United States Patent Application Publication US 2019/0348154 A1 - sequence listing, part 76

SEQ ID NO: 286912 - DNA, 255 bp, Morganella morganii
atggaatgtcgtagtggttgcggggcttgctgtatcgcgccttcaatttcgtcacccattccgggcatgccggacggaaagccggctaataccagatgtgtacagcttacggataatttcatgtgtcaaatcttcacatcaccactgcgtccgaaagtctgcgccagcttgccagctagtcgtgagatgtgttttacacatcgtgatccggcgctgatttatctgattaagcttgaagcggatactgcgccttag

SEQ ID NO: 286913 - DNA, 810 bp, Morganella morganii
gtgattgcgcagccaaccccagcagtgaaagagctgcaacgcaaactcattgattttcttcgcactaaactcacgatccattcctgtgcaaccgcttatgaaccggggaaaggcatcagggaaaacgcactgcagcatgtaaacaatccttatctattgaagatggatttttctaatttttttaacaacatcacgccagagatatttaaaaatgcactgttgcatgattccgtggaaattgatgacaacactttaatgttgttgatcaatatctttttttggtgtccgagtaaaaaactctcggggaaactggtattaagtgtcggtgcaccttcatcaccgtttatttctaactatgtgatgaaaaaatttgaccaattgctgtcggaaatatgcgatcaggcaggtataatctacacccgttatgcggatgatatgaccttttcaactcaacgtgagaatgtgctgtttacgctcaaagagcaaattaccacgctgattgtgcagtccggttatgaaaatatcaccatcaatgaaagcaaaactatattttcatcgaaagcacataatcgtcatgtcactggcgtaaccctgacgaatgacaaccaactatcggttggccgaaataataaacgttatacctcatcattgatcttcagatttaaactgggagaactcagtactgatgaaactctaatgttaaaaggcttacttgcacattatttccatattgagccgaaatttaagctttcaatgcaaaaaaaatacggcgtagaaatcattggcgacatcgtaagttatcaggaatga

SEQ ID NO: 286914 - DNA, 1626 bp, Morganella morganii
atgaatcgaacagttaaaaaaataaaaatgggcgctgatcatgataatttaatcaaagaccagtataaaatgtttaaatattataaagaaggaatgtttgttgaaattaacccagctaaatctgcacattatcgtcagatgtgtcttaataacctgaaagaatcacagtttagtttaaaaaaagtaaaactggtaaactataaaggttttagtgaactatcgattaacttagataatgatattatcctgatcgccgcaaataatggctatggtaaaacgggaattctggaagcgatctatctttctctttcatggttttatcggttggtttatggttctaaccaaggatggaagttcggtgataaatacatcaaccgcctagtcagtaatgctgggatgctagttaatctggatgtttcggtgggaaatgacataaaatcctccaactatcagatcgacattgcccgctcccttggtgctttttcggttaaaagtgactacactgattttaaagaactagctgaaatgtatatggaatttcaggactgtggtattgtggcgccaatgtttgcttactactcggtagagcgaggtaagaattacccagacggtggattcacgtctatgattgaaagcggttccagcaagcttctggataaactttatccagactcttcgctaacgctatcatctaatatctttgccagttttattaaatgggctgctgaaataaaaataaaaaaaagcgtttctagcgaaaatgaacaaagagaaaaaatcaaaagtctcaatgaatttatccaccatattagtcaatctgatcttgctgatgaaataaaaaacacactaattagccagaaaaagaaagaagtcgaaatcatctttcgcaaccagtcggtggataagtctaccaatcttgaccggatggaaaagattgtggatatgattttcgcactgggatgcgattttatcgatgatatttcttctatacagttaaaatacgatgaaaagctggaggcattagatcttgtatgtataaaacgagattgtgaaatcagtgcatcctatctctctcatggtgagaagagcactctttcattactattcgatatcgctctaaagctaatctacacctgtggaaccgaagatccattcaacggtcacggaatcatctttattgatgagattgaattacacctgcatccttcatggcagcagtccctgctcagtaaactgaaaaaaaccttcccgaatgtcaaaattattgccaccactcatagccctaatatcctgaataccgttgaagaacaggcgatcaggaaaattaaagttaaggataatcgattctatattgaaatcccgaccttttcatatggtgccaaatcttctcaggtgcagagtgatatccaagatgttgaagcacgacccgatgtcgagccagtacaaaatcttgcacgtttccgtgagatgatgaaaaacaatcagtacgacacaccagaagcacaggctcttctggagaaaattctgcaatggggcgatgatcatgacccagatgtcaccaaactgaaaattgatctggaactcagaataaagcgtaatgccaaaaaggttagcaaggagcagtaa

SEQ ID NO: 286915 - DNA, 732 bp, Morganella morganii
atgagaggctttaggaaagcgcggttgagcaatgtcattctggacgattatattgcagtgccaggaaatgcgaataatggctggaaggatgaattctatgccaccttggcctctcccgaccgaaacagtctgaaaaatgagataattaccgatcaagctggtctctgtgcctattgtgaaaaagcactcagagatgagggtgacaacaaaccactaggatttaaagttgaacattttattcctgaaaacagcaaaactattaaagagatgattgcagctggacagcccgcccctaccactaactactcgctgttgtggaccaatctgttggggtgctgctttggcggggaacacgcgcgctcagcaagctatattgagtctctgacagataaaactaatctgagttgtgatgtgcccaaatccaatcataactggtcaaaatcgatcctcgatccttctcaagagcctcctgacgatgaaacatggtttgaattcgatgaagacggagtgatggatgtctccgcagattgtccggcccagtatgtggataaagcccggcgatcaatagaaatgttgaatttaaactgtgctagattaatccgtctacggctggcagcgctggagtcacttagtgctattcgtgatgaagctgatatcgctgcattactcagcaaggatgctgcaggtatctacggtgaatttatctcgctgagaaaatggtatctggcttaa

SEQ ID NO: 286916 - DNA, 798 bp, Morganella morganii
atgagttttgcgtcactcaatgctgccagtatttttaatgcgatagggggcggctctccgctctctatcatgaccagcatcctgaagccgtcatacgttattaaatccgaggacggaagcgttacgttgccattcgatggcctgaaaaacatcaccgccagcgggtccgccaatgtggttaccgcaccggtcgaaaaaggaaagtatcagacactgaataaggttaaagagccgaatcagataaaatgtgaaatcctcctcgacggcctgaccggattctccggcaacatccccaatattttcaatatgactctgacatctcagaatgcgtcactgaaaattattcaggagatgattggtaaagcggcaatctacaacattgaaacgcctaaagggaattatgacagttacgatttggttaactggtcatatcaggtgtcaagtcagaccggcgtaaccctgcttactgtttcattgtatttcactgagatcatgcagcagatggaagtcactttggggtcaccgcagtcacaatcaaaacctattttaaatgaaaataccgttggtaaggatggtgttgtgactgatgcagaaaagcaggcagggacagggcaaccaacagtggatgacctaaatatggaaagttcagccctaaacaaagcaaatagcataaaaaataaaaccattaacgagattgcagataagttagatgaattttctaaattccccgaacaggcaacgggagcaatggagaaggttaagcaattcaccaatgatattttggataacatcttatga

SEQ ID NO: 286917 - DNA, 486 bp, Morganella morganii
atgaaagacaaaacagaatttgcacgaatagtcccgttatctattcaggaaaaagccgctgatttggtcataaacagcgttcgtgatgacgtagaggcaatcttcgctcatggggagccgggctctgcgaataaggcatatcggttagctgctttcagggggaaggtaatgaacatggcaatgaccgccctgtttgctgatgcgcagagcgaaaccaccacagaacaatcatcgcttgattccaatgcgccgaaatgtcgcgccggtagtgatatcggtgactttggcgatctgtctctccgtcgttgtggatgccctaaattctctgtgcctaattataccaacaggaccataccgcagttacggcagcttcagaaagaactgacggaagtgtacatgatcaatggtgacacagtgtggttttccgagcaatcaagactgattgatgccgctgcacaggtggcgtattcgaaagggtggtattaa

SEQ ID NO: 286918 - DNA, 204 bp, Morganella morganii
atgacagagaaaacacaggagttgaagccgtgcccgttttgcgggtgtaatcgtatttttgtggcgactcatgaattcgatgaaaggccagattactacaaggttgagtgcaatgaatgtgagtctgaaaccggatttaaactcagcgcgccggaagcaatcgccgcctggaaccgcagagcaccacaatgtgagaaggagtag

SEQ ID NO: 286919 - DNA, 204 bp, Morganella morganii
atggaaccaacggattttgaaaagtggtgtgcgggtgagatggggcacacagtcgaattcatcatgtctcagcgacaaagggagccgtattcaggctacctgcacaatgatattaacatcagatatcgtgcatggaatgccggagtacgcagcaggctgccgtaccagacaccgccaaaaggagatgaagatggaatggattaa

SEQ ID NO: 286920 - DNA, 252 bp, Morganella morganii
atgagcggatacgctttgcttcaggaatgttatttcactgatgaagacaaacacgcctggatggatgccatgagctatttactggaaaactacagtgagtttccggcagatatggatatgaatattcagcataagcctgagttcaggaatttcagatttatgagagctcctggcggcggggttatgtttgcaaactgcatcgtgcccggtatcacagctgatgattttaatcagttcaagacgattaactga

SEQ ID NO: 286921 - DNA, 837 bp, Morganella morganii
atggatcaaaacaatcagaaccaagataatcctgagcagttaggtatacaggaaccgctatttagccttgatgttgtggagcttaggcctgttatcggtgggaccgcgcatttaaggtatacagctattgcatctgatggttatgaatacgcagttaaaagtaccagggatgggagcgactcagaggttaaagtcccgtacccctctctagttcctgcatccgagtggttttgcacaaagctggcagaagttagcggtatacctacaccaacttgccgggtattaaaaaatactgattctggggagtttttatttggctcgcagtatgacctctctgctttgtccacccctatacagcaagcagaagtaacagatagcctgagatcaggggaaagcccacttctgagatggcaattttgggcaatctatgcatttgaccaatttatctttaataaagataggcacctaaataattacctcttctcaaaaaatagagatgggtcatacatatgtaaagcgtttgatttcagcatatcatcaatggttgttgggtggcctacaagaataaatggctcactattgccagattcatgcaatacagccataaattggaatataataaagtacttgacttcatttgacccaatgtgtaaagagtatgccctcagggttttagagcatgttggtcaaattgacgttaattttatagataacatctttgaacagatgccgagcacttgggattttccattgcaaagacaagcgctaacgacttggtggggaagcaaagaaaaagatatcaggctaaatctagttaggaacgaggtgttaaaatga

SEQ ID NO: 286922 - DNA, 816 bp, Morganella morganii
atgagtaaatacttttacagcattattaggctagttccgaatccggtgaggtcggaatctgtcaatgttggtattgcaattcaaacaccagaaggccctgatgtcagaatgataaactcaatggctaaaataaatgccattacaaataattataaagctgataatttaaccaagttaaaaaatcaaatcgaggatctcctgcttaatggcattgatttgaaacaattatctgttttttatcagggggctataagtctttccaatattggttcattcacattaagtacgcatgatgactacgaatcaaaaatacttgaaataaataagttatttattacccctgaaaaggcaacaagggttatttccgtaagtcagaggcgcataatcacgcaattgaaaagccagtttaataaatacggaatactaggaaaggatctgtcggatatatctgatcacaaagtagtaactaagtatccattatccgaagatgaggggctgtatgccgagttactattgaaaaatggcgcgtatcacttaacagaaacgttagactttaggtcggataatctaaagcagaagctaggagatgcggcaatcaaggctgtaaccatggataaagctaaggttatctgggataaaaaagttaatactttcctagtttatgcagcagaacctaagcatgaaaaaattcattcaactcagttatctttgatagataactatgctgacaaaatgtttaatatattgagcagtaatgatatgtctgagtactttgaacatatgctgacagcagcaaatcactctatgccacactaa

SEQ ID NO: 286923 - DNA, 237 bp, Morganella morganii
atgaacgcatacgcagcacaggatgctcaggaagagcggcggctggagcatgcagcatggcaggatgccgtgtcatgtgactttgaggaattcacacaggacgtgatattcgaaatcagcacggacacgctggaatacctcggcactgaaagggaaaacgaaatcagggaggcaatcgacaaagttctaagaaaacggagtaagcagcatggaaacgggaattcattatgggcttag

SEQ ID NO: 286924 - DNA, 228 bp, Morganella morganii
atgatgtttattccgctggtcgcgtttgatgaaaaaggagagcgtctcgggatgggcggcggtttttatgaccgcacactggcgggctggcaaaagaaaggattttacccagtggggctggcacatgattgtcagcaggttgatgaacttcctgccgcacagtgggatgtcccgctgccggaagtgatcacgccatcacgtcgctggctgtggccggaacataaataa

SEQ ID NO: 286925 - DNA, 1998 bp, Morganella morganii
atgaccaattatatctgtgcatttaatcccatagatgcggcacttaaagacggtgctgtgactgttgcaatcacgatttctgccaattcagagaagatggccagagcaatggccgccgtgatgctggaggaaacttatcctgaaaatacagggaagtttgatgtggcggcaccaataatctgcgaagctcaggcaggcaaaccagcaccggccggcgatagttttgatgaacattttgccaaagagtacgagttcaacggtaccgactggcagaaacgtgaagaagaaatggtagtgtttgcaaaaacggcaccagtcgttcgtattgcggcgatcatgctgtatgaaaaaacacaatttacccgcaatgagtaccgcaaagcggtcgattttgttcacgaaagtgatgaatacccgcagatccggaatattgcaaaaggtatcgcggccacacgcacggtttccctgctgaatgaacaggatttagaagcgctggtaaatactgttctggaaaaagctcaggatggtattaccgaagcagaagcacagaagctggcagaagaatacctgttccctgcagaaccggccaccgggcaactccctgtcccggagcaaaagcaacgtaattttgaacataattacgcgacactggatcaggaaatagccctcgcccttcttcccggtgattttgacccatgggaaattcagccgagcaaacttaccgcggcgaaaaagctgatcagtgatgaagatgaaagctggcggcgctggtctactgagttccgtattatcccgaccgcattgcagatcccgcgtgaaacagtctttgctgtcgtacgtgaagggaaagaattacctgacctgataagcgatgcggcagcccgtaaacagtttgtggctgaccgtatcggcataacgccggcagaaagcagtcatgaccaggaaacgggccgggccggtgctgatattacggaagataacccccccgtagctgcagagccggaaaaaccaaaacgcacccgtgctaaaaaagcggataaaccgacagagaaaccagctccggaagtagcagccaacgatgaaccggctaccatagcgcagataccgaaaccggttcatgccgaggaacccgctactgatgacttccgcagccgcgccgaggtgattgccgaggttctggcagacacagataacctgagtatctggaagcaggtacagcgcacagatccacgctttaccaagcctttagagggagcgggatttcagggtaccagcattaacagtaactacatgtttatgcgtgctaccgaaattttcgggccgatcggtgagggttggggctatgaggtggttgaagaaaaattcctggacggcaaaccactgactgaacctgttatggaaaacaacaaacaggttgctctgcgctacctgcgtgacgcagacggttctctgttctgcgagcaaaatcattcaataaaaatccagttttggtaccgcagtaaagatggcaagtgctgttattttgaaagctacggcgcgacaccataccgctatcagacccaatacggcataaaagttgatagtgaagtcatcaaaaaatcactgacagacgcgattaaaaaagcactgtcaatgctcgggttctcttctgatgtgttcatgggtatgcacgataaccctgaatatctcatcaaaaataaactggaatttgaaatcaaagcggccagcgagaacgcagaggacagcgtccggatccgcgaagaactggatgagaaatttacccgtaacacggaaaccatgcgtaccgcagttacgcagaatgaattacgcggtatcgcatccacccttacccgcgaaatatccgcgcatcttaatagcgccaaatcgcgcggtgacaacgaatatgcaggatacctgtccggccgcctgcgccgcctgacagaaattgagaaagagtgtttaaccaaactgactgaaaaacaagaggcagaccaatga

SEQ ID NO: 286926 - DNA, 4596 bp, Morganella morganii
atgactcgtaatgtaaaacaaattctgaatcatctcgcagagaagaagcgggatgcgtatgtggattactttactaattatgtagtaggtaaagatgaaaatacagcaatgctgggaattaccgatgcagatgatctgtatgattattttctgacggatgtgaaaacgagtgctgactttgaaaccagctatgtttcggatgcactggccagtgttcagcaatatattaataacattcttaatcaaaaagagcccggctattcaggcgaatttagtgaagagcttcagcagtggtggtccggttatctcgggcatatttcactgtggaaagcctatcagaaaatggaggattatccggaggattatagtttaccggattatgttactgataaaacagagctgtacactaactttgcatcagaccttggcagtgacagtctgaatgatgcgggtatacaaacggctttccttaaatatttacgcggctatgaagcggttaatgctatcagtgtcatctccggatatgttgactatcccggacaacgaagtgaaaaagatacatttgatgggcatggttttctgaattctgactatttttttatcggtaaaaataactcatcaccagccggtttttactggcgtgaagcaaatataagagcagataaatcctccggatacatttctccgcgtgtgtggcgggaatggcagccattagtcatcactgaagatgcaaaagatattttacaaatgcggattgtcaaagtgagtggttgcctttttattgtgtatctggctggtaaggaagaaaaaattgcgggtgatgaaaaatcagagaaagaagtcagggttgaaaataagaaacaatataaggtctcacttaagttaagccgtatggggttggacgggaaatgggatattcctgaactattatatgaaaaaatctatgatagtaaacccgtgaagaaagatggcgataaaagggatccgttccggttaatatccgttgcattcactcaggatgaacagcgggatgattatctggttattgcatggctggataatcatgataagaataatgatcagaaaaatattattttttccgatattttgaatgtactcagacaaaaatcagttgtcgtgagtacggatattcttggcgcagaatggcagtcaaaattagcattccgattttttaaagaaataaaagaagaaaaaaaagaagaagaagaaaaagaaaatatctgccagcaccgtatttttggtgttgaaaatgatatcagcagtatccggggagtcggtagtaatccaaatttatcgctggaggcattctatagtctcaagaataactgtcatcaattacgggtcagggggacttgccatcgttcagctaaaatacccgatcttatttcacttcaccttcaggcaacggtcagtgaatggagtaatggccgcattattgtcagcggagatcgtaataatattacagtcagagcagaggcaaccggaggtgcagaatatttagcattattactctttgataaaaaagtgattgagtttaacaagaaggactttgatgaacacaatggctggctttcagcagaaaaaacattcccgctttctcaggaacaatgtgacctgatagcggtaaaaaattataaagaaatacgcagtggcgccggtttttcctatcagataacctccggaggaacggtaaattcactggctcacgttaaaaaccgtgtcagcactgtgatgcagcctgttgttgttcctgctgagttatcaattttgaatgacaaccttggcggtttggataaagaagactgggaaggtgaactaatttatcagaaaaacagtcacacaccgtggtgtactttcagctgggaaaaaagcacagaagaaatcgatgatatccgctttaaattcggactgacagatgaaggtgatcaaggtgaatttatcattgaaatcagtaaattaaaagtaaaaatacctggtattaccacgtctgaagagcatcagcagtttttgattttcaatcaggctgatgcagaactgaaaaaagtacgtcttaattctgttcaggttcgtgatcttatctatcgtgcgcaaatcgcagtcagtcatatttttgactgggaggcacaaattacggaagagccgggagacactgataataaaaaagagaagctcgatttacacggggctaacagccggtatctgtgggaattatttttttatttaccttatctggtggcaagtcgtttttcacaaaaccgcctttattatcaggctcgtcagtggctgcattatattttttcaccttatgacggacaccgtttatctgcaaaagatgacagtgaatcgttgcctccgccttattggaactgccgtgtattaacacaggaagattcagaatataaaagtaatgactatgcattacctgacccttatgcgatatctgaagatgtgccttctcattatcgtaagtcggtctatttaatgtatatcgataccctgatttccgaagcggatttaaattaccgtcagctcagccgtgacagtattacccgtgcctggggattttatcatcaggctcagggaatgctgggttatataccaaaggagcacagcttaccgaaatggcagccatgtactgttaatgaactgcttgataataaaacctattctgtacaggaaagtaccaggcctgaattattttcaggaatatatccggaaaatatgcccaaaaagctcagaggatttttctggtacggcagtctgggcaatgaacgattccgtttgcccgttcagacaagtttactgagcaggcagtcagttctggagcaacgcttatttaatttacgtcattatctggatattgaagggaatatgatgaacctcccgttatatgcagctgcgtttgatccgttcgatctgctgcgttcccggctgggaggaacctctgaactggcatatttacagtccgggtcattaagtattccgtcatattgtttccggaccatgctggaaaaagcaaaagaacaggcggcggcactgattactttaggggataaacggctcagttattatgagcaaaaagaacgctatcacactgaaaatatgcaattaaaggatgcggttgcgcttgcggatgccagtgctgcgattcagtcatcgctgcgtgaccagcaaaaatctgctctggactctctgaatgaagccaggacgatggctgagagcaaaaagacatattacggaagcctgagtacgagtacaaaagaatgtcaggccagaaatttattagtgagttcatccgtgtttcatggggttatttcaggtgctgctgttgcggcaggtattgcggctgcgattccgcgtgtatttggtctggcgcaggataccggcgaccatggtaaaacagcactgctctctggtgtggggggggctgctgcattaggtgcggaacttatgcgcggtactgcggagtatgttcagatagatgaacaataccgtcgccgccaggaagagtgggcatttttggcgtctcaggcagaaagtgaaataaaggtactggataaacaaattgatgctcagaacgtggctattaccgcagcagaaaacagtgttaaatatacaaagcttcttcagacgcaggctaataatttgtatgactatttcagtcagacccgtcaggttaatgaaagtttgtacgaaaaaatggccaatattattggcttattgcatgaccagttgtgttcactggtcagaacattttgtgcattaacagaagcatcctggcgttatgaaacggatgattataaacggaagacatttattccggccgatctgtggagtggcgataatttaggtattctggtcggcgttaaattacagaaagcgttgctggaaatggaaatggcgtatacacagcaaaatacacgccgcctgaatatcacaaaaacgatttcactgaaatcacttgtcagtaatcatctggttaaaacagatgaaacagcgctgacaacatgggatgaagtaaaagaagcattaaaaggagcaaaaaaactgtccttcgggttatcccatcaattttttgatacagattttcccggacattatgcccgaaaaattcactctttatccgtgacatttccaacattattaccgccatatcagaatatgcgggttcttctggagcagacatcgaatacgttattagtttcaccggatattgatgcggttaaatccctctatacaccagcagaggaaataaatagtgagtcaattatccgtaatctgcggattaatcagaaaattatactttcccgtggcagtgatgatagcggagagtttcaggaagatgcctctacaggcgggcaataccatagttttgagcattcaggcgctatttcgcactggcggatgtccgttccccgcccgcagaataacccggaacttattgataatcttaatgacattatcattaaacttaattatacggcgaaaagcggtaatgacgcctttgaaacagcagtaaatgatctgctggaaagtactgaatcagtaaaatcaggatgtgacgagaatgattga

SEQ ID NO: 286927 - DNA, 231 bp, Morganella morganii
atggaaaataatgcaaaaaatataaaagcgttgagattaaaaacaggtttaacacaaaaggaaatggcagaaaggtacggggtagggatcagaacttggcaaaaaaaagaggaggacgggacgcaaagcagtcagaagttatcaaattttgattttgaatacttgctgttattggctggtgagcatcctgattttgtgctggaaaaaagaaataaggaaattgcaagctaa

SEQ ID NO: 286928 - DNA, 267 bp, Morganella morganii
atgaaaaccataagaaaaaacaaaggtgatgtaacttattatttaagcagagagaataacgatagttatcgtcttattaaaaaaatcaaggcgagagcgactcatttagttaaagacgggcataaaaccaccaaagtaacattaagtgatttgttattaacgcatgaccaactttacaacttagattattcattaaacgggctgagggcagatgataaagccacaattgaattgcttataggggagttttttaaaaatggaaaataa

SEQ ID NO: 286929 - DNA, 552 bp, Morganella morganii
atgaacgaaaaaccgactttttttgatcaatacagacccgtttttgaggtggtgtgccgtatgttaggcggaaactggcgcgttaatctgctggacgattgtcaatatcgtatcaagctgacatcccccgattttagagggtttatcattatcgtcaggcaggagcaagggcggttagtgttaacgggatttgttgattcccgattgtatcgcgggacgtattttaaatgtactgtagcatcggacagaaaacccgatgcaattgcacagaccatcacgcggaaaattttatgctgtgtacgggaagaactgataaaagcgcgagagattgaaaaatcacatcaggacgcgcgggagcaggataaaatcattaaaggtatgctgtcccgtctggtgaagctggaaagccattacaacgcttttacgggctttcgggctgataatgatttacggggggatataactaaacggtttgacgggtacgggctgacagtgcaagggttgaccgttgagcaattagtcaaattaacaggtattattaatactatctaa

SEQ ID NO: 286930 - DNA, 207 bp, Morganella morganii
atgaacatgaaaattactgatattttaaaatttggtgattgttaccgttattttttaatcaaaaacagcactgaaatttgctggattgagtttaacggcaaaaaagaaattaaatgctctaactttgaaaaaggcagcaaagaagaattagaactcgcagagtttttatataacgtccgtcgaaaccacctgttaagtgatatctaa

SEQ ID NO: 286931 - DNA, 525 bp, Morganella morganii
atgaatattcagcaagccttaaacgttttcggtttatctggcgaactcaccgagcaagacatcaaaacagcttacaaaaaagcgtccttaaaattccatcctgaccgtaatcagggcaaccccgtagccgctgaaatgatgaaagctgtcaattgtgcctatgattttcttatgcaaaatatggacaaaattaatgcgttccagagtgaagaagcaacagcgcattacaactacggggaagaactcgaaaacgccttaaatgcattacatgcgctttctggtgtgatttttgaagttaccggcaactggatttggatcagcggtgacaccaaaccacacaaagaagctctgaaagcaatgggctgtaaatgggcgaaccaaaagaaaatgtggtttttccgtcccgaagaatacaaggcgcacggcaaccgcaaatcgcacagcatggacgaaatccgcgccatgtatggcacgacaggcgcatacaaagcaaaaggaagcagacagatcgaaagccgcgcttaa

SEQ ID NO: 286932 - DNA, 855 bp, Morganella morganii
atgaataaaaaatcactatctcggttaactaaagtcagacatagaaatgatttgaatttaactctttctgcattgccaatagttgcaaaaaaagttttatttttagccatgagtcaaataaattcaaaaaacgaatttgatgatgatcacatattttatgtaagtgctagtgattatgttcaatgggctaatgttaaagcaaatgcagcatacgcagctttaaaagagggggctgctattttggatagtgtattattaaagctaaataatgaggatattttaaatcttaaaaatgagttaaagctaccttttacaaaaaaaaatattccagattcaatgaacctgagtttgacagagttttctgtttattataacgatgaggggcgaattggaattaaatttacaaattcagcaaaaagatttttatgtaatttggtaggtgtagaaaaaaaatatactacacaagttttattgtctgttgtaagtttatctagcgttaatgctgcatctttatatcagttaattagaaaacattatagtgctaattctaggttaggtttttttgatatttcaattgatgagttaaaagatgaattaaatctttattcaattgatgaagatggtaataaagaatataaataccctgattttcctattttcaaaagagatgttttaaataaatcagttaaggaaataattaaattaacagaagttaaaaacttaaagtttgaggtttcgggaaaactcggaagaaaagttgaccgtttgaaatttagttattctttagattcagttaatttaactgatgatgaacgtgagtttttagatatgtttgataaaaacttttcatcttag

SEQ ID NO: 286933 - DNA, 390 bp, Morganella morganii
atggcaaagatttatcattttccacaaggaaaagaaaaaaataaaattaaaaagcaaattaaaaaaattaaaggtgcttctgttgtaaagaggcgaaaagaaacagcactaagtgcgctgaaaaaaatttttttctttattcgtgtatttattggtgtgtcttgtgatgtgattttttctatgattgttggtttatgtagaggtgttatttatctgaccgttattttgggtggatttttcctgattatcaaatacaacactaacggtggtgtgtgggacgggagtatgtggtttgttatccttatgctcgtattagggtctttgggggatgtgagtgagtggtgtttattccagagattgatgggaacatattcatttaaaaatagataa

SEQ ID NO: 286934 - DNA, 267 bp, Morganella morganii
atgactggtcataatcatattgatccgcactatttagatcaaatttttcctgaaaacaatctcaccactgcccaaaagcatgatgcactactttatgctatgggatcttctatcgcagagcttgcgagactcaacaatcgtcaccctgatacggtgagaaaaagactgaatgatacaactgttttaatttcaggatgctcagaaattaaaattttgaggtcggtcacattaataagaatctttaacttattactgaacaaaatttga

SEQ ID NO: 286935 - DNA, 192 bp, Morganella morganii
atggcaaaacctatcgtagaaaaaaattatgtcagtgtcaggttggacttacctagcaacctaaatgattgggtaaatgctgaaagccaaaaaatcagccgttcaaagcggaatttcctgatgctactaattgagagggagtataagaaatctctgtctggaaatacgcataaaggtgaaggacagaaatga

SEQ ID NO: 286936 - DNA, 636 bp, Morganella morganii
atgattaaagaaacgttactctcattagctttgcaatgtgccccgtcagtgcatactgatacggtgatagatattgcaaaaacggaaagcggattcaatccgtttgccattgcggagatcgtaacgaaagataaaatcattagtcatttgccgaaatcaaaaaatgaagctctggaaattatcgaaaggctggaaacaaacaacggacgattttcagttggtctgatgcaaatctactccggaaattttaaagggtataacgttaccgcagaggaaatgttgaatccgtgcagtaatcttaaaatagcggaaaaaattctagtcgattgttttcaacgtggaggaaatttaaagaacgcattaagttgttattactccggtaattttgaaacagggcacaaaaaagaaacagcatttaataataccagttatatagagaggataggagggcagcctattgaaagaacaaaaacaacggtagttgttccaagcacaaaaacaattaaacaagcgaatacaacacagggaaatggaaataaaacaagtttaaggcacacctcatcaataatatatcctgaatatattattcgaggtcaggtaacaatgcatttgcaaaaggtgaatgatgaacagtaa

SEQ ID NO: 286937 - DNA, 279 bp, Morganella morganii
atgaacagtaaaaaaatatttgcacttttcatgatggtttttatggggctgtttatggttgaacccgctcttgcagcaggggttgatactgcatcaacagggattctccaaaaatggattgattggttagtcgggattcggggagccgctattacactggcagtaattgcaggggcattgattatactgtttgcccgtaaatatatcggttttctgtgggggattggttttgctattttcctctttgtgattgccccttacgtgaaagactggctgtaa

SEQ ID NO: 286938 - DNA, 2775 bp, Morganella morganii
atgagtgttgtttttaaaggattaacccgccccgctttaattcggggcttaggtgtaccgctgtacccgtttttattcatgattatggtggtcgtcgttatcgcagcaaacacaagcgattatatgtattttttaattccggtcggttggttcttgattaaaaaaatgacggaaattgatgatcgggtgtttgatttgttgtatttgcgttatcgagtgagtggtcatccggtcagtaatcagaaatatgatgccgtacactattcaggaaacacatacgataaggtcgatatatcaaaactggaaaaaatgatgaaactaaatcaccaaaccccgattgaagatatgatcccattttctacacatataacagataagttggtatgcactcgtaagcaggatttaattgctacttgggaaattgacggggcttattttgaatgtcaggctgaggatgagctagatcgtttaacagatcgtttgaatacgctcattcgtagttttgaggataaagctgtaactttttatactcaccggataagaacgaaaagtaaaatagaaaagaacttccgttctcttgtcccttttgctaacagagtaatgaatgattactatgactctttaagtcaggaatgtttttataaaaatcgtctttttatctctttatgttataagccgttaacggcagatgagaagttaacgtttcttttttccaaaaataaaaaagagaaagaaaaacaaaacaaaaaaatattaacagaatcgatagctgtcatgaatgatatgacaggaagattagataactatcttgagcagtttaatgcaactcgtttaggtgtgtatgaagaaaaaaacagagtgttttcttctcagctatctttattccagtatcttttaacagggaaatggcaaaaaatagccatcactaatagcccattttataattcattgggtgggaaagatgttttcttcggtagtgattcaggtcagttatccgccggaagtgatgcgcgttatttccgtattattgagataaaggattattttcaacataccgaatccggtatttttgatgcgctgatgtatgttcctgtggaatatattatgaccagtagctttaccattttaaggaaaaaagaatcaacaaaaagattagatgatcagttagataaattggttattgctaatgatgcagcagtcacacaacaaaatcagcttattgtgggaactgatatgttagccagtggattgattgcatttggtaatgccagtttttcattgttagtttatgcggattcaccggaagaattaataaaaaatagcaatatggttgcaaatatcttacaggatttaggattggttgtgacatattcaggtttatctttaggagcggcttattttgctcagttacctgctaattatacactgcgtcctcgcctgtcgatgataagcagcctgaattttgtggaaatggaatcatttcataatttcttttcaggaaaagaaaaaaataactcatggggcgatgcgttaatcactcttaaaggatcaggtaatgatgtgtaccacatgaattaccacatgacccgtgagggtgttaatgattttggtaagaacccgccgctggctcatactgagatattaggcgcatcagggggagggaaaacggtcttgatgatggctcatgcgttagctgcacaacaatatggaatggctgattcatttcctgataaccggaaaataaaaaaactaaccactgttttttttgataaagaccgtgcgggagaagtagccataagagctatgggcggtgaatattttaaaattaaaagtggtgaacctacaggctggaatccatttcagttagccccgacaaaacgcaacattgcctttttaaaagaactggtaagaattttgtgtactgtaaatggcggagaactggacgatcatcaattacagttaatttcagatgctgtagaacgcttaatgcaacgggataaccgtacatatggtatcagtaaactaattcctttaattatggaggacagagacggaacaacgttaaaaacgggattaaaagtccggctgaatgcatgggcgaaagatggggagtttggttgggtattcgataatgaaaatgaaacttttgatataaatgagaaatctgtatttggggtagacggcacggaatttttagacgacaaagtcacctcacaggtgatcccattctaccttatttataaggttgcatcattagccgatggtcgtcgcctgttaatatatatggatgagtttcatcagtggcttgttaatgaaagtatgcaaaaaagtatttataacatactgaaaacaggtaggaaactggatatggtgcttgtttttgctactcaatcacctgatgaacttattaaaacgccaatagctgccgctgtcagggaacaatgtgccacacatatttatttgtctaaccctaaagctacccgtgaggattacgttaacggcttacaggtcagtgaattgtattttgacattattaaaaatattgacccgctttcccgtatgcacttagtggtcaaaaacccacaacgcaaaggcgataaaactgagtttgctgcatttgcaaaactcgatttaggtcaggcagcaaaatatttaccaatattaagtgcatccagtgatcagatggtgatttttgatgaaatttatcaagagggcatgaaaccggaagaatggattgatgtgtacttaaatcaggtcaataaaatatcacattaa

SEQ ID NO: 286939 - DNA, 765 bp, Morganella morganii
atgaaaaaaacagtatttccgttatttgttgctctgtcattgtttggggtagctcatttagggttcgcagcggggattccggttgttgatgctacagcaattgctgatcgtctgaaacaggatgttaaaacggctgcacaatggactaaagaggctgctcagtggactaaagagttaaaagcctatcaggatgaactgctatcaaaaacgggtatccgtgatgttcagggcttgattcaggatgcaaaggagatagctggagatttaactgatatctacaatgagggaactgcgttctacgataattatattgaaaatccaacagggattctgtcagaaaaagcacaggcattacttgataaatacaaggtcggagaaatgtgtgtgaaacaagggttttccggcgatctgattaaaggatgtgaggcgcgggttttatcagatttagccagtgtagcttatggcgaaaacttgcaggaaaatataaataaagacaataagaaaatgaaagggctgattgatcaggtgaaatcagctacagatccaaaatcaacggctgatgcagctaatgcgattgctcttgaacaactgaaatttgaaaaaatgaaattccagtatgaaatgtatcgcgataaacaggctcaactttcaaaatataaagaggaaatggtacaggcagaatttaaacgccaacaattacaggcgaccattcctgattatcgtaaagcctataaatctatgcagtttaacgactttaacaattaa

SEQ ID NO: 286940 - DNA, 231 bp, Morganella morganii
atgaaaaacgctttatttgttgttgtgatggttatcgggatggttactttagcgggctgtaaagaggaaactaagtctaaagaatggttcaaagcacaccctaaagaaactgttgagatttataacaagtgtcaacagtctggagaggaatctgataattgcaaaaatgcaaagtggagttatcagttaatagaagccaaaagaatggctggtttacctacaggattataa

SEQ ID NO: 286941 - DNA, 135 bp, Morganella morganii
atgaaaaagtttctgtttctgattattgtcagtattggattagttggttgtgccagtcaaaaaacagttccccccgtgtcggggggattagagcctgttaatactccggaagtaatgaataccgcagggaaatga

SEQ ID NO: 286942 - DNA, 708 bp, Morganella morganii
atgaaaaaaattcaattttttaaaaacaaagaaactgccatagaaaatgcggcgttatttgaagatgtgatttataaaaaagaacaacgtctgaaatgggtttacttaggaacgggtattttaggggctttaattggtgtgctgagtctgattgctcttattattgttttaccgctgaaagaaacggaaacatatatttattccgttgataatcagactggcagagcagaagaaatgacaaaagtcacgaacagtacattaaatgaaaatgaagcggtaagtcgtttctttgttgatacctatctcaaagctagagagggatataattattttcgtttgcaacaggattatgatctggtcatgtcatacagcagtgacagtgtgggaaatgaatacactgctatatttaaatctccacaagcaccgcagacgatttacaggaaaggtgaacaaacggttaaggttgatgttttatcaaaaattatttcggattcatcaaaagctgacgaccctgataagcttgccagtgttcgttacaaacggacaattaccgaagttttaacgggttctaaacgtgaagaattttgggttgcaagaatcacatttcgctttattcctgaaaacaacctgacacgggaagaaagagacagcaatccattggggtttgttgttaccagttatttaacagaaaaggaaaacaggggttaa

SEQ ID NO: 286943 - DNA, 924 bp, Morganella morganii
atgaataaaaatataatcgctttattcctgtctgttttcgttatcgccatgaatgcaaatgcagccagtaaaccaacaggcagtcggttcgacccccgtaatcagataattagctataatccatctgatacaaccgtaatcaatagtgctgctggttatgtttctgtcttggttttcgacgatgacgaaaaagtgatggaaaccgatgttggatttgagcagggctggaacatcaggtcatcagaaaataaagtgtacataaaagtcactcctgtgacacaaaccattgaagcggtaaatgatgatggtgaaacagaacaaaaacaaatggtttttgatccggagtcagatttaaatcaattcaaaacaaatttgtttattgtgacaacaaaaagaaattacagtgttgaattaaatgcaaaaacatttaaagaacctgagaaaatttcgtttgttgtaaattatcgttatccgaacgaggtgagaaaggaaaaagaaaaacttgagcaacaacgcattgcggaattaaaaagaaagcaggaaataaatgaaataaataaatcatttgaaaatgccaaagttccgcgaaactggaaatattatcagcgcgtggctaacaacagcgaatacattaaaccggattatgcttatgatgatgggcgatttacttattttggttttaacccgtccaaaaaaatcccaagcgtctttgttcagtatggtgagcaggaaacaataactaatccgactgttgaaaagaaaggtgattataccgttgtgattatacatcagacaaatgatcgttgggttttacgttcaggtgatcaggttgttggtgtggagaataaagggtatggacttgtccggttagctgattctgatacggtttcccctgatgtgaaaaaggaaataaaaaatgactga

SEQ ID NO: 286944 - DNA, 1203 bp, Morganella morganii
atgactgatgaacaaaaaccaaaaaccgctgctgagttagaaaatgaaatgcttgcggtaagagaaaacgtcagcacgaataatcatatagaagatgaagatactgcggaaacgccgaaacctcgtttagggattcactcacttaagaaaacgtttaaaggtaaattacttttaggcgggatttttgtaatcctactggcgggtgcggctgtttacaattttcctgatattcttcgggggatgttttcatcagaaaaaacaacacaggacgacaccattaatacgacgaaaagcaaccgtctgacagatttgaataaagatacggcgtttgatccggcagaagcatctgtttcaccggaagcgaaaaacaataagactgagtcggcttctgccagtacgtcagacggaggcgcaaaggttgttaatgttccgtctgctccggcaacattcagccgttcactggctgtcagaattggttcagggggaacaggaaaccaaaataatcaaaatactaacggagaagatactgcggcagtcagtaccgttccgaccacgacagagacagaaaaacgttcactgagcgcgattaaagtgttgccgtatgaccctaatctgtttattcctgaaaacacttcaattccctgctcgttggacaggcgttttgtgtctgatttaagtggttcgctgacctgcacagtgattgaggatatttacagcgcaaacggcaatgttcggctgatagataaaggtactcgggcgagtctgatttataaagcgggtacgctgaaacacggacaggggcgcgttttcattatggcgacaaaactcagaacccgccaacagccttttattgatattccgttgatagatacggcggcagcgggggcattaggtgaaatgggggcggatggctggattgatacccatttttgggacagattcagcggagcaatgatgcttggaatgatccccgatcttactcagggagtcagtggagcaattaaaaacaataaagacaatcagacggactataccgctaacagccgtcaggcatttgcggatattgccaaagaagcgtttgctaacagtgtcggtattccgcctacgctgtacaaaaatcagggggagattatcacgttgattacaggggaagatctcgatttttcgactatttaccagttaaaaatgagtaaaggcaaatga

SEQ ID NO: 286945 - DNA, 1035 bp, Morganella morganii
atgagtaacaataaccacattgttaatgaaatagcggcacagttctttggtgaggctctgactcagactgacggtttaactgagattgcagttaaccgccctaatcaaatgtacctgaaagtaaagggtaaatggataaaaaaagatacattaatcagctatgatgattgtaaatcatttgcctcagcactggctgatttttgcagtgattcagtcagtgaaacaaaacccattctctccgcaacattaccgacaggagagcgggttcaggttgttcttcctccggcaacggaacaagatactatttctatcactatccgtaagccgtccgatatttttatcagccatgaaatgtttgttgagcaggggttttattcaaaattagacacgcaagcaggaaacatcatcagtcctgccacgaagaagttaactgatttatacaattccggtgatattgaaacctttattcctgaatgcctgaaacagggaaaaaccattgcattttgcggaggaaccggcagcgggaaaactacttttggaaactccttgctggaatatatcccgcatcatctgcgagtcatttctattgaagatactccggaggtaaagctgcggtttcatgacaatcatgtcaggctgttttacccgtctgagggcggaaaaaacagcatcataacgccagccatgctgttacgtgcctgttatcgcatgaatccagaccgtattttaatgaccgaagtcaggggggcggaagcttgggattttttaaaagggaacagttcggggcatgcaggagggattactacattgcatgaagatacaccgatgtatgctgtttccggaatgatagaacgttgtcagcaaaatccggagtgccacaatttaccgtacaacgtcctgctccgaaaggtgctaaataatatcgatgtaatactgagcattaaatatttggacgaatttgataaaaggtatgcgacaggaatttactttaaagatattcataaagagcagtattttaacgaattaagggactga

SEQ ID NO: 286946 - DNA, 1875 bp, Morganella morganii
atgaaactgaccttaccggataaaaaacaatggctatttatcgtcgggctgatggggttaatctcttattatgcggggagtgttgcggtctattttttaaatggatataacattaaattcctttttaataaatatgactcaggtgtattagggactattttaacacaaagtgagttcacatctaaattatggttatccggcgtgacagcgttaggggttgggtttgctgtcagtttaattgcacctgtattaattattgtcctgatgaataaaaacgaaaattcctcgctgtatggggatgcgaagtttgccagtgatgatgatttgaaaaaatcaaaattattgaaatgggaaaaggaaaacgaaaaaggaattttagtcggaaaatataaaggaaaatacctttggtataccgcccctgattttgtttcacttggagcaggaacaagagcggggaaaggggctgctattggtattccaaatctgcttgtatggttgcattctttgattattttagaccctaaacaggaatgttggaaaattaccagtaaagtgagagaaatattactagggcatagtgtctatttaattgatccattcaacagtaaaacgcacggcattaacttttttgactacattgaattagccaaagaaagcggtgcaaaagatttactgaaactggttgagattttatttccgtcctatggttcaacgggggcagaggcgcatttcaataatctggcaggtcaatattttactggtttgacaaaattattgtatgtttttatttatctggataaaaaatatcccgaaaaaaattatttaaatcagtttaaggttaaaagtcctgttttttctatcggctcagttgtagatctgtatggcagtattgatagacaatttgtaattgatgaaagcgaagaattattgagtttaccgttagatagcctgatgctttaccatttaaaggacgggttaactaaattaaaagagtatcatttaactgaggatgaacaacgttcgagtatcgatggttcattccgtaaaaaaatgagcctgttttatctgcctactgttcgagcctgtactgaccgcagcgactttgatttacggcaattacgccgtgaaaaaataactatttatgtcggtattaatgcagaagatctagggatagcttatgattttctgaatttattttttaatttcgtcgttgaggtgacgttgcgggaaaatcccgattttgatccgacactaaaacatccttgtttattgatgttagacgaatttccgtctatcggatatatgcctattatcaaaaaaggttcgggttatatcgcaggatttaaccttaaattattaactatctatcaaaacataagccagttaaacgaaatttacggcatcgagggggcgaaaacattgttaagtgctcatccttgcagagttatttatgctgtcagtgaacaggatgatgctaatcagatatcggataaattaggttatataacaacaaaatctaaaagcgaaagtcaaagtaaagggcgcagagattcaaagagcgaatctcatagtgaaacaaaaagggcgttggtgttaccacaggaattaagcactcttgatttcaaggaggaattcatcattctgaaaggggaaaatccggttaaggcagaaaaggcactttatttttctgatccgtattttatggacagattgcttgaagtcagtcctaaactgaaagaggcagtaaagaaacttaataaaaaagacaaggttattggggttaaaggtttgcgttaccccgataaagaaatgatgttatcactgggtgaacttgaatcagaggtattaaataatgaaaaaaatattattgcttag

SEQ ID NO: 286947 - DNA, 390 bp, Morganella morganii
atgaaaaaaatattattgcttagtatttttctgcttggcgcatgttcatccccgccggaagccccgaaagttgattgggatgaaaaaggggatgtgatgaatacacaactcatgaattggtcgcctacagacaaggtcataaaaagtgacaaaactatcggaaattggtcacggaaaatcaggaattttattcctgaaaatcgtttttatcatgatgatgttttttatgcgattgctcattctaaaagagtggttgttgaaacaaccggatctacagacttttttaatgcaaaagcgtggcttcgaaaaaacggcgcagagggtgtgattgaatatcgcagtaataaaccatgtgtcatgtgtacaacaacactttatctggagaaataa

SEQ ID NO: 286948 - DNA, 552 bp, Morganella morganii
atgaaaaaatttttatttatcttattacccttgctgttaacacctgcattaagtcaggctgaaccagaggtgttaacgggagatgttcgtctttcctgtgaggctattttatgtctttcatcgggcactcgccctggcgaatgttccccgtcactatcacgttattttggtattaataaaaaaaagtggtcagatacgatcaaagccagaaaaaatttccttaaattatgccctgcggcagaagaaaaaggaatgcccgacctagtcaatgctattgctaatggcgcagggcgttgtgatgctgcttaccttaataaatttctgtatgaagaaaagaaagagcaaaagtgccgcagtcggggaaaggaagaagattgttggtatgaaacgtactatcgcataaaaaatgaacttcctaactattgccgtgcttacgttaatcatgaatggactgatttagatagtagcctgcattatcagggaaaaatggaatgggttaagaaagaatctgtggctggttggaataatcagggcggacaatgggttgattaa

SEQ ID NO: 286949 - DNA, 279 bp, Morganella morganii
atggaaactgaaatgtttagggtaaatctggcagactggattaaacaggaagaaacagaatccggtgaaaatgctttttatcatcctaatactgaatacttcaaagttatgcgtgaaatcaatcagtatgaaactgaatttattgctaatagtggtgatttagtaaaaatggctaaaaagcattctgctacttataatcaactcaatgaaaaagataaagagtttgttgattttcgccttgatgaagaaattttcttcataacttatgatgatgagtga

SEQ ID NO: 286950 - DNA, 624 bp, Morganella morganii
atgaaaatcagttcaataaaaacagtttacgattttatgcgttactgccggatgccgctttattttcagcgttcagtcagagatatgaaagtcggtgatacttttattctcggaaaatatacacaacacctttccggtgaagaaaatagtgtgctcatgcctgtcagtgatggtgaaccatgttatgtagcggaagcatggatagaaaaagaacgcgggttttattctttctttggtacatggacgtttccgactaaaccgacacgggcatttataatgacctcggggaagtttaaaatactgaaaggagggattattgaatttgaaaagtcagagtcagtgaagtcttttgcactggtttgtcgttatcttatgtggcttgtaaaaaaaatgccaaaagaggaaaagcaacgatatttttctgctaacagcgttccgctgtttatgggtatctggctggacagtgatttgatagaaagaaaaacccgcgcttatctggcagaggggaaaccaaaacccgtccggatggattacagtgaatatgcacccacacatcaactggcggcgatagtggatgcggcattttctttaggtgtaattcaggaaattcagaatgagggatga

SEQ ID NO: 286951 - DNA, 2145 bp, Morganella morganii
atgagactgtttatcgcagaaaaacccgccgttggtaaagatattgccaatgctctggggagtgctgttcgcaaagatggatattttcagtgtgggcatgattgtgttacatggtgtgtcggacacattattaaaagtgccgaacccgaagcctataatccggattataagagctggacgaaaagtgatttaccgctgaaaatgtttccggttaagtatgaaccaaaagccgaaaccgccgcacaggttaaaattgtggttgatttaattgaaaaggcagattctatctgtcatgttggcgatccagatgatgaggggcagcttctggtcgatgagattttaatttatgcgggtaatacaaaacctgttcagcgggttttaatcaatgacaacacccccgctgctgtaaaaaaagcattatcttcaccacaggataataatcacaaaaaattcagggggatgtttaataaggcattagcgcgaagtgtaggcgatgctattttcggaatgagcatgacccgcgcctgtactatcgatgcccgtgagaacggatataagggtgtcctttctgttggtcgcgtacaaacgcctgtgttgggtttaatttgccagcgataccttgactttaccaaccataaagaaagtctgtatcagaccattcaggggcaatttttgcatgaaactgcggggtgttttgccgctaactggaaagtcagcgaaaatgcaccacaggatgagaagaaacgcctgaacaatgaagattatgcaaaacgactaacacaatcttttacgggaaaagatgctgaaattgtcagcgcagccgttgatgagaaagaaaccactccgccattgccgtttaatctgtctgaattacagcaaatcctcaataaaaagcacaagttatctgctgataaaacgctgaaaatcacacaggatctgcgggaaaaatacaaatgtatcacatataaccgttctgattgttcgtatctttctgatgagcagtttgctgaggctcctcagatccttgaggctctgaaaaaatcgtttcctaatcaaccaaatgttgacagccagcgaaaaagtaaggcattcaacagtgagaacgtcacggctcataccgccattattccgacaacggcggttcctgatttgacacagctaagtgaacaggaaaaaattgtttaccagataatagttgaacgttatctgatccaatttatgccgaataaatgctatcaggaagcctctgttgttttaaaaatcgggctggaatcattcagtacccgcgcagtaaatatcacaaacaaagggtttagtgccttttcagcagaagaaagcgacgattcgggacaaaatgacgaagaatccggtgattttgatatactgaaaaaacttcgtactggtgaagctgtcagatgtgaacaggctacgtacaaaaataacaaaactaaaccgcaaccgctgtttaccgaagcaacgttgcttaatgcaatggacaatattgttaactttgttaccgatccacaaattaaagctttgctgaaagccaaagatgcgggaaaaaagaaaggacagagagggattggtacacaagcaacccgcgcaagttttgtgccgttactgatgaaacggggctttattatcatagaaaaacaaaagctcattccgacacaagccggactggattttttccagtcattaccgaaaaaggttattcagccggatatgacggctttctggtcagaaaagcaaaatgatattgaatcaggtgacttatcagtagataattttattgatgcattgtatgcggatattgaagaactactgacacaaacagcagttaaagtcacagataaatcgtcactgcaatttttatcttttccttgcccgtgttgtaactctggcgtgacagaaaaagcaaaattagttgtgtgtgaaaaaaattgcggatggaaattctggaaaacaattgcgtcaaaagaactatctgctaaacagattgaaacattatacgaaaaaggaatgaccagttttatcaaaggatttaccggaaaaaatggtcagtttgaagcgcagttaaaactggaagataaaaaaacagggaaaatttcatttaaatttaaaccacgggaagttaaaaaatga

SEQ ID NO: 286952 - DNA, 207 bp, Morganella morganii
atgaaaacgaagcaagagtggttgcaccagttaagacggtgcaacacgttagaaacgctggataaagtaacagaacagatagcagaacggttgactacaaaagaaataatggtttttatgatggcagtcgatcaccgtaaagctgaaatcaccatgagaaccctgtatgataatgtccctgtttctgtctggaaatatgtcaaataa

SEQ ID NO: 286953 - DNA, 477 bp, Morganella morganii
atggcagatttaaaaagagaagaagaaatcgagattgttgttaaaaatctttccggtttgacagctttaagacgctttgctaacacccaatcatttgattggctggaagatgtttctaataaactgttaactatcatcagtgaaaaacgtgaagaagaagaacttcgcagactggaactttcagaacaggaagaaaaacgcctgaaagctctcaaatatttagaagaactcggacttgatccggaaactattaatgtctctgtctttgatacagagccaaaacgtaagaaaaaaagaaaagccagcactgctccggctaagtatcgtttcactgatcctgacacaggaaaggctgatacatggactggtatagggcgaccaaaaaaagggttacaaaagcttttggaaaaagggcatgaattagacgaatttttgatccagcctgaacttcgcaatgaagaaaattctccgctttaa

SEQ ID NO: 286954 - DNA, 600 bp, Morganella morganii
atgaagaaaattctccgctttaagattgcactctcttttctctttgcactgccttttatagggcagtgcaaacctttatttattggtgattctttaacctatgaactcgctatgagttacaaaaagattgcccccgttgatgctaagtttttggaaagtacgggattaaaatcaacaaaaattctccactggcaaaattatttacaacacatagatttttcccgttatgatacggtttatattgttttgggaacaaatgattttattcaaaaatcagaaattcctgattatcagaataaagcttctgcatttatccgtgctatcaaaaaagaaaatagtaatattatttggatgctcccgcccactctgaaaaatatacaaaaaaataaattattatcaaatacacgtgaagctatcaggcaagcagcaagacaaaataagataaaaacaatagatacccgtttatcactcgggtatctatatacagagtttattaatgggatgaaagtaagaaccagtgatggtattcatataacagaaaatggggctgataatgtaataaggggtttaattaatgtcgataaagaaaataacagatag

SEQ ID NO: 286955 - DNA, 963 bp, Morganella morganii
atgtcgataaagaaaataacagatagcattattgcatttatatataagacaacggataattatgtcattgatcagctaaataatgttaatttaggtaaagttgagctatataaacctacggcggattcaaatactattttgagatgggatgagctttttaagaattatatggtcgggggttttcctacagaaattaaagatataattactaatttgtgccgtattgagaaaactacagactatttttttgattttaataaaatacaatcattaacagcatctaaaagttttggcggcattcatgatggcgctataaacggtagctggttttatgatttgtatagttgggggcgcgcaatgtatcccgacgaaagaatgaaagcggaaaatgaagatgattggaaacgaaatatcgcgcacattgaatctgaggggttcagaaagtgcagacctattaatgtcatatattacgaatggttaaataggtttgttgcccctaatacaggtggttctcatcatgccgcattggtagtgtatcaatcaatcagagataaaattaaatacacaagagaaactattttagaaaaggtttctcttaatagttattacatacgaatgctggacaatgaatactattcattcatcattaataatgatagcaatcacaaatccctatcggaaagtgataaatttattaatgtaataacagagctaatcagtacgcatatttcaattctcaaacccgtacattattatcagaacttaatgattatctttattcctaaagagtcattaaaaatagattcagaattatttaataactggattaataaagcacatgaccagaaaaaaataatcaatctgccgaactattttagattaccaaatgaatatcatacaaaaccttatttgcatgaacttcgttatctgaaaatgccaaatccaaattctatttttcaatag

SEQ ID NO: 286956 - DNA, 147 bp, Morganella morganii
atgaccaagtacgccctgatagggctgattgccgtttgtttaacggtactgtgtttctctctgttaatgcgcgatagactctgttctatcagtgtgaatagtgggaatacagtagttcaggcaacactttcttacgaagaacggtga

SEQ ID NO: 286957 - DNA, 654 bp, Morganella morganii
atgattctagtatttgcatcagataagggcggtgtaggaaaaactacaacagtgatcaatatggctgtcatgcttaaaagaaaaaacaaaagtgtgatcttagttaaggttgataaaaacggtgacttgtttgtctggtcaactactcgcgaaaaagcgggattctctgctatccctatttatgaagcatatggcaatatcagcgaagaaataaaacgcctagaaaagctgtgtgatgtggtaattatcgattgtgcgggacatgatagctcggaattcagaagcgcattaaccgtggcagatgtattgctgacgttagttaaaccgtcatcgtcactggaaaaaaacacgttaactaatgtaaccaaaacggtcagaacagcacaaaagcagcatggaaatcctgacttaaaagcttatgtactaatgacccgtattaagccccataagttacaagatgcagtatcgcttgaacaagagttgaaatcagatgaaatctggttacagcctcttaaaaaccgaatttcagaactcgatatttttgaaaatgccgttaatgctggcgtaggtgtgcacgaagttgaaaaagcaagcagcttaggtacagcaaaagctcaaattgagttaattgcaaaagaaatagggctgatttaa

SEQ ID NO: 286958 - DNA, 282 bp, Morganella morganii
atgaagctacaaaaacccgatttagattttacagactctaacaatgaaaccaagagcaatacggctcaattcattaaagcaggtgacaaacgtcccgctacatcaaacaaattaacaccgtctacatttcgactgccggaagccatgacagacgaattatccaacgaagcggaaagggtagggcaaaccaaaacaatgctgctcagagctgcttggatcgcttatatgaaactcgatgaagatagcaaaaacagagcattgcttgagtcatttaagctttaa

SEQ ID NO: 286959 - DNA, 177 bp, Morganella morganii
atgattacatttttactgtgggcgactatagttggcatgtttaccggactcattggtacttttatggttttttttacatcagataaatccggtacgggaaaagatttaatctcaattggtatggggattgccggtatatgtgcgatcggcttgttatggatgaggacttttagttaa

SEQ ID NO: 286960 - DNA, 246 bp, Morganella morganii
atgaaaacaatcaccgtaacacaatcaatggctgatttgctcaagaatgcaagaaaatcctcaccggtttatgaggaatacatccgcaggcttcctcgtaaaagcaagttaccacgcgggaaatatttcagaggtcgtattgctggcgctgtggttccgattatagatgaattctggcaatctgccgcaactcagacggacatggagttattacaatccctgtttaaacaggcaaggagatattaa

SEQ ID NO: 286961 - DNA, 330 bp, Morganella morganii
atgaacactcagaggctatctcagttgatttttttgtttgaacgtataggggtcaacgaattaaccttagctgccgctgtcgccagaaaagcggttgaggaaatggaagaaaaagacctgacaccggaaagaaaacatttactgaataatcagttatgggggctggtcagtacggctatcgatcattcaggttatccggattattttaacgatgagctggaacagcttgagtatgagcttgctgggcgcgttctgaactatcgccttttgcggggctggctaatccgcgcacccgatgcaccaaaatactttgaaagtttcattgattaa

SEQ ID NO: 286962 - DNA, 525 bp, Morganella morganii
atgcctacaaatattaaaatcatttgctggattttcttttccataatactaattttttcgttctggtataaaaacaccgcccgacagcggcgacataaacgaaaacaaaagagcgcaaaaaccgttttagaacggctttctggtatttctgaatttagccaaaaaatagcctatctaagaaaaatagatccgtttgtttttgaagaactgttgttagaagcttttgagcgtcgaggctatcaggtgatcagaaataaaaagtacacaggtgatggcggagttgatggaaaagtaattatgcacggggaaacattacttattcaggcaaaacgttatcgtggatttatttcattacagcacgtttacgattttgaatcgttgtgtgaaagaaatcaatgcaaagggattttttgtcacacaggaaaaacccgtcctgaattactaaaaaatatgaataattcaaagcgtcttatactcatcagcggtaaaaaattgattcagctactcacggtaaaaccggagtaa

SEQ ID NO: 286963 - DNA, 357 bp, Morganella morganii
atgtataaaaaaattgagtttctaagtaaaaatcaaattgaagcggttaatattatcagaaatgaagtgctggatcgctattgggtattgaataaaataagattaagtgagttcctgtattcagtaaaagaatatggtacgccagaattttacgatgattttaaaagaattaatcaaattacgcttccgtgtgtaatttttgatactcatgaaaatacattaaccgctgctattttttttgagagcgaacccgccgctgaggaagttttgaaaggtgcgggggtaacgtacattatgattaatcaaactaaagatgctttaacacatccggaattactccggttttaccgtgagtag

SEQ ID NO: 286964 - DNA, 1161 bp, Morganella morganii
atgggcgttactgtcgaaaaagagtatagggtcaagcgtagccgagcaccgaaaggtaacggattaaaaaaatctgtcttggcggggaagtctgtttttgctcataaagttaataatggcggaaagctttacagcagcagagtgaaagaacgactagggaagcatggacgaagtaaagaagttttggttaaagttacaggtgcagcaaaaataaatgccggagtaagaggaagtattgattatatttctcgtaaagatacactatcattaacagatgatgagggtaataaaatcacagcggaagaagctaaagaaatcatgacagaccctgaaaatgaggaattaaaggagaagaaaacaccagatattactaaaaatattgttttttcaccgcctgcttctgcggatgtaagtccggaagatgctcttgaatctgtcagacaaacattatcaaaaagatatccggacaataaatttgtacttgtatatcatgacgacaaaaaagaacatccacatgtccatgccataataaaattgaaaaaagaagaagaaagaaaaaaaattcatatatctaaaaaagaattgcgttcattaagaacggatttttgcgaacagttaaaactaaagggttatgatgtaaaagccacacataaacaaattcctgattttaaaaataaactgaaagaggaagatgcggtggcaccaagacggcaaaaaaatgtaagagaggtagtggattttggacgtgccccgtatcagtttaaagagggtaataaaccacaaaactatttgactgtgaaaacacttaatggcaaagaatatactgtgtggggtaaagagcttggagagcttgcagaaagagaaaaagttcaaaaaggctcactgattaaactcaaaaaatccggttcagaagaagtaaaagtaccaagattagataagaacggggagcaatcaggttggctaattacccagcgtaacaactggcaattggaaaatatcgggctaaaaggcatagacagaacacaaaaaataggaacagaaaaacaaacggatttaactgaacaactgaaacgccagcaggagcagaagcgtagatttaagcttcaagcggcagaaatgctcaagaaagaacaaaaactcaaaatagggttgaaattttaa

SEQ ID NO: 286965 - DNA, 549 bp, Morganella morganii
atgaaaaatatatgttttagaatttcagacaaagaacatgaattatatgataaaaaagtaaaagaaaaattaggtgtgtctttgccagtattttttaaatcagtaggcgtcagttttctcagtcgagatgaagacgttaaaaaatcgctgtataataataacataaatctggatgatttgtccgagtattatgatactgaattaaaaacgtacttaaccaaagaacaatatgaagcattaaagaaaatggcggacaaacacggatggtcactttcaaaagaaatccggttcaggttgcaaaatacattaagtgacaatctggatttttatgaccaagagttagacgaaatgcaagcttgccgtaatcaaataaaacgtattggcattaatattaatatgattttgcgccgtgatgaaggcagggttttagataaggacgggtttaaaaaagacattgatgatttgaaaaatcaattaactgatttggaaagtagatttaattattttctgaaacaatgccgaagcaggattacatcaagcaaaggataa

SEQ ID NO: 286966 - DNA, 285 bp, Morganella morganii
atgaaaacaaaaccagaattatttgatgtagtcgattacctagaggatgaagaagatattcaggcatatctcaatgccgctctggatgaagatgatgaaagctactttttagcagcactgggaaatattgccagagcaagaaatatcagccaactttcaaaagaaacaggaatgagccgtgagggaatttataaagctctttccggaacaggaaacccatcttttaaaacgatttcaaaaatatctaaagcattaggtttgaaaatacacttcgcaggggcttaa

SEQ ID NO: 286967 - DNA, 297 bp, Morganella morganii
atgattgaaatcaggcaaacagaagaagttaaaaaatggcttaaaggattaaaagataaaatagccaaagcaaaaattttaacacggattgagcggatgaaagagggaaattatggagatgttgagccgataggtgatggatattcagagttaagaattcatcagggcaagggttacagagtttattttgccaaccgaaacaatgaaattattttattgctttgtggtggtgataaaacaacacaacaagcagacataaaaaaagcaaaacagatagcgaaaaaatgggggttctga

SEQ ID NO: 286968 - DNA, 135 bp, Morganella morganii
atgtccgaaaaaatgatagcagttgcaagagcatttggaaagggaaaaggcggaacattccctatcatgaccgcaaaagagcttgagaaatttttagaagtgatgagaacagagcggctgaaacaaatccattga

SEQ ID NO: 286969 - DNA, 345 bp, Morganella morganii
atgaaaatgtatcttgttaaattagatttttttgaagtctgcgacaatgaaagaatgttcacggatagtaaagaatatgtgattgtagaaaaatcagaatcacgggttttagaaaagttcattaaatttaataacgcattgttaatgagtgtcactcaatacgatttattcaccgaaccgaaaaaaattaagtttattatgtcagcgtacaacgtaaacggggaggtgatttttgtcgaaacattaccgattgaagttaaaaacacattagagttaattgagatactaaaagcccgccgaagcggtgactatttaaccgtagattggaaggaggtagacaactaa

SEQ ID NO: 286970 - DNA, 258 bp, Morganella morganii
atgaaaaaatacacagttttatttgcagaaataagcaaaaaaaattcggatgatgaacctgatgtttatcgctttgagtccataaaagaatttctatcttttgttaaaaaagtaaaattccaagaaaaaatgaattttaattatcattatattttatctgattctatggaaaaaacaaataagtttcaatataaaattacagaagaagcaaagcactataagcaatttaaaaaattattaataaaatatatgagttag

SEQ ID NO: 286971 - DNA, 183 bp, Morganella morganii
atgaaaacaaaaaatatcaaaaaagcgtttaatatccctagtttttcagaatcagtaaaaaaagattttgaagcaggtcttattactctggaagatgcagccatagaattttataaagcaaattatacattttatatcgactttgaatatacaaagaaacaactccagatacaagaggtataa

SEQ ID NO: 286972 - DNA, 474 bp, Morganella morganii
atgtcttttttaaattatttttgttatgtgattgttatggctgaaagaaagaaaaaggaagttgttgctcctgagtatagctttccagattactatcctaagaatgttcctccaagtaacgcaacagaggctaatggtgtatttttccggctcgtgaagcaaaaccctgcgtcactacattgcttcgatgatatgtatactgaaaaccctaaaagactgaaaagatttaaaggtattagtcttacgtattgctatgggacttctctgtactccgatgaaaaatcagtaacaaacgcgtttgacaaatttccagaaggtgtgggcactagatttgtagctaaaggtgaactaagtccgggtgatgggaagatgttaaaaaccggagctcctgataccacgcattacactatatggtttgtaaaagatcatcaggttcacaaaaaattttcatgtataagggaggtgactaaatga

SEQ ID NO: 286973 - DNA, 1296 bp, Morganella morganii
atgagtaatctattcttgaaggatactcgttttggttctttatatatgaaaaatgtttatgaatttttcgagggacctaaatttttctcagttactaacgaggttggtgggatctttcttctttactggattggtgatgaagaagagtatgacaagtggtttttgattcctatatcaagttctaggttggaaaatttagaaagaaaaagaatcgatatatatcaatctcttgtttaccaagagcaaaagtttttttatcaaataaaccttccttatgatgaaaaagagaaagtagaccttctttgttttgatactgatgagataaaaacattggtcaagcttccaaaagaaggtttgtttatcagtatggttatgcctatgcttgaaaccggaaagcttggggagcaaaagcaattttcaacacatgaaatacatattgaaaaatcaagtagcgctataaaaccacttgaacttaatggtgtttcaagattgtttgagagctttaatgaattttataattcagttttaggtatctttgatataaaggattcaatggtgcctgttgatgcaagacccggttcttttgttttatcatttaaagctcaagaaatgaattctattgaagagttattgttgaagcttaatcagttgattataggaaaacaagatatcatatcctttgttgaaaagaataaaattgatgctcagagtctttcagccctttttcaggggattattgatactagctccgactttgaacttaaaagcaacaatacagatgagatcattctgaaaatcagtaaaagagatgccgaaatttatataaataagttagccagaatggcaagtgagtatgttggtggctatcaagtaccacaagcgaacattatggaaaaagtttttcttttggttcgattaatatgggaagataaaccagtatcagcccaaactataggactagatgccagacacatagcgtattacaagcatgcggctaaaatccttgggtttattaatcaatctggttatttatctgcattaggccagcaaattgcagagtttgatgatattgagcgtaaatatgccattgctgctcggagctttgaagccagtcattgcggttgggcttgggttacttggagcggagttaaaaacttatctgaaataaatccacaaactgcagatgaattcttgaaggaaaaatgtctgtcattgagtgagaaaacaaaaataagaagagcttcaacgttgagacaatggcatgatgtcctgaaaccacattatagatctatttaa

SEQ ID NO: 286974 - DNA, 1482 bp, Morganella morganii
atgaccgtgccatttgccactattccgcagaatttgcggaccccgctgtttttcgttgagtttgataactcgatggccaacaccgcaaccgccacccagcgcacgctgttaatcggccagatgctggacggtgcggcgggaaaagacagcattcctgagcgcatcacatccgggatgcaggccgcagagcgtttcggtcgcggatccatgctgcacacagaggctgatgcgtatttccgcaatgataccgccggtgaggtgtgggtgttaccgctggcagatactgaatcgcagacagccgccgccggtaaactgaaaattaccagtgctgccaatgataccggtgtgatttcactgtatatcgcgggtatccgtgttcagatggccgttgtggccacggacacagcggaagctatcgcaaccggactggctaaagtgattaaccgcaatgcgaacctgccggtaacggcagcagccgagacagatacggtgacgctgacggccaaaaacaaaggcgttcacggtaacgggattgatatccggctgaactacctcgggctgaccgggggcgagtcgacaccgtccggttttgaaatgaccgtcacggcgatgtccggcggtaacggcgctccggatttgcttaatggtctggcgaacctgaaagaccgatcctttgattttatcgtgaacccgtataccgatacggcgtctctcgatgtggtgaaaacctttctggcagaccgctgggcgtgggacaaacagttatacggacacagctacggggtgatcaccggcacttatggtcagttggctgatcttggtgaaaagcggaacgaccagcatgcctcactgctcggggtcaacggttcaccctcaccggattatcagtggagtgcggcatataccggtgccattgcccagagcctgcgtaatgacccgggccgcccgttacagacgctggttatcagtggtgtgctgccgccggacgacacgaagattcttgaactgaccgagcgtaacaatctgctgcacagcggcatttccacatttaccgtggacgatgacggtaccgtgcgggttgagaatatcatcacgacctaccagaaaaatgcctacggcgacaatgacgacagttatctgcaggtggaaaccctgtatctgctgatgtttgtatcacgctatctgcgtacccaggtgaccagtaaattcgggcgtatgaagctggctgaagacggcacccgttttgcgccgggggctgcaatcgtcacgccgaatatcattaaagcagaactgatcgcccagtatggcttcctggaatttaacggtcatgtgcaggacgcgaaagggtttgccaaaggcctgaaagtcgagcgcaacagccagaacccgaatcgtgttgatgtcctgtggaccggcaccctcattaaccagctgcgcgtgtttgcgttgcttaaccagttccgcctgatgccgggcaactaa

SEQ ID NO: 286975 - DNA, 549 bp, Morganella morganii
atgaatgcagccagagttcgtgagctcgttgtcgcggccctgaaggggaaaaccagcgcggaagaccgtgtgtattccccgcaggactggccgacaacaaatgcagaatacccctgcattatcgtgcagaccccgtttgatgaaaaacattcactcggccgtaacgttccgcagtttaacaccgtgaccacggtccgggtcaccggccgcctggaagagttcgatgaggcagaccggaacggcgccataaaagcagagctggctctcgaagccctgcgggaacagattgaacgggcggtaattaacagttatgagctgacccggaaaatccagcagttcctgaatatccgatctcagataaacatcagtgctgccggtgaaggccatatggcgcaactgctgatggatctggatatcgagtattaccaggggccggaggaattctacccggttgatgcggatccgctaaccggtatcgacatcagcgttcagatgcctgacggcagcccggaacatcacgtctccatcgacctgactaatcaggagtaa

SEQ ID NO: 286976 - DNA, 168 bp, Morganella morganii
atgtttgtaaaacccgtaaaaggccgcagcatccgctgtccggtcaaaggggagcttttgcctgaatccgggcaggacgtccccgataatgttttctggcgcacccgtctgaatcagggggatgtcgtgccgggtaatcctcagaaagtgaaggagcaaaaagcatga

SEQ ID NO: 286977 - DNA, 522 bp, Morganella morganii
atgaatacaaatggatgtttatacctcattgatgccaatataattatacacgcacattcattctattaccctctcaatcgagtacctgaattttgggagtggttgttatttcacgccaaaaataacaacataaaattgccgattgaaataattaacgaagtaaagggaggtgataaagatgaacatgcaaagtgggttcatgaaaaaaataataaatcaatccttctccttgatgaaaatttgcatatagggaatttaaataaggttcttagtgaaggatatgctgatgacctatccgatgtggagttggaaaaaataggtgaagacccatttttaatctcttatggcctgtcatcaccagaaaaccgggtgatcgtcagcaacgaaacatccagcccaagtaaattaagagcaaatagaaaagttccagatgtttgtaagcaaatgggggttaggtgctgtaatgtttatacgatgataagagagctagactttcgaacaaattggaaaagcagcctataa

SEQ ID NO: 286978 - DNA, 1155 bp, Morganella morganii
atgtcatcacctaaccctaaaatgttgatatgggcgagagagcaagcagggctaagtttgcaggatgctgcaaaaaaacttggcttgaaaatttctcgcctatcagattttgagtctggtgaaaaagcaccgacatctaaccagttgaataacattgcaaaaatatatcacagatctcttatttcgttttacttggaaaaaccgcctattgttgcaagcaagggggaggattttcgcacaatctataatgccccagaccccatggaagatgcagcggtaaacactcttataagaaatgttcatgtaaggcagagcatagtcagagaggcgatgatagatagtgactcagctattgctttgtcatacgtggggtctatgaaaaataacatgccaattaaagaagcggcatcttatgtcattgattatttcaatatagatatcgacatatatagaaagcaaaaggacgcccactccgcatttaattttctgagaaaaactatagaagataaaggaatatttgttttgctgctaggtaaccttggcagtcaccatagcgatatttccgtaagttatttcagagggttcgccctgtcagatgacatagccccatttattgtaatcaatgataacgactcaaaatatgcctggtcatttacactactacatgaattggtgcatatactgataggcagcactggtgttagtaataataacattgataacatcactgaaaaatattgcaatgatgttgcgagccaggtattgctcccagacaatgactttatttcaataaataacgtaagtggatttaccactgaggaagttattgaaaaaataagcgagttcagctctgtctttaatgttagttcaacaatgattgcgtacaggctatatgtatcggggaaaataagcagggacaattgggagtacatatcagatgtattctttaaaaaatggctatccgccaaagaagagaaaaaacaaaaaagcaagtcatctggcgggacatactacataactaaaaaacacaaggttggtaatgctttgtctaatttagtgaaaaaatccattatagacggcgtgttaacagaaacaaaagcgggcaaagtccttggtgttagctctggaaatgtaattgaattggtaggattataa

SEQ ID NO: 286979 - DNA, 222 bp, Morganella morganii
atgaaaattgaatttatctcaaacggcaacatagccaaggtggtgatccgttctttcatcactgaaaaccggaaactgtatcgcctgattgatgctgcccttctccataccccgattcagcaatcaacagccggcctgttgttccgcgtgacgacactgtacggcaagcagaaccatgtccgccgggcacataagattatctgccgggaggtgtcacgatga

SEQ ID NO: 286980 - DNA, 609 bp, Morganella morganii
atgaaagaaaaattaccattcatagatgccggattgctgcgtgctgctcttatcctgattgccgcaaaagacgatccgcgaccggtaaccaaagccgctcacattaacggtgaatttatcgagtcaaccaacggacacgccctggttcggatgaagcacaatgcgtattttcaccatgatatcgttgtgcaatttaacgaccccgtccctgatgatgctgattttgctgaaatcaaagtgctcgatgatggcctttgcgttgcagtgtattaccgcgaggaaacagaagcagagtttgtcccgttcgaaatatttgcactgacccgcagaacagagacatatcctgatttcgatattttcctgaaaggtgaatttgtaaaaaacgccctgccgccggttagtgccaaatacctggcattacctcacctgatgttcggtgccggtgttgtggatgcaatgtgcacagaagacgggaaagccgttctgttcaacatggggccgctgaccaatgaaatatatggtgacccgcagctcgttgctatggcagttatgccggagtatttcgatgcatgccgtgccgcccgtgaagaaggtatgggggacgaatga

SEQ ID NO: 286981 - DNA, 486 bp, Morganella morganii
atgaaagataaagaaatgacaccagaagaaattgttgaatatttaaaggatacgagtgccccatcatttttgttagatgcggaacgcctcagaactaattatccgccattaacggaagatgaaaaatcagagtacatgaaacactcaattaaaaacttcagaaaaattattaccggtaaatatctgctgtcctgtttttaccggttcggtcacggcgtaaatactacctttgcattccgccacgacaataatgttattgcggttgatgaagaagtaattgaaacactacttattcatcaaatagacaacctgatcctgagcaagcaccctgatgacggatatcaggctctgtggcgcttttatatggctaatgaccaatacgagaaagagactggtcataaatggatgcaagattttatcgactccatttttgcgaaaggcacaagtctattggctaaacctgtcagcaacacaactattcactga

SEQ ID NO: 286982 - DNA, 726 bp, Morganella morganii
ttgctgaataagaagttcgataagaccggcggtgagataacagataccgtcacaattaagcgcggctgggaagctctggttatagaatctggggcatccggcgtaccgtcacagattaattttaaagagggaggggttcgtacagcttttgttggctacgggtctaatggttcaaaacacctcggtcttgttaatgataaaaccggaacgtcatttcatgtaattgacaatgatatttcagttaacgggaaaagcgtcatggcgggcctggttccaatcggcggaacaataatctggaactcatcagtcccttacccggataacttctggcctaacgaggggcgctcattttctgccgcagactaccctgaactggcaaaaatattcccgaacttaaagctgcctgatgaccgtggttatgccatccgtgcagctgataacggtaaaggcatagacaccggtcgcgtcgtggggacgtatcagggtgatgctatccgtaatatctatggtggttttggggccaggggtaacggtacctacgaaatcagcggagcaatgaaagttaccaccacaacaaactggcaggtaaatgattttgccgcagtgcctgatgggggcaacaggagaggtgttaccgcatatcttgatgcgtcaaccatcgtcccgacagcagatgaaaacagaatgaagaacgtggcaaaaattttaattacgagggttaaataa

SEQ ID NO: 286983 - DNA, 630 bp, Morganella morganii
atggcttatacaaccgatatccagaatgcacaatttgacgaaaacggactggcggttattccgggctgggctaaaatttaccgcgctcacccgtatacccgcgaatatattggtgctgcaatggataatgtcccctatggcggttctgtgatcggtgatgcttaccttgatgagcctgagataccgacagtgccaaatatggctatcgtccgcgcacctgacggtcaatcatggctgcatgttcctgattatcgaggttctgttgtgtatgacaaagaaacaaagcaacagactgaaattacagagctgggcgaactacctgacaacctgacgctggacgcacctgaaaccccgtttgataaatggaacggtaaaaaatgggtgacagataagtccgagcaactggcgtatgagattgctgttgcagaaggtcagaaacagtcattactggcagaagctgaacaggaaattgccatgctggagcgtaaaatacgcctcaacatggcgactgaaacagaccaggcaaaactgacagagtgggaaatttacagtgtaaaaatcatggatgctgacacatctgccggtgccgacactaaatggcctacaccaccggcttcaccggccagataa

SEQ ID NO: 286984 - DNA, 387 bp, Morganella morganii
atgaatactcagattatagatcagaaattttttaaagatgcggatgataatattttttgccttgatatcatgccgatgaatgaagatagctgggaaagtgaaataaaagacggatggactgaaatcagtaaaaatgatgcgatgagtatagccaacccaccgccgacaaaagaacagttggttgagctggcagaggctgaaaagcaaatattgattgcggaagtcacctccgaaacagaaatgcttcggacaaagttggcacttggccgcatcaaagatgatgaaaaggcgctgttaaacgcctggctggattacctggatgaactggaggcagtggacgtatccaccgccccggatattatctggccggtgaagccggtggtgtag

SEQ ID NO: 286985 - DNA, 594 bp, Morganella morganii
atgaattacaccgctgacgattacactcaggccatgatcggactggcaccgcagggtatggcgtgggactggcggccggggtcgaatatgcatgctgttctccgggcgttggcgcgcggttatgaggcctcggatattgacgctgttcagctgcttgagggagcatttccgaagacggccacaacgttattacctgagtgggaaaaaacactcggtctgccggatgattgtgggatcggggagatggacaccattccgaaacgacaatccgcggttctttcaaagctgctgcgtaccggcgggatgtcaaagccctattacatcagcctggcggccgagatgggttacaccatcaccattaccgaattccggcaggcaagggcggggctgtcggcctgcggtgatgcactgaacggtgatgaatggccgtttgtctggcgcatcaatgccggaaacacgcaggtgacatatgcagtcgccggcggcagttactgtggtgacccgctgcgttcgtggggggaacattacctcgaatgccagtttaatcagatttccccctctcatacgatccttcaggtcggttacggccagtaa

SEQ ID NO: 286986 - DNA, 1140 bp, Morganella morganii
atgccgtttaagcgtaaaacactgacggagctgcgggagcagaaccagaatttcctgcgcaatgaactgaaagagcccggtgcgctgctgcggtattccaatatgcgggtactggcggatatggatgccggtatggcgcacctgcattatgcctacctggattacattgcaaaacaggcaactccgtttaccgcaacggatgaaaacctggcgggatggggggcgctgaaacgggtgtaccgcaaaccaccgaacaaagccacctgtacaaaggtgcagtttgacggcgtgccgggcagtatcattccggccggtacggcgatgacccgcggagatggataccggtaccagtctgttactgaggtccatattaatgctgacgggaaaggcttcacgtctgttgaagccattctgcccggcattgacgataatatttacggcggcggcgcggcgggtaactcaccggccgagacaaaactgacgcttgatatagcgatatccggagtgtcttcagattgtattgctgttgatccgatcaccggcggcagtgatattgagaatgaagaggctttccggcagcgggtcctgcatgcgtaccaaaaaccaccgcagggcggcagcgatacagactatgaaggctgggcgaaagaagtgccgggcatttcccgcgcctgggtaaaacgccgcctgctgggggccgggtcggtcggcatttacattatgtgtgacggcaacagcaacggcggctttccgctgggaacagacggaccggctaccaaagaaacttattcagttcatgcgaccggtgaccagttgcgtgttgcagatcatatctgggatgtgcagacggtaacggcgctggtgtgggtctgttcacctgttgcgaaaaagatagattttgaaattgaagggctgagccgggcaacctcggaattacatcagcagatagccaaagccattgatgatgtgttcttccgggacagtgacccgaccggcggcacaaaaatctacctttctgacctgcagtatgcgattgctgatatccccggcaccaccggctttgtcctgaaaaaaccggctgaaaatatagttctgagcaccggcgaactggcgcagcgcggggaggtgtcatacacatga

SEQ ID NO: 286987 - DNA, 222 bp, Morganella morganii
atgagcttatacgaaaccctgaagggtatttacaaaacgaacgccgcgatcgggatggcatatccactcaaaggtaaaccacgcagcagtcaaggtgtgggtaagtggaaatggcgtggtgtacctgaagatgtggcgattctgtgccattacgatcctgaaattccctacacacacgagtcactgaaccatgcatccgaaccaaaacacactgatgcctga

SEQ ID NO: 286988 - DNA, 588 bp, Morganella morganii
atgatgagtgatcagatccgcgatttaaaaacccggatgtctatgatgatcggcgccggtaaatccagcgtcactaaagatgacggagcgattcagaccatccagtacagcacggtgctggaagtccgggacggcacttaccgtatgacagaatttggtttttcttcctctctgccgcccggatccgatgttctgattgcctatctcggcggaaaccgctccagtgcggtggtcatcggcagcaatcacccaggttcccggcacaccggactctcaccgggtgaaagcgtgatgtacaacctgtggggtatgtacatccacatgacagaggacggcattgtgattgaggccaaagataaagatgtgaccatcaataacgccgataaggtgacgatcaatgccaaaacagaagtggtgttgaatacgccgatcctgaaagtgtccggtgatgtgattgataactacgaaagtaactcgtccacactgaaaatgctgcgggacagttataacaagcacgaccacgatgtggaaaatgtggaaccgggcagtgccaccaaaaccagtaatccgattaaggagaaagtctga

SEQ ID NO: 286989 - DNA, 339 bp, Morganella morganii
atgcggtaccggaattacatcaccatcatcgaaagcaccctgatcaccgctaaacgggagcaggagagtatcgactgggaaatgaaccgccgttacgggcgctcaaaaatcctgagtgtgatggtcgacagctggcgggatgcctccgggaaactgtgggagccaaatacgctgatcccgatagatattccggtgcttggggtgacggataaattctggacgttgtcggatgtgacctacctgcgggatgccggcgggacacgtgcgacattacagctgatgccgccggaagccttcattgctgaaccgtatgaattttaccaggtaataagggtgtga

SEQ ID NO: 286990 - DNA, 186 bp, Morganella morganii
atggacggtgaaagcggtatcaataccacccgtccgatcctcggtgtgcgtgatgtgattttcacggtaccgccgaagcagggggaccgggtgtttatttacagtgtcaataccctgtttgtggtgtcggaagtacagcctgacagccacggcgggacgcatctgatcctgaataaggtgaaataa

SEQ ID NO: 286991 - DNA, 312 bp, Morganella morganii
gtgaaaaaaggccgccgcgctgaacgcaagcgctgtgcccgcatctttggcagcaaggctgctgccggtcgtccggatatggctgcacatctggcattcaatacccgcatgtcttcatctgaagctatcagcaccctgaaagcgatgggtgcggtacagcctgcaacacagcgcgcatcgctcgacagccgcatgcgggcagagcagcaggtgcgtatcagtccggatgcacaggcaccggctcgcggatctgcagatgctctggtgcagcagatgacccgtctttataacagcaacaagggagcgaaataa

SEQ ID NO: 286992 - DNA, 189 bp, Morganella morganii
atggcggttaatcagaccgccgatacggtgctgagcggcttccctgttgagacactacctaaaacgcaggatgacctcagtcagtaccatctgaatgggattatctttgaagcaaagtgggaaggtacgcctgcagcagtggcaaatgcggtattggtgaacgggtataaaaaggagtgtgaaaaatga

SEQ ID NO: 286993 - DNA, 255 bp, Morganella morganii
atgctgattttttggttcgaaattcgggggttaaatgatagtcgtgaaaattatttttggtgtgaatgtgatcttgctgttttagcggggaaagggcggttttatggattaatccgcctgttttattctttcgtccaacatcaggatgtaagtgcatttacccatcctctggtcagttaccttaccggtttatatcacgccgccttaccccaaactaccggacaattccttactccgcattgcatctgtaaataa

SEQ ID NO: 286994 - DNA, 306 bp, Morganella morganii
atgaagctcagaacaacaattaaaatatttacagcttctgtggttgcagttattcagataaataccgcatttgctgaagaagccattaactttaatacatcatttttagactcagacagtcaggaaattgatttttcaaaattcagccgggctaattatgttatgccgggtacttatcttctggcaactaaactcaataataatgttattaccagtgatgagaatatccttttttatatcccggaatatgatcctgaaataacagtccctgtattacccctgaattatttgcacaacttgccatga

SEQ ID NO: 286995 - DNA, 1935 bp, Morganella morganii
atgtcctggtatccgtcccgcatttcaacccgcctgactatcgggggcatcctgctcctggccgtcactactgccattatcattgttgttatgctgtggcggggtcagccccgcgttgtggaaattaatactgcattaattgaagaaaccggacgcggcctgacatcccgggtcagtacaattttatctcagacggacgggaaaacggtcagtctggcgcgtctggcggaagtgctgcccaatgatgaggcgctgtaccgctatatcccgcccaatctgattgaaagcaacagcctgatcaccggcggcgggatctggccggagccggggacattcactccgggaatagagaaacgcagctttttctgggcacggaatccggccggggaactggttttttctgatgagtacaatacagagggtgccggtaattatcacaatgaaagctggtaccggaatgcccgtgagcaatccacggaaagctgtttgtggtctgatgtttaccgcgatgccatttctggtgtgaatatggtgacctgcagtgtgccgtacaaaaccgacggaaaatttgccggtgtcgcgacaacagatatccgtctggataatatcgccgctattatgcagcaatacggcaacagcaccggcggctatgcctttgtgacagaccggcaggggcagctgatctattttccgggtgatgacaataaacaattcaaaacctttgatgagctggccgcgcagtcagcctggctggcaccggtggcggcaagcctgaagcaaccccattctgagcaatccgctatcgacaatatccgtattgataatgacgggcagctgaacaccgcttcacaggtgatgctgttcccgatggccgataccgggtgggttatcggccttgtcacgccggaaagccggatcaccgggctggcaaaagtaatgatgcaggatgtgctggaagccctgctgccgattatggcactgctgttactgggctcctggctggttgtccgccgtctgatcacccgcctcgatgagacccgtaaggccctcgatgatatagcacacggggaaggcgacctgacacggcggatggaagtgcgcggtgccgatgaaatatccgctatctcacaggcatttaatctgtttgccgataaaatatcatccatgttgctcacagtacgcagcagcagttctgttgtggccggaaataccgttaatcttgctgataataataacgagttatccgcacgggtcacacagcaggcagcggcgctggagcaaagtgcttccgcgatggaagaactgaacgcaacggtgcgtcagaacagtgaaaatacccatcaggccgatgaactggcggaaaccaccgcacaaacagcaagccgctgcggggatatgatgcgtgatgtgatttcgacaatgaacagcgttagtacatcatccggacgaatggttgaaatcgtgtcagtgatcgacagtattgcattccagaccaatattctggcactgaatgccgccgtcgaggccgcgcgtgccggtgattccgggcgaggctttgcagtggtggcgactgaagtcagatcactggctcagcgcagtgcacaggcagcacaggagattaaggcgctgattgatgagtctgtgcagaatgtcaaaaccggcagtaatcaggtgcatgaagccggagaaacgctggcagatctggtgatggatgtgttgcaggtaagacagctgatgagtgatatccgcgttgccggtgaggagcagagcaaagggctggccgaggttacgatggctgtctcagagatggataccacggtacagcagaatgccacattaattgatgatgctgcttcacggacgcaaatcctgcgaagagaagccgaacagctttcgcagatggtatcggcctttaaattaccggaaccgcgttaa

SEQ ID NO: 286996 - DNA, 1401 bp, Morganella morganii
atgccaattatcaaagacgccatatctgatgtactcggcattgagccggactggaattggtctgaacacctgcaacaggcttcattccgtggtgtgccgttcggtgtgatcagcggtgaaagtgttttcggccgccgccaggctattcacgaatatgcctaccgtgatcagtcctggatagaggatattgggcgcagtaaccggcggatcaccataaagggattcctgattcaggacagtctcgtatatgacgcaccggatgttatcacccagcgcgacaatctggtggccgcttgtgaagttggtgagtccggaacgctggttcacccgacactcggggaaatgaccgtcagtgtgactgaaagcggcctgcgggtgtcagaaaatgcagaaagcggcagggtgtttgaatttgagctggtggtgatcgagtccggcctgaaagtgttcgccatcaccggcagtgaaaaaaccggtgaactgacattcgggcagtggctgaaagaagcagcacataccaccctgaaaacgatcgccatgattaaaggcgaagtccggtcagtcacgcagatgatgaagacgctgaaacagactgcggatttctggataaatatggtcagtagttcagttgatgaggttactaatctcagtaactcactgaacagcgtattcggcagcaataaatacggtcgctatcagaaaggcagcgcgggcggggcggtgtccggtgcgaccggcaagcgcatacatcagggtgatgctgatgaccgtgaaattatcgataaaacgctgaatcaggccattattgaccggcaacggctggataaaacactcagcgcggtcagtgatgctgaaacccccgaagatgtgatcgcacagatacagcaggtgtttgtcatcctgataacaatggacggtgacaccggccagaagatgcagatcctgaatacattatcccgtttccgtaatccggaatatcagcagacggagcaggataagagaattgccgcactgactgaaatgatgctggttgtgctggctgcatcggcactttccgtggtggccggtcagtctgacccgacaaacagcactgagtccgccggatatcagcgggaggtctgtgaatcccttgatgatgccatgactatcaccggggatctggcgctggatgacatctatcttaccctcctgaaccggcgcgaacaggttgtcattttcttcaccgataaaggctccgaacgcggccgcctgtcgtcttacgctctgccgtcggtgctgccgtctctcaatgtggctaaccgcctgtatcaggatgcaacccgcagcgacgagctggtgatggagattcagccccggcacccggcgtttatgccggtcagatttaaggccctgaaaaaatga

SEQ ID NO: 286997 - DNA, 1071 bp, Morganella morganii
atgacggaagagacaaaaaaaaccgaagaattatccctggtgataaacggcaggcgtatttccggctgggacagtgtccgggttacccgtggtattgagcggctgccgaacgattttgaaatcagcctgatggactactacccggcaacggatgaaaaacagctgtttaaaccgggtgacccctgtgaggtgttcctcggtcaggaccgggttatcaccggttatatcgatacctggaacgggcagattaataaaaatcagcatcagataagcgtgtcaggccggggtaagtgtcaggatctggtggactgctccgccaaatggccgaataacgtgatcagccagtccaacgccctgcaaatcgcacagaaactggcgcagtggtatggaatagaagtgacgagcaccattcctgatagtgaattacagattgttccgcaattcactctgaactggggagaagtttgccagcaggtgatcgaacgctgctgccggtactctgcactgctgtattacgaacagccggacggaaacctgctgctgacccgcgtcagtgacaaagtggcagccagcggtgtggagcagggtaaaaatatcgaaagtgctgatttctcggattctatggcagagcgctattccgattataccggtgtgtcgctgtctgttaccccgtttgccggggatgtgtcagcggtacagaacgcctcggcgcgggatccggaggccgggaaaatgcggtaccggaattacatcaccatcatcgaaagcaccctgatcaccgctaaacgggagcaggagagtatcgactgggaaatgaaccgccgttacgggcgctcaaaaatcctgagtgtgatggtcgacagctggcgggatgcctccgggaaactgtgggagccaaatacgctgatcccgatagatattccggtgcttggggtgacggataaattctggacgttgtcggatgtgacctacctgcgggatgccggcgggacacgtgcgacattacagctgatgccgccggaagccttcattgctgaaccgtatgaattttaccaggtaataagggtgtga

SEQ ID NO: 286998 - DNA, 168 bp, Morganella morganii; identical to SEQ ID NO: 286976

SEQ ID NO: 286999 - DNA, 186 bp, Morganella morganii; identical to SEQ ID NO: 286990

SEQ ID NO: 287000 - DNA, 267 bp, Morganella morganii
atgaagctggcagaagacggcacccgttttgcaccggggtctgcaatcgtcacgccgaatatcatccgggcagaactgatcgcgcaatatggtttcctggaatttaacggtcatgtgcaggacgcgaaagggtttgccaaaggcctgaaagtcgagcgcaacagccagaacccgaatcgtgttgatgtcctgtggaccggcaccctcattaaccagctgcgcgtgtttgcgctgcttaaccagttccgcctgatgccgggtaactaa

SEQ ID NO: 287001 - DNA, 360 bp, Morganella morganii
gtggtcatcggcagcaatcacccaggttcccggcacaccggactctcaccgggtgaaagcgtgatgtacaacctgtggggtatgtacatccacatgacagaggacggcattgtgattgaggccaaagataaagatgtgaccatcaataacgccgataaggtgacgatcaatgccaaaacagaagtggtgttgaatacgccgatcctgaaagtgtccggtgatgtgattgataactacgaaagtaactcgtccacactgaaaatgctgcgggacagttataacaagcacgaccacgatgtggaaaatgtggaaccgggcagtgccaccaaaaccagtaatccgattaaggagaaagtctga

SEQ ID NO: 287002 - DNA, 1032 bp, Morganella morganii
atgaaaatttatgccccggttctgttgatatctctgtgttattcaccggtgtcctcagcaggtcgtgatttgctgatcaatatttcgccgattgtttatgcagcatccgaaaatgcagtaaatatcggtggatccctgaccagcgggtgggatgcacaaaagaatcagcctatgttttgttcattcgctccggggatagataaagagacaatatctgcggttcagacagcgagcaattataaaacaacctttcagtcagtaacgtatgatgtttttaataccggacaaccgggaatcggctggattatgggggcgaaagacggcggatcagccggggactggactccgcttctggcaacaggagaaactcaggtttttccgtttccaggcagtattcccagttatccgcaaccgggggctaatatccggcttgcttatatacggatcccgggggggcttaatgccggtcagttcatactgccgggtcaggagattgcaaaggtaaaatgctataagaatggtattctgagagattcggcaactatccgtaccgcaccggtgacaatgaccattaaggcccgctcctgccgcatacagaccggtgatcagaccgtgcagatgggcacattaacccggcaggcattttcagggcttgcggtcggtcagaatatcgaaccgggtaattccgcaaccatgaacttaagctgtgataaagacgttattccgtttgtcactatcagtgataataataatcccgctaatgtgagtgatactatttccttatcatcaccaacggcaacgaccaccgcaaaaggggtggcgtatcaggccttttataataatcagcgtcagtctctgggaccgaaaagtccggataaaggaaccaaaaatcagttccgggtcgggcagataacaatggcggataatcaggctgtgccggttgctctgcagtttaaatatctgaaaacaagtaataccgtgactgccggtgatgcaaatgcctctgtcactttaacgttctcttatcagtaa

SEQ ID NO: 287003 - DNA, 276 bp, Morganella morganii
atgaaaaatcaggcgcgttaccagataatgaaaataatattcagtctgaaaagaagcaatcagctatatcagctgagtttcaatgggtttccggcaaaaattattcgtctgctaattggactgttatggtcatttcagggtcagttgacgccgcaggatctggcgaaagtgccggacgggaagtttaccccggtagcgaaactgggattgatatacagaaaaaagcacttcccgggggaagtgcttttaccgctgataaaaattaatttttcctga

SEQ ID NO: 287004 - DNA, 855 bp, Morganella morganii
atgagaaaaacagttaccctgctggcgctctgcctgccgctgtccgcagcaatggcagacgacagcagctgtacggacgcacagcgtcagctgaaccgggaaaatacctatattatcaccggcctgtatctgaacgggccggtcaaatccgttgttaccacacgcaataacaaacaggactcttacggcagcagcgaaaccaccatcacattgtcaccgtgcggtgctatgacgcagtatgagcagcagatgtactatctgataagcccggatgtttaccggaaggaacagaataaaactgatccggataatccgcttcacctgaccggcacatcagaatacaagtttcacgataaacaccttaattcgcagatggacatcacccggacaaaaaatgataaagggcagatttccggctataccatgctgtataagaccgaaggtgacaataaggacgaggataataaagaggaaactgttactgcccgtttcaactgggaaaacggccggctcagcagcatggaagaagtacaaactgacggaaaaacaacagacggtatgttttaccactatgattcacaaggccgtctgtcacaaatcacccgcaataccggccgttcaggaacccgctttacctacactgatcagccgtggccgtcagtttcccggtcatctgtttacgatgatgaaaacttacgcgacgtgtataccacccgttgtgagcaatgggatcctcacggtaactgtcttctgcaaaaacagtacaggaccgagcattacaatggttacttcagagacgataacccggaaacggccctgaaggccatccagcgttaccgttatgagtattactga

SEQ ID NO: 287005 - DNA, 291 bp, Morganella morganii
atgaaagttacaaatatcaatggtagtggtaataataaatgcaaatgcgatagctggattaagcattgggaaaaatttagcagtaaaaaagctgataagtgttgtgtgaaagggtgttcatctgctgcgacagatggcgcacatgttcagaagtccggcggtactaatagttggtatatcgtacctttttgccacacacataatacatctcctaaaaatacagttcttgagttaaaggatagtacgcagtttgtatcagctaatgtttctgaaacatgtggtaaaaattag

SEQ ID NO: 287006 - DNA, 1014 bp, Morganella morganii
atgaatataaaattactggcggcactggccgctctgggaatgtccggtaatgcgctggcttataacgaatgtgaagtaaataatatacctaattatcaacctgagacaataactgcaaaagcatcagaaccaatcagattacgggccgatgctacgccaagtacaacaacgccgattggacgtgctattcctgtatctggcagttctgaactaagaattacctgtaaaggtgacaaagttcatgtacgtcgcccacttattggtacttatgttccttatcctggctttgatgatatgtacaaaacacaaatagatggtattggcgtaaaatttattactgctcgtggtacaagtgatgatggacttccacttcccagaccagaaacacttgcaagggatacgccgggggcaacattaatacatatgacagtacctacagagcgctttattgcatatttttataagttagataataacgtaaaattaaatacacgctctccggatataaacttactagcacaaggtagttcaatcgggcagttttatatagaaaatatgcttactgcaaactatataatggataatgtttacattataggcactcctgtatgcacagttgataaaccacttccggtcgactttaataccgtcaatgctgccgatatccgtaggggagtggtaaggccgcttcaattcggtatagtatgtaaaacagactatggtaattatgatgtcactgcaagaatcaaaggaactaaaattactggtgacgggaaatatataaaagtcgatgatagtaaagacaatgatgaatccttacttattgaaatcactgatggtaaagataaccctgttatggttgatgactcaactgtattacgtattgacaatataaaaagtggacaaaaagccagcttcgggtggactgcaaaactcaaaaagcaggatggaaaaccatatccggcacaaggagaattcaaagcatccgctattattactctggaaattaaataa

SEQ ID NO: 287007 - DNA, 1347 bp, Morganella morganii
atgagaaatacgatttttgtcagtatagccagttaccgggatgcagaattaatcccgacattgaaggatatggtcgcaagttccgcctgccctgaaaaattatttatttctgtttgctggcaggatgaaaaacgtgatttttctgtttttactgatatgggtgtaaccaaaaaagaatattctgaaagtaccccggatgttattcgtcttaattatcatggtgcaacgataaatattcattttgtacaatattatcaggctaaaggtgcctgctgggccagacactgttgtgaacagtactatactgatcaagattactttcttcagatagattcacattgtcggtttaataaaaactgggatagtgagcttattgattactatcagtttctgaaaaatgatttcagaaagccggttatatccggttatccgcctggttatatcccggcaacagacgataaagaagaagaccgtcagcaaattgttgcacgaatggtatttaatcaatttaatgatggtgatatagcttcatttagtccggttgcacttcttgatgaaaaacagcatacccgtggttgttttctggccggtggttttacgttttctgccggtcagtttgtacttgatgttcctaatgacccccaaatattttttctgggagaagaaatatcaatgtccgcaagagcatttactcacggctatgatgttatctaccctaataaaatatttctttatcatttttactgtcgtgaaggttgtgacagaatctggggcgatcatactccggagaaaaaagaagtaaaagtcgttgaaaaaagttgggtagaacgggataaaatgtctaaaaaccgggttcgtcaggtattaggtattccacagtctgatgatattgatctcgggaaatattgtttaggcacagaacggacactggaagagtatgaatatttaaccggtatattttttagtgaacaattggtttccagagagcttctcagtcatacaaaaccaacttattttgaacatattcctgagtcacgggaaacatggatttcagaattatacagcgattactatcagacgataaaaattaacaaatcagaattaactatcaacaatgaaaatatagattattggtcattaggtatatttaccgaggacaatcaacttatcgcaatgcaacgtctgactggtgaacaattagcaacacaggagtcggagaatgataaaaacatctaccagtttgaaattaaactgaaagagaaaacgagtcttatccctaaaaaactcaggctggctcccttctttaccgactgtggctggggagaaacggtggaaaaagtatggtaa

SEQ ID NO: 287008 - DNA, 654 bp, Morganella morganii
atggttaagattaattggggttttgttgataaagttgtctatatcaatttggcggaaagaactgaccgcaaggaaagcattgaacttcagctgaaaaagataggtgtgccacagaataaaatcatacgttttgatgccgtgagaaatgataatgggtcattggggtgtacattatctcatattggtgtcatgacaatggcggaagataataactgggaaaatgtgcttgttcttgaagatgatatgatttttaatgatgatgatgaatcattggatagaataaattattttttcagtagtctgatatgctcatcatgggatgcgggattattatcaggcagttatttcagactaaaccaagagcacggatgtttttatcggctttatttttcatatttaacaaatagttatatggttaatcagcattattacagcaaattacgaagtgtattttttttatcagcaaaagaactgagtgcaggaatatccagagctaaatgttgcctggatacactctggaatacgttaatggaaaaagataactggtatgctatttatccgtgcgtgggttatcagctggttgataagagtgatattgaacatacagtaacagatcggacaacagcatttacccggacactggatgaaatgtag

SEQ ID NO: 287009 - DNA, 144 bp, Morganella morganii
atggctgtttttccgataagtttctcatcttatttattggtgttttggttaagtattttatttagagactatgcttttattcttttctcgtattttcaggtaatcatggcttttattgttttctttgatttttatacgaattaa

SEQ ID NO: 287010 - DNA, 216 bp, Morganella morganii
atgcataaagctgctgtttcactgatttgtttggtcgtgctgacaggatgttcaaccaggccggaggtcgggcacaacaaaacggattggccgcaaccccataaaaattcacgtacagcggagcagaaaagggctgacagggccccggtgcatgaacagcagcgggctgttatgagaggggagcgccctgattatgaggtatttgaccgctactga

SEQ ID NO: 287011 - DNA, 837 bp, Morganella morganii
ttggctctgaaaaatcgacatcccctgaaacacttactttatgcggtgaaactggcaaaaagtatgttttattatcatgtcagcgcactgaagaaacctgttgcttacgggaaagaactcgcacggatagagaccatttatcatgaacacaaaggtcgctatggctacagacgcatccacttaacgctgaaaaatgaagggattacacttaatcataaaacagtccagcgcctgatgggacaactgaatctgaaatcgacagtcagacctaagaagtatcgttcgtatcgtggtgaggcaggtaaaacagtatcagaccatctcaaaagagattttacggcttcaaagccggatgaaaaatgggtaacggatgtcactgaatttaaggtgaacgggcagagagtctatctgtcgccgattattgatttgtttaatcaggaagttatctcctatagggtagcgaaaaatgcacggctgacactggttacagaaatgctggaaagtgggttatcccggttgacagaaacacaaaagctgctgttacacagtgaccagggctggcaataccggagccgtcagtaccagaaacagcttgccgacagagggattaggcagagcatgtcaaggaaagggaactgcctggataacgcggttgcagagaatttttttggtctgttaaaatcagaaatgtatcatgggcatcattttcaggatgccgataaactgattgaaaagattgatgaatatatagagtattacaataccaaacggattaaagccaaattaaaaggcctgactccggttcaatatcgaaatcaggccttacaagccgcttaa

SEQ ID NO: 287012 - DNA, 1674 bp, Morganella morganii
atgtggatcatgaccctcaaccaggacagccgtatcttccagaaacaatctgtgccggaggttctcgcaaccctgctggatgaagcgcatgtcaaaaatgagctgaaattttatcaggacgaactgcatcagaagagggattacatcactcagaaacgcgaatcggcctttgatttctggtgccgtctggcctttgaggaaggcattaacttctggttcgaagaaggtccgaaactgttttacagcgacaaccatctcggcatgaccgccggcatcaatctgacctataacccgcaggcggataccgatatcagcgacagcaccgcgttctcctggcgctacgccgaacagctgtgcagcgatgtcattatccagaaagattacaacccggatcgcccgtcgtatccgtttaaacacgaggttaccggcgacgttcacaaacaacaccctgtctatgaaagttatggtcgctaccacgacgatgagaccggtaaaccattcacgcagctgcgctatgagcagtcacagaaccagcgccagaccggtaccgccggtactaactgctttgcgctgatgccgggtaaaatcttctccctgaaaaatcatccgtctgacagcatgaataaagcctggcaggtgattacggtcaaccatcacggtatccagccgctggcggataatggtggcggagaaggaaccaaattcagtaataccgttcagtttatccccggtacacaggaatggcggccgccgtaccgcttccgtccgcaggcagacggtgatgagctggcaacgattgtcgggccggacggggaagagatttacaccaacgaacagggtgcagtgaaggtgtatttccattgggatcgctacggtaacgcggatcacagcgcctcctgctgggtgcgtgtggcacacggctggaacggagacggtttcgggtttatgtcgatcccgcgtatcggtcaggaagtgattgtctcgtatctcagcggcgacatagacaggccgattattaccggctgtacctataatggacgcaataatccgccgctgaacctgccgaaagagaaaacccgcactactttccgcacgcggactcataaaggtgacggatttaacgagctgcgttttgaggatttagccggggaagaagaaatttatattcatgcccagaaagacatgaatgcgcatattgaacacgatgccacctggcatatacagcatgatttaaagcggcggattgataacaacagtcacaccgaactgaccggtgatgagcatgttatcatcaaaggctcgcagaaacaccagaccagcggggatgtctcgctgcatatcaaaggggaacaacacacccgcgcggacaaaaacctggtgacggaaagcgggcagcagacccatcacctcagtgacggaaaaattatcatcgaagccggaacagagatcaccctcaaagtcggcgacagttttgtccgcatcacgcccggcgcgattttcacctccggcaacctgaatatcggtgacagcggtccgggcaacggtgttccggtcagactgatgccgccggagggggtaccaccggccccggaaccgtatccggtgaaaaaatactgtgcggtggcggcgcagcattccggcagcatgctgattaaaccggcggaggaagagtga

SEQ ID NO: 287013 - DNA, 774 bp, Morganella morganii
atgcgcggattatttgttccgctgctattgttgccggtggttctcaccggctgcgcttacagtacgaccttatccccgcccgcagacagccggaatattcatttttctgctactgttcctgttgatttggaatctctgccgttatcggccatgtaccgctcaaaaaaatgtactcgcacccgaacaagcggcagcggcaaatcgtatgaagttccggggtttaacagtaccaaatatccgctgtccatcacagcaaccggtgatgtcaccacagatattcccgttaatggtggcggatattgtgactggcaactcagtaatattaaatttgaagtcagattgaaaaatccacaggctatagacccggagattatagataatttcggatttgaaacagtatttattaccgataataatgctccccaggcatttaacggcggatatataccttataaagggaatttcaatgaaactattttattatttccatttatgcgtgaattttttcttggtggatataaaaaatcatttttaatagtggctgatcagacctcaaaaacatatcgattatccggaacagataatattcatcttatcgtaaattatgaaaaagatatgatgagttattggaccgatattaaggaaaaaaaagaaggaaacagaacagttatcacttatcctgatggcgaagaagaacgaaaatccaaaagctatcctgactataaaaaactattaaaaatctatgaagagcgaaaaaatcatgttcagcgttaa

SEQ ID NO: 287014 - DNA, 240 bp, Morganella morganii
atggcgcgttaccataaaactagttcagttactaaaagcaactatccaatcaaatatgagaaggtttggaaaatcggtgaaaaacctgaatatcccggtatttatgaatgtcaggaatgtggctttgaggacgtcattaaccgtgattgcgataagcttccaccatgtgccaactgtaatgatggaaaaagtaaaactaatacctggcaattattagttttagcacaaagtgtgaattaa

SEQ ID NO: 287015 - DNA, 162 bp, Morganella morganii
atgaaaaatatatcatttgttggttttgatataaatgataaaggtatggacataagtaaaacaaaaataaacaaagagctatgtataaaagatttctttgccgtttctgttatttttttatcaaaatcgacatttgcagaagcacataattttctgaactga

SEQ ID NO: 287016 - DNA, 456 bp, Morganella morganii
atgaggttgccattaatatttgctcccggaattaatggtatgggaggggccgtttttggtgtggcactcgttgctcatggtgcaaataatatatatgagagcattcgtttttttaccggtactgaaaattcagttggttacgtaagggatttctatcggggaacatctaaggtctttgggggtgatgatctgttaggtgataaaatctatgcatcagtagatataactctttcactaaggggactacttggaaaattttccgaaccaagtaaaaaatcattaatcgcaacaagtaaggttggaccatttacatttaagaattatgatagcgcgcatacaggaaaaatatttaaagctgtaaataatgattttataacaggattacaaaaagcatcaaaattagccatttccatagaggtgattaatgatgttattagttttaatgctatttattag

SEQ ID NO: 287017 - DNA, 249 bp, Morganella morganii
atgcagagcgtaaccgggaataacggaaaaattatccctaacaccataatgggtgatgataattcacggacagataaaggaattctggtgattgatgctcagggtaccagtaaaaccggcaatgatgcattctcgctgtcaccggactcggatggttacagactgggagtcggtacaattgccgccggtgcatacgattatactctggccaaagggggaataacggcgacgcagaatcatggtatctga

SEQ ID NO: 287018 - DNA, 1434 bp, Morganella morganii
atggatagtgaaagaagcacatataataaccctaagttattaggtgaagaaggtgaggccggtgatatctattattgtcaggagacaggtttttatttcaaaataaaacatgatggtaatccccgtgaaatgaattggtgttttccgacggaggctgaaggaaataactattgggattttgcaggtaatttcccgggtacgatgacagagccaaaagaatggtcagagtatggtactgccgggtgtatttattataaacccgattatggctatttacgcttaaaaaaatcaggtaacccatctgataataaatggtattttcctgaaaatggatgttcaaatgaatggtgggactttatcagctggagagcaggaaccccggctgatcctaaaacctggcatgatgaagggagtgcgggtgattattattttcatttagaggatccatgttattacgttcttaaaagtaacggtaaaccatctgatcataattggtattttccaactgatggcaaagataatacgcattggcgtattatgggtaaggcaaccaagaatcgctggctgaaatttattgatggtaaattaccgattaacctgatatccctgccgggaactcatgattcagctacaggtacatacagtgaaggattagttgatcatgggatggtaaaaacccaggatgattcggtttatgagcaacttaattcgggtatccggtttattgatgcacgctgccgccacacaagtaacgcatttgcgatgcatcacggagaagtatatctggaaaaaatgtttggtgatattctgaatgaatgcaaacgttttttgcgggaaaatccgagtgaatttattcttatgtcagttaaacgtgaacatacagaagcagattgcacccggagttttgatgaaacgtttcaacagtcatattatgatccttattggtggtttaccgaagatcgctttcctctgctggaggaagtcagaggaaaaattgttcttttcagccgtttcggtgggcctctgggtataaaaacccatggctggaaagataatgcaacatttgatatgggcggacgaatacatgtgcaggatgaatatcagcagagggatgaggccaaaaaatggcatgcaataagagctgcatggcattttgccgctgacagaggaagaactgactggatgacacttaattttaccagtatctcggctgatttttggtcacctacaagtataagagatttcgcagtagataaaaatccggagcttgggagatacatagatgggggctatgagcacagtggtattatcgtttctgatttccatcatatcgggtggatttcctcaagcgtaattatgactaattttggtaatctgcgctccctctcgaggctggtagttctgtttcatctgtggacagatccgtattcttga

SEQ ID NO: 287019 - DNA, 327 bp, Morganella morganii
atgctgcacaatgtgccggaagatgaaacgcccggtcagtttgaaaaacggctgaaggtatcgaaactgatagccggtgatcgccataccttacgggggatcttacagtcactggcattaaccggtgtgattccgaatcagttcctgacactgtctctcagtcagtggactgacttcggtgatattgctatcgcagagaatcagctgaagaatacaaaaggccgctctgatatggagatgccctgggctggctggaaaggtaatctcagcattgatgctgaaaaagcagcagagtattttgatgactatctggaatccgggtcataa

SEQ ID NO: 287020 - DNA, 1173 bp, Morganella morganii
atgaaaaaaaccaaacactatcaggtctacaaaacagaagatatgaacatccaccgtgagatacaagaaccatttaattacaatgcaataagccggcctgaaataacattattcgtcgctcctcagggtagtgaaatctatgatattaatggagaacttgtcagcaactccacatttggtcatactttcattggtataaagggaattaatcccgttacaaaacagtatgatattattaccgttggtttaagtaccggagaaagccttaaaatagccagtgataacttatcattcaatgatcacatttattatcgtaatgcgtccacgctatctataacgtctgataattttaaattccataatgacttcaataatctttttactgtgctgcataattataagacaggaaaaagtaaaccaccgaactataacttactcactaataactgtggtcaatttgtagatgacttattaactgacagtaatatagatggaatcaatgtttctttttttcctgataacttgtatgaaaacctggaaaatgcggctgatagctactgtactccactcattattgatctggacagaaatggtgttatcacactatctgataataccggaatatatttcgatttaaatggtaatggcgaatctgtacaaacaggctgggttcatcccggtgatggcttactggcattagatcgtaataatgatggtaatataaataatggtacagagttatttggtgaatacactggttatatcaataataaagatggattctcatcgctttccgttttagatagtaataatgatcatctgataaaccaggatgatattgcatggtccgcattgttagtctggcaggatgtaaattcagacggcatcagtcagtcggatgaactgctttctctggagagtataggtatagtatctgttgaattaacgacacggccttcctgtttttatgatgataatggtaacttccataaattaacgtctgatattaactggcataatggtgaaaaaacagaaattacagatgttttatttcatatatacaaccaagaaaaaacatcatcacctgaacatatttatactacagattttgttgctgataaaaataatgaaaattatcatgatataatatcaacacagtatttaatcggatga

SEQ ID NO: 287021 - DNA, 426 bp, Morganella morganii
atgtcgggatggacaggcgaattatatggattttatacgaacaaacctattgtggacgtttttaatattttaaaaaaagaaatccataagataggttatcagtttgaatatcattcatacaatgatgaggaatctttatttttttataaggataatgatatgctggctcatcatgaagaaattggttataaccttgatattgataatcaaggatgtttttgtattgaagctaaaatagctagcttacatggtatcgcgactttatttgaatttgaatctcaatcaaactttgagccatatgatataaacttatttttagatagaattttttattatgttttagttctacctgatttcattgataaatctacattttgcttagatatacataatctttttgttagttatctcaaagaaataccttga

SEQ ID NO: 287022 - DNA, 675 bp, Morganella morganii
gtgagtaaagtcacacaggatgaccgggatttcgcctactgtttattcagaaaaatacattccggcggccatattacccagtcagtatgctatgacaacacagataccgttattaccgactttctgaactttgattattttgatatctgctgtttaatgctgaaaaaagagtttttggatacgaataatttattttttgattcatccatggttgtgggtgaagatgttttatttatcctggaatgtctgaacaaaggcgccttttcctatattaaagagtatttatacaattatatttatcacagtgaatcactgatgaataaaaaatggaagaaggcggattacatcagtgacctggatgcctggaaaaaaattctttcttacattgctgagacatataataaaccggataaatcatctgttttcagtaaagtccgcgctaaagtattaagcctgcagattcagtttatgtggaacatgctggccactggcctttacccggatttaaagtcttatatcaaagacttcagctaccataaatctgattttgcattaatcagaaaagcgggaaaaaataaattccgtctgaatattgtattatccggtaatgttttcgtgtggtgtatagcacgcagattgctgacaaagaaaaaaaatatcatccctgccggttag

SEQ ID NO: 287023 - DNA, 147 bp, Morganella morganii
atgctgacactgatactgagcacttccctgtttacatatgatttctttcctcctaaaggcccgaatctgataccgtcaccacagccgggagaagaattgattatatacagagaacgtgcctgctcgctgtctaatccattttgctga

SEQ ID NO: 287024 - DNA, 1308 bp, Morganella morganii
atgtttgcagacggacgcacccggattaccctgctggctgtgatattcataacgtcactgatgctgatgttttcagattcgtttttttccgcaccggacagaaaacgcacccgcagttatcagccggaaacagaaatcgtaaaattatcctcactggtcatcagttcttttcagaacggcgtgatgataaccggtgccagagatgctatgcgggtcgatctggagagctgcgaccgggaaacccgcacgtgccgccacagtaaaaatattggttttgacccggcaaaggacacggatatcccattgctgaacctgaaaatttccccggataaaaaagcgatcagcgattacctggaaaaacagacctatgaactgagacgcagtgaagtttacggcagcaggccactggtgccggtcacctacataatgacagagcaggacggggatttacgggtcagtgccgcgtttatggggcgggcagaaagtcagacctgcgataagcagggccggtgtctgattctgtttcacgattacgggtcgtataaaaagtatgttttctattcaggggacggtggccggaactggcggtggttatcgcagtggcagatgccggaagtcgcgggtgatgcaaagattatcgccgttactgcgccgggcagcggacttatggttcagaacaatacactgtatcagacgcgtgattacggacaaaactggcgtctgttattcagtatggatcaccgcaaaaaaagaactactgatcgttacggataccggtatgtcagcctgaatagtattggctggcactacaacggcaacggactggttgcggcatggatgccggatgaaaaaaacgatccggaaaatgttgcactggtctgctttaatacccggacactgaaaacggaatctgatcagctcatccccggagagattggtgcgcttgacagtacaaccggcggggaactttatttcacgctgacggaaaaaaaacgcaagcgtcagagtgtaaatcacctgaactgtaacggtgattactcaccggtactggaaagcggcggcaggcatatttccggtttatacgcaggcagtgatttactgatggccgttttatattcagaaacgctgatctcggatgacggtggcctcaactgggatgccggcgcagcactgatgaaagactacggggaaactgtactgtttgataaatggcataaccgcctgttttattttccggacagcaactacagcaaccaccggaaaggaaaccgtgacggtattgagtatgaaacctcaccggtgaaatga

SEQ ID NO: 287025 - DNA, 252 bp, Morganella morganii
atgatgagtttattcaaccggttttttaatagcggctccggttccggtcacggaaaccgcggcggcggtggtcatggcagcaaacacggtaataccggttacaacaagcatggccgtgataataatggttacccggagcagatcagcagggaagcaccgcagaatatcagcggatattgtcagaagtgcggcaccggccatccgccggacagccgtttctgcggccggtgcggtaatacactcaatccgtaa

SEQ ID NO: 287026 - DNA, 567 bp, Morganella morganii
atgaaaaaatctttaattggtaaatcattaatttccgtattacttgcaggcagcgcaatgagtgtatctgcggttgagcagacaggtacaatttcctttaaaggctttatttataatgccacctgttcaattattcttaatgatacgaactcccctaatgctgatgttttaatgggccgttatccgacgagtgcttttactgaaaccggtgatgaagttggcggcgaagacggacatggttctttaagtatctcattactggattgtccggaaaaaggcaaagtgacattacagcttcacggaaagccaaaagatggccttaacgctattctggaactggataacccgacatcaccaaataccgctaagaatatcggtattgtcctctatgatcgtgatgatatgaatactgatattatcattaatggttctgtcaccaaagaatatgaagtttcctccagtaccgaatggcatgctgattacgtagcaaaatatatcagcaccgctgatgacgttgaagccggccaggcagatgcaacgctgaattatacactctcgtataattaa

SEQ ID NO: 287027 - DNA, 4581 bp, Morganella morganii
atgcctcgtaatgtaaaacagattttaaatcatctcgcggagcagaaacgggatgcgtatgttgattacttcactaattatgtagtgggtaaaaatgaaaatacctcgatgctgggaattactgatgctgatgatctgtatgattattttttaacagatgtaaaaacgagtgctgattttgaaaccagctatgtttcggatgcattagcgagtattcagcaatatatcagtaatattattaatcaaaaagagcctggttattcaggtgagtttagtgaggatattcagcagtggtggtcaggttatttcgggcatatttcattgtggaaagcatatcagaaaatagaagattacccggaagactataatttacccgattatgttacggataaaactgaactgttcagtaattttgcggcagacctgggtagtgacagtctgaacgatgccggaatacaaacggctttccttaaatatctgcatggttatgaagcagttaatgctatcagcgttatctccggttatattgattatcccggagaacgtagtgataaggatacatttaaaggacatggttttctgaattctgactattattttatcggtaaaaacaattcctcacccgctggcttttattggcgtgaagcaaatataagagcagataaatcatcagcgtatatctctccccgcgcatggcaggagtggcagccgctggttatcactgaaaatgcacaagatattttacaaatgcggattgtcaaagtaagtggttgtctttttattgtttacctggttggtaaggaagaaataattccggatgaagagcaaccagcggcaggaagcagagctgaaaataaaaagcaatacaaggttacacttaagttaagccgtatggggttggatgggaaatgggatattcctgaacagttatatgaaaaaatctacgtaagtaagcccgaaataaaaaccaaagataaatcagaaccgtttaaattaatatccgttgcatttactcaggatgagcaacgaaatgattctctggttattgcatggctggataatgagagtcaaggaaaaaatattgttttttccaatgtgctgaacgtaatcaggcagaaatcaactgatgatagctcgaatattcttgggaataaatggcaggaagagttagtgtcacgattttttttcaaggaaaatgtagaaatacaaaatatctgtcagcatcgtatctttggtgttaaaaatgatataagcagtatcagtaatgttggcgctgatcagtatttatcattggaagctttctattctatcagaaaggaaaatcatcagttacgggtcagaggggtatgtcatcgttcagctaagatacctgatcttctttcacttaacctccaggcaacgatcggtaaatggcgtaacgggagaattattgtcagcggagaccgaaacaatattactgtcagagcagaggcaaccgaaggggctgaatatttagcactatccctgtctggtaaaaatgttgttgtgtttaataagggggattttacacagcataacggctggttttcagcagagaaaatattgtcactttctcaggaacaatgtgaccttattgcagtaaaaaattacaaagaaatacgcagcggtgccggtttttcctatcagacaacgtcagggggatctgtcaatttattggcacatattaaaaaccgtatcagtacagtgatgcaacccgttattgtccctgctgagctatcgattattgatggcagccttcagggtcttcaaaaagaagactggaagggcgatttgatctatcagaagggcaatcatacaccgtggtgtaccttcagctggagtaatagtacaagggaagaggataataacattcactttaaattcggattgaaaaatgaaggcgtaaaaggtgaatttttaattaaaataagtgggttatcggaagatattcctgttattgaaaccttcggtgaacatcagcagtttttgactttcaatcagtctggtgcagcactgaaaaatgtacgtcttaattctgttcaggttcgtgatcttatctatcgtgctcaaatcggggtaagacatatttttgactgggacgcacaaattacacaagaaccgggatatgatgataataatacagagatactcgacttatacggagctaacagccgttatttatgggagttatttttttatttaccttatacagtggcaagccgtttttcacagaaccgtctttattaccaggctcgtcagtggttgcattatattttttcaccttatgacggacaccgtttgtcagtaaaagatgatagcgaattattaccgcctccttattggaactgccgtatattaactcaggctgatctgaaatatcagaataacgatagtgcattacctgatccttacatgatatccgaggattcaccttctcattatcgtaaatcagtctatttaatgtatatcgacacgcttatttctgaggctgacttaaattaccgtcagctcagtcgtgacagtattacccgggcatgggggttttatcatcaggctcagggaatgctgggctatataccgaaagagcgcagtttaccaaaatggcagccttgcacagtgagtgaactactggataatgaaacacattctgtacaggaaaatactgttcctgatttatttttagaaatacatccggaaaatatgccaaaacagcttagcggatttttttggtacggcagcctgggtaataagcaattccgtctgccggttcaggatagtttgctgagcagacagtcagttctggatcaacgtttatttaatctgcgtcattatctggatattgaaggcaatattatgacattgccattatatgctgctgcttttgatccgtttgatctgctgcgttcccggttgggcggaaccgccgaactgacatatttacagtcaggagcattaagtatcccgtcatattgtttccgatccatgctggaaaaagcaaaggaacaagcggtggcactgattacattaggggataagcgtctcagttattacgagcaaaaagagcgctatcacactgagagtatacaattaaaggatgcgattgcgcttgctgatgccagtgccggtattcagtcatcgttacgtgaccagcaaaaatccactttgctttctctgaatgcagccaggacgatggctgagaacaaacagaaatattacgaaaaattatccgctgacggtgcgagcacaaaagaatgtagtgccagaaatctgctggtgaattcatccctgcttcagggcgttattacgggagctgcggttgccgcaggtattgcggctgctgctccgcgtatatttggtgtggcgcaggataccggcgaccacggtaaaacggcactcctctcaggtttggcaggggtgtctgcatttggtgcggatattatgcgcggcactgctgaatatattcagctggatgaacagtatcggcgccgtcaggaagaatggacgtttttgggtgagcaggcaaaaaatgaagctgaggtcttggatgcacaaatacaagcccaggaagtggccattaccgcagcggaaaacagcgttaaatatacagctcttcttcagactcaggccaaaaatttgtacgaatatttcagccagacccgtcaggttaacgaaagtttgtaccaaaaaatggtcaatattattggcttattacatgatcagttatgttcactggtcagaacattttgttcactgacagaagcagcctggcgttatgaaacggatgattataaacgacagacgtttattccggctgatctgtggagcggtgataatttaggtgttctggttggtgttaaattacagaaggcattgctggaaatggaaatggcatatacacagcaaaatacacgccgtctgaatatcacaaaaacgatttcactgaaatcactggtcaataataatctggtgaaaaaagatgaaactccgctgacaacatggaatgaagtgaaagatgcgttaaaaggagcagagaaactatccttcgaattatctcatcaattttttgatatggatttccccgggcattatgcccgaaaaattcattcattatcggtgacatttccgacactattaccgccttatcagaatatgcgggttctgctggaacaaacatcgaatacattgttggtttcaccggatattgatgcggttgagtccctttatacatcaacagaaaaagtcaataataaatcaattgtcaataatttgcgggtaaaccaaaaaattatactttcccgggggaatgatgatagcggggagtttccggaagatgtctttaccggaggacaataccatagctttgaacataccggggctatttcacattggttgttatccattccccgcccacaaaacagcccggaacttattgataatcttaatgatattattattaagattaattatacggcaaaaagtggtaatgaagactttgaaacagcagtgaataatttattggaaaatacagagttagctaaacaaggcgggaatgaaagtgactga

SEQ ID NO: 287028 - DNA, 990 bp, Morganella morganii
atgaataaaattattggattcatcactaagttatttccggtttgggtagttatctttgctttttttgctttttctgttccggaacctttcgcaaaaatgggacctttagtaccctatttcttagcgattgttatgctcagtatgggtttaacaatgagtgttaatgattttaaattagttttatcacaaccaaaagatgttttatatggtacagggctccgttatattattatgccgggtatagcctggtgtattgcagtttcatttacacatttttttggtatgagtcatgatttagctgctgggattattttagtcgggtgttgtcccagcggtactgcatcgaatgtaatgacctttatttctaaaggtgatacagcattatcgatcactgtttccagtgtcaatacactactggcacctattgcaactccgctgctgtttgccttcctggcaggcgaatatattgatataaaagcaagtgcattattagtggatattctgattataatggttattccgattgttgccggcttaattcttaaaattgttttcccgaagttcgttgataaagttattcctgttgtacctttaatttcagttattgccttattgggtattattactgctgtggtggcattaagcgccgataaattagcccaggttgcactgattgcctttgttgcagtagctttgcacaatatgctgggtttaggattaggttactctataccacgtgctattggtttcacacacaaaaagagtaaagcaatggcgtttgaaattggtatggaaaactcaggtttggcggttgctctggcaatggcccatttgaacccgattgttgcgatccccggtgctatctttagtgcatggcataatttcagtggcgctatccttgctacttactggggaaataaagacaaaaataaggaaacagagacagaagtcactgaaaataatctgccggataaagagccagactcttaa

SEQ ID NO: 287029 - DNA, 735 bp, Morganella morganii
atgaaaaaagaacgaaaaatagtttttgataaattaatagagtatatcgctacaggtaagtttaagcctaatcataaattatattcggaaaatacattggccagaatatggaatgtaaaacgtcatgatattcgtgatgctatcattacactggaattaatgggattggttgagtcacatcagggaaaaggaacatatttaactaacttcaggttaaatgaagcgtcaaacccgtatgccatactgctgatgctgcagcatggaaatccggacgaaattatggcgatgagattaatgctggaatgtgaagctgcacgtttttcagctctgaacagaactcagagcgatttgataaaaatggaaaaaacaatcatgaatatggaaaatgaaactgaggcggatatttgtgccagggaagatgctgtgtttcatagtttggtgtctaagtccggtggtaaccaattactgcaaacacttgttcatcttgtttatggctatatttcttatgtttcttcaaataactggaatttccttgttctttccggcaatgaatcttacaaaaaaaagattattgaccaacataaagatatctataacgcaattttatcaggttctccggatcttgcggaaagaagatcacatgaacatttttattttataaaaaatagtttaaatcatgatatacaaaaggaatatgataaatatgaaaagcaaaaaaatatattatggccctga

SEQ ID NO: 287030 - DNA, 1680 bp, Morganella morganii
atgaaaagcaaaaaaatatattatggccctgaacactcagaagctcgtgcactgttatacgcaaccgggcatttaaaagaagatgtcggagaaaggcctctagtcggaatagtcaattcatttaatgaaattgtacccggtcactttcatttgaatcaaatctgtcaggcagtaaaatttggtgtggcttcaggcggaggtgttccggttgaatttcctgctattgctgtctgtgacggtattacgatgagccatgaggggatgatgtatcctttacccagccgtgagctgatcgccgatagtattgaagcgatggtacaggctcatggtctggatgcgttagtgctgatccataattgtgataaaacaggtcctgctatgatgatggcagcaggccgcctgaatatccccgctattttaatcggcggcgggccgatggcaaccggccattatgaaaataaaaccgcagactggagtacctgtatagagcaattaggccggtttaatagcggtgaaatcagtgctgatgacattgatgattatgcacgcaagtcatgcccttcctgcggctcatgttcagggatgtttactgctaatagtatgaattgtttaacggaggcgttaggtattggtttgccgggaaatggcacaattccttctaattacggggatcgtttagcgctggctaaacgggctggccggcaggttgttaatttgtggaaaaataatataaccccgtctgacattatgactaaagaggcttttttaaatgcaatagttgttgatatggcaatggggggctctactaacacggcactccatcttcctgctatcgcctatgaatttggtattactctcgatttagctgcttttgataagatcagtgccgcgactcctacattatgtaaaattagcccgagttctgatgtgcatcatatggatgatctttattcagcaggcggaattcaggcgttaatgaaggaattaacaaagaaagatttattaaatacggattgtttgactgttagcggtaatacacagggtgacaatttgcgcactgcggtaaaaacgaatgcgcaggtgatccgtgatatcgatttaccgtatagcccgaccggttcactggctattcttaaaggaaatatcgctcctgatggtgctgttgttaaggcttcagccgttagtccgtcaatgctgaaacatacagggccggcacgggtgtttgaacaaatggaggtggcggtacaggctatttatgacggaaagattaatccgggtgatgttgttgtgatccgttatgaaggtccgcggggcggcccggggatgagagaaatgctgacgccgacagcggctattgccggaatggggttggatgataaggttgcgctgatcactgacgggcgtttttcaggtgcaacgcgcggcgcttctgtcggacatatatcacccgaagcgatggatggcgggccgatttgtttagtggaggagggtgatattatcagtattaatattcctgagcgttcgatagctgtcaacgttgatgatgctgttcttgccgaacgccggaaaaactggaaacgtccgcctttaaaagtgaaaagcggttatttagcccgttatgcatccatggtttcatctgcgtccaaaggggcaatatgtggtatccctgctgatgagtaa

SEQ ID NO: 287031 - DNA, 1053 bp, Morganella morganii
atgaaacagaaaactaaccgtaaacccgttgtaaaagctgatttattcagggaggtgaccgataaaatgattgccgcactggagtccggcacaccaccgtggagtcaggcgtggcagagcggaaatgaagggttacccgccaatgccgtgaccggcaggcgttacggcggtatcaatgtgatgctgctgtggtcggatgcagtgaataaagggtatgaacgcaaccgctggctgactttccgtcaggcgcgggaagcgggaggaaatgtgcgcagaggggagaaatccacgacggtggtactgttcaaaccgtttcagaaagcagaggaggatgagcacggccggatgaccacggatgaaaatggcgaccttgtcatgaggaattaccggatgatggacagttttcatctgtttaatatcgatcagtgtgaaaatctgcctgataagctgtgtccggaacaaccggtgctgccggaagctgaacgtatcgccggagcggataagattgtcgctaatggcggcgttccggtgagacacaacaacggcggacgtgcctgttatcatccggttgctgatcacatcattatgccgcaggccgcacagttccggagccctgcggactattacagcacgctgctgcatgaactggtgcattccaccggtcatgtatcgcgtctggcccgggaaggaattgtggattgtccggcagataaacatgatccggcatacggatttgaggaactggttgcggagatgggggcagcatttctgtgtgcagatcttggaatacagggcgatttacagcatgaaagctatacccttattcattcaaattgcaggttcgttggccgcactcagccagccgggtcacatactgatgtatgctccccgtctgtcttcccttgccgcctgcctgtatttcgaatgacgttgggtaatatcacgtcctggctgacaatcctgaaggaggataaacgggcgatattccgggctgcacgttatgcacgggaagcctttgaatatctgacctcagagacagaaacctgtcgctga

SEQ ID NO: 287032 - DNA, 771 bp, Morganella morganii
atgaatatagagagcattgcaatggaaaacatttgcaataacatgattaaagatttctctcactattttgattggaataatatcggtattaactattctattattaatgcaggtgaaaaaacggttaatactatatcaagtaactatgaatggatgcttatgttttggggtgatgacctcgatttattgatggaagaaagattaaataccggaattcaatattggagtaattattcaaatgctttcactgaaacattacggaggagtgaaaatagtaaatttaaagtggatttttgttcaaggtacggaaatgtatttgaaatcctatctatcaatgccggaaggaaattatctgtcacagatatgatgtctgtatataaatggaagtcaacaatgtcagattatattcatcgggtgtggcaaaaaacggagaatgtcagtttgccattgcgggcagaaatcggtaatagcaataatactttaacaggaaggaataaaacagaaatattagatatccaccaatatatgcgctttggcaatatccgctttacccgcaaagaaatcctcaccatccggttattattatcccatcgtaaaataaaagaaatcagcgcagtgcagggatgttcagaagcatcggaacataaacgtattcagcggataaaggaaaaactgggttgcccgcatgcatcatccggcggggtgtttaatgcgctgaaagaaaatgggatcaccctggcgtgtctggataccctggtgagtctgccataa

SEQ ID NO: 287033 - DNA, 279 bp, Morganella morganii
atggcacgattagtatattctgcggatacgtattcccaatgtaatatctcaatagactcgaaaaatgagttgattatatcccctcaggggaaaaacttaggcacattacccacactctacgataaagatggtcacttcgtcagcgtcgccaatagctggtttttcgatttaaaagccgtaaatactctccaaagcttgagcttttattcaagagcattattaacctactggtcattccttgagaataataatttagaatggaataacttcccaccttga

SEQ ID NO: 287034 - DNA, 1179 bp, Morganella morganii
atgagtttatatactgtagatacaataaataaaaaattaaaaccattgaatggtacaaaactcagtgagcataaattaactgaacgttatgatttacaggagtggttggttagccatccggaatctcttggtgagaatctattaattatccaaaaagaatttgatggatttgatggtacaggagagcgccttgatttattagcacttgatactcttggtcaattagtattaattgaaaacaaaagagataatagtggtcgcgatgctgtttggcaggcaataaaatatgcatcttatgttgcaccttttacatctgatgatattgaggatgtattttcaaaatacttattaaaaaacaaaccatattttatggatctggatgatgatgcatatgaagaaaataaagttaggaatactgcaaaaattcttattcagcggtttttagaagaaaaccaggatgttgatggctcagtgataacactaaatccacgtaatactcagcgtattattttagttgctggtaaatttagtaaagaagtaactaatacagctctttggttacttgatcgtaaaataaatgtaaagtgcgtaaaggtatcaccttatcgattaggtgaacagctattggttgacattcaacaaataattccagtgccagaagcatcagaatatatggttagattgattcgtaaagatgatgaagaatttatagctaaggtaaaaagaacagatagtaccgatatccgttatcaatattgggctcagttacttgaatatttttcaaagaaaaataatactctctataataatattagtcctaaaacagaccattggctgagcgctgccacaggtatacctcaatgttcatatcatctgatttttctgcaaaaggcattacgagttgatattgaatttgcaagaaaggattctgttgaaaataaaaagatttttgactttttttatgaacgaaaagctgaaatagaaaagaaatttgggaatgaattaaattggctcagattggatgaaaaaaaatcctcaagaattgaattttgtatggatacaaatgggtataataaagattgttgggctgagcttacaaaatggcatttagaatatatccaaaaacttgaaatggtatttaaaggatatattaatgaaattaataagattattaagtga

SEQ ID NO: 287035 - DNA, 207 bp, Morganella morganii
atgttacacgaatacggaattgataaagagattaacagtgaaagttcgcgggacattgaacagcgggttacatttaaaagcccggtgtttgaagccatccacagctcagtgtctggcttattccgcatcggagcgattacacggaaggttatgtgtaaatttgataaagcgtgtatcagtagcaaaaatgagcgctgcttcgagtag

SEQ ID NO: 287036 - DNA, 1317 bp, Morganella morganii
atgaaagtacaggcactgacagtcgccatgaacggcgatgaggtaggcacactatatcgggatggtacgggtgctatgtcattcgaatacacgccggagtggctgtctgagcccggttcccgtgctatttcattatcactgcctcttcagcacaacagaatcagaggtaaagaagtatttaatttcttcagcaacctgctgccggattcagaggcgattattgccaggatgcagacacggttccatgttgatacaacgcacccgtttgatctgctggcaagtgtcgggcgtgactgcgtgggcgcaattcagttatatccgtcaggcaacgagatgccatctgtcatggaaacacaagctgagccactggatgagcatcagattgaaacactgcttgatggttatcagaccgcacctctgggaatgatggaagaagatgctgatttccgtatttctttagccggagctcaggaaaaaacagccctgctctggtatcagaactgctggcaacgaccacaaggcagcacaccgaccagtcatatttttaaacttcctattggacggatagaacaaaacaatattgacctgcgggaaagctgcgaaaatgaatggctgtgtttacgcatcgccaaagccttcggatttccggcagccaatgctgaattagccgtatttggtcagaaaaaagtgctggtcgtagagcgttttgaccggaagtggtcacagaacggctggctgatgcgtttgcctcaggaggatttttgtcaggctctgggggtttcaccggcactgaaatatgaatcacatggtggcccggggatctcggatgcaatgaatctgctgttaggttcccgctttgctactcaggatcgtgagttattttttaaatcacagattctgttctggatgctggccgctatcgacggacacggaaaaaacttcagtttgtttatcgaacctgaaacatcgttcaggatgacaccgctttatgatgtgatgtctgcatttcctatttttggcagcaggagcattccgcttaaaaaagccaaaatggcaatggcgctgtacggaaaaaataaacaatataattttgcgatgatacagccacggcattttatcagtaccgccgcacgggttggcttttctcaggataccgcccgtcatcttatgcttgaaatggcttcccgcacagataaggtgattactgctgttaccaccgggttaccggtagattttcctccgcacatcagtgatgcaattttcaaaggattatccggacaggcagccaagatcattaaatggagtgaaaccgattaa

SEQ ID NO: 287037 - DNA, 252 bp, Morganella morganii
atgaaaatcacatcaccggccgcactggctaatgctgtcagagatcagcggaaaatcagtaagatgagccagactcaaacagcagagctgattggtatcaaacagacaaccgtttctgatttcgagaacaaaccggagtccactaagctggaaacgttattcaaaatccttgccgctctggacttggagcttcatgtaacaaaacgcggctcagctccggatgagaaaaagacctggaataaggagtggtaa

SEQ ID NO: 287038 - DNA, 231 bp, Morganella morganii
atgaaaatcggcaaatacacggtttatgccccgtttctggcggatgataaacccagcgaggcggaaatccggggcgccgcagtctggttacggatgctctcaccccgtcacagcaaaacaccgctgcgtaccccgggaaagctgctgccgctggaaaatcatcagccctgctttttcctcagttggggctctgaatgcggagacggaacagcgttatctggcgggatgtga

SEQ ID NO: 287039 - DNA, 345 bp, Morganella morganii
atgaaaaacacacaaactgctgctgatcttgccagagaacaactcgataccctgctgagcaacggtgctatcacccccggcgataaactgcctgccgaacgcccgctgacagagcaactcggtgtcaaccggatgtcactgcgtcaggcgctgctcagtccggaaggtgacggaaaaattttccgtaaaaaccgcagtggctggttcgcggcactgccgaaatttaattacaacccgaaatcgccggcgagtttcaaccaggcagccatatcgcaaacgaacatcatttgccgggcgtcaaaatacatgtgccggatggtgaaactcaatcactttcaactatga

SEQ ID NO: 287040 - DNA, 237 bp, Morganella morganii
atgaccgatgatcagcttgcagtatttgcagagaaagcaaaacgttatcatcccgatattaatattgaaaccagtgtgtctgataataaaacccccgatgaagccatcagaatcgcattaaaaaccggcgcaagctctgtccggttttatccgcattatgaaggggcgctgtctgatgtattgtccctgattgccgccgatatccggtatttaaaaaaacattatcagtctgtatga

SEQ ID NO: 287041 - DNA, 786 bp, Morganella morganii
atgagcaaaggtaaagtatggctggtcggagccggacccggagatgcatcattaattaccgtaaagggacttcactgtatacgtcatgccgaagtgctggtgcatgaccgtcttgtcaatcctgagctgatcgcctgtgcaccggcggactgcaaaatcatcaatgtcggtaaaacaccgaatcaccatccggtgccgcaggaagaaatcaatgccatcctggtgaaatatgccgcagaaggcaaaaatgtggtgcgcctgaaaggcggggatccgtatgtgttcggccgcggcggcgaagaagcggaatctctggcagagaacggcctcgattttgaggttatcccgggcatcagttcctccatcggcgggctggcatatgcggggatcccggtgactcaccgcgatcacgcatcaagcttccatgtggtcaccggccatatgtgtcaggggaatgagccgcagaactggaatgcactggctgcccttaacggcacactggtgatcctgatggggatgacccgtctggccgaaatcagtcagttgctgatcgacggcggaaaatcaccggatactccggctgccgtggtcatgtatgccagccagcagcgccagcaggtggttaccgccaccctcgccaccttaccggaagaggccgcgcgtcataaattacatccgccggcactgatcgtcgtcggtaatgtggtgaatctgcaccagattctggcatttgccgccacacaaattgatattacgcaggaagccccattagaagctgcgtcatag

SEQ ID NO: 287042 - DNA, 789 bp, Morganella morganii
atggaaaaatatacggaatatgaactgaaaacgagagatttatttcggactcttgtagaagaaacgttagatgacgctgttgtggtacataatgggacagaaaaaaataatcaaatagatgtcatgatcgatttctttgtagcgggaataccccataaaacgattattgagtgcaaacattattctcatcgggttagcaaggatgtattgagatctgttgtttataacatgaacaaactacgagctaatggagtcatagttacaacaaagggttttcaagagggagttattgaagctgctaaggaggatggcgttacgctttatcaggttaacttcagcgaaattcgtggggctgagttaaatttatgtatttatgatattgaaggtataaatgtaaattttgaccaattgctctcctctcaagaaagtcttggtgaaatgtttgaacgaggccaagaagtgatagaaaagtacaatataattaataaagagatgcaggtagtttctaccttaaatgaactaataaaatcgactatagattacaatgaaggtttaggagatcatttaattgaattttcaaactattatattgacgttccaaataaagcacctttaagaattgaatcaataggttggagagttataaatagtacaccttcacttttaaaaaatatgtgtaacccagccgaaagagttattatggcagaaatgttcaatccaatcacaaaagagtgcaggtcggtgaaagttaaaaattattggtttgaagaattggataaccttctttga

SEQ ID NO: 287043 - DNA, 366 bp, Morganella morganii
ttgctacgatataccctgctttttcttttgataacaatatctgccgcacaggcgaaaattgatattaccgcgatcgggcagtgcaaatacagcgggcagctaacccccgaagagattgccgggaatcccggcaacggagaaatacatattaattaccggacagatacggccggaagagcctatccggtaaaaataaccaaaaacacctgtgatgataaatgtaccgcacgggatgccatacgggtgctgcggaaaataagatgtccgcctgcaccaccccgctataaccgcaaaatgattattaaattttacagtgatacagaaaaacaaccggacaaatttacgccccgcaatctgatggtttaa

SEQ ID NO: 287044 - DNA, 2031 bp, Morganella morganii
atgtcttttgaaataatttctcttaaaataacagttaatactatcgatggactatatggtattaatattcctttctcaactggcctatttattttacgtgttgaaaactcacatggtaaatcaacgtgcatgaatgccattgcttatgcacttggaatggaaaaggctttaggcttaggtggtgcaaaaataccattccccccatctttaactagagcactgactaataaggatggtaaagaagttagtgtgattaaatcatatgttgaattgacaataaaaaataataaaaacacggttgcgaaactaaagagaaatatagcaggttttgaaactggcaatcttataactattgatgaggttagttctggtggcgatcaaagtactggctcatattttttacatcttgaaggggatactaaaagagaaaggggcttttacttttggttttctaaattccttggttggcaacttccacaagtccctaatcataatggtaaagatacccccttatatccgtcggttcttttccctgcatggttcgttgagcagaaaaaaggttggtcatctatccttgccacaataccaactcaatttggcataaaggaatcaaagaaaagggctttagaattcttactttctttagatgtcaatgataatatattagagcgaagctctataaaaaatgaaatagatactataggctttcaatggaagcttataaggcataatgcggagattgttgcagccaaagtttcggcaattgtttcaggaattcctgaacaacccgaagtaaagtttgatacttataaaatagatctgattttaaaggaaaaagattccattatcgcagcgattgactatcgggttaaactcgaagctcagttaaaaactcttaataatgagtatgttagctctgtggatgatgaagaacttcagaaagaagttgtccgtattattagttctaaattggatgaaatcaattcattagagctcgatttacaaaaaataagtgatcacaagagttatatagcgcatcaaattacctctacaacagacaggctgagtaatctcctggatgataaaaggaaatacgaagatcttaagaaaatagcttcctcaactatttttgataatactcatttgaagagtaatgagtgcccgacttgcggtgcgccttacagtgataacttgttagacctttcaccgcaagataatctcatgacttatgaaagtagtttgaatttcattaaagatcagattaaagcttttgagtttgttttagaagatagcaaaaaccaacttaaatttaaaatatcagagcagataaaaacacaagagacaatcgccgctctaaaggtcgatataaatagactaaagaaaagagatgactcatcacttgccttgcaagaagatattttgagaagaaaaataaatttagaaaattcaattgataatataaccaatgcctatgcggcactagctgaaataaagcttgaattaaatgctttgcatgcaaaatacgccaagcttatttctaaaagaaaagcattgccgcagagcgtactctcaactaaagatgttgaaaaattgaattcactgaagtccggaatggtacatagacttaataagtataatttcaccagctttgctgcaagtcttattagcatctcagaagatacatacctccctacaagagagggctatgacattggcttcgatacttcggctagtgacggaatacgaattatttgggggtatttgttaagcttgttctctgttggtagagcatattctacaaatcatcctgggttggttatatttgatgaaccacgtcagcaagaagcaaataaggtgagttttgctgagttattgagagatgcggcgagatcggcttcaagtggtggacaaataatttttgcgacatcagaggaagagagtgtgcttgttgatgcattgaaaggctataactacaagatagtatctttcgataaaaatgacggcaagctgattcgtaaactggatgcataa

SEQ ID NO: 287045 - DNA, 849 bp, Morganella morganii
gtgtttattgagaagttggcgattgataaagaaaaaataattattggatggagtgatttgtgtgactccattgtatggatatatggtaattggagttggggcctatttatagctgttttgtcactgttatttaccgccagggcacttaaaaaaactgaggagtctaataggctatcaggagaatctttgacattaactaaacgttcaactggcatagcagagaggtcactgagggcagcgaagagatcagttagcacatcagtaagaatttatgaaaagcaaaaaaaagactttgagagaattaataaagaggaggcaaacagaaagatatctgcattggaaaatgtaatcttaaacaagatagttcctttatgccaacaatcatcttctttatgtgatatatacttttttataaatgaatataaaaatattaaaagtgtttctttttatgaaagaaaaaaacttcctgccattgaatttagatatgaagaaggtgatgaggattgtataaagagatttgtatttatggatcgagacggtgtgataaatgataatgttttgatgctatgcgctgaattttctcctgatttaatgacaaaagcaatgaaattaaataactgtgttcatgctatagaaacatttgtccatatatgtttaggttattctgctaattctaaccttgatgcctttgaggaaagtttcaaaagagagggtagtaaatatagaaaaataatacgcatattagaggatacatttcaccttgtttatgatttgtctgaaagaaatactaaaaagtaccaagcatacattgaatttaaagaagccatggataagttaaaaacaatgtga

SEQ ID NO: 287046 - DNA, 273 bp, Morganella morganii
atgtcgcggccaatcgacttaatagcagatatcactgatgagtatatcgctaagcattttgaaaacactaactacggacgcactaactatcgggacattcttggttatggatgcctatctgcaatggctggatttccaaacggacacactactcagcgcatattgataaatatggggctggttactggaaagttgaacctaacaaagcgtggccgtgaatttctgttctggcatttttactgccagccagttaatggacagaaaattgattag

SEQ ID NO: 287047 - DNA, 657 bp, Morganella morganii
atgaaacataaatggctgcggcgtctactctgggttttagtttttattggaggagctactcctatcttcacttattggaatgttgccgaagataacaaatggggtacactttttagtttcgtatcggcttttggaataatctttattctcattgattatttcaaaaagaaaaatacagaggaaaacagcaagaataacatattgatgttgatttttgagaggtacaacaggcaatacactgacttattaaatgctatagattgttttattgatgaagtttgcaatctttattgcgtgcatgacagattcacatattacgaaaaaacagacagagatgggctgatacgaatcattaaagaaaaactagccaattatgaagaaattaaaataacctccccacttttagtctcacctggattcacaaactcagatattttacaattagccgcatataataaaagcgtagcctcagtactattagatacagaacaatgcatagataatataaaatttgaaataagggagctatcctatattacaagtaaagagaatataaaatcagcaccgccaatattcatcatatcaactataatagaaatagagagattgcgcgatgtattggaggatagaattaaatgcatattacaaaaatcataa

SEQ ID NO: 287048 - DNA, 276 bp, Morganella morganii
atggatatatcacgacagcagtttgaggaatttattaaattacataccgaacctaaagaattaaaagacaggttggttatggttaatgccggaaagaactatcgcaatgtacaaactgatttgctgtgggttgcgtggaaagaattgcgaaactcattaaatcctatcggatatttatcagtcaccgcggcggtatgcttaagacgcggaagtaagacaattatcacccctgagagcaaggtcaattgcatctcgctctaccgcttagataaataa

SEQ ID NO: 287049 - DNA, 660 bp, Morganella morganii
atggatatcagcacccttatttcctcatcccgacacattcaactgtcggcggaggaaagcaaaatcccctgggacgaaccggccttcagccagcgcatgctgtcgaaccatttatcgcaggaccacgactgggccagccgcaggcagagcatcattgagcaacaggtagagtggatcgccagccagttatcccctggggcacacatactcgatctcggttgcggtcccggcttttatacccaccgcttagcggagcgtggatttcactgcactggcgtggatttctcaccggcatccgtgaactgggcctgtcagcaggcgcagaatgctggtttaaacatcgactatattcagcaggatatccgtgcatactggccggataggtcgttcgatttcatcatgatgacgttcggggaactgaatgtgttcagctcggaggatgcgcgcttgctcgtcaaccactgcgcgctgtggctggatccggggggcaggctgctcactgaagtccatactttcgaagaagttaagcgtcagggaatggctgaagtgagctggcaacgctgtccggacgggctttttctgggtgtccctcatctactactgacggaacatggctgggatgaaaaacgcagatcagctcaacgcagttctggaccatag

SEQ ID NO: 287050 - DNA, 1446 bp, Morganella morganii
atgatgatccgcgcggtaaacagtgataccgaactggtgttgtcattcaatgccccggtgacgctcagcggtgcgaaatattcaatcaccaccacggtaccggacacaatttcagatgcggcccgcaccatgtcagccaatcagggctatatcgtttactttctccaggcaatgcagcagtggatgacagacaccggccaggtggaaattgaactgccgaacggccagaaggtgacactggaggatgtaaaagggctggcttcaagggaatgggttaacaatatgctcctgacaagcggggagctgacacagattcagtcaccggccaaaacgagagggatttatgttaatgataatggggatatcggcggaaacctcggtccacatcagaactggaaggtagacgggaatgcaaaagcccatttccgggaattagaagtaaaaagtccgggggattacaccggcattaatctggtaaaaggtgatggccgatatgtactgatagaaaccaatccgcatgctggtagtgtatcgatgctgacgtttgcatacagaaatgcatcaggagaaaaccagcacgttattactataccgtatgactcaggtgcgttggccacgcagacatatgtgaaatacagtacaggttttggtatcggttctgaggcgggtggtaaaggaattacagattttaatagtttcgtcacgccaaccggtcagtactggtacggaaattcctcctcaaatattccccggactgttgtgggatttggtaccgcactggttacacggtattccaataatatttcgcatcatctgattattccgaactatggcggagggagttatctcgctatcagacgtaacaatggcggggcgatagaggatgtcgttgccctgacatccaatatgtatatcgtagacggcagtggatattataaaaaatcgtcgccaatcgttcagatttaccctgatggccattatgaaaccaacgacgaatccgaaggcgcggaagtccgccgtaccggcaccggccaatatcacattaccggcattctcggttataactcagatggcgcatggggtgtaaacggtggaatttccgtaccgaaagacaataacggccttgagctggtttatgtcgatgaccgcgtacagaaagatggcagtattatcatcgaaacctgtcaccgtcagcatgcgcatttgccggaacgtttccagaactggcggctgaaagaggtcaccccggaaggtgagcgcattttctatcaggacggcgaaccgtgtgacctgccggaatcaacccgcctcgatgtgcgtgtcgaaatgccgcagggctctgtgtggaatgtgaagcaacgtgaactggctgaacagatggagcgtgagcaggcagagcgtgaagcacaggaggttgcggagcaggccgaagattcagaggaataa

SEQ ID NO: 287051 - DNA, 261 bp, Morganella morganii
atgacactccccgttttcaggccgttaatgatatccgccacttttgtattatgcagcacattcgccggtaactgccgtgcggagactgatttaccctgcccggcattatgccagccgtcagaggttctggaaaaaaacgttcagttctcttgtttccgtccgggagagcctttaccttttaaccagttagtgaatatcactgttccggtggcttgtgaaataatacttccggtgaatatctcaccggataccacaccataa

SEQ ID NO: 287052 - DNA, 1659 bp, Morganella morganii
atgaattattcccgcagcttagtttttttctttttgttctggctgtccgggtcaatggtttttattaataattcaggcgggtacgggctgagtttaccgcaaaattgcttttcatgggccatgatggggatgctgatattttctgtcagtttctctgttatccggaaaaagcagtgtctgattgtcactccggcgatgcgctggttcttcgccggtattgtgatcctggcgctgccgttgctctatacccgtccggaatggcggttgaatggcggcttatattgggcgggtgcggttgtcgggctgttattttatctgagttgtgtacaactgaaactgagtaaaaaccaaattcgttttttggtactgctatggctgtcggcctgtatggtgcatgcactgcttatattgctgcaattgaccccggcgggcggatggataccctggccggtgctcagcaatcgcccgtatggtgtttttcagcaggtcaatctgctggcaacctttttatcctgtgggatggcacttgctttgtttctttttttgctgccggatcagcggcaaagcagcatcagccgggggatagcagtatctgcactgtttattatgccgtgtgttctgacactgattcagtcccggattggcagcctgagtgcggttatcactgcggtgattatgctgttatcagcaggtacgcgcagaaggaaatacttggctgttatcctgctggtcagtggtgtgctcgcgggctggtggcttaaaaaccatacacagattggcgtgatatcacatctgaattcagataatgccaggctggaaatgctcagcagcacatgggaaatgctgaaacagcgcccgctgaccggctggggtgccggtggttttgaatatgcgtttcagatgttccggatctggcaggggaaatccacggaaggtacaggggttgttatacacccgcataatgaaattctgttttggggcgcggaaggcggtgtggtggcattaagcggcctggctctgattatcaccggcggggggctgattatccgaaaagcatggcgggcattccgccgggaaattaatccgctgccgctgacattgtgtctgaccatattaccgttattgctgcacactcagactgaatatccgtttggtttgtcagcgctgcattttgcaatgtgcttattattattatctcaggctgacagagtcacggtttcaccagaaaaaacaatggcgttgccatcatttttcagcgtgatatcggcaggtacaggtacgggaatattttgtgtgatggcgggggcatttctgacggggattattctgacaggtgctgaacagcggggaatacaggatattcaaaggttgtcatctgtaccggaacttatgcggatgacgcaatatgaacggatggaatttgatcttcatgtgcacgaattaatacagttcaatcagacccgggatcctcagttattagtcagctatcgacattgggctgaaaattatcttaaaaaacatacggataaaaatgtgtatcattccctgattatgattttacagtttcagggagagactgacgctgaaaagtattatttgtatcaggcagcacaattatttccgcaggacgatcttttttcccccggcggaaaattataa

SEQ ID NO: 287053 - DNA, 948 bp, Morganella morganii
atgaataaattaatgctgcgcggagcggcactattttttttgctgctggtatctcagggtgcggctgcaattggttgggtgggcgcgagcggaacctgtgctgccggcggtaagaatacatttcagcttagcgtttattgtgactgggaacctaataccggcgcttattacggaaatggccagactgttgcatttttgtcttcgggggggaattctggggacagtcaggcttatgtaccgaaaagtggttattacacagccaaagtatactggtgtgcctatccggaaaatatggatacctgcagcaaagcggcgggctccctcttactgacgggagacagagtctggctggaacaatccaaatcgtttgatgagcaaaaaatctttaataacgatcagaccaaaaaatcaccttctgccggcggttactgtttcacaatagaggatacagaaacagggtatgaataccggggcgatatgggatacggtcctgataaccggggaaaattctgcggggatgcacaccggttacctgtcgaacccccgaagtgcaccctgaacagcggtacagatttagatgttcagctgggacgattagagcgcaggtatatttccacgagacccggttcgcccgccatggtgacaaaagatatttccattcaatgtgagggtaatatcgactacaacgccaatatgaaactggattttacaccgattactgtcagtaatgaaaaagtgatcagcacctcaactaccgggctgggtgtcgcagtagtatatcaaggcaaaacggttcagcccggagaaacttttccgctgagttatcagccgggtattcataccctgagactcggttttgaaccagtccgggattcggcaacagcagcgactgatctgaaaaccgggaattttaccgctactgcggtgctggtttttacggaactgtaa

SEQ ID NO: 287054 - DNA, 1212 bp, Morganella morganii
atgtcattacccactaggcttcaaaataaaaaatataccttctattatgatgaatctaacaatgtgagaaaattggctttatcagataagattgacggatataacattgaacatgatgaagataagtattcaagtttcaactttgttttaggtggcgtggcacacttaaataactcatctacggctgatttcgatgagcttaaaaaatctattatgcttcaacctacagcgaaagagatcaagagggaccatatagcaactggcgacttcatctttatgcttaattctcgaaagcttaaagggctttttgaatggctgctacaaagcgatctctatgttcaatattttaatctcaacatggaatactgggcttaccttgatattattgaagactgtgttcaattctgtttagaaaatcatcttcttgaatttagttctatagtgcattatcgagactaccaaaatctccacaaagatgaattgtataaaatcgtttcttctaatagagagaagttcataagatttctgaaatcctatgattatccatattttacaggaaaagaaaaaaactttcttaaagacctacatgatatagttcttcatcactacaacattcttctttataagcctcttgctacacaagacgaaaaactacgcatggatagtcttagggaactacttgaaatgtgtattcaaaacggaatgaatgatttcactcttaccacagacttcagatttgaagctaaagaagataaacctaaaaccagtgaaaatggcgatcaggatgatagtagtgataactatttggtagatgcttttgctatcttctatcaatatcgtggcatgcagtttcctaacagcaagcacatttttgatgttgaagaagttgtaaaagagagctttgagtcttcactccaatatgatgaaaaattggtaaattttgactatcagtttgatatttcgcacgataatttatttattcaagtgagtgatgttgttgctggagttttccagaaatactttgcctatttgaatgccaatcgcatcgaaggcataaaaagcgttcgtgacaatctcaacccaatacaaaaagctaatcttgcgctttttagagaactcattaacaagtcagatagtgaaaataaacaatttttgttttatgtaatgtctatggctgagcatgaaaaacattatcaatttacatttgcttga

SEQ ID NO: 287055 - DNA, 543 bp, Morganella morganii
atgactgttattaattattatttcaaccatgaccacccgttacgtccgttcaccgggtctgattatgcgaacaaagattccttttctcccgcaaacgcattgcgcatcgctccggacgaaacaccggggttctggccttgtgagcaggacggcacatggattcagattacggatcatcgtggcgtaaaagtctatgacacaagaacagcgcaagaatcagaaatcaaagaactcggcgaactgccgccgggcgtcacgactatcgccccggatgttgaatttccgaagtggaacggcaaaaggtgggtgacagataaagcggcgaaaaaggaaagtgatatcgcagcggcagaagcacaaaagcaatacctgattgccgaagtcaacaccgaaacccaaatgctgcaaacaaaactggcacttggccgcatcaaagaggatgaaaagactctgttaaacgcctggctggattacctggacttactggaagcggcagacactaccaccgccccggatatcgactggcccgttaaaccgcagtaa

SEQ ID NO: 287056 - DNA, 1314 bp, Morganella morganii
atgacagcaaagtatttcgctatcctgacgaactacggcgcggcacagctggcgaacgctgtcgcgctgggtacgcagatgaacatttccgcaatgggggccggtgacggcggcggcacactgccggttccggacccggcacaaacaacgttaatccgtgaaaaccgacgcgcagcggtcaatcaggtatcggttgacgataaaaacccgaacatcatcattgccgaacaggtgatcccggaaaatgaaggtggttggtggattcgtgaaatcgggctgtatgatgataaaggcggtctgatcgcaattggtaacgttccggaaacctacaaaccaaatttacaggaagggtccggacggacacaggttctccagatggctctgattgtcagcagcactcaggctgtcaccctgaaagtcgatccgtccgtggtgctggcaacgcgggagtatgtgacaaaaagtattgatgccgcaattcaggcatcagaggcacgggcagcaaagacttatcagccgattggtgattatgttctgaatccgttctttaagctggaaatgctgaaaaagattgataaggcagatattgctcagcaacttggtaatgataccggcaaagtcgggtcgcaacagcttcttacagaacaactcggcaaaaaagctagcgttgtcgacgtcaaaggcaaaatggccaaagaccagaacggcgcagacatcccggatacagaggcttttatcaaaaaccttggtttaacagcatggttaaaaaagcagattgaaattcctgctggtatatttcagacatttcctcaccgcgccacgcaattacctcagaaatggtattccactaatggcgacaggttctccgtaacatccccacagggaaaggtacttaaatcatttacgccagagatgaaagcagactgggggatcactgaatctggtgggatgattaatgtgccaaatatcaaacagcctgacggaagaacggcatttttacgcccagtgaatggaacaacgcggcaagtgggtactattgaacaagatatgcagcgacgaataaccggagccgttcatttcagaaataggtataaccctggggattcggggtcagatgaaatattttttgatgtgaacggtgcgctgtatggttccagaactaccaataaagcaggaccgattgaactaagcaagaatggtgagttattacctatgcatcaacttaatattgattctgcgaagtcagttccaaccggttcagaaaacacggtattaaacgcaggcgtaaccttagcaatttacttaggggtgtaa

SEQ ID NO: 287057 - DNA, 1425 bp, Morganella morganii
ttgaaatattttgctactggttttttccttaaaaaaggcaccactgcaaaggaagttattaatgaatgcttatcatgggtttctaattctccacatacaaaactaataccagcccaaatcgattttatgcgaaataactgtgatgagtttgagttagaaggtgaaaatgagaaaatagaattaactaaatactctgaaaacagcctttctatgtattgttttagatattctaaaataaccatgccacataaatggattacagacatatcaataaacgaatatataaatgaaggaagcttatgggtgcaagtacagtctaacgtactaactcaagatgctgcatataaatcgccaaatactaaaagaccattaatagtaatgaatcttcttgataaattctctggaggagatgatgatatatttaatgttggcatagaaccaatttatttaaaagatacacaagaggatattgaaaaagcaacaagtattattaattcatcaactaaaaacagacttcctatagtttatgttagttcacgatattactatagagaacatgcttacaatttaataccaacacgtttagcaagaaagttgtctggattagcacatgttgttattgaaccaacaagtatcatattttctaataaattaaagtttaaagttaacgggaaaaatgtatatggtggtgcagttggaatctattggccaaacggacaagaaattagtgttcataagcgagggttattaaatgccggtgattttgaagatctaatttttgatgaggttattaaagccacaacgtcgctagtaccattaaaaaaaggtggctggatagaaataaataatgcaaaaaatagaaaatcaattcaagtcttaaaagaagaaggctcatcctcagatcaactattatctctttatgaagaagaaaattccacattacacgatgaagttcgagatctaaatagcaaagtagagatgcttgaatatcggattaaaaaattattagaaaaaacgccagcacaaggtgacctatacttaaacacaggcgatgaagatgatttctttgagggggagatatctgagtatttaatactaaccttagaaaagtcactaccatctattagaaatgattctagacatcaccatattataaatgaaattataaaaaataaccctcacaaagataaattaaaggaattagaaggaaagctaaaaaaggcgttaaatggatatagagaaatgaataaaaaggtatcatcattacttattgaacttggctttagcatatgtgaagaaggaaaacactataaattaacataccaagaagactcccgatacacatatgttttatctaaaacaggcagtgaccatcgcggttgtttaaatgccatatcagacatatctaataaaatgttcatttaa

SEQ ID NO: 287058 - DNA, 777 bp, Morganella morganii
atgttgaaagtatatgcttctcttattacgctcgccgtttcatcctgttattcagtatccggttttgcaaacactactgtatccttcggcaggcaggccatcactgcggcatcacatactgttgctgttggtgacaatgccagagcagaaaaaaccttgtctgtcagcctgggtccttattccaccgctgaggcattcgactccgtcgctatcggatatttagcgtatacaaatcgggagaaaacagtatctttcggtagtcagctgtcccggaaacaactgattaacatagctcccggaactgaagacaatgatgcagtaacagtgaaacaactacagcaaagtaaacacagcatcatttcagaaaataataaaaaaacagatgctgcaaaagctgaaataatcaatacgaccacagcctatgcaaactccgctaaaaatgacgccattaacaccagtacacaatatacagataccaaactccgccagctggacaaaaaaataacctcacaagttaaacaaaatacacaacgcattgataacatcgaaaagaaaattaatgccggtattgcaggtgtcactgctatttcctccattccgtatgtgacggcaaataatttctcatttggcgttggcatcggtaattataaaaacggaaatgcggttgcggtcggtgcacaatatacaccttacgggaatactaacctgcgtgtaaatacgtcatttgacagcaataataattccgttattggtgccggtgttgctatcggttggtaa

SEQ ID NO: 287059 - DNA, 303 bp, Morganella morganii
atggtgcgtgatgttgtactcgctttactcgctagaaaattacctgattcaaaagaaatgcatagcattcatgtaggcatggttgttacatctgtggtaggaacatcctgttttctttctgtatttgaatcatttgctaaattaattacctatttttcattatcttatgaaaaaatacgatttattggttactattcaaaaccagaaataaatatgctctacgttattgtaggtttattaagccttgttattttcaaaattttcttcaataaagccttatcgttaaattcaaagtatgtgtaa

SEQ ID NO: 287060 - DNA, 189 bp, Morganella morganii
atggctcgcatgctttccgctttttttaccggtcatctgcgaaacagactgaaggcgctgttttcaggaaaaatacagacccgttttatgaataaaaaaaccaccggttatatcaacggtggttttaactttccgattcatttattcaatacgctaaatcatttcgttcagagcaaggcggcaaagtga

SEQ ID NO: 287061 - DNA, 2556 bp, Morganella morganii
atgaaagcatgtgataattggtttaaaagcaatgaagatagcataattgataaaataacattaaaacaacagatgatttcaacaaagattgaaagcaccttcaatgaaaaaaatattgatcttaccaataacagtgataatgataccaatgaagatcctcatgaatatataaaagaaaaaaatataaaaaatgaaccactcatcacaaaaatcacaccaaaaaaatcaattcatataaaaaattatcatattaaatctaatgaccatactcagactgatagctttgagaataatagcaacacagatgacttacaaattgacaagacaattattaagacagaaagcgataatgtactggttataactaatgacgataacgcaaatgaactgcagactgccaaaataatattcaagacagcgatggacgctgaaggtgaggcggccacagccagttaccataaactgattgaacgctataaaaccagcgatgataacgcgattttactgctggttgctaaagcgatgttcaatattgctgtaacatctgaaggtgagtcagcaatagccacttaccatgcgctgattgaacgctttaaagacagcgatgataacgcaattttactgcgggttgccagagcaatgctcaatactgctgccgctgcagaaggtgaggctaagcagaccggctatcagacactgattgaacgctttcaagacagcaatgataacgcgattttactgctggttgctaaagcgatgttcaatattaccgtaacatctgaaggtgaggcagcaatagccgcttaccatgcgctgattgaacactttaaagacagcgatgataacgcaattttactgcaggtagctaaagcaatgctcaatactgccgccgctgaaaaaggtgaggctaagcagaccggctatcagacactgattgaacgctttaaggactgcgacgataacgcaattttactgcaggtagctaaggcaatgttcaatactgccgtgactgcagaaggtgagactaagcagaccggctatcatgccctgattgaacgctttaaggacagcgacgataacgcaattttactgcaggtagctaagacaatgttcaataccgccgtgactgcagaaggaaaggctaaacagaccggctattatggcctgattgaacgctttcaagacagcgatgataacgggattttactgcaggttgccaaagcgatgttcaatactgcggcagatgcagagggtgagactaagcagaccggctactatgccctgattgaacgcttcaaggacagcgacgataacggaattttactgcaggtagctaaagcaatgttcaataccgcagtgactgcggaaggagaggctaaacagaccggctatcatgccctgattaagcgctttcaagacagcgacgataacggaattttattgctggttgccagagcaatgttcaatgctgcggcagatgcagagggtgaggctaaacagaccggctaccatgccctgattgaacgctttaaggacagcgacgataacgcgattttactgctggtagctaaggcaatgttcaatactgctgcggatgcagaaggcgaggctaaacagaccggctaccatgccctgattgaacgctttcaagacagtgacgataacggaattttactgctggttgccagagcaatgttcaatgctgccgtaactgcagaaggtgaggctaaacagaccggctatcaggcactgattaagcgctttcaagacaacgacgataatgggattttactgcaggttgccagagcaatgttcaatgctgccgtaactgcagaaggtgaggctaaacagaccggctatcaggcactgattaagcgctttcaagacaacgacgataatgggattttactgcaggttgccagagcaatgttcaatgctgccgtaactgcagaaggtgaggctaaacagaccggctatcaggcactgattgaacgctttcaagacaacaacgataacgggattttactgcaggttgccagagcaatgttcaatgctgccgtaactgcagaaggtgagactaaacagaccggctatcaggcactgattgaacgcttcaaggacagcgacgataacgcaattttactgcaggttgccagagcaatgttcaataccgccgcagcagcagaaggtgaggctaaacagaccggctatcatgccctgattgaacggtttaaggacagcaacgataacgcaattttacgctgggctgctcaagcgatgtacaatatcgccattaatatggaagacgaacctgcagaaatcagctatcaggtactagttgatcgatttgaaaacaataatgatgatacaattttactactggttgccaactcattaattaacattgctaatatttcattatcaaaaggtaataaaccaaaatcaattaaagttattaataaattcaattctgttctgagtaaaataaatgaaagtaacgaactaaaagcattaaaagaaaaagcaatgatgattgaactaatacttaaagactaa

SEQ ID NO: 287062 - DNA, 678 bp, Morganella morganii
  misc_feature (631)..(661): n is a, c, g, or t
atgtgcccctttccggtggtgcatgacggcagcattccatgtaccggttttctgatcaatacagcgctcaccccgggcggcatcatactgatcagcagtctggcaggtattgatctccatattcagcatatcaccgactgccatacctttgagatattcataaaccgggtcggccatcataccgtgcatccattttgcgccgccgctggtgacaactgcgccataaaaacctttactgtcagttgcctgcgggggtatcagactggtttctatattgcagccggcataccagttaatacaacgaagtccgagcagaggattccggatcggggtattttccagccacatatcgaaccggcggccggcagccagaggggtattatgtccgttatcaatatatcccagactttgctggtaaacggtgccggagccctgatatttcagtccggtccatcggtttgcaccacccattcgcggatcacggggaccgagaggggtcacaaaatagttgttatctgtattattttcgataaaagcaaactgcctttccgcaccatcagcgagctgatttttggtgattgccgcagaagcaaaaaacgaggtgctgcccagtatggcaatgaccagcatnnnnnnnnnnnnnnnnnnnnnnnnnnnnnnncagcatcagtgaagtaa

SEQ ID NO: 287063 - DNA, 582 bp, Morganella morganii
atgcctgaatatagatatgtcgtaggtggcaatgatggttggcttacagtgctgcgtgaaccatctaaggtcagagtatctttgccgacaacattaaaagtagaattaacaagtaataaagatggccgggactattttaaggtattagaaggtccggaagcaggaggcagtttttctgttaaagaacgaaatttatcaaattctgcaccagcatacttaagtggtgcagtattgcaattttcaatttctaaaaaaatattagagtataacgctgtaaaaatatctgcctttactcatcccttaaacccggtgccagcaggcagccaccctatacagctacctgattttcctcattccttaggtagtaactacatgtctgagtcaaaatatgctaaaaactggttctatctggggactggaaatgcagttgcccataataatgatcgttatttgcatccgggtactataagcgcaggatgcgttacagtcgatgttgcaagttggacggcattgtatgagtatttaatccggtgtaggagtggtaatggaaaagatgttggccgtattattattactaattag

SEQ ID NO: 287064 - DNA, 7431 bp, Morganella morganii
atggatcaaataacccgaattcttgaaaaactgaatcagcaacgcagcggtgaaacaacagtgacactggcagattttatgccgctttcccttgccgaaatccgcaaccaggctcacctttcacaggatgacgcacagttactgtaccacgcagcacaaaaagaaaagcaaaacaacattctctataccgcgcggatgctgacccgcgctaacccgctgctgagaaaagagatgggtgttgcccgttattacggcgcgactccatatggctatcatagttatgatgacattatcccgccgcgtgccgatgaatttgtcgcacccggcgccgtctcttccatgttttcccctgccggttatctgactgagctttatcgtgaagcccgtaatctgcatccagaagacagtgaccgtaatctggacacgcgccgtccggacctggcaaaactggtactctctcaggacaatatggataacgaaatctctgctctgtcactggccaatgaacagctggaaaccgcgctgatgaccgaagccaaactgacagataaaaccaaatactataaaaccctggcaacctcccgcaacagtggcgtaacgccgtataatgcgccgtttgaggtaatacataacgccctggaacagcagaattttgttctgccggataatattctcagcaaccctatgatgtttgccatactggcggcatacaacgccggtatctcaccagagttgtatgccatactgacagaagaaatagagaaattaaccggctccaaattaaaagactctctgaaaaaaaacttcccgaaggtaaagattaaaaacctgatgactctggatgcactggctaattattatgagcttccggcagatgaaattcaggctcttattgccgccgaaatgacaggtcagttaccaacaccggatgtgtataacgacgataataaactggtaataccggcaataagctctggcggaaaaattaaattcagtgaactaatcaaagaacaggatgataaaaaacaggtacactacatcgatttaattccgcagggtggtaatcagtttttagttaattttagtgtaacggaaaccataaaagacgcgacacattttagtttaggctgtaatacttcaattaatgatctggcagataaaaaggattttgtccctctggccggagagcactacagcatccccgtcacgctggatgctaaacttttagaaaaagagactaaaatcggaatcaccagaaagaaacctgaacctgccagcgacgggaatcattacacctcagccacattcatcatcgataccaatgcgaaaccaggcatatggctcctcagactcaataaaacactgcgtctggcaaaagtcagcggtatgaccccgcacgaaacacaacatgcattaatccacgtaaggagtactccaagtgaatacgaattacgccgtttcaccgaaacgctgctttaccgtaaacgttacggtattgatactgaaacagcattaatactgtgtaacgccggtatcagcaaaaccagctataacgggcagctcagccagtttgaccgcctgtttaataatccgccgcttaatggtgtagcttacactttaggtggtaaagatattccgatggaacatgatgcccaagactcgcgtagagaagtcctgaagcgcgccttccgggtagataataccggtttgtggcaactatttgttatcacaaatcgtaaaaacacatccaaaagtatcaaaaacaattcagaaaatcttcgtggcctgttatttgttcgcctgctggcggatgcacataacctgacagtagtacaattggatgccctgctgagaatttccccttacgattcaatgaacgtttacaacttagatggtcaagaacgccagaaaatactctcttttctgtcccggctcacccaatggctgaatacacaaaatatcacagttgaacatttgatgctgctgctgagcgaagaatctccggaagtcccgaccaaagagatgaataccctgctggataatctgtacaacggtggtattgacaaagccaatacagaaacgctgtataccaccatggcgccagtgattactgcagctatgcaactggatgtcacggaatcaggggaagctctgctgcgctggctggataaaaatcatctcgaagggataccctccactacagaagcctgggatcttattttaaaaaaagaccagacgaagaatgacaagaaacaactggcggcctggtgtcaggcactggcacagcgtgtattggtcattcgcacctttccactcagtaatgccgaacttcagacgttgtcaaaaggtgcaccggccggaactattaccgaactgtatgacatcagtgatttccatgacctgattaaccgctgtggtgaacaggccggtacggtactggatgcactgcaaagcagtaccctgactatcactattctggcaaaagcattgaatctttccgaacttgtaattagccaggcgctgacacaagccaaacaggaacaggagctcaccacatggcaacagctggccatattgccgcgatggctggattttgcagagaccctgcatataaccccaataaatatcttcgagctacggaaggcgtgtgaaagtacaacaccttcctatacagacctcaccacactggcaggattgttacaggccggtctgaacgaacaacagaaaaaacagctgcaaaaccagtcggaaccccgccgtagtgaggctctcagcggggagtaccgcgttaaattaatgaaaaaaccgcaggaaaaccgtgatgatatctggcgtgaactgctgattgacggcaaaatcagtgctgaaatcaccaccacccggctggcggatgccatcgccggtattcagctctatattaaccgcaccattgccggtgatgaaccggatgcagtcagtgcggtactggatcgtcagttctttaaagactgggatacctacaacaaacgctacagcacctgggccggcgtgtctcagttagtctattaccctgaaaactttattgacccgaccctgcgcattggtcagaccgggatgatgaacaccatgctggagcagctttcacaaagtgaactcaacagagataccctggaaaacggctttcgccagtatctgactgcttttgagcaaatcgctaacctgaaagtgatcagcggttatcatgatgcggttgatattaatcagggtaacacctggtttatcggtaccagccagactgagccgaaaaaatattactggcgtaaggcagatcacagcaaatacctgagcggctattttgccgctaatgcctggagtgactggaaagagataacctgtgcggtgaatccgtataaaggtatggtacgtccggtaatttcccattcacgtctttatctgttgtgggttgaagaacaaataggaaaagataacgccggtacagatacgttattttttaccctgaagctgacacatattaaatatgacggcaactgggcttctccattcagctacgatattactgaaaaattcgaatctgacttagatagaacaggtctgtactgtgctgccaatcaggaagatagctccctgataattgcctgctataacaaaaaaaataacaaacaggcgactaaaaacctcggactacgtattctgccggatatgacctgtaaagatgacgcggatatacaaatgatattagacctggttcctcaccaattagatacagaaactgtcgtccgggtaaataccctcctgaatcgtacacactcttccgaatttatcctgaaagaacaagagggaaataaagaaattaatctcaccctctccgctggttactatgttattaaaactgaaaatgaaatatctacactgatattggctcctgctgcccgtattcatatcgacccttataaaatatttagttatattcctgcttattatcgcaagcgatacattactgctattaactctaattcctgcacggtttacaagccggaaacaataaaaatagagcctatagataatttaatatccgacaaggtcaacattcgtgtcgtacatacttataataacgagccgcaaaaaaaacacatttttctttccatttataaattttatccaatagttgattctcttgagctggtaggatctaatcacgacagtttctctctaaaacgcacaggagaggcaggggagtatttgatatatgaaaatgataccgacgatagcttagcgttgaagaaagataaatataccattagctctggtgacaaaaaactgggcacgctcagtctgggcgacatgataacacaagccaaaacaatcagctcagatgatatcaccattgagattgaactaaatgagaagaaacttaaaacaataaccggtagtgacgtcgggatcaggccgccattatacccgacaaggttaccagaaatacagacattcctgtttgggggagtgtctgtaacccttcccgctgagacaaacattgatgacctgaatttcactgtaaaagtcgggttcaataattcagcctttcttacggctacgaccacttataatttgattataaaaaaacccgccacggataacagaagcatctccctgcacgtcactccggacggtgctcaatatatggaatgggatggttaccgtacccggttaaataccctgttcgcccgccagttaattgagcgtgccaacaacggaattgacgcgatattatcacctgaaacccaaaacctgtatgaaccaaaacagggagagggcacctatgtcacactgacactgaaacaatatgaccagagtatccacggcattaaccgggcgtttaagatttattacgataatgatgctgccaaggtcggggattccggcaaatttctgctttacagtggctcactcagtattaccgatacgacagaagtaaaattatttattccgctgattaagtccgggaaaaacgcggtgggtcagtctgctgatacgaaacatgatactttatatctcaatgcgaaataccagacaggagcaacaacgcagatctgtctgtaccgcaccgatgctggtaaaaatgatcctgaaggctggatattggatgacaaaaagaacaccttcgccggcttggcagataacggggtctccgggttattacaatccggtgaaccaatggatttcagcggtgccaatgcgctctatttctgggaattgttctattacactccgatgatggtagcaacgcgcctgttacaggagcagaactttaccgaagccaaccactggttaagctatatctggcgtcctgccgcaaacggagccaatgactggcaggtgcgcgccctgaaagaagacatatcctggaacgcagatccgctcgattcagttgacccggatgctatcgcccagagtgacccgatgcactacaaagccagcacgctgatgaagctgttggatctgctgatcgcccgtggtgacagtgcttaccgcatcccggaacgcgatacgctcaatgaagccaaaatgtggtatatgcaggctctggggctgctcggagataaacctgtcagcattatcagcaatggctgggaaaatccgtcgctgaatagtgccgcagaccagaccaaaaccaaacagtttcacgatgaaatcagccgtatccgcagcggcggtctgctgccggacgcgcgtactgccaataccctgaccgggttgttccgtccgcagcagaatgaaaaactgctcggctactggcagaccctggaaatgcgcctgtttaatctgcgtaacaatctctccattgatggtcatccgctatctttgccaatttttgccgcaccggcagacccggccgccctgctcagtgccgctgcggctgcatccggtgaaagcaaacccttaccgactactgctgtcattccgtcaatgcgtttcccgcaggcgctggaaagcgcccgttcgctgaccgggcaactaatacagttcggttccaccctccagggcctgattgagcgccaggatgcggaagcgatgagtgaactgttgcaaaatcaggccggtgaactgatgctttcctctctgcgtatacaggagcaggcccttgccgaactggatgctgagggaaaaacactggaacaaagccgggccggcgcacagtcccgctttgacagttaccgcaccctgtatgatgaaaatgtcagcgccgcagaaaaacgaaccatggagctgtacctctcttctgcagtactgagtacttccattggcgtgctggatatggccgccgccgccgccgatatggcaccgaatatcttcggtatggctgtcgggggcagccgctggggcggtatcccgaaagcgattggttccggtattggtctggcggcatccgccaccaaaatcactgccgataatatcagccagtctgaggtatggcgtcgccgccgtcaggaatgggaaattcagaaaaacaatgcggaatctgaagtcaaacagattgatgcacaactggaagccctggctgtccgccgaaccgcaacagaaatgcagcgcgaacatctggaaacccagcagactcagactcaggcacaactggagttcctgcaacgcaaattcagcaacaaagcactctacagctggctgcgcggccgtctggcatccatctattaccgcttctacgacctgacagtggcgcgctgcatgatggcagaagccgcttaccaatggctgatcaatgacaaatctgtcaaatacatcaagctgggtgcatggcagagcaataacgccgggctgatggccggggaatctttgctgctgaacctggcagagatggaacaggcatggctgaaacgggatagtcgctcactggaggtcacccgtactgtttccctggcagaagtgtaccgtactgacaatctcattctggcgaagaaaattgatgaactcctgaatggtaatgacagagaggataaaccggcattaaccgggatttcaatgacgaagaatggacaactgcatgccgcgtttaacctgaaaaaactggctattgcggaagactatccgttcgaagagacaaaaacacgtcgtatcaaacagatcagtgtaaccttacctgcactcgtggagccctatcaggatatacgggccatattcagctatggcggcagctcgttgccggccggctgcaaatccatcgcgctgtcccacggtatcaatgatgacggccagttccggcttgatttcaatgacggccgctggctgccgtttgaaggtatcccggtggatgatgataacagcctgaccctgagcttcccggacgcaaccggtgataagcagaaaccactgctgctcagcctgaccgatattgtcattcatatccgttacaccatttgttaa

SEQ ID NO: 287065 - DNA, 315 bp, Morganella morganii
atgaaaaaaatattaacttatatatttcttgcatttttttattgttttacatcgactgcaaattctgaggactttacagataaatgtggctattatgttcatagtacggcaatagataatgacgggtattatcggtttcaattgagagatatacatcaaaatttatatcccgccagtaatctgtggagtttttcagcccgccttcctcctattatcgaattactgaatattgcacatatttcacatacacctgtttgtataagctatcgctcttacaaaaattattgggagattcttcaggtaagtatgcaataa

SEQ ID NO: 287066 - DNA, 348 bp, Morganella morganii
atgaaaatatattgttttttaatttatatattaactttggttttcgcaacttctgcatatgccaatgagcgggcaagtgaattatctaaatgcagactaagtataaaagaatacattcagtccggaaataattataaaatgacactatttatttatgataaaaaaaatgatagtgaatatctttttaaaaaacgattaaaattcatattaccattaaacaatcactcatacaattatattaaaaaagcttatttactgcataaaaaattatgcattgagtatcatgaaaataacaataatgaatacattataaagcgaatgtttgacgattatttaattgataactaa

SEQ ID NO: 287067 - DNA, 132 bp, Morganella morganii
atgttaaataagatttgtttttttgcttgctcactggtcgtagtgctgtctctgacagcttgtaatacaacaaaaggggtcggcaaagatgtacaagccggaggagaagcgatccaaagagctgctgagtaa

SEQ ID NO: 287068 - DNA, 936 bp, Morganella morganii
atgaccagtttatataccgcaacaaaacatccggaacaactggagacaaccctgttaaccggggaaagtcatttgtatgatgatcctttagagccccaaaaactggtttttttggatgcagtgaatgaacagcgttgtgtgattaattcaccgcaacgtaacagccaattaactaacaccatacctttttttatagccatactgattatggcttgttatacattgtttgttttctttaataatcatcttgaaaataaatcctcaattgaaatgatggctaaacacgtagaagaaaaatatagtaatgatcggtatcagaatgatctatctttaaaattaatagagttatataaaccatattttggtaagagagaaattagtttatttgaatatgcagaggcatataattcaggtaattttgttattaatgggcaatatgggaaataccttatcattggctggcttattttattcccgggagcgctatggttatttggctatctggcattttttacgccaccggtttatttaacagcagacagaaaacggggtctcctgtatagccatggcaggggaaaagtgcatgtcacccgttatgaagaggcacaaatcgggttagccggtaaaatgccggctatcaagctgtatgggattgatgaaaaatccggtgaactgaaaacgattatattccggccgaatgtttcccactattctgcgtttctgaccagtactgacagcgaaaaccaccgctttattacgttcctgaatgcctatatgcaacaaggccgggatgctgtctcccctgtggattatcaggcgcgaaaacctttcctgtcgtttggtaaaaacccgctccccgaagactttgaacagcaggttgcacagattctggcagaacttgataaaaggaagcagcgtgatgcgcagtcagattaa

SEQ ID NO: 287069 - DNA, 135 bp, Morganella morganii
atgaggggtgtaaaactcaccggcttttttacctgcattggcagcaaatttttcaatcagatattcgtaaatgtagcccagtacgtcatacccctgattgctattcatggggatgcttttgatcaggtgcagtaa

SEQ ID NO: 287070 - DNA, 684 bp, Morganella morganii
  misc_feature (45)..(54): n is a, c, g, or t
ttgagctgtctcttatacacatctgacgctgccgacgaagaggannnnnnnnnngagtttgagcgtgtgtataagagaatgctgcaacaaaaagagttcctcagcacccgattcaatgagctttcaaaggaaattgacgtcttaagattaaaaaaaaataaaatagttaagtgccgtcaatgtggcctggaagccggtaaagttaatgatactcacaaatggggagatgattatgaatgtcttgtttgcgaatcgcagggcgttgcggtagagcaagtcaccgatactttgccttgcccaaactgtaaagtaccattcgaatttttcagtcctgacatcaataaatgtccacaatgtgctcatgagatcactacaaatatcttaataaaattgtgtcgcgacgtatatgtaacgggtgatgattggtgggaggaaggtggcgaatgtgtcgctggttgtcacgtatgtcagcacgctccaaattcagttttctatattgaaggtcagtggagttgtgtttcatgctttgatagaggatggtcagcagttaactgtccacattgtgatgagtatgtgactggtgatatggaaacaatcaaatatttcgcatgttataaatgcgaagatgagcaacggaagtttattctagctgaagctggaatttcagagtcaactttcaagtaa

SEQ ID NO: 287071 - DNA, 1086 bp, Morganella morganii
atgtttaaatctattattgattttgttttgaaatcattatcaaaaatttttttcttaaatgaaaacagtctagccaaacaacctatattttggataggaacattatcacctttgattttagccacatggcttgaatatcacattatcatgctagataaatcattattatctattacacgggcttcagaccttgttaaagaaagtggcctgcctatttatatttccgctgtaactcctatgctaggagtttttatttcaaacattcatagaactatacaaacaaaagcacaaattaataaaaccgaaattcaaatagaagaagcagcaaagaaaaatattattgatggattttattctcatgtgagatatataacagaagaaattccttacgccaaggatacatcattttatgatgcatttagtgaaaataaattacaagatattaaaattgatctaaccataaagcacccaaagtctctttaccattatatttataaaaaatccagtattatctccggatttagcattgaggttaattctgttttcattgaagatgtaagggaaatattagataatttattctatatttctagtgaattaaaggaatgtattataacggataatgcaggatacccaattagcataactcgtttaaaatcaaaagattttatcgcagagcgattatcacagttattaaatgtgaacaaaatgaatagtctgcttagctttaatgaatttaatattaaatgtgttgagccaatgacaatttatcatataatcaactcgctattctctttgagcactattgatcttggtgattccgacattcaattaaaaattgaaaaacatattaaattgcaaaagcggtatctttcaaaattccttgagtactacggagtatgcattttaaactatacgaattttatagtaaaaatattagaagttatagaaaataatgacaatgacatatttgataaatcaaatacaacaatacaaaatgcaaaaagaatgatcagtgtaagcgaaattttaaattatgaattagatactcgctctcattttgataaatatcttaaatctacctaa

SEQ ID NO: 287072 - DNA, 405 bp, Morganella morganii
gtgttcgcggaagagagctatgaagccaaaatcatccgtgccggtgagcttatcgatgaagaaaaagccctgaaaaaagcggttaaagacgcggctgccacactgcacttaaaaaccaaagccacaattgaagatttcaccgatgagcaggcggaaaaactgctgcaccttaaatggattaccccgttaagcaccaaactggccgcgatgccaaacgccgtcattgaccagctcaccagccgggtacaagcccttgctgataaatacgccgtcacttattcacaagttgccgctgaaataaaaaccaccgggcaggaactggcagagatgatgagcgaattaacgggcaatgagtttgatctgcagggtctgagcgaactcacccgcttattaaagggcgaataa

SEQ ID NO: 287073 - DNA, 1254 bp, Morganella morganii
atgagtatggataataaagtgccggatattcggtttaaggggtttagtggggcttgggataagaaaatattaggtgacttggttaagctagaaaatggtttcgcttttcagagtaaatattttaagaacaagccaactcaagttatagttcttacaccaggaagcgtaaatattggcggcggatttaaagctggtaaaggacaatactacgatgagaaacaggaggttccgtctaagtatgtatttaagcccggtgaaatgttcataaccatgacggatttgactccaacagcccaagctttgggctttccggctataattccaaaagatgaaaacacatatcttcacaatcaacggctcggtaagttagttggattccaaggtgatatagcttttctgtataatctgttgcgcactacgataaaacaaaaagaagttgtattagcttcttcgggtaccacagtaaaacacacgtcacccgacaaatttttgaatcgcatttgcttattccccaagaagcaagaacaaaccatcataggcaactacttccaaaaactcgatagcctaataaaccaacatcagcaaaagcatgacaaactcaataatattaaaaaagctatgctggaaaaaatgttcccgaaacaaggtgaaactatcccggaaattcgttttaaagggtttagcggggaatgggaggagaaagagttaggtactgatgttgcagaaattatagggggaggtacgcctagtacatcaatttctgaattttgggatggtgatattgattggtattcacccactgaaataggaagaaatgtgtatgctgagggtagtcaaaaaaagattacagctttgggtttgataaattcgtctgcaaagatacttcctgcgggtaatacagttctttttacgagtagggctagtataggtgatatggcaattcttgctaagcctggcacaactaatcaaggttttcaatcgcttattgtaaaagaagggttttcaccctatttcatctattcagctggcaaacagatcaaagagtttgcgcttaaacatgcatcaggctccacttttttagaaatttcaggtaagcaactcgagcgaatgaaaatttttgtaccttgcccaaaagaacaagcggccatcggcaactatttccaaaaactcgatacactaatcaaccagcaccaacagcaaatcactaaactcaataacatcaaacaagcctgcttaagcaaaatgtttgtataa

SEQ ID NO: 287074 - DNA, 1404 bp, Morganella morganii
  misc_feature (1333)..(1342): n is a, c, g, or t
atggcaagtaaagctaaccttgttaacttagatgcaatgatttctagagaagatttttccgcgcaatcagataatgatctatcttttgaatctatacaaaatatagcaatgagagatattggaatgctttcaggtttactccgaaaacctgactttcaaagagaaacaaatcactggactccagaacaggtagtttccctactaaaaagttttgttacaggtgatttaataccttctgtaattttatggaaaagttcattcgtatttgttatagatggcggtcataggcttagcgttttaagggcttggaaagaaaatgactatggcgatggtcatatatctcagaaattttttggaaacatcatatcagaagagcagaaaaaaattgctcaaaaaaccagagaattagttgattctacagttggtaaatggtctgatatagaaaaaagtagaagactaactaatatttatataagagcccttcaagtacaatgggtaaaaggagattctgacaaagcggaaacgtctttcttcaatattaataagaaaggcactccattagatgaggtagaagaaactcttcttaaacatagaaaaaaacctatatccatagctgccagagcaataattcgagcaggaaaaggacatagatactggtcttcatttcctgatgataaaactaaaaaaatagaggacttatcttcaaaaataaactctgctctttttgacccggatgtaaaatctcagataaaaacacttgatcttccattaggcggttctcgtggagtcagattggctcttgacatattaatagaccttatgtctatatctgtttcaatgagtgaagattataagaaagaattatttaaacagatcgatgatgcagatggaaatgaaacagtacttgttttagagaaaacaaacaaattactaaattgggttaccggaaatgataggggtagtttaggtttacatccagccgtatatttttacagtgcatctggtagacacataaatcctatgtttttgggtactgtattattgatagcaaaaaaattaaaattcaatgacaaagatttttttaaaaggtttacaggaataagatttaatttagagaaaacattaattaataacaaaccattactggcatccttagttaatagagcaggccacaaaaagagaactgcgtactattgtaatctctttgagtcaatgattgattttcttcttgatgtgaaaaagaaaagaactgatatgaataattatttccttagtgaaagggatatacttcaacttgctcattttgatggaaatattttggctggaactagtnnnnnnnnnntagtaatacaactaagattagtgaagatgcaaagaatgttgtttttatcgataccgcattag

SEQ ID NO: 287075 - DNA, 1260 bp, Morganella morganii
atgcactctgaagacttcgcaacacagcttgcactttatgaaaccggaaccgccccttcccgcacggaagccatcaaaatattcagaaagcaccggacacggcttaaagactggcggatcctgtatgccgacgacagcccggacgggccatttccgctgagacgttgccggttttctgaaaccggctttgtgtccaccctgtttgccggacactcactgtggatcctggatgatgatgtattgtcatcatcaggcccgcagatgttcaaaacaggatatggtacttatattgattcaaatcccgcaggttatatacgttcgctggcctatcgtgaaaatccctcagagaatttacttggtttttgccgcagcctgtccgcttatttttcacacgatgaactggcgcatattaatccatatctctacctgtgggaggcacaacgggatcgctccctgaaaaccgtaaacgctatccgtgaaaccatcgcagcattactggcactcccgcacctgaaacgacctctggatgcggagtggggaaaacaataccgtatgctgtaccgcgagcaggctgaagcagaagcggatcagcttctgtttccgttttatcaggaaccggatgccggcctggccggagcacttgagcaggagctggatatactggaatgtgttctggtcagaacgaaactgatcgaactctcctccaaaaaatcaccgcagaacaaaatgaatgagctgatgcagtttatgcaccacgagctgtcagccatcatgctgcgtgagctgtttgtctgcgcggatattctttttcatgacaacatgacacagatgtcccgcaagctgagcgggttagacatgaagaaagatcctttcgggctgttaagaaactgcgcccgggatctccatatgctcaggcatatggagcggctgacaaactcattatatgatcgtgatgatactgcattttatatcccgtcttttattacgtttgaccgtgatatcgcggatatcatacaactgacagaattgcgggcgattgcactgcaccggacttccggcgcagtatatccgctctgtaacacaccgctgatgtcatggctttcggaacggctgggtgaaaagcggtttatcagtgctgagcatattttcagggaaaaagggttcagcacacgggcagagggcaggcgcagagtgaatgtgaaaagccttcttgaagaagataaggcaaaactggctgagcttatcagcaggcgccactga

SEQ ID NO: 287076 - DNA, 729 bp, Morganella morganii
atgtataacaccatgaagccttatttttattatggggatggcgaaggttatactttatataaaaacagcatgaagatagttaaggttggtgacgataaatttaatgttttaatagatggcgaaattattgaaaaagaaatctcatataaggaggcatatgggaaaatggaatatttcttttcttgccatgagccggtgattaaaggaactaaattatgcaagatatttaaacctgtgctggatgaatttaataatgttattggcttggaaggtaaggttgaacagtttctatttccttatgaactttatggttttatggatttagcgagcgatgaaaaaggacttgatcgtataaatgaaaattttgataaatgctttaaggataagtcaccagatttatcaagttggaataatgttagtgaaaaatcaatagcggctaccagtgatgtaaaatataccagggaaatattgaaaaaaaactatgatgccggattcattagctattatgaaaatgaagaagagagaaataaatattctgagttttatcagcatgaaataaatagtatgaatcaaaaaatagatggggctaagaaagggcttcagttaacattggatgaatatactcagcgatataatactatcaatagtaactatgataatatgctgagaactattacaacgatgataagtgagttggcacaggaattaaagggatttttaaggttctga

SEQ ID NO: 287077 - DNA, 477 bp, Morganella morganii
ttggtaggagatagcctgtcacgtcaatatgctaattttttaaaatcaaaaaatattgggtttgtcgggatatttcaaaacggctgtttttcaacagaaggattttatgatgtttatgatgagagatatagtaaaaaatgcatttccagatatacaaacctattgaaagccattaatgagtacaaggatgcagatattattgtggctcaacgatgggatgacaaagtaaatctaaaatatatagacagtggtactgccgtagataagggcatggttttaaaaataattaatgattatattggaagcatttcaagtaaagctacgcgaaatcgagacgtgtatctaataggactaattcaaggaacaaagaaaaatgttttcgagtgccagcaaaagaataagcttcctatatatagattaattggcgagtcagattgcagcgaaagagatggtgagctgtctcttatacacatctga

SEQ ID NO: 287078 - DNA, 159 bp, Morganella morganii
atgaatatcgcactgatacagattgctgaacaagagtgtactgctcaatataagtgttatcataaaacctcatttgtcttttaccgggttgagaatatttattatgcggaacatatgcagattacatatcagtatattgaccggcaattaacccgatga

SEQ ID NO: 287079 - DNA, 282 bp, Morganella morganii
atgcttaatcttgcgcatgtcaaaggtaacaacacgactggtgtgcatatgctccagagagacaataaagaaggtggttttcgtatacgaaccagccccgggactttaaaaagattcacctccgttgaagtaaatccgatacatcgtgagctctttaaaggtaaaaatgaaatctatcggtccgagccatataactcgattgaggaaggtgctaaggcgttgtgtctgtttgtcgaacgtgtctgcggcgttcagtgtgtctgggagactcagaaaaaatag

SEQ ID NO: 287080 - DNA, 363 bp, Morganella morganii
atgaaaatttacataccgaaagacagactgaattttatggtaagaccacctttgccgcagttctttaatatgggcaattactatgtggtggatattccggatgattttgagctgacaggaaaacgctatgatccggagaccggtggttttgttgcggatgatacaacggcccggcgtgactttgaggatagcaaagtagcggcagtacggatcattaatgaacgtatcagtaatataaaggagctgttgtcggttgccggtgacgatctggaggaatacacagtaaaataccggctgctaatcctttacaaggaatcactgctgaccagtacctatgtgactggtctgcctgttgttccgtaa

SEQ ID NO: 287081 - DNA, 1326 bp, Morganella morganii
atgtggtacagagaaggaacggtatcggttgacggaacgaccgttaagggcagcgggacccggtggatgagcaaccgccacagtatcgggccgggccagatgtttattatcccgggactgtcccggctgtcagaaataaaacgggtggtcagtgataccgaactgatcattgctgacagccttccggtaactgaaacgggtgctgagtacgcgatagccacgttttatacggattcggtagcgtcatttggtcagcggctgtcggtatcgctggggtattatcaggcacaactgagtgcatggcagcagatactgaccggtaccggcagtgttcttattgaaacccctaacggtgaaaccgttgaggtaccgtcaatgtcatcgctgagtgattccggttttgcgctgctgagcagtgcgacagacagcgacagtgaaaagacggctgcaacatcaaaagcggtgaaaatagtggcagaggcggctgctgcgaaaattccggaagcaccggaggatggtaagcagtacgtccgtgagaacggacgctggcgcattatcagtcttgataacccgcaggtctcaggatatttgtcagatacggcttacacggatttcaatgatttgccatcgtcagtctatctgttccggttgtctgaattgaccacgccggagggcgaaaaacggtgggagcataccccggggtttttcttcggcattaccgggctgaccgaggtcagaacggaaacgatcgttttcagcaccgacagtgctgagcagcggatgaccaactattttccgtgggaaacccggctggagctggtgcgttataaaacgcagggtgcctggacggactggagtgcggtagctatcgggccgggcccggtgccgtacaacaaacggacagacatggctctgagtgcccacagggtgaacaacctgctgcttgctgcgtcagacattcatcatgatgagaatcacagtgtcacggtaactgcccgcgcagaccggtttgcggcctggttttcagagataagcccggtatatgagcattatgaacagtttaccggagtgttccgttcagggagtacattcctgacacaggtgtttaccttcctgattacccagtccctgaccgaggccgtgatgaccggcgggatattatcagtttcctgtccggccgccggtggcggtaccaatacggtcagtcttgtcccgcaggagacagaggggcgcattgaatggggggttacggtcgactgcacagattcacttgtttatttatattcatccggcctgaacagtttatattctgactggcaggcataa

SEQ ID NO: 287082 - DNA, 666 bp, Morganella morganii
atgagccaatacggactgagtgtgacgaatgcagacggaaaaggtatgcagattgacagtgagtctccgggagcggctctttacgtgatttacaccctgccgctgacccgccatgtttacggtggtacggcgtactgcgccaccactctggttattcctttttcggatgccattgtggcgtacaaaggcggtattcctgttttttatgatcgttcaacgggacagttatttgccccgcctgaatatcacgggcagtcggtgacggtgtattgttttaaggtgaaccggtttacgtatccctattcccggttcggcatggttatctgtgatgcatcgggaaaaacaaccttcagtaccgcgcacagtccattactgattaaagatgtgatcacctcaccagctatgaaaccgggaaaatttgaacctcccctgacatataacctccccacaggttgcggagttatattggaaccccgtttttttgccgggccatggggggcgtatgactggggagtcttcgcggtcatgatgtctgtcaacggcagtcagctgaccctttccaactattttgccggatggctgacagagagccacccgaaagaagtacagggctggaataacaatcagccgttgccgctggttattgttggcctgcaatattactga

SEQ ID NO: 287083 - DNA, 294 bp, Morganella morganii
atggattacggactgaggacatgggacgtacagggtcgtcctgagatagaggtaacatcccgtattctgaaaatactgggggcggcggacacagggaaaaaagacggttccttaactgacggaaggctttccggcgggcgtccgttttatctttgtgctgttaccggcacactgccggtacaggtttggttttccggtatcacgatgtactggaagtaccggtctgactggaacggctatacaactgccggtaaacccggcagtactgacattattctttacggggtttactga

SEQ ID NO: 287084 - DNA, 1014 bp, Morganella morganii
atgccggtgggttttgccgccaccggtattaactgggggatagcgcttcactggggatttccgtccggtaccggagacacactgaaaacggagatccagtataccgcgaacacggattaccatgacccgctgctgttgtctgatgttccttatccgatgccagaatatacccagctcggccttaaggccggacagtcatttttttaccgtgcgcggctggtggacaaaaccggtaatcaggggggctggactgactggatacacggacagccaaacagtgatgcgtcggattatctgaatgatattgcggatgaatttatgagtgctgaggacggccacaatctgaccagtgagattgatatgaatacagaggccattatcagtaatgcgctggctgatgatgccaatgttcgtgcctggcacagggaatccggcgcggcccgggctgatattctggaaacccggaagattattgctgatgaggataaggctctggccgaatacaagcaggtggtggccgccaggtttgaggaaaacgaggccgccattgagaaccggtcttttgccgaattcgacagtaacggcaacggcagtgcaattttcagtgtcagggccggtgtgaaccataaggggcagtattacgatgccggaatgacggtcggtgtgacagtcagtggcacgaaagtctcttcccgcatcggtttttctgccgaccagtttatccttctgaataaaagtaatgactcgtggtccagtccgttctcggtatacgggggacaggtctttataaacagtgcactgatacaggacgcctctattaccagcgccaaaataagcggggcgattcagtctgataactttgtatcaggcaaaacgggctggcggctggataaaaacggcacctttgagatgaacgggtcattcggcgggcagagccgggtgcagataaccaacgccgggatgtcagtctgggatgaggcggggattcttcgcacgaaactcgggaggctgtga

SEQ ID NO: 287085 - DNA, 156 bp, Morganella morganii
atgaataccggcggcggattatctgccgccggtttccggcaacaggcgctgcgcttccgaatacatcagatccagctcatactgcaaatcattcacggcctgcttcaggtggcggtattcccggcgatcagaaactcttttttctccgggtcataa

SEQ ID NO: 287086 - DNA, 291 bp, Morganella morganii
atgcttgatagtggtcagtattttattgccgtattactgagtcttgtgaatgtcatctatttcaggagggtaatattaaaacaaaaaataataaatagagtcattatatccatacttatatcaacattatttgtaaccgtatttcctcttttaaagttaagtatattaaaagaggtatatttcaatttttcattttgtacagacactaattatgttatcgcggttattacagggagtgttattaatctggttttactgcgggtatcagactctgtaaaaaggattaaataa

SEQ ID NO: 287087 - DNA, 123 bp, Morganella morganii
atgacaacccggcgtggtttaaaaattgtttatatcacggtggttatgatcagcaatatcagtttagctaccgatacccacacacaccgtttaattgtcatcagtaaaaaagaaataaaataa

SEQ ID NO: 287088 - DNA, 522 bp, Morganella morganii
atggtcacggataacgtggtcactgttaccacggaatacagtgaaacgccggaaccggaatgtgtctgggtaagggaatcagacgagttgtacgcccagcagtaccgggtggtgagtgtgactgagaatgatgatggcacgttcactatatcggcggccatgcatgatccggacaaatacgaccggatagacaccggcgcggtactcgatgaacggccaatcagtgttattccgcccggcaagcagttcccgccgaaagatatcatcattaactcttattctgtcgtgaaccaggggatcagcgttgaaaccatgcaggttacctggtcaccggcagagaatgccattgcctatgaggcgcagtggcggcgtgatgacggcaactggatcaatgtaccgcgcaatgccacgacttcatttgacgtgcccggggtctattccggccgctatctggtgcgggtcagggcgattaacgcggcggaaatctccagcggctggggatattcagaggaaaccggctga

SEQ ID NO: 287089 - DNA, 1935 bp, Morganella morganii
atgccactgaacttccgtgcgtccacactggtattcgggatcaaactgaactgggagttcgggaaattcacggaagacaccctgaaaaccgaaattcagtacagcaaaaccaatgacgggcagaacctgttactgctggctgatgtgccgtacccgtcccgctctcacgaactggccggtctggccgccggtaccgcgttttatttccgcgcccgcctggtggacaaaagtggtaattattcagcatggaccgattatgtcagggggatctctgaatttgatgcaggagaaatactggctgatttgtcagggaagataggtcatgaccaattagcacaggacctgctgaccgaaatcaacagtaaagcggacagcagtgtggtcagtgctctggacgaacgtatgtcggatattggcggggaggggactgaggcaacttctcaggtacaggcgttgtccggtaaactggacaaagtaaaggctgatttaacagagtcagtcgttgttgatctggatctgtcagcattagatgaaagtacttattacccggttattctccctctgacgacctcccgtcgctattacttcagggtatttcgtacgctggggcaatacggagataacaaacccggttatgcaactcacggctccggcggttttgccatgattgttgagtggcaggtgagcggttcaggatgggggactcagtctgaaaaccgtattattaataatgttgactggcgatggacaaatcagtctcctgtcatgggccctgcgcagttgactcacagctcagtggaatatgtgtatttacgcggaggcgcaaaatatcagctgaccaggcataaaagtgtcagtcaccggattgtcactgatacttacacaggtaacgggcaatctgttacaccaaaaggttttgttgccggtgaaataccggtgtccggtgaacagcggtttaatgccacagcaaacgcagtgaaccggcttgaaacgagtgtgacagaggtttcaggaagggtcacatcaacggctcagcaggtgacacgtctggaaagtcaggtcggggcggattcggcaaaaattgaacaaacgtcaaaggttcttactgacttaaacggcaggatttctgcatcgtggacaatgaaagtccagctggacagcaaagggaataaggtcattacaggtatcggactggggtttaatgctcagggaaacagtcagtttcttgttaatgctcaaaattttgccgtgatatcgtcactgaacgggaaagtagtaaccccttttgttattcagaacggccaggcattttttaacgatgcgctaatcagccaggcaacaattgataagttactggtcggtaaccacatcagatcagtgaattatgaaacaggccggaacgggtattttctgaatgcgcagaccggaaatgcagaatttaacaacggagtgttcagagggaccctggacggtgtggacggtcgttttacagggacggtatatgcggagagactggtcggggatgttgcagtggctgcttcatatcctcacgcctcggcacaaaatatccatagtggtcgtggcgggtggacaacggcaacgtctgtaattacgtatgcaggcggaatgccttatgacatgacgttggtactcccttcgataactgccattattgaggatgatacgggggggcgtccacgtccggttgagggagaactgcggttcagtatacgtgtggatggagttggtcagcaggcaacttctcagtggtcaggactgagtgttatgggatcagctcatgcggttattcctcgtggacgaaagaatgtgaaaatagaaattgaagtgggagtcaggcataaaggcagggcacatgtggttctgagggaaggggttgtgatggccttcaaacgcagttccgcatcattcagatag

SEQ ID NO: 287090 - DNA, 369 bp, Morganella morganii
atgaacaaatatcgtgacaaatcatactttgagattaataaggctgtggctgagcgttatttaacgcacaatttcagattaaatagcaccgatgaaattgttgagctaattgatgtagatttataccgagaatatggcggtgaaattaacctggcaaataagtacgtcattggtaaattcgacccatgcaacgacccgtctgatgccatgccgattattaacgagtgtggtattagtcttatgtaccaagagagggaattccaggttgcaactaatgatagaaattattattgctgcatgcgtaatccattgaaagccgcaatgattattttcctgctgatgaaggacacggagaatgaaaaaatatga

SEQ ID NO: 287091 - DNA, 477 bp, Morganella morganii
atgaagcggaatattgatgaattcaatggaatgaaggatttcattattggcattgttactgtaattgcatgggtgctaattggagctattgttattatcgggttcttcacaatcaacacaaagggagaaagtgtaatcctcgcttatatttcaacaatattcactataatttcatcgctgggaatagtggcaactgttggggtgtattttttgcagaaaataaacaatgaaagacttgatgaggagaatttaaaaaagaagaaaaaatcgatatcattgatatttagaatggagatagacaagttaatagctatacatgaagacattcttctcttgttgaaaacgataaaagattataaaagtaataattctgatttattgaggatgtcatttaaaaatgaattcgtaaaatttgaatttatttcatctgaggaaaaggatgttgtttatgaaatactcacaaaaaaatcgacttag

SEQ ID NO: 287092 - DNA, 474 bp, Morganella morganii
atgatcaaaaaacgcgttacagacgacatgattttattggatgttgaaaaaataaacggctacctctgtgcggttgagtcgattaactgtgcaccaaatgtggccgctgattatcaatgtttgctgctggatgagaaggtgacgctgctggagtcagtgcaggatggaattatttgtggtgaagataaatatcctgttgagtattggcatatttctctgcaacaaacagatttagagagtctaaagcaagccgtccggtcatggttcttcaggttgggtcatgctgaaaatctggcggataagcttgatgatctggctgtcggattcatagatttaattcagccatacacttatggtgctgctatttaccgggtcgagatggcaccgccggtatggtatgccataggatgggaaattttcgttgttcatacgaagtatggtgcgcttttattcagatttagttttgatggctga

SEQ ID NO: 287093 - DNA, 696 bp, Morganella morganii
atgaattttttaattttggttagagatgtaatcgtctcattttttgaacacctgcctcagtacgccgcattgattacttcaagtgtagctatttcgttatttttaataaaagaacacaaagaaaagaaaaagaaagaaatagataaagcaaaagaaaatgaaaaaaatgaaagtgaaaagatagctattcgctcagtattggcaagagaagcatttttcttactgaagcaagttaaattttttattgaacttcatgaggatattaaaaatgcagttaaggttaaaatagaaatcatgcctggcaatatgtggcgtcaaatacaaatagagtgtggtgatattgaatgcaacccatctttactgataccaacttctccggtaaagtttaatcactcatttacggttagtgcaataaaaatagatcctgacttttatcaatatattaaccaattaaatatagccatagatgtgatgagcaagagtcttgacgtatgcattggttctgctgtagaaaatgatgtggataaagtaaaaattattgcagactttatggtgaatggaaatatagaaaaaaatatacatatgacgaaatatatgattaacgctattagtgtatttaaaaatgaaatgtctggttttaaagattttcctgaagtatcagcgaaaattaaatcaacaataggcattgatttttaa

SEQ ID NO: 287094 - DNA, 348 bp, Morganella morganii
atgtcacgatataaagtgttgaagaaatcctttatcaatggccgcctgctttatccgggtgaggaaattgagttcaccggaatggcgggaaataacctgctgctgattgaaaccggtgagcgtgtagtggcgaatgaaggtaccaataccggtaacgataatcacgatggcggtgccaacggtgatagcggctccggtgttcttgttggcgatggcggtgccagcactgaattaatcgcgttgcaggatcagtaccaacagttgtttggtaaaaagccgcatcacaatgccggtgccgaaaaactccgcgtagatattgacgcgaaacgtaaagagcttggggtttaa

SEQ ID NO: 287095 - DNA, 147 bp, Morganella morganii
atgggaatttttattctggttgttttggctctgatcgcattggtcgtaatggagcgtaaaggagttctagatactggcgaatttgcggtggctgtcgttattgttttatccgcagttgctggctatcttggcgtgtctcactattaa

SEQ ID NO: 287096 - DNA, 432 bp, Morganella morganii
atgtttggcctttttagaaaaaaagaaaagaataatttaaatgaagtaaaagagctggcggcattactcgacatcaatttaacaaagaacggagaagaattagccaaccttttgttaagtaatggaaaatcaagttcagaaacattgatgaccatagtggttattatactttcaaagatgatggtagacttagagttcagtcagttaaataaagaaaaaatacgtagtgtaataattgatatcaccccactaatcaacaaaagattcaaaaaaggatatttacgccaagatgtgtatgaaaaaaacctacactgcattggtgagatatatacatacgactcaaaatcgattagtttcgcatttgacattagtgaaaaatatgaaccatatacagatgatatgctatgccgatttaaaggtgtagatatttaa

SEQ ID NO: 287097 - DNA, 1137 bp, Morganella morganii
atgaaaaatgaagtttttgatccaatgagttccacaaatgatgagttgattaaatttattaagtctgataatgagcttgatgagcaaattaaaaatgaaattattgcaggtattaaagaagcaggctgggctttttttgaatcactgccagttgtggggggggttacaggtggtgttaggaaggctgttgatataatatcaacaagatataaaataagtagacaattaaaattatataaatatgtttctggaataaaaaaatgctctactgatatcagtagatacttaactgatgataatgtttcgtttgtaataaaaaaattattagaggatgatgaggataataaaacattattttactcaagattgacagtttctatgtcaaataagacattagatgaattaccaagaagtgagagggttaacttaatatctatacttagtgatttgacatattcagacattgaatttgcatggaaatattacatgtataatttatatgacgtggtgggttacgatagtaaggaaaaacagatagaatcattattgccatatggtgatgggctatcattgaaatcaacaaacaagctcttggcgaatggtcttatttttataaatcagaataaaacatggaaaggagatgggtatcagattactgatttgttaaatgagtttatttcattgattttcgatgaaaaagatttatcacgagacaatggaaaattaaaattaaaaaaattatacaattttattgttgggtttgataaaacatttatagactttgaaactaatgaattaaaatctgatgaagttgctattgatttttgtaaagaaatagagaaatcatttgatattgtacgtggtgattatcttgcaataaatagtcttgactgggcatttttaagagataaaataaaggcagatttatattttaggataattttcaacgatgattataccaaggtcggattgtattctttaactgaggaatcatttttaggtaaaaatgaagtaacgaatggtgatgaaacagtacatacattcgacatgaataataaagaattaatgaatagaataatacaagatataaattgcgaaatattagagccagcgttagacaagtatcgtgatcagtaa

SEQ ID NO: 287098 - DNA, 1002 bp, Morganella morganii
atgtctcatatcatcccaaaaacatacaccggaagcggaattacacagagaccaggtgagttcgttaatgacaacggagttccggcttttgccggtaacctgtttgcaaggagagagcactttataaggaatggatatttccagacaaacatgactgatatcacaggaagtgtgactattgtcggaacagacagaaagcaatgcactgatggatggtatctcagtgtcgcaaacatggtcacatcaagagcaagacgatacgcccaccagaccacggatgtttacgcacctttctttgttgaaattgagtacagcgctgacacatcaaaaggaacaacctttgtagcgcttgagcaaacgcaatacgatgtggcaaggtttgccggtaagacgctggcatattcgttttatgccaaagcaaatacaccatacacgttacaaatagaagttaaatatgcctataacgatgcaaactcaagcacagaggaatctattctgattccagtgatggttgatatcggtacatcgtgggaaaagcatgatgtgcggatagcaatacctgaggtgcatccgtcaaagctgacgaagatgacaaaaatgacactgcgtcattttattcattcaaaaggaaccaggccatttaaccagggccctgataacaatattgtccactttgctaactttgatgacgggtcaccgtgggcgtatacagacactacagagcaagaggttcaggttggtaagtattacgagaatacaacaaccgccattccgctcagcgtgaattctcgtggtgaaataagagggtttgttccgtttgtattccccaaggcgtaccctccggcagcatcgcaaattacggtaaataaaagcgccacggttgctacgctatccatttcagccgttactaaatacgggtttcaggttactggaacgacagtaaataatgagaataccgtagctcttgtctatagtttcgtagttgaaattggatatgtgtag

SEQ ID NO: 287099 - DNA, 312 bp, Morganella morganii
gtgatcggtaacgcctacgaatatctgattaaaaactttgccgccagtggtgggcagaaagcaggggagttctataccctgccggaagtttcggacctgattgctgaacggcttgacccgcaacccagtgataccatctgcgatccggcctgtggttctggctcgttgttaatgaagtgcgggcgtaaaatcgtctccgggcataacagccgcaactatgcgctgttcggccaggaagcgattggctcaacctggtcgttggcaaagatgaatatgttcctgcacggcgaagacaacctacagcaaaaatga

SEQ ID NO: 287100 - DNA, 897 bp, Morganella morganii
atgtataagaatagatttccgaaaagagataacaaccacattcgagaaactttttcgtacaaggtttttagcaactcgattccaaatcaatggataataagagatttaacagaacgagactatgggacagatgttttaattgagtacgtcactgatagtggggaagtaaccggtaagttagcatcaatacaattaaaattcgtaacagacatgaggttttcaaactctggtgagtttagattttacaatatcaagccgagcaccacagactattggctgagctccaatgttcctgtgtatatattttttattaatgaaaacaaagaaatgtactttgttagtgtaactaattacgtcaataagaattatgaaaggtatatgaagcaagataccttttattattcattaacacttggcgatgttttttctattgagaggtttatagatgaatttaagtttgatattagttttgaagctaatgagctgctttttttaaatataatagaatggcataaagagtttaaggattacttcatatcttcttatagaaaagatgacttaatggttttggatggtaagcaaattgaagccatgaataaacactattcacatgtatatgaagcgtcaaaaaaattatctcttcctattaacgcaaggcatattacacaaattgttgacgaaactgattgtgaagaaatgtatgagtttcacttaactatatgtctagaagaaatggataaacaatggatcagtgtcagcaaagcagctctatctagaatgaagccacacataatatactgggcaaacaaaaacattggttatttagctggcattattctcattgctgctagcaaccttaaaagagatatttacaaattatgggggggtaatacttaa

SEQ ID NO: 287101 - DNA, 1455 bp, Morganella morganii
atggcaaataaaaaaactttagaggctggagctctttttgataattgggttttagtagaaaaaaaaggggcaggcggtaacggagaggtttggcatgcaaaaaatgagtcgggtcaaagctgcgcaattaagtttctaaaaagtggaggccaagaaaaaattgagcggttcaggcgtgaaatagaaataattcaaaatcataatattataggtgtagtgcctgttattgactttcatatacctgatgatttcaatcgaaattatgcttggtatagtatgccattggctacttcatttgaagatttctctaaagacatgacaatacaggaaattgccaatgaatttctagggctaattgaaactttaaaaaagctacatgagttaggggtgtctcatagagatattaaacccgataatttcttatattataaagaaagactttgtttagctgactttggattagctaaaacatctgatagtggaaacctcactcctgagagaagagatgttggtgctaaatttacaatggcacctgaaatgagaaggacagcatccactgcagatggaaaattagcagatatattttctcttgctaaatcgttatggattgcattaactaaacagaaccttggtttcgatggtcaatataaccccaatagttcattagctttaagtaactttcaccccaatgtctttttctctccattggatgagcttctattggcggcaactcagaatagcccggaattaagacctccccttgattattttacgtcatcaattagtcgttggttatattttactgaacattttcatgaaaggaatcaggctgaatggaaatggtttttaaataaattattcccagtaggttcacccaaaagagctgaatggggaaatcaagaagatataatatctatattgtcattactttccaaaaatagtaatttaaatcatatgttctatcctgatggtggaggcaatgacctaacaggtataagtaaggcagccgagccagggctcatagcactacatgttgatgaaaaaagtgtcgaactcatcaagccacttaagttatgttttgagtcattcggattttcttcagaatggaattatttttggttagaagtggataacattccaagcatagggatccctaactgcatgcggcataatgacgtcgcggaagacttaactgaaatttcaccaggttattatgaaagtatcagctactgggtagctaatgaatttaatggtgagcctctgccagacgattcacgtcctgtaacacgctattgcaagggggcctttgtttttttctgtaaaaggtctacctataatctaaattcttcaacatacgacggacgccattacaaaatgggagaaatggtttttcgggaatatatagaaaggaatgccaaatttcattacaagcctttaacgttttcgtcgtgctaa

SEQ ID NO: 287102 - DNA, 708 bp, Morganella morganii
atggatgacagtcacccaccctccgggcgggacagcaagcctccggcggacagcggtaatccgctgtccgttccggcgcctcaccatcctctgcggataaccaaaacacatcttcccccggatacactgcttcaccgcattcacaatgaaaaataccacgcctgtcagttcaaccccggcctgcacggtaatgcccgtttcagcccggtatctgacagtaccggttcaccaattccttctctctatggtggtctgacgcccgcctgcgccatgatggaaaccatttttcacgatatcccctgtgcccccggtttcaaaacactggataaaaacaaactctgcggactggtgctttctgctctgacagtaacccgtgaactgatgctggctgatctgagcagcattgcgctgcgcaaactgggggtcagccgcagacagctgattgagactgaaaaatgtgattacccgtccacccgtctgtgggcacaggcgattcaccggcaatgtactgacattcaggggctgtcatgggtttcacgccaggatgattccgcccgtgccgtgatactgttcggcgatcgcatatccgccggtattctccagcctgccggaggatcccgcccgctgctgaccgacacggagcttttttcagggatcctcagcctggccgataaacttgatgttctgctcatccccgggacaggataa

SEQ ID NO: 287103 - DNA, 678 bp, Morganella morganii
atgaatgccttaacgcaacaccccggtgtatctgctctggttggtacaccacaggaaatcaaacagtatctgggaaaatccaaagcagacagtgtgcttgttgtctctgtcagtcagcaggagaaccccggttatatacgttgtctgtttgataatctgactgcaatcgcctgctcaatggccgatgtgctcagtcaggagccggaaaaacaggcactggaaaaaattgtcagcgccctgctgccaccggaaccggtgccgcctgcgctgctgaaagaagccgctatgctcgcccgggccagaaaagcagtgctggaaagcgggcactggctgacggcggcagacattgccggtctcgcggggttcagtacaaccaatcccgccgcacagccgaataaatggaaaaaacaggggcggatttttgcggtgcgccataataatgctgattattttccggattatgctctcgatcagaacgccgggttccgtccgctgaaaaccatggcaccactgattgaaatcctcagttcacagaaagatgcctggggaatggcatactggtttatgtctctcaacagttttctcggcggacagcgcccgcaggatttactgctctccgcaccggaaaaagtcattgccgccgcacaggatgaaataaacggagttactcatggatga

SEQ ID NO: 287104 - DNA, 138 bp, Morganella morganii
atggcattaagcgacatagcagcaaggaacgcaaaacccggtaaaaagatgtacaaactgactgatgagcagggctttttttctcaggtgagttgtattttggttttaaaagatttcaggagtagacagagtgattga

SEQ ID NO: 287105 - DNA, 261 bp, Morganella morganii
atgagaatgattttatataatgatgaaaatcccgttttaatactgaatttattcaggcgctaccgtgatgaacatcttattacaccttccaatcaccgttatggcaaaatatttgactggcagcaaaatatggccattgtaacggataacatgaataaatcagatgcagatcacattattttatcaatatggacacaggtcacaatattgactattaatccggccctcagcacagaaatccggaaaaccgcgttgcactga

SEQ ID NO: 287106 - DNA, 249 bp, Morganella morganii
atgaaggaccaaaacggcataacagcaggtataaatcctaccagtcagcctgaggttttaaaagggtattacagtgccattttacctcctttaaatgattatgtattgttgtttgttttcctatacctgaggatttactcagatttgctggcggttagcgaagtgctcatacattttttctgtcatcacccacagcgctttattcagacggatatcaccatcaataccggtcactgcccgggtgtgtga

SEQ ID NO: 287107 - DNA, 747 bp, Morganella morganii
atggcaacctaccgtatcgaccctgacctcgcgtttatcggtcagtgcagcaatgaggaccttggtctgctggtctccgtcctgactcacgacagtaaagacggcaaaaaacggctggcggagtctctgaccacctcaccggaatatcagctcttttaccctgaccatcagaagtactggcctgccatctgtgccgaactgcaggccttcggggccaacagtctggtcacgctgctgcgcggcaacaaaggcgtgctctaccgtgaaattctgctggatgtctgcagcagaatgaaagtaaagcatgaaaaggaagactgtacagaaacagcagaaatcaatctcctgatgcagataatgagaaccagcatcagtgatatgtcaccggacgcactggctgccttatcacaggaaatgaaactcaacctgactaatcccactccgcagctcgttatgatggctctgcaggcagcagtaaatgtctccggtgtggctgctctggaactcgcatccatcgcctctttcggtgtgatacaggcgatgggggggatggcaaccacagccggtgtgaccggaatggcttctgtattcttcggttcccgcatcttaggcatattggccggtcccgtcgggattgcgctgagctccgcctggctgatagccgatatcgccggtcccgcttaccgggtcaccattccggcctgcatcattgtggcgtacctgcgccagaaggccctggcgacctga

SEQ ID NO: 287108 - DNA, 999 bp, Morganella morganii
atgcgtaatataatattatcaggtttacttctgttttgtgcaaacagctatgcggtaacctgtacttcaggatgtaataacgtctatcttacgatagataaaaatctggcatcaagcgaaaataatcccggtgttcagatggacagtaatactattacaataccggccttaaaaatgacggcatcgcataacgggtatcttatgcagtgggctaaatttaatggtgacccgattccgactccgccgttttatacgaccaactggcaatttaaaaaggtggatgattatatttcggtggcattatccagggatagtccctgcatcggtaataccggaacaatttatgtgccgtttaatgccagggtttatggtcccggttgtgtccccacagttcatcagccgggagatgccatgtcaataactccccgtgactggcagagccggcttcgtatagacagacaaattgtcagtggcacgtattcaaaaaatattctgattggtcagtttggtttttgtcagccggataactgtgcttcagctcaggcagtacagaatgtgtatttatctctgaatattacggttccgcagacatgctctattaatgccggacaaacagtgactgtggatttcggtaatgtttcaaccggtgcatttaaaacagcaggcggaagagctcagggtgtaaatccgaaggaaagtaccttatcagtgacctgcgataatatcgctgcggggacaaacttaagaatgcgcttgcaggctaataacgtcgccggaaatattgtgatttccaacaacagtgatgtcgggtttattgtcactgacagcagtgataaagaactgacacccaatagtctgtcgagttttattcctttttatctcgacggaaacacgcgggctaatgcacggatccgtgtttatccggccagtgtgacaggtgtcagacccgatgaaggtccggtaacatcacaggcctatttacggattgatttcccgtaa

SEQ ID NO: 287109 - DNA, 612 bp, Morganella morganii
atgaccaattatatctgtgcatttaatcccatagatgcggcacttaaagacggtgctgtgactgttgcaatcacaatttccgccaattccgagaagatggccagagcaatggccaccgtgatgctggaggaaacttatcctgaaaatacagggaagtttgatgtggcggcaccaataatctgcgaagctcaggcaggcaaaccagcaccggccggcgatagttttgatgaacattttgccaaagagtacgagttcaacggtaccgactggcagaaacgtgaagaagaaatggtagtgtttgcaaaaacggcaccagtcgttcgtattgcggcgatcatgctgtatgaaaaaacacaatttacccgcaatgagtaccgcaaagcggtcgattttgttcacgaaagtgatgaatacccgcagatccggaatattgcaaaaggtatcgcggccacacgcacggtttccctgctgaatgaacaggatttagaagcgctggtaaatactgttctggaaaaagctcaggatggtattaccgaagcagaagcacagaagctggcagaagaatacctgttccctgcagaaccggccaccgggcaactccctgtcccgtag

SEQ ID NO: 287110 - DNA, 1287 bp, Morganella morganii
atgcgtaggatttttgaaggtttttatgatttaactctagatgaagagaaaggtgtatttgagagtgataaaactatttttgtttttgacgcaaactgttttttaaatctatatcgctgtgaagatgaaacaaaaaaagattttatggctgtagttgataatataaaagataagttatggttcccttttcaagtcggtttggaatatcaaaggaatcgattgactgtgattagtaaatcactaaaagatttaaatgaaatgaaaaaatcattaagtgagataactaatgggataaatgttttttgcgaaggtgataaaaacataaagaataaatatcatgaattacataagaaacttatagaattaaagggggatgtaagcgaaagggtgcggttatttgtgaaagaaaacatagatgcaaggattgagagaggagattatatatcaaatccagatgatgtaagaaggtgggttgatacaatatctaaggggaaagtatcatcttcctttactcaggaggaagtaaataaaataaataaagaaggtgaggttagatataaaaataaaattggtccgggttggatggatgagagagaaaaaggagaaggtgaatcatttttcaataatataatgtataaggacaagtttggtgacttatatttatggaaggaattattaaaaaaggctaatgaagatgatattgataatgtggtttttataacaaatgatctcaaggaagattggtggtataggatacatggtaaaacaattggtccactggaggttttaaaaacagagattaccaatcaaggagtgaaagaatttaaaatgtataatcaatcaacatttgttttggaaatgttgaacaaacaaagttcaaagaatattaatgaaactttgaatgtgctagataaactatataaaactactggtttatctcaaatttatgataaccctgtattaaagaaaatgcgagattttaacgataaatatgcgtcagcaatagaattaagtaatagacttaattttaaaaaacatctttttgaagaaggccataaatctcaggggaaaaaaaattttttgcaggaacaattaatggatatagatgaagagatatctcaattagaaggtgaatgtatctttcttcacagtatagatgatgctaatcgaaatgatgaaaaacaagaggatgatgaatttactcaagaattagaatctattacacttaggattgaagagttaaaattagagcaagaatatattcaaaaattaatagatagcaaatga

SEQ ID NO: 287111 - DNA, 846 bp, Morganella morganii
atgaaacaaaatccatttagcctttatgatttcttaggatatctgatacctggggctatatttttatacatattgaattatatttttaaaattgacacagtatctttactcaacctattaaacaaatgtaacaatgataatcttaaaaatgaaataacattcgcacttccgataatactaataataattacatatattacaggccatattatctcattaacatcctcattcttcattgaagctttttcaatatatttatatggttacccttcaaaatatctattcataagaaaacatagtactttcaacatccccaaagacgaaaataaaataatttgtactataaaaataattattttatttttatcactactccctacatctatcatattagttatatttaaaaacttcaaaatatcattattcaaccaagcaaagcctctaccggaagatttaggtaatgttgtttttgataaatgcatgatagttctagatagaaacttagaaataaaaaccgattcaataagaaataaaaaagaaactgaaggattgggtaatgactactttcgaatcatataccattttatatttgaaaattcagaaaaacactcatcaaaactacaaaactatgtagcattatatggtttttgtcgaaatatatcttttgtattcctcactagttttttgttatctttatatttcacaattatggataaacacatccaaaccttttggatttcactgtttccattattaacatttttatttttcactggatttgtaaaattttacaggcgatatacacttgaagcattaatgggaacaactgtattcaacaaacattag

SEQ ID NO: 287112 - DNA, 477 bp, Morganella morganii
atgaataaaggcctggcaaaaaaagcggtaacggctgcgagtggcggggcaatagctgttgcaatggttttgatcccggcgttcgaaggtatgaggtataagccttatcaggatgtcgccggagtatggacggtgtgtgcagggcatacagggccggatattcagcgggataaggtttacacgcaggcagaatgcgatgcgctgttggataaagacctggctgttgtcgccaaaggtgttgatcgtcttatccgtgttgatattccggttcatacccgtggtgcgatctactcatttgtatacaacacgggtgtcgatgctttctcccggtcaactctgctcagaaaactgaatgctggtgacagagccggagcctgtggtgaaatgaaacgctgggttttcgcagggggtaagccgtggaaagggttgatgacccgccgcgaggtagaggaggtcgtatgccacggaatcctttaa

SEQ ID NO: 287113 - DNA, 159 bp, Morganella morganii
atgccacggaatcctttaacgctgatcaccattgctatcatcctgctgactactgttctgctgtcggtttgttatctgtattcactcctgaattactgtaaaccgctgcctggtaatccgctagacggagtgacccactatgagtgtgaagcgccatga

SEQ ID NO: 287114 - DNA, 387 bp, Morganella morganii
atgtcaatcaccaccacaatccatcaattaatccgcctatcaaaaaattttaacgacgattctcaaaatgcaggaagaagcgttactctcaccgaagcgttcgaagagcttcccgaattgtccgaaaaaatgcatcatgtcgagattgttctaaattcattacctgaccacaatattattgttgcattaaacctgatgtacgtaggccgtgaaatcaatgaagatgaaacctttctggcgtgttacgaccgaatgaagtcgggtttagagcaatcccgccaaaaagcaacttcaaaattaatggaaaagatacaaaatctagcaaattatttgcctagggcactacgtgcagcagaagatgatgaggtagatattaatacgctataa

SEQ ID NO: 287115 - DNA, 342 bp, Morganella morganii
atgttgaaatacatcttattttctcctttgatatttttattactatcatcaccacattctaaagccgcgaatgattttaaaacaaaatgtcgcattaatataaaaaaattcatacagcatgataacgagtatagaatgaccctctatattaacgataaaaaaaatggctacgattatatatttgactctgacctttcatttactctcccattaactacctttgtatataattacataaaaacctcttatattcttgggaaagatttatgcattcaatatcgcgtcgaaaataacactaatagaataaccagaatgtatgatgattatcatatggatgaataa

SEQ ID NO: 287116 - DNA, 984 bp, Morganella morganii
atgattaatagactgattaccttatttatcataattttccctattcattccttagccagcataccaatagaaaataaagatatttactttgattacagtaatgaatcaaaatatatggactctatatctgctcttagaaaaacactcagtgatagtactaatttatacggaacaaccattgttacttctacaaagaatgacaaaatatataaagcaaaaatcacaagtggaggtaacgaatttatacacatggtttttaatgcaagaaatgcctatatgataggattcattgttacatcaaaagaaaacaatggaaaattgaaagaaacatattatagattcaatgaagataataagaacaatatattggatataaaagattacgaaaatataacattgccattcaaaggcaattacactgatctgcaaaagaaagctgccgatatagagaaaatatcagccactcctgaagcaataaaaaattcagtaattatactcagcaaatatgattccagaaaaaaatatgatgaaaagggaattaaggatttaaagaaatcattgttaagtcttatcttaatcacatcagagtcagtcaggttccctgatgtcagggaatggagcaaggggcacttcaaaaaaaataatgctcaaccaacagtatttggcatggctttgacaaaattaattaaggactggggtaaaatcagtaaagaacttaaaatgttatacaacacaccaggaaagaaagatagttcatattcttatatgaatggttccatgacaacaaaacctcacccttacaatataggaaacgcctatgaattatgcgattatgtattatatatgccggataaaaaaatcaagaaaactgattcagatgaagatcatcatgaactctatcatattaaaacactaggtgatgatatttatttttcattcgaccaactaatgaacatatattattctataaactactcaaattaa

SEQ ID NO: 287117 - DNA, 2826 bp, Morganella morganii
atgattgaaaaatataatcagaatgaagttaaggggcgtaactttatattggatccttattttgatgaatgggataatggagtatgggataaaggtgaatcgggtaaatatacaaggaaaaaggtcggagataaaacgtatcttcgtattcttgggaaggggagtatttcgcaatcagttatgttgccgaaaggaagttctggtgatccggcattacctcctttttattcattgtcttttgattactttattgaattcaatgtatctgcatcaataatactgacatatataagtaaaggaagtgaacggaataaagaagagattttcttacagaatgaagaagagtggtataagaaagaattatcacttaatgtatcagaggacgataccgaaataaaatttgagttttatgccggtaaatcaggcgggaataaagcattgaatctgacagccgttgatatgcagttacatattggcggattcagtccggaatccattgtattcgatcatgaaaatatcccggcagataagccacagttacggcttaactatgggcgtaaacacattcttaatatcaggccgtctgatgacagtgcatggcgtgatcttgactgtgtactgaagtgggggagtgagactccgccatctaactatccaatcatttttgatcctgaactgaacactgcgcaatcattaaaaaaagagggatgtgactggaatatatcctgtctggctcaaaaaatcagcgaaattccggagacattcagcataatgctggcgtcagaatacagtgcagaaccttttgttttcgatgcggaaattggcgattacctctataaatttacggaaccgaaaatcaccgggattgccgttattgcccagaagataccggcggaaatcagcattcgtgttgtctgtgactatgatgaagaatatccggatatgccgggcgtacccgatgttgatgttctctggcaaattgacggcggaaagagcagcagtacgaccaaaacagataatgatggtatgacggctcttacatttttaccggagcaaagcgggaattataaactcattgcagttataaccgataaagcagggcgcgaaagtcgccatcagtttgacattaatgtttatgaccgctcaccgtggctggatgatacccggtttactataaacgacgacgaggttgatttttcgggagacgccgtatatctgatgaacggagagactacggcttttcacctgaattgtgataaaaaccgtaatgttttcggacgggtgaagctcgaaagtcaaaaggaaaatacagatgtcagcatcactccgccagaagaacgtgaaattccgccggaaggactgtcatgggatatcaatattgccgacactgacagcagagtactgacatttttactgaccagtgatcagtttgatattccgcaggaaattagtgttattgcattacagccggatacggatagagaaattgagtcgttgaaagtgaatggtaaagaggcggataaaaagacgccgttaattatcacaccggtaaaaccaataacacttaattgtacggtcaataaattattgtcccgtttgcaggctgaactgaacaatgaagaaagtaaattgctgacagctgaaccggctttcggacaattacaggcactgaaaaataatgcagcagaatgggtattaaaaagtaccaacccgcagggcggattctttaatctggatctgaatattccgccactgacaattccgctgatactttccggccgtgcactgccgcaggaaattatttcaggaattgaatgcattacactgaataatacgccgctgacagcccccgggaatttggctcttgcaccggggaggacctgtacactgacagtgaaacctcatcctttactgaaggatattcctgtttcattagtatccgatgccggtaatggaatttctgttgtcagcaatccgccgtttggtcaggaaatcagtctggcagaaaacggaacctcatggcagatatctgctgacccggcctctgcacgcggaaaattctcattgcagattcagagtcagtggggcggaataccggttaatctggatggcgtggtattgtctgcggatttacaggatgaaggttctatccgtgtcactgatggtgacatgggcagaaaatacgatattgattttaatattggttttgcttttctggcttttgaattttattcactggatctgaaacttctgccggataatttaatcagcggacaaactgtttcctgggaactgacagaaggggactatcaccgggatgctgttttgtttgatccggagacaccggtaatattagatttaccggaaactggttgggagttcaattataccagagaagaaagtacgcaattcgatgtagtattaaacagtcaggggaagttcagttataaaattccgtgccatattttcagtaatgataaatatcttgaagaaagtcaatgtgtttttatgttgaatgattcagttattgtccctggtataaataataacaatcttgaatataagaaaaaggtatcacttaaactgaaattatcacaagaaatatcagcgtttctgaatggaatggtattagcattagttgttcataaagctgatggtgatagtcttattataacctcagatgaattaattattgttgataaaaataaacctgaccttgagtggaccgttgaaactgatgtggcagtcggtaaccgttttacactggagatcgttttggcgaatttaaaaaatatccgtgccgttatgaggtttacctcagtgtaa

SEQ ID NO: 287118 - DNA, 474 bp, Morganella morganii
atggcaaactcaatatatctgaaaataaaagggacatctcagggagatattgcaaaaggatgctcgacttatgattctatcggtaataaatatcagaacggccacgaagaccaaatatatgtttattcatttgattatgatataaacagagatcaaaatatcagtcattccccggtaattatctctaaaccaatagataaatcctctccgcttttaggtgttgccataacaaataatgaggttctggaatgtgaactggagttttacagaacaggctctcatggtcatcaggagaagtattacactgtaaaactgaccaaagccagtattaccaatatatccgctcattacccgaattctctgacccatgcagatgctcaggcatatgaagatataacgataaaatatgaaagcatctcctggaaccatctcagtgccggaacatcaggttacagtatccggcaaaatatctaa

SEQ ID NO: 287119 - DNA, 687 bp, Morganella morganii
atgacaaagagatcagatattaatagcggaaggctgatttataccgaagaattaggctggatagatacagggcatgcaaaaggagaagatgcatctgttctgatgaatgtattaaatgccggtgatatcagtactaaagagccttactttacagtgaaatacacccagtatatgggaaaaggcagagcacatggtgtatcgaaaataacgcggtggaaagtcagaagggggttatctgacagtgataagaaaagagttgcacttacgataatcatgtacaccacacataaattcgagtcactccaggattcatttccgttcagctggaccactgacagcggctatagcggagaggattgtatatctaacctgcttggtttttataaagcgacaagtgatgtggatcctgtaagctatctgacaattgtcagtaaagaagcagcatacagacgctgggactactatgggtcaatcgggaaatataagaataaaattttccagccgctgatattccctgatccgctggaatatcctaataatgcccgcccttattttgtatcattaccgttattcttagatactgtaaaacctatcagtgatataacgaaaagtcagatattgatacatatcaaagatactacagggattaatttcggagctgaaagtgaatggattaaagttgagtag

SEQ ID NO: 287120 - DNA, 840 bp, Morganella morganii
atgagcgtcaattttgatgtttggattgatggtgatgacttctctgttgatatgaatgcgggcttggagacatttcgaggagcttccgaggttacgcgtaaagtcgctggtacgcttttgaccgagaaagtacctaagcaacttactagcgatagtaaagttagaaccaagctcagaaaaaactttaaaggctcatttatccaaacctttactcttgagctagaagatcccgaactacaaagtcgctttagaaagatcggcaaactccccttcactgagctggtgagttattttgtgcatgaagcactgtataaagaaagccctgagttatctaagaaggcttctaaggctttggataaccttggggatgatctagctgaagagttgatcgaagagttgagagtttcagcacttagccatttgcactctgttgccactcacttcaacaaagacgtgaagttaagatatcgtcaaaaccagactgaccatatagtgctagctaaactagacagagggacaggatcgactttgaaaacttgtatgaatgcaaaggtaattgagctagaagctagtattactcgtctgaacatcaatacgggaaacggcagacttcagataaaaggtgctagtgagactatagcgtttggctttcctcagcaggtgaagtttatagagcagaataaggcgctgaagcagaaactctctgataacttgcatgtgaacaatgggttaggatctgatcgtgataaatggaaaacactcacgcttcgtgctagcactcaaactacgagtaatggtcgaataattaaatatatcgtacaaggtatcctagatgcttaa

SEQ ID NO: 287121 - DNA, 738 bp, Morganella morganii
atgcttaataggtattttattacagcggtcatattgatggttgtggttattgcctcctttgtaatccagttttacttcaatttggggtatgggatctcagataagccttctgattgggttgattttagtgatttcttcaatgggattgtcagtccactactaagttttatgtccttggtattgctaattcattccttgaatctacagaatcaggctaataaggacctgagagccgaggtaaagcttaatcaaaagaacgaacagctaagatcatttgaaacctatttctttggactgatagaagcacaaaaggcttcttttactagcttcaaattagaattcccatcccatcttggggcaaaaaatcttgaaggagtcagtgctatccaagaactagaggatcaaattgagttgatgcgagataacaacgctcaagacgctgatatagaacaagctctggatgagatagataaagatgagcgtattcataatacgattcgcattttctacaacatagtcagaatgatcactgacaggttgactgatgccaatgggttcgatgaaagcatcagaaagggtcaattccagacccttattagctttacagaattatcccagcttcgcttagttatgatcagtatgcaatttatggactgtgagccagccaagtacctcagaggcaataatgagttcatgaaggtactgaaagaattaggcggtggtgctgatctttactag

SEQ ID NO: 287122 - DNA, 180 bp, Morganella morganii
atgaatgatattaataaattatttccttttggctggatggaattgatgtttttttacttgacatttttctgtttaatcttcttcgtttaccaactaaataaacacttactaaatttaaccggagtctatttatcaattggattaggtgtaatatttttttttgattttcggcataggtaa

SEQ ID NO: 287123 - DNA, 918 bp, Morganella morganii
atggatctgcgtttactgcgggcatttgtgactctggccggttgcagacattatcatgaggccgcatccgtcctttgcattacccagcccgcactgaccaaacagataaaactgctggagaacaggctcgggctgacactgtttgtgcgcggacggcacggtgctcaactgacggcggagggcgctgaattattaccggcagccacggcgctggtgacacagagccgggagtttatgcatcatgcggcgcggctgagccgtcagttaccggcgcggctgaatgtcgggttcggtatttcagcatttaaagaagcggctgaatttgtcagccggctgcaaagaacgttgccggatgtgcaggtgtctctggatgatttcccctctcaggtgatgacggaaaaattactttccggcgaactggatatcgcctttatgcgcctgccgttaccggaaaatatggctcactgcccggaagctgttgcctttaagcaggaaacattatctctcgcggtaccggccggaactgtagtgcagcccggtcaggaattgtcactgctcacccgcaatccgctgctgacattgcatgaaaaccggggcgcggggctgtatcaccagataacggcatttctggatgctaaccatgttaccccgcaggccgtgcactacagcaacgatatccggacgctgattgccctggtggcggccggtgccggtgtcgctctcctgcccggcgaagccggtgatccggggcatccggatgtttcgttttacccgctgactgactttgcacaggcatcctggaagatgggtatggtctggcggcgtgagtcaccgattctctggcggcagcagtggcgcgagtggctgacagtaaaagatcacccgttcggtttcggtaaacccgggagcccggtgtaa

SEQ ID NO: 287124 - DNA, 1557 bp, Morganella morganii
atgtttactgtaatactaaaaatttttgtatgtatattattggtagcagaattatattatttcatagatagtgattatttttccgctggaactatcatagattttatcactatgatagccacagcccttatatgtttttttacatttagctcagtacaacaagttattaaatcaaatgagcagaatgaggaatcaaacaaaaaaaacagagagatcaataacctacaaatagccacagaaatatttgataaaaaattcgcacttttattacaagagcacaaatactacttagacctattattaaaagattatgacctgtatataaaaaatgacaaaatattaagacaatcagggttagaaacgttatatattataagaggagaagtaaaatctataaaccataatagcagtgagtatatttttttatcaggtgagttatatatatccattaaatcaatattagataatagacgtctcgacgatttatttccttctatgcctagtattatggaagatctgaaaaaaaagctatcagatattaatttaaatgaagatagtcaccattgctttatctctttaaacggtaaagtgataacaggttctaattgtgaaagaaaagatgacttttgttactctgacaaaggaataaattacacggaaattttacacgctaaactcaagtgtattatggatgacgaaaccattgaaaaagtaaaagaatcaattaaaagaagtaacatgtttgctaaaaatacaatgagcccatacatgcgcatcatttatcacatattaaaactatcatatgaacatgctataaagctaataaacactaacaacatagataatgaaaaagaaaaactaaaacttattaaagtagaaatgaaaaaaaatactaatattattagatctgtaatcccaaacaatgttttattactaatagcaatcaactcgttatttttttacaggaataatagagataaattatatatgttcaatgatgttgatttaattgaacaaactgatattaaaaactcaaaagaatttcttgaattcgcaatttttaatgactataaaaaatactacaacttattaatgctctctgatttctttgaacatttatatattgagcaaaatgaaagcacttacagcattaacactgaaagttttcctttttcatttaatgacaaaaatacaaaaagaatacgcttagataaaaaaaacacgattcatggcaaaagaaatggtatacttatatcaagtttaaaagtaaaagacataatacgatattaccaggatacatcaaatatattttatttaaataatacaaaaagtcttatttatattttttatagaaaacacaggtctgacattcagaccatgttaacagataacatggatgccgtaattagaaaccacatcaaaggaaaatgtttaaataaaagtacatatataaccacaaattatgacgagaaaaaaaaagaactagaattatatcctgactttgcagtgtcttattcaaatggattaattattgatataaaattaaatgaaaattaa

SEQ ID NO: 287125 - DNA, 246 bp, Morganella morganii
atgaaaattaacattttatattatgcagcactgaacatgaaggtgaaagaaaaggcaccgaaagtgagctttgcctctctgatgaagcagtttactcgaacagatccgtaccagtgcgtgctgtgtggcggaaaaatggtgtttaatagtgcgaaagcgggtatcagggcaggaagcttgctggaaatgcgttgtcatgaattaggggttatacgcaggaaacctggatttttccgcagtcagtaa

SEQ ID NO: 287126 - DNA, 753 bp, Morganella morganii
atgaaaaaactaaaatttacgttcaaaaatgcggctggtgaagaactggccggattgcttgaacttcctgaaaatcctaaagcgtttgcgctgttagctcattgttttacgtgtggcaaagacctcaaaggcgcggcgcgtattgcgcggaaactgacagagaatgctatcgccgttctccggtttgattttactggtctgggaaacagcgaaggggatttttccaacaccaacttctcatccaatatttcggacctgctttgcgcggtagattatctccgccgacagtacgaagcgccttctttgctcatcggccatagcctggggggatcggccattctgtctattgccggcgaagttcctgaggcaaaggccgttgtcaccataggatcacccggagaactgacacacgtaaaacgtctttttaaggatgatgttgaaaacattaaccagcatggagcctatcccgttgagctggccgggcgggtatttaccttaaagaaacagatgctggacaatattcaggaacacaaaatcgctcataaggtgttcgccatgaacaagcctctgcttatttttcatgcgactgaagatgatactgtgttaattgagcaggccgaaaaaatattcaaagcagcaaagcatcccaagagtttcatttcgttgggtaaggcggatcaccttctgactcatactcaggatgctgaatacgttgccgatatcattatatcgtggagcgaatgttacctataa

SEQ ID NO: 287127 - DNA, 870 bp, Morganella morganii
atggccaattgcgcgctcattcttaaaatatccctggcaatgctggcatttgctgcaaactctattctgtgccgtctggccctgcagggaggccacattgatcccctttcattcagcagcctcaggctggccagtggtgcactcgtcctgtcacctttcttgttttatcacgcaaaaactacattatcgctgtggcgtccgctgagcggattttacctcatggtgtacgcagtgctcttctctgtcgcctatatccatctcgataccggggcaggtgcgctgttactttttggtgccgtacagtttgcgatggtgatccacggattatttaaaggggaatcactctccgttatgcgggcttgcggtttagttattgctctggcaggaattgctgccctgctgttacccggggcgaaggcaccgccgctttacagtgcacttatgatgatcgttgccggattagcctgggccgcctattccgtcagggggagggcgggccaggcggccggggcttcaacggcggcaaattttgtactcgccacgccgatggctctcgctctttcgttgctgtttatgaagcagggtcactatgatgctgcgggcattgctttgtcattgctgtccggtgccgccgcctcagcctgtgcatatgtattgtggtatacccttttaccctctctcggctctatcaccgccagtacccttcagctcagcgttccctgtctggcaatgctagggggtgtggtattcctggatgaatcactgacggtcagaacgatattttctgccctggcggtgctgactggcattgtgatggtgacacgcgagaaatccccccgtcagtcgatgacaaaggcgagagaaccttaa

SEQ ID NO: 287128 - DNA, 1224 bp, Morganella morganii
atgaaatatgattttgatgagtacgtaagcagagagaaaacagacagtctcaccgtggacggctggcgggaatacctgttttcgggacagtccgaatttgcaatgcggtatccggcagaagggctaatcaacctctgggttgctgacatggcttttgccacaccagagccgattcttcaggccatcagagaccgtctggatagaaaaatactcggctacactaaaatctacgacgaagaatactatgagatctttggcagctggtgtgagcgacaatatggtcaccgtttcaaaacggaagacattgtgctgtctccgggcattattcccgcgctgaaccgtctcgtcccgcttctgactgacatggatgacagtattcttattatgacgccttcatatggcccgtttaaaaaggcgggtgaatacagtcagcgtcgcgtggtgtactctgcgttaaaaaaatcagcaggcggctgggaacctgactgggaagactttgcacgcaaagccagtcaggccgatttacgtgtgaaaattcttttcctgtgtaatccgcataacccgaccggacgagtctggcggcctgatgaacttaagcggattattgaaatttgcctggccaatgacatctgggtgatatctgacgaaattcactgcgacctgtcccgaagcggtatcggtcatacaccggccgcctctcttttccctgattctacacgcattattacctgcatgtcctcgagtaaaacattcaatctggccgggaatttgttggcaaatattattattccggatcccggtgtcagaagcgagtggcgtctcagacacgacgagttcatctctccactgagcctggcagcaaacaaagcggcgtggagtgaatgtgatgactggcttgtccatctgagggaatatattgacggcaatttccagtacctgcacgactatctcaaaagctatttacccgaaaccaggttctcgatccccgaagggacatatctggcctggatagatattagccgctacctgcccgacaccgcaggtgaggatttatcgctgtattttgcccgggagtcaggggtccttcttgaagggggcttgctgtttgtcgacaatggggacggatatatccggttaaatctggcctgcccacggagtatgctgacagcagggatgaaaagaatttcacaggtactgcggataccggctcctcatcgtgtataa

SEQ ID NO: 287129 - DNA, 774 bp, Morganella morganii; identical to SEQ ID NO: 195090

SEQ ID NO: 287130 - DNA, 702 bp, Morganella morganii
atgcaaacgctgaaacccacccttaccatcgatatctggtcagatttggtctgcccgtggtgctggattgctaaaaaaagatttgaacagggtctgaatcgctttgaatttcgcgaccaggtggtgatccgccatcacagctaccgtctggccggtggtactcccgcgatgccttttaaggatgccatcgttaaaaagctgggcagtcagcattcagcggagctgatgatgaatcaggtgggcaccgccggtaaatctgaaggtctgatctacaacttcgacggcatgatgtttggtgatacagaagatgcacacaccctgctggttgccgcgcgtaaggccggaattgcggacgcggtggaagaacgtttttatcatggcagtatcaccgaaggtcgctctctctttgaccgtcagcagctcgttgccatggccgtagaagccggtatgccgaaagctgacgctgaagccgccctggaaaatgacgattttcacgccaccgtttccgacgatgaagcccacgcacagtctattggcctcagcggcgttccggtttttgtgatgaacgaaaaatatgccatcagcggggctcaggcagcagataactttttgaatgccctgcgtcaggtctgggatgaacagcaaaccgaattttcagccactgcgggtcagacctgcggaacggatggctgcagtatttaa

SEQ ID NO: 287131 - DNA, 1107 bp, Morganella morganii
atgagtaagcttttcaccccctacaatctgtctggcctggcgttaaaaaaccgtgtagtcatggcaccgatgacccgcacccgcaccatgaatgacgtgccggatgaggtcgtggctttgtactatgcacagcgtgcttctgctggcctgctcatcaccgaagggatgccggtttcagaagaaggccggggttacctttatacccctggtatctacaacgacgaacacgtccagggctggcgtaaggtgacacaagcggttcacgccaaaggtggccgtattttcgcgcagctctggcacgtcggccgtatgtctcacgtctctcttcagccaggccacatagcgccggtttcagcgggcaccgttcaggcggtcaataccaccgtttttgcgctgaccgaatccggagaaccgggcccggttgtaccaagccagccacgcgcgctggaaacgcatgaagttaaacgcatcactgcagacttcgtgcactccgcacgcctggcgatggaagccggctttgacggcgtggaaatcatggcggcaaacggattcatctttgaccagttcctcagtagcgaactgaacacccgcaccgacgaatacggcggctcggtggaaaatcgtcagcgtttcctgctggagaccattgacgccgtggcggaagccgtgggtaacagccacgttgccgtgcgcctgtcaccgttcggccgcatttatgacctcgcgccgtatgaaggtgaagagcaaacctggtcagccatcaccgacgcgctcggtcagcgggaactggcctacgtacacctttactatcagccggtgtacaccaaagcgccacttccggaaggcttccgccgccgttttcgcaacacgtttaaaggcaccatcatcgctgccggcggttttacccgtgatatcgcagagcaggctctggaagatgatgagctggatctggtggcatttggtgtgccctacatcgctaacccggatctggttgaaagaatgcaaaacggctggccactggcagaaagtgaccgcgccacctactacggcgtcagtggttccccggaaaaaggctataccgattacccggtctggcaggcgcaataa

SEQ ID NO: 287132 - DNA, 330 bp, Morganella morganii; identical to SEQ ID NO: 19372

SEQ ID NO: 287133 - DNA, 339 bp, Morganella morganii; identical to SEQ ID NO: 195086

SEQ ID NO: 287134 - DNA, 582 bp, Morganella morganii; identical to SEQ ID NO: 19374

SEQ ID NO: 287135 - DNA, 558 bp, Morganella morganii; identical to SEQ ID NO: 120952

SEQ ID NO: 287136 - DNA, 585 bp, Morganella morganii
atgtcacgtgtttttgcctactgcagggtctcaactctggaacagaccacagaaaaccagcgtcgtgaaattgaagtggcgggttttgccatcagatcccaacgacttattgaggagcatatcagtggctcggttgctgccagcgaacgccccggatttatccggttgctagatcgcatggaaaatggggatgtactgattgtcaccaaacttgaccgtctgggtcgtaatgcgatggatatccgaaaaacagtagagcaactggcggctttagatattcgcgttcattgtctcgcactcggaggcgttgacttgaccagtccggccggaaaaatgactatgcaggtaatttctgctgtagcggagtttgagcgggatttgctgcttgagcgaacgtattcaggtattgcgagggcaaaagcggctggaaaacgcttcggtcgcccccccatcctgagcgaggaacaaaagcaaacagtgacagagcgcctaaatgctggcatcagtatcagtgctattgcccgggaatttaataccacccgccagactatccttcgggtaaaggctggattgctgcaagagtga

SEQ ID NO: 287137 - DNA, 2985 bp, Morganella morganii
atgccacggcgacagatactgagcagcgaagagcaggaacgcttactggttataccagatgatgaaattattctgacccgaatgtgttttctgaacgaaccggatattgcgctcattaataagcaccgaaggccagcgaatcgcctgggctttgctgtattactctgttatctgcgtggacctggatttattccggacaaaagcagtgctcctcacaatggcgttgtatccagggttgcttcccgactgaaacttcagcctgatttatggccggaatatgcatccagagagcaaacccgctgggaacatctgaccgaactttatcgctacctggaactatccccgttcagccggtcaatgcaaaaagactgtatccgtcatctgcacccctatgccatgcgaactgacaaaggatttatgctggcggaagaaatgctcagctggctacataacaataatgttattttcccttctgttgaagtgatcgaacggacgcttgccgaagtcgtcacgctcgctaacagatcggtattttcgacacttaccgcgcaactggaaaagcagcataaatcagcactcgacagcctgctcatatcagagggtgaacaaccttcccgtctggcatggctgctacagcctccgggtaaaataaacggtaaaaatgtgctgcaacatatcgaccggcttaattccatcgctgcgctggggttgcctgatggtattgcactttccgttcaccagaacaggttgcttaaactggcgcgtgagggccggaaaatgagcagcagggacctggcaaaattcaccgatgtcagacgttacgctacgctggtttgtataataacagaggccagggccaccctgactgacgaagtgattgatctgcacgagcgtatcctgggtagtctgttcagcagggcaaaacgcacgcaggccgaacggctccagcaaacgggaaagcttattcagagcaagctgaagcagtacgttaccgtcgggcaggcgttacttaacgccagagaatccggggaagatccctggactgcaatagaagatgtccttccctggcaggaattcatcaacagcgtggaagaaacgcggtttctttcccgtaagggcaatttcgacgcgcttcatctgatcaccgaaaaatacagtacgttgcgtaaatatgccccgcgtatgctgtcagcattgcagttcatggcgacacctgcggcgcaggcgctcagcgatgcgctggacaccataacggaaatgtaccgtaaacaacttcgtaaagtgccgccatcagcgccaacagggtttatccctgaaagctggcgaaaactggtgctcacgccttcaggcatcgaccgcaagtactacgagttttgcgtactgaatgaactcaagggtgcattacgttccggtgatatctgggtaaaaggatcgcgccgctacaaaaattttgatgattatctcatcccgactgctgagtttgagaaatcccgacataatgaccagttacagttggccgttcagaccgatagccaggcataccttcaggcccgtatgactcttcttgcatctcggctggaagaagttaacgcgatggcgcttgccggtgatttgcccgatgtagatatctcagataaaggcgtaaaaatcactccactggagaacagcgttccttcaggtgtttcgccctttgcagatttggtctatggcatgcttccccatccgaaaattacggagatactggaagaagttgatagctggacgggatttacgcgtcacttcgcgcacctcaaaaataataacgtcagaccaaaagacggaagactgttgctgaccaccattctggctgacggcatcaaccttgggctgacaaaaatggcggaatcctgccctggggccacaagatcgtcactcgaaggtattcaggcatggtacatcagggatgaaacttattcagcggcactggccgagctggtcaacgcacagaaagagcggcctctggccgcattctggggcgacgggacaacatcgtcgtcagacgggcagaactttcgggtaggcagtcacggacgttatgccggtcaggtcaatcttaaatatggtcaggagccgggcgtgcagatttatacgcatatctcagaccaatacagcccgttctacgccaaagtgatcagccgggtgcgcgactcaacccacgtgcttgatggcctgctgtaccatgaaagcgatctggaaattaccgagcattacaccgataccgcaggcttcactgaacatgttttcgccctgatgcacctgctgggattcgcttttgcgccaaggatccgtgatcttcatgacaagcggctgtttattcatggaaaggccgagcgctatccggggcttcagtctgtcatatcaacaacctgcctgaatatcaaagacattgagtcgcactgggatgaggtattgcgcctggcaacctcgattaagcaggggacagtcaccgcatcactgatgatgaaaaagttagccagttacccaaaacagaatggacttgccaaagcgctgagagagattggccgcatcgaacggacactatttatgctggactggttccgtgatcccggtctgcgccgacgcgtgcaggcggggctgaataagggtgaggcccgtaatgcccttgcgcgagcggtctttttgcaccgtctgggtgaaataagggatcgtgggctggagaatcagagttatcgcgccagcgggctgacattactgacagcagcgatcacgttgtggaacacggtatatatagaaagagctattgagtcactaaaacgaaagggtatcccgataaatgagcaactggtctctcatctttctcccctgggctgggaacatatcaatctgagtggagattacgtctggcgtaataatcttaagctgggatccggaaaataccgctcattacgtacagtcgataccgctttgtacaaaaaacagtcttag

SEQ ID NO: 287138 - DNA, 612 bp, Morganella morganii
atgacattaatcaaaagtatcaggcattgcctgatatttctattttgtgttttttgcagttcagcgcaggcggcgaagatattatttgtcggggattcattaacgccaacagtaagtcaggcgtatcaaaaagtatcgggcgatgaggttactgctgaatacagagttgggtcaggattacacagtcaaaaaaaatttaattggtttactcacataaatcagctggatttggtgagctacgacagaattgtgattgtgatgggaacaaatgaccatatagaacagggggatataaatccgtatatcagaaaagtgtggcagtttgttcgtgctgttcatcaaaaaaatccacgtgcccagattgtgtggatatcacctgtaccattaaaaaatactctcaaaaacacaaagctcagaaatacaacattagcactgcggtatacgttggattatatgggggttcaatacattgatcttcagcggtcggacaggctgggaaatcagtattcagaagatgaaaccaggcgaaaaatgagaactgccgatggtattcatttaaccagactgggcggtaattatgtagcaagggttctgttatcagaatcatactga

SEQ ID NO: 287139 - DNA, 1956 bp, Morganella morganii
atgccgatgcgtatgccggcagatatggattgcactgatccgtctacgcgaagagaagtgcccggaaaaatgcttggtttcctacctatatccgctattcgtataacaatgaaaaaggcagccggtattttatatctgggctatttacggggacgggatgccggacgtgaattatggttaagcatggatgatatgacgagacatatcattatgtttggtacgaccggtgccggtaaaacagagacattattaggttttgtattcaatcagctggggtttggcagagggctgatttactccgatgcaaaagcacaaaatgatgtcgcattgagtatagcctcacttgcccgcaggtatggcagggaagatgacctccggatgatgaactttatcaccggcggccgcagcagagcacaagaactgttggaagacataaagaaccgaccgcacaccaatactatcaatgcgtttggtatagctgaggaaacatacattattaacctgatggattctatgttaccggcggccggaaatgatggagggtggcaggagaaagccaaggcaatgatacaagcattggttttttcattggtttataaaacaagaaaagaggggaccgtgatgtctcagcgggtgatccaggaatacctacccctgaaaagtattgcctcactgtatatacagtcggtttctgaacaatggcacgaagaagcaaggctgccgattgaaaactacctgaaaacattggcagggtttgatcttactaaggttgagactccggatgaatgggcaccggaggcattgaatcaacacggatatttgattcagcaatttacaaggatgctggcattatttaacgatacatacggacatgtgtttgcaagagatgctggtgatatagatctccgggatgtggttcacaatgaccggatactcactgttttaattcctgcacttgaactatctgcatctgaagccgcgaccttaggtcggttgtatgtgtcgcaacttgctatgatacttagtcaggatctcggtgagaagctggagggaaagccggaagatatcatgataatccggaaatacagagatcgttttccatttttgtggattgctgatgaggttggtgccagttatacagaaaaattaggtgagctggcaacacaagtgagatccctcgattattgtttattattggccggacaggacgttcagcgtctgaaatccgccgccggcgataaaatttggacgttaattgccaatatgggaacaagaataacggggaaaattctggacccgaaagatacactggaaatactgcaattgatggccggaacggaatatgtcccgacgatggataatatggccagacaatccggaatgttcgggtcagaatggaatgacggggatcgtttatcagtcagagagcagaaaaaaatcagtgtagaagaagtacagcaacttcaggaaggtgaaaatatcattttattcagaggggatgtgatacgtgccagtgcgctgtacattccagactctgaaaaacttagccgggaaagaatacaaataaacagatttatcgaagttgagccggcaacacctgaagaattgcttgctcagtcaccggaaagtgtccgaagaagttttccgcaacaggaaggcattctgaatattctcagtgcggtatcagagcggaatgtcaaaacgttttctgatctgcgtctaacagatcaggtattgaacagccttatcagccttgaatcagaatggtcggaaatctggcagcaagcaccaggcgcagcagtgaaaacaacaatgttatgggaattagcggaccgcatgattgtgcttcatggcacccgctatgaaacggcattaaatcacccgagatcactgaatattggtctgcaagcattagcagattatcaaacacagcacgttaccagaagtcctcaataa

SEQ ID NO: 287140 - DNA, 930 bp, Morganella morganii
atgattgaaataaatatcaagggtagctgggtttcgattatcgaaaatagcggggttgctaaaaggatactctatcattttaataaggataaatattgtgcgtacgtggcatcagataaatcaattatatgtttttctgaaacgggagttaatttacagcttgattttaatgctgttgatgacgcgagcgaagtcttaaattacatacaatcactgacactcaggaacagaatttacaaaagtattttattaatattaataattattttgggatgcactctgattggtggtttttacgctctaaatacccgatttaatcagacatcctccagttcggttgtattaccttccatttcttcattgaaaccaatgagtacgcaaccagtgagaacattaccagcaccagccccgcaaaatatatatggaaacaccataaatgatggttggcagttagctgaagatattcgtgaatctctccctgggaagctgcagaaagcagcacagagcggtatttttaccgttccatattctaccggacataagaggacaatatatgtttttgctgatccgttatgtccaaattgtcaacgactggaaccaacgctgaatcagatagcaaaaagcatgaacgtgattatttttccggtttctgtaataggaggcgataagtcagcagaacacattacatcgttgctgtgtttaccgcctgataagcggaaagcggcctggggctcgttattcgatatcgcagcagaatctgcggtacttccgaaatgtgatgtcggtcagaacgcgctcacagtgaatgaggttgcttatcgaacatatcgcatccccggtacaccttgggtcatttctgatcgtggacgttatatttctcagcaaattttgaaaaatccagctgctcttacccaatttatgggggattaa

SEQ ID NO: 287141 - DNA, 1197 bp, Morganella morganii
atgcagcacacaatgccgtccactcatgaaaatgacaaaggtattatgttaatttgtctgattcttgttattttcttgtgctggttattttttgatatttttgtatatatgacatgctggattttgtattggatttggcagttggtcgatatattcccccggtttcatccgtggatagccgaacgtatcaatatgttggcgtatgcctcgaaagaagcaaaaaacattgatttctttcaatgggtcacattgatgaatcttacatcaggggtactgctgattttctttgtaccagttggtgttttgagtggatcactgttattcaggcaccctgcgttagggtttcgaagtaaacgagcaattaatcctgattctttgcccggtattaccagtaaattttcacctacagttatcccggttttgaaatatggaaacaagggattgatgaataatacagatcaggaaaatgcctgggcattaaggcctgaagagtttgcaaaacaacataacctgatacagcgtaaaacacttgatacagaagcaactacaaaagcatttgaaaatcagcttggtgatgaaatgaagccattatcagagtggctgccatatgaacgagctctatttgtcattttcggtcttcaatactttctggatgaacggaaaacagcggcttccttactggacgatctcaatcgctcatgtttagtttccgggctccgtttctggaaaagaagcactgtttctgatccgctgtttagtttgtcagacaaaggatataaacgacttttacaactggaagccgtgtcagattggatgtcatcacaccgctatgtcagaagcgcactgacagccctttacgcgaacgacctccggttatcaccgtcaaggttccggtggcttaaagggatcgacaggacactatggtatgcattgcatacagccgggacggcaaaagtatttgtggaaggtgcgggtgttgttgctcaggcaagagctgagagagctgcggtaaaactcaggttgaaagttagaggaaatatggtgtattcagcagtcagaggattagcatatgacctggaaaatatcggatttatttacccggaaacagtaactgagcctgtgattaaacaaaaaaagaagagcagtatttttagggatatttactcacctgaaattcaagaatataatgaggaataa

SEQ ID NO: 287142 - DNA, 624 bp, Morganella morganii
atgaaaaagttgaagcaaggtgagcgtcccagagggatatggatttttgttgtatatttactgattctcctgcctgtcagtttgttggtaggattaacagttcctttcgggcgtaatggaatgtcagacgatcctattcttcagataatggctttaatttcatggggaatcatcatcattccgatcgcattttttattaaaaacctgatcgcaaaacgaagagcactctctgatattgtaaataaaattaaaaatattgattgtttttatccacaacccggaaatgagtattttcatctcggggatggtaaatattttggtatcgatacttctaacggaacaatgttatatgttcatcgtctgacaaaaaataagtttaatattctgtcgttaaatgtgaaaacatggtcttcaaaagaagtaaaaggaaataaattaaggataaatacagtttatcctgagtttccttatatagaaattacggcaccgtttgctcagcgttggtttgatattcttgaatcaatgtgcagtaaaagctattctaattcatcacttaataatcacattgaaaatgtcatttctgaaataaaaagtaataattgtattttttcacctgattactga

SEQ ID NO: 287143 - DNA, 1839 bp, Morganella morganii
atgttatacccgatcatgacatttgcgggatttatttcactcgttcctacggcatcaggctgggcattgtctcagctgattatgctttgggctacatcggtaatgggtatcggaagtgcaaatctgctgacagacaaggctgctgatatgatgaatgaagggtactcactggttattcaacctaccgcacaagagtcacgaatggcagccagggggatctttgagatgaacctgtgcaaatatgcagtgaacagagaactggattcattgtatgcatttggcggggcggatacaaagccgatgaccacagttcggggtgacagtagttattataccgggaatggcagtgctatgtgtggtagtgcgcatttaccaaataccggagggaatgatttctggaatctgctttttgacgcagaagttaatacttccggtgtcgtggcttctcagcgacaggctcttgatgagatgcaaacaacacttgaccaggtagcaatggagtttgtggatacttatctggcgaaggtaaaaacagggtcgggttcttttcaggacattgaaactgaaatacagaaagcagctgcatcttatgagatgaaagttaatcaggctataaaccagattaactataaagaaacgcttcaaagccgtctgagtaaccagataaaaacatatggatgggttgctctgggaagctggtatcacacatttgcgacagcgaacagtaaaacaaatgatgtggcgaaagttgtgccattcactaccggtatgagtgatataggtgaacatggaaccggtgattttctgaatcaggtctttgtggcttacagaacacaattacagaacagccgctatgtagctccgattggaacccaaactgaaaaaaaactcagtgccgttgcggcggcggaaaatccggatacagtatttattggcctgtttaatagcccgattcagagactgaccaattatcttgccactgatttcagcggcaccggtacagaaactggtttttcagatcagatgaatccgctgttaaaaatgcaggctgtcggagattacaccctgggaatcactgaaacagtactgattggatatgccactgtatggggggccgcatcagcagccagtaattcgattgtgggatggacgaccaatctttttgctgtggatgccggtgctgttattaaagatattctgggtgcgttgtcaccattattttatgccattgtatttgcgttgctggctattggtttttctcttgctgtttatctccctgccgttccgttcctttattggatggccggtgtttttaactggattgtcagtgttcttattggttgtggcgctggccccatgtgggcggcgactcaccttggtgcagaagaagataaaggctcccgaagcgcatatggatacatattcctgatagacatgatgttgcggccatcacttatggttcttgggtttttctttgcctcagtcgcatcagttgccggcgggacgattttgaacatgctctttgcaagcgcaattgcaaacgcgaacgctgattcaattatgggaattgttaaattaaccggttggctaatgttgtatgcccgtattgcgacattcggtgtaactagattgtttgggctacaggctcagctggctgattatattattgcctggctgggaggccgtgatggcgcgaacgtaatgggcggtgcagtagataacatgaagaatatgtttcttgcagctggtacaggagttcagcgactgcctggcatcaggacgggacaaaactcggcaaatacaggtaattccagaggaaacaatgatggtatacggtag

SEQ ID NO: 287144 - DNA, 555 bp, Morganella morganii
gtgaaaagtaatgaaataacttcaacagaaaaaaatagcaagtcactggggcggaaggttgccgggattggcgtggctatttttgttcctgtttctgaattcaggactctatacaaacattgtatatcctcaccgttaaaacatctctctcgggtaaagaaattactggttaattataatcgtgattcacgacaagtcacctgggaacaagcagttaatgatacagggttgtctgtcgaaaaattgatgagaaactattgtaacctacgtcgattatggtggctttttatgtcagtatctgcttgtttaagtttgattttgatgtgcttaatgattttatcattcaatgatttacccggtgttactatccaacgtgctgctgtgactgaatttattttattacagttaacagtaattggatttataaaaacattgactataacctatcgtttatggcaattaaccgaaaaacgcgtaagtgctaatgaaagaggccggtttaaagattttctttcggaagagaattggtgtaagaaaagtattcttcttaaataa

SEQ ID NO: 287145 - DNA, 1209 bp, Morganella morganii
atgaattcaaagttatcaataaccgcatttttcctcgggggggtgctgagctcatcagcatatggctacaccgtaaatgtgaacagcagtgttccggtaacaacagaagtcgtaccgcagttggtgacaataaattcagtactggctgaaattttagcgactgagatgcagataggcactgcaattgttcaggcaacggataaacaggttgctgtcgctacggaaatagccagagcacaacgtgaggcggatattttaggccgtcagacacagcggctggaagatgcacgtaaagcgcttgaagtgtctgacagcatatgtagcgaatcagcatcaggggccgcccgacaggttggtaatcatacccgctcgagtgcatcagcactcagtacgggttcaggaatccggaatcagcttctcaaagcggtagttacatcccagccggtgtcaccgcgtcagggcggataccaaagtgcagcgatacacgctgcatactgtacagcggaagaagccaaggtgtatgccggaacggcagtatgccctgatgtatctcagagtccgggcggagatatagagctgagatccttgtttgacggagccggagctgttggaaaagcccctgacctaaccttcagccaggagcaaattgatgcggccacagcgtatatgaaaaattccgcccgtcatgatccgggccgagcaccgggaaaaggtgagctgaatagtgcaacgggcagacagtatttcgggttaatgacccaatttaaggctattcagagtgcggccagtcagccacaaatagacatgattgcagccagtcagccgaatccggcaacaaaagaagttcttcaggaagcattacaaagccagtctgctcaggagttttttaattcaactggtagtaaggaagcaaaacgaaccggcgttatgagcgaaagggaatttgaggcatttgaggttggccggaggtatgcaaacacagcatatgaaaaagatcttcaggctatgacaggagataatttaacgagagaattaatacgagttcaaagtatgaataactggctgcaattaggtataaaaaatgaattacgtaaagctgcaattatttctggtcaacaactggcactagatgcagatgcgaaatacgcccctcaattacgggaattgtcaaaacaaatgagtgcaggagttacagccagtgaaaagtaa

SEQ ID NO: 287146 - DNA, 3060 bp, Morganella morganii
atgctgaaccctattcgttggattgaggatattattacagccacgtcccgtttcgctatatccagagatttacctgattactgtgatgttcagacaattattcgactgacaaaagaagatcgtattcgcagacctgaattgaatgcaccgtatattcttgtaactgatgatggcgattatttctcagtttattctgttccgggaagtttttgtgatactgatgaaagtgccggctctgatgaaaatcattcatggtctggccgtattgaacgtatgactcaggctctcaatgcaatataccggcaacatggacataaagtcagtatggtttttgaaacagagccttcacgcggtgaagatgaagtcaggaggctcatttcacatcagtatcgttctgtgatccgtaccggaattgatatgaaggctattctggatgaaaaagttaaaaaaatatcaccatgggtcagccgcgaacgctgttatcttgtttgttataccggccgtgctgcattgtcagctcatgagcaattcaatgaaagcaaacggcttaaagatttaataaagcatagtcctgaagctgggtttggccagaaccccgtattgtcagaaatggctggactaaaaatcaggcatgatgcctttatgagcgctgtagaaggtgctttcaatgataacgggcagggcgttttattaacattactgaatgcccatgaagttggtaatgcactgagttctcaggtagaccgcaaaggtacggctgaagcctggaaaccgcttcttcctgatgatgttattattccgcatggggagcggaaaggcggggatcatacaacttttcttgctccgtggattaagtttcaggtactaaacaaggatgtaaaatcacaaggaaataaattatttattaatgggatgtggcatgggactgtttcagttacgttggggccgcagactccgaaaccattttcacatctgaaagcgttaattccccggaatattccctggcggatcaagacagatattatgcccggcggcatggcaaaattgggtgtgaaaaaaggaatgctggattttatggcattcgtaccggcattaaagccagtttggggatctattgcagctctctctcttcaggaacagagagagcccatttgtgtgatgagtattaccgccagtacctggggagagtcacctgaggaagtaacacgaaatctcacattgttatcgcaggcatttcaggcatggggcgtttgtgatgtaacccagacctttggcgatccagtcagagcctgggtttctacgctcgtcgcagcaaacaaaagcgccggcccgcatttattgtatccaccattatctcaggcattaaaccttttacctctgacccgcgccgcttctgtatgggaggacgatggaaatgcattattcccgacaattgacgggaaactgtaccctgtaggccttgccagcagtaaacagaataaactgacaaaaattctgtgcggctcaccggggttaggtaaatcagttttgcttaactcactcggcaatatccagattaccagcgcacaacagaagttaccctttatcggcggggtcgataagggttactcaatgcaggggcaaattgcgttattacgggacagcctgccacctgaacgaaaagatgaggttattggctttgttatgcaaaatgacgcagagcattgccgaaatttatttgatattcaattgggcgcgaagtatcccattgaaccggaaaaaaattggatattgggtattctgacggctctttgcattgacccaggaacaggtgagccaccgaatgcgaaagatacccggcaaatcttagagcgtgcactcatattagcctataagactaacgctgagatcagtccccaatcttatgcaaaaggtttgccggggctcgataaaattgatgcagcgctattgcggatggggttatttgaaaagtacgacgaatcctggtgggaaaaagcacagtggtatgaagtgcgggacctgttgtttgacggcggatatatccatgaggctcagatagctcagtttcaggcagtacccgagttaagcgacatgactagcttattgaattcagaagaaattcagggagcgttcggtaatattcaacgggaaagcagccaggaaaaattattggagtatcttcaccgttgtatggtgagtgcggtcggagattataaaatgctggccggacgaactcagttcattatcagcccgaatacgcgggttattgcgatagatcttaataacgtgatgggtgacgacagtaaatcaggccacctgaaaacaggaattatgtttctgtttgccggtcaggttgcagggggggcatttattcttcctcaatataaagatgacctgttttctaaagtagatccccgatatcaccgattacatgctgagcgtcttgagcagctcgaccaggaaatcaagacgatggtttacgatgagttgcacaacgttgcaaaagtcccgtttatttttcctctgcttgaaactcaggatcgtgaacagcgtaaatttggtatcagtacaattttctcctctcaatatatgcgcgattttcctgaggcagttttacgttctgcgaactcattatttctgatggaagttgatcctgatgatgaattactactcgtcgagcgatttaaagttccaaaagttacgatccgtaattttcagcgattaggaagcggcccttctgcagacggaagcggtgttccgtttctgggggtattcagaataaaaggcggaagcacattagcaagaatccttaaaaatgcgttgggccctctggaactatgggctttgaactcgtcgccggcagatagtgcattgcgttccattctgtatcaacaggttggtggtaaaacagcacgttcaattctggctgaatcttttccaaatggctcagcggtgaaaattattgaactaagacaaaaactagccggtgaaaatgattcatctaatgtgattcgctcattagcggacgaattgatcgggaaacgaggctataacctttaa

SEQ ID NO: 287147 - DNA, 618 bp, Morganella morganii
atggtaaataaaataaaggaaatattcattcccatagttccggatatcagcggcgaagatgaatgtgttaatcctgaaaaaattaatgcagaaagttgtgactgctgtggtttcaaaagtctgtatctgtggaatgggtttaggtcggatcacagcagttcacatgctgtctgtacattgtgttatttaaccggacatcttgatagtccgacagcgttacacggcaggattatttggttgcccgagttatctgctcagtctgcaatccacttacagcgtcaatcaatattggcatggaattttggtaataaagttcaacgtaaaataggtaagcgtatttatttatatttgattagacattcaagagaggttgagtatgttttcggtagttcaagaggagttgatttttctgaagcaattaaacgtattccattagggaaaagaaaccttatttatgaaaaattacgtgaatgtacattattacttcctccggatgtatttcaaatgcctgatttgcttttggcaaaatataaaacaacagagcaacaattaacttcatattcttacaaaacatataagcggagtgatctctatgctgaaccctattcgttggattga

SEQ ID NO: 287148 - DNA, 387 bp, Morganella morganii
atgcttaataatagcgtgttgtttttttctgtctatttttcggaattaaaagaacttttaattaaatatatgcataaatttttaatttcattatttggtcttttaccaactgtcgcttttgcagatggcgatttcgcagatatggcggggcgtgttgcagatggtgctaaatcaggaactaaatccgcattgattattgctcagcttattggtgctcttttcgtaattggtgctttaatttcaatgaaagcaaaaaaagacaaccctcaaattaaaggctggcacattattgttggtttattagtgggtggtgcattatgtgttgtccctgagattattaagcgttcacaagcacaggtaggattaacgcctgtaaatattgggtga

SEQ ID NO: 287149 - DNA, 531 bp, Morganella morganii
atggatggtatccagatattggtgaacctggcgagtaatattaatggtgcatttgtttctcttgcgatcacattaggcggtttttttgcggtattcggagctatcggatatttggctcatacggctagttctgaaaaaaaaaatcatggcagaagttccggccctggaaaagccattgcctggttgttactttgcggggcgttaggagggttggatcagatggtttctgccggtgcccagcaattaggttggcagggagcaacgttcggggctatcagttacattgatgtgggaacatttggcgtggccgcggatgccggaaatgccattttgacactaatccggacattgggttggttttatgcattacaaggtattcttaattggcgtcgttcattgaaggaggggcataccggtttatcttcaagtcaggatgtatcaaccggatcattaaaatttgttattggtgtaatgatgatttgttgtccgaatcttcttgatgctttacaaaaaacattgggtttactgtaa

SEQ ID NO: 287150 - DNA, 765 bp, Morganella morganii
atgacgaatgaattttgtactgttgaaaccgaagatgtgacaacggaagaaatcacttcacccgttgcatcgaaaagaaaacagggaactccctcgttcctgtctaaaaaaatatttctaggattaacactaccttggttagccggattctcggctatgtttatagctttctgtatttacctttttgctccggatgatactgatacacagacgcttcagacatcggttgaagggcaatctcagtatgctgactcagatttttcggagtcatttattgaacagtcagctttgtctgaccggaaagggaaagagccggctgcctacgcagagtcgcatgtaatgacggtacataccgccggaacggatattgcaattggcagtgaggtgaaagcatatgcggaggccaatcgggaagctatcaccaaattgtcaaatacagttacagcacagaataaaacattggctattttaggagaacaatatgtgcagtctcagtcagaacttgcaggcattaaaacccgtttggctgaattagaattgggtagaataaccgagaagccgcccaaatcgccggtacggaagacagcagataaaaataatgccaaaggaatgagtctggcatcgatccaaaatggtatggcatggatacagtatcagggaaaaacatgggcggtacaggaaggtgatcgtatcggtagtgtcattgttactgaaatagatgcggccggacgtcaggtcatgaccagcggtggtattgtgaggtaa

SEQ ID NO: 287151 - DNA, 1290 bp, Morganella morganii
atggctaatgacgcgaacagagacaaaaaaatgaccgttacggttgtgatattagcggtggtatcagtaattggcggattgtatgcattgtggggatacctggtaacaccgccaactccggtttcacaggtagatttaaataaggtaggttcatcttcgctgaatcaaagcgaagaaacgccggaatatagagcgctgcttgagaaatcaaataaagaaggggaggaacaggcaaagctggaaaatagtagttttatcgcgtcaattccgttggaacaaagcgtcatacatcccaaaccaccttcaaaaccaagtgaaataaatgcggaggttaaaaatcagccacggcagcgggaaagccgatataacaccggtaatgaacaaaatgacagaagtgaccggcaaagtgaacaactgaaaaatctgattggaagaattaaatccagtgatgaacaaccggcaggtttacagctggctacggtaattaaagacgacaactggaatggcggaaataaaattcggccggcgcagagagtggaccctcaatattcgttaccacagtctaattcaatcgttgtacctgcatattatcggggggccggtgaagtcatcgttggggtcgattccgataatgcatcaccaccggtgctggctcggttcttatcagggccatatgcgggtgcaatattaaaggcacccggaggcgcagtgctgtccggtaacggtgtaatggtgcattttacagaaatggcgctggggggaacggaatacaaaattgatgcgtatgcgcttgatcaggaaacactgactgcgagtatttcaacagatgttaacaatcggtacttctctcggattattttgccatcattgcttaaaggcatcggcggaacaggtgatctttatgctcaggccaatacgcaggttgtttcaaatggactcaatacaacaacctcacgtccggattcgccggatggtaaagcggtggccggaataatcgttgggggtaccgcagggcaggcagccaaagtattgagccaggatgctgcaagattacccgtaaagcaggtaacagtgaaaaaaggtcaggtcatcgctattcagtttgttaacggtgtttattcaggagatcgaacagataagtcaccgcgactggtcggggataaagcagaacggcaggaaccggtaccggaaaacacgttgacagaaactgactggagaaacagagctcaggaaaggattgatgcacagcaggcactgcgaaaaacgaacaggaatgaatatgacgaatga

SEQ ID NO: 287152 - DNA, 927 bp, Morganella morganii
atgatgaataaaagaaccttattaacactttcactgtttttcgctgcagcgtgggggcctaacgctgtagcagtgcctgatccggccgttatttctgaaagtgggggattttcaggtaatgcaccgttacctctgccggttcagtcagagtcgtaccggcaggcagaggaagaaattgcccctttaactcccgaggaaatacgcaagctcagatcagaaaatgaattggttgaacgtgcgttaatcacacctcaggtggccgttgtacctaaaatcagcgtgctcacagttgatctttctcccggcagtagtttaccgatggcaagaactgctgtgaattatccgagttctatcacattcatggataacaccggtgccggttggaatatcgcatcagccccgataagcggaaatccggcgttcagagtgcattgggtggaaaaatcaccggtaatggttgtggaagccattagaccctatgtaagcggaaacattattgtttatctcagcgaattacccgtaccggtcattattaatgttaacagtggtgaacctgactcggtgaaacagacctggacggttgacagtcgtcttgatctacggatacccagaaggggaccggcttctccagacgttgttttacctgaccaaaagatcagtttacatgatagttttctgcaatcctttctggatgggattccccccaaagaagctaagcggctgaaggtgagcggaaatattccggatacagtggtatggcaactgggggatactttgtatgtgcgatcccgtgctgatatacgtgatgaatttgaggcaacattgtcttcttctgatggcatgcacctctggaaaatgcctttgacaccatatttatcattttctgttatgggacaaaaccgaccattaaatatttctctggagtaa

SEQ ID NO: 287153 - DNA, 690 bp, Morganella morganii
atgtcatcagaaaataatagttcacagggtgatgttcagcaggaacatgaaatagaagaaccagcgtatcagcacgcccttatgttacagcggcgtcaggaattgggggctgcttttgcgcatcgttgtctgacggtaacagtttatgtctgtgtcctttttacgctgtcagtcaccctgaatttttatctggtttacttggtacaaaataaagaagtcaggtacttcgcgacagaaaacgggagagttacaaaaataatccctctgaaccaacccgggtttggtatcagtcaggtatcggggtttggtgctgacactatacgagaaagcttcacgctcgatttcgttaattataagcaacaaattacagcggtgaacggacggtattctgaaattgggtttcaggactattacaaagctctggccgtatccaacgttttagagacggttaagtccaaacgtatgaatttaagtgttgatgtcgggccgggagtcattcgcagtaaaggaatgttagcgggaatatatgtctgggaatatcagtatccggtaactcttaaattaaatggtcagcaaagcagtagtccggcacaacgtttcatattcacggtgcgaattgaaagagcagatgtgaatgaaaaaccacaaggacttcatgtcacacaaatcataacaagcaatgcgggttga

SEQ ID NO: 287154 - DNA, 357 bp, Morganella morganii
atgttgaagaagagcgtgtgcacagcactgcttattggtttgtgctgtgtgtcggctaacagttctgcggctatatgccgagcaggagcagcagctgaagcgggtagcaaatatgcctatgaaagagccagaaaagccgcgttttcctgggctgagagagaacggaatgcttcagatcagtttcagagttgcgttgacagaattaaatcagtcgatattcggctgccgtcgtttccgaatcttgctgatctgatcaatcaggctgctgaaaaggtatgccggtcagctgtcgataaaattaatgatcacatcccggacacaattgatccctgggaagactatcagatgcgctattag

SEQ ID NO: 287155 - DNA, 3159 bp, Morganella morganii
atgaaactaaataaaattacatggctggttatacctcgggaaaaaaaacagttagctctttctgaagctggtttactccctgatggtaaatcagcgatcggctgggattctgacgccaagctttggtatgcaaaaccgggtgctgatttaagtaaaatacgaaattggttgcctgatactaatatgaaagtttcagatggtgaccctcaaattgagtttcatgatgccttagttcaatccggatttttactcgatgaactacctcttatggatggtcagcggcatcgtgtcgctactattgaagacaaaaacggaaaaaagagtggcgtatattgcggttatatggatcgacgtcctggaggatggtttattaatttccaccgggccgataccgagaaggatattacaaactggaaagcgaccagtgttgaaagtgaccccataaagcgactacatatcagagctggtgcaaaacaggctcatgatgacgcattgcgttacagagagcgaatacatcgcgatagtgcagtaaatgcaggcaagttatatcagtctttatcttctgtggatcatcagcatccctatttattcagaaaaggtatttaccccactcctgaattaaagcagacccggagtggttctctggttattccgttttatgacataaatggcgagtttcaaactcttcagtacattacaccggatggcgataagtatctgtatgcgaatgcaccaaaacaagggcattttcacgttgtaggaggtgtgctgaatgatcgtcaaaatatccttttagccgaaggatatgctacagccagaagcctgaacatggcaaccggctatccggttgtcatgactgtagatgctggaaatatggttcatgtcgcaaaaattataaagggtaaatatccagcgtctgacctattcatgatggctgattttgatcatgcaaaaaaaaataatattggtcttttgatggcggaaaaagcctctgagctaaccggcggaagagttttttatcctgtttttacagaagaagaaattctgcggggaatgacagattttaatgatttacaccagtctcgcggcattgatgcaatccgctctcaattaactgaaattttacctaatgaggattctgtagtgagtgaacgtaatgactccgaagggccgcaattgcctgtcgatattcaacaaaaccagcgtatgtttgttcctgatggagagcacgctggatcacacgattatggcgactatgagttatatgccggcagttttactaaaccgacttctgtaatgcagggagaggcggcttcagttggcattgaagctggctccgaaccagacagtgagacaataccggtacccgaattatcattgccaccaatgttcgcaacagacgatgagaggcctgatttcctggaagcagaatctttattacattctgtgccatttgcaggcaacagagataaagaagaaagtaaagcacctgaacttaatgcaatttgggttggcgggcctcggcccggtaatacggcaattgaacctgagtcagaaaacattaattgtgatgagctgatatcgaggctgagccatgaaatccagccggataaaagtgttctttacaaactggatggctcaaatgcctttattgattttggtgaccggcttgaaatggctgccggagcaaattcagatgatgaaaaaattctggccgcattactcaccgctgcacagtattacagagggcggatcgaattaaccggtagcgatgaattcaaagaacaggctatttcattgatagcgcgacatgggctggatgtggagatgaaagtacctgaacagcaaacgatgcttaataaagcacgacatgtcggagaggcaggcccttcactagcaaacggtatcgccggtgattatcaggaattcaactctccggataccggtcagtataagagcatccgccaggatggaacactcacaccggaaaccgctgccgacatatcagcagagaaaattaatcacaataaagcagaacaaaactccggacctgtttttacggatgtaccagttcaggtgtcagagacacaacctgctttgcaaagtgaggctatttcagcgccaaatgatattgcccagatgggggatacggttgataaccatgatcccgctattcatcagagtgcccttgctgcaaagactggtttaaccggaaaaatcatggattacggtacggcgccgtttaagtttgatgaagaaaatgatgacagtttctatatcaagctacgcacaaaaaaagggatgcagacattctggggtaaagagctggctggggtattgcgggataccagggcacagaaagggtcaatgatcaccctgacctggaaaggtaaagagaatgtgacggttaacattcctgttaaaagtaatgatggacatgtaatccggtatgaaagtaaacaagcccacagaaatcaatgggccttatctttgaagcagtcggaacgtgttatgtccggaacaaatgagggggtatcactccatgtatttgatgccaaccgttttgcacagagacaggcaattatattaggtcacctgaatcttcccgtggtaccggtaaacgttcctgaggatggtttattgtggcttaaccctaacggtcagggcagtcaggataaaggtgatgcattgtctgctatcagaccagaacaggcaactatgacggcactgccgttaataagccgaactgacgacaaaggtgaaatagatttgtatctggtaaaaagtgatggtgactttttacagggtattgccaaatataatggagaatatcaccacgtattagtcagtctgccggggcaggaaggtatgccgccaatgatttttaacactgtcactgagacaggtgtaaatcctgttggttgtggcaacggtattaataaaagtaacggtaccccggtggtcagacaacatatagcttttaaactggaaggtgattcaaaaccccgggttgcgaaattagactctcctgattcagtttctccgcagctgcatgccaggcttggattcgatgctcgttatatcagtgaggaacaacacccaaaggcaatgccggcagcagcaccaatagtacaaccgaacgaacctcgtcccgtataa

SEQ ID NO: 287156 - DNA, 744 bp, Morganella morganii
atgagtacactgaaaattgataaccccgctaaacgattacttgacattttaaacgcagggaaagaaatctcttccacgacaactggtcgtacagcatggaggaaaatcattaaggctcctaatataaatgagagcttattgaatacacgccttggaaagatcatggggcttcctgaacgtattatacaaacgctgaatgaccattttcctgagtataattcactatctacacactggcttgaaaaaactgaaagtgcattttataaccatagtcttggcgggatttggagtaacttcattagccatattgacgatcaaacaatttccgagttaacactactatctatggtatttgaaactcgcggatcccatgatgtcattagtgaagatgaagtagaaagattaataactaaggttaatgatcttcgtaatgatatccgtagttctgatctgtcaaccaatttaaaaaatatgttgttgagacaactggctcagctatacgaagctctggaaacttatagcgttttgggaatagagcccctcatggatgcggttcagtctactgtaggtttagcggttatcaatgaagaatatcgtaacgaaatcagtactgaagctacaaacgaattcggagaaaggatttcatcagtccttggcgaaattgctaatgttataactgttgtcggagctttacctgctctgcctgttgtaattcaaacggcactaaattttttcagcaaatga

SEQ ID NO: 287157 - DNA, 993 bp, Morganella morganii
atggaaaagttacataatagtctaacggtattaagtttttataaagagagatttgagcgagatttatatttggtagagtgttccgtatctgccactagaagatttggtaagagaataaaggatttatattatttcaacaatgatcttaaaaccacaattttctcaaaacaaattttggatatatgttcatttttggatgagtttgatatttttaattcactggcaaagaataatgaaagagtcagatctttatgtaagcgtgctaaaccagtattaaatcgtataaaagaagtaaaaggactaagaaaatatagaaatgtaatggttgcacacaattttagactagataacgagttggataaggtcatcaagttgagtgatttcacaaaaaacaatgattatcctaactctatcgctgaagttttttttattagctgtctttgtttaaccttaatagaattaatttttgaagaattcaatgatgagctggagttagctttaaaaatttattattctcacctagaagatgataaagacacgccattgcgaggagttaaaaatttaagagaggcatatgatcaagttgatatgtatagattgaaaataggaatgaaaccaaagtttttagcggcggaaatcatcgaattcaaagatgcactaagtagaataaactttagtaacatatctgttgaatttaatttgtcttgcgataagaccaataaaaattggtgcgaggttttaagtaagtatttaaaaatgagaggttatagtaatattaaatttattcaggctaagaaaggtccatatgtagaatacttcatttgtgtttatggaattattgtaacaataattgagaggttatatatttatgaggaagattcaatcctggaaaattttaatattattaccaattggataccatcaaatgaaaaaaaacatatggaaagcatacaaaatgcttatgatgaaataatgaaatttgtaaccccataa

SEQ ID NO: 287158 - DNA, 285 bp, Morganella morganii
atgtatcagcgtgaaaccgtcaagcaagccggcctgctccgtgaaggtacttttttcgaagaactcagagaaatgtatacccggtattgtgatgccactgggtgggacttaagcaacagagttatttacgcattcagtgttgattatgaagcgcgacaaaataatcaaaaatggtcatctcatctctgttactttgtgcaattttcaccgaaggataaactcgccttttcagttcgggaagctgtggatacaatcgtaaaagctgatgcggccgagcaacaataa

SEQ ID NO: 287159 - DNA, 819 bp, Morganella morganii
atgggtaacatgaaagactacatacttgatcttgaaattgagcgattcgatgaatggattgaggataactacccagacattatacgtggttcagaagaatgggaacaggcagcacacttgtacaactgggagcaagagtctttttctgagcgacgtcagtgggaatatgaacatggcctgtttgtcgcttccctgaataatgttcatcagcgattcttgcacgcaaataatgaaatgcaaaagcttaaagctttacttaaagatccgcagcctgagctggtataccggatgtctttcgttcatgccgtgacagttatggaagcatacctgatgtactgtgcaagagctctgctggaacatgactggccacttagacggttcagagatgtctattacctgaagtccggacgtattaaaaataccgacaagttggctgcactggatatggatctttctttattcaggcctgccgcccgaaattttgtttcgcgcatgacctttcataaccctaaaaccattgagcggtatttcagtgctgttcttcacgttcccccagtctggccggttacaccactggctattattgcagagtggcgaaacgatctggtgcaccgtaatggtgtggatgaaaatgacgtcccaagagagatatctgaacaactattgaaaaataccctacaaaaggtttatgacctgattgatgcagctgatctctctatgaaacaggagattgatttattcggtaatatcagaattcaagaaaaccttgaaataattgcttcatcagttcacatatctccaacaaaagatatccgttag

SEQ ID NO: 287160 - DNA, 519 bp, Morganella morganii
atgccaactccatgctatatctcgatcgaagggaaaactcagggcaatattactgccggtgcgtttactgccgagtccgtcggtaatatctatgtgcagggtcatgaagatgagatgctggtacagcagttcgatcatatcgtcactgttccgaccgacccgcagtccggtcagccatccggccagcgtgcgcaccgtccgtttaaatttaccgtggcgctgaacaaagcggttccgctgctgtacaacgccctggctgccggtgaaatgctgccgaaagtgcagctgaaatggtaccgcacctccgttgaaggtaagcaggagcacttcttcaccacgtcactggaagatgcgactattgtgaatatcgactgcaaaatgccgcattgccaggaccctgaaaagtcggattacacgcagctgatcgaagtctctctgtcttaccgtaaaatcgactgggaacataccgttgcaggtacctccggtgccgacgactggcgtatgccgatcgaagcataa

SEQ ID NO: 287161 - DNA, 219 bp, Morganella morganii
atgaccggcggtatcaggagggcagattttggtatgccgtcgcctaagtcaaaatcaggtaacacagcatatgccacagtggagggagcgaaagcagaccagcatatcatgaccagtgatgccacaaaggcagggaatgtcgctgcggctggtgttaataaggtgactggacttaaacaaacatataatgatcttgatgaggcattccccacaagctga

SEQ ID NO: 287162 - DNA, 984 bp, Morganella morganii
atgcttgtaatacttctgcatgtatcatctccgtattttcaatggaatctggactcatacatttcaggagaaaataaagcgttctggattattgggaacgctgttgattctatttcacgcgtatgcgtcccattattctttatgttatctggatatttctttttttatgataaaaaaccgaaattaaagaattacacaaagataatattttcattattattctatagtgcatttagtattttatcatataagatattacataaacttctgcctgatgttttttattaccctagggttggaatactaaacacgccagcatcatatcacctatggttcttttatagcctgctagtcgtctatatgctttctaatatttttaatgccaatacacaaatgttaaagcaggctatagtaccaatactaataattatggtattatttaatgacaaactcactttcatcactgaatcaatgtttgaagtaaaagcaactacattatttactgttagcggtgatattgtctactacatgatatacgccgtagtcggcgcatatataagatgcacaaatataaaatctaataaattgatatcattttcactattgttagtatttattatttcaacttgttttacagcggcattgactgatttagaatcagtgaggcgcggaaaaatatttattgaattttattcataccattctccttttgtattcatatctgctgtatcgttatttctatttgtaaaatcaaagaatgaaacactgagagaaaataagttcatatcactggtgtcaaaaaattcattacctatatatggttttcacgcgatagtgctattcattatagttgaatcaacaaaatacttcttaaagtacaacccaataataacaatacctattgtatttgttattacgttgtttttaagcttgctaatgtcagttattgtaaagaaaatagatatatataaattgttatcttaa

SEQ ID NO: 287163 - DNA, 174 bp, Morganella morganii
atgaagcaaaatgatgttaagagcaagcagattagttatcgtttacggcctgaggttgcggaatttcttgcaaattacgcatctaaaacgcatcggtctattcaggggatgctggacacaattatggacagagtgatcgacaaggaaaagaaaggtgaaagtattattcagtaa

SEQ ID NO: 287164 - DNA, 855 bp, Morganella morganii
atgaattttgacgaatcattcccaagacgcgtatctatggcgagaaacgccattggtttgactcaggccgaattagcaaaaaaagtaggagtagttcctaggcaaatagcggcttacgaaggaggagaggccaaacctcgcgtaaatgccttaaacaatcttgccgctgctttggggacgactgtagagtggctatcgtcgggaattggtgagccaccaaacattggtcatatccgtgaaaccgtaaccttgccattaatacctgtgatcacttacgcccaggctgcccagctttttattggcgatgatgaagaaaatttggtcggatatgattacatcccatcatcacgagaggcttcatctgatgcatttgctgttgttatagaaagcgaatctatgcaaactgaagttggaatgagttttactactggcagcattgtaatttttgacccaacaatagaagcaactcacggcgatttcgttttatgccgattgcctgactatagttcgataacatttaagcaatacgtcatagaccaaggaaatgaatacctactatcgctaaatagcaaataccctatgataccaattaatcataactgctttattattggggtagccatagaatcaaggttgaatttgtcacttcgcgcaggattcgggaaccctccaaattggatgaaaacaatcagtgaccccatacctgattggttgggcaatgttcaacctgaactatttcatagcgaacacccgattgatttccatgaaaaagacacaaaaatcagcaatcaagagttagcctcacgccttgataagatcgagtccatgcttgagcaactactgaaaaacaaataa

SEQ ID NO: 287165 - DNA, 804 bp, Morganella morganii
atgtcgtttaaagaagctgtaataaggttagcaactgacctatcaggtgttttcagcgaaaacgcaatttgtgaagcggttgattttatttcaaataatgatgatgctttccaaaatgcaccgacgaacaataacgataacagcagccatataattgccatgctatgccgtttaattgtcgcggcagtagaaattcattatggcgacactgacactgagtttgaggcgggggcgataataaattatgaccttttacttgaataccccagcatgtctcagcatgagattaataaacttttaccgtcacgcatagcggtattcaccaatgacagcaagtacgcaggaagatttggtattgccatcagcgttaactgccgctgctgggaagatgtattttatgacatgtgccacgaatgcctgcatctattgaatccaacaaatgacattagtaagaaaaaaatccagaggcttgaggaaggagttgctgtaaaattcgccgagaacatgtttaataagtatattaaaccatactatttaaagcacccaataaactccccattatcgctaccactggtaacgctatccgccagggaaaggctatcccaagagcaatattttgaatcttatcgcattgccatgattattcctgatgataatctgaaattagttcgtgaaaaatttggtagtttttggtctgttaaagatgagcctagcttcgttgaggccatagggaattgcctgaccagtgaggaagttaattacattcttgatgattttgactacagcattaatctggcaatataa

SEQ ID NO: 287166 - DNA, 246 bp, Morganella morganii
atgaaattattaggaacaatgcgttttatcagcaatgctggtgatgtgtataaatatgagatttatcaggcacagggcacctattttgcggttatttataagcaagaagacatagtggatgtaaatggcgtcactcaccgtggagtgtgggtgcaaataaatgggaattatcaaattaaccaaacaaatatcccacattgtgaaatggcctgcgagtcacatttcgacagcaattacaaaaattaa

SEQ ID NO: 287167 - DNA, 771 bp, Morganella morganii
atgataccagagccaatagagaacgaacttcaaaaagagttgacgtcatttttattaggcggggaagttttagataggtttaccctgaaaaaatacttagaaaaatcagagtcaattattgattatgatacccgctacatgataaaaggccttgcttacggcgcagccagagattatgaaaaagcgaacgatgccttccgtgttgcactgcagtcgcatagcgacattgttcaaagaaattactttgcttacctaaatacaacaaaacaaataaaaaaatacgtaaaagactcttaccgcatgattggcaatgtgtcctctcaattaattagaatagtaactgttcagtcagctattttctttggtgataaagaaaaagccagatctgagttggataaattaataagtaaccctccgttgcaggacttcgattatcaacatataatcaatgaatacgcttattttgcgagcaactttggtgattttatggcgattgggaacattactgacaaggattttgattggattaacaatcagatacttgaggtatgtgagagattaaaaacgctgccgctttccacccagcactatgtcgacagagatcatggtgaagttgcgtttataactacagtctcaacaagagaccctgaaataatcgcaagcatggactttgaactggcgatgctgatagctgaaaatgactcatttttagagcgaggaatcaccggatggttcaagccctttactggtgaggaggtggcttcattatga

SEQ ID NO: 287168 - DNA, 393 bp, Morganella morganii
atgtcaggacacccacatgctgacttaatggctaaggcagcagagatagcgaagacggataaagattggtatcggcactttcaatttaaaactgataaatgcagtggttggtctgattttaattgtaatttcatatttcatgaatgcgtcaaataccggattaagccccgcttcatcgacattaacgggcataaggttccggagccagtgcgggagccgttggaagtaaataacttactttggattgctgatattacacaacccaatgctgagcagttgatgtggacaggccatccatcagacattttgatgcttgaacgcggaattcttcacctgaccaaagaagcagcagaagcccacatagccgccctactctctttcacacagaagtaa

SEQ ID NO: 287169 - DNA, 165 bp, Morganella morganii
atgaacgcatacgcagcacaggatgctcaggaagagcggcaacggattgccgaacagcgcaggaagcgtgaacaggaagaaagggacgattactggtttcgtgaaagtgtcggattgccaacaggacgggtgccggcagaatttttaagcggagaattcacatga

SEQ ID NO: 287170 - DNA, 948 bp, Morganella morganii
ttgattatcagcgctagcagaagaacagatattcctgcattttataccccttggtttatgaaccgagtcagggaaggtttcttacttacaaggaatccctttaatgttcatcagataaaacgaatttctttaaaccccaataatgtcgatctttttgtgttctggacaagaaatcctcatatgctaatgaaccatctaccagaactcaatctgcggggctatcaatattatttccaatatacgatcactgggtatccaaaaattctggaaaaaaatgttccaaacccaaataaagcaatcagaacatttaaagaactcagtgaattgataggtccagagaaggtcatctggcggtatgaccctattttattgtgtaacatagttgatgttaatgaacataagcgcctctttcataaaattgcacatttactggccggaaaaacaaaaaaagtagtcattagctttgcagacttatatgcaaaaacaaagaaaaatctaaataaaattaatgaattggattgcattgatattattcagcagcctgacgctttattagaactggttcactacatgcaccaaatcgcttcatcagtcgatatggtgatagaaagctgtgcagaagaagtggatgtatcacaggctggtgtcctgcacggaaaatgcattgatgaccggttgattaaaaatgtttttggtattcaccttgatcctcaaaaagattccggacaacgagaagcatgtggatgtatcaaaagtattgatattggttcatataatacctgcctgcatggttgctcatattgttatgcaacatatagctcaagctttgttcataaaaataaacaacaacatgatagtaaaagtccttttcttattggtgggatagaaggaatctcccctcattttctcattccggaaaaacaaatgatacaagggaatttattttag

SEQ ID NO: 287171 - DNA, 792 bp, Morganella morganii
atgtttttaaataaactacaagattgcaactatgaaatggctcaactgatatgttgcggtgatcgttcgccatgcaactgtgaggattctctcacagaagactactatagtgaacggaaagatagttatgattgtcagaaaaaaatgaatacttatgctataaagtatggcctcagctatattagtgagatatatcactacttagagaaatcaaaaatacttaacaagtttcgaggcaactccccattgaatgtgatctcattaggttgtggattcgctccggattattatgcactttctaaatataatgacgataataaattaaatattcagatcaactataccggattagatatcagtactgcttggaataccgcacggcctaacgcacagaattgtagttttcaatatactgatttaagaacaccgttcagtttgcaaaatgctcatattgtgtttgtatgtaaaagtttttctaccatgtacaaaaatggctatagtaggttattcttagaccaactagaactagctataaattctagcctgccacgcgattcaattattgtattcattgatgttaacttggatagctttggccgagatgagtttcataacagtatttcccttattactaactcaaatacacaatatttttttagtggaagtacttataccaaaccacattggatagaaatagaatctaccaatatcatatatgatattgaacaaacttttttagttgaatttattgatcatacaaataaaaccattgtattcgaatataggaaataa

SEQ ID NO: 287172 - DNA, 1299 bp, Morganella morganii
atgagtatggataataaagtgccggatattcggtttaaggggtttagcggggagtgggataaatatccgttagccacttttataagctctctggatgcaggtgtaagcgtaaattctggtgagcggcctgctaatgaaaacgaatttggagttctcaaaacaagttgtgtaaccaacggattctttgaaccgaacgaaaataaggttgtacttaaaacagaagaaataagtcgtttaaaagaacctgtatcagaaaatacgatcattattagcagaatgaatacgcctgcattagttggagccaatgcatatgtcggcagaagtcacggtaactatttcttacctgacaggctttgggctggaaaaccaaccccgataggtgacttgaagttcatagcctgtatattgggttcagataaaggacggctggcactgtcagatttggctacaggtacatcaggctcaatgaaaaacatctcaaagtcagcggttcttcgattagagttgtgtgcgccggaaaaaaaagaacaaaccatcataggcaactacttccaaaaactcgatagcctaataaaccaacatcagcaaaagcatgacaaactcaataatattaaaaaagctatgctggaaaaaatgttcccgaaacaaggtgaaactatcccggaaattcgttttaaagggtttagcggggcgtgggaagagaagtcatttggcgtttgctttgttaacgtaccaaacaatactctttccagagctgacttaaactataaagctggattggcaaaaaatattcactacggagacgtattgattaaatttggtgaaattttggatgcaggcaatgagttattaccatttattacaaatgatgatgtagttaataagctaaatagtgctgcgttacgagatggtgacattattattgcagatgctgccgaagatagtactgtcgggaaatgtactgaattatttaatgttgatgagcagttgattttctctggattacacacgattgcagtcagacccattttgtcttttgcttctaaataccttggttactacataaattcatcgtcataccatgatcagcttgtatcattgatgcagggtacaaaagtattatcaatatcaaaaacggcaatacagaatacgaatgttaaatttccaaaggattttaaagaacaagcggccatcggcaactatttccaaaaactcgatacactaatcaaccagcaccaacagcaaatcactaaactcaataacatcaaacaagcctgcttaagcaaaatgtttgtataa

SEQ ID NO: 287173 - DNA, 645 bp, Morganella morganii
atgattaaacacaccacagcagaaagagaaatcaacacttcagcgaagctgaatgagtaccagttgaaccttctgaaaaggattaacaacctcgctatttccctgatgcctgaatttgaagacaaaaatcaggctatggatgctatcacgctggatgacggttctctgatgcaattgctctataccgttcaactcgagcagaagacacgcgtcaacgactacgaaatgcgtaaagtgcgccgtcgtcgcgaaaatctggaaagattttatcgtgagcttcaggaattgggcggtacgcttaaggtgaacgacgtggtcgatattcttggtatcacacgccaggcgatcaacattcgcgttaagaagaacaagcttttagcattcaaacaaaacggggattttattttcccgaaatttcagttcgctgataatgggctaattcccggctttgaagacgtgatggcggcattcgaagaggatacacatccaatgttgcggttgggggtgctgaaatcaccgatagaggttaatagtgaaggtctgcaaaagacgccgattcaaatcatgctggacggtgctaaaaagtgtgagcttagtctggccatacgtgcagctaaacagttcggaaatcaagtagccagttaa

SEQ ID NO: 287174 - DNA, 711 bp, Morganella morganii
atgaccaaatggacatttgataaaactgttgttgcacaagggattgctgcacaaaacaattctggacgtattccggagattgacattcaacaaggccctggtcttttgaagcgtcatcaaaggaagttgtataaaagcgcaatcaacttcagcgcgccaattgagaaagacgattgtgggcgatacaaccctcccgggggaagtgtagcggtatggtatgcttctgactcggcgttaacggcggcggcggaagcatacgggcgtttgctccatatcaaaggaacgatttcttatcctgaatcggtactttcacaacattatatgtgctctgtggatgtcgcgagaacggtgaaagtgattgatgttgtcgcactctgtgagttgttacatatccctttggatagcttagagaacgaggattacacctttcctcagtggctaatggaacatctgtatacgcatttcgggcgtgactatgacgggattgcctatacctcaagacataagcgttataagcgttgttatgccttttgggtacgaccgggtagtacaccagcctttaccgatacccctcaggggatgtggccttatgctggttacgtcgaaactgacgaaggcatgttccctaaggggtggcacaaaggaacgatgtcaggtgaagaaatgttcgaagaattgcttggattcgaaattacgccagaaccaatgtaa

SEQ ID NO: 287175 - DNA, 1323 bp, Morganella morganii
atgcgcgattacgacgaacgcccggcaaacgggtttgatatccgcgcagaaggctatctgcctgattatccgcagttaggtgcatttgcaaaatatgaacagtacttcggcgacggcatcagcctggccagtaccacctcttccggtgaactgaaaagtaacccgtcggtctccaccatcgggctcagttacaccccgttcccgctgatcacgttcaaaggtcagacatcccgcggtgattccaatgacagccaggtcggtatggagctttcctaccgtttcggcgtgccgctgtcacagcagctggataccgataatgttgacctgatgcgtaacctggcaggtaaccgttacgatttcgtcgacagaaactacaacattgtaatgcaataccgtaagcaggaactgctgcggattgccctgccgccgacactgcgcgctgaagcagcacagacagtgccggtgacggtcagtgtactgaaagccaaatacggcctgaaatctctgcgctggtcagcgcctgaactgctggcaaacggcggtgaaatcaaacagaccgggctgaccacagccgatatcaccctgccggcctatatctttgctaaccgcagcggcgagccgcagggctaccgcgtgacagccgttggtgaagataacgagggtaacccgtccaacaccgcagaaatgtgggtgaatgttattccgtctgtggaaaccatcaccaaactgaccgttacgccgaaccagtcactggtggcgaataaccgtgatcagttcacagcggtggcgctgttacagaatgacaaaggcgaagtgctggcgaacaaagctgtcaccttcagtgtttccggcctgaaaaatccggaaggcgtgaccatttatgatgcggacggcaacaatggccagacactgactgtgatttccgggccggacggcacggcgaccgtgaaaatcatcagtaaatccgccggtaaagcatcactgcaggcgaagatgcgtaacggtaacagccgtacggaatcgataatctatattgcggatctcagtaccgcaaaaatcaaaacccttgagttaaccaataacaaagcagtggctgacggccaggcgaaaaacatcgccgtggcaacagtgactgaccagtttgataaccaggtggaaaacttcccgttaacggccagagcagataacggtgcgacagtcgttgatccgaaccagcagactgacgataacggccgggtcactatccgcttcagcagtgaaactgccggggattccaaactggtggttgagggaacgggtacacgggtacctcgaagagtgtga

SEQ ID NO: 287176 - DNA, 1080 bp, Morganella morganii
atgatttcggcgttacatactcctgttgcgccacatgaaaaacggtgttttgttgaattcagttatgatcccccgggacgacgactgcataaagcagtcaattacctgccggcgctgtcggtgccggactttcagcaacgtctgccgctgaatgcgcatccggaaggaacgacgacatttttatgggaagggttgcgtctgctggaggagcggcgacccggtaatacccggatgttgtatgtctatgaagacagtgacagttactcgccgctggcccggattgattttcatcacggtaaagaggatatctgttattacaggacacaaccgaatggtttacctgacagcctgcatgatgagcagggtgagacattgtgggaggctaggtttacctcatggggaagagcagaagttgaactgggaaccctgcattatctgacaccgcaacgggatcagaacctgcgttttcaggggcagtatctcgaccgtgaaacgggtttacactacaacacattccggtattatgatccggacacaggccggtttacccagcatgacccgatagggctcgctggtgggctgaatctgaatctgtatcagtatgcgccgaatccgttgggttgggttgatccttggggttgggtatgctctggaaaaacatctggcggaaaaggattaggcggaaatcaaaaagtcgatcgtgctgcgagagaattggactcagcagtacagagagcaggtaaataccccgatcgtggtggacatatgaatactacatgggggaagatataccaaaagtgggcaaataatcaacatatacctcagtggttgaaaaatgttgcacgtgggaatgccattcaacaagtaacagataaactgactgtcaataacagatacctcgagggtattattagaaacaaaacaggttcatggtgggggaatttacgtccagactatcatttggaactaccgaatggaaaagttgcagtatttgacattactactcctggacaagcagccaaaattggtaagtataaggttgatggtgtaacaaattggttaattaatattctttattga

SEQ ID NO: 287177 - DNA, 354 bp, Morganella morganii
atggaaaatctaaaattttttattgaaaattttattgcaaagaatagacaagaacattggttatcattggtctctggtaaatgggaaaaattcgcatctaaaattgatagaatagaaaggcatcttaatgaaaaatgtatatttatagatagtaatatacctaaagaattccatgctattatttctaaaaaaaacataaagcacggattttattttgaccgatatttttttaatcagagattgtctccggttatatttgaagaaatacacgatgatagtattcttgtatgtacagagaataagattgctttttattttcatcacgagggatggatgtggtattgctgtgtttaa

SEQ ID NO: 287178 - DNA, 213 bp, Morganella morganii
atgagcaccccaaatgcagcaagagaaaaagataaaatcattcatgccagcatctgggccgatctggcttcagtcgtcatggaaggtgtggtatatgccggtgccgcgctggtggtggttggtgctgccacgctggccgcgccggctcttgcggcagggtcggctgcagcagctgttgttggttttgcggggggtgtattggttcaggtttaa

SEQ ID NO: 287179 - DNA, 981 bp, Morganella morganii
atgtatattaatagatctttaataaaaaaactaattttctcatcacttagtttaattactatcttacttaccgcaaaattgatgttgcgtggtactgggtctgattcatcatatgataatgttttcctgttaagtattcttgttattatctttaactcctctaaaaaagcattttggtttttcatttttcctgccacaattatctattccctttactctccaataggtttaatctttggggcgcctagctaccaatatattgcttctatctttgctactgatctacttgaaagtaaggaatttttttctcaaattcctttatttaattacgtttatcccttttttattattttcggattattgttatttaggtttttaacagtaagatatcatattgatttctataaaaataaaaccattttatgtatcttcattttcttttcattagtgaatcaatcacctttttatttcttcaaagaaataattaattctgctcagaaagtaaaaaatgaattagtaaaactaaattacactaacgtaaaaagtacctggggtaaatctattctgacagatagctccacttatgataattatgttctggttatcggtgaaagcgccagaaaagactatcaccatggatttggatatccgataaacaataccccattcatcagcaatgaaaatgggttattagttgatggattaacatctggaggctcaaatactgtagcatctttacgcttgatgcttacaaacccagataaaaaatcatgggatgctgattatacaaaaagttttattgatctggctaactcagccgggattgaaacctattggatatcaaaccaaggttatattggaacatatgacaccccaatcacagctattgcaaaaaatagtcagcataagaattttttaaagtacaaagactataactctgataatacaagtgatttctctcttcttaattatattaaataa

SEQ ID NO: 287180 - DNA, 549 bp, Morganella morganii
atgccatcccacatagttatgcatttatttttacatcaaaaattacacttatgtatttgttctatctgtataaagcatagctttattttagaaaacaaaatacaattcccaactgaatatagtttcggcgaggatatattttttatactacaatccctgatatattcaaaaaataaggtttattacatacctgacattttatttaactataatctgaaccagtcgggaactgtacagtctgtagttacaaaaaataagattaatgtactttcactatataattctttatttcaacttgatagcatcatatcaaaagaaacactcagcgatcttatttatttccagcaaagaacttttttctatctaataaagctaagcttgaaatttaatttagaaaacaaagaaacattagattatctatttgataataaaaaaatattgaagaaaagaataaacaggctatatccattaataattttattaaacatagcatcgccattattatataaaatccttaatcaccgattgttatcgagacacaccaaatga

SEQ ID NO: 287181 - DNA, 258 bp, Morganella morganii
gtggcggcatggggagcgatgcataccgggctggccatgaccggcgtatccatgatgctgggcggtataatccagatgttgtccccgcagccgggcggacttgctatgaaagaccagggcgaaaataaaccatcatatgcattcggtgcgccggtgaacaccgtttctcagggctatccggtaccgatcggttatggtaagcgccgcatcggcggcgcggttatctcagccggaatttacgtcgaagatcagcagtaa

SEQ ID NO: 287182 - DNA, 180 bp, Morganella morganii
atgttcataattactgatggtgcccagtgtatagatccgctgatcgtccggggttgcctcaaaacggcgcttaaaaaagctgctgatagtgtcctgctcaatatcattaaccaccaggttattggtaaagtgatcgccctctttaatatcaaactgcacctcaccaatctcactcactga

SEQ ID NO: 287183 - DNA, 798 bp, Morganella morganii
atgagaaaaatatatcactcttctcatataattgataagatcgcttattccccatatcgagaaaaaccagatatttttttatcaacatctgaatttatgaataatcacttctcaaaagcttttaatattcctttatctaatataattaccagtagctatcccagatgttctatatttaaaatgaaaagcactgatattataaatgatataaagagttttgagctttcttatgaattaaagctattagagaaagcacgcatgttcgataatttaatattatacatgcccacatggcgagataatgatgataattttatggaaaaagcaattcctaactatggtaaattaaatgaagttctgctatcaacaaattcactattcataataaaacttcaccctaatacagagttaaaagataataataattatagtaacatagtttttattaaaaatgacatagatccatatcctatactatattatacgactctattaataactgattactcatcaatatactatgattacttattaaaagaaaattataaaacattactgtatccatttgatatatcctcatatagtaaaacatgtcgtgatctcgcatatccatatgatgaattcacatcaggagataaagtttatacttttgatgagttcgtattattcttatctaagattaataacaatactgaatttagcaatagtgaaaaaataaaagaaatattttttcagcctcgtaataaaaagcaagatatcaaaaccgaaataattaaaaagttgaactatgaaaattaa

SEQ ID NO: 287184 - DNA, 366 bp, Morganella morganii
gtgcaggctcatgatgcgcagctgcagcaggaactcaatgatggaggcggcacggtcggaaaactgctcgcggtaggcgctgaacgcaacaaacatcccgagggtcatggcgttgtcgatcaccagacctgcgccgatccacaggatggcaatctggtcacaggccatgataaaggtattcaccccgccgaacatcaggttcatcttagtcagacgaatgccggtattaatggaatcgactttcagattcagccagtgattcccccggcggtcactcatcccctgggttttcaccgtggtaatgccgtagagggattccataaaatacgacccggcgcgcgcctctttgatcagcgactcctctga

SEQ ID NO: 287185 - DNA, 132 bp, Morganella morganii
atgttttataaccagcttctttataagctgaaattagagacttttcaggccacagttcatttagattatcttgcgtcagaatttttctggttagaatcagtggagtggatgataatgtatgagagccattag

SEQ ID NO: 287186 - DNA, 372 bp, Morganella morganii
ttgctgtccggcattggccatctcgcgcccggtggcactgaccaattgatacagcgtgtcataggtgtatttattttccggcaccactttctgattatgccagaagcgcgtctcctcggcgctattggtcacacacagcacattgccgaccggatcatattcataacgcagatcctgaaatacatttttccgtgccgggtgttcggttttcacggcaatcagccgctgggtctgcgcttcgtaagtgtaagtggtcactacgccattgccgtgctcctcgcgcagcttctgcccggcagcagaatacgtcacagatttgataatgattttttccgtgccgcctttcaccgtcacccggctggtgctcagtaa

SEQ ID NO: 287187 - DNA, 369 bp, Morganella morganii
atgcaaaacctttataccctgataacaatttccgataaggaaccaaaggaagaaataaccattccctccggaagatactgcatcaacagtacaattaaccatgacgacgacctgattaacctgaatctcacaggtgcagaaccactgcctgaaaaaacagaagcagagttatatgaaaacaactatcacgtctcttttaaaacctgtgatggtgaattagtaatacaagaaatcaattataacgccccctttatttttcaggggaaagtccttttcgccataaaaaacaacaggataaatggcgtaaaaacatcatgttatatgaaaaaacgacaaagcgcgctgtcccgcgctatcttctgtctgtaa

SEQ ID NO: 287188 - DNA, 561 bp, Morganella morganii
atgagcggcatccggcgtgtaatacagaatctggcggcagtgattatcctgctggcgctgtttctcaccggattccgcctctggccgcatccgccgctgtcagaaggtgtgcctctgtcggttgcctattatgaccgcaacggcacactgctgcgcctgacgctggcaaacgatgaccgctaccggctgtggacaccgctggaagagatgtcccccctgctgacacaggggacgctgcgttatgaggatcgctggttttatctccatcccgggtttaatccgtacagcctcacgcgcggtttttttgtcagttacatcagcggggagcggcttcaggggggctcaaccatcaccatgcagctggcacggatgcgctggcatctcaacacccgcaccctgcgggggaaaaccgaacagatcctgcgggctgtgcagctggaactgagctattccaaacacgacattctggaagcttatcttaactatgccccctatggccggaatattgagagcgccggggcggcctcactggctatttcaataaaaaaccggcggatttaa

SEQ ID NO: 287189 - DNA, 384 bp, Morganella morganii
atggaatttaaaggtacaccggggccgtggactatcactgatagtggcggctcaataatggatagtgatcaatttattatcgctaatttccgtcggttggccatcttgtgcaggtggcatgaaaaaggatttgagcactttagtgacgaaggcgccagtaaggatattgggacaattgccgcgaaggcgaacgctaatttaatagcgtcagcgccggagttattatcagcactgcaaggcatccaggaatcaatggctaaatatatcaacatcgcaaataacatcggcatggatgttaccgcagacgggttttatcttggtcacgcgatggaagttgaagaacaagccagggctgcaatcaacaaagcactgggccgggaatag

SEQ ID NO: 287190 - DNA, 624 bp, Morganella morganii
atgacgcggttaaccaatcacatcaaatcagaaatcatcaaaaatgccttggtaaaagctggcattcaggaagaaaaatcgcagttaagagcagagaaaagcgcactggcgaacgatgtcagaatagcggctcttggtggcgctgaaaatgccaagaaagcagaagaaacaatagcgcaaataacgacgtcattgaaaaccctgcaaacctcggttagcgagtatatctatctctgtaatgaagatagcagtgatatataccctgcatttgctgggcagagagtgcggttgagttacggtgtagatagtcacggtagggctattcttcggttaacccctgaaaaaaacaaatgcctattttctgccgaccatgagttaagcaagcggtttgctcaaattgctgataaagaagccagtattgagaaaagagaagctgaaataaaagcgaacgtaaaagccgctctggactcggtgactacgattaaaaaactcatttcagtatggccggaagtaaaaaaaattctcccggaaggtgagcaagagcaacagacatcactgcctgcggtaaaagtcgaaaatcttaattctcttattggcctgccaacagaatcagaagccgcatga

SEQ ID NO: 287191 - DNA, 357 bp, Morganella morganii
atgacattacgtgaaaaaaccctgggcgaactggcgctgtctgtgaatggtgcatcggcacttttccgccgttatgatctggatttctgctgcggcggaaaacggacactggcaaaagcggcagagaaaaaatccctgaatatcgatgaaattgaacaggcattactcgccctgaaagatgaggcaccggcgcaggactggcggaaagccccgctgagcgacattatcgcctttattattacccgttatcacgatcgccaccgcgcacaattaccggaactgattttacaggcggaaaagtggagcgggtgcatgccgccaaagccagtgtcccgaaagggctggcccggcagctga

SEQ ID NO: 287192 - DNA, 1116 bp, Morganella morganii
atgtttaattcagagcgtttatgtatagcaagagaacgtagaggcctaacacagagagctttagcaacagcagcagggttaactagtaaaacgatatctaattatgaaaaagcaggtatctttgatgtgatcgccagcgacagtatggaaagaatctctgctgttttgggataccctattgattttttccttgatcgggatgttccttctctgacaccagaagctgtaagctttcgcgcaatgacaaaactaagtgctcaaaaacgcgattcagcgctcagtgctggaaaattagcccaagaattatcaggatggattgatgagcagttcaagttgccaaaacctaatattcctgactgtagttttgatggatacacagaaccagatcgtgcggccagaatggttagggaagcatggggaataggtgaactatcaatatcaaacttagtccatttgcttgaaagtaatggtgttaaggtcttttcacttgctgaaaactgtgttgaagtcgatgctttttctttctggatggatgaaaaaccttttgtattgttgaatacaatgaagactccagaacgaagccgttttgatgctgctcatgaacttggtcatttggtccttcataaacattcgagcaacaatggtcgcttagctgaacaagatgcagaccgttttgcatccgcattcttaatgcctgaacgtagcatattagcctccataccaagaatgccaaaattagatcacctcattttattgaagaaaaattggaaagtttcattggctgccttagtgcgccgtacctttgatgtaggcttgtctacagaatggcattatcgacaactatcaatagagcttaatcgtcgaggctatcgtactggagaaccccaaggaatgcctgagcgtgaaaaatcattaatcttggaaaaagttttttcaacattacgtactcaaggcataaaacgaaccgagattctcgaacaattaagattccctgctgatgaagtaaacgcactaacatttaacaaccctttctttatggaagcaattactggtgctgggttcgaatcgggtattgaacgtaataagcacaagccccaactacagcttgtaaaatag

SEQ ID NO: 287193 - DNA, 720 bp, Morganella morganii
atgtacctacataatctagcaaaaacacttgtattctcggactcaaatgatgttgaatcttatttacaaccactgagtcttagccaatatgagctcacgagtattcttgaacgtggtttatctgggcgttactcaaccacgaaaaaccatcctgtaacttctcgggggcagtatttttacggggaaggtgttagcgcagcccgagatatccttgcaccaaaagggtatgagcgattgtctttgcgaaacgttgaattgactgttagtgacaaggttgcaatatacctttgccgtggttgtgagcaaacaggattcgctaatggatatcctgaatcacgcatgaaaaaaggagattttacatgtgaactcatggggttaattcacaataataccccaggacaaggagaattaactctggatgatagccagctcaagctagatttaggtctgacagaaagtgagacaatccctctacttccaaataaaattggacgggatttatggtttttactttacaatttttatgaactagatgaatttgatcgtgtaggtattcgtgcagaattatctcgccctgtatcttacaacaataaaaatgtagttaacaatttctcaactcgcttgattcttgattcttatcaaccagatccgattattcggaatagtgaagtacctcaatttacagcagatatcgatcttgatattttgaaagtaggctaa

SEQ ID NO: 287194 - DNA, 1086 bp, Morganella morganii
atgttgtttacttatacttatgtaccacatcaaatggaaagaatgcagcggtttgtcaattttattttctatcaagtatggtgtaggtcgaggaaagcaggagaatataatttagcgctatttgatgcgaatccacccctcaaagagataatgacggcttttgcttatggtgatagtacagtgggagatcgtttttcaagtcaaattcaagctatctaccaaagcttctctcaactttcacagaaccaaatagcacaatttaagcggtggtaccaagccaataataatttggaaaaggtatgtgctaataccccgaatatacaactagcccgttacgctgatatagcgatgaaccataaagggctgtcagaacagctcggtacgtttttcaaaggattatactcgcagtcattgctggatctcgctgctttgcgcgctaagattggtgatattgacgatcattacaagaatttcgtgcaaatcaataaagttgggaaatgcccgttttgtggtatcagcgacttacttagcgaatatcatactaaacgcgaagcttacgaccattatctgcctaaggcattgtatccttttaattctataaactttcgtaaccttgtgcctgcctgccactattgcaacagtagctataagaccagtaagaacccagcctacacgccaaaagaccctaaaggaacggttcgtcgtcgcgcgattttctatccatataagcctgtgatacatgccatcgagttacaagttacactgcaaacttcagacatagaaaatttggcacctaacgatattgacttgcaatttggtccagatgctgttgccgaagaaatcgatacgtggaaggatatttacggtattgaagaacgctacaaagctaaactctgcggggaaaatgatggtaagtactggctgacgcaagtgcttgacgaatggagagaggatggccgagatcctgatgtttttcttacagctttagcgcggcagactcggagtcgaccatacgccgaatgtaattttctaaaaaaacctttccttgaagcatgtaaggtacgaggtattttgcaaaatatataa

SEQ ID NO: 287195 - DNA, 1791 bp, Morganella morganii
atgaaactactacgtctgaagatcaacgacccggcaggctttcgcagcttaccctgtggttttgagcaccattttcgcaccgaatggaacttgcaggatgaactcgcaaaagctgaccactttgcccccttcgtctgcgctggaccgaatggcagcggcaaatctaacttgcttgaagtcctcgcagcaatcttctttcagttggaaattctgcgtgtgcgccggagttttcttcctgaagcattgcaagatgagactctggatctttcacccatttcctttgagctggactatttgattcgagtccttcctgaatactgtagctctaacagtcccgaatgggcaaaagtgcatgttaggaaaaatcctgatgaatcggtgcgctttctttgggaaaaccaaagcgactttggtactgacacaaatgaagcattcactagtagccatatagacatgctgttacctcagtacgtgcttggttactcttcaggcgagaacgaaatccttagtcttcctttttttaagatgcgttttgtacagtttgacgagtactacaacgcgctgacccagcaacttccatatcccggtcacccagaaaccagacttacatatcttgataacgaattcagccaagccatcctactgtgtaacctgctgtttctcgacgaggataatttgcggcctttccgcgaggatgtggggattgactcactgcaggaattccgcattgtcgttcgtcgtagtgttggactgcggccagaacaacttactgcttttgccagtgaagatgaaaatcaataccagctacctgaagatatagtcaatagtaatcccgctctacagttccatatcgacgaacagggaacactccattatcgtctaaatattatccatttattggaaagcgacgaaagatcttcattaatgattaacgccttacagcgatgcgctactttgagttacgtcgatgatgacactgatactctaattttagattactgggttaatgaggcaactaagcaagccttccgtgaaaacttcgacggttcaccattggctctattccaggcatttcaggtattgttagctcttaacctttatgttgtaagtgatacgcttaagtcggatttatacacttcaaccagtcactatgttagtgaaacagtaccgactctagcgtctgatgagcgaatcatgcgctttaaacacttctatttcaggaaaataggggttgaaaagccgatgcttctcaaagagctatcggacggcgaacaccagttattgcatagccttggtctgtgtgtgctattccgtaacactaactgtctgcttttgctcgatgaacctgaaacccactttaacccaaattggcgagccagttttatcacccgcttgcgtcagtgcttacctgatcaaagagatgtggggcaagaaatgttgatcacaactcacacaccgtttctgatttcagatagtaagccagacaaggttttggtattcaacaaagatgaaacagctggcgttgtcagcatcaaccacccggactacaacacacttggtgcttctatcaataagatcactatgaacacttttggcaagcgtgaaactatcggtggctatgcacaggctctgctggaagatttgcgccaacgctttgaagctggtggagaggatagggaatctcttattaccgaaattcaccagcaattaggagactcggtggaaaaacttttgttgatcaatgcgattcttggacagaatgcacaagacagcgaggaggggcatagctaa

SEQ ID NO: 287196 - DNA, 1554 bp, Morganella morganii
atgaagtggcataaattttctactgttatcaccgatgccacttctaagttcagaaaaattaaggcatccaattatcttactagtggcagatacaaaatcattgaccagagtaaagagcctgtcgctggctatactgacgatgataaccttatcaatgaacaattacgtccaatattgatttttggtgaccatactcggattctgaaatatgaaaatgaccctatagcactcggggctgatggagcaaaagctctttgggtagatccgaatatagctgatgcgcgctacgtgtactactatttacgctcagtcccgatcaaagatgcaggttatagcagacatttcaagtttctcaaagaggttaaaataccaataccttacaaagatggacaacctgatttcgactatcaaactagggttgtttacctgcttggcaaaatagaaggcatgatcgctctgcgcaaacagcatctgcaacaactcgatagcctactcgaaagcgtttttctggagttgtttggcgatccggtacggaatgataagggctgggatattgtgccgtttcacaaagtaggcaaatttatcagcggcggtacacctagtaagagtagggacgacttctggaatggcgactttccctgggttagcccgaaggatatgaagacgacaataattgacaatgcgatcgaccacatttctgaaacggtttttgagcagacatccctaaaacgaattgctccgaatcacttactgatagttgttcgaggaatgatacttgctcattcttttcctgttgcgatcaattctgtcgatatcgccattaatcaagatatgaaggcaattaaaccagttaaagacattaatgtcgtctatttattgaactgcttaaaatcccttaagcgtcaattgttaaagctcatctctacggcaggacacggtactagaaaattcgattctgtttccatggagaagctgtttataccgaaccctcctaaggaccttcaaaaccaatttgtcgccattgccgaaaagattgaaatcctcaaatctgattaccagcggagtctcgttgaattgaagtgtctctacggcgcattaggccaaaaggtattcaagggcgaacttgatctatcacgagtgccgatgccaaaaccgtctactcgagatattaccgctgttcccttcggagaccaaacgaccatgcccgcccccgttgtacaaaccttgcctgctattcatttaccctatactgataatcttctggctgcactggaagattccgaggctcgcaaaacgttgattacagaatggctagaagcttatcgtgcacaacttgctgaaacaccattttcgttacaacaatttatggaactggcacaaaaccgacttgcggagctccactcggacaacgacttagtgatgggggctagtgactacgaatacatcaagacatgggtgttcgaagccttggctgctggaacattgaaacaggtgtttgacaatacaggtaatcgcatcgaactaaaagccgctcttgagcacaatcccatatga

SEQ ID NO: 287197 - DNA, 1665 bp, Morganella morganii
atgttacagaacaaccctgaactaaaatctaaaatagagcaactctggaacaaattctggagcggtggcatcagtaacccactcactgcaattgagcaaattacttacttgctgtttatgaaacgactcgatgagctagatcaaaaacgccaagccgacgccgagtggacagatgaagaatacacctccaagtttgaaggtacttggattcctcccgaggagctcaactggcctgtgacggaacagcgccccatagacaaacgtacactgcgttggagcgaatttaagcgtatgcaggcagaggagatgttgcagcacgtacagggtaaggtatttcccttcctgaaagatctgaatggtgcggagtccaatttcactcaccacatgaaaaacgccgtgttcatcatccccaaaccggcactgttggtagaggcagtgaagaccatcgacgacatctttgcggtgatggaaaaggactcacaagagcatggacaggccttccaggacatccagggagatgtttatgaaatgctgctttcggaaatcgctaccgcaggcaagaacggtcagttccgaactcctcgacacatcatcaagatgatggccgatttggtgcagccgcaactgggtcaccgtatcatcgacccggcctgtggtactggtggctttctgctgggtgcctaccaatacatcgttacccaattggctatcaatgctggtaccaagaaccttgtacccgatgaagatggttttatccgtacttcagttgccgcaacattcgatgaaaagcgccaattcgtcttgcaagaaagcctgtacggctacgatatcgatgccaccatggtacgcttgggattaatgaacttgatgatgcatggcatcgatgagcccaacattgactatcaggacacactgagcaaaagctacaacgaagaatcagcctacgacatcgtgctagccaacccaccctttaccggtagcatcgacaagggcgacatcaacgaagccttgcaactggctactactaaaaccgagttgctgtttgtcgaaaatatctatcgattgctaaaaaaaggcggtaccgcctgcgtgatcgtaccgcaaggcgtgctgttcggctccggtaaagccttcaaggatttgcgccaaaccctagtagagcactgtgatctcaaagccgtcatcaccttacctagcggcgtattcaaaccctacgccggagtcagcaccgccattttattgttcactaaggtatggggagcaaaagataagattacgaaacctgctaccgaacacgtctggttttatgaaatggccgctgatggctactcgttggacgataagcgtagtaagcaggaaggttatggtgacctgcaagacatcatcactaagtaccacaaccgcaatgcggggaccgacaccgaccgaaccgcgaagtactttatggtaccgtacagcgagattgcggatgagaagaacaacttcgatctttccctttcacgttataaagaagatgtatttgaagaagtgagctatgagtctcctagaattattttggaacgtctgattcaagctgaagttggcgacatagacgaagcagagttggccactgtgcagaatggtattgtgaaggagttgctagagttgaaagggatattaggatga

SEQ ID NO: 287198 - DNA, 2799 bp, Morganella morganii
atgcaggacttagagaaagaaacgcgtattaaaattatcgataagcaattgtatctggcagggtgggatgtaaatgaccctaccaaggttgtgcaagaattcgatatcctcactaatcaatcagaaggtgttgctgaaccttgccatgagtatcgtggacatcagtatagtgactatgtgcttttagggaaagatggtaagccacttgctgtagttgaagctaaacgtacaagtaaagatgcggctctgggccgtgagcaagcgaagcagtattgctacaacatccagaagcaactgggtggtgagctacccttctgcttttacaccaatgggcatgaactttatttctgggatctagggaatgcacctccacgtcaagtcttaggtttccccacacgagacgatttggaacgttttacatacatccgtcgcaatcgaaagcagctgacgcatgaattcattaacacctcaattgctggtcgtggataccagattcgtgcaattcgttcggtgcttgacggtattgaacaaaaaaggcgtgactttcttctggttatggccactggcaccggtaaaactcgaacctgtattgctatggttgatgctttgatgcgtgccggacatgctgagagggtactatttcttgtggaccgcatagctttgcgcgagcaagcattggcagcattcaaagagcacttgccgaatgaaccgcgttggccaaatgtgggcgaaaaactgattgctacggaccgccgcatatatgttgctacctacccgacaatgctcaatataatccgggatgatatgcagcatctgtcgccgcacttcttcgatttcatcgtcgttgatgagagccatcgctcaatttataacaccttcggcgaagtactcgattatttcaaaaccatcacgttggggctgactgccacaccaactgatattatcgaccacaacactttccaactatttcactgtgaagatggtattcccacatttgcttatacctatgaagaggccgtaaacagcgtacctccatatctctgcaattttcaggttatgaagattcagaccaaatttcagatagaaggcatcagcaaacgtactatttcgttagaaaaccagaaaaaattgattcagcaaggtaaggatattgaagatatcaactttgagggctctcagttagaaaagcaagtgattaataagggcactaataccctgatcgtccgcgagtttatggaagagtcaattaaagatgccgacggagttctacctggtaaaactatctttttttgcgctactaaggctcatgctcggcgcatggaagaaatcttcgataagctctatccacaataccacggagagttggctaaggtgttggtatcggaagatcctcgagtctatggtaagggcggtcttctcgaccagttcactaacaataacatgccgcgcattgccattagcgtggatatgctcgacacgggtattgatgtacgtgaaattgtcaaccttgtgttcgccaaaccagtttattcttacaccaagttctggcagatgatcgggcgcggtacgcgcctgctagaaactagtaaactcaaatcttggtgtcccgaaaagggcatgttcctgatcctagactgttgggacaatttcgaatacttcaagctcaatccaaaaggcaaagaactcaaaccacaattgccattgccagtgcgtcttgtcggcctacggctcgacaagattgagaaagctaatgatagagatcatgccgatattgccagtcgtgaaattgccaagcttcgcttacagcttaccgcactacctaaagactcagtcgtaatcacggaagcagccactactctggctcagttggatgatgacaacttctgggttaacctcagccattctcgattggaattcttacgtgctgaaatcaaacctctgttccgtactgtttctgaggtcgatttcaaggccatgcgctttgagcgcgacctactcgaatattcgctagctgtgctcgatgaaaacaaggaacaatccgaaatactcaaagaaggcatcgtcgagcagatcagtgaattaccactgtccgttagctttgtgcaacaggaagaagctttgatccgcactgcgcaaactaactactactgggctaaagcagatgaggatgcgttcgatgttatagtcactaggctcggtcctttaatgaagttccgtgaaaaatctagaggcgaggagcaaactcaacttgatttggctgatgagctttataagaaagaaagggtggaattcgggccgcagaatgaagctgtcagcattacccgttaccgtgaaatggtcgagaccttgattgccgagctgactgagcacaatccagtgctacagaaaatcaagaacggtgatgctgtgagtaaccaggaagccaatgaattggctgagctactgcacgaagagcatccgcacattactgaagacctgctgcgtcaagtctataagaaccgcaaggcacgtttcgttcagttcatccgccatatcctcggcatcgaggtgcttaaaagtttccctgatgaggttagtgcagccttcgatcaatttatccgcgtccacactacgctcagtagtcggcagatggagttccttgacctgttgaagaatttcattgtcgaccgtgaaagagtggagaagaaagacttaattaacgcgcccttcactgtcatacatccgaggggtattcgcggtgtattcagcccagctgaaattaatgagattctacagctaaccgaacggttagctgcctaa

SEQ ID NO: 287199 - DNA, 330 bp, Morganella morganii
atggatgtgagcctagaggtcgataactgcctactgcattaccacccgatgctggagggcattttactcagtgaatgcatacggcttggacaacgttcgtttgccaacaaactgattagcctatttaaccagttcaataaccctgaactacgtcccaaactaatgtggctgtgctggtatgatttgatgctgggttttccattagacgattggctgaataccctgaagatgaaaactgaagaacagctggaagaatggatcattggcaggcaaatggagaactggggactgacgaggataatggatgattatgtgttgtttggtctgtag

SEQ ID NO: 287200 - DNA, 1626 bp, Morganella morganii
atgaactcatctaaccaacagacccccagtccagtggaacgccttgcttcactgctagaatcaggaagaagggcccaagaaatacagaatataaatacgtcatttcctctagatgccttacccccaattttaaaaaatgttgtaatttcactacatctagacaccaaaattccaattgaactcatttgccaagttgttttagctgcagcatctcttgcttgtcaatcaatagtgaacgtcaaacctcattatagccaaacacctgagccctgctcactttattttttaacgcttgccgatcctggtgagggaaaaacgacaattaataagttagttatgaagcctttttatgacttatccgtaagaatgaaaaagaaatatgataatgatttagtcgactatgaacagtcatatgacatttggaaaattaaaaaacaagtattagacaataattataagcaagcaattaaaaaacattatcctggagactttgaatcagatgaaatcaaaaaacatttatctgcagagcctcggaaaccaaagcattttaagttaatttatgatgatgtaacaaaaaatgggcttattgaagggttacaacaacatcctaatgccggtgttatttcggatgaagctattatattttttacggggtatttaaaaaatcatataggattattaaataaggcatgggatggcgaaacatattcatttgccagagcaaaaaatgagtatcatgaaataaaatcctgcttaactttttctttactggcccagccaagtatatttattgagtatttaaaaaaacaaggtgatattgcaagagggagtggtttcttttcacgttttcttttttcatcagtgattagtaatcaaggattcagatattattcactgaaaagctattcatcagaggaaaatatttcagatgttaatgctttttatgaaagaattgaaagtttactaaatactcaaaatgaaactctctttaaaaaccactgtgataaaataacaatagaagcgaatcaagatgccattgcagcatggacccaaacaaaaaataactttgaacaatggagtagcaaaggaggtccatggcttcatattagagatatagtatcgaaatcgggtgcgaatatttatcgattagcctcaatattaaaacaatttgaaaccgaaagaaatgaggttaatttaaatcgtcatgatattaaatgtgcaagtgaaattatcttctggaatctagaagaagccagtaagttattttatccattttctgaacaatgtgaaataaccaatgctgctcgcgaactttactcgtgggtgaaggcttacttttataaaaataataactgtgcctttcttaagaatgatatattaaaatatgggcctagaaaattcagaaaaattgatgtgctagattcagtcttaaatattattattagtcaaacaaatgtttgtattatcagaggtcaatttggaggggcgttatatatttcgcttcaatcaaataatggtagttttatgctaccattgccaacttctatgtatcctactcagtatttgattgtacagacaataaacacaagcaacgatattcccaagattgatttcagtgatttataa

SEQ ID NO: 287201 - DNA, 264 bp, Morganella morganii
atgaaaacgacaaaatacgcagtaacttacctgggtgattatccgtgtggacaccgtcacgcactgacaataacagtgacagctcaggatgcaaattccgctatagagaaagtgcaggcagacctggaggaggaacagtttacctcaaccaatcacacactttatgccgtgattccggtcgggttcggtaccggcatgatggctgaaatcgccatgtgcccgccgcgtagtgagattgaactgcaggaagtggaggaaaaataa

SEQ ID NO: 287202 - DNA, 2433 bp, Morganella morganii
atgaaacaactatatttggcagagattgaaaaagtaaaacaacttcaaaataatgcagagaagctgttacacctgactaatataatgcgatcccttcaacaggcaatgtcgatatcgttattacaagtagtggcagatcttgttgactcttacggtaatgatataacagcatttatagatagatatgaaaaaccgaatgatggacttcctagagaaataatagaaaaatcactaccattgttaaatgctatacaaactacatcctattttacttcttggtataaccaaaatgataaaccaggcctatctaagaggctattagagtggattgaatttagaaataatactgttgcacatggttcaacttgcaaggatgatatagagacgtggtctgtaaaactcatggagttagtaaaggattttcttgaaggaatgtcaattctagtgccaaaaataaatgatgataaatttagaatagatatatataacgaacaaataaatgttaaatttccgttgttatatgaaggtaaatgtatcattattaactcagtggcgagtagaaaagaattatttaagttaaagttacagacgttggattgggatggcaaaaaagtcattacaaaagacatccctaacgataatattttaaataataaaaatctttctccatcaccaaggtttgtttgggcatctcaaattttcaatcaagcagataatagcttttgccataatatccctaagcggcaaactgcaaactttgtaggacggcaacctgagatagaaatattaaaagaatggatgtgtgattttgaccatcgatcctgtataatttatggggatggtggctttggtaaaacaacacttttattggagttttttaactctatatttgaaggggatatttcattaaatataaggttgccatttataataagttatcatacggcaaaaatgacccgttggggaagtgatgggctgatttattataaaggtgtatcttcatttgttgaagatgctttaagggaagtattatatgtgattgatgaaaaattaaataagagttggtttgaatgttctgggcgttctttagttgacaaaatagaaaatgagttacatcagcaaggcatatctagagatgatgttctgattattattgataatgcagagaccttagcatctactaaggatgaaattactactctcggtaaatttttagagttagtatctaaaaaaattggacgactaattatcacatctcgaagaaaggaattccttgcagctaaacctattcctatttcatccttaacagaagaggattcgttatcattgctaagaacatcagccttggaatatggggcaaaagcaatcactcagtcaggagattctggtttaaaaaaaatattaagaactttacattacaagccattattaatcgattcattagtgaaatatatagctagggcagaatgctcaatagatgatgcaattgaacaagtatataaaaaaagcagtgacgaacttcttgaatttttatatgaagatgcatggattaggattggtgaaagtgatcaaaacgtatttatggttttagttacgttatcatgtccaatagattctttttctgttggatatacatgtcaagagctagaaatacaacatgcagagtttcagggaagtttagatgaaacttattttgttaatctaacagattatggaaatagatatgaaatagaaattattgaactcgctatgagattctttttttccaaaaaaaagaagctctcaaaagaacgactggaaaaaataaataaaattgctgaattagttaatcggcgtgctttagaaaaatcgcagattgacaaagcttataaagaagatagagttacagaagcttttaggacagaattcgctaaagctgcaaaaatttgtgtagatagaaatgaaattgatgatgcaagaagtaattatgaatgtgctcttatagaagatcccgttaattcatacttacttgagcggtacgctttttttcttatgtcaaaaactaatgatcaagattatgctaaggaattaattattaaagcactagatatagacccaaataattctgaggcacttttaactggcgctataattttctatcgttctctggatcttgagaaaggagatgaattaatattaaaagcagaaagtaatggtaaaccccgatcctattgttatgttaggaaagcaatgtcccgttatcataaagcgcgggtggaggccgacaaagttaaggctttaaaatatttggacgaggcagtccaatttattaatattgcagatgaaacattaagtaaaaatgattcttattatacaaaaaataaaagaaccattaatgaatataaaaatgaaaaaataccaagacaaatttttcgtactagaaataaaaaataa

SEQ ID NO: 287203 - DNA, 810 bp, Morganella morganii
atgagcactgatattgaacgtatgtccaatgcgcccgtgtactatgcattggtacaagtgaaatttacccccgtagcagcaatgagtaagtatgttccagacatacaagatgcactcagagttgaaggattccctttatttgaagtttccaatacaactcaactgaaatttgagataaaaaatcctagtgagccaccggttcattcatttgagcctataacaaattggttgatggttgatgtaaataaaagatcaggttttgttttaagtaatgatttcattacatttcacacaactgattatgataaccatataccttttatctcatcattaatacttggtttaagtaaagttattgagtttgcaaagccatcgttggtaagcaggattgggcttcgatatttggatgcggtgtatccagatggaaacgaaacgattgagcagtacttagtagagaaacttcatggtgttgattttggatggaaaccgatacagtccatacaagagtctgtttatcaaacatgtgttaacccattaattgataatggatttatagtatcgcgcatccacaaaatgcaggggcagttaggtttccctccggatatgattcctaacggtttactacctctacctagattttgtaatacagaacctcgtatgcacgcaataattgatacagatcattatgttgaaggtaacatgcctactgatttacagttaattgaaaaacaaattctttcgttgcatagtaaggtaaaagaagcatttgagggtatggtttcagacttcgcccgtgctaaatggcactga

SEQ ID NO: 287204 - DNA, 666 bp, Morganella morganii
atgtttgcgattcctactggaagcacaggtattgttgagcagtgtacccgtgattcaccggtacgttcttgcgcatcaggtgttgttgctgtcgctaccgcgtcgctattattagccggtacaggagctgcatatcccgtaaatagttataagcaatggcgtcaatatgtacagccaagggttctgtttgcctttgactcaattgaaccaacatatacgccagaaatttcttccgagcttgatgttagaaatgttgcccaacatttgactaatattcgtaatgtgctatctccatctatgtctgaattggctaaagatttaggggtaactcggcaagctctttataaatggttgtctggtgaaaaccagcctgatgacgcttcaaaaatgcagtttattatcaacttgagcaatattgctgatttattttctaaagctggcttggataatgctaacctgttgattaaaatgaaggcatttaatgggaaatcattgatcgagctggtaaaagaaggtgagaattggcatcatccggttcaggttctaattaatgaagcaaaagctatggatgaagccgcaaatttagctaattttacagcaagtaaggcgaaaccaactgatggatggaaatcgtccgtttctattccaggaatagcagaggattaa

SEQ ID NO: 287205 - DNA, 849 bp, Morganella morganii
atgttggtacgggaaacatcatggcgtcaaggtcatgtccttaaacatgaggatgctgtttcacttcagattttgcaacctcatgaaacaaaccaaaaagttgttgtgatcacacatgactgcgatttgcagagtaattcagacaaaaacattgaactcatgtttggccccttgaaaaaggggtcaaacaggatgaagagagctaaacaccctagaattcttgatctttgttttgagagtccgcaaaatcccaaagaaaatgcaattgagcttcgacatgaaaggaaaataattcttcctaaggattccttcaattgtcaagagaatgatcccgtattcactatttctacagaagaaaaacaatcacttaagcaatggttggctgctaaatatggtcgtccagcgtttccaaattcttttgaagaacgtttgcgtgcttttaatgatggtaagcattttatttttgaaaaggaaattgcagagattatcggaaaaaacgcggaacacttgattggcgtttttttcgatttgggagaggagcggtttaacgaccttagtgaaggtataccatatgaactcacaatcaacgtggtatacgatgcgacggaaggtagctcaaacgcaagaaatgctactgaaaaaacctgtgataagttgcgtgagctattttatagctactatggagatcctaaattggggcgatcagaactaattgaattaaaccaatgtttagcgattgcagatacccattttcctttatattccctgagacggatggatcaatggagggtagaatatatcagccttgaagatgaaacgtatggtgatttcataagtgcaggtatctaa

SEQ ID NO: 287206 - DNA, 1275 bp, Morganella morganii
atgacagcaaagtatttcgctatcctgacgaactacggcgcggcacagctggcgaacgctgtcgcgctgggtacgcagatgaatatttccgcaatggcggtcggtgacggcggcggcacgctgccggttcctgacccggcgcagacaaagttagtccgtgaaacccgccgggcagcagtcaatcaggtatccattgacgagaaaaaccccaatttcatcattgccgaacaggtgatccctgaaaatgagggcggctggtttatccgtgaaatcggtctgtttgatgataacggcggtctgatcgcagtcggcaacgccccggaaacctacaagccgaatttacaggaggggtcaggccggacgcaggttattcagatggtgctgatggtcagcagcacacaggctatcactctgaaagtcgatccgtctgtggtgctggcaacgcgggagtatgtgacaaaaagtattgatgctgcaattcaggcatcagaggccagagccgcacagacctatcagccgaaaggtgattacgtcaccaatccgttctttaagctggaaatgctgaaaaaatttgataaggcggatatttcccagcaacttggcaacgataccgggaaagtggcatcgttgcatttactgacgactgaggtcggtaaattacagtcgaagggtgactatgcaacgcgggacgaactaaataaaaaattcgataagactggcgggaaaattaccgggcaactgaatattgaatatgtcggaggtcagggattaacgacaaacgcaaccagcggaacttcagtctaccatgagttatacctgcttggaaaaatggttgcctggtggggaatcgtaaacagcaatgaagtagtgatcgagaacagagctacagggcaaaagctatttattggttcaggcggatttaaaattgacggtaaaaatattgcgaccacagatcagctttttggtgtcgggcaaacctacaaaaatctgacgtccagtcgtcaaaataaagtctggtataccaacaccgacagtaagccacgcattatccatgtcgaatcaaacagaaccggcacacaatacccttttagtattgatattcaggttattgatgcaaatggtaataacagagttgattaccgatggacttctgcggatgaggttgtttctctgaatgcactggttcagccgggtgaacggtacagcgttaacggcgggtggggacagcctacagaatgggttgttattaacagatgggtggagctgtcacaatga

SEQ ID NO: 287207 - DNA, 252 bp, Morganella morganii
atgtcccaaagtaacgggcttcctcagctgaactatgaatttgcgtataatgatgatggtcaggttatccggcagacacagacacaacatacgccgctgggccgggtaaaagctatttatatctgccagcagacagatacttacgggaattgtgaaaaagcactctggcagagtatctctgaagggaatcaggccaataatattattgtgataaataccgctattgtgacatcagactatcgttattactga

SEQ ID NO: 287208 - DNA, 276 bp, Morganella morganii
atggctaactttggcgaagcattagaggcagtaaaagcaggaaaaaaaatctcacggtcaggatggaatggtgctaatcaattcgtaattaaagcaggtggctataaggtaagtgagcctcgtgttggaagtgattaccatcgcgccgggattactggtgagtttactatcgcgccacaccttgattcaaaaaatgcgcaaggaatcatgcagcctggctgggttccatctcagggcgatttatttgccgaagattgggtgattcagggggagtga

SEQ ID NO: 287209 - DNA, 219 bp, Morganella morganii
atggcgtggcaaaagcgcatgtggtgctcaccactgagcggaaatatttatttcggaaatgtaaacactgacaccggaaaggcgacaaaaggaaaagttgccgtgactgatgatgccgttcgctcagtggccgagcatctgtatttaacaggtaacgaagaaaaatacacaacaaatgatggagtgaaaataaccatcagtgtgaaagtggagaaataa

SEQ ID NO: 287210 - DNA, 285 bp, Morganella morganii
atggaatttaaaggtacgccggggccgtggttaactgacaggaataacttccacgccggacgcatagctgcggttcatggatgtaaaaataacgactgggtggaaatctggtctacaaattggcctgaaaatgaagatgtgcaggaagcaaatgcgcggctaatggcggcagcgcctgacttgcttaatgcgctgattaatttgattgaatactggaagctggacgaaactgcggaagcccatgcagcaatgatagcaatcaacaaagcacttggccgcgaatag

SEQ ID NO: 287211 - DNA, 603 bp, Morganella morganii
atgaaaaaatatgaccttctgttagccgatcccccttggtcatatagcaacaaatcctccaatggcgcggcagataaccactacaacaccacagatttttattccctcacccgcttacccatcgaaaaaatagcctcggagaactccgtactctgtatgtggtacacgggtaactttgtccgagaggcttacgagctggctgaggcgtggggatttaaagtgcgcaccggctttgggttcgtgtgggtgaagctgaacaaaaacgcaggggatcggatagataaacatccgccggaggatttctttgatttcatggagttgctgaactcagagacgcggatcaatggcggcaactatacccgcgctaatgcagaggtatgcctaattgctaccagaggccgggggctggaacgccggtctgccagcgtccggcagattatttattcctgcctcggtgagcacagcgagaaaccaaaggaagcgcatcaccgtctggaagagttatatggcgatgtcccgcgcatagaactgtttgccagggagaaatacggcgaatgggatgtgtatggtgatcaggtggacggaagcgtagaaattaaatga

SEQ ID NO: 287212 - DNA, 1080 bp, Morganella morganii
atgttttatcttgtagtcaccaaaccctatctgaaaggtaagttgaaaaatatggcgataattgatttatatagaaaaaatgttagtcgtaaaagagatgaaatagttaggctgaccgagcagaaagcaaaagaacatataagaatcacaagcctaaataataagattcaatctgcaacgaggcaaatgaactcatcaaaatcatcaacaaccattaacaataaacaaaaggagatatataagcaccaaggagacatatctaaaattgaaaagaaaattgcagattttgaatctaagattgctaaaaaaaataaagaactacaggttgaacaacgaaaattgagtaatgaagagattaaagaatcaaaaaaacagcaacagttacaagaaaaattccaaaatgagcagagtaaggtactaagtactatgagtgaaacattatgtgagcactctgatatgattaactcattaaatgaattacctgaggaaattacagtattgtttcttgcttctaatccaaaagatcaaggacagttgaggctagatgaggaagttcgatctattaaggaaatgattacgaaatcacgtcaccgtgactcggtgaaattggaatcatgttgggcagtcaggcctggtgatatccttcaatatataaatgaatatacaccaacaattgtacattttagtggtcatggaagttctaacgatgaattagtcctgatggataataactctaatactaaattagtatcgatgggctctatcgttcaagcaatgagtgttgcaaatgataatttaaggttggtgttcttcaatacatgccattcaagaaatcaagcccataaagtaactgaatatatagagtgtgctatcggaatgaatgattcaattacagatgatgcagcgcgtattttctctgctcaattttattcatctttaggctttggtctttcagttgaacaagcgtttaatcaagcaaaagcagctttaatgctagaaggtattccagaagaaagtacaccaactctttttgtgaaggatggttgtaatgctgctagtataaatattgttgcacagtag

SEQ ID NO: 287213 - DNA, 1035 bp, Morganella morganii
atgggcgaaaatcttcctgaagcaccacagggtgaatttgttttattccgcagtgaagatgggcaaactcacgtcgaatgccgctttgaatctgatacgttgtggttatctcaatcatcaattgctgagctgtatggaaaagacgttcgtacaattaacgagcaccttgttaatattttctctgaaggggaacttgctcaaaacgcaaccatccggaaattccggatagttcgattagagggaaatcgtcaggtttccagagagatagaccactatagtttacccgccattcttgctgttggttaccgcgtccgttctactcgcggcacacaatttcgccagtgggcaacacaaaccttagaacagtatctgatcaaagggtttgtgatggacgatgagcggttgaagaatccacctgtcggtcagtcagtcgtgcctgattactttgatgagatgctcgaacgcatccgtgatattcgcgccagtgagcggcgtgtgtatctacgggtgaaagagatcttcaccatggcagcggattacgagccttccagtaaagaaaccaatcgtttcttccaaaccatccaaaacaaactgcattttgcttgtacgggcatgactgccgctgagcttattgctagtcgtgcggatgccagtcagccggatatgggcttaaccagttataagtctgatgaagtgcgtaaaaccgatgtcacgatcgcgaagaattatctgcgtgagaatgaactcaaagaattaaatcgcatcgtcaatatgtggctggattttgccgaagaccaagcgctgcgccgtaagcaagttttcttacaggactgggatactaagttggatcagtttttaagtttcaacgaccgtgacgtattgcaaggtgttggtggggttagtaagaaagcagctgacgaaaaagctaaagagatatttgatatttttgctcaaaaacgtcgacagttaaaagaagcagaaggggcgagggtgaacatcgtagcactgaaagatttactaaaaacaagtaagtaa

SEQ ID NO: 287214 - DNA, 837 bp, Morganella morganii
atgactcgtttagcttcccgctttggtgcggcgaatagcattcgtcgtgatcgcccgttaacgattgaagaactgtttcgtactgtaccgagtgttttctctgaggaaaaacacgaatctagaagtgacagatatacttatatcccaaccattaccttacttgatagtcttcaaaaagaaggcttctatccgttctttgcctgtcagactcgtgttcgtgatacgagtcgtcgagagcataccaagcatatgttaagacttcgacgccatgaccaaattactggtgtacaagtgcctgaaattatcttacttaatagtcatgatggctcaagcagttatcaaatgttgccgggcttatttagagccgtgtgccaaaatggactagtgtgcggtgatacctttggtgaagtgcgagtgccacacaaaggagatgttgttggtaaggtaattgaaggggcctacgaggtactagaaacgtttgatacggttgctgcaaagcgcgagcaaatgcagtcactattgttaccgccactagcacaacaagccttggcacaagcagctttgtcttatcgctttggagaggaacatcaaccgattactgaagaacaagtattacaacctcgtcgttgggaggataagaaagatgacctctggacggtatatcaacgtttacaggagaatttaatcaaagggggattatcgggtaggaatgcgaaaggcaagcacgctcgtactcgttcagtgaatggtattgatggggatatcaaattgaacaaggcactgtgggtgatgacggaaaagatgcacgaacatttctctggaagagagagaatatag

SEQ ID NO: 287215 - DNA, 465 bp, Morganella morganii
atgcagcgaaagcgacatgccgtaaactcaatgaagggcagtgaggattttaatgccaatttgatgatgggtaatcgagtttctgaccaccagcgtacgaagttctggcaaacctacttcggcacagtaaaaggcttcgccacgtttgaagtggttattttcactatcatgggtcaattctgtgatgagtacactggcggttattgggagtactgcacgctacccaacggcggtgcatttatttatcccgatttggacctcgaaaaactcacactttttaatatgcacaatggcaatgaagcgatactcagtcctgaagctgcgggtgtggcagtttgcttgatgctgtatagccagtggtcgtttagaacggaaagtgaagtactggtcgagcgtttctatcagcttcgtgattacgccattcaacatcctgaaagttcagctatttttcttcttatcgattaa

SEQ ID NO: 287216 - DNA, 219 bp, Morganella morganii
atgtcagtattaaaacttatcgccacaacaacaagtgttgtggccttgtcctgtgtgacccactatgcacaaaaaagagttgcggaaaaaatgcttattgaagggcaattttcaggagctgaaatccaagcagcacgattaggggccgtatttacgtgtactactctgattggcggtcctcttgaccaattactgaatacactattttcaaaacattaa

SEQ ID NO: 287217 - DNA, 462 bp, Morganella morganii
atgtcttcacgtttcgtattttcaataatgactttattaatgacattgatatcaacctcatcagcacaagccattacgttgcgtggtgaaattcaaccggaccgttatacctattatttaacggatcaatatgcacaaaaattatgggcaatgaatcgagatagaaatagaacgatccgatttaatcttccaccaggtgagcttgtcgcgcaaaccgatgtcagctttgcttatcaacatccagcccccaccgcaataacgtgcattagcagcatctattataatcaaggggctcgggcaaattggctaaaagtggcttgtattgataataatggactggaatatagcacccatcagaaatggcctgacacatcgattgctaagcgtgtttgtaaagttggcgaagccagttgtgatgcttttttaaccatgagtagcgataattggtcgggtcctcaataa

SEQ ID NO: 287218 - DNA, 486 bp, Morganella morganii
atgacattttatttatcagaattaaaaccgcaattatgcacacttatcagtgggatattgctccttttttcaacctcagcacacagcacgattgctgatgagaaatggggagattggtatggcagtacaggaatggcgtgggatttgagtagcaacaatgcccaagaggaaacactaatgttcgcttgccatggcggtgcattccatattcgtatgacgacgcctgagtatcgtaatgaccttatggcagacgatgcaatttcacctgtcactatccgcattaatcagtcctcatatgagactgatcgttctaatatctcgagtggtgataattatcaacaattatttgaacagctcaaaaagacaaccccaaacgacacgttacaatgggtgtcctcaccgttgacttctgcattattttcagcaaatgggcttgctgaagctatggccgatacagattaccaagactgtattgagcatccttag

SEQ ID NO: 287219 - DNA, 690 bp, Morganella morganii
atggcacaaccttcagctcgtcatgaacgattggtacatcgtctggcgtatattttaacgcaattattcaaaggggaaacgttatacctaaataggctagcctcagagtttaatgtctcgtaccgtacattattacgtgattttaatgaacgactagcccacctcgatttggaacattttcaaggcggctatcgattagcggggggatctggtgtattacgtacagatagcgatattctccaatttgctaatatcacccatgttgctcagctttttcctgtcttggatagaaagttgctgtcattacttcttaatcgccaatctcatgagtctccttatagggtgtatcactcgcctcctaaggctttaccttcaccttttggtggttttgctattgtgacccaagcgattttagaacatcactttattcattaccgacacgaagaaaaaatgtatcgctgggtatctccctataagttgacttattttgatggtgtttggtacgtctgtggggtctataagggatctattcatgccatgccattactgctgttgcaggacattgaacaaacctctcgttgttttcatccgaataacacgattacccaacaaatagaggagcccacatttatccaagcattaccgtactttcaatatatcaaagggatattacatcccacacatgcttag

SEQ ID NO: 287220 - DNA, 726 bp, Morganella morganii
atgcataagaacaagattgatcccgatttagcatttatcatccatttacatgatgacgatttagtcttattggcttctgttttatttaaagaaaataagaaaaagtgcgcaatagaagagtttaaaacctcctctattccgttttcgcttgcgacgcgttcactctatttagattatattttttcagcatttcacatggtgagtaatgaatgttcattagtatctacttttaaattttctcgtagtttatatcgtcaccgattacaagatttgtgtgcccgattaaatatcaacgatgggattaaaaatgatattgaaattctagaactcaatttactcatgaaactgattgagaaaagtatgaatgggcttaaccaaaacgacttgttaattatttcccgagatttacagcttaatctctcagaacccacttctatacaaattaaggttgcactcactgccgcagtgaaaacatcaaatagcgttgcacttgaaatcgccacaatgatactcagaagttatcttgaaatgtgtgaaaatatttcagtccatcaaagtgttgaattaacacaccattcactcatgtcattgaaaaaggccgtcaataccacactacagtctacttggctaatggaggcgatatcctttcccagtcaaagtcaatttccactactcatttattttattgtggcttatctacgccaaaaatcctttattcttgcttag

SEQ ID NO: 287221 - DNA, 2931 bp, Morganella morganii
  misc_feature (2766)..(2775): n is a, c, g, or t
atggcaaagatacagcgcagactttggcaacatttaagtaagtcccaagtaaatggtgtagagattttacgcgaatggggacgctataaaggggatagtagccaatcgctgttacctattgtatttactagcatgttaggtatgacactagatggtgacaatattgatgaagcattaaatcagcttttcggtcaacccgtatatagcttcgcgcaaacacctcaagtttggttagatcaccaagtaatggaaggaaaagagggactaacattaaactggttctgcatggatgacatctttgccgacggtttattaacaatgatgttctctgattatcaaagcttgatcactcaattatgccaagatgaagataataatcaatcagttgataagattattgcacaactcccttcatatcaacatttagcaatagataatcacttccaatcacgctatcaacaactcgagcaaacattggaaaatcatccgcaaatcaaacgtgctcatgttatggtaaaagacgatacgaaagtagagtctcctctacaattactgtttgaagcctcttctgatattccactatccgttattaaacagcccaattggttacctaatttacttttgccatcagcttcactcagtgacattattgaaaagagttggcaacgatttgaggaacgagcacggtatggcatatgtcacacactgtatcgaaatactctttttaccgagctaaacacaccaatcaccctagctgaaatagtgactcgtttaaaagcaaagcctcagtatgagaggctacttaatcagtggctagatttattatgcctgcatcacttattaaccaaagagggtgatcagttttatgccacaacacagtttattgacttatgtttatctgccccagtatttcaacaacctgttaatgattgggaatatgtactttgggattaccttgagcaatcactaacccaacatgaattactctttagtggtaaggtttctcctctttcactactttttaattcagatgaaattaccacagcactatacgccaaacaccctgcactaaattatttaaatcaatgtgcaaaagatattgttagtgcaatggttggtgcaacatcttcactcaatattttagaaataggggcaggaacaggagctaccactcaaggtatagtcgcagtacttaagaatacgcattactcatacacctttactgatatatcacattacttccttgataaagcgcgaaaaaaatttactgctgtaggagaaatgcgctatcaactctttgatattaatgcaccaatacaattttctcatcatccagataatggctatgatctgatcattgcatctaatgtattacatgatgcatcacatatcggccacgcactaaaacggattagaagcctgttaaaacctcaaggctatttattatttatcgaagcaaccgagtgtcaaagtgctatgcaaatggcgactgttggctttattgagggattaagtgcatatcaagataagcgtatattgacgaataaagcgatgcttgatagtgaaagttggcatgatattttaatcaatactggttttgaaactattggtcaatggccccaaacagattcctcatctttgcgacaaacactctttttagcctctcccactcgtggaggaaaaccttatttaggtaaattacgtgattatttatctcattctcttgatcagaatatcgactctcttgagttgttccaatgtgaaaatattgaagcaacccttaatggcatagcagcatcatccgctcaagaactaaatgaacagatacaacctgttacaatacctgatgtaccaaccaatatgattaatgaagtcattgcattatggtctgagttattaggtcgtgaggtcaatagcacaaatgatttcttccgttctggaggagatagtttgattgcaaccaaaatgatcagccaattacatcaacggggatatccggcaacattacaacagatttttacctatccatgcttagccgatttttgtgctcatttagagcaggaaaagcaatcacaacgagagtactcctctttgatacctctaagcgctgtatctgctccaaaaccttaccactactttatggtgcatgcttctgatggtgatcccggtgtttacctacctcttgctgagtcgttaaataatacagtgtggggattaacagttacagatgcttcaaaactaactgatttggatacattgttatcatcacatttatctagcataaaaacagcacagcagactggcccttatattcttattggttggtcatatggcgcttttattgccagttaccttgcagaacaactctcgcaacaaaatcagtccgtattattagtattaatagatcccgtctatcgacatgattttattaaattttgccatgatgactcagatagttcatcagatgaaaataagcagcttgcatgcactaaaaggcttatgtcattcctacctgaaagtgacctaccattatctgatgatatcgcctgtttatggctggaagccaccaaccacccaacagaatggacatcacctgaaaaagagtggtaccaacgattaccgccacatacccaacatcactatttttcaggggagcactggtcaatactgcaagatcgcgctaccagcacacatctggccgaaatcattgatcagtgggtgcaacaaaaactttctaataacggatatccatccgaaggaggtaannnnnnnnnnaatttggagaggtttatctcaatgcatttatacaacctcaagacaaatggcatcttattggccttttttccaaaggtagcactcgttctcgagaattatctaaagcattcggtattccactttttactcgatttgatcaactacctgaaaaaatag

SEQ ID NO: 287222 - DNA, 219 bp, Morganella morganii; identical to SEQ ID NO: 277738

SEQ ID NO: 287223 - DNA, 399 bp, Morganella morganii
atgaatacggacacactcgccgttgccgtccgtccgcagggattgggtgatatcaaacctgtccacaatccagcgttcacctttttcaccgtagccggtgacctgaaccacaaaccggcggtttttcccggcctgcacgtcgacggttgccaccagaaagcggacaccttccggcacacagcggatcccgagatcctcagcccgcgccagcagttcttctgccttgcgctgaccctgagtatgtttcggccggtacggcagcccccagtccgtattgatcaccgttttcagggtttcttcgctcagggtgagctcatattcctgttcggcggtgagatatttataaacgagctgggacagcgtctgataggcggcagccggtccctccatccagaatga

SEQ ID NO: 287224 - DNA, 603 bp, Morganella morganii
atgcacgttattgtcattggtgcgcgggctcagccgtttagctacttccggactcgcacggaatgtccggtcgaggcgctttttcgaatgctcacgggctttttcttccgtcatctgaatcagcagaaaatcagccggatcacagactatcgtgtagacaatccagccgtcgataagccccagggatttaccggtacgcgccgggccgacaaatatcaccgcatcatatttccgggatgtcaggcagttcatcggctcaataatgtacggcgtcagggtgtcttcccactgcaccgcgctgccgccgcccatcggcacccgcatgtattttttaacggcctccgccaccggcatccggcgcggcggacgcagcagcacagagacatcccggcgcatttcagccgccgacgcataacctgtactcatccgttttcttcctctgcgttttccacctccaccgccagcagatcgcggagttcatccaccacatcctgtgcctgtgtgatttgctcaggctgccagccgtggtcacgctccagtcggtcaggccaggtgtccagcacctgggctatcgctttgatgatggtcgccatctcacggtga

SEQ ID NO: 287225 - DNA, 2094 bp, Morganella morganii
atgtcaggggtactacgcggcggtatgtggggcgggattatatccggcaccgtgggtgcaggtaaggctgcatacgatgcggaatcagagttcaccaacttcaataaacagctgatcctgaccggtaattatgccaacaaaaccgcatctcagcttaatgaaatggcacggacactgtccggcggcggcataacccgccataaaatggcagaaacattgtcagaggtagtcggcaccggcctgttccgggataacgaattaacccgtgtatcgaaagcagctgcacagatgaactacatcaccggccagtcagtggaaaccacgatcagccagttcaaacgcctgcaggacgagccgttacaggcctcactggaactggaaaaggccaatcatcacctgaccgccgcacagcttgagcagatccgcacactggaattacagggtgataaaaccgccgctgcccgcctggcggtggatgcttacgctcaggccattaatgatggcgccacggatataagtaataacctcgggtatcttgaatctgcgtgggttaccttgcgggatgcggcaggaaaggcctgggacaccatgctcgggcttggcagaaaacagacacttgatgaagaaatccgtgatattgaagattcgcttaagcggatgtcggactctccatggtcggttaacagctcggttaactcagagcaccttaaaagcaagctttcctcgctgaaagagcaaaagtttaaagaagacttagataaagctcgtgcgcaggccgacaaaaataatgaacagatagaagttaacaggatcagaataaggcaggaaaattttttaaaaaatgccacctgggaggaaaaacaaaaagctgacctggctaaactggaaaaagacagatgggcattatcggaagacgaatatgaaaatgctaagcgaatgatcgcttggcgaaatagaccaagggataaaccgcgagaaagaaaggggaatgggtaccgggtaggcgaaggtaccaaagccgaagagcaggccattaaagagcaggtagccctggagtcaaagctccgcgtcctgaaagagcacaaatcagtcactgatgtgatcagcgctgagcgtaaaaaactatgggaaatggaagcgcagatcgccattaccgaagaggtcaggggtaagcggcagttaaccaaacaggaacaggcacttctggctaataaagcggcggtactggctcaacatgagaaactggctctgctgggtgatgaagttgttgcacaggaacgcctgaataaacttcaggatcaggcagataaatacgttaagcagcagactgaaaagcaaaatgcgatccgtgatgctatcggtaaatcctcgcgtgaggcacagcaggcgcttgaacggtcgcagattctatccgcacatcaggataatccgcggttgaatgacatgcttgagtctcaggcggcaacatatgcagcggaagaggaaaaacgcgctaactggctggctggggcacagactgcatggggtgattaccgtgatgccgcactggattcaaatgctcaaatccagaatgctactatggctgcactgaacggattctcaactgagctgacatccgttctgacaaccggtaaggctaatttccgtgagttcactacatcgatactgaaaatgctgacagaaatttttgttaaaaagtcgattgtcatggggatggatgcaatgggatttaacttcacggcgaacgcaaacggcggcgtttataactctccgtcactgagcgcatacagcggacaagtggttcatacgccaacgatgtttgcttttgcgcatggcgctggtgttatgggggaagccggaccagaaggaatcttcccgttacggcgcggtgttgacggaaaattaggcgtggtggctaaactggctggtggaggtggggagcctcttattcagaataattatttcactatcaataatgacggcagcaatggacagatgggcccgcaggcaactcagcagatcctgaagttagttgaacaaaaaaccaaacaggtattagcatcagaacgccgtccgggcggagcgatggggtaa

SEQ ID NO: 287226 - DNA, 2154 bp, Morganella morganii
atggggatgagcaagttcacctactttggcggtatgggggcggtagtcggtggaatagctgcggttggtaaagcagcctggaatgctgagcaggaagtgacgctgctcaaccgtcagctgatcgccaccggtaattatgccggtaaaacatcggcacagcttcgcctgatggcagatcagatgtccggtggctggataaccaggtcggatatgactgctgcgcttacaagtgcagtcggttccggttatttcttcggtgaccaggtatcacttgtggccaaagcagctgcacagatgaaacaggccaccgggcagtcggtggatgaaaccgttaatcagtttaaacggcttaaggatgatccggtcaacgcgattatggaaatggataaatccatgcacctgctgaccgcatccgagtatgaacatatagctgcattggaaagatccggaaaaacccgtgaggcgtcagaatatgccattaccaaactggcagaggttaccaaccgtcgcactattgagatgagtgaggatgtgggtatccttgaacgggcatggaataaccttacaacaagcataaaagaagccggtgatgaactggcgaaaatttggagggcacctactgaagcggaaaagttggctagtgtgaatgaacagatcgcatctcttgaaaacggtgatgggtggatgaccgactccgctcgtaagagtagtttggaaacattaagaaagaacaaggccgaacttgatttcgccgttaaatcccagcaggggtatctggataataaaaataaaattatccaggccaatgaccgagaaaagaaaagccagcaggatctcaataagtacattgaggcgagcctctctcaggcagaaaaaagaacgcgggagcacgaaaagttaaaccgtgaaattgctgccaatgcaaaggctgcaaaagataccgcctctgcatctgacagtgaaaaaatcaggctatggacacctgatgaaatagcgaaagccagagctggtattgataaaaaatatgccgaccctaagacgccaaataaacgcgattatcgtgttgatgaaggaacaaaagcagaagaaacggccttaaaagagcaaattgcacttgaatcaaaattgcgcgtgctcagagagcacaaatctgttacggatgtaatcagtgctgaacgtaaaaagctttgggaaaccgaggctcagattgccattactgaagagtccagaggtaagcgccagttaaccaaacaggagcagacgttgctggcaaataaagcggcagtactggctcagcatgagaaactggcactattgggtgatgaagttgttgctcaggaacgcctgaataaacttcaggatcaggctgataaatacgttaagcagcagactgaaaagcaaaatgcaatccgcgatactatcggcaaatcttcgcgcgaagcgcagcaggctctggagaggtcgcaaatcctctccgctcatcaggacaatccgcggctgaatgaaatgctggcggctcaggcagcaacgtatgcagcggaagaggaaaagcgagctaactggctggccggagcacaaaccgcctggggggattaccgtgatgccgcactggattcaaatgcgcagatccagaatgcgactatggcggcactgaacggattctcaactgagctgacatctgttctgacaaccggtaaggctaacttccgagaattcaccacatctatactgaaaatgctgacagagatttttgttaaaaaatcgattgttatgggaatggatgcgatggggtttaattttaccccaaatgccaaagggggcgtttatagctctccgtcactgagtgcgtacagtggccaggtggtacataccccgacaatgtttgcctttgcaaaaggtgctggtgttatgggggaagccggaccagaggggatttttccgctgcgccgtggtctggacggaaaactgggtgtagtggcgaaaatggctggtggaggtgatggtgtagttcagcattttaatatcaccattcaaaatgacggcagcaacgggcagatgggcccgcaggcgacacagcaaatcctgaagctggttgagcaaaaaaccaagcaggttattgcatctgaacgtcgtccgggcggagcaatggggtaa

SEQ ID NO: 287227 - DNA, 1437 bp, Morganella morganii
gtggtgcgcagcggtgctgctggtgatcgcgaaagttaccgttatgatgcgggcagccagcgtattctgaaaaccgccgtgcagaaaaccggcaacagtacacagacacagcaggtgatctatctgccggggctggagctgtaccgcggaaaagaaaactatcaggtgatctgcgccggtgttgccgggcgggcacaggtacggctgctgcactggcaggacggtaagaaagatcaccagcggttcagctacgacaatctgatcggcagcagcggcctggaaacggacggcgacggtaaactgctgagtcaggaagaatattatccgttcggcggcacagcggtgctggtggccggtgcggacagcggcattgactacaaaacccaccgttattccggcaaagagcgggatgcgaccgggctgtattactacggtcaccgctattatcagccgtgggcagggcgctggttgagctcagatccggcgggaaccgttgacgggctgaatctgttccggatggtgaggaataatcctgtgacgttaagagatgatggcgggttaaaacctgttaataatatgccgccggcacctccgcttccggtctccggaggaacacctttaccgccgccacctcccgtgatgagcggagctccgttgcctccgcccccaatgccgggcggagcacaattacctccgccaccgccaacgatggcaggaggaaatccgccaccgccgccaatgatgggctcaaaaccaacaggagcaaaaaagaaatggactatcaaggaagaccctgcactgtataaacaacaaggcggagaatacccgtactattcatctttcagtatcactttgcagaaactgaatatcggccattacagtgaaattgatgatatggataaatttgtcagtgcatggagagataccggccgtaatatgaaacccgccgccagagatatcaatcatgagaaagccattgaggttcagtctgttatgggaaaaattgatgcggaatggtccgggtataataaagcaaatgtcagtgaaacatttcgtggtgatacgccggttattacaggaagttatccatggcttgccgattttattaaggaaaccggcaacagtgcggaggctgtgactaaagttatggattcggatattcggtctcagctgattatgtctacagcaaaagatccgggaatgggatatgtatcgaataaatcaattatgtggcattttgaactggaagaagggcatgccggtgtttctgaaggattgtatgcatcagaaggtgaggtgactttccctatctataacaaaatgaaggttacatcactgagttatattccggaaggacaatcttatatgaataatgcggaacggtttggtactgcacaccggtatattattaacgcaaaaatgttaccgaaatcataa

SEQ ID NO: 287228 - DNA, 303 bp, Morganella morganii
atgaatgcggactttcatatcgtgaacaacggatgcttcgccggcggccatgtcccactgcgcccggatggagttctgcgccagcgccagaccgtcttcagctttaacctgtaccgcatccagtttctctgcaagtgccttcgtttccgtgactgtgtagttgcggacttcgatgatttctgctttcatcgcgccggtttcgcgctgccagtagccccactggccgtaggcgttattggcgttgttgatgatggcttcaaagttgtcatcagcctgagactgcaggtctttgatgatggctga

SEQ ID NO: 287229 - DNA, 186 bp, Morganella morganii
atgtttaaacatgaattaggtcaggttgtgcaggtcaccatcagcggcgaagaaggtcatgtgaaagcccgtgctgaatatcataacggcccgaatcagtatctcatccactatctggcagcggatggccgtggaactgacggctggtttgaggaaggtgagctgtccccggcagaaccacaataa

SEQ ID NO: 287230 - DNA, 1356 bp, Morganella morganii
gtggtgcgtaacggtgccgccggtgaccgcgaaagctaccgttatgatgcgggcagccagcgtattctgaaaaccaccgtgcagaagaccggtaacagctcactgacacagcaggtcatctatctgccggggctggagctgtaccgcggaaaagaaaactatcaggtgatctgcgccggtgttgccgggcgggcacaggtacggctgctgcactggcaggacggcaaaaaagatcaccagcggttcagttatgacaatctgatcggcagcagcggcctggaaacggacggcgacggtaacctgctgagtcaggaggaatattatccgttcggcggcacagctgtgctggtggccggtacggacagcggcattgactacaaaacccaccgttattccggtaaagagcgggatgcgaccgggctgtattactacggctaccgctattatcagccgtgggcagggcgctggctgagttcagatcctgcgggaaccgttgacgggctgaatctgttccggatggtgaggaataatccggtgacgttaagagatgatgacgggcggaaacccatcagtgaaaacttcagtgaagaaaaaggtgatatggtttatggccttgccggtttcagaggaaaatatatttcttctgcactgggacgtccgtttttacctgacagcaaagacgcacctgcatcgataattgatttatataataatacggtatccggtcaggtattgatgagcgttgatatgaaaatattacagaatttcatgaaatcaccggataaatatgagaaaaagttatcgccaccggctgatataaaggaccgtgtacagaaaagcagagcatatcctttgtgggacagttatttttctgctggtgaaaaaaatgagaaatttaatatacactctgtttataaagaggtcagaaaaaatcccggaagtacgcaatatcatgaatggcatatgtccggggcacaatctgtaccgaaacttctctggaaaagaggtagtaagctggggatagaaattgcggcatccggtggcggtaataaaatccactttgctcttgataatttaaatataaaggaaattatcagtaagtcaggaatgggcggacagtctatcactgccagcgaattgcgctatgcttacagaaacagagaacggcttggcggaaatatacatttttacaaggatgataatgaggttgacgctccgtgggtatcaaaccctgaacagtggaacacgtataaacctaaattattatcggtatcaggcggacaattagtccggcggcataccggatttatgggccgtttacgtgcatcattcagtcgtactttcaggagaaattaa

SEQ ID NO: 287231 - DNA, 231 bp, Morganella morganii
atgatcaaagtgccgattgatgacaatacccgggcggccatctattcatttgcatataacaccggaaccggtacgttctcgcgttcgacaatgctgcggaaactcaatgccggtgatatcgcgggtgcctgtgacgaaatgaaacgctggacatttgccggtggtaagcagtggcagggtctgattaaccggcgcgaaacggagaaagcggtatgccacggaaccctttaa

SEQ ID NO: 287232 - DNA, 294 bp, Morganella morganii
atgtcaacgttaaaactgttatcaaaactgttttcaaagacagtgaatgtgctgctgctcctgttcccgctgatgctgttagtgagttgcggaaatacgcggacggaatacgttcccgcaccggtggttcctattccggctcaactgaccgttgattgtccgctgccggttattccggatgaactgacatacggcggcgcaatcctgttgttggctgatgccatgaagtcgatagcagactgcaatcacgataagcgggcaatacgggagatagaagcggagagggtgaagtaa

SEQ ID NO: 287233 - DNA, 591 bp, Morganella morganii
atgtatacagttaatcaggattatctaaaaataatgaatcaagtactatcacgtatattaagcgaaaagaaacgagtctctgcttttagaatagacttacgtttccctagcggaaatagtgattatcacaatgatgccaaagtaataacacgatttattgaatcattgaaagaaaaaataaaatgggatgtaaaaaacaagagtaagttatgggggaaagcattaactgaaaagttggattatatttgggttagggaggtagggagtgaaagtcatcacccacattatcatgtgatactctttttaaacaaagataattattactctcttggcgattacaagaagaatgacggtaatttagctgcattgattaatcaagcatggaatagtgcattaaatatcaaattcgaaatagcatcaggattagttcattttgcaggtagttatcatcttgtccaatatcaaggcatagccttgaatactacttttcaatttgaattagataaactacagcaagcctttcattatttagcgaaagactatacaaaagcctaccacagtggctttcgttctattgggtgtagccaataa

SEQ ID NO: 287234 - DNA, 375 bp, Morganella morganii
atggagcaatatcttgatgcggtaaattttccggatggaaacaatcaggcagatccgtcccgtgaggctgtacagaaatttgtcattgagcaacgtgaaaattcagactcagatttcgttacatatgtgctggcgctgccgacagaaacagataatgcacaaattcccgcccgggttattcaggctgatatatgcccgtggcgatatcgtggacaggattgcgggtatgacgggcctcctgtcgcagacgaaaaggatcagccgaccaatgaaccgacaaaagatcagtgctctcataagtaccgtggctgcaaacttcgccactcctcagtattgccgttcggtgggtttctcggctccaataaactaggttaa

SEQ ID NO: 287235 - DNA, 534 bp, Morganella morganii
atgaaagtggaacaacaaataattactaaattggtaatttctgatgttgaaaatcacgaccctattcacgtttatcttgaagatgaagatgataaccggcgcggacgtgtaactatcagcgagttcggcaaatcatggacatgccgttggctcggtatggaaatgccgcttactgaatttcttctttggataaataatgattattggattggttatcttgatagctatatgcaccaaaccattgatgctgataatgacgagaatatcgactttgttaaaatggaaatattacggtgccgcaaaaagcagatcattgatgaatttcaagcccgaactatgtttgatgattgcgaatatagcgaagacataaggtacagtctcacaagcacctcaccggctggtgattacggatgcttattttcaggggaggcgtatttggctcagtggcctactcaggataatcctgaatacatccgcatgacatccagattagacgcagtgcgtgaagcaattaagcagattaaggaggggtga

SEQ ID NO: 287236 - DNA, 201 bp, Morganella morganii
atgagcagattaactcattcagaaccagaaaagcaatttaaatgcctcgtcattggtaatgaaccgtttcgttatgttgaaagcatacctgctggtggtacagcggacaactaccgagaagcgccggaaatggtagaccgcgagaagctcaaagagagctgggcaaaatactattaccgcagcgggggacagaatgcttaa

SEQ ID NO: 287237 - DNA, 756 bp, Morganella morganii
atgatccattatcacggtggcccgataactcccgatacatgcgcgataaaagcatggaaagcgcgacacgcatttatcagttttgcccacacttcacagttaaatctggcatcagaaatatgccagtcattcgcagttgataatggggcgtttaccgcatggaaagcagcagggcgcaacaaaatttactggtctgattattacggtttcgttgaaaaatggaagcgtcacccgcgctttgacttcgcgattatccccgatgttatcgacggtggagaagaagagaatgatgcactgttagcagagtggccacacggtgatttctatggtgtgccggtgtggcacatgaatgaatctgatgaccgatttattcgcctgtgccatgaatatccccgcgttgctattggcagttgtggtgagtatgacgttcgccggccaaaagcatcagtcgccaggatgaaagaccttatccggcatgttgtcgatgaaaacggatttccggcagcaaagttacacggcctgagaatgcttaatccgcagatatttactcagttaccgctggcatcagctgacagtacaaacgtggcacgaaatatcggcatcgataaatcatggtctggttcttattctccggcatcaaaagagaccagagcggctttattggtggagcgcatcgaatcgaacaacagcgctagttctctgaactattgcgaagagaaagatcgctttgattatcaactacaactggcggtgtga

SEQ ID NO: 287238 - DNA, 399 bp, Morganella morganii
atgagagatattcagacagttcttgagcagtggggcgcgtgggcagcagatgaaaatagtggtgtggattattcacatattgctgccgggtttaaaggtctgatccccagcagtaagcggtcaaaagaacaatgcagcgacggtgacgggttgaagatagatatggcgataacgcaaatgaaagatactaattcatattattttcaattaattatcatgtattacctcaaagggtataccctccgggcaatgggcgggaagatggggatttctcataatgaggtcgcaaagcgattacaggcggcagaggggtatattgatggttggctggcgtcatcaggtgtgaggctggagtcagatgtgaattatgcaaaaaactatatatatgcacttgcgtaa

SEQ ID NO: 287239 - DNA, 627 bp, Morganella morganii
atggatctttcgacattacttctctttatcccagcctgctttgctttgaatctcgcaccgggaccaaacaacctgctttcaatcaataatgctgcatactatggcttcactcgctcatgcgccgggggtatcggcagattgctcgcttttgtgattatgatcatccttgcttctttaggtctcgctgttgtattgcaaacatctgaagtgattttcaatgcaatcaaatttacaggtgttgcctacttattgtggcttgctttccagttatggaaatcccctacaactgaattcagcatcactgattcccggaaggatacatccgtttttaaattggcgaagcaggagttttttgtcgctgccggaaacccaaaagcaatcctcatcttcactgcttttcttcctcagtttgtgaatccgcagattcaggcaggaccgcaatttttagtgcttggttcgttgtttttgtttttggaatttattgcgatcatgctgtatgccttgttggggctgcatgtgaaaaaattactcagcaaaccaacagctaagaaaatatttaatcgcggttgttcttgtcttttagctggcgcaggtgtcggactcctgctttcaccaaaaaataattaa

SEQ ID NO: 287240 - DNA, 216 bp, Morganella morganii
atgaagtggctgatgttttttataccgcattacaccaccgaagaagtcgtgtttgatgaaaatgaagatgttatttatccggtgtgttgtttggctgacgtgaggcctggtgagcaattcccctgggtaggaacgatgcggtcattaagttttatgaactttgggtacttcccgaaactaataggtgaattacgaccattcggcttcgctaaatag

SEQ ID NO: 287241 - DNA, 123 bp, Morganella morganii
atgaccgatgatattattgtgttattgattaaattagcctttgctggtggcgcttatggtcttctgttgaaatacaagccagagcacgcgctgccggtggctgccgctatacttgacgcttag

SEQ ID NO: 287242 - DNA, 330 bp, Morganella morganii
atggaaaaattcacctggaaagttaaacccggcatgaatatagagagcgagccccgcgttcgctctgttcgtttcggtgatggctatgagcagcgccgccctgatggttttaataccaaccttgaaaaatacagcattgcattatcaccaagtaatgctgatgctcaggttgtcagggcttttcttgaaaaccatgcgggcgtgactgcatttttctggaaaccccctcatcaaacgcactcgatcacggtattatgtcgtaagtggtcattttcagttggagcgcttagaacagaaatatcagctgaatttgaaatggtgttggtatag

SEQ ID NO: 287243 - DNA, 513 bp, Morganella morganii
atggttgacccaacgcgtaccatgaaaatgggcaaattcgttatctggcgtattaagcgcggacggacctatgatgagaggaaaagcatagcacttgggatgatgatgtcagttgccagtaaatttgaggcactccaggcgtctttttttgtcagcatggtcacagatagtggtttcagcggagaagacttagtatcggatctgcttgggttctatcgggtggtgacaaatttagatttattccctatgctgaaacccgtaagtaaagaatctgcaatcagacgctggcattattatggtgatataggcaaatggaagaatgaatcgtttatacatttgctgtttccggaccctgcagatagagtaaatcctcagcctgtgagagggcaactccccaacattatgcaaacagtcaacccgtggagtgactttacctctggtattgttagtatagttactcatgaaggaacctatatggacagagccaaaggcgggagtttaccttttgcgtaa

SEQ ID NO: 287244 - DNA, 429 bp, Morganella morganii
ttgcgtaattcaattaagataattattggaatgggtgcattgatttgtatcgggttaatatatttttggccgtatgtgcaaatggaatttgcagagagcgcacattacactgaacaagataagagagaatatgaattttatacgcctgaagtattgaaaaaaatgcccagggtttcaaatgattattcgtttgattttgcaaacataacaggcccggcaactcatgttaacgctattaaattctctgatgtaaaagatatcagccggattgaagaatatcttatgtcatccgggtatgtgaaaggagtatgtgattttgagtcgccatgctggcgcaaccttgatccccgggaagctatttttatcgataacactgaaaatgataaggtggttgtgcaggtggtttatgattttacagaaaaacaatga

SEQ ID NO: 287245 - DNA, 1044 bp, Morganella morganii
ttgagccggtacggtatatatgttcagcctgaaacagggtcaaaacctttttatctggatgattcaaactgccagatgttatcaaaattatcctccctgaagttctggaacgcaaactacgatggaaaatctcagcctgaggggctttgggagtgggttagtgacagaaaagcattcagatccagaatacctgatatagaaaaatataacgcttttgttttggttaaaaagggagcccacggtgcttttcctcttggcaattacacaggtgttatacaagcgtggacggaaagcgcctggctggaggatgtttatctctatgtctacgcatttggggggcgtgcttctgcgtggaatgatgacccatacggtaaattttatgtttatgaagtttttgggacacctaaaaaagccgcacaggactctgatttcgggatcaggcttgcaggaatgaatggtgttactaccataactgacatgtccaaactgggatattgtgtgtgggccggagatttatattcaccaggctgggacggcgttggtattcccggatttaatatagaagatgaaacaagatatactatgtatgtaaggccaaaaaatggcgaagctattatgatgaaatacaagaacgccataaaaacgaaagatacgactacattacaagttatcttatttgaccataaacctgattttaataacaagccaaaatttggtgttgaaataagaaataaaaatggtgtaataacatataccagtaagtacgctcccctgatgggagggcagattttgtcaagcagaagtggtaatacacagtattccaggcctttttttaaccttggaaattatggcacttatatttctgctataaagaataagtattatgatctttctgctatgggtttatatgtttcaggtaactattacgacgtgaggcatatgactaatgtaagtatgggctggatgggcgatatgtggacggaccatggtgagataaatggcgtatttaacacccactgtatcgacggcgatttatatttataa

SEQ ID NO: 287246 - DNA, 1062 bp, Morganella morganii
atgcaacatgtccgtccgggagatatcgtaagctatgattttgaatatttggttggcgaaaaacatattcccgggattgcatcaaaacatttttgggacatttgccggaacctgacagaaaaaggggctattgtcataatggctgcaggtaatggtgaattaaatttaagtaatgaaccaacttgccctgattatggtgactccggtgcaattttagtcggagcctgtgataaggatacaggcagaaaactatctttttcaaattacggacattatacatctctcgttaattcagtggggcatcatctcgtaacaaccgggtatggcgctctgtataaacggaataatgaccctgatactatgtatactgacggatatggaggtacatcaggttcaacgcctttatgtgccggtgctctcgcattgctgcaatcacatgctaaaagtatgggcgttatgctcaatgcacaaagtatgcgtaagttactcaaaaaatcgacttatacagaaggtgttattgatggcattggtgtacggccgaatgtggctcagttaatgcatgaactggataaagaaattttagcgcctctggctgatgtgaatccgtttacacctgcctcaaactacctgaattttcttgtatcatttaatattgatgaatataagtttgaaaatatcccattcaactatcaatatactgatttatactctaacggtattattgcacattatcctcagcagggtccgactcagctgatatggtggaatcaaagtaaggagctcacccctgttacaattccggtaaaagacagtagaggtaatattaccgtcgtgtatcttactgcctgtaaatggaatgatgccggacttgccgatatgaattcggcggccagcactgcgggggctaccggtattaatttcagaatccggttaatatatgacccgaagaaaaacacacatttaagaaaggaaaaatacagcggaatactccctgtttatattaaatccatggaatataaagaatataaaatccctgtgaaaattaaaattcttattggatag

SEQ ID NO: 287247 - DNA, 441 bp, Morganella morganii
atgaaatccggtacaataaagtatggtgttatcagtctgctttttctgactttaacaggcgttgcgaatgcggatgtttaccgtgaccgcagcggcagggttacaggctcatcagtaaaaagttcaggcgatactatttatcgtgatagtcgcggtgtatataccggtcgtactgtagagtcagcctacgggacaacatcttatcaggatgagcacggtgtgacgaccggatactccgcaacagatgcatatggcaaaacacagtatcgtgacagaagtggcgcagttaccgggactgccacgaaagatgcatacggaaaggtaacattcaccgataaaaacggcattgtgacaggaacggcaacaacagacgcgtggggaaaaacaactttccgtgatcgcagcggtattgtgaccggaacacagcaaaagcaaaattaa

SEQ ID NO: 287248 - DNA, 2286 bp, Morganella morganii
atgaaaaaacggattttaacgacagtactgttattcagcagcataattctgtcaggatgcaacgaaaaaacatcgtcaggtgagcagtattatattgtcagtgactatgacattcagctgtctgatgataaaccggctgaggaatataccgatattgtcagcaggatgaaaaaaaaccgggatattttttatctgcggatccggcctgataaatcattaacggtattcacccaccgggccggagaagaggttcacccggataatgatggttattatactgaagggaacaaccggttccgcctgaataatactcacccggataaaccacagattatttttgataaaagtaaagcctgcatcctggagtgtgtcattacgatgacactgaaaccggtggcagaagacagtaatgaaatccggctgataaaaagcaaacacacactgataaccactgttctgactgcggcatatctgtctcagtcggatgtatttacgcaacatccgttgcaggattttaacggcagactggttaatatcggctggccggatatatcccttcatactctgaaactgaatttcaatgacactctgactgaaatacagccggatgataacagcaggataaaaacatatttatcctggtttaatctgccgtatcgtccggaaaatatccgtgcttatcactataccggcagccgttattataacggtgtgatcatggcagtaaaagacagtgacccggtgacagacctgaaaccggttctcagaaaaatggatgcaaccctgtttgatgaaggacggggggccgttttttattctgatgcgacggtactcaccgggctctattatgattacgatgaatctgcccgtgtcctgtatcttgctgttttaccagatactttcagggcggtttctgaaccgtttatcagcgactaccgggttatccgcacactgaagccggacagcaccggtattataattcaggaaagtgacctgaacgcggataaagagacctttgagaaagaactcaaatcaccgctgaataattatcttgataaagacaggctgacacgggcggtgacagacaagatgaatgaagcctatgtttctccggatttctttttcagttccccgaagaaaacatcagaaggcgatgttcagcttgatttaagccggttatcgggattttttacagagaatccggtgacactctccgcgacatttcataaagatactgttgcaggattactggcgaaactgaaagaaaaatatccacagggacggatttatcaggatgtttttattaatgacaatccgccgcgtttttattttatcagtgaaacaaataccggactgactgttgaatataatatccgcaataaagcagaaaaaacgctgagccggcaggaaattaccagcagaaatgtgattattgcacagttattacgtcagacatcaccgctgaattttcatccggttttaccgcagcgtatagagaatttccggcgctatacaatcgcagaagatcaaattaccaaaggttttgaggtggttgataaaggccggtatatcaattttgaggggaaattaatacgcggtgataccggcgacatgctgcttcatttcccgggaaaagagcacattatctattatgtcttcagaggctacattcatgcccgcgataatcaggcggaaaacccggatgaggtcctcaggttatttgatcaaaagggtgtgttttatatcagcggccgcattgcagatatgaatcagagaggtgatgccgctattacggaacaaaaagggttgcagggcgtattcgacctgcagcgccgtgaatggctgatcaaacccggtttttataacatcagtgaaagtggtgaattctatgttgccggtatcgatcctgattcacggcgtgaacttgtattcaaccggcagggaaaatatctggcaaaaggtagggttttccggataaatgggtcgcctccgcaggtaatgatttttaatgacagcattgcggatctgtatgttattgatgctcagggaaagaaaccggatatccggcctgaaattgaagccgtcatattaccaaagggcactgtttatctttttaagcatgaaaagggtattgctgtactgaaccggcaggggcgggctattgtctcgccgtattattacagcaaatataaaaaaggaaaaaccggggtgtggttgtggtcagtcagaaaaaataagtgggtaagagctgacaaagaaaaatgggcggaactggtttctgactga

SEQ ID NO: 287249 - DNA, 1191 bp, Morganella morganii
atgagacttaatgttttgcttttttctctttttcctgtgacatcgtttgcttatcaaccggaatatgcatcaataaatatcagtgatataacaggaaaaaaagcaacgactaaaattataactgtctatgcaggtgttgaaagctgcaaagataccaataaattaagacaaaaaatatccgaactcaaactcgggaatttcaaggggtgcgatgctataggccctgacaaatatttcgttgtatttgatgtgaatgcgacaataggaggtttcggttcagttaacaatcttgcgttacaacgctctgaaaatcctaaaaaagagtatgaatttggtgcttactttaataatgattgggttaataacgtaaaaacaagctttgacccggggtatgcactaattaaccttcataatgatagcgataaaatccattaccgcagcttagttcactccactggtgcattgtttaataacgcccctcagagtaattttacgcattggctggaaccagagaagagtgtcaatgttgttataccactggtatccaaatcatatctgtcaatgatggacagaaaaataataagagaaccatctgagttatttattgccacaatgaagcgggcagatgccggagatgtacaagcgatgtatgaggtggctaacttgcttgacaaaatgaacgaacatgttcagacagaccgaagtaaagctcatgaatggtatgtaaaagcagctgataacggacatgttatatctcaatatatcgccggagaaaacttttattggatgtatagctcgagtggtgacccggaaagacttgcattaagtgtaaaatatattgaaaaagcagcgatggcgaataacccccttgcacaatatcggctggctcattttttacaaagtgatttatacggactgaaagatttgcctcgcgccaaaattttattggaggcatcggcaaagcagggttacagtgctgctcaaaatgcattggctattatgtatttctttgaggataacaaaacagaaggctatgcctgggcacttaagatgtttaatggttcagaatataaccgtaaggaattagcctcattagcggctctgatgacaccggaagaaatccgcgctgccgaacaacgggctaaaatactgaaagatgaattcccggtaaaaacatttgattacgagtag

SEQ ID NO: 287250 - DNA, 147 bp, Morganella morganii
atgtatttccgggttgttttcacaggactcaacaaatccggtggttttcaccttcacgacataactcactgcttattattttgtactgacaacggcaatataccgcaggcgatcacgattctgccggaaatggcggaacatctgtaa

SEQ ID NO: 287251 - DNA, 822 bp, Morganella morganii
atggctatagatgcagaagacaataaaccagaaaataagataaaaaaaacaactctgtggaattgggtacaaggtatttgtacggtgctttttgttttttttgtattgctaaaattttataattcaacatttcaggttgatttttctacgttactttcaatattattagctattttttctatttggttatcagctactttttattttaaagcaacagagacaagtaatcttttttatcaaaatacgtatgtacactcaaaggatatagcaacactattagctaaaatagaaagtgggtttggtgagaaattaaatagcttgaatgctaattatttgaatatgagggatattatacagattccatttgaaaaaaatgaaaaaatagaaattgaaatgacaaaaagaaatgatgaggtagataaattaaagacatctttaagtgaaattataaataatattttagaaaagactgatctcggtgaccaagaacgtgagcatattaaatcagagttaagagataaagaagaacaattaaaggaagcagaaaaaaatgttttagatttagagcggaagctttctagtttaaatattgaaagtagcactaatatgaaaagaataatcgacagagatcaagaggttagttattttgtacaaagaattaaagagggagcaaatactatggactatgatagtgtaaataaaaggattattaacttgctagagaacgatattgtctttaaatctcttcgagataaatttattgatcttggccttattcaaaataacaacataataacacttgatggttttctattagtgtaa

SEQ ID NO: 287252 - DNA, 1899 bp, Morganella morganii
gtgcctagaaaaaagaacaatagaaaaaagaacaataaacaaaagagtagtaataaaaccatattcatccatgagtattatcaattagtatggtcagatattcatgatgaatataaagatgaaattaatgaagcatatattacaggttctaaggaatttctgaggaatatattagtgccagtaaaaagtgaatttaatacatctggtaatagtgttaaatataatatcctgcgtgatgcttacattaaggttgaagcagagtttgagcgggtgctatctaagcactcagttttttattggcttcatatatatcgtagaatcgcaccctacttagcttcagagataggtaacaacacagatgaagaaacagtaatagttgtaagaagtcatctggatcaagctatatataagtttggtgatttatctaaggatgatgattattctttaagttctgatgtggaatttaatgatattcttggtggtatgttatatgattctataaaaaaacattatcctaaatcaaaaatagacctctatgcatgcaaaataaaagaagagaaacagtgggtgctaacttcttttagtgaggaatctattgttaatatttattacttggagggaatagcttatcaatattggtatttacttgctaagatgagagcgataggaaaaaatataagtacaatgattgatgattttggagtaattaatgagtttcgtacggatgagcaaaagtttttaattgaatcatttgataaaagaaattctgaaaactcaccatcattcggaatgacaagtaatgtagggacttttattcctgcacaaatagatgatgtgaataatactatattctgcgcaatgattaactctatgagatatgagttgtcttctctcggttttcgaggattaagtggaaagttctctccgaatttcattccgttttttataaatggcgattcattttatgatgctcataaatacttggaagaaaaatttttaagtaaatttaattttgggttgcttgaattttgtcagttaataaaaatattatctaatataagtctatcgagtgatggatttttaaatataaagaatatctctaaggatatcagtacattgatgtttatatatcataattttcaacgaggatataaagtatattctataagccgcagtgaactgaagtcgtctattattgaaatttttgatgatttacaagctaaaaaatctattaggacctcatctctagatagtcaattagatgatattcttaattttattacactaaatgaagatggccaaaaaaacattggaatttggtctaatgggcctaagcctatattaatagagtcttgtggtaattacatattagaatattcttcaatttattatatatttaaaaatttattttttggacttagaaattatgattcaaaaaataaaaaaggattcgagtttgaggattctttatgtgatctattaagaatggaaggttttgatgttattttagactcggaaataataaaaataggggatgaaaaaagagaaatcgatgctggggtgcgtttaaataataagctttatttatttgaatgtaaatgcttcgaaaggcctttgaattttgatattggggaacttaatactataaagtatcgagtggaagaattagataaaaaattaactcaagcagatactttgattgattttattactaataatataaaaggtgataactatgattttagttgggctacggatatttctagttacgtggtttcatcttatacagaatggatatggtctaaagaaaaaagattatggagcaaagatcctactataccaaggatagtatctgtttatgaagttttaaaattattaaaatcagataaaaattcataa

SEQ ID NO: 287253 - DNA, 291 bp, Morganella morganii
atgagtgctttaatcacgccactatattggatattaaacattgttcagattgcagccgtaattgctgggtttcatgactggcttgggtggaatattgttatctctgtaatccttgccatggtaatcggttggatgccgctaattggcacagtactggggattatgggggcggtgcatgggtggggctgggaatactggcaggcaatcctgctatttatctggccgatggtgcttgcgctattttttggcaccttaagcatggtgttcgaaaaattatctggtggacggtga

SEQ ID NO: 287254 - DNA, 531 bp, Morganella morganii
gtgagaatactattatttatatttttggtatttccgatgacatctttttcatatgaaaaagatggtttctatactatagataacactgggtgggtaacaaaagaaacttcagttggagaggtttttatttgctcagaatgtcctgatttagttcaggttcagatttcgtacggtccggaagctggtgttgacgcaccattccataatgatcggcaatttaccaatgcattcaataccaaagaaaagaaaaagcaattggcggaaatgttgctggaaagcggaatgccatcagaaaactacaaattaaacataattgcagtggaagatgatgagatcggcggattaaaggcaataaggtattcagcaacagttgatgctcctggcggcatggaagccagagaaactacattaatcacaatgcacaaaaatagaatggttaaattttcagctaatttttacgagggtaaactgagtgaaaaatcagccattttgttacaaaatcttagtgatacagtaaggttccataattaa

SEQ ID NO: 287255 - DNA, 372 bp, Morganella morganii
atgaacaaatatcgtgacaaatcagactttgatattaataaggctgtggctgttaatattaatggcactgacgctgttttagaaaagttcggtagaatatatatcagtgatggagatagaggagtgatggtgagcttctccccctgcaacaacccagcggacgcaatgccgattattattgagaatggaatatcacttataaattccgacggcgttcactttgcggcggctccagggtgtgggattgaaggctaccttggtggtgatacagttggatatggttcacgtaaatacagtgaaaacgaaaatatctaccgtgccgctatggaagtattcctgatgatgaaggatgcggagaatgaaaaagtatga

SEQ ID NO: 287256 - DNA, 1659 bp, Morganella morganii
atggtaggattttcactattaattgttatgtttattacattatacatgtcaaaaaggatgttccttgtaaaggcattgatactgctgttatctatgatgttggtctcagcatggtatattgcaaacgacttcactggtaaagggatggatgattcattcttatacacaataacaaattcagtaactggaactcctatatttgataatttacgttatatagtaatacttgctttattattttctttatactgtttttttatttttcacttaaggaaaaagaaaaataaaaaattaatatatgacattgccttcattctttcggccgtgtgttttttcataaaatcagaaccggccgtgaatataatcaccctatacgagtcaaataatgattttggcgaaatagaaaaggattatatcatatcaaatgaaataatgaattcaacaaatggtaattatgttttcatactcgctgaaagtcttgagcgaacatttaaagatatcgatggtgtcaattaccttgagaatatatcaaaaatagataatcaaattgatttttcaaatataggatatgtaaggggttctggatggactatagctgggcatgttaattttatgtgcggaattccatttattggcacaggaaactcagcaagtaaaataaagacattcttgcctaaagcaacatgttttacagatatagctaaaaaatcagggtataaaaacatatatctttcaggtacggatatatcttttgcaggaatgaaaacatttcttaaatcacattcatttgatgaaatcattgatttaccaacgttaggagataaatatccagatgaaattaaaaggaactcatggggacttgatgataaagtaatctttgatgaggcttttgatatgttcattgatgaatcaaaaaataaaaaaccattcatgatgtatatatcaaccataaatacacactccccagggtataaatcatactcatgtgaaagtcatgtggcagacagatacctagattctgtgatctgtgaagatataataatatcagagtttattaaaaaaattaaggaatcaggttactatgataacacgactattattttgttatcagaccatgggcttatgcattgggataaattgataaacaaagatctaaaaagaacaaaccttctaactgtattcaataaaaatatcaccaatgatatcatcagtaatgagggaacggttttagatcagctgccatctgcattgagtgccgtatcaaaaaaggatgaatcatttggctttggcagaagtatttataataaggaaaacagcctaaaaaatcttaaaaatgagtataatatgttttctaaatcattatgggcccatccatcactaaatcaaaaaataaaatttaacggtaaagagaaaatagaaataggaagcatgacatttaacttaccgatatgcatatactttgataacaagtatgaaatactagactttggttatgaagatgggattaaagaaagatgcgaaaatgacatatcaaaaggtgtcgatgaaggaataataatagctgaaaaatgcgataataagctttgcacaaaagtatataacaatcaccataaaacagaaaaaataataaatgcgggtgaaactcttgtgatagaataa

SEQ ID NO: 287257 - DNA, 603 bp, Morganella morganii
atgaatttggaaagtgataatcaaaaattgctcaatcacatatttaatggtgaaaaagaaatagccatttttgttattgatggggaacattactatatttctgatagtaaagataatttttgtattgatgttagatctgaatataaattatacatagagaaaggttggatgaaggagtccctttataatgaggctattgctaattttagaggtggcattcccattttagataagagtaatttcagaaactatataacacaaagtaatgttgatatttattccaaggattggatgaggtcattttttctactgggtagaagtgatagtgatttagtggagttttattcttatatagaaaattttttatctacattaaccgacccagtttctgatgaatgggacaaatggaaaatgcgacttcctaagttttatattaattttgataaaaaaatttatcgtcacactgattgggggcgtaatcatgaaaagaccgtaccttctgattggaatgctcaggcaagtaatgattttgggttgttagttcctgatagatatcaatattggcttgttagtgggatgaatttttggaaactgcaaatgtaa

SEQ ID NO: 287258 - DNA, 1026 bp, Morganella morganii
gtgggcggagatacgcagagtgcggctaattcagcgcaggccgggaagacgacggttgaaaataattttttaagtccggatgagcgggatataattgacaaagcacttgaagatcaaaaggcaggcaaaaacctaaaagaagcgtcacaaaatattatttatttatcagataaagatgcttataccgacagattagttactctctataacaagggagaactcgataaaaaaggtcaggtagaattagctgagtaccttgatgcggttggaatacagctacagttaagaggtgtgagtgaaagcgatgctaaaatactgatagaaaatatcttaaattatccggggggatataaggatacgcgctcagcctactatgaagcattaggacaccttagtgccgaagaaaggcatgcatggcaggctgcaataggtacagatgttttgttagccgggccggggagaaccagccaattaatgcggctggccttgattcctggtggtttgaatcagatagaaaaaggaattgatcaaattgcagatggtaagtttactgagggaggtatcaatgttggcctcggcggattgattgtatccggcagttatctggggaataaagttacaggtaaaccgaatgtaaaacctgatgtgatgacacctaaaaattctgaaacctactttagggtggaagatggtggtagtggaacaaaaacaagccaaaatagaattaatgtaaatacggatggtagtgtaacaataaattcaggatgtagtggacaactttgtgtaagtactaatggaccaaatcatgcatcttattatctaacaaataaaaggtctgatggctctgttgtagtctttgaggtagatgcaaatttgcatgaaacaatcatggatgcagctatacctcagagacctataccgggcattcctaagaaccataatgcacataaaatcgttgacccaggaaaaggtgatcctagtatatccttggaactaccaaaagtttgggataaattaattgagtaa

SEQ ID NO: 287259 - DNA, 357 bp, Morganella morganii
atgggggcagctataatttttagtcaggataacactgtagaaaaaattgaggataaatttaaatctacatatgtcaatagcagttattgggacgcatttggcgagcttttagatgcagtatttttgccagtttaccctaaattacatgaagtgattaaatctgaagaaggcgaatatttgaagttttattcatttgttgaactgagcaggcaggattttaacctggctgttaagttaattagaaattatatttcggagcaacaaaacccaacagaatggcagaagatggcgcaggttgtttggaaagagattgctgatccttatattgttcaggacgaccgttatgaaccaggatga

SEQ ID NO: 287260 - DNA, 267 bp, Morganella morganii
atgccaaaaattgcatgtaaatgtggatatgtaatgaatgtaggttcgctcgatgaagaatttgcttatgacctcatttcacagaacgctttatgggacataacagatttatggtctgaaaaaagtgagtttaggtcagaagaatttatggattcctttaataataaaagtgttgaagtatatgagtgcccaaattgtaaacgattattagtcgaggagtctcctcgttcaaataaattcaaattttataaaatagaaaataaataa

SEQ ID NO: 287261 - DNA, 1107 bp, Morganella morganii
atgaaaatgaataaaagttttcgttttattaatttgcttaatcataagaacataccggccattgccggaatttcattcttattagcatcagtaacctgctttggtgcctatactatcagaccgggaacccagattcagataccggttaatgtcgtccagaataacagaaattattccggaggcctggggggtaagatggatggccctatgtggggagctatagtaccggcaaccggcaaaactcccggatgtgaaaaaccagccggatattcatttggctggtcaagcgataataaaatatacgggcttgttttagctgaagatgtcatccttggttttaccggaactggttacaacagcccatacacatacagaggcaacgggaacacaatatacggagagtggactgttaatgcatctaccggaaaaacaacttacggtggtgcggcaaaagcatgcagtctgaatagctggggaggatacgaagtcggtcaactgaatgtcgatggtacaggaacagccagagtcagtggtaatcttattgcttatgcaggccctaaagctcagccgggaagttatcccgtatcattaattctggcaaccggcgatttccagaatacaaatactcaggtttttaacaatactattcttgtggaaaaacctttgcgtaagtgtacagtcagcacagataacaccatcaccttcccggcagcggatattaccgatgctgtcaacgcaaaagcactggcaaataaaaccggtaatttcaccattacctgtgacgatacaaccaatgcccctgttacggtggaaatgcagggactcaaaggacggtatagcgataccatggcactgaccatgactgacggcacgaatgcaccggccgaagttcgcggatttatcggtccggatatcccgcttggcggtgaatgtaatggccgccttaacggatataccggtatcgtttatttcgttccgaatgccggaatggaaaaaatgccgttcaaaccggggtcgtataaatacaactgggtactgtgcagtaccggtgaatataaaaccggcaaagccaccggttccgctaaaatagttgtcaactgggattaa

SEQ ID NO: 287262 - DNA, 471 bp, Morganella morganii
atgcactataataccttccggtactacgccccggatacgggaagatttacccagcaggatccgatagggctgatgggcgggttgaacctttaccagtatgcgccgaatccggtcgggtgggttgatccttgggggtggttttgcggatcgtcacaagggcatcatcctatacctaaatttttgggtggaaataaaaaacaaaacttaattaaattagctaaggatccacatgttgatttccataacacattaaatcaaagtttaaaggaaatatttggaatgagaggcggaggaaaaggaggaggaaccgttgattgggcaagaatgatgcaaaacaaccccggcgctcaacgaaaagcattagatgctgtattggatgccgcaaggaaaacggattacacacacggtacgaatattgtaggtgctatttgggataatatagcaaatggtcgattcaaggtgtatccatga

SEQ ID NO: 287263 - DNA, 423 bp, Morganella morganii
atgaattatatgtgtcaggaaggttcggtaattttaccgtcagcgcagtatgaggataacagtattaatatcctgaaatttccggatagcaatgccagtatgacactaacccgggagcgtctggttgaagggcagactgccgagcagtatctggcggcacaaaccgctatgttgcgaaaaggaatgaaaatatacacgatcacacagcctgtcatatttgaaacggatgccggaacgatgggaacagagttctattgtgagttagaccagcagggacaccacctctggcagtatattgccgcgtacgatctctgcggtcatatttttgtgatcacgtactgtctgacccgtcctttcagtgaggcagacttgcaggattggaaaaatattaaactgggttttataccgtcattacaggcgtaa

SEQ ID NO: 287264 - DNA, 201 bp, Morganella morganii
atgagtaaaaatgaccttggcagcgttgcgccgaaagaacgtattaatattaaatacacacctcatgacggcggaagccaggcagaaattgaattacctcatcatcttctggtcattggtgacttcaaaaataaggaagaagatacaccgattgaagaacgaaaaacgtttttatcgatcagaataatttcaattcagtga

SEQ ID NO: 287265 - DNA, 225 bp, Morganella morganii
atgcaaaagatattacgtattgatgaaactgataatttaattgtggcactgaaggatttgcatgccggtgaggtgtatcagtggggtgatgagtcagtcacactggtcacggatgtgaaagccaaacacaagtttgctctggaagcggtgccggaaggcggcatgtctccatgtacggaactgctgtcgggaaagcaacaaaaccgattgcccgcggggaagtga

SEQ ID NO: 287266 - DNA, 177 bp, Morganella morganii
atgatgactgacacagattttaaactgatgctttatattttccatacaaaaattatctttttattcagcacgttaactattaatatagtaaacagacagagtaatttaaaaaacaaatttcctgtttgcattaacaacataaccgcattaatatttaatgaatcagtattatattaa

SEQ ID NO: 287267 - DNA, 864 bp, Morganella morganii
atgaatagtatatcaacaatcaacgtacctttccacggcgacaatctgtatgtcgtcaattacaacggtcagccgtatgtgccgatgaagccaattgttgaaggtatggggatggcatggggtgctcaatttgctaaattaaaacaacgctttagttcaagtgtttcggaaatcgaaatggttgctgaagatggcaaattgcgcaacatggtttgcattgcgcttagaaaattatccggctggctccacaccatcagcccgaacaaggttaaacctgaaatccgcgacaaggtaatccgctatcaggaagagtgcgacgatgttctgtatgagtactggactaccggcgaggtgaagccaaagcacaaatctacagtgcaggacagaaacccgttaaagaatgctgtcaacctgctcgtcagtaaaaagggaatgatgtacccggaagcttattccctggttcatcagcggttcggcattgccagtattgaggagcttgatatcagccagataccggaggctgtcgagtatgtccataagctggctcttgagggcgaattcattccgaagcaggaaatgccactaccggcaacgccgcagattaccgatgacgacctgattacgctctgctggtcatggagctaccttaccctgtgtgtcgccgcgatggatgaggtgtacccgattctgagagcggcagagcatcgccttgccggtcgctactatgacatgcctcgcgaaggtgccagaaacgccagaggaatgagggaaatactcgatagactgacccggcacatcgaaccggcgagaacagacaattcccgcatcttaaacagacttagactggattcattaccagcataa

SEQ ID NO: 287268 - DNA, 177 bp, Morganella morganii
atgaaaggagcaagccgaatgcctcagcttaactttcgatggccacaagaagacattgagctggctaagtggtgggctgagaaaaaaggtagatccctgaacacagaggttaacaggattgtaatggagtatatcaaagggagaatgaacggtgatcaggaaatagtgaagccctaa

SEQ ID NO: 287269 - DNA, 252 bp, Morganella morganii
atggctagagatgaaccaaaatttaccttccgcatgcctcatgaggtcaaggaaaagctgaagtacagagctaagtcgaacggcagatcgtttaacgctgaattattgcagatagtcttagatgccctggataacccggtaaccgtgaagggttataaggacgatgccgaaaaacttgcagatcatcacgcagaagagttcaaaaagacagtatttgaaactctcgtaaagatatataatgataaaaaataa

SEQ ID NO: 287270 - DNA, 423 bp, Morganella morganii
gtgttttggtcgtcaaaaaaaaagaaaattactgcccttaatgaccagtttgtgaaagcaaggaaacaggctgatcacatatttgaatctattcctgatgttgaggaacgggcattttatgctctggccgagctttcaaggagcacaaaaatgccagctcacgaagcggcaaaaacaccggagggcaagaaaattctcctggaagttgtccttaacaggcaatatgcattctatttaaatgaattatcaattcaaatttatggtgaactgaagctattgactgatcctgactcaattccactttacgacaaaaatgcatgggtagacaacgttgttataccagcaacatcaggggtgatatactctcagctcgaccctatatgcacgggactaatagaaagcgtagatgaatacataaaataa

SEQ ID NO: 287271 - DNA, 588 bp, Morganella morganii
atgaataaaaacaaaaaacaatctttagtctctgagttatcgcgcataacattatactgcgccacaattttctatggtgtgtattattttgcgacagagaagctagacattggcagtacttggtattctgtatcatattatttcttgatggtcatatcgcttttccttgttttcatgctcttttcctgttaccgaatggcattgactgacattaacgacccagtaagacactggatggaaagaggttattcagtcagccacaccgccgatgaatacgatgaactttttactgattttattctgaaatattactccagtggtgatgtgaaaaatagaatatctgatgcatttcagactgttatatcgatacttgatctagctgctatagttattgctggcttgatgtattggagattaacagaccaggtgacgattaccccctggagtttcattcctcaaattttcttgctgctatattttattgcttaccttgcaattagtgggctgtgcagagtaataaccaatcgatacccaggggaggcgaggagagcaagaatcattgatccttacctactcctccacccatag

SEQ ID NO: 287272 - DNA, 1560 bp, Morganella morganii
atggctacatggaatcagagtataaattccggcggtcttttggccgggatcggaaagacgaatgataacgcgccgagagccagcgatattaatgcaactcttggcatgatccgggataacaatgaattacagagaagcggggctaacaaccttggcctgcaagctttatcagggctaaggggtcttgctgacatatatcaggcagaccagcagcaacaacggcagaaagagttcctgcaaaaatatggagaggccagagcggcaggtgacatccccagcatgcgcggtctttttgctgaataccctgaaatgggtgagcaaatcggcaaaggaatgacaggaatatctgccgacacaaaagagtcgataggtaatttggcggcaggctttcgtaccgctgcggcaactgggtctggcgatcagttcgtcgccaaaaatgcggctgagttcctgcgagttggggttgaccctgctgatttgcagaagcggttaaaggaagaccctaattcagcggtagaattagccgattgggttggccttagcgcagtaggcagtgaaaagtatttcgacatcattgacgcgaaagaggggcgtcagattgaccgaggaaaactggctgaaacagtgcgcagcaatcaggccggtgaggctcttaccgccagaggccaggatgttcaggtaagagggcaggacataagcagagccaatgccattacggctgcgtatgcaccaacatcagccatgcagaattacagccaatatgcacagatgctgaaatctgacccggaaggagcaaaatcttttgctcaggctgctggtatcaacccagaccagaaaaagctattcaaggttgaaacaatgcctgacgggtctgtgatgaaatactacgcggatggtaccgaagaaaaggggaaagcatcagacccaattagtgatgcaaacatgcgtaagccgctaacagttcgtgaagcagatggaatacttagcaaggcttctgagggttcaaaacaggcggctggatttgctatgcgtgttgaggatgggttgtctggcatgaagcaacttattgatacagggcaggttagcccgcagcgtgcggcatttatttctgcccgtctaggggatggcatgattgctaacagcgccttatccccggcagagcagtcttatctgctccatgccagagatacagttaatgctgtgctgcgtaaagatactggggcagcgatcactaccgatgaaaccaaagagtatgcaaacctttacttaccgcaacctggtgaaagtgatgcggcattaaaggttaaaaataaaaagctggagaaccgctttaagacgttccggggggagtctggtttgtcttacgaggcaatgaaggtttcatctaaagcatatgacgcccaagacgccgcaagcgcacctgaaaatcaaagccaacagcaacctgccgtaacgcaacctcagagcaccggacgggctccagccgcagcaatacaggctttgaagaacaatccagcactagccgagcagttccaggctaaatatggatatctaccataa

SEQ ID NO: 287273 - DNA, 1413 bp, Morganella morganii
atgacacagataaaccctatctttatgccattcattgaggcgcaccgttacaaagtcgctaaaggtggcaggggtagcggtaaatcgtgggcaatagctaggcttctcgttgaagcagctaggcgacagccagtccgtatactttgcgctcgtgaattgcaaaacagtattagtgactcagttatcaggcttcttgaagacacgatagagagagaaggttataacaatgagttcgaaattcagcgcactatgattaaacatcttggcactggtgctgagtttatgttttacggaatcaagaataacccgacaaagattaagtcgcttgaaggtgtcgatgtttgctgggttgaggaagcagaggcggtaacaaaagagagttgggatattctgatcccgacaattcgaaagcctaactctgaaatatgggtgagctttaacccgaaaaacattcttgatgacacctatcagcgtttcgttgttaacccacctgatgatatttgcttgctcactgccaactatactgacaaccctcactttccggacgtgctgagattagagatggaggaatgcaagcgcaagaatccaacgctgtatcgtcatatctggcttggtgagccagtaagcgctagtgatatggctattatcaagcgtgaatggttagaggctgctactgatgcacataagaagttaggttggaaagccagaggcgcagtcatttcaactcacgacccatccgatactggcggagatgccaaggggtatgtttcacgtaggggatcagtagttaacaaagttgcggaaggtttgctaatggatgttaacgagggtgctgattgggctacggagcaagctattcaagatggcgctgaccatttcttgtgggacggtgacggtttgggagcagcattgcgcaggcaagttactgacgcattcactggaaagcaaacaacagtaacaatgttcaaaggtagcgagtctcctttcgatgaggatgcgttatatcaatctggcgcatgggctgatgaagtagttagcggtgacaacagtcgaaccatcggcgatgtattcagaaataagcgcgctcaattctactatgcattggctgacaggctctatttaacatatcgagcggtagagcatggcgagtatgcaaaccctgacgacatgattagcttcgataaagaagcgattggcgaacagatgttagaaaaactattcgcagagcttacgcaaattcaacgtaagtttaatggtaacggtaagttagaactgatgaccaaagttgatatgaaagtaaaacttggcattccatcgcctaacttggctgactccctcatgatgtctatgtattgccctgtgattatccatgacgatacagagatttacgttccatcatcttctagttggtaa

SEQ ID NO: 287274 - DNA, 471 bp, Morganella morganii
atggccgcaccaaaaggaaacagattctgggaggctagaagcagtcacggaagaaaacctatattcgaaagctccgagcaattatggaaagcttgttgtgaatatttcgcatgggtagaagataatccgctgtgggaaggcaaggtattttcgtaccaaggcgaagtaataaaaacaacgatacctaaaatgcgcgctatgacgctgacaggtctttgtttgttcttggatatcaccgatgaaacatggagaacattcaggggcagggaagatttatctggggtcgtaacgcaggcagaaaaagttatttatgaccagaagttttctggcgcggctgctgacttgctgaatgccaatatcattgcaagggatttagggttgcgtgataagcaagagcatgaagtaacgggcagagatggcggcgcaattcaaatagaaacatcccccatgagttcattattcggtaaatag

SEQ ID NO: 287275 - DNA, 210 bp, Morganella morganii
atggaaccaacggattttgaaaagtggtgtgcgggtgatatgggctatgagcctaaggacatcatggcgagacgagtgactttcccgtctggcgaattcacatacgcgctatacggcataaaaaccagataccgagcttacatggccggagttcgcagcagactgccgtaccagacaccgccaaaaggagatgaagatggaatggattaa

SEQ ID NO: 287276 - DNA, 318 bp, Morganella morganii
atggagtttaaaggtacgccggggccgtggtcgcatgcagacagctacggccttaaggaaacagcaggcggcgctatccacggagatggtaaaacgctttgtctggttctgggaaagggtatcggaaagggaaaggcgactgctaatgcgaaactgatagcggcagcgcctgatttgctgtattcgctgcaaaaattactcaccgaatacaaatttacccgttcacagtttaatggtgataccgaagaagaccttgttgatgtcttatgtgttcgtaatgcgatggcagcaatcaacaaagcacttggccgcgaatag

SEQ ID NO: 287277 - DNA, 654 bp, Morganella morganii
atgtcacaccaaatgacttacgcggattcacatagtgccacttcttcgccggtgtcggagtgtggtcactcgccctgcgccgtgcaggatggccggatgataaaccagtctggacgggaagttgtccgtgccaacctttcagcgcggcaggcaaaggaaatgggttttctgacgagcggcacctttggcctgcattcttccacctcatcagcgagtgcaaacctggcgttatctttggtgagcaggttgcaagcaaagacggcctcggatggttcgaccttgttcaaactgacctggaagcagcgaactatgctgttggcgcggtcgatttatgcgctgcgggcttcggtgcgccgcatatcagacagcgattgttctgggtgggcaacgccaacaaccagaggattcaaagacagaggaaatatcagtcaatccttcatcaggaaggacgggagagtgagagacgacacgctgtaccgccagctatggctacacatgtttgggatgggtggcaggccgtcacgggagcagataaaaacactcgaatgctgccacctgactttggcgagagaactgatgatgctgccggtcgagtgggaaaactccgcgcctacggaaatgccatcgtcgcgccggtcgcggaagagttcataa

SEQ ID NO: 287278 - DNA, 264 bp, Morganella morganii
gtgacaaataaagtaagtcttcagcttgggtattccccattaacaaaaacaatccagttggcaaaaatgaaggatatgccaaacggggtgcggatgcgtgttggcaacaccgagccgcgagatgtaaccaatgaagctgcacagatggtttggcagctggtaatcgatgaaggtggcgccattcagtggaaaagagaagacggaaatataatgcgcctatcagctgagttaattaatggtggtgacaatgaacaaacatcgtga

SEQ ID NO: 287279 - DNA, 357 bp, Morganella morganii
atggtggtgacaatgaacaaacatcgtgacaaatcagactttgagattaataaggctgtggctgttaatattaatggtgctgacgctgttgtagaaaaattcggcagattatatatcgttgatgaggatgggtgcgcaatggtgagtttcgacccctgcaacaacccggcggacgcaatgccgattgttattgagaatcgcatcagtatagaaagccgcttcaacggtcattacgatgaatggtatgcaagccgacagcttaataagatgcacatagatgctattggcacaaattattacagggtggctatggaagtattcctgatgatgaaggatgcggagaatgaaaaagtatga

SEQ ID NO: 287280 - DNA, 228 bp, Morganella morganii
atgacaccacaggaagcagagaacggacgcagacgaatagcaagggaatgctatcacgaacttgaagctaaccgcccacttaacgacgacaagcgccgcaccatcccacagagttacctcgaaaagtttacccagatgttaaccgaatatcactttaagcggtcagtgcctgcactgtggctgaatgtgtacgttcgcatgatagagaaggagaagaaatatggatga

SEQ ID NO: 287281 - DNA, 309 bp, Morganella morganii
atggatgatggcctgatgacaataaaggattacgcgaagaagctcaggctgtctgaggcgaccatttaccgtgatccggagaaatatcacatgttcagggtcgggggttcatggagagccagtgaccagagtctgaaaaagtttgaagaagaccgccttaacaacaataatgtttaccggctggccgtgataagcggcgggagaaaaggaaaatgcctgtctacaaaagaggtaaaacatactgggtcgatgtgtccgccccagacggaacgagaattagaaaaactactggcaccgctgacaaggtaa

SEQ ID NO: 287282 - DNA, 906 bp, Morganella morganii
atggataagctgaataagcaaccagaacgatactttgaggaagtggttattctggcgctcagggatgcggaagggcagtcgtgctatgtgaataaacagatttatgcccgttactttttgggattgttccgtggccggaaactgtcgtcaattcgctccgaagagataatgaactcactaccggattataacccgaaaaccaagcgccggttatcggggtcaacaaaaaaccggtatctggcattcatcatgcgaggcatttcactggctaagaaagtgggatggccggtcggtcacgttcacacagaaagatcgcgtgaacctaaagtaagggtcagatggctggaaaggcatcaggccatagcactgataaacagcttggcgaatgactggatgcgaaacgtggtttcatttgcgctgctgaccggcgcacggaaaacggaaatattatcgctggaatggaagcacgttgatctgtcgcgcagagtggcaatcataacagcatcgaaagcaaaatcgggcagggggcgagccataccactgaatgacgatgcagtgagcatactgagcaatatacagcgtgaaggcgaatatgtgttcggcgagaatggaaaacagcgcagtgacatttacaggcacgatttcagacgtgcgttgaatttgtccggtattgatgatttccgctttcatgacctgcggcacacctgggcaagttggcacgttcagaacggaaccccgttaatggtactgaaagaaatgggaggatgggagaagttggagatggttaataaatacgctcaccttagcggcgaacatttagccaaatacagcaacgttgtcacatttttggcacagaaaggaaatcaggccggaaaggaatgtcacttatcacttctaaccggctga

SEQ ID NO: 287283 - DNA, 945 bp, Morganella morganii
atgtggtggattattactattacgttaacattgatgttattaattattcatccgttaattttaagaaaatatactaagaatacgctatgtttaaatactgaccgtttacacttacaatattattttcaaatagcattacttcttccttttatttttagtgtattccttatgatttgggctggtagtgattatccctctcgctgggatagtataggatttaatgcctttttagatatacaaaaacttccgttaggaattttagcattatctcctatactgggtgcttttgttgtatatgcacaccgctcattacagactgaaaagcaaataaaaacagcagaaaaacagttagaagaagcgcaaaagaaaaataaagttgatatttacatttcacaaagagaatttataattaaacaattaggaagtattaaaattacacattacggggaaattgtcgatgcaacccatgtttatgatatatttagaaaatcccataattacagtgaccaaaaaataacagtgtcatttgagtttattaactcaaaactagatgacatacatacctcatttattaatgtgaaaacgtgtattgataactttgataaagataagctaacctttgataaactaaaccagaatttaacgaaaataaaaatcggtatcatgtcaataatcaatagcagtggaattaaaagcaataattttaaaatagataatgaaatcgaagattaccggagcaaatttaatgcatatataaaaaataaatctgataataaccatgactatcttaggtcaatgctaggtggtttattacaagatatcagaaatgagatgttcaatctacacagcacactttgtaaattatttacaataatattactagatgaagatatttcagagttccttccaaatttagaaaaaattaatccaactcaactcccataa

SEQ ID NO: 287284 - DNA, 189 bp, Morganella morganii
atgtcagtacggcgcaaaaatgaggtaaaaacacgcggatttcttattttttcctgtcagaaatcacgggatattttgctgaaaaataagaattattttcttttttatcccggaagggagaataaacgtgttcttttcccggaaaatgagatggattttatgctgccgatttacaggttgattttataa

SEQ ID NO: 287285 - DNA, 279 bp, Morganella morganii
atggctaataatttatttattacttacgacctcattaaaacgaaagattatgcggctgtgtatgatgcaattaaatctttaggtaattgggctgtagcaactgagtcgaactggtatgttaattgtaattattctgctgaggatgcagccaaaatagtaagagcggtgatggatagtgatgacaaacttattgttgtagacgcaacaaacaactcggcttattggtataatctcccggatgaagttagcaaccaaattctgaccgagtggtacaaataa

SEQ ID NO: 287286 - DNA, 249 bp, Morganella morganii
atggcagcgaatagtaagcaatcttcacaaggtgtgtctcatttggcagcagagatccttaataatcctaacgcctcggcgattcagaaaagtttagcgggttcggtactatcccagtccgggacaaaaaaccagactggtgcaggtatggaagccaaagcatcggcagcattgaaaaacccacgctcaagcgaagttactaaaaccttagctggttcggttgtttcacaatcgaataaaaaacgttag

SEQ ID NO: 287287 - DNA, 660 bp, Morganella morganii
atggttaaggtatattggcgttttgtcgataaagttgtctatattaatctggcaaaaagaaccgatcgccgggaaagtatcgagtttcagttaaagaaagtaggtgtgccgccagaaaagattattcgttttgaagctattgaaaatgaaaatggtacattaggatgtacactttcacatattagtgtcatggaaatggctgaaaaaaacaactgggaaaatgttcttgttctggaagatgacatgattttcaatgatgatgatgattctctggatagaattaattattttttcagtagtctaatgtccactacatgggatgcaggtttattatcaggaggctactattctctcaaactgcttcatggctgtttttatcagctatatttttcatttctatctaatagctacattgtcaatcagcactattataaagtgttgaaaaatattttttcttcctcaaaagaatcattagtgaatggagttgacagaaaatattgtagcttagactattgctggatccaattaatgaagaaagataactggtatgcaatttatccgtgtgtcggatatcagaaaacggatatgagtgatattgaaaataaagagacaaacagagaacatctttttttccgtaaacttgatgaaatgaaaaaataa

SEQ ID NO: 287288 - DNA, 183 bp, Morganella morganii
atgactcatgaacaaagacaagcatttttaaaccatatacaagaatctaaagacatagttgacggatggccggcatggaagcgggaagacagtgatagtctccgggataataatcatgagaattcattttatgagtgtcaatcagtcaatcagcgtcgtctcgaaactgaagcagaatcctga

SEQ ID NO: 287289 - DNA, 915 bp, Morganella morganii; identical to SEQ ID NO: 134464

SEQ ID NO: 287290 - DNA, 1368 bp, Morganella morganii; identical to SEQ ID NO: 134463

SEQ ID NO: 287291 - DNA, 1716 bp, Morganella morganii; identical to SEQ ID NO: 134462

SEQ ID NO: 287292 - DNA, 255 bp, Morganella morganii; identical to SEQ ID NO: 134461

SEQ ID NO: 287293 - DNA, 780 bp, Morganella morganii; identical to SEQ ID NO: 134460

SEQ ID NO: 287294 - DNA, 597 bp, Morganella morganii; identical to SEQ ID NO: 134459

SEQ ID NO: 287295 - DNA, 231 bp, Morganella morganii; identical to SEQ ID NO: 134458

SEQ ID NO: 287296 - DNA, 1233 bp, Morganella morganii; identical to SEQ ID NO: 192600

SEQ ID NO: 287297 - DNA, 723 bp, Morganella morganii; identical to SEQ ID NO: 134456

SEQ ID NO: 287298 - DNA, 1884 bp, Morganella morganii
ttgctggagaccgcaccgcctgaagcatacggtcaacagtatggcaaaccatggtcgctctctgctctgccgatcctgccttccccatggcaggtggtggtaaaaaaggagacgcagtctcagttcaaggttattgagcggctgctgcgccaggtcgatgatgtggttatctccactgatgcggaccgggaaggagaagtaattgcccgtgaattgctggaatactgccgctgggacggtcctgtacagcggctttggctttctgcccttgatgaaatgagcatccgtgcagctctccaggatctgcgaccgggtgccgaaactcttggaatgtatcatgctggacttggtcgcgctcgtgccgactggctcattggaatgaatctgtcccgtctgtatacactgcttgcagtacagtcaggattcgacggtgtgatttctgtcgggcgggtgcaaactcccactctggcactggttgtccgacgtgatcgggagatagcgacattcatccctaaacctttctggcaggttaaggcgcttctgagtgcgggagggagaacttttccggcgcaatgggtacctgcaaaggtttataccgacgaagaaaaacgctgtgtacaccaaaatatagcgcagcaggtagcgcatctttgccggcaggctggagcagcgaccgtaacagaatgtgagacgaagcgtgaaaaagcggcagcaccgctggctttttcgctcggcactttacaacaggcctgtggcctgctctgggatatgtcaccccagcaggtgcttgacactgcacagagcctctatgagaaacacaaggcaaccacttatccacgaactgattgtggataccttcctgagtctatgcgtgaggaaatcccctcggttctttccgctattggtctgtctgatccagagtgtagttctcttctttcaggtctaaatacttcgtttgtttcgcgtatatggaacgacaaaaaaatcacagctcaccatggcattatccctacccgaaacgcgtttaagttttctgcgttaagtgaggcagagcgaagggtatacacccttatccgccgaaattatctggcacaatttcttcccctgcacgaatctgatattactcgtctgcagtttgacattggcgggcaactgttccgcacaacaggaaggacggagattgtaatgggctggaaggtccttttcagtaaggaggaagaggatagtccaggggatgatgatctcagtattgaacttcctcctctcaggaagggtgaccgttgcggagtaaacggtgcagaggtcgtgcagcaaatgactcgtccgccggctcactatactttcgcaacactcatcggcgctatgatgaacgcgtcagcgtttgttaccgatattgctcttcgtaaggtactgaaggacaacgccggattaggcacggaagccacccgtgctggtatcgttgagcaactgctgaaccgcagatttattgtgcgcaaaggtaagcagcttcgcgcgactgatcttggtgctgatgtcattgatgctctgccctcgcagttaaccgacccgggaatgactgcactttgggaacaggctctggatgaagtagcagaaggacgccttaccctgaatgattttttgcagcgacaggtcggatggacccgtaaccttgtcagcatgggaggacagcagcgggtgagcattagaataccacccacaccatcgtgccctttatgtggggggaaaactcgcctaaaaaaaggacagaaaggagatttttgggggtgtactcgttatcctgattgcaaaggaatcatcaacaacgacacccagaaacgtaaaagcgcgcgtagctctaaggctgtaaaaccaaagaataattaa

SEQ ID NO: 287299 - DNA, 492 bp, Morganella morganii; identical to SEQ ID NO: 78755

SEQ ID NO: 287300 - DNA, 204 bp, Morganella morganii; identical to SEQ ID NO: 134453

SEQ ID NO: 287301 - DNA, 549 bp, Morganella morganii; identical to SEQ ID NO: 134452

SEQ ID NO: 287302 - DNA, 243 bp, Morganella morganii; identical to SEQ ID NO: 134451

SEQ ID NO: 287303 - DNA, 249 bp, Morganella morganii; identical to SEQ ID NO: 78759

SEQ ID NO: 287304 - DNA, 879 bp, Morganella morganii; identical to SEQ ID NO: 134449

SEQ ID NO: 287305 - DNA, 873 bp, Morganella morganii; identical to SEQ ID NO: 134448

SEQ ID NO: 287306 - DNA, 660 bp, Morganella morganii; identical to SEQ ID NO: 134447

SEQ ID NO: 287307 - DNA, 246 bp, Morganella morganii; identical to SEQ ID NO: 134446

SEQ ID NO: 287308 - DNA, 1356 bp, Morganella morganii; identical to SEQ ID NO: 134445

SEQ ID NO: 287309 - DNA, 444 bp, Morganella morganii; identical to SEQ ID NO: 134444

SEQ ID NO: 287310 - DNA, 1674 bp, Morganella morganii; identical to SEQ ID NO: 134443

SEQ ID NO: 287311 - DNA, 1281 bp, Morganella morganii; identical to SEQ ID NO: 134442

SEQ ID NO: 287312 - DNA, 498 bp, Morganella morganii; identical to SEQ ID NO: 134441

SEQ ID NO: 287313 - DNA, 1575 bp, Morganella morganii; identical to SEQ ID NO: 134440

SEQ ID NO: 287314 - DNA, 1116 bp, Morganella morganii; identical to SEQ ID NO: 134439

SEQ ID NO: 287315 - DNA, 597 bp, Morganella morganii; identical to SEQ ID NO: 134438

SEQ ID NO: 287316 - DNA, 480 bp, Morganella morganii; identical to SEQ ID NO: 134437

SEQ ID NO: 287317 - DNA, 669 bp, Morganella morganii; identical to SEQ ID NO: 134436

SEQ ID NO: 287318 - DNA, 1359 bp, Morganella morganii
atgcctgtgttcacatataaaacgactgaccggggctgggctatcctcagcactggtgcttcattgattattctcctggtggtcagcgtctggggctttacccttatcagtgactggatgcaaaaacggacctggctgaataccgcgtcacaggtatctcgctttacacaagctgtgaagagctacactggccgttattacgatactttgctttcaagtgccaccaccacgaccccggttacggttacacccgctatgctgaaaaacaccggatttctggagcaggggttcagcgagacgacagtagacggacaggcttatctggctgctgttgttcgtaatgccactaatacagatcagctgcaggcactggtttacactcaaaacggcgcggcactgccttttctcgcactgcgccagatatcaatggatatcacctcgggtatgggcggctatatatggacatcaggtactgctaccggcgctatgggcagctggactattcctctttcacagtttgggataagtacaactcagggacatattgcggctttactgaccacagatgaactgggcgctgctcgcggtgaaaatgatcgcctttatcgtttttcggtaaccggcaagccagacctcaacacgatgcataccagtattgatatgggaggtaacaatcttaataacgcaggcacgattaatgccgtaacgggtaatttcagtggcgatgtggcggccactggaaatataactgcgaatggaactgttacaggacagaatgttactgccggttcaaacgtcaccgcaggaaatacaataacggctaacaacgacatacgttcaaataatggctggttcataactcgagggagtaagggatggctaaatgaaacgtatggcggcggtttttatatgtcagataatgactgggttcgagtcataaataataagaatatttacacaagcggtcaggttcgtggcggaagtgtgcgggctgatggaagactttctacaggagaagttttgcagctcgacggagtcaatactgctggcgcagtttgttcaccaaacggccttgtaagccgcgacgccactggagccatactttcctgtcaatccggtgtgtggaaatctcaagattctggtcattacactgatgtcgcaatgtgggaaaccacctcaacaaaaggagttacatatcaggtcccaggtgttcataaatactgctttatttctggattaatgtcggcaggtgacaatggtacatgccgtgtatatccgtccggttcttcgtggtggcttgacctgatcggttacaacggaagcagcactcaaagatgttgggtaagctgtatcgattga

SEQ ID NO: 287319 - DNA, 1122 bp, Morganella morganii; identical to SEQ ID NO: 134384

SEQ ID NO: 287320 - DNA, 867 bp, Morganella morganii; identical to SEQ ID NO: 134385

SEQ ID NO: 287321 - DNA, 726 bp, Morganella morganii; identical to SEQ ID NO: 134386

SEQ ID NO: 287322 - DNA, 624 bp, Morganella morganii; identical to SEQ ID NO: 78775

SEQ ID NO: 287323 - DNA, 531 bp, Morganella morganii
atgaaaaaaaatatcgataaatatttcaatggcatcttttgtgtatcactgcttacagcagcgtttagttgttttgcttcgctgacagtggtcggggatctgggcggggagtcaaccagaccattattcgaggcgattaattcaggtgaggagtcgcatttgtccgatgtttcttccttgcctgaaccaccgtcatcgctgtctatttccgatatgttgcccgttaatacaccggaaatgacacccggaaaggtgacgtctcgccctctgcagttacccggtttgccccctgtttttgtgattggcgatgatgatatttcccgagcctggctgcggcagcgtggtgctgaactgaaagggatgggcgccacaggaatggtagtgaatgttacgactgaaagtgcgctcaacacgcttagaggactcttgccaggtactgagatggtccctgttcgcggcggtgatttggcacagcgattgaaactgacgcattaccctgtcctgattaccgctgatggattagcgcaatga

SEQ ID NO: 287324 - DNA, 549 bp, Morganella morganii; identical to SEQ ID NO: 78777

SEQ ID NO: 287325 - DNA, 228 bp, Morganella morganii; identical to SEQ ID NO: 78778

SEQ ID NO: 287326 - DNA, 2112 bp, Morganella morganii; identical to SEQ ID NO: 192474

SEQ ID NO: 287327 - DNA, 690 bp, Morganella morganii; identical to SEQ ID NO: 134392

SEQ ID NO: 287328 - DNA, 318 bp, Morganella morganii; identical to SEQ ID NO: 78781

SEQ ID NO: 287329 - DNA, 246 bp, Morganella morganii; identical to SEQ ID NO: 78782

SEQ ID NO: 287330 - DNA, 366 bp, Morganella morganii; identical to SEQ ID NO: 78783

SEQ ID NO: 287331 - DNA, 381 bp, Morganella morganii; identical to SEQ ID NO: 134396

SEQ ID NO: 287332 - DNA, 660 bp, Morganella morganii; identical to SEQ ID NO: 134397

SEQ ID NO: 287333 - DNA, 900 bp, Morganella morganii; identical to SEQ ID NO: 273514

SEQ ID NO: 287334 - DNA, 1527 bp, Morganella morganii; identical to SEQ ID NO: 134399

SEQ ID NO: 287335 - DNA, 264 bp, Morganella morganii; identical to SEQ ID NO: 134400

SEQ ID NO: 287336 - DNA, 417 bp, Morganella morganii; identical to SEQ ID NO: 134401

SEQ ID NO: 287337 - DNA, 2817 bp, Morganella morganii; identical to SEQ ID NO: 134402

SEQ ID NO: 287338 - DNA, 408 bp, Morganella morganii; identical to SEQ ID NO: 134403

SEQ ID NO: 287339 - DNA, 408 bp, Morganella morganii; identical to SEQ ID NO: 134404

SEQ ID NO: 287340 - DNA, 972 bp, Morganella morganii; identical to SEQ ID NO: 192488

SEQ ID NO: 287341 - DNA, 1395 bp, Morganella morganii; identical to SEQ ID NO: 134406

SEQ ID NO: 287342 - DNA, 339 bp, Morganella morganii; identical to SEQ ID NO: 134407

SEQ ID NO: 287343 - DNA, 1542 bp, Morganella morganii; identical to SEQ ID NO: 134408

SEQ ID NO: 287344 - DNA, 291 bp, Morganella morganii; identical to SEQ ID NO: 134409

SEQ ID NO: 287345 - DNA, 2688 bp, Morganella morganii
atgacggtaggatcacgctggtttaaatttgattttcataaccataccccggcctcagatgactacagagtaccggatctccagccccgggaatggctgctggcttacatgcgacagcaggtcgactgtgttgtcattagtgaccataacagtggggcctggattgacgttttgaaagcggaactggcgaacatgtcccgggacgccagttccggtgaactggcagacttccggccgttgactctgtttccgggggtggagctcacggccaccggcaacgtccatatcctcgcagtgttgcacacccagagcaccagtgccgaggtggaacggctcctggcccagtgcaacaacaacttccctattccgcgtgaaacccccaatcatcagcttgtgctccagctgggacctgcgggcatcatcagtaatatccgtcgtaacccggaagcgatttgtatcctcgcacacattgatgcagcgaaaggcgttctgacaagccttactaatcagggggaattggctgccgcttttcaggcaaaccctcatgctgtggagatcagacacagggaggaggatattacgaacgggactcaccggcgtctgattgcggatttgccatggctccggggatcagatgcgcaccaccctgaacaagcgggagtgcgcacttgctggctgaagatgtccgcgcctgattttgacggtctcaggcatgcattactcgatccggaaaactgcgtgttgttcgatgataaccctccggaggcaccagcttcacatttgcgaagcctgacattcaggactcgactttgccggccggcggaccagaatggggcctccgtcgagttcagtccgttttacaacgcggtgatcggctcccggggcagtggtaagtccacgcttatcgaaagtatccgtctggccatgcgaaaaaccgaaggactgactgtgtctcaaagcaacaagttgagccagttcagtcagacggggatgggcatggaggcggattctttcatcgaatgtgtattccgcaaagaaggcaccgatttcaggctcagctggcggcccggtggtcgtcatgaattgcatatcttcagcgaaggtcagtgggtgcaggacaatcactggtcagcagaccgttttcccctctcgatatacagccagaaaatgctctacgagctggcgtcggacacaggggcattcctgcgcgtctgtgacgagagtccggtggtcaacaaacgtgcctggaaagagcgctgggatcaactggaaagagaatatctgaatgagcaaatcacgctgcgtggtcacttggccagccagacgatcgcgggcacactgcagggggagctgtctgatgctgaacgggccgtcagtcagttgcggtccagtgcgtactatccagtttgcacccgtctggccacggcccgggctgaactgtctgcggcgactcttcctctggagcatcatgaacagcgtgtcgctggcctgagggcgcaggcggaagagtcagtacaagtcccggttctccaggtggaggcgtctgcaccactgacagcatttatgacgcgtctttcggacgtacagcaacaatatgaacagcgtcttgacacgctgttgtcagactatgccgcggaactcgatgccatcaggcaggagccctctcttctcgcactggaagaggtggtccgcaaccaggaggaaaccgtacaacgtgaggctattgcgttacgggagcaggggctcaatccgaatgtcctcgatgagctgatgacacgttgcgagtcgctgaaatcggagctgagaaattacgccgatcttgacgggacgattgctgcctccgcagcgaagtccgcagaattgctggctgaaatgcgtaaccaccgtatggtactgaccgaaaagcggaaggcgtttctgtcctccctgtctctcagcgcgctggaaataaaaattctgccgctctgtgccccgtatgaagacactgtatctggctatcaggcggtaaccggcataggcaactttgccgaacgtatctatgataatggtgacggaagcgggctgcttcacggctttatcagtctgcgtccgtacagtccgatgccagcggctacggaaagcaaatatcttgagctggataagcttaaagcgctgcatcttgctatcaatcgcgaggagccgggcgccggggcagagcttcacggtgctttcagaaatcgccttaaaggtctgaatgaagcgcaactggatgccctgcaatgctggtatccggatgacgggatccacattcgttaccagacgcccgggggaggaatggaagacatttcctctgcctcaccaggacaaaaaggggcgagcatgttgcagttcctgttgtcgtatggcaccgatccacttctgctggatcaaccagaagacgacctggactgcctgatgctaagcatgagcgttatccctgccatcatggcaaacaagaaacgccggcagctgattatcgtgtcgcattctgccccaatagtcgtcaatggtgatgcggaatacgttatcagtatgcaacacgaccgctctggcctgtacccggggctttgtggagcgcttcaggagacgccggtgaaggcgctgatttgccgacaaatggagggaggggaaaaagcattccgttcccgttatgagcggatactaagctga

SEQ ID NO: 287346 - DNA, 1830 bp, Morganella morganii
atgcgtatcgaccgacgtctgaacagggacgtgcttaccgagcgtcagctctattttactgaatgctggtccaacttctgccataaaaacagcccggatacggaccgtgtcggatacagcaatccactcaacacaatccgcgaactgctgtttctttacgaaatggaagatcgtttcagtgccgataaaaaaagactccgggtggccacagaactgctcgagttactcgagaccgatcaagttctcaggagagaggcatttgaggacatccccgctcaactggtgagtcttctggacagagatctgctggttgaccccactcgcagcccggtggaaaagcgtcctcgtcttatctgtagcctctgcgtacaactggcggatatcaccgaggccagttatatcactgaggctcttgagatgcttgaacaggagctgtttacagagcaccctctggatgaaaactgtgcgcgggatatttacgcactgacgaacggggtcatgagtgtgctcctcacccggggaatgacgcttacggaatgttacttgctgtacatcaatattttcagaaatgtgagtactgaaccggacgctttccggaccgcctttcactcgttccggcagaaactggtaacacctacccgggacgtaacagtccggatgtttattatcagtgagaaactgcacaccctgcttaacacgcaaggacccacactgcagttcaacggatgtgtgttccggccacttgatgaagcccgacaacgcttctccctctctgtcgatataccagtttgctcaatgtctgacacatctgcccgtaacatggccggtcagatgcttcgtgaatccctggatgtcattgcctacatggtgggtaagggagatatcaccgtccagaaacagttcatgataatcagggatgaagacgaagccgaagtgccgcgcttcgataatgaaatcgaggcaaactcggaccggttaacggacgaggagtttgcgcgctttatggtggcgatgaaccggctattcacagatacaccggatgtgtcccgtaaaaaaatcagctccgtatttcggtttttccgtaacggtattgaaagccaggttcaggagagtcgtttcaccgcttactggtcggcacttgaatcattaacgctaggggttgcccctggcacaccatcacatgaacagcatgtcatcagcgttgtggctccctgcatggtgctggattatattgttaaacagcttttttcactaagaaaagtgcttcgcttcatcctgcgagaaccgggacaccccttacgcacaccagacattgcctcacttccactggggcagctctatgcccttcttaaagatgcagaccgggcccgggagcttcaggcagatttacagcactttccgtatgtcatgtaccgagtgcgtaagcttgccgggatctgtgcgtcacccgagaaaatggcggataaactgcagcagcatgcagagaaagtcacccggcatcttcaccgcctgtatctgctgagaaacaccatcgtgcacaatgcaggcaccagcccgcacattgacctgctgacggtgaaccttgaacactatctgcgggcaaccatcagcgcgttgtttaatattgtggtgatccacccaaccgtcagtaccgctgaggaagcatttacccggtgccagtttaccagtgagtcagttttcagggaactgaacccccttcacggaatcactgaaaaaaaactgtacacagccattgataatcagctgaaaaatgggacgctttcccgtagcgatgcacttctgattgcatggctcaatgctcaccactga

SEQ ID NO: 287347 - DNA, 3120 bp, Morganella morganii; identical to SEQ ID NO: 134410

SEQ ID NO: 287348 - DNA, 285 bp, Morganella morganii; identical to SEQ ID NO: 134411

SEQ ID NO: 287349 - DNA, 819 bp, Morganella morganii; identical to SEQ ID NO: 134412

SEQ ID NO: 287350 - DNA, 792 bp, Morganella morganii; identical to SEQ ID NO: 134413

SEQ ID NO: 287351 - DNA, 1023 bp, Morganella morganii
atgtcccacctggaagaactggcaccgcgcgtggaacagtacagcattgatgaaatgttcctcgacatccgtggcatcgatagctgcatgaattttgaggatttcggccggcaactacgcgagtatgtccagaacgggaccgggttaacaatcggtgtggggatggggccaaccaaaaccctcgctaaatctgcgcagtgggcatcaaaagaatgggcccagttcgggggcgtactggccctgacaccaggaaacctgaagcgaacggagaaactgctgtccctgcagccagtcgaagaaatctggggtgttggcagtcgcatcggcaaaaaactgaatacctacgggatcaccactgctctgcagttggcccgcatgaacccgacctttgtgcgcaagaatttcacggtagtactggaacgcacggtacgcgaactgaatggggaagcatgcatatcgcttgaagaggctcctccgtcgaaacagcagattgtctgtagccgctcctttggggaaaggatcacaacctatgaggcgctgcgtcaggctgtttgtcagtacgccgaacgggcagctgagaaattacggggagaacgacagtattgccggcacatctcggttttcgtcaaaacctcaccatttgcagtcaaggagacttattacggcaacgtggccagtgaaaagctgctccttcccacactcgatacacgggacatcatcaccgccgcagtaaaagctctggatcgtatttttatagatggccatcgttatgcaaaggccggtgtgatgctgaatgactttacacccaccggagtttctcagctaaacctgtttgacgagatacagccgcgcgcaaacagcgatgagctgatgaaagtgctggacgggatcaaccattccggactgggaaaaatatggtttgccggacgagggatagcgccggagtggcaaatgaaacgtgaaatgctctcaccttcttatacaacgaaatggtcagatctcccttgcgcttcgattagataa

SEQ ID NO: 287352 - DNA, 1008 bp, Morganella morganii
atgcgtgcatcgttgctggcatctttaccttacatgatggctgagcctacagcttttcgctggttatgcttacaggaaagtttgctgaaggcgccaaatacggttgaagcttatgcccgtgggatcgatgattggctgcgtttttgtcgccagaatgatgtgagccctacagaagccagccgggagatcctggctttgtatgttcggcatcttaatatctcccgcaatctggcggctgccagccttcgtcatcgactcactatcgttcgattatattgtgactacctgcgagaagaaggattaatagtactgaaccccgttatgagaggcagctggcatcctggcggaggtgggcgcagggggctcattcaggcacagcgacgcctgccatggataccgagtgaccgtgactgggaaaacttacttatcgcggcccgccagaccacaatacgtaatcgttttatgctatctcttgcgtacgactgtgccctgcgccgggaagagttgtgctccgttgctaccggcgatattgacccttctcgtcgcttgctaacagttcgagctgaaacgacaaaaactaagcgaggtcgggttgtgccctattctgtcgtaaccggagagttatatttcctctggttagcagaacggcgacaattaaatacttcccgtggcccactgtttctttcttattcctgtcgcaacagaactgcgccaataacccggtggacctggtccaagatcgtaaggtcgttggcaatgcaggcggggctaccccaattgagtacgcataccttcagacatctatgtctgaccgatctcgccagagctgactgggatattcatgagatcgctacgtttgccggccatcagagtatccagtcaacgttactttatatccatcttagtgcgcgtgatcttacggaaaaatttaacgcaggtatggcgtcgatacatgaacatcggttacaccatttaaagggggacaatacggatggcaatgaaaactga

SEQ ID NO: 287353 - DNA, 2211 bp, Morganella morganii
atggcaatgaaaactgaatatgatgcgccagccccttttgactacgaagtatggcaacctgatcctgactgggattgttctcccgaattacagccgattgaacgagatactttgataaacctggctcagtatgttgttggacgtcataaacaaaactggtcgaactgtgtaagacaaaggctttctcgcctgataattccactcagagcagcattaaagtggatgaatgccgcatccacaacaaccaattctgcaattcatgacatcattctggaaatgcaccggctggaaaaaaactactggtcatggacccaggacgactggctcgaagtgctgtgcagcagtgaagaggtatttcgcaaaaaatatggcagctgtggtaattgtcgacagtatgtcctcgcgattgcttggttactgtgcggatttaatcgacttgaggcggctggctgcttttatcattatcggctttctgtcaaagtttttggccgcccggcgacagaggcggcggtaaacaagcttcaggagaacatgcagcgcctcggctttgtcgctgctgacaataacattcgtaatgcgctactgctgtctatgctttgtcagcggcaggttgatcctgaaaaattggaactggaaacacttaagcgagtaataacttacgggcctgtttatatgcgtcgctctgcggccaccttgtcaaggatatttgctgcgatggggctgttccccgcgggcattgaccatcgtattcttgagcgcagacggcctcacggggaatatcgtgcaaccagtaacgttccggaagaatggttgcgatggtgtgaacgctggcgtaaaaccgctattaaagcaccatcatctgaactcagtacatggtaccgcatcctgcagtgtgggcgctggctgaaagccactcaccctgatatacattctcctgcagactggagccgggacatcgcacttgaatacgtagccgcagtgtgtcaaatgaaaataggccagtggtctgaaccgcgccatatgtatcagaatcgaataggccagttaatgacagcctctgcacgggcggggattttacaggctatcagagttttttttcgagaccttcaggaatgggggcttattatcgtccgatttgatcctgtcagaacgttccgtttaccccgcgctatccgggccagtattggccctgcaccaagagtcgttgctgatgatatatggagtaaacttgtctgggcagggttgaacctgcaggagcaggatctgcattatggtgaacaactttactatcgctacccattttctatggttcgtgcattatgtgttctctggctgtttggtgggttgcgtcgtgatgaaattttgcggatgcgaacaggctgtatacgctggcaaaatgatgaacatcagggtggctctcggatatgtttgctggatgttcccgtgaacaaaaccagcacggccttcaccaaacctgttgatccaatcgtaggggaatacattgattgctgggaaaaagaacgaaatatacaaccagaccaacttgatttaaaaacgggtgaacttgtcagttatctttttatgcataaagctgctcggattagccagagttatattaataaatccttaattccgatgctttgtcggaaagctggtgttccaaacgaagatatcaggggaactatcactagccacagagcgcgggcaactatagccagccagctgtttaatgccagggaaccactaggattatttgagttacagcgctggctcggacattcctctcccagttcgacacagcattatatcgatatcacaccgacaaaactggcagggtctctgtctaaagcaggatactttgagcgaaaccgtcgtatggtttcggtgctgatcgatcaggatgcaatttcgtccggacaaatgcagaaaggagaaccatggcgatattatgaccttgggcacggattgtgtagttatgacttttttgaacagtgcccacaccgtatggcttgtgcaaaatgttcgttctacctgcctaaatcatcatcagaagcgcaatatatagaggggcgtcagaatttactcaaaatgatgcaggagatcccgttgacggatgatgaacaggcagcagtaaataatgatattggtgcgatagacaaattattagagaaattaaaaaacattgaaacaccagacaagcaaagaagataa

SEQ ID NO: 287354 - DNA, 519 bp, Morganella morganii
atgaatgtaactggtattaataaaaacaataaggaatggatgattgcgataataattacctacctttttgttttgttatgtctggcaacatacgctattggggctatgtctctggggtggttgcctgcaccttacgcaccattaagggtgccactgatgtgtggtgccattgcctatattggtggttgtttatattgttttcgtgcaatttacatcaataaatgcattagaaaacaatgggatccagattggcatgtatggtatttcatccgcccacttaccagtacaattgcaggtgcaatcagttacttatttcttaaagcaggattgttagttctggaatctagctccaatgcagggtccagtgaaatgggtttctttgcattggcgtttattgcaggctttaatgtcgataagtttgtcgcgaaaattgaggaagttgcaaaggccgtgtgggggattgaaaaaacaagaagtgcaactaatcatgaggtaaaagacttagataaaaaagaataa

SEQ ID NO: 287355 - DNA, 861 bp, Morganella morganii
atgattgataaaatggtgcgaactggtcattggggccaagagagacgacttgaattcatcgattttcgcctactgtgggaaggtcgacttaaccgtgcagatatcactacatttttcagaatttcagtgccgcaggcttcgttagatttggctaaatatcaagagattgcaccaagaaacatggtgtatgatcgaactcagaaggcttatgtaactaccccagatttcaaacctgttttttcaagttttgacagtaatcattacctgaatgaactattagggcgagaaaatggaatagtggatccttgtgatagtttcattggatgggcccctccggttgccagccttcctcttccggctaggaaagtacaacctgaaatattgattgatttaatccgggccatgcaaagagaacaggctttggttgttgattatcgttcgatgactaatgaaccagcggttcgtatgttatacccaactgcatttgcacatgatggtcatcggtggcatattcgcgcctattgttttaaatctgcaatgtttaaagattttgtccttggcagattctttaatattattgaatttgtttccccaccgacatcaattccacaagatgttgactggaatacatttattgatgtggtgataggtccaaaccctaactacgatacgaatagacggctatctattgagcatgattaccaaatggtacatggcgaggcgaaaattcggatacgtaaagcacaattatattatcttaaccgtcggttaaatttggatgtgaaaatcgattcttcaatagatgataagcagcaaatcatcatgctaagaatagaaaaacctgaagattctataggataa

SEQ ID NO: 287356 - DNA, 1182 bp, Morganella morganii
atggcagcaaaagttacttttttccaggtcggcaacggtgatatgacactggtgcgtttggctgatacccagggtacatccattctgactgatgtacatatccgttctgctgctgatgaccccaaagatgacacacctgatgttgcctcggcgctacgtaacagattgaagtacgataataacgatcgcccttttgttgacgtctttatgctgagtcatccggatcaggaccattgcgggggtctacgtaaacatttttggctgggccgtcctgaagactatccagatgaccatctgaaacgttcagaaaaacgcataatcatccgagagttgtggtcatcaccattgatttttcgacgtcgttcgaaaaatcacacactttgcgaagatgctcaggcatttaatacggaagctcggcgccgtgtaaaatactggcgggaacatggttacgcatttagcggtaatcgcattcttatcatgggtgaagatattaacggtaaaacggatgatctgagtgccattcttattaaagctggagatacattcaccagaattgacgggcaagtttcagacattttctctgcacagcttctggcacctgcaccacatgaagatgatgaaaatctggaagaagccctttctaaaaatgaatccagtatcattatgaatatgaaaatactgccttccgcatattctcgtaatcctatgcactttttactcggtggggatgcagaagttctcatctgggagcgattatggaatcgttacaaaagcaatcctgaggtgctggagtatgatcttctcctcacaccacatcattgttcgtggcattcactttcctattatagctggtcacaatggggagaagatgctctggtttgcgatgcggcccgtaatgctttagggcaagcgcgttctggagcgacaatagtttccagcagcaaacagatacttgatgacgattatgaccctccgtgtattcgagctaaacgtgagtacgatgatattctggataatgttgatggttggttcagttgcacgggcgaccttaaagataaaactgttcttgagtttgaagtggcacgagatggaaaattgattcccgctattgttggtgcagtttctgctgcgacaagcgctgctacggcagccgcaccccgggcaggtgtaataaaccaatga

SEQ ID NO: 287357 - DNA, 2229 bp, Morganella morganii
atgatcgaatatttcgaattgggtaaacgcctcgattcatcggggcgtgatagcctatatccgcaaacaatctcattgcttacagcatgcgaacagcatccctatataactgttcgagaattacgtttatctgagcaaaacaatgaccgctcggaatacctagtcattgatgttgctgatggtacagtaacttctggcaataaggccggcattcgtcgtaaagaacgattagctattgagataaaccctaagttcactatcccgatcctagttcatgcattgcgtaaagattttcctgttttatctcatcaacatgcaggtgtaccagactctccaaaaattctttgcctttatgatgtatcttggagcgccgtcgaacgcaactggacacctgaaagatttattgagcgaatattttggtggctcagagaatcagctgaacagcgtttgcatcgagaagaccaacctcttgagcaacttttttatatgagcccctatcaacttattttaccagcgaattatcttgattataatcatgccgcagctcataaactcagcctccagatggtcagcaatggtaagccgataattttaagggctgtacctgaacattctaatcagggcatcagaccatttcgcttattaaccattgccgtcccaccagttgaagcctcattagttgcttcatatcctgacaatctgaaaaaactggaagagcagcttcaatcctggggaagtgaacttctccagccactcgctgatgctgtttatgatgctatacctgatacaggtcttcgccctagctctggtgaaaaggaaggattgctaattctgctatgggttcctcgtttaagggatggtaaaacagaacgtactgatgttatgggctatatcgtggaacgctcactctacgaacttgccagcgtattagacatacttgcccctaggaatgagcggggaatacagcaccgtttccgactacttggtggcgtgagaggtacacaatggcaacaattaccactgttacctgtcgaaatacgttctgctatgaatgctgcacgagcaagagacatttctgctgttgattctgataatgcatctttctatggtgttctggctggcgttggggctcttggcggcacattagctgatatctggatacgaatcggctggggacactggacatttatcgatcctgacaaactccttccacataatctgccccgccatattggggttgatgatcatattggataccctaaaactgatattcttcggcacctcgcaggtagtatttatccacatgaacctctccccggagcgatcaataaaagtattcttgatggcgatcatgatattgccagagctgtgaatgaggctcacttagttgtggatgtcagtaccacctttgaggtgcctaggaccttagcgttaaaagatgatatacccagaacagttagtctgtttctgacaccatcaggcaaggccagcgtgatgttaatagaggatacagacagacagtgccgaattgatgcaattgaggggcaatactaccgggcaattttgagcagcgagtggggaaacactcacctacagcacaattatggtgatcgttgggtcggtggtggatgtcgggatatttctgtacgtatgtctaacgaatgtattcacgttcatgctggtatcctgtcgcgccaactacggcagaccgtccttaaggatgatgctcgattatgtatctgggtgtctgatgaaaattcaggtgcagtgagcgctcatgaaattgagctttaccctgtggtatctgtaattgctggcgaatggattgttagatacgatcaaggcttagaacaaaaactgagacatacccgtttacaggccctaccgaatgaaaccgggggcgctattgtgggcataactgattttaagaacaagactattattctggttgatgtgctcccagaacctatcgacagtaaatcctcaccagccttctttgtccgaggagaagagggacaaaaggaagcattagaacgggttcagcagctgaccgctcgtgttgtcgattatgttggtgaatggcactcccatcctcaaggattttcagcgaaagccagtaatgaagatgataatttaatcaaaaagttacatcaaaaaatgagtgtggaaggtttacctgctgtgatgctgattgttgcggaaaacgatatcaatattatagtcagatga

SEQ ID NO: 287358 - DNA, 156 bp, Morganella morganii
atgttcgccttagccgacgtgaacagcttttatgcgagctgtgagaaagtctttcgtcctgacctgcgtggcaaaccagtagtagtgcttagcaacaatgatggctgtgtgatcgcacgctcaaaggattatgtggaattgcaagtaacactgtga

SEQ ID NO: 287359 - DNA, 447 bp, Morganella morganii
atgggtgagatcatgcgtgttttatccttccttagtccaacatcagagccgccagaagtatcgattccattgtttatcgagagctgttccgcaggttttcccagcccggcacaagactatgtagaagccgaactagatctgaacgaatactgcattcagcgacgtggctctacttactttgtacgagctattggtaattcaatgacagacatcggtcttcattcaggtgatttaatggttgttgataaggccgaaccagcacggcatggcgatatcattatcgcggagatcgatggtgaatttaccgttaaacgactgctgctcaccccacgtccggggctgcaaccaatgaatcctgcgtatccaacgctatggccagagccagaacagctacagatttttggagttgttaccgcttttgttcataaaactcgcggagcacagtga

SEQ ID NO: 287360 - DNA, 1188 bp, Morganella morganii; identical to SEQ ID NO: 134415

SEQ ID NO: 287361 - DNA, 216 bp, Morganella morganii; identical to SEQ ID NO: 134416

SEQ ID NO: 287362 - DNA, 891 bp, Morganella morganii; identical to SEQ ID NO: 134417

SEQ ID NO: 287363 - DNA, 429 bp, Morganella morganii; identical to SEQ ID NO: 134418

SEQ ID NO: 287364 - DNA, 1143 bp, Morganella morganii
atgactgatttttctgctcttttacagcaaggcgtggcgaatgcctggctgttcatccccagcgcgatcctgctgggtgcgcttcacggcctggagcccgggcactccaaaacaatgatggccgcctttattgtggctatccggggaacggtcaaacaagccgtattattagggcttgctgcgaccatttcgcacacgtcagttgtctggctgattgccatgggcggaatgtatgtcagtcagaaattcaccgccgaatcggctgaaccctggttccagctgatttcagcgatcatcattcttgccacggcggcatggatgttctggcgcacctggcgcggcgaaaaactgtggaagatggagcaggaagaggaacacggccacggtcatcacgatcacgacgaaacccgcatcatcgataccggtcatggcagcattgaactctcaattttcgaggaaggccagccgcctcactggcgtttacgcacgctcagcggcaagaaatgggaagcccgcgatatctcgctggtcactaaccggggcacaggaacattttcacaggcctttgatttcatcgaaaaagacgggtttatggaatcggccctggcgatcccggagccgcacagttttgatgttcgtctctctttgggtcatcgcggccatgtacacgattatgatgtggaattccgcgagcatgaacacggtcacgatcatgaccacgatcactccgcgctggagggactggatgttaattcccccgagtatcaggacgcccatgagaaagcgcacgcgaacgacatcaaaaaacgctttgccaatcgcagcgtaaccaccgggcaaattatcctgttcggcctgaccggaggactcattccttgcccggcagccattaccgttttgctgctctgcatccaggtgaaagaatttacgctcggtgccgcgctggtactgtgtttcagcattgggttagcgattacgctggtttcagtgggcgcagcagcggctttcagcgttcgtcaggcaacaaaacgctggagcggcctggatacgctggcacgtcgggccccgtacttctcaagcgtactgattgcccttgttggcatctacatgggttatcacggctggatcggcgtgacccgctga

SEQ ID NO: 287365 - DNA, 270 bp, Morganella morganii
atgaccgttcacgcatcacaccctgacattattaaaagacttaagcgtgccgcagggcacctgaaaagtaccatccagatgctcgaagatgaaaaagcgtgtctggatatcgcccagcagctgcacgctgtggaaaaggcgataacgaatgcgaagcgtaccttaattcatgaccatctggatcactgcctggaggacgcccttcatgccgactacactgagtctgataacacgcttagcgaatttaaagagataaccaagtatctttaa

SEQ ID NO: 287366 - DNA, 1299 bp, Morganella morganii
atgctcaatattctttctaatcgtacctaccgccacctgtttatggcacaggttatcgcccttatcggcaccggtctggcgaccgttgccctggggctgttagcctacgatcttgccggagacagggccggggcggttctgggtaccgcactggctatcaagatgagcgcctacattctggttgcgcctgtggcagcggcctttgccgacaaattcccgcgtcgaaccatgctggtgacgctggatctggttcgcgccctcgtggctgtcgcgttgccttttgtcacccagatttgggaaatctatatcctgatcttcattcttcagtctgcctcggcggcgtttacgccaaccttccaggcgacaatcccggatattcttcctgacgaacgcgaatatacccgggcgctgtctctgtcacgtctggcctacgatctggaaagtgtaatcagccccatgctggcggcggcgctgctgacggtcatgaacttccacaacctgtttgccggtacggcggtcgggttcctcgcctcagcgactctggttgtttccgtgacgttgccaaagatgaaagcgttaacggtcaaccgcagcatctatgacaaaaccacacggggcatgcgcatcttcctgaaaaccccaagactgcgcggcctgctggcactcaacatggccgtggccgcagcaagtgcgatggttatcgtcaacaccgtggttctggttcaggcggactttggtctctcgcagcgctccaccgccattgcgctgaccttcttcggtgtcggatccatgatatcggctctgattctccccagacttctcgacaaaatgagtgaccgcatgccgatgcttgtgggcaccgtactcttagtcgttggcctggggctgggcattttcctcaaggattacatcacgctggttgtgctctggacgctgctgggcgtgggctattcgctttctcagacgccgagtggtcgcctgctgcgccgttcttctacggctgaagacagaccggcactgttcgccgcccagtttgcactgtcgcattcatgctggctggtgacttatccgctggccgggtgggtcggtgcaacatgggggacacaggcttcgttcatcgccctgaccattgtggccgcactgtcactgattactgccgttcttatctggcggcctgagcatgaagtttacgcccaggttcacagccacaccgatccagaaacaaacaacgaatcgacccatgagcatgatttcgtcattgatgatgaacacccttcatggccgaagaaagagaagtaa

SEQ ID NO: 287367 - DNA, 954 bp, Morganella morganii; identical to SEQ ID NO: 134419

SEQ ID NO: 287368 - DNA, 1434 bp, Morganella morganii; identical to SEQ ID NO: 134420

SEQ ID NO: 287369 - DNA, 759 bp, Morganella morganii; identical to SEQ ID NO: 192504

SEQ ID NO: 287370 - DNA, 921 bp, Morganella morganii
atgtataaagactctatccaggcgcgtcgcgagattgcgcggaatttcactgcactcaattatcgtattgatcccctgcactggcagacgctctgcatgggcgttaatcgcgaccttcaggccaaaaaattgcgtccgaatgttccggttccttcacggcggaaggtcattccgttcctgaaaatgatgcatcaggaaacgggctcgatgcttaaagcgatcctcgcctttggctttgacggcccctggacctccagcggcggttcgtttcgtctggcgcgggaaattgggttcgatatcgttcactacgcgaagaacattcaccacaaaaatggcaccgtcaccttcctcgaaattggtgctgcctgggcgggttttcgtgcagaagaagcggccagccatcaggcgacaatttccgggcttgctgagggcttcagagagcaactcggggagagtgcattcctgcacttcaccaatctcacgccatggcatgaatcgctaccaaaaggcgtgactgagcacccttacgtgacggctgccgggctgtgtgccctggagaaccggggcgttcaggccggtgaggtcgatattatctactcccaggcagcggcctatttcgagcaggattacgcggcattccttcgcagcgcagcacgcctgctgaaaggggatggcgtcttaatcttcaaccatgatcctgtcctggcaagtgcgatggatgaagtcgcctgggagcacgggctgcggctggtcagacgcaagcaaatgggcggcatgaatggcgcgattgcccgctatcaccggcttcgttcgtccccgatgagccagatggtcttccctggcgtgaatcgggcgcaggatgaagaagtggtctgtgaatcactggttatgtcggcgcttcgtcgcagcgtggaggtgtaa

SEQ ID NO: 287371 - DNA, 372 bp, Morganella morganii
atgtacctgatgtttaagcgttcaccccgttatgttctgatgattgtcatcatggcctttggcatgatgatgtcgtcgatggggacgtttgcgtcgcacggtacaaacggcctgacaggctacgagatgaatctgcacgatgcagaagtcaccatgacaatgcaggatcactctcacgattcggatatccctcagtctggtcacgcaggtcatcatcagacagaccatttccatgaaacccctgaacagccgccctctgtggagatttccctctcccctgtagcagacagatggttgccacttgccgatctccgtagcccggttaaagccacggacatcatctaccgtcctcccagcacccgccagatctga

SEQ ID NO: 287372 - DNA, 690 bp, Morganella morganii; identical to SEQ ID NO: 192505

SEQ ID NO: 287373 - DNA, 738 bp, Morganella morganii; identical to SEQ ID NO: 192506

SEQ ID NO: 287374 - DNA, 372 bp, Morganella morganii; identical to SEQ ID NO: 192507

SEQ ID NO: 287375 - DNA, 417 bp, Morganella morganii; identical to SEQ ID NO: 134421

SEQ ID NO: 287376 - DNA, 366 bp, Morganella morganii; identical to SEQ ID NO: 134422

SEQ ID NO: 287377 - DNA, 309 bp, Morganella morganii; identical to SEQ ID NO: 78834

SEQ ID NO: 287378 - DNA, 624 bp, Morganella morganii; identical to SEQ ID NO: 134424

SEQ ID NO: 287379 - DNA, 993 bp, Morganella morganii; identical to SEQ ID NO: 134425

SEQ ID NO: 287380 - DNA, 954 bp, Morganella morganii; identical to SEQ ID NO: 134426

SEQ ID NO: 287381 - DNA, 684 bp, Morganella morganii; identical to SEQ ID NO: 134427

SEQ ID NO: 287382 - DNA, 279 bp, Morganella morganii; identical to SEQ ID NO: 134428

SEQ ID NO: 287383 - DNA, 648 bp, Morganella morganii; identical to SEQ ID NO: 134429

SEQ ID NO: 287384 - DNA, 546 bp, Morganella morganii; identical to SEQ ID NO: 134430

SEQ ID NO: 287385 - DNA, 1218 bp, Morganella morganii; identical to SEQ ID NO: 134431

SEQ ID NO: 287386 - DNA, 1017 bp, Morganella morganii; identical to SEQ ID NO: 134432

SEQ ID NO: 287387 - DNA, 561 bp, Morganella morganii; identical to SEQ ID NO: 134433

SEQ ID NO: 287388 - DNA, 1539 bp, Morganella morganii; identical to SEQ ID NO: 134434

SEQ ID NO: 287389 - DNA, 954 bp, Morganella morganii; identical to SEQ ID NO: 134435

SEQ ID NO: 287390 - DNA, 1008 bp, Morganella morganii
atgaatacgacaaaacgcctctttttctgtctgtgtgccggtctgttttcggttcaggctgacgcttttagcggactggactatatgaccagcgtcacaatcaacagtgctgcacaacaacagcctgtcggtactgctgtcggcgcctggcataacttaagatcatcaatgaaatgcgggggcagtacgacgccggattcctaccgtttcagtaatgtcggttataccaccaccggaataaccttttccgacgacggtaaaaaatacccggtatttaagacctatattgaaggtatcggtgtggcactcgcgatacgtgaaaaaggcacttcagcctggcaacctgtctctgcaagccagaccagcatatcaatcaataaccaaagaagcggtattgaatttgaagtgaaaagcatttatgtgaagacccaaaaaacattagcgccgacaaacgtttcacaggaagtcagcctgttaaaaaacgaatgcctgtatcgtaactcacttgtcgatataccctatgaattatccgtccgcagtaatggtgccacactcgaggctgaaacctgcaatgtcaccacgaaaacccagtctgttgatctcggcactcatgagctgatggctgtcagaaaattaaaagtgggtgagaatttcggtcatgcccgtgccgggcttaccgtgaaatgcgatgccggaatgaatgtctattttacactcggtgatcatctgcattccggaaatattaataccaataccctgttccttgaaaatcataataccaacccgggattcgggatgcagatatttgaaccggaaaaatcaaagccctatatgttaggcggtgataaaaaaatcgattctgaacaccagtatccgttttataagaccggtaataacagcgcggagaccatcacaaaatatctggattttaaatatgtaaagctgtcggatgatgtaaaagcaacggaaggaaatgcgcaggcgacaatgacccttatctataaataa

SEQ ID NO: 287391 - DNA, 195 bp, Morganella morganii
atgaaactgacaggcatggcaatcaaacgcgcaagccaaaagaaagccgggtggtcagaaatcaactttgataatcacaccagggaaatcccggcggataaaatgaagatgtgccgtccgcatatcgtacctttatctgaacaggtgacagatttactgaaacagattcagcccataagcggaagctatcagtaa

SEQ ID NO: 287392 - DNA, 198 bp, Morganella morganii
atgaataaacttattcgattaccagaagttcagcgtcgtaccggttatggcaaagcatggatttataaacttatggcggataaaaaatttccacagtcagtaaaaatcggttcccgctctattgcctttgttgaatcagagattgatgcgtgggtagcgaataaaatcgcggaatcccgtactggtgaggtggtgtaa

SEQ ID NO: 287393 - DNA, 396 bp, Morganella morganii
atggaaaagaaaaaccacccgtcacaggtggcttttgaggatagcttcgtgtcatctattttatcaaagaacccgccgaaaaaacaccgcgcccgtttatatatgatcggtactggcattaatggttttacggaaaatgaaatcttatttcattgccggttatcgtccggacgtaactacccgaacgaactcgaacacaagctgaatattgaactggaacgccttgatgagcctaaccccgacggtattggctcacattaccgctatcgttttaaaacctctcaggacgtacagaaggtgattaatttaatcaaccattgcgcagagcagggaaagtatcagccggtaagtaaagcactcacagacaatttcttaagcctgtacccgacagaataa

SEQ ID NO: 287394 - DNA, 837 bp, Morganella morganii
atggaaaagaaaaataacagcttaattgctggcggattcgctcaccctgaaatcaaggttgaagatattaacgagacaacattcgcggatatgttgccggttattcgtggcgatattaacgggcgggtaattaatggcgtgagcgcgaaagcattacacgaatcgttaggtgttggtcgtgatttcagtaactggattaaaggacgtatcaatgagtacggctttatttgttcattagattacgaattatttgattcgcccattttggcgaaccaaagttcaatttatgaacaagttaacactaaggtgttgccaacacgcgggggagactgccgcagtaaagattatctgctttttcttggcatggctaaagagttggcgatggttgaacgcaacgaacaagggcgcgccgttcgtcagtatttcattaagtgcgaagaagcattaagcaaagcagtacccaccattacccggcattaccgtgcggaactgaaatcacgcctgaaagttgccagctatttccagccgatgtgtacggctctggaaattgcacgcatggaacagggcaaaaacaccctgccgcgccactataccaacgaagccaatatgttgaaccggattgttcttggcgggctgacggctaaatcatgggcgcagcaacagggcattatcggcaatccccgtgatgctatgagtgagacgcaactggagcacctttcatatctggagcagaccaacacaacgctgattgagctgggtatggattaccacgggcgcaaggataagctgaccgggctgtctcagaaatggttagcgcagcgggctggggtgaactga

SEQ ID NO: 287395 - DNA, 300 bp, Morganella morganii
atgatatttgattttttctcaaacgaatggtggcttgcaatagctgttgcttttttgatgtatttaattggtagagtaagtacaaaatgcaaggaaatacagcaaaaggtagagcttacaagagaccatatactaaaattttggaatgacgttgatactaatctaagaagaattgaatctaatattgatagagtttgcccgtcagtaaatgatatgacatatactcaggacgaaatcaaagagaagttaacaaaaattcaagaacaaataaatgaactaaggctacgcattgacaagtaa

SEQ ID NO: 287396 - DNA, 642 bp, Morganella morganii
atgctgttttatttttatcacttaaataaccagtctgacactgaaggtaccggccacactttaaaaagtgcgcaatggcaggagcgggttgcagaagtgaaatcgctgaccgcaaaaggtgtgaaaccgtcatccccgcaggcacagcaggtcgcagcccgctggatggcggcactggagcaggataccggcggtaatccggatttcttctgccggttaaataaaatgtatctgtcagataatgaatttgccgcatcatccggtattacagagcagatgatagaatttgtcgcggaaagcttcagtgaatatcagctttctctgttcaggccgcatgtcactccgcagcagttcgcctttatgcagcagcattatttccgtgccggggctgtctggccggacttaatcgccggactgtacaccgccatgaaatcgggagaagacccggcatcaccggcggtccggaaactggcacaaacctggcttgtgatgtttaacacgtttaccggcggtgacccggaattacaggagattgtccgccgggtttaccgggaagagccggctatatccaaaggcacctggatgacaccggaaatcggacaatatctgtttacggctattcaggcgggattacacaaataa

SEQ ID NO: 287397 - DNA, 3282 bp, Morganella morganii
atgaccggaaatgtgaattctgacgtttcaaccccggaagaaaaacacctgcgtaacatggtggagtcggtcaacaaggccgctccccggaacctgccggcggacgcagtggtctgcccgtgtgagaatgaacaccgcccggtctatccggtacggtatgcgtactcaaatttatttggtgatgaaaatgcccgggcgactgtgcctccaccggttaagaaattgctggagctttgccccgcacaaccggactttgaaatttatgagtctgaagtgtgcagcattgaagagacaggtggattcagtgcgcggttgttacgatcaggatgggtctatgtgtttgaagaaggcgaatacccgacccggacagatccccggggacaactgctgatttttaagcacagtatcacctatgcatataatggtcgtgtttatgatgagacagataactcagcagaagcggaaaaggcggttaacggtggcgatgcggatgaatactttataccttatgcccggatatttgataccggatctcagacttgggtactgaaagagcagtttccttattacccctatctggcgataaaaaaagatgttatccgtgcccggttctttttcagcgatattccgttaccggattatacattgaataaaatggcctctgaccctgcatttcgcgaatcgtttatgcaggaaatcaatctggtggattttaatgataacccttatgcacttgaattgtgtgaagagcatattgattatctggtagaggaatataaagaagagtcacagaggttttctgccttcgcggaacaggctaaaaaggtgggagaaaatctggccgggggacattatttcgctgaaattaccaatacccctgatgtatctaaaggttctgaagcgctgcttgcacaggtgagagcctcactggatgataatgaaaaaagtagtctggtgatattacacgaccccgtggggtatcagaaagatatacttgcgctgtattcttttattaccgtgttgtacgccacattccagcattactggagttatcctaatcaggtcggtcaccatctttcagcgattaaaacgcatttggaccatcctgatattgcgcacacaggggccggattccgacggaatgaacaatttttggataatattgatgttgaaggctggcaaacttactggcctgaaattgaggaaggatataaaaaatttgagcagcttcaggaaaatatagtcagactgtatggtgattttttaacgaatccggaaataacaaataaaacaggcggtattaagaattatattgaccatgtttttttaatccgggaacagtacaaacagggagatttctggcatcgtgagttttttgaagaggtcagacgctacagtgaatttcatgaattgttgttatcaccgttaaacagctcaaaatcagggcagcagatgctaaacctgatattttcggttgataaaccggaggggcggctctggaataatttatgtaatatagtggtcagcttactcagtaaagaagagctgataacgggcggaacacattttttccaaaaacagattctcccgtcattccagtcagtacttctgattggctgggatgcattagggtatgcgtttacaaaaactcacgaacaattaaaaaaaacaaccagccattcccgtaatattacgcaggcaggtattgattttctggcaaagaaagtattgccggcgtttttgggtttttggggggttcgggtaaatatggagacgttacagtctatgtccggaaaacaatttatggactggatggattccctggacgggaaggtggcgccgcttaaaaacgcttccgggcagatgaaaaaattgctggactgggatacaaaactgagaaacccgaaagtaacacatgcgattaagaccattcagtataactacacatcaacgggtctgccagttgataaagagacgtttaaaaataccttctctttgggagtgtcactttataccctgctgacgggggttttgggactttatacaactaaaatgacggagtatgaacaaaataacccgctgaatactggtgcagtcaatgttttttacacgcaaatgattgtccatatgatcaatacgacaggaggcatcttagcgacacgtcaggcagccggagtttatatgacgcgggtcacttatccgccactcagacacattttaatgaaaatcagtttgcctgaggctacatctgtactgaccaaagtgggtgttaaatctatcggttatgttgtcgcgctggcgggagtggctgtaccgatagcccagataatggcggagatagataaaggtaaccatgtggcggccggagcaaaatttatggaggccgcagcaacccttgcactgagtgtgggagtggctggtgtcggaaaggctaacgccattattaaaggagtggcaactctcagcagtaacccgataatacgcgctgttactgtttatgcgtgggaaatcgtccttggcgcagtagtgctgcttattggaggcgccacaatatattatttatttgaaaccgatgattttgaagaattactgaaaaaatgtttctggggtaatggaaaaaaatactttgcggggggggaacctattgaaaatagcgataggcctaataaaaaagaagttcaattagaaaaatatattgataattttgaaaataatacctcctgtttccaaatagaattacaggagtttttaaattttttctttacgccgcaagtgaaaattactgtgcagccgaaagcaaaagccggtcagatcccggattcaccatatgtcgctcattatgtgatacgttatcagttcagactggctaactttcagtgtggtctctcggatattgaatatcagctggtaaaaataaaacagacagtaatgtatccgtctcagatgccggtaaagtatcttcctccgaaaccggatgtcattctccagcataaaggatacgagtatattgcatctgataatcagacttttaacaggacatttgaacaggctctgacgaccgctctgcagaacacgtcattgcgggatggtgaatttgagttcagctttgaggttgatgcaggagtgtataccggtgacccgttaaagaatcatttcgttccgtctcttcactggtattatctggttgaccggatgaaaggggatattgcaccgctgcgttaccgtaaaggtaatttgcaggataaaatttatggttatattgatgataaggaaatggaatga

SEQ ID NO: 287398 - DNA, 936 bp, Morganella morganii
atgagcaacccgtttacagtatcaagaaaaccatcacaactgaaaacttcgcgtctggcagatgcaagccatcattatgatgacccgttaccgctgaaggacttggtttttttgcaaagcatcaatgagcaggaatgcagaattaaatcatctcagatcaacagtcggatatcgaatacggttccgatgtttgtggtgctgttggtgatgatgttttatacattattcacttttgttgaaagccataatgctaaaaaattcgacttcgaaacaagtgttaaacgtgtagagtctcgactaggtaattcaacaaatttaaaccagtttgataaaaagattatggaaatctataagccatattttggaaaaaatgaaataagttggtttgattattttaaagcttattatattgatgactactatagtggtactgagtatgataaatattttattattatttggctgattttttttccgggtggattatatatattgggctccctgagttttcttgttccgatgacctggttagtagctgaccgaaaacggggtattctgtattcttacgtagacggaattgtgatggcagtgcgttatgaggatgcacaatttggctttgcaggcaggatgctggcgtttaaattattttatattcatccggaaaccgggaggttaggtacgcatatttacagacccaatgtctctcactataccggttttttaatgagtacggatactgaaaattaccgttttattacgttcttaaatacgtatatgacagagggtcgtgatgctatttcacctgtggattatcaggcgcgtaatccgctattctgctttgccaaaaacccgctcccggataattttgaacagcaggttgcacagattctggcagaatttgataaaaggaagcaacgtaatgcgcagtcagattaa

SEQ ID NO: 287399 - DNA, 522 bp, Morganella morganii
gtgaaaccgacatccccgcaggcacagcagatcgccgcccgctggatggcggcactggagcaggacaccggcggtaatccggatttcttctgccggttaaataaaatgcatctgtcagataatgaatttgccgcatcatccgggattacagagcagatgatagaatttgtcgcggaaagcttcagtgaatatcagctttctctgtttaagccccatgtgaccccgcagcagtttgcctttatgcagcagcattatttccgtgccggcgctgtctggccggacttaatcgccggactgtatactgccatgaaatcgggagaagacccggcatcaccggcagtcagaaaactggcgcaaacctggcttgtgatgtttaacacgtttaccggcggtgacccggaattacaggagattgtccgccgggtttaccgggaagaaccggctatatccaaaggcacctggatgacaccggaaatcggacaatatctgtttacggctattcaggcgggattgcaggaataa

SEQ ID NO: 287400 - DNA, 633 bp, Morganella morganii
atggatacagtcgggagcaggataaaaaggcttcgcagcttaactaagacgacacaaaatgatctcggtaaatattgcggggtgtcaggtgttgccgttgggtactgggagaaggatctaaacttaccaaacggtaacgcactgataaaactagctcaatacttcaacaccacagaggctttcattctctatggtataccgtcgaagcactccagttcagttgtcaccacaatgcgaaaattaccagtattatcatatgtacaggcaggtaaatttactgactatgtcccttctgagttgtatgatgaagcgttagaatatgtcgaaacctcaattaaagtatcacccgcaagctttgctttaattgtgcagggtgactccatgaccaatcctgctggaatgccctccatacccgagggagttaaggttattgtcgatccatcggaagaaccgatgcatggaaaaatagtagtcgctcgcctcaacggaaccagtgaggtgaccatcaaaaaattagttttcgatggtccaaacaagtatttatctccccttaacccacgttacgacaacattccaattaatggaaattgtgaaatagtaggggttgttaaaggtgttcagtacgaactgtaa

SEQ ID NO: 287401 - DNA, 480 bp, Morganella morganii
atgaagaatgaatcactgaaagaagtcgtaaaaaagatgtgctgcgccatgccgggtgggcgggaagcgctggctggtgctctgggcatgtcactgacgacgtttaacaacaacctgtacgaaaagaacggctgccggtttttcgacaatgatgagctggaagcaatggaagatctgaccaaaacccgtcacctggtcgaataccacatggaccggcacggtattacaccgatggtaaatgtagacccggcaaataccgacaaggttgagcttttccggatccgcactgaccttgattccatgcagggcgaattatctgtgctgattaaagagagcctggcagacgatgtgctgacatcggatgagaaaaaggccattaataaaaaactgaacaaggtattcgcctatgcgctgtgttttgttgagtcactcgatgtggtttatggggtcggaaatgattcaggtaaccagaaagggtga

SEQ ID NO: 287402 - DNA, 243 bp, Morganella morganii
atgcgctcagaaagcaaagagatttacggcgtgagtgtgttcccggtgctggccgtcctgcatcaaatccgccggtggtgggtactgcgtgatctgaagggccactggaacagccgccataaggtgatccgcatttgccgcagccgtggctgggatgagcatatccggtttaagaatatcgaacggcagtattccatgacccgcgccacagctaaacgctaccagcgcaagggggttatctga

SEQ ID NO: 287403 - DNA, 525 bp, Morganella morganii
atgaaaagggtaatcactgtattgctcaacggctggttgtgggcggttgtgttcttcgggttatggatgttcagcatgctgtcagccgagaaaacggaaggccaacacaaagacaaggttatcacaggccagcaaaaggtgattgataacgcttacaccagtattgatatttttaatcatgccgccgcagcgaacgctaaccggaatatgctggcagcggccaaatcacaggagaagcagattgaataccgtactattatccggaaagagcctacctgtaatttgtatattcctcagcctgtttctgatgggttgctcagccacgtctacaccatccgcgaatcagcaatgcgttccgattccggtatcactgactcagccggtactggcaccactgccacccgccgactgacatattgccaggcggttgagtggatagagccgctgctgatggcactggataaggctaacgggcagttgatggatatcaggaaggcggatgcagagcgaaacaggaagccttaa

SEQ ID NO: 287404 - DNA, 177 bp, Morganella morganii
gtggttgtcttcttccagattggtagtccgttatacgctatcgtttcctgcttaattcctgtttacctggtattccgtgtcgcgaaactgaaaaaattcaaagactggaaagcctggtgtgttatgggcttcggtatcctgctgctcatcgcaccgttcttcaaataccttgagtga

SEQ ID NO: 287405 - DNA, 564 bp, Morganella morganii
atgactatacgaaaaatatttttactattggtatttgttttgtctgggtgtggggataatgcagaccctgtagatacttctgattcgcctgaagaactggcgatgttcagtgttgagactgataattcaactataaatcagttattgcctgcaataagagcgcgattgcctgggttagataaatatgctagccaattacaaaaagtcagtgttgaacaaaattattggcttaccattaaatttcatgtgccagatgacgccaaaatacctaatgattacatgacgtttggacataattgttttatcgaaattaacaaagaaggaacagcagtaaaaatacctaaaacaccttgcaaagcactgatgctagatcagaatgcagataatattgatagtgaacaatggtttgatctttcaacagcaagaaatagggatgcctcaaatacaccggatgaaacacgtgaaatattgcctgccacacctgacaacaagccaccgaaaccaggctgtctggaaatctatcaccctgataaagatagtaaatggaactgtccggtaagctaa

SEQ ID NO: 287406 - DNA, 411 bp, Morganella morganii
atgagtataaaagagagattgcgcgaagcgattgatgctaaaaacttgactattaaggcattgtctgacctgtcaaaaattccatatcgctcacttcaaaactatttacgtggtgagagagaacccaatgcagatgctcttattacgttaagtgctcaattgggtgtatctatagattggctacttactggtaaaggggaagctactgggatagagaaagtacaactgactaatcaggaacagcgtttcaatcagtctgatctgaagatattggagctgctaaaccaactggagccagaggtgcgaaaagaattgctgcgaggcgctgaggaaaaacagcgaatgattgatatggaaaaacaacttcaggagctgtccgcagcattcaataaattaaaaaatacaggttaa

SEQ ID NO: 287407 - DNA, 273 bp, Morganella morganii
atgatcacgcctaaagaagcagaaaaacgaacccgtgaaattgtcgcggaatatattagtgaatgtggctgtgaaaatcctgaccatatccggcaggtattaatcaaattaatcagcatggcggctcacgccattgtggcaaccaacggactggaacaagccacgaatgttcttcattcaaccagcgattacctgcaaaagctgccgccgctgtacagactggaaatgactgaagatggtcggataaaaatcatgggtgtaccccgccattaa

SEQ ID NO: 287408 - DNA, 210 bp, Morganella morganii
atgacgacggaatctgttgtatatcacctgttctggtatggtctcgtgggatggtgtactgctgagttacaccgccactcgggtttttactcacgctacagtggttacggtctctggatttgttggaccgttatgttcctgtgctggcctttatgccttcctttatatgtcgattatattggtggcgcaggtaaaagggggcgtcgataa

SEQ ID NO: 287409 - DNA, 855 bp, Morganella morganii
atgcataagtcattcaagattgaaaaatgtagcctagagaagctaattaataataataaagtaatcttcgaccattttgaggatagtcacttagcttacatgtctaaagttgatgaagaacgattggatcgcatgatcttcgatgctgctaatgggaaaattaatgccgatgaaataataaaagcctattttccaagtatgactccacatatttttatatctcatagtagtaaagacaaaaagccagctataaaatttgcaaactatttattttatacatacggcataacatcatttatagattcacaaatatggggacatattaaccatgctataaagatactaaataataagtacagtaagataaaagaagacggtaattcaattacttataaccaccggaaagctaatataatatccagcaatatatatgcaatgcttactattgcgttaataaatacaatggataattcagatagtttaattcttctagaatctgacaattctgttggaggtgataaatatgatgtggaaaaagtcttagactgcacatatgaaacagaatcaccctggatttactctgaggttaacttctctcgtctactaagacccaaacaacatgatagacctgatttattagcatatgatggttctgaaagcttcgttgcacatgaaaaaagaggtcaaatatctttggaagagcaggcttcatttgtttatcctgctgatttagagcatatgctatccgtaacagaacgtaacctattaaaaataaaagatatatatcctacggggcacaccatgattaatttagataaaatatatgaattatttgagaatcgcttattattttaa

SEQ ID NO: 287410 - DNA, 456 bp, Morganella morganii
gtgaacaaagaaagcgggcaggattttggtgatggttctatctccgccaagatagcatcattaactttccttcaaggtataatatctcgaatggctagtaactcattaaaaataaaaacattttttattgggtttctaggcgtttttattacaataaaaacatcttttacagggataacaacattaagttatgtaatcccattaataataaccatttgtgcttgttatttagatagttactatctaacccaagagcgtatttttagacatatttataatgaaaaatcagcaaaaaagcctactggtgatactaatttctttgaaatcaaagaagaaataaaaaataacaaagacaaggaaaatgtgattagcacaatgaagtcacctgccatatatcctttttatttaaccagctttctttttattattttaataaactggagtattcatgcataa

SEQ ID NO: 287411 - DNA, 1287 bp, Morganella morganii
atgacaaacagtgaaaatagtctggtgctgaatacagaccagaaacaaaaaattccttttacactatatgatgcagggtgggtggtattatgcatcggtatggcaattggtgccggtacaattgttatgccgattcagggcggaattaaaggattatgggtatttactgctgcactggctattgcctatccggcgacatttttattacagaaactgtatttaagaacactctctgaaacggaagagtgtgacagctataccaacgttatcacccaatacctcggtaataactggggaatgatattgggagtgatttatttcctgatgctggttcacagtacctttatttattctattgccgtggtatttgacagtgcctcttatattcataccttcgggctgtcggaaatcacgttatcttccacctggtggtatccgctggtgttgttcactgtgctggtgtttatttcatcaaaaggggaaaaactgctgtttaaagtgtccggcccgatggttattgtgaacgtggtgattattctggcactggcgctggtcatgatcccgcactggaactttgataatattaaagcgtttcctcctgtgggggaatatttgcgggatgttctgctgactctgccgtttgcctttttctctattgcgtttgtagcgatgctgaatccgatgaatatcgcctaccgcaaacaggaggaagataaacaggtcgcgatttataaaacactgcgtgcgcaccggattgcattcctgatcctcgcagggcttctgttatttttctccttctcgtttactttttctatcagttacgaacaggcagtttccgcatttgagcagaacatttccgcactggcgattgccgcgcaggttattcccggcagtgtgattaaagtgatgacggttgcgctcaatatctgcactgtactgacggcatttctgggtgtgtatctgagtttctctgagtccgtcaaagggctggtgatgaatattcttacccgctttatgaaagaggacaaaattaatcagacactgctgaatatcctgatcccggttgtgattattctggcattaaccgtctgggtatcatcgggcttctccctgattgtatttgtgcagctcggcagtccgctgtacggcattgtgatgtgtctgattccggttctgctggtattcaatgttaagaaactgcacaaattcaaaagctttcaggtgtatttcattctgttgttcggtattttgctggtggtctcaccgttcttaaaatatatcgaataa

SEQ ID NO: 287412 - DNA, 1482 bp, Morganella morganii
atgaaaaatagtactagtgtaacaccatcagtcttatatgttgatgatttaattacaaaagttgaaagaggcgctttgaaggttccggctttccaacgaagttacgtctggagtaaaaaaaatgtaattgagttatttgaaagtatttatcatggttttccaataggttctgtcttactttgggaaacagaaacaaaaattaaaattaataacaattttgatataaatactacatccaattcttttcaatatattttagatgggcaacaacgattaactacactttatcactgtcttaatgggaaatcaggagctgatgacatctggaatttgtatatagatttagagcaagagatttttttacacttaagtacgaatgaagatataaatccttgttattttcccatatcaaaagtccttaatacatttgatttccttaaagagtctcaaagattattaagtgaaaccaactctgaattattagttggtaaagctcaagagctagcaaatagaataagaaaatataaattagcaataataaatctggaaggcggcgatttagatgatgcaattgaaatattcacaagattaaataaaacagggatgcaaataatacctattgacctaattacagctctaaattacgacaatcaaaacatgagcacttttgatttaacaagacgtaaattcatagacattacaaaaaaatatagcttcctacctgactataaagtagatgactatgtcggagatacatttataaaactcttaagaattggattgggatttcaaatatatgcaaaaaatgataccgaaaaagtagctagtttagttcgctccacaaattttgatttagtttctgaaaaaattattacttcatatgagaacactctaaattttattgtcaatgacttaaaattcctaagccaatcagagcttccctatgtaaatttactatatatgacattttcatactattttaaaggccatagtgatattcgagctttaaaagatatgttttataaaggttctattgctggcttatttaatgttagtccttccggcacagagaacctactaaatttcttttcttcaaattttaacaaagagtttttgactaaaaaactattaatgactcttaataatgactacctaagctcatatatccgtagtttagaagagggggagtttaatgcaagatctgctcttggaaaagtcacctataatatattatcaaataaataccttaaagaatacaaggatagcgaagttttaaaatacccaccaattgcgttgtataataatgatatatataaagaaagactgggaaataaatgtttcttcatttcattaaaatatgaagaaaaaatttattctcacaatgaactcatgagtaacaatgaagaaaaaattataaaacaaagagaaaaaatagtatcaagaatagttagagattttttgactgaaaatgaaataatgtaa

SEQ ID NO: 287413 - DNA, 939 bp, Morganella morganii
atgagagttaaaatatctgatgaaattttgttggaaccgaaaaaaatcacacagataattaattttatatgtaatttaaatggccgacactctatatgtacagacaatatagacaatatatttgaatctttagatgatgatatctcagctaaagaattactgaaagaacaaataataaaacaatgtaatgggataaattacactaactctattgaaatagttttagaaaaacaaaatgaccagcaagtattatttgatgactttggtgaattattgtctcagaatgcagttgtagtgctagagaacaaattaaacgatacgaaatttttaaaaacaatactagaaagtaaaaatcacaaaaacatttcaaatagttatggtaaatattggcgggtggaaagtgttggaggatgcggacaaataccaaggctattagaagaacagataggcttaggaatacctagcaataggctggcagtaatacatgattcagacaaattatacccccaagatagattaaataaaactcatgcaaacataataaacacttgtaatcattacagaataaaatttcacacattaagaaagagagaaatggaaaattatatagtagatgaattactatttactatatttaattttgactcagaattaagaactgcatgggataatttgtctaaatcacaaaaatctcattttgattataaatatgggtttaataataaatcacatatttcacctgaatataacgggctattcaaaaatatatctaagagtcatgtagatacactcacgtatggttttggaagtgatatagctcaaaaagcttttaccgatagtaatttagattatttcaaaagcgacaaagtgagattatggtgtcataatgctgatcatgaatttaaacacatatgttcaataattgaatctatactatag

SEQ ID NO: 287414 - DNA, 1236 bp, Morganella morganii
atgcttattaaaaaactatacgcctataattataagggatttaaaaaattagaattagaattaacaaaaataaatatattaataggtaagaatggttcaggaaagagtacaataaccaggctcgttccattaattatcgattctatagactttgatggtaatgatgttttatcgctttcaccacttggtatagatatagcagcaacatttgaagacttaagctatcgaggattagaggcagccacaataacattaggtgctgatgtcgagattaaagacacaacttatacatttaaaactgacttaatttactcaactgaaatacgcaaaattatcgtaagtaaattctcatggtacaaagataaaaaagttatttttgaatgtttttttgattcactaaatagtaaaaaaccaacttatacctcagatggaaataagatatatgttacctttacaggacttatcccgaatatagataaaagtcagtttaacttcaaggaaatagaaggaatctatcttttaagagataaagttaaagaattaaagaaaaacctaacttatattggaccatttagagaaaatctttatagaaattatggctcccaaataaaatccaacataaacattggtacaaaaggtgaatttgcaccatatatcttagatcaagatagccgtagtataaatccgacattacaggataaaattaaagactggatgaaagtgcagtttgataataaatttatatatacagagaactatggccctacgttttccttacttgtaaagtctgaaaacttttcaacaaatattgttgatgatggtgttggttattctcaattatttccattaatagtgagtagacttcaaaacaatatgatttccagtaattgcatagaaattgtggaacaacctgaattacatttacatcctagcgcctgtggttctattattgatctatacctaacttcaatagagaatgaaaaagatttaataatactagagacacattcaaaagaattaattttacgactacggagaaggttggcggaatataaagaaaaaaacgatataaccgataagttctctattatttatacatatagagaccatgagtcctgtgcaattgattacattaagataaacagtaatggtagtgtagactggtggccagatggtatttttgaagagagctttaaagaaacgcttgcaatcgtagaggctaacaatgagagttaa

SEQ ID NO: 287415 - DNA, 1011 bp, Morganella morganii
atggcttattgtaacgattttgaccctatggatcagttttattgtcgtgatggtgaaattgcggatatttcagaggaagcaaaagagcggatttattttatcagacggataatgcgttttctgaagaaattactgtctgaaagaaaaacagaaacatcatgtaaaccgtataccggactgggtgaatcaatttattaccaatgtgcggacagtgaaccttctgttgaaacggcaatgagtcgtattccggatgcactgataaaagatattgcggtgaccagctaccacggcgctgagcggacgataaatacactggctgatttcccttttccggttatcgatattccgatgagttttttgcgtcacaaacgcctgtccggcggatatcagattctgaaagagaacacggaagcgatttatcttctccgctttctggctgatccctatgaaaactttaaagaagcgattgagattatcgtgtcagcggttttagaggatatacctgtatcgcgaaaggaaaagcttagagatttagttgtaaaggatacaagtaagattaataggtataaatctgagcaagacatcatgttattgagtgattccttcatggacgataagactgctcattatgcccctatcataataggtaattccgtattaaggcgatatatcatcactgcaatatctgccggtgttattgctgctgttgcctataaatttcctgctctcttcagtaagaaagagctgatcatcaaacggtcggtggttattgcaacgcttctgtacagttacgggactatcgaaaaaatggctcgtgcggcacaacggctgaaagagagaaactacgcggtttatcaggcattagatcgtgcacagctatcattgatctactattttctggaagaagaactgaaaacgtttgtggtactggctgcgaagccggaaggcacgtctgcggatgatgcttttgtacaggaggttcgcagccttatcgcacgttatcgtcagtaa

SEQ ID NO: 287416 - DNA, 1071 bp, Morganella morganii
atgttagcatatcaattcaggagacggttaagtttagttattttctcagttttcctggctgtcacaggccatagttatgcaaatggaattattacaccagatactgtcagttctgaaattaaaaaatcagatgcagaaaaaaatatttctgcagcattaagtgctaatgcacagatccagtttcagatgggcctgttgtatgaagaaggtattggtttttcgcaaaattatatatttgcccgctactggtttgaaaaatccgccgagcagaataatgcagatgcgttattttatcttggtgagttttatatggatggtagcggggttttgcaggatgtgaagaaaggaaaggagttgtataaaaaagcagcggaattaggatcttcgcatgccatgaataacctgggattgctggcaaagcaggaaggaaatattgaaaaagcaattactctctataaacaggcgatcgcatcaggagcggatactactcttttaaatttagcgagcctttatcaggaggacggaaactatgaagaatctgaaaaactactattagctgcattagaaaaagatgattataatataaagtcagaagcattaaataaactaggtactatatatagtcggtctgattttaaaggttatgatcaaaaaaaagcagagggatactatttagagtcaataaagctaggtaatgatttatctttaaataatattggtgttctttattttaaaaataatcagtaccagaaagcattttactatattaagatggcggaagaaaaaaatattcctggtgcaataaataaccttggtgccctatataaatatggttatggtactaaacaagattatacaaaagcactatctttatttaaacaatccgctgcacagaataactctattgggttatttaatttaggaagtatgtatgaaaaaggtgaaggcgtaaaacaagacgataataaagccattgagtattacgaaaaagcattagccgcagggcattatccttcacaggaacggattaattatctgaaaaataaacagaaaaataagatggataaataa

SEQ ID NO: 287417 - DNA, 1005 bp, Morganella morganii
atgctgcggatggcaaaaataatagtgtatgttttatttatcgctgttgtcttgcctggttatgcagtgataactaattcagatgaagaaaatatagtactggttaataaagcgaatgctttgatataccttcagcttggtattatttatgatgagggtctgggtgtttctgagaattatcaggctgcccgctactggtttgaaaaatccgccgagcagaataatgaagatgcattattttatctgggttcttactatatgcatggttcaggtattgaaaaaaacaaagaaaaaggtttgttactatataaaaaagcatctgaattaggttcttctcgtgcaacaaataatttggctcttcaggaagaaaaagaggggcgaattgaagaggctattctcctctataaaaaggcaattgatttaggttcaaatgctgcgatattgaacttaggtgagatttataaagatattggagagtatgataaagcagaaagaattctcacccaagggttatataaagaagatgttattaaatcagaagcattaaggaagttgggttatttatattctgatgttgattttcccaggaatgacagaaggaaatctaaaaaatattacttagagtcagtatcactcggtgataaatgggcgttaaatgaccttggaatgctttattttcatgataaaaattataaagaggcatttaattatataaaaatggcggcggatgaaaatattccgggagggattaataatcttggtgcattatatcagcacggatacggtgtaaaacaggattacgcacaagcaatttcattgtatgaaaagtcagcgaaaatgggcagccccggtggttattttaacttaggtggtatgtatgagcatggggatggcgtaacacaagacgatacaaaagcactggaatattacgaacaggcattagccgcagggcattatccggcacagaaaaaaattgatttgctgaaagcgaaacagagaaaatag

SEQ ID NO: 287418 - DNA, 165 bp, Morganella morganii
atgcgcaagttagttttgtctgtactggtcaccggagccgcgcttgccagtgcggcggtttctgctgaagagctggccggtacactgaaaaaaatcaatgacagcggcgtgattgttgtcggtcaccgcgaatcctctgttcctttctcttattatgataactag

SEQ ID NO: 287419 - DNA, 2574 bp, Morganella morganii
atgcagaccgacaaaggcatcgtgctggccagcgccttgatcgaacatctgcggcggcagtcggtcattctgcctgccctcaacgccgtcgagcgggcgagcgccgaggcaatcacccgtgccaaccggcgcatctacgatgccttggccgaaccgctgtcggacgcgcatcgccgccgcctcgacgacctgctcaagcgccgcgataacggcaagacgacctggctggcttggctgcgccagtcgcccgtcaagccaaactcgcggcacatgctggaacacatcgaacgcctcaaagcgtggcagacgctcgacctgccttcgggcatcgagcgtctggttcaccagaaccggctgctcaagatcgcccgcgaaggcggtcagatgacgcccgccgacttggccaagttcgagccacagcgccgctacgcaaccctggtggcgcttgccattgaaggcatggctaccgtcaccgacgaaatcatcgacctacacgaccgcatcttgggcaagctgttcaacgccgccaagaataagcatcagcagcagttccaggcgtccggcaaggccatcaacgccaaggtgcgcctgtacggacgcatcggccaggcgctgatcgacgccaagcagtcgggacgcgacccgttcgccgccatcgaggccgtcatgtcctgggatgctttcgccgagagcgtcaccgaggcgcagaagctcgcgcagcccgatgacttcgattttctgcatcgcatcggcgagagctacgccactttgcgccgttacgcgccggaatttcttgctgtgctcaagctgcgggcggcgcccgctgccaagaacgtgctcgatgccatcgaggtgctgcgcggcatgaacaccgacaacgcccgcaaggtgcccgccgatgccccgaccgatttcattaagccgcgctggcagaagctggtgatgaccgacaccggcattgaccggcgttactacgaactgtgtgccctgtcggagatgaagaacgcgctgcgttccggcgacatttgggtacaaggctcgcgccagttcaaggacttcgaggactatttggtgccgcccgcgaaattcgccagcctcaagcagtccagtgaattgccgctggccgtggccaccgactgcgatcagtacctgcacgagcggctgacgctgctggaaacccagctcgccaccgtcaaccgcatggcggcggccaacaacctgccggacgccatcatcaccgagtcgggcctgaaaatcacgccgttggatgcggcggtgccggacaccgcgcaggcgttgatcgaccaaacggccatgatcctgccgcacgtcaagatcaccgagctgctgcttgaagtcgatgagtggacgggcttcacccggcacttcacacacctgaaatcgggcgatctggccaaggacaaaaatttgctgctgaccaccatcttggccgacgcgatcaacctgggcctgaccaagatggccgagtcctgccccggcacgacctacgccaagttggcttggctgcaagcctggcatacccgcgacgaaacctattcgacggcattggccgaattggtcaacgcccaattccagcacccgttcgccgggcactggggcgacggcaccacgtcatcgtcggacggccagaacttccgaaccggcagcaaggccgagagtaccgggcacatcaacccaaaatatggcagcagcccaggacggactttctacacccatatctccgaccagtacgcgccgttccataccaaggtggtcaatgtcggcgtgcgcgattcgacctatgtgctcgacggcctgctgtaccacgagtccgacttgcgcatcgaggaacactacaccgacacggcgggcttcaccgatcacgtcttcgccttgatgcacctgctgggcttccgcttcgcgccgcgcatccgcgacttgggcgacaccaagctgttcatccccaagggcgaaaccaattacgatgcactcaagccgatgattagcagtgacaagctgaacatcaaggcgattcgtgcccattgggacgaaatcttgcggctggccacctcgatcaagcagggcacagtgacggcctcgctgatgctgcgcaagctcggcagctacccgcgccagaacggtctggccgtggcgttgcgcgagctgggccgcatcgaacgcacgttgttcatcctggattggctacaaagcgtggaactgcgccgccgcgtgcatgccgggttgaacaagggcgaagcccgcaacgcgctggcccgcgccgtgttcttcaaccgccttggcgaaatccgcgaccgcagtttcgagcagcagcgctaccgagccagcggcctcaacctggtgacggcggccgtcgtgttgtggaacacggtctatctggaacgggctgcacatgcgctgcgcggcaacggccatgccgtcgatgacgcgctgttgcaatatctgtcgccgctcggctgggagcacatcaatctgaccggcgattacctgtggcgcagcagcgccaagatcggcgcaggcaagttcaggccgttacgaccgctgcaaccggcttag

SEQ ID NO: 287420 - DNA, 408 bp, Morganella morganii
atgcgaattggtcagttggcgcagttggtaggggtcgaaacacagacgatccgcttctatgaacagcagggcttgttgccgccgcctgatcggcaggacaacggttaccgtgtctataccgagaagcatggtgaggggctggccttcatccgtcgctgcagaatcctgggcctgtcactggctgagattcacgaactacagagctatcaggacgaccctcatcagccttgtaccgccgtcaacgccttgctcgatgatcacatctctcatgtgcggtcgcagataaccgctctgcaagcgcttgagaaacaactcgtttcactgagagcgagttgcaacgatgaccgggaagttgaggcgtgtggggttcttgctggaattagcgaaggaaacatgcaccagcagtag

SEQ ID NO: 287421 - DNA, 897 bp, Morganella morganii; identical to SEQ ID NO: 108036

SEQ ID NO: 287422 - DNA, 513 bp, Morganella morganii; identical to SEQ ID NO: 194081

SEQ ID NO: 287423 - DNA, 1290 bp, Morganella morganii; identical to SEQ ID NO: 153640

SEQ ID NO: 287424 - DNA, 432 bp, Morganella morganii
atgaaaaatatcgtcttagcatcagtgttaggtttgagcttaatttctacggcctgggccactgaaactgtaaatatccatgagcgtgtcaataatgctcaggctccggcccatcagatgcagtcttcttcaactccagccgccatccagggggcagctccacggatggccggtatggatcagcatgaacaggctattattgttcatgaaaccatgaacaatggttcagcagatgcacataaaaaaatggcggaaagtcatcagaagatgatgggaactggcaccgttaacgcttcccgtccggcgacttcgtttgcggcgatgaatgagcatgaaagagcagcggttgcccatgaattcatgaataacgggcaatccggcccacatcaggccatggccgaagcgcaccgccgcatgatcaatgcaggctga

SEQ ID NO: 287425 - DNA, 1023 bp, Morganella morganii; identical to SEQ ID NO: 129977

SEQ ID NO: 287426 - DNA, 393 bp, Morganella morganii
atgaacccattcaaaggccggcattttcagcgtgacatcattctgtgggccgtacgctggtactgcaaatacggcatcagttaccgtgagctgcaggagatgctggctgaacgcggagtgaatgtcgatcactccacgatttaccgctgggttcagcgttatgcgcctgaaatggaaaaacggctgcgctggtactggcgtaacccttccgatctttgcccgtggcacatggatgaaacctacgtgaaggtcaatggccgctgggcgtatctgtaccgggccgtcgacagccggggccgcactgtcgatttttatctctcctcccgtcgtaacaggggtccgcttggaaaacggaaaatatcctacgctaagcctgttttttgtacagactga

SEQ ID NO: 287427 - DNA, 2985 bp, Morganella morganii; identical to SEQ ID NO: 86716

SEQ ID NO: 287428 - DNA, 624 bp, Morganella morganii
atgtacattcacggttacctccgcgcatcaacaaaagaacaggatgctctccgagcaaaaaataggatgaaagcctttgttgaagaaaaaggatttcgactggccagttggtacaccgaaaatgtatccggggcatcacttcaacggccagaacttttacggctacttgatgatgctgcacctggtgacattattctcatcgagcaagttgatcgcctttctcgcctggatgaagagggctggcaaaaattaaagcatcttatccaggaaaaacaccttgtggttgtcagtcttgacctcccgacgagccatatggctcttgcaacacatgctggcgatgattttacccttgcaatgcttaaggctattaacggaatgatgcttgatatgctggccgccatagctcgcaaagactatcaggatcgtcgccggcgccaagaggaagggatagcgaaagccaaggtagccggtaaatttcggggacgtcaggcagatcatcaattgcatgaaaaaatcatagagcttcgggttaaaaatagacagagcatccgtgataccgcgaggttgtgtggagtttcagaacgaacggttatacgcattgttaaacttaaagcatgttcttga

SEQ ID NO: 287429 - DNA, 828 bp, Morganella morganii; identical to SEQ ID NO: 86713

SEQ ID NO: 287430 - DNA, 996 bp, Morganella morganii; identical to SEQ ID NO: 86712

SEQ ID NO: 287431 - DNA, 195 bp, Morganella morganii; identical to SEQ ID NO: 8291

SEQ ID NO: 287432 - DNA, 366 bp, Morganella morganii
atgcatcattcaacaaaattcgctttatttggactcttctctgttgtgatggcttcaggcgtttacgcgagtgaaatgaaacatgccgatatgggggagatgaaaatggcttctgaggcacctgcacagcagcaagttattagcagcaaaggggtggtaaaagagattgatctgactaataaaaaaatcacaatttcccatgaagccatccccgctgttggctggcctgccatgagtatgcgcttcacctttatgacactggactcaggcatcgcttcactgaaagtcggcagtgaagtggacttcacttttgtgcagcaaggcaatatatccatgctacaggacattaaaaccaaccagtcctga

SEQ ID NO: 287433 - DNA, 1386 bp, Morganella morganii
atgttcaaattcaaacaattaacactcacaacattgttcattctggcaggatgtacttcgcttgagcctgactaccagcgtcctgaatccccggttccacagcaattctcgctctccagaaactcactggttccggcaacaacaggttaccaggatacaggctggcgaaccttttttgccgatcctcaggcaaaattattgattgaagaagcattacaaaacaaccgggacctcagaatggcagccctgaaagtccaggaagccagagcgcagtataacgtcaccgatgcggacagatatccgcagttgaatacctctttagcggccaactacaagggggggctaaacggtgagaatgccacaacccgggaatataacaccggacttgatgtcagctttgagctggatttttttggcaagctgaagaacctgagtgaggctgaccgccagaatttctttgccagtgaagaggcgcaacgtgcggtgcatattctgctcgtttccaatgtttcacagaattatttcaaccagcgactggcttacgaacagctgcatatcgcccgagaaacgctgaagaactatcagcaatcttatgcctttgttgaacagcaactcatcaccggcagtactaacgtactggcgctggaacaagcgcgagggctgattgaaagcactcgagccgacattgccaaaagagaaggtgagcttgcacaggcaaacaatgcgcttcagttggttgtcggtaaatataacaaactacctgatgataaacgtgtcgcagcagcggacgttaatccagtaaaacttcccacaaatttgtcttctgaaatcctgctgcaaagaccggacattatggaggccgaacatgcacttaaagccgctgatgccaatattggcgctgcccgtgccgcttttttcccctctgtttcattaaccggcgggatttcaggaagcagctcggatatttcaagtctgtttagtgctggcagcggcatatggaattttatgcctaaaattgagatacccatcttcaatgcaggccgcaataaagccaacctgacactggcggaggttcgccagcaacaatccgtcgtcagctatgaacaaaaaattcagaccgcttttaaggaggttgctgatgcgctttcattacgtgaaacaatcagcaagcaaataaccgcacagcttcgttatcttgactcgcttcagataacactacagcgtgcccgaggcttatattccagcggtgcagtgagctatctcgaagttatcgatgctgagcgagcattattttcgactcaacaatctattctggatttgaaatattcgcagcaagtcaatgaaattaatctgttcaccgcactgggtggtggatggacggcataa

SEQ ID NO: 287434 - DNA, 687 bp, Morganella morganii
gtgaaaattttgatcgttgaagatgaagtaaaaacaggcgagtacctcagcaaagggctgacagaatcaggtttcatcgttgatcatgtggacaatggattgaccggctaccatcttgccatgactaccgattacgatctgatggtgctggatatcatgctgcctgacgtgaacggctgggaaattgtgaggatgttgcgggctgcgaataaaagtatgcctatcttgctactgagtgccctgggaacgatagagcaccgggttaaaggccttgagctgggtgctgatgattatctggtgaaaccttttgcctttgctgaactgctggcgcgagtcaggacgctgttacgacgagggtctgctgtcattgcagaaagccagttccaggttgcagatttgacacttgatctggtgtccagaaaagtgagccggaaagggattcgcatctcattgaccagtaaggagttcactctgctggagttttttatccgccaccagagcgaggtacttccgcgctcacttatcgcttcgcaggtctgggatatgaattttgacagcgataccaatgccattgatgtggcggttaagcgcctgcgcgccaagattgacaatgattttgaacctaagttaattcagactgtccgtggtgtgggttatgttcttgaggtgctagatgaggaaaaataa

SEQ ID NO: 287435 - DNA, 1467 bp, Morganella morganii
atgaggaaaaataacctcaaccgtcgacctttctctctctccacccggctgaccttctttattagtctttcgaccatcatcgcattcgtggcattcacgtgggttatgctgcactcggtagaaaaacacttcgctgaaaaggatatcagtgacctgaaacaaatcagccactcgctggaaaggatacttaaagttcctgacgcctccgaacagcagaaagcagaaacaatcagcaatattatggaaacctaccataatatttcagtattacttcttgatggtaaaaaacaggtgctttatcgctcagttgatggacctgatcttacacctgcactcccccctgaaaatgcccaacagccaactgattcagagggtgtttttatcttacctaatactggggaaagcgcgggaatgcattcggatagtcagatgaggaatatgacctaccgtgtgatgacaacttcagtgaaaaaaacagattttactgcttcttcagcctatacattactgacagctctttcaattgattatcaccagcactatatcgaccagctaaaacgcaatcttattgccattgcctcagtcatcagcctcatgattattttcattatactatttgcagttcacacagcgcaccaacctctacgcaatgtcagccggaaaataaaaagtatttcctctgagaatttagatgtccggcttgattcagaccgtgtccccattgaactggagcaactcgttatttcgttcaaccaaatgattgagcggattgaggatgtctttacacggcaggctaatttctcagcagatatcgcgcatgaaatacgaacccctattaccaatctggttacgcagactgaaattgtgttaagccagacgcgtacagatgaggagctgaaagacgtcctgtattctaatcttgaagaatataaccgcatggcgaaaatgaccagtgatatgctatttctggcacaggctgataataaccagcttatacctgaaagggcgatgatagacctccggagtgaagtcattaaagtattcgatttttttgaggcctgggcggaagaacgtgaagtcagtctcaatgttgaaggtagcgcatctcgcgttgagggtgatccgctgatgctgcggcgtgtcatcaataatctcttatcgaatgctattcgttatacaccgaaaaaaatgacggtaaccgtccatatccaagaacataatcaatgggttgatttaattgttgaaaacccaggtgtaccgatccctaaagaacatttgtcacggctgttcgatcgtttttaccgcgttgacccatcaagacaacgaaaaagtgaagggagtggcattggccttgccatcgtaaaatccatcgtgaatgcacacaaaggaaaaattagtgtgacttcgggtactgtttcaacctgctttattatttcgcttcccgtaaccgcacccgatcaatgctaa

SEQ ID NO: 287436 - DNA, 432 bp, Morganella morganii
atgaaaaaaattctaattgccgccacttttgcaatgacttttgcttcctcttcctgggccgcagaaaacattaatgtgcacgaccaggttaataatgcccaggcaccggcacatcagatgatgtcaaccgatcaaaaatcaacggtgaacggttctgaatccacaatgatggacatgaaccagcatgagaaggcgactgttgctcatgaatccatgaataacagcaattcaaacgcccatcaacaaatggcggatgagcataaaaaaatgatgggtaatatgaatcaagcgggtgacactacagcgaaaccattttcaaaaatgaatgagcatgaaaaggccgcgattgcgcatgaaacaatgaataatggtcagtcaggtgcacaccaacaacaggctgaaaaacatcgtagtatggaatcatctaactga

SEQ ID NO: 287437 - DNA, 570 bp, Morganella morganii
atggcattactgggatatgcaagggtatcaaccagccatcaaaaactgacggcgcaagttacggaactaaaatctgtaggggtcagagatgatcggatttttactgacataatgtcgggagcgacagacgaacgcgacggtttacaaaggctgcttgcccgtgcggaaaaagacgacatcatcatgtgtaccaaaatggaccgacttggacgtaataccgctgatatgatcaacattgttgatgcctgttataaaaaggggatcgctatacggtttctggagaatggactgagtacagaaggtactatggggaaaatggtgattcagatactggctgctgtggccgaggctgagcgtgaacgcattctggaacgcaccaatgaagggcggcttgctgctctggaagctggggttaaattcgggcgtaaaccacatcaaaaatccgtcatcgccagagaacttattgttcaaaaactgcccgccaaaattgtgatggagaaaaccggtatttcccgggcaacctatttccgcttgaaaaaacacgaaacacatcagcctgcccaggattaa

SEQ ID NO: 287438 - DNA, 3009 bp, Morganella morganii; identical to SEQ ID NO: 283829

SEQ ID NO: 287439 - DNA, 870 bp, Morganella morganii
atggctaattcaggacgcgaatatgaagaactagtcagagatatacaatattctttgattaaagctgaaaatatctctagccttagaaatatcattatcgagaaaaacaagaaaataaaagatcgttcagggattgaccgtgagtttgatgtatattgggaattcgaaattggaggccaaacctatcgttcggttatcgaatgtaaggattactcatctccagtgtcaatcgagaagattgatgcctttataggtaaaacaaatgatattccgggactgaaactgatctatgctacgcggacagggtatcagagtggtgcaaagctaaaagcagagcaacataatattcaactgcttgttatcagagatcagcaagagcaagactggactgatgaagatggaaatccatatttaaaaacagtccatcttaagatgatagcaacaacacttcctcgggtaattagttttaatacttaccttgataagcaatggcttcaatctcaagaaaaatacacagaagaaacggtatttaacgcttttggaatggcgttaaataatagtgtttttataaataatattacaaataatgaaagatatagtttatacgatcttcaacaactacttctgactaaagttaaaaatattgaatatggaaaatataattataacgagaccatagagaatggatacattgaaaatgaagatgcgactattaaggtaaaaatatcaggttatagctgcacttacatctatagaaaaccgatggagacgatttctatcgttgatttttcagagcaagtcaaagccattgttgaagactttcaaacaggtaagaaaaagtggattttcaatgatgggaatgtaagctaa

SEQ ID NO: 287440 - DNA, 204 bp, Morganella morganii
atgatccggttgttgaagcgatttatgccgaactggaattatcaccatgggtcggattccggaaatgttttcaccggatgcgacaaaaaaagtactcctttaatcataaacaggtttattgagcgttttaacggatcattccaccgagagtttttaaatgcgtatttgcttaaatcactgagtcaactgaaagaaatggcctga

SEQ ID NO: 287441 - DNA, 1038 bp, Morganella morganii
atgattacaaaaaatgacagcctgacattaaaagccatcgcaataatttgtataacaatacataattttgttcactggaccaattctattggggagaatgaattaaaactgaatgaagatagaataattttactactacaaagtgtatataataagccatcaggagctttcaattatatattttcatattttggatggtattttattgttatctttatatttatcagtgcttatggaatggtactaaagatacaaaaaaaaggaaatgcgggtatcgtttgtttagaacaaataataaaaacagccatactactatgtgtgggtggtgtttttatctgtctttttacagagttatcgccccaggatactatgggatttatcataagtaaattagctacgattgataatttatcttatgaaacggtattttctactatagggccatggtggtattttagtttagcgattcaattatatcttgttatccctgtcgtactgtacctgactaaatatatcaatgaatatgttctattggttttatcctatctttctatatatgtgatctattttaatattataagcgtaagtatatttgcaacagctattggtcatatacctgaagttttgatggcttttattttaattaagaacaataagaaaatatcaccaattttattctttatatcagtatgtctttttatactttcaaatattaataattatttctttccttttacatatattacttttttgataatggcattattcatatatgatttattaaaaggaagtataggtaattactatgtcacttttgttggtgttatatccccattcatatttattcttaacggaccaataagaacatggacaatgaagaatctaccgttatatatagattctggataccgagaattgataattacagtgtcatcattgttgcatttattatctgtaataattatatcatgccttttttattctttatgtaataaaggaatggagtggctaaaggaacaagctacaaaaatagcgtag

SEQ ID NO: 287442 - DNA, 630 bp, Morganella morganii
gtgcaggctcatgatgcgcagctgcagcagaaactcaatgatggaggcagcgcggtcggaaaactgctcgcgataggcgctgaacgcgacaaacatcccgagggtcatagcgttgtcgatcaccagacccgcgccgatccacagaatggcaatctggtcacaggccatgataaaggtattcaccccgccgaacatcaggttcatcttggtcaggcggatgccggtattaatggaatcgactttcagattcagccagtgattaccccggcggtcgctcatgccctgggttttcaccgtggtgatgccgtagagggattccataaaatacgacccggcacgtgcctctttgatcagcgattcctccgacagctggcggtaataacggtaggtcgccagccgcagcccgatatacacggcggtaaacccgagcacaatccaggtgagatggccgccgtagaggatcatcatgataaacacgccgatcagcatgataccgtccatgatcgccccgaccacgctggtggtaaaggtggtgcgcaggatatccagcgagccgaaacgggactgaatatccccgagtttgcgccgttcaaaatagctgagcggcagccgcagcagatgggtgaataa

SEQ ID NO: 287443 - DNA, 780 bp, Morganella morganii
atggcacttctatttcggctttcaaccataggagtatcaacaaatgttaaagttattgcaatggaacattttggatatcaggtaccccactcaattttgaaatctattcgtaaaatactgtataaatatgtccataatattgtgatactcacaaatgaagattatgaacaatatataaaaataaataaaaaaacagatattatccctaatattgttgcatttgaaacagaattactaccaaacccaggatcgaaaaatataatatctgttggcagattggaatatcaaaaaggatttgacttactattagatgcttgggatagagtagaaaataacacaacagactggaagttaaatatatttggtagcggaagccaactaaaacaattgaacgataagattaaaaaattaaatctcaagagagtccagatcagaccacaccaaaaagacataatgtctgaatatctagattctagttttttggttatgtcatcgcgttatgaaggtttgggtatggtattacttgaagctttggcttgtggtattccatgtattagcttcagctgtccaactggtcctaaaactattattaaagataactataatggatttttatgtaccgaagaagatatagaagagcttgcagaaaagatattgctattaacaaacaatccagatctattatcccagctaaaatgtaatgcgaaaaatagtatatatccttttacaaaaaaagaaattatttcaaagtggatatctttactagaagaagataagtaa

SEQ ID NO: 287444 - DNA, 1155 bp, Morganella morganii; identical to SEQ ID NO: 99783

SEQ ID NO: 287445 - DNA, 369 bp, Morganella morganii
atgaatatggataatttaatcgcccttagtgtaaagcataatgcatccgatctgcacctttgtgttggtcaggtgccggtgttacgggtggatggagagcttttttcgcagacacactgtgcggcggtaaccgatgacgcactgcgcggctgggtaaagacgatcctcgaccaggcaaattaccacagattgatgacaaaagggcaggcggatcttgcgttgtttatccgcgatcaacctttgcgggtgaatatttttatggcggggggattgctgaacgccgcactgcggctgataagccccgcagttccttctctggaggatatcctggcaccgccggtgtttgccgggctgctgtcaaaaacgtaa

SEQ ID NO: 287446 - DNA, 741 bp, Morganella morganii
atgccacagatttccagacaagaatattgcggcctgttcgggccgaccaccggagacaaaatccgtcttggtgataccgatctctatatcgaaattgaaaaagacttacgcggttacggcgaagaatctgtttacggcggcgggaaatccctccgtgacgggatgggcgcgaacaacacgctgaccagcgacaacggcgtgctcgacctggttatcaccaacgtcactatcctggatgccaaattaggcgtcatcaaagcggacgtgggtgtgaaggacggtaaaattgtcggtatcggcaagagcggtaacccgaacctgcaggacggtatcaccccgggaatggtcgccggtgtggccaccgatgctatctccggtgagcatctgatcctgacagcggcgggtatcgatacccacattcacctgatctcaccacagcaggcttatgcggcgctgtccaacggtgtcaccaccttcttcggcggcggtatcgggccgacagacggcaccaacgggacaacggttaccgccggtccgtggaacatccgcgcgatgctgcgttcactggaaggtttaccggttaacgtcggtatgctcgggaaaggtaactcttttgcccgcgatccgctggttgaacagatcattgccggtgttgccggtctgaaagtccacgaagactggggtgcaacctccaacgccatccgtcatgccctgcgtgtggcagatgattatgatatctag

SEQ ID NO: 287447 - DNA, 414 bp, Morganella morganii
atgacaactagtccgaagctaaaaacactaaaaattgaaggtctgtttggctataaggatatagagttggattttggagatgtaaacgttttagttggtagaaatggtctcggaaaaacgactatccttaaaattttgaatgctatgttaaatgaagattttaattgtagtgagctaaaattatgtcacagagctagcattatatttacaagcaaagcggttatatcttatgagccagataataggcttgaaactattgcaaaagctactttccaaaaagtatttactaaacacttaagtgagtcatttcaaaaagatgaggtggggtttcataagtatttaagggatgagtttcttaaagaggttacaaatcagattaatctcaatagaatgaatgtttcaagagtaaggtaa

SEQ ID NO: 287448 - DNA, 993 bp, Morganella morganii
atgtcaggatttgatagtttactaaaatcagctaagtatcttcaagcatacacaaaacaacaaacaggaaaatcgagagggattttatacgttgaaaatccatcagatcgattattttgggaaaatgttattgctcatgtttgcccagaacagtacagtgtaaaatcatttagtttagataatgctcctggtaaacgttcacttgaaaaggaatatagtaaactacatcgcttctatattgttggggtagatggtgattttgattatctttgtccaagcaggcatgagtttgctaattctttaaatagtaatccttatgtaattcatacatttacatattcaagggagaatgtcattttcaatatgccttctgttattgatattagtaatagactggcatttagacaccatttaattaatgattgtgtatcggctttgacagagtactctaaaattatatttcctgcactttcttttttttcttattctcataatttggattggcaaacatttaaagaggatcagttcactagagcaatatccttgcctgaaggcgaaaagcttttaaccgatgaattaaaaataaatactactgcacttgattatgttaaagcatcgtctaaaatttatatagactctattcttaaagtgctaaattatgaaatagatgagaagcattgctgtgatatattgactgatcgttatattactccagaggttgcttatatgtttattgatggtcattatcttaaggataatgttattaaacctatgttggatttattaaaacgaaaaaataaaaatgaagacataaatgagataaaagaaaaactgcctagggagagatggaaacaatcaatacaagaagtaaataattattttagagattgttgtcataccgaatgtattatacataatacaacatcctattcatcaggtgaagtttgggaattaataaaggggaaattaaataatgtaagtaatatggtttaa

SEQ ID NO: 287449 - DNA, 186 bp, Morganella morganii
atgacacaagacgaagaaaccgtattgctattcaaggggctgatagcatcactgcctgatgttcagcagcagaatgttaagcaatgcattgatgtcattcgtcagctactcagcaaataccctgcaggagaagcggtggttgctattggattggttggtgcggaactgcaacagcaggctggttga

SEQ ID NO: 287450 - DNA, 186 bp, Morganella morganii
atgtttaaacatgaattaggtcaggttgtgcaggtcaccatcagcggcgaagagggccatgtgaaagcccgtgctgaatatcataacggtccgaatcagtatctcattcattatctggcagcggatggacgtgggactgatggctggtttgatgaaggtgagctgtccccggctctgccactataa

SEQ ID NO: 287451 - DNA, 528 bp, Morganella morganii
atgaaaagggtaatcactgtattactcaacggctgggtgtgggcggtagtattcttcggtctgtggatgttcagcctgttatcggctgaaaaatcagaagggcagcacaaagacgatgtaatcaccgatcagcaaaaggtgattgataacgcttacaccagcatcgatatctttgaccgcgtgtccgcagcgaacgccaaccgcagcatgcgcatcgaggccaaatcacaggagaagcagattgaataccgtaccattatccggaaagaggctaactgcaatttgtatatccctcagcctgtttctgacgggttgctcagccacgtctacgccatccgtgaatcagcaatgcgttccgctcccggtatcactgacacaaccggtactggctccgctgccacccgccgactgacatactgccaggtggttgagtggatagagccgctgctgatggcactggataaggctaacgggcagttgatggatatccggaaagcggatgctgaacgaaatgggaaaccacgatga

SEQ ID NO: 287452 - DNA, 231 bp, Morganella morganii
atgatcaaagtgccgattgatgacaatacccgggcgggcatctattcatttgtctacaatgtagggtccggtgcgttctcgcgttctacgatgctgcgtaaactcaatgccggtgacatcgccggggcgtgtgacgaaatgaagcgctgggcgtttgccggtggtaaacagtggcagggtctgattaaccggcgcgagacggagaaagcggtatgccacggaaccctttaa

SEQ ID NO: 287453 - DNA, 591 bp, Morganella morganii; identical to SEQ ID NO: 99821

SEQ ID NO: 287454 - DNA, 1506 bp, Morganella morganii
ttggttgtactccttctttgggctacaaatggtggtgatactttgaaaacaactctcaaccaggcttttattatcaacaagttaagtattaatgttaagcctgaactcagtagctctggaaaagtcgttttcgaagccaaccctgaccaaaagccttacatagtttttgacgatcatcgagattcacctgttggcttcggtgtgaaggtcagtttgacgaaaaaaacctatgtaatccagcgaagagtagcctcgtcagatcgtaatgtcagcgagggtaagaagccaagctctgtcttgaaagtaaaggttggaaatgtgtctgattttccgagtatcgatcaagcccgtgaggtagctcgacagttggttcagaccatgatcgcaacaaagagaaatcccaacaagattaagagggaactcgatcttgctgaattgaccgtgagtgaagcttttgcccaatacaggagccacttacttggcagaaccaaacccgctaaaccaaacactctcaatgtgttagacaaagctgagaatcggttgaaagaatggcaaaaccttcggataaaagatcttacgggtactgaaatccttagtaagtttgatgaaattgcttcaagagcaagaacggctgctgaacaaactttccgatgggctaatgttgcagttaaacatgcgattgaaattgaagctggcaatgcccagacacaacaacgacaaccttcgctgtcctataatcctttttcaattttaaaggtacagaagaagttcagaacgcgatctgaactggaggatagctatcgtgccaagggagttcgaaacccattgtctcccaaagataccctgggacgttttctaactgcattacacaataagcgaggttttaatcggttgggttgtgattatctgttgctaaccgttctgattggagcccggaaagaagaaaccgctgcactgtgctggcgagagactctgacagaagaggaagccagaacgacaagctacgtcgatcttgaaaaccgaatgattcgattctacgacaccaaaaaccgtaatgaccatgagttgccaatctgcgatgctacaaagcgaattctggaagatcgaagagatatcgtcaacgataacgaaaagcgagcagataaacgcaaatgggtttttccggctcgttcatcacgaagtaaggttggacactattccgacagtaaaagcctacgtgagtatatctgtcaggaagcaggcataacgaagttgggtatgcatgatctgcgcagaacctttggccgtgttgcagaagagctaacttcatatgcagttgtgaaaaagttgcttaaccaccgcaataccaccgatcctacggaaaggtatgctgtgccagataatcagcgagtttttgaggcacttcaaaggattgagttgcatatgctaatgactgcacctaaattgtataatgcacttttagcatctgcgaagtatccgccattaccagaaaggaaagagggatga

SEQ ID NO: 287455 - DNA, 189 bp, Morganella morganii
atgaaagaaacagctgacaatctggatcggtattacaccgacagccgcgggcggaaagttcatgttgtccggtttgaccggcaaaacagccgggtgattttcatgcgtgacggctatgagcatccgtgttttgaacctctgaaaacctttcaggagcggtatacacgcgtggatgaggtgaaaccatga

SEQ ID NO: 287456 - DNA, 840 bp, Morganella morganii
gtggcggtaacgccagatcgagtgagtcattcgttgccattgtgggttatatgcctcgcgcttactgagttgattgggtatgtggtggagaatggtctgtgcaccgagataaacggcggcgtgattcgcccgggaactggcgtaacagaacaggatcacatcccccggctgaatatcttttttcacccggacaaaaccgttgctctccatattgtccaggtagagttcttcaccgtaccgccaccagtcatcatgccgttcaaaatccggaaggttgatgcctgtcaggtgatacgcatcccggaacaggctgtagcagtcggtcacgccgtgcacaaactggcggcccagcagaggcggcaccggttcatagcggtggattttttcgtcacagaccagcagccacggcagtccgctgtttatctgcatggtcctgtctgcactactcagatacggctggccgcccgggtgactgtgaaccacagccacaacctcgccctgctcaccggcacggataaaatcgtcaaacccgacagtaaaatggtgttcaggatccggagactgattccggcacggcagatactgctccccctgctcattacggataatcaggccgcacgattcccggggcgcatccgcctgagcgtgcgccagaatggcgtgtttaatcatggaaaccctctgaaatgctatttgctgagacgggaagtggagacaaatgccccgatacgtgactggttgttgcggagtttgcagtccggcagtcgtttgccgcatttgtcctttgccgggtcactggttggtttaccccattcatcagcgaccggcggacccgcgtaa

SEQ ID NO: 287457 - DNA, 645 bp, Morganella morganii
atgagcatttactctatgaagagcaacagtaaacaagcagaaactgttgatcctaaattcgttttcttaggggaaacctacgagtttgttgaaactttttcaggcgaagtcatcgaatcatttaatgaacagatcttagtaaggaatgattcaggtgaggaaacaaaaatttctgactacggtattacattcaggaattcacaccgcatccataaatatgagttgcgccaatatagtggatatgagcggtgtagtgtaaattacgatgctctgatcgtaaatgagaatacaggtgagtataaagtaaatttaagcagaaaactcattgtcatacctgcattcatgacaatgttattaaataatgtatcaatggcatcacactacaaagtgatgcctgttcccaaacttttttatatccttttcactttgctttgcttagcttctttcattgccttctgtattttacttgcaggatataaagatgggtatattttcaatgaacacaaatatgagtggttaacatatctcctatctcgctcagcaacttttatctgcatccaatggatgaaaagaaaaagttcaaggtttgataacgaaatcagaaacattatttataagttagttaaaaataaaacatcatcataa

SEQ ID NO: 287458 - DNA, 1227 bp, Morganella morganii
atgaagggaatgcagaagattaaaagaggaaaatgtttctcaggaattattcactatgctttgaaatcagtatctcatcataaaactgtaccaagagtaatcggtggaaacatgctgggaagctctactactgagttaatcgatgaatttaatacagccaaaaagcttcgtgaagatatagtaaagccggtgtggcacaattcacttcgattaccaaaagatgatacgcttacagattatcagtggtctaatatcgctgatgattacatggcacgtatggggttcacggaaacacatctaaaatgctatgttctacatgatgatattagcggtcaacatatccacattatcgcctgtcgtattgatctcattgatggcagagtctacttaggtaaaaatgaaaatctcatcagtacacgtattatccaagaactggaagaagattataaattaactcgaactagagggccatcagctattggagcgcaatcatctaagtcgaaaaataaaaaaagtcgtggtgaggatatgttggaaaaaagaactggtaagccatgttctaaagtcataatccaggaagctattgaaaccttgcttgtcaaaaatatttcgactatagaatttgtacatcaactcaaagaaagaaacattgtagctgttccaaacatctcatctactggtcgtatgaatggcttctcgtttaaatatggaaatatggctttcaaagcatcgcaattaggaaaaatctactcatggtctgctctacagaacaggatcaattatattccagatcgcgacaacggttttcttttaaatttaaaagcatcttgcagtgaaactcttgatatgatacctccttctggaattgtaatagaagaggttaatcccacgatagaaatgcttgcactttgtaaaacttctcatgacgatagatacgacactgattataccaaagaatgtatctcgacaattcctagtaatagcgaaggggtgttaactgatgctccaaaattaagcttagaaatacctaagtttagatggctagaaacaattccctatattgatgcagttattagtctactaaaaaacatcaaaatactaacacttaaacgtcccaaaaaccctagtattatcagcaatataagaattgcgaagatagcccctttatgcctcgccacaacagctgagcctgtctcggtacaccgcaaacgatcaccatcattgtag

SEQ ID NO: 287459 - DNA, 147 bp, Morganella morganii
atggaagtatcaactgataaatcaggcaatccagtagttatcatctacactccgtttattaccagaggtaaaaaacggtgctacaaaaaagatggcggcaaatatcgcttagagatccctctgagtaagtacaagccacgtcaatag

SEQ ID NO: 287460 - DNA, 567 bp, Morganella morganii
atggctaagcctcgatttttagctaataaagtgtcccctctatcttctgagttaatatgggatcttgcatctacagtcagaaaaggcgcatgtgatgcgatggagatcaaatcggcgcgtattgatgtggtatcagctttagagtttctgcataacaacgaaactattactatgattatcgttgagccacatgagatgccatccgagtatgccgtcgcatcaccaacaaccatggagttatatatcagggaagatacctactgcaacgcagctaatggggttccgagagatagatttacactcgcccatgagttgggccatcttatcctgcatcaaaatgcacctcagcaatacgcatctgcccgctcgatcatatcaaaccatcattatacagaggatgctgaatggcaggctaatgagtttgcagcgatgttcctaatcgatagaacaaataagccagcaatacaaaccccacggctaatagccgaaacattcggagtgagctttgaggttgctggtattgtatggaggaaactccatgatggaggttatatgcagaggaactaa

SEQ ID NO: 287461 - DNA, 351 bp, Morganella morganii
atgagtgtgacaccgttaggtaggctgttaaggaatatccgtaaaagcacacatgaactgctcaaagacatggcttcagcactcgacataagcgttgctcaattatcagccatagagttaggcaaacgcggtatgtcgccagatgttgccgaaaagctacttgctgcgtatgacgtccctgtaaatagagagcagctatccattctgattgattcatctcagcaggtttataaagaggattttaaagatgctaccgaaaaacaacgcgatgcctttgtattatttgcaaggaaatacaaagaattacctgaaacagaattgaataccatcttggaaaaattacaaaaataa

SEQ ID NO: 287462 - DNA, 255 bp, Morganella morganii; identical to SEQ ID NO: 99903

SEQ ID NO: 287463 - DNA, 861 bp, Morganella morganii
atgagaaaagaaatatataatgaggataaatacaagagccaaatacaaaaatatgctctatgctgtgatgattttaatgatggtgtatacaggaaaccgagagagaaagctaccttaaagaaatatataggatataacaataaatattttataaatggttttgtttttgatgtggatcatgaatatggggcaattgcgtgggatatggctggactgcctaaaccaaatgcgatcatacaaaatacaataaatggtcatgctcatttactttatgctctaaaaataccagtattaaaaacaaactcttcaaaaataaaaccactaagattagcttctgttgtgcagtgtggatttacagaaagattaaaagcagataaatcttacgctgatattctaatgaagaaccctcttaacatctttgaatggagaaccacgtggacagatattaaagcgtatgatctatactatttagctgattttgttcctgatgtaattagaaagaatgatagcaacaaaagaaatatatatggattagggcgcaatgttaatttattcgaagatctaagagtaattgcatataaaaatatactaaaatatcaagagagtaaaaatgagcatgaattttataattatttgtatttaacggctgatataattaacaaacagagcaactctaacaacccattatcacataatgaaattaggcaaatttgccaaagcgtttgtaagtggacgtggaaaaatttctcaaaaaaacagttttcaattattcaatctaaacgagggatgaataatgttggaaaaataaaaaatactgataccaaagaaaaattagaaaaagcattgaggatattattatga

SEQ ID NO: 287464 - DNA, 1056 bp, Morganella morganii
  misc_feature (794)..(803): n is a, c, g, or t
atgaatattataggaattcgaatttctgagaatgtaggtgatcgtcatacagataggtatgatacaagagctatcgctaacggtcgattccacattaattcattattagatggtcatagagattatatcaatggccgcattttaaagaatagaattggtgagttaaaagcacaaaacatcttagttgaacgtaacgataactcatggataatgggtagagatcataatcctacttataaaaaaatatctgagcatacagtagctataatcggatgtggctcagtcggttcatctatatcgaggctgttaatacaatctggcattacaaaaataatgctctgggatgaagactctatgaaatcagaaaattcttcacgacatctcctggggttcgattctgttaacaaaaataaagcatctgctctcgcatccaaacttcgtttagaatttccaaacaccagtatagagtattttaatgaagaatggtccgaaaatgctgaatcaagtacaagaattactgaggctgaccttattctaagctgcacagccgattggaataccgagcaacaactgttaagtaaacaatctcagtgtaatttgggcgttcttgtttttgcttttgttgaagctcatgcaatggctggacatgtaatagtaaatcaaatagattctggtgcctttaatgcctggcattacacacaaggtgaaaaaataggtgcattgagatatcctgctacatattggaaagaaaatacaaaaaaaagaattgctgcttgtgctggagaatttcagcnnnnnnnnnnatttcagccttatggagcgatacctttagcaaacttacattcacttgctgcaagaacaataattgacttaatattgaatagatttcctgacagttcctttgcatatagctatcttggtagacaagaagaactggtagaacttggtggtcaatggaataattgttggataaataaatttggcaatccaaataaaggcgatcgaatcatttctttgatttatgaaaactcaaattggatgaataacgatgcataa

SEQ ID NO: 287465 - DNA, 546 bp, Morganella morganii
atgaataaaagtgatgaaaaccgttcaagctcaggaataagtattctatggcctgaactaaataaccctttctttattgaggcgttaagtgcctgcgaaacaggtgaaagttataacaatgcctcagcagtaattagatatagcctcaataatggtgccagcataatgtggttaggagaccttgaaactgaatttatggaaaatattgccaatgacatacacttagaaaaaaccacaattgtttttgcagcacatcatggtagaaagtcaggaaaaataccagattcatggctgaaaaagttagatcctcaatatattattatcggagaagccccatctcgacatttaaattattataccggataccaaaaaataacccaaaacagagccggtgatattacaatgaaatgcatcgatgataaagttcatttttacgtatcgaatgcagcctatgaaaaagagtctttgagtgatgaacaagtatatgacgcatctctcgggtactacatcggctcacttacagtagaaaaagaatatacgttatag

SEQ ID NO: 287466 - DNA, 315 bp, Morganella morganii
gtgctggcaatcggatggtggaaccccggcggctgggccatcgggggggcgctgatgtcggccggtgcggccatgatgctgggcggtgtggcacagatgctgacaccggtagcgaaacagccggatatgtcgcggggtgaggaagagaagggtaatacctatttcagtaacctcgaaaataccgtggcgcagggcgtggccgtacctgtggcctacgggcggattatgtgcgggtcgcgggtaatttcacagtccattgagattatggatgacagcgacggcaccaatattgatgccggtaaacacggcgggtaa

SEQ ID NO: 287467 - DNA, 6333 bp, Morganella morganii
atggatagtcacgggatacatatcggaatcctgacacaagacaatgattacccaaatgatctttattcagataattcagtggagattgagatagggaagcactacagcatcccggtgatgataaatgcaaagataacaccagaagtcaatatttcggtttacaccaagaattacagacattggtatgggcacactacatttgctattgctatcaccagaataccagccctcctcccgttcaacaaaaccctgcgccttgccaaagcctgtggtctcagtccactggacacataccgaaccctgcgccgtctgcgttacaacaataacgaaactgatgatattgtattacagcgcttcaccgaagccctgcactaccgtaaacgctacgggattgatactgaaaacgcagtagtattgtgcaacgctaaaatcaatcaagccagctatgacgggcagcttagccagtttgatcgcctgtttaataacccgccgctcaacggtatcgtttatagtccaagtgacgatctcattccgatgaaaccggatggtgaagatcctcgtcgcgacgtaatgaaacgggctttcagggtggataacaccgggctgtggcagatttttgatatcactgcgcgcgatgacggcgataaaagagatcgcaataatattgaaaacctcagtgacctgctgctggtcaggttactggccgatgttcacaacctgactgtcacacaattagataccctgttacgggtttcgccttacagcgaaaccaatatttatcagataacggaagaaaaactccggaagctgattaccttcctgtaccaaaccacccaatggctgacagcacagaatatcaccgctgagcaactgtccctgctgctgacaaccgatgccccggcggtgccgaccaaagagatgaacaccctgctggatgccctgcgtaacggcggtattgacagtactgatgccgataccctgctcgcctccatggcaccggtgattgctgccgcgatgcagctggaaagcccggaacagggggaagccctgctgcgctggctggataataatcatccgtacaatgtgcctgttaccaaagatatctggccgctgattaccaccgaagaaccgtctgcggatcagcagaaaaaaatcgccgcctggtgccaggcactggcacagcgtgtgctggttatccgcacctttaccttcagtgatactgaactgcagatattgtcacagggcgcaccggctgattccgttgccgcactgcgcgacatcagcgatttccataacctggtcaaccgctgcggtgacaacgccggcaccgtgctggatgccctgcaggacaacacactgacggtggcggctctcgccggcgccctgaatctgtcagagtccgtgattacccaggcactgacacaggccggtcagaaaaccgaactcaccacctggcagcagttagccacactgccgtcacggctggatctggcagatacactgcatatcaccccgaaagatatcactaatctgctgaccgtttctgacaatcccgccccgtcttatgcggagctcaccaccctctccggtctgttacagtccggtctgaatgaacagctgacaacacagctgaataaccggattcagccgcgccgcagtgaagccctcagcggcgaataccgcacccgcattatgggtaacgccaccgcaaaccgcgatgatatctggcgtgaactgctgattgacggcaaagtcagcgcagacatcaccaccacgcggctggcggatgccattgccggtattcagctctatgttaaccgcacgattgccggtgatgaacccggcgcaatcagtaccgttctggcgcgtcagttctttaaagactgggatacttataacaaacgctacagcacctgggccggcgtatcacagttagtgtattacccggaaaacaccatcgacccgaccctccgtaccggccagaccgggatgatgaacaccatgctggagcagctgtcacagagtgagcttaacagcgataccctggaggacggcttccgccagtatctgaccgcctttgagcaggtcgctgacctgaaagtcatcagcggctatcatgatactgtcagtattgatgagggtaatacctggtttgtcggcaccagtcagactgaaccgaaaaaatattactggcgtaaagccgatcacagcaaatgtcagaacggccattttgccgccaacgcctggagtgagtggaaagagataacctgtgccgtcagtccgtatcagaatatggttcgtccggtggtctaccgttcacgcctttatctgttgtgggcagaacaacaaatacgcaaagacagggacggtaatgacgatattttgtcttataccctgaaactgactcatataaaatatgacggcagctgggcatcaccgttcagttatgatgttacgccaaaattcagcgaattaaccgggcaggatgtggggttatattgcgctgctgattatgaaaacgatatattatcgtgtatcttttatacaaaagaaacagagggcgacctgcatcagagtacagttacccccaaagaatatgccgggttacatattcttgcggatatggagcaaacaccgttcctgggtatagacagtttcattaaaacagtaataccgcagctggataccgttaatatatcccgtattaataccacactggaaaatatgaatgcgccgaccctcgatccggaagaacaacagggtagtccggatctggctctcggacttgatctgatcagctataatctccggaaagaagatcaaaaatactttctgtctgtcgaacccgttgccgatgtgacaatcaatgtcagcacaataccggaaccgttacgtcctctgtttgcagataaatattcaggcggaaattatgccttatatgagttcactgatacgtctttcagctcagaaaatacggatatccccgggggaaaatgcagtctttatattctttgtgatgaacccggttcaaccagttatgtatacctgactctcccgtccggtaacaaacaacctgaccttatcaggcacctcttgctgctggcagaagttgattccgaacacggctctctggacgccataagacttcaatgggaaaacagtgacagtgagtatcattattttagttccgtgacgagacagggatttactaccccgttaccggactctccggcctttatagcagatgaaagaaccggccataatataggaaagttagacaaaattaaacctgagcttattttacctgaagactacccggcctgccctgaactccgtattattaatggcgatacaacagtgctggaatttacccaatccggtaccccgaatcatccggcggtgttatccgacggcagtttttatttcgacagtacatttagccgtcagtccctggatgtcacggcctttgttaaaaataaccaactcaatttaccgtttaaaattgattttaaacgtgtgagtaatgcgaaaatcagcggaagccgtcactataatctgacgatgaaagtgtcggctggtgattcatctgcagcaacagggtctgcggttatctccctgcataccacgccggacagcgcccggtatatggaatgggacgcgtaccgcacccgcctcaataccctgtttgcccgtcagttaattgagcgtgccaaccgcgggattgatgcggtactgtcaccggaaacccagaatctgcgggaacccaaaccgggggaagggacctatatcacactgacactgaaaccgtatgacccggcgattcatggcagtgaccgcagctttacgatttatcgtactgatgtcttcgtttctggcgacgcatatcctgttattgatggcacggtaagtacagaaacatcaaccacggttaatctgtttatcccgcatctgggatataacgataaaaaaatattccttcatgcacattttcagagcggatatcaaaactggattaaatttattcctgacggaaacggtggctggaaattagacaccgactataacagcaccttccccggtctggaatctgtctccggcctgtcacaacccgatgaaccgatggacttcagcggtgccaatgccctctatttcggggaactgttctattacaccccgatgatggtggccatgcgcctgttacaggagcagaactttactgaggcccaccgctggttaagctatatctggcgtcctgccgcaaccggtgccggtgactggcgggtccgtccgctgctggaggataccgcctggaacgccgacccgctggattcggttgacccggacgcggtcgcccagaatgacccgatgcactacaaagtcagcaccatcatgaaaatgctcgacctgctgattgcccgtggtgacagtgcttaccgcatgctggagcgcgataccctgaatgaagcgaaaatgtggtatatgcaggcgctggggctgctgggcgataaaccggtcaccgtcatcagcggtaactggaataacccggcgctcagtgaggccgccgatgatacccgggaacaacagcgccatcaggccatcagcgccctgcgtcacggcggtctgatgccggaacggcattccgccaatacgctgaccgggctgttcctgccacagcagaacgaaaaactgctcggctactggcagaccctggacatgcgtctgtttaatctgcgcaataatcttgccattgatggtcagccgttatctctgccaatctttgccgctccggccgacccggcagccctgctcagtgccgctgctgccgcatccggcggaagcaaagcgttaccgtctgccgccgtcccggcaatgcgcttcccgcaggcgctggaaagtgcccgttcgctgacaggtcagctgatgcagttcggcgccaccctccagggactgattgagcgtcaggatgcggaagccatgagtgaactgctgcaaaatcaggccggtgcactgatgctctcttccctgcgtatgcaggagcaggcactggcagagctggacgccgagaagaaaacactggaacagagccgtgccggggcacagtcccgttttgacagctaccgtgccctgtatgatgaaaatgtcagtgccgcagagcagcggacgatggatctgtatctctcttcttcggtcctgagtacctccgctgaagcactggcgatggcggaagccgttgctgatatggcaccgaacgtcttcggtatggccgtggggggcagccgctggggcggtatcccgaaagcgattggttccggtatcagcctcgcggcatccgccaccaaaattaccgcagacaatatcagccagtctgaggcatggcgccgccgtcaggaatgggaaatccagaaaaacagtgctgaatctgaagtcagacagattgatgcccagctggacgccctgactgtccgccgcaccgccgctgaaatgcagcgcgaatatctggaaatccagcaggcacagactcaggcacaactggaattcctgcagcgcaaattcagcaacaaagcactctacagctggctgcgcggccgtctggcggcggtctattaccgcttctacgatctgaccgcggcccgctgcatgatggccgaagccgcttacggatggcagaccggtgagaccacccgctatatcaaaccgggtgcatggcagagcgcccatgccggactaatggccggggaatccctgctgctgaacctgaccgagatggagcaggcatggctgaaatgggatcaccgcgcactggaagttacccgtacggtgtctctggcagacgtgtacagcgctgataaggtggatctggccgcgaaaattgccgaattactgacaggcagcggatcaggcagcacaccggcggaaaccgggctttcactgaccacggataaacagctgcatgctgcattcaacctgaaagcactgaatattgcggaggattatcctgccggactgggtaaaacacgccgcatcagacagatcagtgtgacgttaccggcactgaccgggccgtatcaggatgtgcgtgccgtgctcagttacggcggggatgtcagactgccggacggctgcaaagccattgcggtctcccacgggatgaatgacagcggtcagttccaactggatttcagcgacggccgctggctgccgtttgaagggatcgcggtggataatgacagcagtctgaccctgagcttcccgggggcaacaactgataagcagaaagcgctgctgctcagtctgagcgatattatcgtccatatccgctacaccatccgttaa

SEQ ID NO: 287468 - DNA, 924 bp, Morganella morganii
gtgacgcaccatccgtcaaaaagctgcctgtcactggaatttaaataccgcggcagctataaagaaccggaaaccgcacaactctcctgttttcttgatcccgctgtctcctccgccggtattttattattgtggctgagtcagtattttgatcatatcgaactggctcacggcgatatgctgtatcacggtgacgaaacccggttcagctttattcctcagatcggaaaaaataattcggtattagaaggagcagaggaaaaaccgaactggccgcaaaaactgctggaagggttatatatcgatcatgtgcaccattttatcaatattgatgttccggcgattgttccggaacttgactgggcattatcagacaccttcacactgaatatttatttcagcaaacagctgccgctgcgtaatgatcagctgacaaacagttttctgcttaattgtgccgccgtggtgaatcaggaagaacaaaaagaaatcatactgaattttcatgaaaatgaagcggtttaccgtctgccgctggatgatgcccactacattacggaactggaacatattcagctggctttcgagcctcacgaggaattccgcggcgttgtcgctgacttctacccggtaacacacctggcaccggcttcccgcctgctgccgcaatatcaggatgcctggttttacgcgctcagcatcgataaaaccatcaccggccagaatcattattatatccatttttatgataatcacggtaaagcactgaccgttctgccgggcccgcattccgctgtacttaccgctgtattatcagtgcaccgcaaagccgtgcggaggatatctgccatctcagcccgctgctgccggatctgctggaagccaccggtatcacacaatgcacgccgtgctacccgccgataa

SEQ ID NO: 287469 - DNA, 387 bp, Morganella morganii; identical to SEQ ID NO: 275530

SEQ ID NO: 287470 - DNA, 384 bp, Morganella morganii
atgaaaaaagcgttattagtgattagtttcggcaccagttacgcggaaacccgtgaaaaaaatatcgaaagctgtgaaaagcagcttgcggcagcgttccccggccgtgattttttccgcgccttcacctccggcatgattatccgcaaattaaaagagcgcgataacctgcatatcaataaccctgaagaggcattacgccatctgcacgagcagggttatgaggatgtggctatccagtcactgcatgtgattaacggggacgaatacgaaaagattgtcggccaggttgaaaaataccgtccgtttttccgctatctgcgcgtgggcaaaccgctgctgagcactgatgaatcccctaatgattttggtaaaaatcattaa

SEQ ID NO: 287471 - DNA, 246 bp, Morganella morganii
gtggatctgaaacggtttatgtcagatgtcagtttcacatttgaacacgattttatcgaaaaagtgatttacattaatctggaatcccggccggatcgcaaagacgatattctggaagcactgggaaatattgaaatcccttatcagaaaattatccgctttaatgcggttgagaaaacaccgggatttctgggatgtgcgctttctcatgctgctgtgatgaaaatgatcatgaaaaatggctga

SEQ ID NO: 287472 - DNA, 681 bp, Morganella morganii
atgattgagttatcgccaagagctaaaaatattattttttggatatcaactgcatcaatatccttaattatatttgggattttcattatagatacatttgtcaccgatgctaaaggaaaagataaattgagcattatcttttcctatctatcaactgtattcgccattttgtcttccctaggtatactttccactatcggtgtttatttagctcaaaaaaaacacatccatgaaaccaataacgagataaagtcatcagttttaaaaatactgaccgatgctgttaaactaaatgacaatttcatagaatttaccaacaacgatacaagaaaaataaaaagcataataaaaaacaccaacagtgactcaccagttattgaatcatcattatcatttatgataacaacaaatgatgaggattacctgcatttatataagctaacggataacggtttgtcaaaaatcattcataatatatatcacctggactaccatttatttgagcaaataaattacttattaataataatgcaaatagcaaacaataaaataaaaacggcaatatattcaaaaagaaaccccgatgataaagtttataatatcatagaagctttagattcatacagaaagcgtcaaatacaaataataaatggattaaaagaaagaggatacttgatttag

SEQ ID NO: 287473 - DNA, 684 bp, Morganella morganii
atgaaagaacacggaataatttttaacaccgagatgatacgcgccattctcgatggcaggaagacgcagactagacggattattaaatcagttccgacaactcacaacttccacggctggattatgtccagcacatgcgcgaaagatgaaggtaaagccgtctgggctatcggggattcacctctacttaaagacccaattcgccttaactgcccacttggaaaaattggtgatcggctgtgggtgcgtgaaacatggcagggtccgctggttgattatgaaaattccaataaattatataaagacccggaaccatttcagacgataaaaaactgcgtatacaaagccgatggcgatgcatgtcctgagtattttgatgctgacgataaccttaggtacggatggaaatcatcagcacaaatgccccgctgggcttctcgcatactgctggaaataaccgacattcgtgttgagcggctgcagaatatcagagaagaagatgccgtagcagaaggcgttgcgcctttgcacggtggttactggaagcattaccagcctggctggactcagcaccagcttagtgcgagagggtctttcgtaacgctcaggaattccattaacggggaagatgcctggtataaaaacccgtggatgtgggtagttgagtttaaaaatgtgagctaa

SEQ ID NO: 287474 - DNA, 342 bp, Morganella morganii
atggccaaaaccccagccgaacgcaaagcagcgcagcgtaaacgtcagcgtagcgcgggcatggtaatcccgcagtggcagattgaagccgaagaacatgagatgatcaagcgcaactgtgtgctgcgccgtccgggtcgtgagccgtacgacgaggctgagtatattcagatgttgatacgcaacgatgatgcacggcttaagcgtgagattgcggagctgtcaaaacgctgttgtggtaagtgcggtgaggcgctgccggtcgctgagtgttgcctgtccggtgatgctgaatgctggaacaccagagggtggcatgagatgaaattgatagtatcataa

SEQ ID NO: 287475 - DNA, 1908 bp, Morganella morganii
atgataaagtaccgtgctgatattgatgggcttagagccatagcagtgctgcttgtttttgcataccatctaaaaatatctgtatttagtggtggttttgttggcgtggatgttttttttgttatatctggatatttaataactggtataatattaaatcctatagctgaaaaacgatttagcttgttgtcattctttaatagaagaataaaaaggataataccatcagttgcagttgtttcaaccgcaactgtgattgtgtcatacttcatattattgccatctgattttaatgaattaataagaagttatttatatacatcactatactcagctaatattttctttcagtctgtaacttcagggtatttctctccatcgtctgatgagctacctttgttgcacatgtggtctctttctgtagaggagcagtattattttatatggccattaatgttattaatggtgtttaaattatcaaataaaaaatcactcggtgtaataacattattattagcaattatatcatttgccattgcagaaattacatcattagaaaatcagtctttttcatactatatgctacctacacgagctggtgggctactaattggttcagcattagccataatgcaaaaagataatgattcaatcagaaattataactcaaaatatactgttttgattgggcttattttgattttcggctcatctatatatattgacaccaataatacctttcctggtatattatcagcaataccatcattgggggcattttttgttattcttggtggctctggatataaaaataatttaatttcgaaaatattaagtctaaagcctgtggttaccttgggtttattatcatttgggatatatttatggcactggccaattatcgcattaataaactaccttagtataactataacatataaggttatattttttatctttaccttgacagtatctctttccgcactgagtatgatttttttagaaaatccaataagaaaatccaagttaacatttaaaagttcattcattatattaaacttagcatttgtattaattggtcttatcctattaatcatatcacaagtgacaaatggattttcatacagatttaatggtgacgacttaacattaaatagagtaaatgtatcatatgctgaccttgatgccggatggtgccatgttagcagtgaaaaaacaaatgatataaaattcaatagcagtctatcgaattgctttattggtgataaaagttcaaataatactgctttattcataggtgattccactgcaggtcattatggcccattcattgataagttagcaaaggatgcaagaataaaagttagacaattaagcacatcctcatgttacccgtctgttaatataaaaaagaatggagagaacccagatgtttgctttaactttagaaagataataaaagaatcaattgattcacataaatatgacatagtgatcctatcaaatagatgggtgcgtgactctgctgattcatcttataaaacatcatatatttctgatactatctcgtatttttctaataactctaaggttgttatcattcttggtcagttaccagaatgggaaatagatccagccctttgtattaaaagaaaaacttgctcgccgtcatccgattttaaattatcaagtgatatagatgcagttatgaacgatataaaaaaagtagcaaagagtaaagataatgtgattatcattgacccatcttaccttctcaaggttaatggaaaatacactccgtttgctatggggtatcctatgtatcatgaccgaggccatttaagtattaaaggaatggaatggctatcagaaaagttcatctctgaaaataaaaaccaattaaagtaa

SEQ ID NO: 287476 - DNA, 282 bp, Morganella morganii; identical to SEQ ID NO: 274300

SEQ ID NO: 287477 - DNA, 1143 bp, Morganella morganii
atgaaacctcagttattgataaattttatcagagatatttatcaaagtaacgattttattccattacatgcacctaccttcaatggtaatgaaaaaaaatatgttaccgaaacggttgatagcacttttgtttcaagcgtcggagaatttgttgatgattttgaaagaaaaatagaaaagttcacaaatactccacgagctgttgccgccgtaaatggaaccgcagcattgcataccgctatgtatatggctggagtaagacatggtgatcttgttattactcaagccttgacattcgttgctacatgcaacgctttatatcatatgggagctcagccaatcttcgttgatatctcgcctatcagtcttggattatcccctaaagcagcagaggaatatttacagcaatatgctgagctaacagatcatggctgcattcataaagtaacaaaacagcgtatcaaggctattgtgccaatgcatactttcggccatccaactgaactagatgagttagttttgctatgccagaaatggcagttagttctggtcgaagatgctgcagaaagtctgggctcattctacaaaggtcagcacacaggcactattggtaagtttggtgctctaagttttaatggcaataagatagtaacaacgggcggtggtggcatggtgctatgtgcagatgaatgtgcgggaaaacataccaaacatgtcacaacgacagctaaagttccacacccatatgagttctttcatgatgagcccggatttaattaccggatgccgaacattaacgcagctctgggttgtgctcaaatggaagcattagataattttttagtaaaaaaacggaatttagcaaaaaaatataatactttcttttccaactctgacttcatatttgtaaaagaaccatcatatgccaagtctaattattggttaaatgctattatttgtcctgatattatgactcgagataatctattaaacgaaacaaatcaatcaggcgtaatgacaagacccatttggaaattgatgcatacactcccaatgtttagtaattcgttgcgtggagacttgcaatactctgaatacattgaaaaacacttaattaatttacctagcacacctatactttaa

SEQ ID NO: 287478 - DNA, 2142 bp, Morganella morganii
ttggttgattctagaaataaaaaacttaaagaaataataacaagagaaaacattgatgaaatatttaagctcacctataccaatgaaattggagaagaaagagattttaatgaaataaaaagtagtgagtattttgacttacttaaatatcttattcgtgatggctatattgatgaaacctacaccgactatatgacctatttttatgaaaatagcctgagtcgaattgataagatgtttttacgcagcattaccgatcaaaaaggcaaagagttcacttatcaactcaagaacccaaaactggtcgttgcccgccttcgagaagtggattttgaacaggaagaggcgcttaattttgatctattagcttatctgcttcaaacgccagcccaagtaaacttaataaaacgtttattcaaacaactaagaaaagatagaagagttgagtttattcgcggttactttgaaactgagagggctcagcctagcttcattaatcgattaaatacgcagtggcctgagtttttttcttatgcgctgacagagagtgaattttctgctgattgggttaagctctactctataggcacattttattattctgccaataacaccattgaggcgattaacattgataattgtctaactgattacctctctaattcggaggattatttagcaatatcagagccgaaggttgacaagttaattagtggttttaagttgcttaacgtctcttttgtcagtattaaatttgaaaacgcaaataaagtactctttgatgcgatttatcagcattcactttatgatattaattttgccaacctgaacttaatgttgagtaaggtttatacgcttaacagtgaggatgatattcgccataagaactatacactagtgatgtcacagcctgattctcccttggctagttatgttaataaccatattagtgattatctggatatggttttatctagttgtgatggttcaatcttggatgatgaagccaatgttttatccgttcttaataatgagaaaatatctgatgaacaaaaaggccagtatataaactatttgcaaattttagtgacctctctgagtgaggttgagagcgaatccttatggtcatctttgttggataaagatagagcagtttgctctgaggaaaatatcgtctcttattttgaacatgttgatggactggatgactcacttatcgaatttatcaatagaactgatgcagagctaaattttcaaaatattaacattgataatgagcttaaaggtaaattatttaagtcgattgttatctgtaatgatttatcaaatgataaatatgaaaaattaatttgttcactaaatcttatttataaaacctcctttagcgccagtaatattccgggtgataaattcaaaatattagtggacaaaaatattattcgtatgagtatttctccacttaacttcatacgagataactattcggagtaccttttctattatattgataagaatatcagggcatacgttgaattaatgacgattgataactttattttggatgaggctatatcaatactttcttgggaagttgatgatgatttaaaatttaagctactcgagtttgttaaaacaccgttggctattcatggtaagaattaccatcaggtcgttaatgactatattttagaaaataattttaaaccagatgaacttctaatcttgacgtcatcttataaaacttggggaacctctactcagtcgctcatcttgagtcgagcaatacagaatatatcagcattgatagcaagccctaatgatgtttctgaaccgttactaaaagacctgtttgtcgcagagggactgaatatacagaataaaatagcactgctaatcgctttgttgccgggtaaggatttgagtaagacgacttgcaaagagtatcttgatctgctcggtttatcggagttcagtaaaattttggggcgaggcaaacctaaaattgaagttgattcaactaatcaaagtttattaacagcattaagagataaccacttcttctctgcttttgaggtggatgaagaaaatcctacttattataaaataacaaggcggcgctctatgtttagctcagatacatag

SEQ ID NO: 287479 - DNA, 609 bp, Morganella morganii
ttggttattgatgatttttttgaaaagttaatgaaacaaaattcagatgaagaattatatgacttctgtcggaaatatgtgttacatgggactccgcatgtctttataaataaagaaaatgaatactatgagtttagaaagaaaatagctactaaatttaatatttcatttcatgaggtttatattgcaggatctgctaaactgggatttagtccatttaaaaagaaattatttgactataactctgacattgatgttgcaataatatcctcggaactttttgataagtacatgggagatatagcaggatatcaagagaattacaataaggctaagtatgttgtcagagagaaagagctaaacgcatatcataaatttctagaatatatagttattggttggttaaggccagatatgttacctatttcattccaaattaaagcgatacaagatagctggtttgaatactttagaagtatatctcatggtaaatctgaagttggcaattataaagtgagcgccggtgtttttaaaagttatgatcattttgaaaaatatattattagtggtttcaaaagcttaaaaaaatctgttaatgtaaggaattaa

SEQ ID NO: 287480 - DNA, 987 bp, Morganella morganii
atgacaaatcaaataaagccatcagttacaaatccaacaattgctgatatttatgaaaaaatagatgcaaaaaggttagatttatcacctgattttcaaagaaaattcgtatggacacaagagcatcaggaagaatttttggatactattctaaatggatatccatttccagaaatttatgtttgtcaaggagaaactgatgctgtaaaattaaggacttctcaaaaggtcattgatggacaacagcgattaacaacaattaaaaattatatagaaaatactttcgataaaccacttagtctcgttaaagctttttcatcattaaatgaaagtgaaagagaagactttctgaattatcagattgttgttagagatattgggaaggtaagtgatgtacttattagagagatttttagaagaataaatctcacgaaatttaagttggaaagtattgaaatacataacgctatatatgatggaaaattcatccagttagctaaagaattagctagcgaaattgatttggaaccatatggtgttttccatgaatctgaatttactagaatggcagatatacatttctttttacttgtaatgtcaacattacaatgtggagggtattttaatggagattcagagctggaaaaatgtatcgctgaatataatgaggagtttagtaattataaagatattagaaataaaattgaacgttcatttaataagatatctaagctaaaactcaatgatgactctatttggtatcgtaaatcaaactttttcaccttagttgttgaattatcagatgttaaatataaatcctcggggttgaagtccagattattaaagctggaagagaatatagtggagaatagatacaataaggatagcgagtttggggtttattacggatatatgtatgcaggaacaaataatagaaaagccagagtgactagagctgagatatttgagaaatatataaagatataa

SEQ ID NO: 287481 - DNA, 1227 bp, Morganella morganii
ttgtcttacactcagggctatggctacgattatgaacgtgaccaggcgaccgatccggcggccaaagatattgaacgcgagaagatgaacagtatcttccatgatattaccggtgcggtcggggaaatacaggcgttcggtatgccggtgtgggcggaagaaggtaagtcctatgctatccgcagtatcgtgtatcacaataaaaaagcctggcagtcaaagattgaaaataataataccgaaccggctgccggtaccgcatggacggaactgaaagctgacctgaccgccggggaggtcggagcctacaccaaaggggagagtgaccagaaatttcagccgctgggtaattacctgcccgctggttacagctattcgaaagctgaatctgacaccaatttccagccgaaaggcaactacgctccagcgggtaactatgctctgaaatctgatgtttataccaaaacagagggggacggacgttatcaggcgaaaggtaactatgcgccggcaggggactatgctttcaccgcagatctggaaaagaaaccagacaagaacgcggtgactcagacaaccggggcatcaacaacaaacaccatgagtcagaaaacgattacggatgcattacaaaatgccgtcaatatcgacactatttatccgataggtgtggtgatctggtttgcgcagaacaagaacccgaacagtttgtttccgggcaccaagtggtcatacatcggtgaaaataaaaccatccggctggcaaagagcagcggtaataatgttctgagcagcggcgggagtgacagtattacactgacaaccgcacatataccggctcatagtcatagtttttcagggtctacatcaagctttgattatgggactaaatctgggtcagttggttattcaggagatcattaccatcaattatggtcagatattaccactgaacacggcgggtctcctgcagggttaggtgggggcaatggatacttgggggtaacaggctctattcatgggtcacgttcgcctggctatttgtcagtaaccgggtcaaataagcaattaatatcgaacagtggtaatcatacacatactgtttcagtaggtattgggtctcacagtcatacaataagcggaaacacatctaatgcaggtagcggatctgcattaaatataacgaatgtttatattatgttaatggggtggtatcgtactgcctga

SEQ ID NO: 287482 - DNA, 480 bp, Morganella morganii
atgctggcgaccgaaaagcgggactttgaaatagaccccgtcaaccactggccgatactggattcagctccgccacatgatgacatcattatccagccactgacaccaccgcaggcatatcaccagtttatggcgcggtttgaaatgctgatttctggtaaacaacaaaaaactatttcatacataaaaccagaacgcgatcccgatggttactgggtgcatccggatgttccttgtttagaatcgaatcaggaaatagagcaatggtgcgatgaaaacaaccttgaacaccaggtggtgtattgccagaatgacattgataacttccactcactgtggttcagctattttgaagaaggtgataccaatatttcagcgtgggaaccaacaaaaccggatggtgatggctggtttatcgcctggatagcaggaaatgaagacggcccgatctgtatgtgggtcagacctaaaaacctctaa

SEQ ID NO: 287483 - DNA, 315 bp, Morganella morganii
atgtttgaaattgatatccacacggatgcagtacaagaattacacgagttaccagccccattgcaggctaaaatgacccgacagattgataagcttgcagcatacggcacaccactccccgataccaagcctgccagagacggtttctttgaattgcgggtaaaagccggtgatattggtcatgagatctatatgtaccggaaaggaaaacagatttttgccctgaaaatctttgcaaaaagtactgcaaaacgcccttcatccatattaactgccgctgcccggcggttagaggagatgctgaacgatgagtaa

SEQ ID NO: 287484 - DNA, 168 bp, Morganella morganii
atgcacctgcaaggggaggttaaggtcttgctggaaactgaacagcagggtggtatgtatatcatttctatcttgcagatctcagttgtaaaacaggttttcatgcaaaaaacaaaaatatacagaattattttctatatttcgcatttaaattgtttattgaattaa

SEQ ID NO: 287485 - DNA, 1035 bp, Morganella morganii
atggctattttatgttgtaatgtaggatggatggaaaattacagtgggattattggtgatagtataaaaaatggtggggattatatcaaaaagaatgctattggtggagagataattaacttctacccatgcaatggaaatttttatggatatgtaagaaataaagataactttaaccttaaaaggttaacatcagataaaaaaataattaaacaaggctatgttgatggagttgatattatttgggtggcaaataatgacttaaattccgtcattgtaggatggtataaaaatgccagggtctatagtcaacgacagataataaaagatttagaactacctattgttggagatattctaaagaaaaataaaaaagaattatcattagacgatgatgatgaaagtggatattatcgctttgttgcaaaacaagaggattgcgttttactcccaatagagcagcgtacttttttatttcggcgaaagggagctggctttatggggcaaagacccttttggtatgctgattctgaagaatcaagagagttcgtcaaaagtattaaagaatatataaatttaccacatgcatcaataaataacctaaaaagaataacaaaaaatagtaaatcatttcgaaatagtaacattgaacaacgcctagaaactgaaaaagctgctattgaatttgtgtggggatattataccaaccttgggtataatattaaaagtgttgaaaaagataatgttggttgggatttggaggcaagcaaaggagtaaaaaaattatgtatagaagttaaagggttatatggtacaggaagacaggttcagttgtcacctaatgaatatcggcatttcactgaaaaaaaacaaaactatcgattgtgtattgtcaacaatgcattatctaaaattgcgcctaatttatttatttgttattacgataaagacaaacattcctggttagtaaaagaaaactctaaaataaaaattaccttgtctgaacaattatccgtaataattaaactagattaa

SEQ ID NO: 287486 - DNA, 438 bp, Morganella morganii
atgaaaaaaaataacattatcgcgttaaggtgttcaaaagatgcaggaaaaacaaacactattaaattgttttcgcagttattaaaagaaaaacaccctaatgctatcttattggattattatcccgatactccatatgatataaaacttattttcgagattggtaaatttaagattggaatagaaagccaaggtgatccaaactcccgcctctgtaaaagcctggaggaatttgtacaaaaaaaatgtgatattatcgtttgtgcaacacgtacacgtggccaaactgtaaaatgcgttgagtcatatagccattcatataatataaaattcatagataaacataaggagcttgataaaaacaaacaagatgaatccaactctgaatatgcaataaaattattaggatatgtttctgatataatcaaaaattattaa

SEQ ID NO: 287487 - DNA, 309 bp, Morganella morganii
atgactgaatacgttaataaaacatcggcggttgttgaactggatgaacccattgtgcgcggtgaaacagaaatcaccagtgtcactgtccgtaaaccaaaatcgggcgctctgcgtggcgtgcgtctggtcgcactgatggatatggatgtaacggccatgacagaggtgttaccacgtatcacggatcctgccctgacaaagccggaaattatggcaatgtcgccgggtgatctgctcaatatgtcaattgaggtggttaattttttgctgccgaagtcgatgcaggccgattaccggaacgattaa

SEQ ID NO: 287488 - DNA, 489 bp, Morganella morganii
atggcgatggctgcactcggcctgttcgtgtttgagctgcgaaccgtgccgtttcagggaatgcaggaagaaaaacaataccggtttgcgtataacagccgggtcggaaagcgtccgtcctggcaatttttggggctgtccaatgatccgattaccctgtccggcacactctgcccggaaatcagcggcggtaagttttccatgatggcgctggaagccatggccgacagcggaaaagcctggtcctttatcggcggtgagggaaccatttacgggatgtatgttattgagtccatcagcaaaaataaaagtgaatttttccacgacagtgcagccagaaagatagattttaccatcaagctcacccgcgttgatgaatcgctgtctgaaatgttcggtgatatcagcgcacagcttgactcactgactgacaccatcagcggcatgggtaataaaatttctgaccgcattacagggttattatcatga

SEQ ID NO: 287489 - DNA, 234 bp, Morganella morganii
atgaatacattattcagtaaggtattactggcagcggtgatgactttcgtcatccacgggagtgtgcttgcggagaatacaccgaaaccgccggtaacagcacaggtgaatgaggttgattttcagcatcactataaggatgtggcggggcagcggatacattatgtgacggcgggaaaaggcgagccggtgttgctgatcccgggctattccgcagaccatcgcgcagaataa

SEQ ID NO: 287490 - DNA, 657 bp, Morganella morganii
atgacgcagcaaccactgatgcacctgcctcccgtcctgacggacacagtgcaccccggcactgcccagactgctgaccaggcggtcacacatctgattgagcatcgccaccggcggcatcggatcggcatacgcacttcccagacgacgataaaccaccatccgggtccggcgttgctgaccgcgccagggttgcccggtcacctccgtgtctttaaacaatccttccggccgggcaatcccccgcaaatgacgcgccatttcggccagccaggcttcggtaaacgccgtgccccgtgccgccggcaggatatagtcccgcaaggtggccagcgtgacgctcacgtcgtcctcatcctgacaaaaaaactgtaccacccacgggttatcatcatgctcatccaggctgtcctgaagcgcatcctccaccgcatcccggatttccagcagacggtcaccggagcgcccttccgtcggtgccggctcaacggcatacaccgccccgaccgacaccccgtcatcaagcagcaggcattgctcctcatccagaaattccacccagggcaggtaatcaataaaagacggattcgcgtggtaaatcttctgctcatccgcccgggtcattttcccaggacgggaaagcggctgacgggctaa

SEQ ID NO: 287491 - DNA, 8310 bp, Morganella morganii
gtggcgctgttacagaatgacaagggcgaagtactgccgaataaagcagtgaccttcagtgtttccggcctgaaaaatccggaaggtgtcaccatttatgatgcggacggcaacaacggccagacactgaccgtgatctccgggccggacggcacggcgaccgtgaaaatcatcagtaaatccgccggtaaaggattgctgaaagccaaaatgcgtaacggtaacagccgtaccgaagcgatcacctatattgcggatctcagtaccgcaaaaatcaaaacgctcgaattaaccaataacaaagcagtggctgacggccaggcgaaaaacatcgccgtggcaacagtgactgaccagttcgataacctggtggaaaacttcccgttaacagccagagcagataacggcgcaacagttattgatccgaaccagcagactgacagcaacggcctggtcactatccgcttcagcagtgaaacggccggggattccaaactggtggttgaaggaacaggcacctcgaagagtgtgactgcacagtttatcgcggatatcagtaccgcgaagatccagagtgcgatcgtgactcaggatggggcgaaagcagacggtaaagcgaaaaacgaggttctggtgactgtcacggacagccgcaataacccgttagccggtgcaccggtcaccatcaaagtgccgggaaccgcccgttatcagacccagccggtcagtggtctgacagacagccgcggtcagttgcgtgtcagtatcagcaataccaaagccggttctgataactataccttcagcattaacggcgatgatgcggtacgtgcactgaaatttgtggcggatgaaaccacggcaaccattacggacgccagcctggttatcgtcaccaataatcagaaagcagatggtgcggcagcaaacagtgtaagagcgactattgttgatgcttacaataacccggttccggggatcgcggtgcagtttgtcaccgatcacggcgcacttccgtctcagatgcagatcaatacggatgctgacggtaatgcactgtttgaactgacaaatacccgtgccggtaataccaaagtcaccgcacaggttaataccaaatccgcatcaaaaactgtgatgtttacagcggacagctcgacagcggaaattctggcatcgaacctgacgataaccgcagataacagcgcggcggatggctcatccgttaacagtgtgaaagcgattgtcaccgatgcacagggtaacgttgtgccgtatgtggccgttcttttcactgcggataatggtgcgtctccggcttcacaatcactgctgactaatgagcagggtgaggtaaccttcagcctgaccagtacccgtgcggtacaggttgcggttaaagcgaagattaacaccagtgaaccttctgtcactgtcacctttaaggcagacagtgcgaaccctgatgctcagaaatcctcgctgacagctgatccgatgacgatcgtggcagacgggcagacaacatcaacgctgcatttcatcttaaaagatcgtcaggggaacctgatcccgggccagactgtggtcttcggaactgcgctggcgggaacaacggtgagcggtactaccgaaaatccggatggtacttacaccgcgacactgaaaggtgttaaagccggggatgcgaaggtcagcatcacgctgaacggaaaagcgtttgcggttacaccggtcaccgtaaaactgacggcggataacggtaacctgagcggcgataaatcaaaactgactgctgttcctgacaccattgtggctgatggcaagacgtcttcaacgctgactctgagcctgaaagacgtgaacgataatgccgtgagcggacaggaggtcgtattcagcaccacgctggcagataccgtattcggtacggtaagagataatgcagacggtacttatactgccacgctgaaaggcactaaagccgggactgcaaaaatcaaagtcaccgtgaataatgctgtgctggccgtcactgaggtgagtgtaaaactgaccgcagacagcagcaaactggataaagataaatcgtccctgaccgctgtaccggacaccatcgtggcggacggtaacacgacatccgcaatcaccctgacgctgcgggatgtgaataacaacccggttgcggggcagactgcattgttcagtacaacgctgaaagacaccaccttcagtggcgtaacggataatcaggacggtacctatactgcgactctgaaaggaaccaaatccggtaatgcacaaatcagcgttacgctgaacggtaaggcttttgccgtcgcaccggtgacagtcagactgacagcggacagcagcaatctggataaggacaaatcttcactgaccgcagcgccgctgagtattgtggcaaacgacactgcgacctcatcactgacgctgaccctgaaagacgggaacgataacccggttccggggcagacggtgctgttcagtaccacactgggcggtactactttcagtggcgtgacggataaccgggatggtacttatactgcaaccctgaaagggaaaaccgccggtgatgcggcactgaaagtgaccgtgaacggcgctgtgctggcggttgcaccggtaacagtgaaactgacagcggacagcggcaacctggataaggataaatctgtcctggaagcatctccgctgaccatcgtggcaaacaacaccacgacttcagcgctgaaactgacactgaaagatgccaacggcaacctggtgtccggacagacagtattgttcagcaccacgcttggcggcactaccttcagtggcgtaacggataatcaggatggtacctatactgcgaccctgaaagggaaaacggccggggctgcggagatcaaagtgaccgttggcggtaatgcgctgaatgtggcaccggtcaccgtcaccctgacaccggacagcaccaatctggataaagataaatcctcgctgactgcagcaccgctgagtattgtggcggatgatgcctcagtatcggatctgaaactgatcctgaaagatgccaacggtaacctggttccgggacagaccgtgctgttcagcaccacgctcggcggcaccaccttcagtggcgtgacggataatcaggacggtacttataccgcaacgctgaaaggcagaactgccggtgatgcattactgaaagtcaccgtgaacggcacggagctggcggttgcaccggtaacagtgaaactgacagcggacagcggtaacctggataaggataaatctgtcctggaagcatctccgctgaccatcgtggcaaacaacaccacgacttcagcgctgaaactgacgctgaaagatgtcaacggtaacctggtttccggacaggcagtactgttcagtaccacgcttggcggtaccaccttcagtggcgtaacggacaatcaggacggtacctataccgcgaccctgaaagggaaaactgccggtgatgcagagattaaagtcactgtcggcggtaatccgctggatgtggcaccggtaacggttactctgacaccggacagcaccaatctggataaagacaaatcctcgctgacggcagtaccgctgagtattgtggcggataatgcctccgcatcggatctgaaactgatcctgaaagatgccaacggtaacctggttccgggacagaccgtgctgttcagcaccacgctcggcggcaccaccttcagtggcgtgacggataatcatgacggtacctataccgcgaccctgaaagggaaaacggccggtgatgcattactgaaagtcaccgtcaatggtgcggtgctggaagtggcaccggtgactgtcaccctgacagcggataacggcaacctggataaagataaatctgtcctggaagcggcgccgctgagtattgtggcgaatggtacggcggaatccactctgaagctgacgctgaaagacgtcaacggtaacctcgtttccggacagactgtgcagttcaccaccacactggcagataccaccttcagtggcgtgacggataatcaggacggcacctatagcgcgaccctgaaaggcactaaatccggtgctgcaccgctgacggttattgttaacggtaccggactggcagtggcaccggtaacggttactctgacaccggacagcgctaatccggataaagataagtcagtactgactgcgtctccgctgaccatcgtggcggacaatgccacaacgtcttcactgaaactgaccctgaaagatacttacggtaacctgattccgggacagactgtgctgttcagcactgatctggaaaatacgaccttcagtggcgtgacggataatcatgacggtacctataccgcaacactgaaagggaccaaatccggtacagcggcactgaaagtgactgtaaacggtacggaactggcagtggcaccggtgagcgtgaaactgatcggggataaggatcatcttgatgaggataagtcttcactgacagcggcaccgctgagcatcgtggcaaacaacaccgcgacctcgtcactgacgctgacactgaaagatgtgaataacaacccggtgatcggtcagactgtgctgttcagcactgacctggcagacaccaccttcactacggtgaaagataatcaggacggcacttataccgcaacactgaaagggaccaaagccggtgacgcattactgaaagtcactgtcaatggtgcagtactggaagtggcgccggtcactgtcaccctgacggcggacagcagtaatctggacaaggacaaatcctcactgacagcggcaccgctgactatcgtggcaaacaataccacgacctctgaggtgaaactgaccctgaaggatgccaacggtaacctggtgtccggacagaccgtgctgttcagtaccacactggctaacaccacattcggtacagtgaacgacaatcaggacggtacctataccgcgaccctgaaagggaaaactgccggtgatgcagtgattaaagtcactgtgggcggtaatgcactggaagttgcgccggttacggtgaaactgacagcggacagctcaaacctggataaagataaatctgtcctggaagcagcgccgctgagtattgtggcggataacgcaacggaatccacggtgaaactgacactgaaagatgtcaacggtaacctggtctccggtcagaccgtgctgttcagtaccacactggccaacacgactttcggtacagtgaaagataatcaggacggcacctataccgcgaccctgaaaggtaaaactgccggggctgcggagattaaagtgacagtgggcggtaatgcgctggaagtgacaccagtcactgtcaccctgacaccggacagcagcaaactggataaggataaatcctcgctgaccgcagtaccgctgactatcgtggcggatggtgcaacagagtccgcgctgacactgacactgaaagacgtcaacggtaacctggttccgggacagaccgtgctgttcagtaccggcctggctgatactaccttcagtggcgtgacggataatcaggacggtacttataccgcgaccctgaaaggaaccaaatccgggaatgcgttactgaaagtgacggtgaacagtgctgaactggctgttgcaccagtgacagtgaaactgatcggcgaccaggataacctggacaaagataagtcagcactgacggctgatccgctgactatcgtggcaaacaataccacgacgtctctggtgaaactgaccctgaaggatatcaacgataaccctgtgaccgggcagacggtgcagttcagtaccacactggccaacaccacgttcggtacggtaaccgataatcaggacggcacctatacggcaaccctgcagggtaaaacagccggggccgctgttatcaaagtgactgtcggtggtaatgcgctggaggtggcaccggtaacggttaccctgacagcggacagcagcaaactggataaggataaatcctcgctgaccgcagtaccgctgactatcgtggcggatggtgctacagagtccgtgctgacactgacactgaaagatgtcaatgacaacccggttacaggacagaccgtgctgttcagtaccggtctggctgatacaactttcagtacggtgacggataacctggacggtacctatacagggactctgaaaggcactaaatccggtgatgcgttactgaaagtgactgtcaacgggactgtgctggaagtggcaccggttacggtgaaactgacggcagacagcagtaatctggacaaggataaatcggcactgacagcagatccgctgactattgtggcaaacaacaccgcaacgtccgcgctgaaactgaccctgaaagatgccaacggtaacctggtttccggacagaccgtgctgttcagtactgagctggccaacaccacgtttggtacggtgacggataatcatgacggtacttatacggcaaccctgaaagggaccaaagccggcgatgcgttactgaaagtgaccgtcaacgggactgtgctggaggtggctccggtcacggtgaaactgacagcggacagcagtaatctggacaaggataaatcctcactgacagcaacaccgctgactatcgtggcaaacaataccacgacctctgaggtgaagctgaccctgaaggatgcctatgacaacccggtttccggacagaccgtgctgttcagcaccacgctggccaacaccacgttcggtacggtgacggataatcatgacggtacctataccgcaaccctgaaaggtaaaactgccggtgatgcagagattaaagtcactgtgggcggtaatgcactggaagtggcaccggttacggtgaaactgacggcagacagcagtaatctggataaggataaatccgtgctgacagcaacaccgctgactatcgtggcaaataacacggcgacttcagcactgaagctgaccctgaaagatgccaacgataacccggttgccggacagaccgtgctgttcagtaccacgctcggtggtaccaccttcagtggcgtgacggataaccaggacggtacttataccgcgaccctgaaagggaaaaccgccggtgatgctccgctgacagtaaccgttaacggaactgaactgccggttgcgggtgtgaccgtcacgctgacaggtgatgccgcaacagcgactatcacgaatgtgaaactcaacggtgcgctggcacggaagattgccaacggtacggattcttttgaatttattgccgaagtccgtgacgcgaacggtaacccggtcagtggtgtgacgactaactggaccagtactgccggtagtgcagctgtattatctgcgacttcaaagcagacagatgcagcgggtaacgcgactgtcaaactgaccagtaccaaaacaccggtctatgacattgtggtcagtgccgcacagggaagtcaggctgcggttaatgctgataagaaagtctcctttgaagagctgttctcaacgtcagtgctggttattgacgcgattgcagccggagataagccggttaacggcgcacacgttaagatcttctcggaagacggatcagaactgctgtatgagacaacaacggatgcaaccggtaagtttaaggttgatctggttggcgggaagtacgcagttaagatcacggcgaataattacgacgactacgatgactttatggacgtgaagagcggcgcggataccaactttaagtttgcgttatctccggcgctgggcacagagttcggtcgtattattctgcagtggagtgaaaacccgagagatctggactcttacctgcttgttccgccagcatcaggcagcggcagcagaattaaggttaactatcagaacaaaacaccgtcaggtgcagatgcctcccttgataaggatcagacaacagctccgggtattgaaacgatcacgatgacgaagtcacataagggaacttatacctattatgtacagaacttcgccggtccgaatgctaaattgtcaactgcgaaggtgcaaatcttcctgaataaggatttgacactgaaaccgggaacatccagaacaatgagtttcagtgcaccggacttagtcgtcaatgccaaagcgcaatggattgtgtttgatatcattgttgacagtaataatgaggtgcaggtggttaccagaggaacagtagatgcaaatcaacctaattaa

SEQ ID NO: 287492 - DNA, 975 bp, Morganella morganii
atgaaaaaatctgaccgtaaacgctgtccggctgcggataagcctgttcgcgatatttatcaggaagtgacagaccgtattgtgaccgcgctggaaaaaggcacctgcccgtggaaacggccgtggcggccggcagaagggacgggcaccggttttccggtgaacgccctgaccggtcatccctatcaggggatgaatgtgctgttgttatggttgtcggcggcagagcagggctttggttgtgatacttggttgacttaccgtcaggcacagcaactgggtggttatgtccgtaaaggcgaaatggcgaccgataccgtgatattcaaaccgctgaacgtgccggcaaaagaccgtcacggtgagccgctgcgggatgaacacggtgaggtggtgatgacggagataccaatgataaaggcgaatccgttatttaacatcgcccagtgtgatgacctgccggcacatttttacgaaaaacggcgacaacccggagaggtgacgacaggaataaccctgccggccacgcaccgggcactggatatcctgaatgccagcggcgtgaaggtgaccagtgcggcgcagaaccgtgcatattacagtccgtcacaggaccggattgtgatgccactgtcgtcacagtttgaccgggatgctgattactgggccaccttactgcatgaactggtgcacagtactggtcatcagtcccggctggcccgtgaaggcatcacctcatcgtccctgaaatttggtgacccgctgtacagttttgaggagctggttgcagaaatgggcagcgcttttctctgtgcgcagttaagcgttgagggagaggtgaatcatgaaagttatcttgacagctggctgcgggtactgaaagcggacaaaaaagcgttgttccgggcagccgggcaggcccgtcaggcctgtgagtttttactgaatacggccacctcccgacaggccgcgtag

SEQ ID NO: 287493 - DNA, 294 bp, Morganella morganii; identical to SEQ ID NO: 81471

SEQ ID NO: 287494 - DNA, 213 bp, Morganella morganii
atgcaaaccgaaccaatcatcaccactaacaacatgtcagtagaggatgttgccgcgtggatcaccgaaaaagcccaggcatttcacaaactgcaatcactccgtaccgaacgcgaaagagcaatccgcgatcacgaacgtgctctggaccgctttgatgaagacattgccaagtgggaagaccgctgtgctttaacagtacaaccgcagtaa

SEQ ID NO: 287495 - DNA, 324 bp, Morganella morganii
atgatttttaccaaaatcattaggggattcatcagtgctctgcgtcagtcaggtaaagaaagtgatcaatgggccgccacggctattgcagaagaaagccggggctgggaatgggaagtgacgccgggaagttattataaaatgggggcggatatgggaaaacgtaacccgccggcacatatcgtcatcgaactggaaaaaaatggttcgggaacacacatgtatatcacttacagcgcttcgtacagtgataccctgactccggagtttgttcaggaaatatttaaaaccgcgaatgacgttgcagccggaaaaaggaggtag

SEQ ID NO: 287496 - DNA, 2055 bp, Morganella morganii
atgaaattatttctgtgcgaaaagccgtctcaggccaaagatattgcccgggtgatcggcgctcatcagcggcgggataatttttttcagggaaatggcgttcaggtcgcctgggcaagaggtcatctgctggagcaggctgaaccggaggcttatggcgcacagtttgcggccccctggcggcagagtgccttacccgttattcctgaacagtggaaaatggtggttaaaaaagacgcggtttcgttgtttcagaccataaaacagttgctcagtcaggcgacggaagtggtgattgccacgaatgcggacagggaaggggaagtgattgcccgtgaattactggaggcctgtcattaccggaaaaaggtacaacgtttatggttgtctgcactggatgaggcgagtatcaggcaggcattaaataacctgttacccggcgagaaaacggcctctttatattcagcgggattagggcgggccagagcagactggcttatcggtatgaacatgacgcgtctgtttaccctcaaagcccgggaactggggtttggtgggatattgtcggtcggacgtgtccagacgccgacactggccctgattgtccggcgggaaagagaaattacgcactttgtttccaaacccttctggcgggtgaccgcctcgttgcagcatcaggggatcatttttcaggctcactggcgacctgcctcgcagtattgtgatgatgaacatcgttgtattcacgttcaggccgctcaggccgtagagcaactgtgccggcaggcagggaaagcgacggtgtgtacagtgaatgaaacgaaaggaaaagccttgccgccgttgccgtttgatctcgggacacttcagcaggcggcctcaaggcgttgggggtattctgcggataaagtgcttgaaatcgcgcaaagtctgtatgaaaaacataaggccaccacgtatccccggacggactgcgggtatctgccggtgtccatgcgtgccgacataccggttgttttagatgcattatcacaaagcgatccggccttacagaatgtgctggcacaattgcagccggcgcgaatttcccgggtctggaatgatgcaaaaattacggctcaccatgcgattataccgacccggcagacacctgatttgaacgccatgaatgaggctgaactgaatgtctataaacttatccgtgcccattatctggcgcagtttttgccggatcaggaatgggatgcaacagaggtgtttttagatataggcggacaacaatttgttgccaaagggaaagtcgaaagagtgaagggctggtctgtattatttgtgaaacatgaagacgatccgccagtaaaagaagaggcagaaaccgggctggaagccggaacagaaacattgccgtcccttcacgaaggtgaattctgtgtggtacaggaggcaaaggttgtacaactggcgacctcaccaccgaaaccgtatacggatggtacattgattgcggccatgaagaatgcgtcctcctttattaccgatccgacattaaaaaaagtcctgaaagagaatgcggggctggggacagaggcaacccgggcagggatcatcaccacgctggaaaacaggaaattgattgtcaggcagaaaaaaacactccgggcgacagacaccggttgtcagctgattgatgccctgccggcagcctgtacagatccgggaatgacggcgttatgggaacaatcactcgagcaggttgcacagggaaatctgtctctggatgtgtttatgcaaaagcaaatcagctggttggcacatctcattaaaaaaggcggggaaatgccgctggcgctggatctgccaccgatgccatcctgcccgtcgtgtcatggaaagatggtcttacgggagagcagtaaaggccgtttctggagttgtcagcgttatccggattgtaaagggagtgtaccattaccggaaaaaatgcagggggttacccgggggatgaataaaagaaagaaggccgtgaagaagagcataacaggactctttacctga

SEQ ID NO: 287497 - DNA, 240 bp, Morganella morganii
atgcataccgggctggccatgaccggcgtatcgatgatgctgggcggtattatccagatgttgtccccgcagccgggcgggcttgccatgaaagaccagggcgaaaataagccatcatatgcattcggtgcgccggtgaataccgtttctcagggttatccggtaccgatcggttatggtaagcgccgcatcggcggcgcggttatctcagccggaatttacgtcgaagatcagcagtaa

SEQ ID NO: 287498 - DNA, 300 bp, Morganella morganii; identical to SEQ ID NO: 103754

SEQ ID NO: 287499 - DNA, 465 bp, Morganella morganii
atgtggcagaacttccgtgaacatctggacaagctctatcaccactatctggccaatcccatatccgcagagcagatttgcggcggatacccagataaacctattgtgttgtgtgatggcctggaggaaaaacggctgaatgatggctcattattcaccgacgacggtgaggcgctttgttttaacggtaatgcggctgatgacatgaatcatgagacgtttattgttcagcgcgaaatccccgtagaggactacggggatttctgcaagacagcatacaaaccctatgacgtgtttgtagtcgcggcattactgttgttgtacaacctgtgcccgggatatttttcggtctcttctgacggggatatccgggactggcagccggtgctggactatgtcagtcaggtatttccttatcttatcctgacgttaccggaagggataggtttaccggaggcaggataa

SEQ ID NO: 287500 - DNA, 270 bp, Morganella morganii
atgctggcccgcaccaataatgtgcgcagcggtatggcgctggtggaacgcggtgaagcaccgctgggtatcgtgtacggctctgatgcggttgccagtgataaagtgaaagtggtcggtattttcccggcagatacccataaaccggttgaatacccgattgctatcctgaaagatcgcaataatgctgatgtcaaaggtttctatgattacctgcagacaccggaagcaaaagagatctttaaacgttacggtttcagccctctgtaa

SEQ ID NO: 287501 - DNA, 351 bp, Morganella morganii
atgccaccacgcatcccccgcgcttgccgcaaacgtggctgcgcaaggacaactaccgaccgcagcggatactgcgaagaacaccgcaatacagggtgggagaactaccagcagggcaagagccgacacgaacgcggatacggaacgaagtgggaccggttgcgcaaagcagtcctgagcagggataaacacctgtgccagcagtgcctgcgcgaaggtcgggcaactgaagcaaagacagtcgaccacatcacacctaaagcgcatgggggtaccgatgcggaaagtaacctgcagagcctgtgctggccatgtcactaccggaagactgcaacggagataacacgatga

SEQ ID NO: 287502 - DNA, 570 bp, Morganella morganii
atgcggataagtcagtttggcgtcaatcacctcggtgtaactctgcagcaccatggtgtcaccaattttggcactgttggcatcttctgtgattttccgcacccgcagggtccaggatgtggccgactgcggcagatcaatgcggtgggtacgctcataaccggaggtggttttgccctttacacgaccgtccacaacggttttccaggtgccgccgtcagtctgcaaatcaatagcgtaggttacctcgttaccgaccagatctccgttatcctcctgacggaacagggacggccatttcaggcggacccggacagcggacagctgcgggttggtgaatgcatgcgcccacggtgtgctgctctgtaccgtggtaccaaccgtgatttcattctccgccgccggcatcccctgaatataggtttgtgcctgggtaccgggacggtattcccacaccacgccgggaaaattttccgacccgtctgcattcagcagcggggtaccatccagaaaaatagttttcccggtcagtttaccggcaaattccccctcaccaagagcgatcagtaa

SEQ ID NO: 287503 - DNA, 1218 bp, Morganella morganii
  misc_feature (1134)..(1143): n is a, c, g, or t
atgatttttattggtgcttataaaatgatgggacaagcccgtctaagaatagccgatcatttacgaaaaatcccgattggctggttttcttctcaacgcagtggtgatcttgcatcacggcttactgctgatttagagatcattgaaaatatctggtcacatttcttaggaatgtttatcagtactttagcgatgcctgtttttctctcactattcttagtatgggtagattggcaactcactttaattatattattttctattccaatcgctctgttcgcattatccataagccataaaataatgttaaaagctgcacaacaggcagctgatgctaatgccaatgtacaatccgaattactcgattatatccaaggaattatggttattcgtagttttgggcgacttggtcctgcatggaaaaaactaaaagcagccttagaaacacaaaataaaacccaaatagttctagattccaagcctgccccttggattgcactttatggttttattcttgaatcaggttttattttattaatgataataggaacaagccgtttaattagtggctcactttctccttctcaattcgtttttttccttgtattagcactccccatttatcgacaattctttgatttaggattatccagtatgttgttaaattatgcacaaaaatcattacaacgcatagaagaagtaatgaaagtggttccactttctgagcctaaatatactcaattaccaataagaacagatatctattttaacaatgtaagctttatttatccttataatagtcaattaacattagataatatatcttgctgttttcctgaaaaaagctttactgctattgttggccctagtggctcagggaaaagcactttactacagcttatttctcgtctatgggatgttaaccaaggtgaaatattgctagatgatattaatattaaccaaataaattccgataaactctgttcatatgtatcttctgtttatcaagatgtcgttttattttcaggaacaattaaagataatattttaatgggaaaaacagatgctcacgatgatgaaataataactgcagctaaattagctaatgcacatgagtttattatacaaaaaccnnnnnnnnnnctcctattggttacggtggtatgttactctcaggtggagaacgtgaacgtctttctcttgctagaactttattaa

SEQ ID NO: 287504 - DNA, 240 bp, Morganella morganii
atgcataccgggctggccatgaccggcgtatccatgatgctgggcggtataatccagatgttgtccccgcagccgggcggacttgctatgaaagaccagggcgaaaataaaccatcatatgcattcggtgcgccggtgaacaccgtttctcagggctatccggtaccgatcggttatggtaagcgccgcatcggcggcgcggttatctcagccggaatttacgtcgaagatcagcagtaa

SEQ ID NO: 287505 - DNA, 573 bp, Morganella morganii
gtgatatctttcggcgggaactggttgcccggcggaataacactgactggccgttcatcgagtaccgcgccggtgtctatccggtcgtatttgtccggatcatgcatggccgccgatatcgtgaacgtaccgtcatcattctcagtcacgctcaccacccggtactgctgggcgtacagctcgtctgattccgttacccagacacattccggctccggcgtttcgctgtattccgtggtaacggttataacgttatccgtgaccatctggatggtgcgggcctgtgatttaccggacggaagattcagcatcagcctgtcacccggcgcggcatccggtttgcggtcgagggtgatactccggccattcaccgcactgacacggccgccggtgactttcccggacagattttcatccgccaccgcaatgatgtaccccggctgcggaatattaccgtccagccccacaccgaatgtcaccacccggtctttgttattggtgagtatgccccagcggcctttgcggttggcctctgactggcgggtgcagccgatcgccgtcatctccagctga

SEQ ID NO: 287506 - DNA, 333 bp, Morganella morganii; identical to SEQ ID NO: 190840

SEQ ID NO: 287507 - DNA, 345 bp, Morganella morganii
atgtggctggttgaggaagcccggacactgcgaaatgttgaggctgatttgaaactggctgaaaggtatgccggtgagcaaaaccgccctcattccatttcgctgatgaagtgtacgctttatgatgccggatttgcttacggcagattattactgtggcgtgcggatggtctgatgagaccctggccggcatgtctgcttcgccgtttaccggatatcggtcagcggattgatgcagtgatctggcagaaaggctgtgaagccggcttggatgagaccgtcagtgaatggatggcaatggagatggctgatgaataccttgtcggtatcgaactgagcgactga

SEQ ID NO: 287508 - DNA, 195 bp, Morganella morganii; identical to SEQ ID NO: 272454

SEQ ID NO: 287509 - DNA, 186 bp, Morganella morganii; identical to SEQ ID NO: 103826

SEQ ID NO: 287510 - DNA, 798 bp, Morganella morganii
atgcagttatctcactacaacacgctagacagcagctatgacccattgacagttaaagccattgattatgtcattctcattaacagagcgtcaccgagacgtttacagcgctattttcggataggatttcaccgtgctgagcgtattattcatcaactggagtatttgtgtgtgattacgcccttgaaccagtatgattgtcgtgaagtacttggatacccaactcactaccgaccgtttgatgcatccgccttttcggcaccgcttgggacagcgaaagaacctttattcattgaatcaccactggatacgcaatcactggaatatcgttgcctgattcatgctattgtctggcaacgtattgtagtttgggtcgaagaaatcgagattgaaggcggtacagctaatattttgaaatctgtttccccctttgaatacctgacagatactgacagtgatgacatttatcaggatcccctccgcaacaacgccagttcctaccgcttccttgccacactgcgccctgaaaccccgttggatgtactgcggcaacatgggcgcattagttatcagccgtgctggaagctgcctcgtatagcacaagaagaatggcaaggtttatgggtgccgaatgaggatggatgggaaagcctatctgaggaaaatattcatcatccaagagggattggtaactggcctgacttaccccataaaagcatgaaaccgttggtgcatgggctgcaagaggatggaggggactatttgcggtacttgatttattggaaaagccaaatttag

SEQ ID NO: 287511 - DNA, 435 bp, Morganella morganii
atggaatttataaaaatcatgactgataaaaaacaactaactgaaatggataatgcgcccaagctctggtttaccagtggagagctagctgctataggaaaagaaaaagctgacgatccaacacgttatcctgaatataaagatatggatatcccgacgacagcgaaaggcgttagagtccgtctagagtcaattacagctcttcatccccactttcgcaagaagaaccctaataagcgtggcgacctctatcatattgatgcctttaaggtgatcctaaataccgatgaaaaagagctcatcaagcaaaacacgctatcttctgaaagtgcagatcttaaccttttacttgaaatctacaaatcactgtcagttgagaaaagaaaagcgttattaaaaaatgcactcacaatgaaacaggaagatttagattag

SEQ ID NO: 287512 - DNA, 342 bp, Morganella morganii
atgtctatcaaaaataaattgcaaaaaatccgagaagaaaacgaagcgaaaggattaaatgatccggctttatttaaacagcgtttgctcaacggtggctttggattagctaaaaccttttggctattttggtttttaccgattttattcttaaatatcgttgagttttttatcactaaaaaggtgactttgaataaagtggaagcattgattctcatttgggatgtttgttgtttttactttatcgtgaaaataccgaatcgtcgtgcttggtattacgtggcgttggtggtgattgcacttgatatattagcaggaataaccgtgaattttctgctataa

SEQ ID NO: 287513 - DNA, 312 bp, Morganella morganii
atgaaacttaaccagtggatgaaattaagcgtattaacagcgatggttggtttaacaggatgtaatgagagtaccgttaattgtaatagtgatggtacaaaagcattagcgttacaagtggtcaatcaacatgtcggttgggcgatgtatgagcagcttgagaatgtgcgaacgcaacgtcaaaatgcagaacgaggcgtttatctctgtgctgccgaagcaacgggaaaagcaggctctgtcaccgtaatttattccgtgcaacttaccgatgataaaaaaagttttgtagttacgttactcaacggttaa

SEQ ID NO: 287514 - DNA, 522 bp, Morganella morganii
atgttgataccgtccaagcaaggggatttagattgcctctgtgggatttacagtctggtgaatatgagtacatggttctatggcgaccgcattaagccccgcccgttatttaattatcttttgcgtgaatacagcgaatactggtcactgtacaagtgtttaacccaaggtattgatattcctgaaatggattacttgattaagcgcctagcctcaaaatacccatcatacgctcctctacacatcaccacgccatttcgttacaaagatgggcttactacacaaaaaatactgtctgcttgtcaggcgttccttggtgctcataccacgtcacgtcggcttattcttctgggggatcagtggcattggtcgctggtggagcgtatggatagtgaatatctctatttctttgatagccaccagcaagagaaagtgagccgcacccgttatggattaagaggtaacaaggtacggcggttgtatagtgaatcaatatattgggttgaaatcaaaagtatttaa

SEQ ID NO: 287515 - DNA, 627 bp, Morganella morganii
atggcaaaaatgaaaaaagaagcattaactcaaaaggttaaccagaacgatactaatagcccaagcgctaaatcccatttagatcgaaatacatttatggcgagcgttggactttcactaaaaaaagtatatctaagtcatgatagtctaaaaaaactcgcaaaaattagtgaaagtagattcggtgaggacttcgatgaaaaggagatagttacggaatatttgagtgagttaatagatttttgcattaacaaatgctatggaacagaagagaatatcccaaaaaaagaacactcaccactaagtttaacggtaccaaaaacaattgagggactgacactatccaaatatcaccaaatggcaacttactttaaaaataaccctcctagagggtctgatggtgatcatgagtgtattgcaaaagcatttaacaatgccaaacgtagagttccttatactgaattaatagctgactacgtatccgactattacgaagataaaactccacttcaagcaggtgaaaattggaaacctaaagatattcaagccattcttagcagaaaaagaatcaataaatacattaattctttaaacgaagactgcgaatgggaaaaagagtgggaataa

SEQ ID NO: 287516 - DNA, 123 bp, Morganella morganii
atgaccaatcagcttaacgtcgaaacactaaaaaaaatcaaaaaatcacgtaacaaactgatattaaatgagataaatattttattttttcatgatcaattgagactcaaccatattaaatag

SEQ ID NO: 287517 - DNA, 231 bp, Morganella morganii
atgtattcaactagatactggtataatgaatatattgatatcaattgggtatataactggcttatagaggaatacattagcatccccctttttttacgcatttttcacaccattgaactatttcgctacttttccaacgagcagtacgccctgatacggtcaatgaatattgagctggaaaatcgcctgcctttatccaacgatatagtgtcgcgcgtgaaacctgcgtga

SEQ ID NO: 287518 - DNA, 1068 bp, Morganella morganii
atgcgtaaggtatctattgaacagattgataatctcattcgttcggtcaaattaggtaaaaatcgagtagggcagaagatggtcgctcggttcgacaaattgtcttttgtcacgacttgtgaacctaaatatttggagcgtatttataaatctctggagagggtgattactaatgatgtttttcatgtaaaaacctatattcctattggtgatatgggagagttgtatcattcggctatttacatcaagaacaagaaaaaacctcatcaatatgtcgttattcattatcacccaacaggaaaggggaagaggggggaatttcgcgttgaattcagtcctcaacactttcgtaaaaaagagcttaatgctctctttatgtggttaggtagtgaaccgttattaggcgaatatttatttaagctcttaaaatcagcgtgggtgacacgtatagattatgcgctagatacttatggacttaacatcgatgattactttattcacctaaaaagtgcgagtaaaggtaaggttaataagaattcatcagatggtgggtatggtattaatttgggcagccgtaattctgaagtttatgcatctgtctacactaaatgtgatgtgggtgacgatatatcagatattgcagaggaagttgatgagctcggtaatgtcttggttgatgtagaacagtatccgaaatttttacgcattgagttacgttaccagcccaaaaaacaaaaactgttattaagtaagattaataatatgactaatttactcgaaaaagtgatcttcattgacactaaggtgatatctgaactatccgcgttagttcctgactataaagagctgacgttgccagaaataaaggcatacattaaagagaaatacccgaataaggtattgaaaaagtttgatcgcttgctagaaaaacatcatgtgagtctaattaataataagaagctatggggtaagctttatttgctgattgataagctcggcattcttggagttccagctctttggcagaagagtttgcgtgaagaatgggctcgcaaacatggttattag

SEQ ID NO: 287519 - DNA, 1950 bp, Morganella morganii
gtgcatattgagagaataaatctacagaactttagaagcttcggaccgggggggcagagcatagctgttgacccaaatctaaccaccttggttggagcaaatggtgctgggaaaacggtcttgatgcaggccttacagcgaatgttcggtatatccaatgaacagcggacgattcgccgtcaggattttcatattccatctttggacgaagaaataccctgtaagcgaactctcatgcttgaagccattgtcgccttccccgaactggatgatgaagacggggatcactctgtgataccagatttctttcaccatatgagcgttacagatgagggtggaaaactgaagtgccgtttgcgcttggacgcggaatgggaagatgatggatcaatagacggatacattacgagtcagttccgtgctgttacgacatggggtgagccagtagaggctgattttcacaatgtacgcccagcagatcgttctcgaatccaattgatttacgtcccagccacacgatgcgcagtttctcaggtatctgcctttctgaaaagtcgtctttggaaggctattaactggtcggaacaagttcggtcatcttttactcaaaaggccacagagctgaacgaatcttttgaaggtgaaaatgcgatcagtaccgttactggaaagctcacagagcgttggcaggagctgcactctgctggaactgatagtacaccgaagtttcgtctggtcgaccaacgttttgaagaatttgtccgtaaggtagaggtactgctgcacccagatgaaagtcgtcgggatcggagtattgatgagctaagtgatggccaaagttcgctgtttcacatcgccatgacttctgccactctcgatgttgaaaccgagatcttagcccagccagagagtgaagattttctcggtgcagacttgcccttgccctcattgactattttggcgcttgaggaaccggagaataacctagccccatactatctatctcgaatcataagtcaaatcagcagcctagtgcatggtttaagagctcaagccatactatccagccattcgcctagcattctcgccagaatccaaccaacgcaagtaaggcacttcaggttagcaacagaatcaaacaccactgttgttcgtcaactgactttacctgatgaagagaatgaagctgcaaagtacattcagcaagctgtgagagcctatccagagttgtatttcgctaaagtcgtggttctcggagagggggcttccgaagagataattcttcccgcaatatcagaagctatgggcataccaatagataaatcttttgtcgccatggttccattaggggggcgccatgtaaaccacatgtggcgtttgctaacagatttacagatcccctttctcacattactcgatctggattgggggcggtacggcggtggctggggaaggattaagaacgcagtcgccaagttgatagagtatggaatacctgctgaaagtatgggagtacatgctgacaggggggctgtaaatctggctgaatttgataccttgaggtgtgataattttgaattaatgagtcgttgggttagctatcttcgtcaacccccttttaacgtatacttctccagtccattagacattgattattcgatgctaaaagcattccctgaacaatactgtgttgctcccgacgaaagctctactgggccatctagtcgtggggagcctggttatgccgttatgggcgacgagggaaaccctgaattttacgctgacgatctgcttaatttgcgctggtacagatacctattcttgggaaggggtaagcctagcacgcacattcgagtacttggaactattccgcgagaacagttggctcagaacgcaccagaagaactacgagctttaattcggtctattcacactacccttcaaaactag

SEQ ID NO: 287520 - DNA, 1884 bp, Morganella morganii
gtgaagtttatccgacctgaccactggcagccccaagggatcgacgatcttgagccaaatgcttggcaagcactaaggcaacgagagtccacaagcattatcgctggccctggagccggaaagacagagtttttagcgcaaaaggctgcatatttgcttgagactggtctatgtccaccaaacaaaaaaattctggccatttcatttaagactgatgccgcaaaaaatctcgcagatagagtgaaagagcgttgtccagaagaactcagcaatcgatttatttcgatgacttttgacgcattcactaagaatttagtggatcgatttcgcatggccttgcctgagcatcatcgcccatcaaagcgatatgaaatctcttttccatcttctcaccaagagaagctgcttattagtagtttcagtaataatttttggaacgcagtgggtatctatagctttacgcaaagactccaaaacatgaatcagtttatcggaagtgtgcgtataggagccccaaatttgtcatggttagaggaggaatttttaactttttggttgagtcaacaaataaactaccctgactgtatttccagagtatcatttctggtgctaaatcgacttgctgaatatatcgtgcgcactaacgagcatgttcgtagatctattagagcatcataccctattgtctttgtggatgaattccaagataccacgtttgctcaatatgattttctatcttctgtttttaagtcgagtgaagctgaggtaacagcagtaggggattacaagcaaagaataatgggttgggctggtgctaaaggtaatgtgtttcatcaatttgaggctgacttttcggcacatcggcattctctactcctaaatcaccgctcttcacctgaattagtcaggatacaacatgttattgcacaagctattgaccatgaagtgagagaggttcagacaagtaatatcaatttaatttctggtgatgccgcctggatttgttgtagttacaatataaatcaggaggctgctcatttggctcagtggatagcaaatgacttgctagataggtcactgaatccaagaaactactctattctggtacgtcaaaaaccagaagattatgaacaacagctatcttattatctcgctcaacatggactgagtttacgaaatgagagtgtgaaaataggtcaaactacattacaagatttgcttgctgaagaactgaccattttgttttctactctgctaaagctgggacttggccgtcgaaatgcacaagcgtggaatcaactatcatcagatatacagattcttcgtaatacgaaccaggaagatgaaaaagcactacgacaggttgagcgtgagctaacaaagtttatttctacacttcgggtgttaatgcaacagcctcttacacgggaaaatggtcgagatgtatttgagcgaaccataaaatttattaactcagacgatcttcgcagctccttttctcgttacgcaacaggagatttacttggaataaacttggcagcacttgaagagttttttacaaactgtgttgatactcagatctcttgggcgggtttgctagatgagtttgaaggtacgaaccatattcctcttatgactattcataaaagtaaggggcttgaattcgatacaactattttcatggggatagacgataacgcttggtgggcctataagcaaggtgatacggaaggactatcgacattttttgtagcactgtctcgcgctaaacaaagggctattttttcctattgtcagcaaagagggcaacgaaccaaagttgcagatttttatgcgttgttgacggccgctggtgttcaggagtatgtgatcccaccgagttga

SEQ ID NO: 287521 - DNA, 132 bp, Morganella morganii
atgaaacaatttcctctggctttaatccctcatgaaatagaaggtgacattattcaccttagagccaaagatggatatgcaaatgccacggccatgtgtaaaacggcaggaaaattatttgcagattattaa

SEQ ID NO: 287522 - DNA, 381 bp, Morganella morganii
atggcaagtgtttttcttagtcataactcggctgataaaccctttgttcggcgactcgcccaatcattacaatcaaaaggacatgttgtctggttagatgaggcggaaattaatataggtgactccttaatcgagaagattagagagggcttggataaagttgattatgttgcagtggttctttctcaaaactcaatagctagcgcatgggttcaacgagaattagatattggctctaacagagaaatagcagagaagagagtaatccttctgccgctaatgctccagcatgttgaattgccaggttttctcctaggaaagaagtatggcgcgattttactacagacgaaatttatgaccattctcttgaggagttgttaa

SEQ ID NO: 287523 - DNA, 399 bp, Morganella morganii
ttgggccgtgtggataaaaaaattattgggtcagatcaagaaattgctacgttacgcgctgagctggaattagctcgaggacatcttgcagggttagcacgtttgcaggagcatcaaagtagttctttcacttctacttggacgcctcaattaaaagaagccgttgaaaaaagtaataaaaactatccacaatataaagtaatcaatgattcatatgcatttaatgctatagacgatactatacccgtaaccttggattatttgttatgggctattgcaaaaactatgagaaaaggtgggcatcctttagatgctttaatggagatgggcaaaacacatcataaagctgaagcgatgattaatgcttatatggcttatcttggtgatcctagcaattga

SEQ ID NO: 287524 - DNA, 690 bp, Morganella morganii
atggaagagcttggatatgtatctaattggtatgatataccaggaatggattttcacaaaagtggtttgacaggactaggtgttattgttaaaactactgaacaggcagatttagtcgtaagtgatattttaacattgattgatagcggacaagttagtattgatacttttggatttatattagtaagcgatttacttcctaccaccgataaactaatggaccccaattgtataaccagtgcaattagctccgcaatgattgatctgtctccttacttttcactttcagtagaaaaatgctctgaatatgattatttatttactgaattagttaaagtagctagttatgacattgatatgaatacctatgatggtgaatttggaggttgttggttatggttacatgataacacttcagaactaactagggcattattaaatacgaagagagtctttgtatctacagatggtagatatcttgctaatttaccagagtttagtaacttaatagatcttcggaaaagagaggatatggtttccacattatctaaactagtaaataacaaatttggtacctcaagctgcttcttttctgtattaaattcagacaatccttcagatattcctttttatgtagataatatgataaatgataatatccctttctttaattgctcatggaactattaa

SEQ ID NO: 287525 - DNA, 636 bp, Morganella morganii
atgcataggacacccatttttctgtattccgttgctccagcactcctcggattgtacttaatagaaactgttgaatttaacctgttcttttttgtgccatttttatataggtatttgtatgcttttcataacggttgtattaatatgaaaatctatcaactaggattcagggataagccagtaactaactttattattaatagctgtattggaggattagtcgtgaataacaatatacgttttgatttatcagattaccttattcatttttttcgtgatatagatctcaatagttcgaatggaattgtatttcccgaacacatgggatggcaaaatttgtatgaagatgtatattttcctgcaattttcatgttaagagccgcccttcgtaacggtcgattatgggctacttggtcaattcgtggtgataagagaactatatatggatatgaccctgcgatatgttttactgagatgcctatagccgcattcttagaagctgggcataagcgatggtcaagcggccaagctatgagtccttatgcattgatcttcccaagaaaagaattgttttatttgggagccaggccagttatttcagggttaagcactaatagaaatatatattcacattaa

SEQ ID NO: 287526 - DNA, 357 bp, Morganella morganii
atggctaattatgtttctgggaatataatttcacagtcttatgttcatgttgatcctgaatggttgtcaactgtaagcaagaaagaaagagctataagaatagctaaaataaaagaagatataacaaaatttgcggaaacaagaattcctttttttattggctcagaaatcagaatagaagttgaatttaccgatgggtctataaaagcaaaaataacaagttacgggaaaattatttcacttgtaggtgcttttgctgtggggtatccatcattcagtgaatcagtgcgtactatggtcaaagatgtgcatgatgttggtagttatgttaactcggagctgttgtttcaaacgtaa

SEQ ID NO: 287527 - DNA, 993 bp, Morganella morganii
atgtcaatagcaaaagaatatgatattgctctttcattcgcaggtgaagatagagagtacgttaaacaggtagccgacctcttattgcaatccggcgtgaaggtgttttatgattcatttgaagaagaaaaactatggggaaaagatctttatgtctatctaagtgaaatatataaagacaaagctctttatactataatgtttatttcagagcattacgccctaaaattatggacaaatcatgaaagaagatcaatgcaagcgagagctttccaggaaagtgctgaatacatactccccgcaaaatttgatgatacagaaatccctgggttattacctacaatcggtttcatatctcttgtaaatcgctcccctcaaaattttgtagaaataatcaatagaaaactgataaacagcggaagaactattccttcagaatcaataagaaaagcttacttctcagtctccccccttcctaaaataaagcctttgcagttaagagtagtaataaaatcttcgacaggagaattagttccctatgcatcagtagttgcaatagcagacaatgatactattaagcagggaatgactgatacaaacggttcattgattttagaaattttcactcgaagaaattattcaatattggtagctcatcccaattttgctggtgttatagttcgtaattgggatcccgcaaaagatattgaaataatcttatcctccactgaaactattggttccataataatcaatggcactggttatattaatggtttagaggggcgactaaaccctaagctagattgtattaaccgaacatatctttatgcggacaatatatctattaatgatggggaaattcaacctgttcattttgaaataaattctccaattactttagaggactgcaatggtgtaataattgaagcaattttcttacatgttcaaggtaacacatcattaattcaattttaccatccacgtaaataa

SEQ ID NO: 287528 - DNA, 1530 bp, Morganella morganii
atggcaaacaaaacaaaatttatactagtttcctttttatcaatctcatatttcgtttatttctttaagcatgcaagtgatgcattaagccctttattatacctgtctctgtttattacaattacaatcattgggcttaaatttaaatcatttaaggcaatagcggcatcatattttatcgttgccttatttactataattgagttaataacaaagaggatgactgggttttatttccatgaaattccctatgaaataatatcgatactatatgatacaaatcaagatgaaataaaaagcgggatgcattttgatagaactgaaaaaatagcaatattaatatgcactatcaactttgtttttttatttctcagacaagaaagcaaacaaaagaacataactaaaaccattatgccaatattaattcttattatgtttttttcagcgacaagtaatccaatttcgataacggcaaaaacaatatacaataataaactatctattgagaaagcaatagatacattaaataccagaaagagttttttatggggttcaaagagttatgaaaacgaacagcagacagttgtcatttttcttggtgaaactcatcgcggtgactatatgtccattaatggatataacaaaaaaacaacgccacggcttgaaacaaaagatataatatcctttgataacgccatttcacaaggagcatacacattaatatcaacaccgatgatactaactcgaaaaaacgttactgactctggtatatttcctgagaaatcaataatatctgcattcaaagaggctggctatgaaacatggtatatttcgtatctgtcaaaaagccacatcggtgataatgaaataaatattatagcaaacgaagctgatcactatatacgtgacggtgttgataataatgttcttaagtctatcctgagtgcgaaatcaaataaaaagttgattgtttataaaacaattggtagtcacttcacgtatcatacccgctatccatcttcatacgaaatatttaaacctgcattcacggaagaaacatataaaacaccatcaattgatgatattgaattattaaaaaacagctatgaaaattcaattctattctctgtagataagcatatcagtgatttcattgaaatattagataaggagaaaggcctggtgtctctctcatttgtatctgaccatggaacgtcaatatacgataatggaaagtctctgtacggtggaaacactgagggaaattataatattggtttgtttttttggtttaatgaccattataaaaataaatacagtgacgatattatggcactgaaaaacaataaacataagaaggtatcttctgaatactttgttgatactatgcttgagatagggaaaatcaagacagaaaaaacaaaaggaagaagcctgctagaagaaaacctaatagagcacgatagaatggtgataaacaaaaatatatacaattatgacaaggaaatatcatctaataaaaataaataa

SEQ ID NO: 287529 - DNA, 1494 bp, Morganella morganii
atgattggggtaatattagctgcaggcgtaggttccagactcagaccaatgacaaataataaacccaagtgtttggtaacaaccgcaggaaaaccaattctccaatatcaacttgatgcatataaaaatgctggcataacagacattattattattgtaggttatgagggtgatgcaattcgtaattactgtaaatatataaaagaattaaatattactataatagaaaataatgaatacgaggatagcaataatatgtattcattatatctggcaaaagactatattaaaggaaactcctttattttgaataatgctgaccttgctgttgaggataacttagttacagatatgatggcatcgcaggaagaaaacatagttgctgttgatttctctacattcaacgaagaatcaatgaaagttacatgcaatagtgatgggctgattgttaatatttccaagcaaattacaaaagaggatacactcggctgttctattgacttctataaattttcagataaatcttcggagatattttttgaagagttagaccgaattattattaaagaaaacaataaaaaggattggactgaaatagcaatgcagcgattattcaaatcactggagttaaaattcaaaccatttgatattaaaactacagcttgggttgaaattgataattatgatgatctcgcttcctctgataaaatcttttcccagctaaaaaaaaaaataactgactatatctgttattgctttgatttagatggaactgtctacgttgggaacacactgattcctggcgtagtagaatcgataaagtggctaaaagaaaataataaaatagtacgatttatatccaataattcatctaagagcaatacagaatatctccaaaagcttaatacgctgggacttgattgtaattctgaagatattaaattatcgactgatagtgtaatttactatctgaaagaaaagggtataaataaagtttatgttcttggaacaaaaagcctacaaaaacaaattattgatgctggttttgaaatttgctcacattccccagaacttattgtagttgggtatgataatgaactaacatactcaaaactaaaaactgcctgtcgattaattaataaccatatagactatattgcgactcattgtgatattttttgcccaagtgaagatggcccaataccagatataggaacaatcatttcagtattagaaaaaacaactggtgtagaaccatataaaatatttggaaaaccaaactcagatttaattgaattaattgctaaggaaaatagtgtacataaatctgatatattaatgatcggagaccgtttgtatactgatatactaatggccgacaacgccaaggttgactctgtattagttcttagtggtgataccaagcgtgaagaaattgaaaaaaacataataaaaccaacatatatcttaagatcatttaacattttatattaa

SEQ ID NO: 287530 - DNA, 1170 bp, Morganella morganii
atgaataaaaatatttttttaccactcctttgctcgatattatttttatcatttttcctccaagcatatagcttatatattggatatcatctgaagtttttcatgataatgataccgctgtcatatattatgataaataatagtttatatcttgattcaaagttatatcttcatgagaaattgcttttaattactattatctcattttcttcaacaactctatactcatataacataagttcatcattacggatggtctttggtttacttatcctcattattttatattggatgctaattagcactctgaaagccatatcaaaaaatataattttacgaacccttttatatgctggaattatatttaatatttcaagtattttgttatatttaaccggacttatcatttcaaatggtgacttcacacaacgagcgattatctatggcttaatgattgagcgaaataccccaagattaattggtacaatgacagaccctaattttttttctgcatataataatatttttatttttttgagtattttttattataaaaaaatatcaatatccaaaccattattattacttgcaattataaatacattacttacattctccattggtgggtacattgccttattttttggtagtgttggtttaatttttcataccaaaaataaattaaaatttttatttaacacagtcagtataatttgtataaccttacttactgtttacatttttttcccgcaatatattgaacaagttcaacacaaggtaatggtctcattagacggtagtggaagatttaaagactggggttcagcgctaatgacattttatgacaatccatttggaattggtatatttaccttcttagagtacaatggacatttttatgccggtactcactacactcacaatacatacctcgatgtactggtagaaggaggaataattacattcttattttacatgctatttttactttcttttttaagaaaatcttactctaatagtaatgtttttctatttccggtaactatagctatactcatatcatttttgtcactatctgcatttttaaatgaatactggcttttgattttagcattacttcatcgcttatcttcttgtgaattaaatgaaaaaacacttaactctaattaa

SEQ ID NO: 287531 - DNA, 678 bp, Morganella morganii
atgtatttaattaatgcagatgattttgggttatcgccctcgataaataaagctataatactatgctttgaaagaggtattattaactcaaccacattaatagctaatagtccttatactgatcaagctatcgcaaactctaatgatttaattattggatgtcatcttaacttagtcgaaggagtcccacttaataaaaacctacttaattatccagagctaacaaataatggtaactctcttaagtttaacattccaagaagctctttatccttaaatagagaattacttttaaatatcaaaactgagctctccatgcagatcgaatacatatatgataatggtttgtccgttgaccatattgactcccatcaacatacgcatactatatatcctatatttaaaattgtccacgaactttccaataagtataatctaaaaataagacttcctcgttacactggaagtagccattctatccataaaaaaatatacaaaaaattactttcaaattatatgaagtttaaaaatataaattattgtgactattttataaactttgatgagatgcatctatttaataatagccataaccttattgaagttatgattcacccagatattaaagatgatctaattgtttgcaatacaactgggataattatcgataatgtctag

SEQ ID NO: 287532 - DNA, 744 bp, Morganella morganii
atgaatgatgagaatcttgtctctataattatgccttgctataactctgcaaaatttatcgatgattcaattaaatctgtgttagcacaaacctaccgaaattttgaattaataatcattgatgataattcagctgatgattcacttcacataataaaaaaatataatgaccacagaataaggctaattaccttgaaaaataactcaggtgcaggtgcagcgagaaatgaaggaatagcatctgcacttggtagatttatcgcatttcttgatagtgatgacctatggagaaataataagcttgaacaacaaattaatttcatgatagataataattatcccttcacatacacctattatcaaaaattttcattcaaaggtagcggaaagctagttacttctcctttaatggtaaattatgatcagcttgttatttgtaatgttattggttgtttaactgctatttatgacataaataaattaggcaaacactatatgcctttaattagaaaacgacaagatatgggattatggctcaatttattgaaaaaatgtcaatatgcatactgtttgcccgaagtactagctgattacagaactgactctggaatgacaaaaaataaattatcagcagctattagccaatggctattttacagaaaagaattaaaccttagcattatgaaaacattcaatctcttcgttaaatatgcatacaacggtattttacgaaaatatttataa

SEQ ID NO: 287533 - DNA, 1014 bp, Morganella morganii
atgaacaaaaaaaacaaagccactgtaaaggcgggtagcgtatggtcagacaatggtctgccagaaatggaatattgcaccctgacgcgagccgctgaattattaaacgtcaaaatcgaagatctgcttcattttgcagaaattggatttatcgaactttgtgtaaaaatggatggattcgaagctgggttgtcttcccctatgagctatagagatcaatctacttgggaggatttttgtgagaatgatataaaaatacttttagggtttgggtcggcaacaaaagaaaatggattaagcttattttctccgaaatactgtccatctattgattttcataatggtaaaattgcagagtattatttttatgaatacaatgacacgcccgggttgcgacaccctatagtttttttattcggcctgtgggcgcttgtaggattatcagatagaaatattttccacaaattatcaatgaataataaagtggaattaaacccatttagctttttatttaaggaggttgattatatttcaaactcagataatgatgatgtttatcatgcgcagccattaagtgaatatttatatgaaaacagtatgttagtaaaggaaagaatcaagacaatagccactctaacctgtgaggatttttatataaccagaactcaaatagataaaatttattcaaatatagggaagcctatatctagccttagaaataatagctttgaagataaagaacattacacccaaataagagccagagaaaacagattcaaaatacaccaagctataacaaaactattaattctacaccctcataatcccaatgatgattcttcaaattatagggctgctgatggaagaataataatagcaaaagtcgccaggtgccttgattatcatgcagccaatttatttgacgataaggaattaccaatcaaagatgaatcccgactgagggctattattagtgattacctggaaaatttgggcgcaaagatggataaataa

SEQ ID NO: 287534 - DNA, 258 bp, Morganella morganii
atgaaacgccgattcttttttctgatgatgcttattttatccgctaatgccaccgccaatatcgtgattaacgggacccggcttatttatcatgaagaaaatgacagcattactgttcaactgaataataacagccagacatcatcattagcccagagctggacggatgacggtgacattaatgccacaccggaaaacagcagttccccgttttatgtttatccgccgattgtcaaaatagacggaatgcagggatag

SEQ ID NO: 287535 - DNA, 330 bp, Morganella morganii
atggcaattcatgaactgaaaatattcagtgaatattttaacgaagtcagacttggcctgaaaaaagcagaattccggcgcgatgtagacagaagatttcatgttggtgatgtggttaagcttatcgaaataaaacgctgtagttgtcatgagaatactaatcttccggtagcgcatgagtgcaggataacaggcaatgccattgcctgttttattacatctgtggttgttgttaatgatgtatatgaagagttcacttacccgggaatgcctacttttgtgatgttctcattttatattactgggatggagttatctcaccatgaataa

SEQ ID NO: 287536 - DNA, 807 bp, Morganella morganii
atgaataaaaccatcctcaaatgggcaggttcaaaagtcggcattatggatctgttacgtccgcacctgccaaaaacaaaacgcctcgttgagcctttcgccggttcctgtgctgtgatgatgaatactgactatgagcagtatttaattgcagatgttaattatgatttaattaatttatatacagaaataatatcagttcctgtttatttgtttattaatgaagtgaaaggattatttgacgaaaaagatgatgaatcagctcattattatgaggctagaggcatattcaatacagaaaaactgaggcatgtagacagagccggtttattcctttacttaaatcgttattgctataacggactctgtcggtacagcaagaaaacgggttttaacgttccgtttggtcactataaaaaaccttatttccctgaaaaggaaatcgccgctttcgcagaaaaagcccgcaatacggagataatcttgctgccgtggcaggacacgttatcgctggtcgattttggtgacggtgtgtattgcgaccccccgtacatgggaaaaaatttcactcaatatcacgctgacggattcacagatagcgacaatgaagcactggcctttgctctgaaagatttgaatgatattcagggcaacccggtcacggtatcaaattcactggccgcaaaagaactgtatgcagatttgggcttcaccatccacgaaatagaagcgccgcgtactattgctggcaacggcaaccggaagaaagcacctgaaattattgctgtgcttggggggtgccaatga

SEQ ID NO: 287537 - DNA, 486 bp, Morganella morganii
atgcatattgaccaaatagcactaattacggccattaacaacgaaatttcagcccagcatccgggaataccggcagagccgagattcttcaatgtcgtaattaatgctgcaaacatgatttgcgctgagtttaaaaaaccaacaattaaggccagccatgatatagggcttcgcgcatggcttgcctcacacgataccggcatgagcaacctgtatatggcatctgttttatccggtgaaaactgttcctctgggtttgcgtacccgtgggacccgtctgattttgggcggtgcattcgtttaattgaagcggttcctgaaatggccggatttatcagcaaaatgcaatctcacgggccggagtgggccgcaatagtagctaactgggaagagtggaagaaattataccacgatgaaaatggcgaagagctataccggcagatgaaagacgcatatgcaaaatacagagccgcagaggaaaaataa

SEQ ID NO: 287538 - DNA, 558 bp, Morganella morganii
atgtcatatatagcaaccagtaccggaaaacatattgatttcgtcaatatcactccggctcagatttgtatcgaagatattgcgcgcgggacatctaatatctgccggttcgccgggcaattagaaaacttctactcagtagcccaacattccgtgtacgtcagccagattgtaccaccggaatacgcactggaagcactgctgcatgatgccaccgaagcatacatgggtgacataccctcaccgctgaaagccatgctgccggattacaaggccgtggaaaaacgcattgaggcgattatccgtgagaagttcggcctgccgccggtaatgacggttgatgttcattatgccgatctggtcatgctggcaaccgaaaaacgggatttagagatagatcccgacaatcactggccgatgctggattcagttccgccacatgatgacatcattatccagccactgacaacgccgcaggcatatcatcagtttatggcgcggtttgaaatgctgattatgctgaatacccattaccagatggttttaagctacccataa

SEQ ID NO: 287539 - DNA, 558 bp, Morganella morganii
atgattaatcttaaatcaaaatttaaaaaaataatagcatggagcttgaaaaataaaaatttagatagtgaggaaatattacatacttatattgaaaaagcaaaagaacaaaagctcgttaacttatggtttatagtaagttcatcactatcatcactatctttcgcttttttaattggattactaagtgtaaaacctaatgaaataagttcatcaccaagtcttattttcgcaataacacttatatcggcctctttatttttaaacgcattcttaacaatgatattctttggtattaagtcacaccccagtgaaaacgatgaagaaatactgtattcggtcatgagtacaaatataatgcgattaatgcacacatcttcttttttaatattaccaactggtgttatctttttgattttttatttctcaatgactgtatttttaattttaacacccctagcaattggatttctttatatatggaatgaaatcgaagaatcagtaacacacaaagaaatatttagatcaaaaaacaataaagtagatagttacaaatga

SEQ ID NO: 287540 - DNA, 1197 bp, Morganella morganii
gtgtatgcactgttgaagatacagatagagcgatttaacctccgtcaccgttttcgggttctggataacaagatcatcaataaagccaccggcagtgagtttatgttttacggtctgtggcgacacattgacgaaattaaatcactagaaagtattgatgttctgtggaacgaggaggcgcatgcactgacagagccacaatgggaggtgttagagccgaccattcgtaaagagggctcggagtgctggttcatattcaaccctgggctcgtaactgattttgtgtggcgtaactttgttgccaacccgccgccagacacaatagtacggcgcattaactacgacgaaaacccatttctgagtaacacgattaaatcggttattgctgctgcgaaagcgcgtgacccggaaacattcgagcatatctatctcggggtgccgaaaagcgatgacgacaccgctgttattaagctgtcatggattgaggctgctattgacgctcacaagactattggctttgagccatcggggcggaaacggattggtttcgatattgctgatgatggtgatgatcggtgtgcgacagtgttctctcatggctctgttgctttatgggctgacgagtggaaagggaaggaggatgaactgttaaccagctgctcacgaacttaccaggaggcgagagtccgggagtcagaaatcatttatgacagcatcggcgttggtgcttctgccggtagcaagtttaaagaacttaatgcagagcataaggccggagttgcgtatcacaagtttaatgcaggtgctgcagtgatgaatccggacagggattatcagccaaaagtgaagaataaagactttttctccaacctgaaagcacaggcttggtggatggttgctgatcggttcaggaatacatattcggttatcaatgccataaaaaacggcgtggagccggagaagttcaaagacgatgagctgataagcatatcctccgacatgccatatctcgaaaaacttaagtttgaactagcgatcccccgtcgtgactttgataacaacgggcgagtaaaagttgagggtaaaaaagacctcgccaagcgtgacataaaatcacctaacatcgccgacgcattcattatgtcgttttcatcaatgcgcaagccgttccacatacctgacgaggttctgcaatga

SEQ ID NO: 287541 - DNA, 528 bp, Morganella morganii
atggccgcaccgaaaggaaataaacatgcggctggtaacaaaggcaagccgtcatcttaccagcctgaatacgcagagcaggcgagaaagttgtgcttgctcggcgctaccgataaagaattggctgatttcttcaatgtttcagaggcgacagttaaccgctggaaaaatgaatttgtagagttttgcgagtccataaaaaagggtaaagagctggctgatgctgatgtcgctgaaaggctatttaaccgcgcctgtggttatgtcgcgcctgatgttgatatcaaagtcattgatagccagatagttaaaactgacttcctgaagcattacccgccagatacaacagcggccatattctggctgaagaaccggcagaaaaataaatggagagacaaacaggagattgaccttagttctcctgatggctctatgtcaccaagggggcttaacgatttctatgcagacattaagtccaagcctgaatccggctctgagaccattctggacgacgcaggcgaggaataa

SEQ ID NO: 287542 - DNA, 411 bp, Morganella morganii
atgactaaattaactgtcatcagtaacgctttgcctgcggaagggcaaccaacaatgaccagtctggagatggtcgattacatcaatgctgaccgcaaggcgaaagctgaagcagaaggcctgaagtttccgtgtaaaactcacccgcagttaaagcacaaaagctttttggcaaaagtgccaaaggtgctgggggcagaacactcggcaaaatattttgctcagtacaaagacagcacaggacgggagttaccttgctacacattccctaagcgcgaagcttgcctgatggccatgagctacagctatgaattacaggctcgggttttcgaccacatgaccgagctggaaggtggtaaagatatcaatctgcttgatttttcagggctggctgacatggctatcatgtga

SEQ ID NO: 287543 - DNA, 249 bp, Morganella morganii
atgaaaaaatgtgaatctaacggaaccaaatacgcgagttacctgtgtgacttcatgcgcaagagggcgaaaagcaaatcaccgaccggcaaagcaaaagggatttacaaatatacagccatcgacacgatgaccggagatagcctgggtgatgcagtttattacgacgagggtaacggtagtcgaattcacatcaatttctgtccgttctgcggcggaaaattgcatagtgttgatattggtgagtga

SEQ ID NO: 287544 - DNA, 348 bp, Morganella morganii
atggaattatcaaaaagtatcaaagtcgattgctcatctaacgagctgatgagctttttcatccggcagaccttcgccatgaagaatgacaaccttgcgaaagaattgggtattcacccaacggcggcgagtcgggaaaagacaagagcgtttgaattggcatgtaaggcaattacagcacttggcctaccagaggattcagtaaaggtcgaaggaaaacctccgcgcttagtggtagagggcgcagatgccgaatggctgatgcagatgctggagattaaggggaaggtcaaaagaaaagccccggcggtaaccgaggctcgggatcaaatcgagttaacaatataa

SEQ ID NO: 287545 - DNA, 1032 bp, Morganella morganii
atgacgtcaatggcaattgagaaaataaaaataacatctgaatcagattttgttgcatttgtgtctgggatgctggaaaggaaagaccttgattctgataagttcactttccctgacattgagtttgttggctggcctacaatagatatacatgtaaaaggcgacccccaaaggtataacagctcatttaccacatctatgttatttggtatggctgattttactgatgctatttatcgggcattttcagtttttagacatagcacatctaacctaacaaatttaactgaagatgataaaaaatcattagatattgtgtatcatgtatctgagggctcaactaaaacagatggcacctcagataaaataataaatggcgcacttaaaagtttgaatagtttggtgaaaaaaatgaatggtagacaagctcttggcttaatagttgccttgaccattgctgccggaactgttggttggcactggatatctgagtattacgaaactcagaggcatgacaacacaaccactatagagctagtggataaatcaactcgcgctgttgttgactctcagaaagccatattagatgctttagttcatggtcaaacaagagagagcaaagaaatacttcaattcagtgaagatgggcaacaaaaattacttaaaaaacttgcgtctgacagcacagttacagaggcatctattggtggtcgtattgtggatagagatgagctaaataccatgaccgccaggcagaaagttgaaagagtaaaagagcaaaaggtctctagctttgttataaatggaatgaactggactggcagcgcagggcaagacctcagtctaactgtaataaatcaagactccggcgaaagcctaactctaaaaacagcagaaggaacaatgcttcctgacgaactaacccagttgtcgagtgcatggactagtcggagtgagataaaaataaagtatcttgaagttcaggaaaacggcaagacgacagtaagccaatttatttcgatagaacaataa

SEQ ID NO: 287546 - DNA, 162 bp, Morganella morganii
atggaagaattagagaatttgataaaacaaatggcaaaagaggaaggcatcacattcaaggatgccataaaaataactattaatttacttcgcatcaatcaagataaccagcctgataagcattcaacacccgctgatggtggcggtcattttgatgggtaa

SEQ ID NO: 287547 - DNA, 288 bp, Morganella morganii
atggctaactatattgttagaattgagttgtataatgcggactatgatgattacgacactcttcataagagaatggagggcattcgattttatcgatatattcagttttcaaatggtaaaaaccatgatttaccaaatgggacatactttggtaaaagcagtctgacggcatctcaattactcggcgaggttaaaaaagttgcaaagccgttgtctaaatcaaaagacccatcaatatttttatgcgcttttactgattggacagcttcgctttacccatcaaaatga

SEQ ID NO: 287548 - DNA, 264 bp, Morganella morganii
atgtggccgtttagaaaaaaagaaatacccgaagttgtcgattcccagaccgtggaatatgaaatacctacatggtttgatttcgaaaaagaaatcccgcctatctcacatgatgagttaatcattaaagacagcaaagggcgaatgcttatcgctcgatatctgtcgggtgattgctggggcggcgactgcggtttttattttcacgacgatagaagagtgaagtatttcaaagtagtcaaatggatgaaaatccctgactaa

SEQ ID NO: 287549 - DNA, 201 bp, Morganella morganii
atgcacaagataactatcgaatcaaaacacctggcgacaagcactgagcaagcaggatgcggaaatcagcgagccgtaatttattttgaccgtaattcaagcgtggaaacaatggacgttgaaacgcttatcttgctgcttaatccagagaaggaaactctggaaaagatactcagggagcgatacggggaggcagtatga

SEQ ID NO: 287550 - DNA, 318 bp, Morganella morganii
atgatgaggcacaaagaagtgacagattacgaaattaataaaaccgtagcgaaatatctaaaattaaacacaatcgcatatgaccgcacggaaatagttttatttgacgatatggacgcaacaccattcgacccctgcaacaaccctgctgacgcaatgccgattattattgagaatagcatcggcatggttcgagtaaataacgagtggtcagcgcgtcaatttaacaatcactgcatcgaagttaatgatagtaactattatcgcgcggctatgatttgtttcctgataatgaaggatgcggggaatgaaagctga

SEQ ID NO: 287551 - DNA, 1875 bp, Morganella morganii
atgtcatgttatttcgatatacctgtaaatattgaaggtaataaaaaactgcgcatacctcaaatagaagcatatataaaaataaaagaatattttaataatccagataacaatgaagccttagttgtattacctactggaacaggaaagagtggacttatatctattgcaccatatggtgtagctaaaaaaagagttcttatattaactccaggattagtgactaaaaatagcataaaaaaaacacaagaagttcttaatgataatttttggataaattttgatattatgtttagcagcaaagatattcctatagttaacgagtactcctcttctatttcagatgaacacttaagagatagtcatatcgtatataccaatattcaaaaggtttcaggaaataatatacgagggttaataaacagagttccttatgatttttttgattttattattgtagatgaagctcatcacgctccagctaaaagttggatcgatactttaagttatttttcctccgctaaagttctacacgtaacaggaactccgttcagaggtgataatcaagaaattcccggtgaaaaaattcatgagacaccactatcagaagtaatgagagatcggtatgtaaaatggttaagaaaagaaactgttaatgctcatgaaatttatttctataccccagatttaccagatgtaaaactaaccaaagaacaggtaattatactgaaagataaagaatggctagaaaaaagcattgcattgtctaaagattgctctctcgatgtaatcaggcatagtattgaaaaattacatgaactaaaaagctcgtctcctaacgttccccataaaatactagctgttggctgtagtatcgcacatgctgaagatctattcatttggtataaagagcagggattaaaatctgtcattatacatagtgaaatggatgatgatgaaaaagatcatgcattttctgaaattgataggaacaactgtgatgttgttatttctgttaatatgctgatggaaggatatgatcataaatacctaaccgtattagctatttttagaccatatcgcagcttgaatgcgtttgctcaagtcgtaggtcgtattttaagagctatacctgaaaatgagataactacttttgaaatagacaataatggaattgtaatttttcatgaagaaattggactaaatgtcatgtgggaatcattccaaaaagaggtagatagagctaaaaaagcaactgttagagaatacagctttactgatagagagtatattgaaaggtcgtctactctagcttccattgaaagtgaaggaactattattagtagttctgaatcttatctaaatgatattaatttcaatgaaatatttgaaaaaaagagaactgaaattaaacagtctgtaaatgaaaaattagaaaaaataaagttactatcgggacttgaattatctgatgatatattaaattcctttagagaaaagctagcagaagaggaaatgcggaaagttgctgatgatataatcgatccagagttaatagagaaaagacctcaccaagccagagtagcgctacgtgatattcttactaaaagaacacaagacatagcagccaacctcttgatagaaaacaatattagtgagaaaggaactgagttatatagtatttttcgttattcagttccatacttaaagccaacagatgcaaacgatggtatacttgttcgcttcatttttgctaaactagttcgcacatatggccccgttaaccaaagagataatcaaaccttgctactttctatcaaagcacttgatgagttagtaatggaagttgagaggatgataaaaaatgtcaaataa

SEQ ID NO: 287552 - DNA, 528 bp, Morganella morganii
atgaaaaaggcaatcacgatattacttaacgggtgggtgtgggctgttttgtttttcggtctgtggatgttcagcatgctgtcagccgaacaaacggaaagccaacataaagataaggttatcactgaccagcaaaaagtgattgataacgcctacaccagtatcgaaatctttgatcgcgtggccgcggcgaacgccaaccgtaatatgcgcgccgatgctcaatcacaggagaagcagattgaataccgcacaatcatccggaaagaggctacctgcaatttgtatattcctcagcctgtttctgacgggttgctcagccacgtctacaccatccgtgaatcagcaatgcgttccgctcccagcatcactgacacaaccggtactggcaccactgccacccgccgcctgacatattgccaggcggttgaatggatagagccactactgaccgcactggataaggcgaacgggcagttaatggatatccggaaagtggatacagagcgaagcgggaagccaagataa

SEQ ID NO: 287553 - DNA, 444 bp, Morganella morganii
atgcttacttgctttgatgtggccgattatttcttgtcgcgctgcgatgatgaaagcggcgacacaatctctaatatgaagcttcaaaaactcgtctactatgcacagggtttttccttggcgttacttggtcaccctctttttgaaaacaaaatagaggcttggatgcacgggccagtggttccagatctttaccatcaatataaatcacacgggaactgtgcgttacctgcgccagagagtgttgatgaatcaaaattcagtgaagatgaattggatttgctaaatgaggtgtgggatgtttttggtcaattttcagcttggaaattaagaaacatgacacatgaagagtccccatggaaaggcaattatgttgagggagtcgggggatcagaaatccctcttgaggatatggctgaatattttgctactcgtgtgagataa

SEQ ID NO: 287554 - DNA, 237 bp, Morganella morganii
gtgacagataaagcggcgaaaaaggaaagtgatatcgcggcggcagaagcgcaaaagcaatacctgatttccgaagtcaccgccgaaacagaaatgctcagggtaaagctggcactcaaacgcattaagccagacgaagaagccctgttaatcgcctggctggattatctggacgaactggaagcggcagacgtatctgccgccccggatattatctggccgcagaaaccgcagtaa

SEQ ID NO: 287555 - DNA, 837 bp, Morganella morganii
gtgatcgatgacccattaccagagaactggcaagacctccagacaggtgtccaacgtatattccgtaatgttggcttgcttgcagaagtcgaggtcgatttagaaaccccgcgtggctcggtgaatgtagatgttctcgcgacagatgttaggagcgtggacaaaatcagatacatcgtggaatgcaaaaactggggtagctctataccacagactgtggtccattctttcaccacagtaatgcatgaaactggggctaacattggatttattatttcaaagcatgggcttcagcagggtgctaaacagtacactcaaaacaccaatattattgggatgacatacctagagttccaacaaaggtattttgaggcttggtggaataggtacttttgtccacgtatcggtgatgcagcagacgaaccgcttcagtacgtcgaaccaatcaactcaaagcgagatcgcgaatacgccaagcttagccttcaagaacaagagaagttcgatcagttaaggaaagagaaaggtgtatcagtaatggttctctctatgctcaattacaagtttatgtcgaaagcattaaacactggtaacttgctggaagtcccaaagaatctggatgattttaagagcagagttcttgcccaaatttgtcctcacatagaatggcattgcgatacatacagggagctgcttgagatcatcttggaatacttatcagacaccaaagcagagtttgatacgatatttggtggagccatctttgaaccgctaagtagcattacagggattactgctgatggtccccctttggaagatgatatttatcatcattaa

SEQ ID NO: 287556 - DNA, 213 bp, Morganella morganii
atgcaagtcgaaccaatcatcaccaccaacaatatgtcagcagacgaagttgcagcgtggattactgaaaaagcccaggcgcttcaaaaactgcaatcactccgtgctgaacgccaaagagagatccgtgaccacgagcgcacgatggcccgcctcgatgaagacatcgccagatgggaagacctctgcgctttaacagtacaaccgcagtaa

SEQ ID NO: 287557 - DNA, 705 bp, Morganella morganii
atgatgcgtaaaaacattcaggcagctatttttgcacacgcagaacgtgaatacccccgcgagtgctgcggggtgatagcgcaaaaatcccgtgtggtgaaatactttccctgccgtaatatcgcggctacgccggaagagcattttgtattatcgccggaagattacgctgctgcggaggattggggcacagtgaccggtattgttcacagtcacccggatgccactacccagccgtcagaactggacaaagcacagtgcgatgctctgggtgtgccgtggtatatcgtcagctggccggagggggatctgcggactgttcagccgcgcggtgaattgccgttactcggtcggccgtttgtgctcggatttacggattgctgggggctggtgatgagctggttcaggcaggaacacagcattgaactgccggattaccgggtggattatccctggtgggaacagggtgagaaccgttacgccgataactggcaggaagcgggatttattcaggttgacgatccgcaacccggtgatgttatcgtgatgcaggtgcaggcaccggttgccaatcatgccggtattttgctgcctgataatatgctgttgcatcatttatacggtcacctgagccagcgggtaccgtatggcggttactggcgcgaccgcacagttatggtactgcatcatgagcaactgatatga

SEQ ID NO: 287558 - DNA, 588 bp, Morganella morganii; identical to SEQ ID NO: 283945

SEQ ID NO: 287559 - DNA, 570 bp, Morganella morganii
atgaaaaaattaacagtatccataggcagtttgggtagcgcggctgccggtgattatgtgagctttaatatctggcagggcaaacgactactggtcagtgacaagattgcaggtaaacattccggtacattccatcgtgagtatgatgtggattatacccagggtgagccactgcgcatcgaaagcaacgcaccggctggctgttctgtcggggtgaatgtgaccccatctgatgatgtagtggctgacactgacgcttcagctgtatttaacggtgtgctgagaattaaggataaccagattttcatacgtgaaacattcatcgatacagcatggcttaatggcgtgacacctaactttactttcgtggctcatagtattacccctgactctgatacagttacagcatatgttgatgttaaagattccatgttaccgctgatgagtatattttccctgcaggtaacgatggaacgaaacgacgaactgtcactgggacagtatgaatcggcggctatccggcaagctaaggccttgattactgctatcgcaaaagaggcggccttgtga

SEQ ID NO: 287560 - DNA, 1221 bp, Morganella morganii
atgaaacttcatgaattaaaacaaaaacgtaataccatcgccaccgaaatgcgtgctatccatgaaaaagtcggtgacggtgtcatgaccgaagagcagcgcggcgagtggaatcaggccaaaactgagtttgaccgcctgaatgagcagatcacccgcgaagaggaactgcgcttggcagatcagaccttcgtggatgacaaagagccggaacagcgcggaaagcagccgggtaatccggaaagcgaagccgcagagcgccgcgccgcggcatttgaccgctttctccgccatggtttcggtgagctgacagcagaagaacgtcaggccgtgagggaattacgggctcagggaacatccccggatgagaaagggggctataccgtacctactcagatgctgaataaagtcgttgataagatgaaagcctatggtggtattgctggcatttcgcagatcctgccaacttcaaacgggcaggatatcacctggtcaacatcagacggtacagcggaggagggggaactgctgggcgaaaacaccgctgccagcgaacaggacgttgagttcgggaccgctgttctcggtgctaaaaaactgtcctccaaaattatccgggtatccaatgagttgttgcaggacagcgggattgatattgaatcctacctcgcagcccgtattgcgcagcgtatcggacgtggtgaggctaaatatctggtgaaaggtaccggcgcaggcactccggtgcagccgaaggggctggatgcatctgttaccggtacggtcgatgcctccgccgtattcacctggaaagatattaatgccctgaaacacgccattgatccggcctaccgcaacagccctaagttccggctggcttttaatgacagcaccctgaaagtgctcacggaaatggaagacggcaacaagcgtccgctgtggctgccggaaatcaccggtgttgctcctgcgacgattctgggtatgcagtatgctgtggatcaggctgtcgacagcatggaaaccggcaagaagtttatcttctgtggtgatttcgatcgcttcattgtccgccgtgtcacctatatgacgctgaaacgtctggtggagcgttacgctgaatttgaccagactgcattcctcgcgtttcaccgctttgactgctgcctggaagacacctccgcgattaaggcgctggtggccaaagctgcgacaaagtaa

SEQ ID NO: 287561 - DNA, 813 bp, Morganella morganii
atgaaattcgggtttaatataactttcgagaaagatatttctgagcaggcactgatttatcaaacatccgatttcaagagggaattgaagggtgtaatagaggaagccattaataaaaatgatgtctctgttatttacaaacatgccgaagtagttaagaattggttcccgaacggcggctatcatatatttatatcccatagtcacaaagacgccaatacggctaaatatatagcgaataagctttatgaaaactatggaattaaaagtttcattgattctgagttttgggggtatgttgatgagatcatttccgaaattaatcatgagcatttcccttgcggtgagaataacgagtatttaatctatgaatcatgtatgaaagtagcaagtaatttttatttaatacttgcagatgctttattggacgccataaacctaagtgattcttgttggttcttaaatacatcgaactctattcattgcacagactctttagaaaaagcaacctattcaccatggatatacactgagttaaaatacacatctgtcattgaaagaaattggcatcccgaaaggaagttaatcgctaccgaatcgataataaaatccgggagtgggctggaggaaatatcaaagtcagcaaatgtatatgttgaatatattgcgccattaaatcatttaaccactgtttctgaaaataagttaaatttgattttggataagaaaattaacgatattggcgatctgaaatatcaaaaagataaacacttttactggttgaattcaatatataaagaattatttaactaa

SEQ ID NO: 287562 - DNA, 1269 bp, Morganella morganii
atgagtattcatagtgccgatacaaataaatcacccggactgaccagcggaaccatgcttgttatagcaacagtcgttggcggcggtatgttttctttgccgattgcgatggccggtgtctggttttccggtgccaccgttattttgattttagttgcaattatgatgttactgaccggtctgatgttagttgaagttaacctgcattttgaaccgggcgccagctttaataccttcaccaccgagttactgggcaaaaaatggaatattgtcgtgggtattgccttcgggtttgtactctatattctgacgtatgcctatatatccgggtcatccgctgttctgactcagacgatattaaaatataccggtgtcgccctgccgataaaagccgcggtcgtgattgtcgcctgtctggtggctgcgattgtctggtacagctcattatgggtcggacgtattaccaccattttaattttcggtaagtttatcgcgttctttgccaccttctccggactggttgcacacgtggaaattgccaatctgctggattccgcatcagtggcaatacccggaacgaaatatctgccttatgttctgatgacactgccgttctgtattatttcgtttggcttccacggtaacgtgccgagcctggtgaagttgtacggcaaaaccaaattccgctttattacccgttcaattattatcgggacaatatttgcggtactgctgtatatcttctggctgggtgtcacgatgggcaatatcagccgcgccaacttctccccgattattgccaaaggcgggaacattgatgtgttcgttgaggctctcggcgggaggatgtcagggaaaaccatggatcttatcctgacattcttcggtaactttgcggtggccagttccctgctggcagcaacactcggcctgtttgactatattgccgacctgctgaactttaaaaatgacagcgccggtcgtttcaaaacagcggtagtgacgtatctgccaccggcggtggtgtgtttcttcttcccgaacggattcgtttatgccatcggttatgccggtctggcctttactatctggagtgtgattttaccgccgttcctggtaaaagcctcccgcaaacgctacagcgacagcgataccatttaccgttcgccgtgtaacagcgcggtactgaatctggtgattgtctgcggtgcgattgtgtatctgacggtcattctggatgtgttcggctggctgccggcatttaaataa

SEQ ID NO: 287563 - DNA, 978 bp, Morganella morganii
gtgagagggctgacccaggcatcccgtaatgccagtgatggtatttccattgcgcaggtgacggaaggtgcggttaatgaaatcaatgataacttacagcgtatccgtgagctggcggtacaggcacaaaacggcactaactcagaaagtgaccgcgcctctattaaggaagaagtggatcagcgtctgaaggaaatcgaccgtatttcagagcagacgcagtttaacggcatcaaagtgctggccagtgacagtaaaatgactttccaggtcggtgccaatgatggtgaaactatcgatattgacctgaaaaaagtggatcgcgagtctctggggctgaaggatgtggatgtggctgccgtggctaaaaattatgtctgggacggtggtgccattaacctcgctgacttcaaggacagtgccaatgcgtctgctacagtcgcaacagtagaggcaccggcaggtatgacctggaaaacagcaccgggtgctgctgatattcatgccgtgacagatgaaaacggtcaggtggttccggataaatattatgtcgtcggtaaagttgatgatggttccgccaacggtaaagatgtcgggctggaagtaacactcgataaaacagaagatgtcggtggtgtggtcacagcacagtttaaagcgaccaataaagaagtggaagtgctggctgccggtacgaaagcaccccttggcccgctggaaacgctggatagtgcattggcaaaaattgattctcagcgcagtcagctgggtgcattccagaaccggatgcaatccaccattaataacctgaacaactccgttaacaatctgagcgctgcccgcagccgtattcaggatgcggatttcgcgactgaagtgtctaatatgagccgtggtcagattctgcaacaggcaggtacagctgtactggcacaggcaaaccaggtgccgcagtcagtactgagcttactgcgttaa

SEQ ID NO: 287564 - DNA, 378 bp, Morganella morganii; identical to SEQ ID NO: 278131

SEQ ID NO: 287565 - DNA, 378 bp, Morganella morganii; identical to SEQ ID NO: 278131

SEQ ID NO: 287566 - DNA, 321 bp, Morganella morganii
atgttgaagcctattaacggcacatctcgtcaggttggttctgttgagcaggacatgcagcgcaggctgactggtacattcttttcaaggccgatttataatgcaaaaggtgcactcggtgctgtttacaaggcggatggcacatttagaacatcacaggcggccggtgatgacagaacctcacctctgatgacaaacgcagcaacgccagaagatatatcagataccatcacttttgattcaggacgtcaggttccgacaggtagtgagaacacggttctaaacgtcggcgtgacattagcaatttatctcggggtgtaa

SEQ ID NO: 287567 - DNA, 441 bp, Morganella morganii; identical to SEQ ID NO: 277767

SEQ ID NO: 287568 - DNA, 204 bp, Morganella morganii
atggctgataaaaaaacagaactgctcgggctgggtaatgtggaaatgcgtatgcagtttgtgacggatttggtgacttacctgagagacaaatacggtgatgatgcctgtggttcatcagtgatgccggaattgttgcttctgacatcactggtattaagcggtaagtatagtactgataataccttccgttccagcagctag

SEQ ID NO: 287569 - DNA, 519 bp, Morganella morganii
atgaaaaaatatttattagggattgtactggcacttaccgcagcgggagcgatggcggttgatgggtacaaaggtgtgaagtttggctcatcttttgaagatctgcagtcggcgggactttgtgattttaagaaggcaaacagtcagcctaatggacaaaacgttgttgtatacaattgtctggattttaaattttctgggaaagatacaattgctgctgcctcatttttagacggtaaatttggtaagctagtgataatggtgaattcaccggcagagccagtaattgacgctctggctaagaaatatggtggagtatcttcgtcttcaacaatggaagagatacaaaatgcaccgataaccgggaagcctgtatatgtccggtttgatcacgatactgtagtttttaagatggagatggccggtaaaataaatataaaacacctgatctatacctctcctgagtttgataagaaaatgaatgaaactcaagcaagcaacatatctgatgacatctaa

SEQ ID NO: 287570 - DNA, 279 bp, Morganella morganii
atgcagctttctaggcaagatttgacacatttgtttgtacgagaaggtcatgactggtcaagcaaagcaatctatgcagcacttgagcagcgtggtctggatttaaccgtattagaaacggaaaacggtttaaaaagcggaacgatgcgaaatgtcttttaccgccagtgtccgaagtatgaggaaattattgctcacgcaattggcatcgaccctgccgttatttggccgaaccgttatcaggaaccagcccggttctctgaccttaaaacagcttga

SEQ ID NO: 287571 - DNA, 591 bp, Morganella morganii
atggaaaagtccgataatagtccggaaatgcagaaacagattattccaatggagggattaatccgttttcctgagcgattaaatttagctatgaaagggatgacaaacgttgaactagcaggcaagacagggcttacagaagcaactattaggaactatagaaaagggaaaagttacccgccccttgataaactcaaagaattagcagatgcatgtaactgcccgttaggttggctggctactgggggagccagtaacgctgatattcgtcaaaacgaaatagatttcgatggtgaaattcgcgagcttgcgacatggctttcaaatgaggagaaagtagccctgatcagctttatacgcagggaaggtataaacactcttctaagattaacgaaaataaaccaaacgttgatatccaatcacacaatagaggagcaaatcgataatttaccaattcgcccactattgaagcaggccattaagataggtttagcaaatgatggtgattacgacagagagattttgcgccttcttgaggaaatcgagtccaagggccaaagcaataatttagccaaaaataaggtgggatga

SEQ ID NO: 287572 - DNA, 549 bp, Morganella morganii
atgtctttagctgacaaaatgagattgcaagaattaaaaaacgaatgtgacacattaatggaacctagaactgcactactaaaaacacaaatcagtaaggccggagaggatataaaaaagggaattatcgaatttttcaaatcaaaaaattttactgttgaaggaagcggttcaaatataaaggtacattataaaggaggattacagacaaaaattgatttcagctgccttcttaaggggtcttgggggtgtgatgggctagtcgattttgaatacgaatccagaaagtatagcttgatatatatagttgaaagggggaatttaccacaacaaaatggtggggtttttaattctaatgatgaaatgagaaagactgaaatcgactactatgaaaagcaattgataccagcactaaaagaattaaaaatgactgacctgactggtaattatagtatttcagttatcgctaaagctaatactgctaccggatcaggtagaagtgaaaaattcgaaaacattgaagatgcattagatagttttatttgttaa

SEQ ID NO: 287573 - DNA, 351 bp, Morganella morganii
gtgagcacaaaaccgcaattatggccaacgggtgagcaattcacccgtgaggtgattattcagacaaacaccgatccgctgccggtgatgatcacttacacggtaccgccttttgaggcagttatcgaagcctggcagaatacggacccggcgaaaagctatccgcagttacggcagtttattatcggctgggatttacaggaaacgctgactgatactgtgttaatgtcgtttctgacatcatacagcgggacttacgaagccattctgaatggctggtgtgaacatatgaaaagtacgatgatagttaacaaatttaatatttttcagtcgttagaattaactcactga

SEQ ID NO: 287574 - DNA, 354 bp, Morganella morganii
atggcaagagcacccaaaccgccggtttaccttaatgaaattgcggcgaaagagtggaaggcaaaagcgaaagcactgagtgaccgggacgacctgaccccggcagactggaacaacttagaattgtattgtgtgaattactccatgtaccgcaaagccgttgaggatctggacaaacgcgggttcagcattgccaacagtcagggcagcgaaagccgtaatccgtcactgagcgcgaaagcggacgcggaaaaaatcatgattaaaatgtcctcgctgctgggatttgatccggtgtcacgccgtaaaaattcggtggagacggacgaagaagatgagttagatcgcctgtga

SEQ ID NO: 287575 - DNA, 156 bp, Morganella morganii
atgcatgaagatgaaataaatcagatagttaaaggattactgaaacacagtgagccgtacagacagcagagatggaaacgctctgagaagcccgtggtgaagcgcacatcacagcgtgaccgggagataaacgaatgcttccgcaaccgtcagtga

SEQ ID NO: 287576 - DNA, 447 bp, Morganella morganii
atgccgtggcaaccgttaaaacgatgcagttatcagggctgtaataagcgtgtgaagtcaggccgctgtgatgagcacaggcgggaagccagacggcagcaggacagcagacgtggttcaaggcgtgagcgtggctatacgcctgcatgggataagtaccggctgaactatctgaaactgaatccgctctgtgtccactgtctgaaacttggcgtgtataccccggcaaagatagttgatcacatcattccgattgatggcggcagtgatgtgctgttctggcctgaatggaatcaccaaccgttatgcagcgggtgccactcacggaaaacggtgacaagtgacccggcaaccaaacagcggcgcagaaatggcgcataccgtgaacaggaagaaaaggccgcacaccgtactgactggatacatgagtataaccgcgatgcatga

SEQ ID NO: 287577 - DNA, 297 bp, Morganella morganii
gtgactaaacctgaaatcagcctggaagatatcagacggcactgccgtattgacgatgactttgaggatccgctgttacaggtgtatgcagatgctgcgctggaggtctgccagcagcatatcggcagacggtttgaggatggtctggcatttaccccggcgatcagagtcggctgcctgatgtatatcagtctgctgtatgagaaccgggaaatgataggcaatgagaatctgaaagaggttccgttaacaattgattccctgtggtcagtctaccgggatgtggggatttattaa

SEQ ID NO: 287578 - DNA, 216 bp, Morganella morganii
atggttagagcagaaacactgtcagatcaggccattcaaacgacattcagatggatggttgaggctaaaaatgcaatcgatgatattttcggagaagggtatgcggcagggcatcctgagcttgtctccgggtttatacaggcggcagcactggatcaggctggtatgtatttacgtgcaatcgcagagtcactggaaaacaacaaggcggattaa

SEQ ID NO: 287579 - DNA, 789 bp, Morganella morganii
atgaataataaggcaaaccaaaaagataagcttaattttttactaaaagaattagctggtggtgataagagtcgtttttattttgcgtgccttgaaggagatcttaaaactcagcatgaaatttcaaaaaaatataatgttatttttgatttaaacttgaagaaatcattacgcgatgattttattgatatttttctgtctggctcactagagaaagcgcagtgtaattatcgtgaatttgaaaatttattattggaagctgcggatgagttgttaagtgaaaatatcttcggtatagatacaaaaatagatagcattgacaaattgccattaatagaccgtgaaattaataaaaatgatgttgctgatgcaattggttttgggttaaataaaaaactgattgtgctaaagcaagcatatgatttgttaaggttggctaagtgtaataatactgctgatgagatattgaaaatttttaggattgaattgtgtgacttattactaggggagttgagagtaaagttaagatataaggaaattcaatctgaaaaagcaaaagaaaatgcatcaaagccaaggcacaaatattatgatgaggtaatttctgtaataaaagctacttgggataaatatcctaatgcgagtcagacaggtatattagaggcgttgtgctcccattattatggaaaggtcagtcgtaacgctttaaattcatggattgttaattcaaaattacgtccagccagaccccaaaaatattcatcttttgaattagttatccctcagtaa

SEQ ID NO: 287580 - DNA, 519 bp, Morganella morganii
atgataactttagagcatgcatttgaattagccaaaccttgggctataaaactatttgaagaaaaaatacttccttttatttttaataaaggaactgaaaaatataaaaaagagaaagatttatttaaattaaaaaacagaatgtctgattatttagcaaaaacaaaagcacagtgttcaataataaactccctagccttccctaatgttctaaaaaacgtcaatgatatatatattactttgactatctccacattagactcaagagatagcaatgaatacacgattgataatggttactccttcattaataaattcaaacatactttaataattgataatgcagggatgggcaagtccaccctaatgaaaaaaatagttattgataccattgataaatctgaatatatacctatctacattgaattaagaactcttgaaactgtctcttatacacatctccgagcccacgagactaggcatgatctcgtatgccgtcttctgcttgaaaaaaaataa

SEQ ID NO: 287581 - DNA, 168 bp, Morganella morganii
atgcaataccctattaacgaaatctttcagacattgcagggcgaaggggtttttaccggcgttccggcgatttttgtccgcttacagcgctgtccggtcgggtgcagctggtgtgataccaaacatacctgggaacagttaccggaaaaagcccagcagaagacatga

SEQ ID NO: 287582 - DNA, 1587 bp, Morganella morganii
atgtcatccgcaaagaaaaacgttgtgattggtgttctcggcacagtactcgaccggcgcggcaagaaagccaaccgctggcataaatggcggccgagtatcgggctgtgtcagcagccggatctgcatattgaccgctttgagctggtttatcagccgggtgatatgcagaccgcaggccgggtaaaagaggatatagagcaggcctccccgcagactgaagtgatgctgcgcgaggtggatattgccgacccgtgggattttgagcaggtatataccgcattgctggactttgccactcactacccgtttgatactgaaaatgaagagtatctggtgcatatcaccaccggcacccatgtggtgcagatttgctggttcctgctgaccgaagccagctatctgcccgcgcgtcttatccagactgcaccgcgccatgatgcacgggataaagatcctgccggggtgtataccattattgacctcgatctcagccgctatacacagatcaccggacgctttcagaaagagcagcaggcacaggtcgcgtttctgaagtccggcatcgccacacgcaatgccgggtttaataccatgatcgataaaatcgagcgtgttgctctgcgctcctccgcccctgttctgctgaccgggccgaccggtgccgggaaatcattcctggcacggcggatttatgaactgcgccgcagccgtcatcaggtaaaagggcgttttgtggaggtcaactgcgccacgctgcgcggtgataatgccatgtccgccctgttcggccatgtgaaaggggcatttaccggagcaattcaggcgcgcggcggactgctgaaagaggcgggcggcgggatcctgtttctggatgagattgccgagctgggcgccgacgaacaggcaatgctgctgaaagccattgaggaaaaacgctttttcccttacggctcggatcatgaaacagagagtgatttttccctgatcgccggtacacaccgcaatctggcacagcgggtcagcgaaggtctgttccgtgaggatttatacgcccgtatcaatatgtggacctttgccctgcccgggctggcgcagcgccgcgaggatattgagccgaacgtggattatgagctggcgaaatacagccgcgaccagcagacccgtgtccggtttgataccgacgccaggcagcactacctcgcctttgcctgctcaccaccggctttgtggcgcggtaacttccgtgaactgagtgcctctgtcacgcggatggcaacctttgcagagaacgggcggatcaccaccgcgctggtgcaggaagaaaccgaacggctgaagaatcagtggcacagcgcggaaacagcggtgacgttgcctgccggggtgagtgaaattgatttatttgatcgtcagcagctggaaacagtaattgccgtctgccgccgttcacagacactttctgatgccgggcgcacactgtttgctgtttcccgtcagcagaagaaacaacccaatgatgccgaccggctgcggaagtatctggcccgttttaatctcagctgggaacagattaccggctgctga

SEQ ID NO: 287583 - DNA, 3606 bp, Morganella morganii
atgaatacgaacaacattaaaaaatacgcaccaaaagcgcgccgcgaatttatggatgcggtagctaaacgattaaacacctttggtatcacggcgaataaaaaaggcgagctgcaaattgcagaagcgaatctacaaggttctgtgcttcaaatcgccggtaacagttttgacggtaagcttgctgagccaagaaaacgcatagtggccagaagccagaagctggggtatgcacaacttattgaacaagtagcttatacctggttcaaccgtctgtgtgctattcgctatatggaaatccatgactatctaggtcacggttttcgtgttttgtcgcacccagacaatcctaaaggctttgaaattatcgaccatgcgcaagatgctgcggatgaactcggattagatagagctcgcattattgaactcaagcttgcgggcaacaaagacgaagagctttatcgtgaactgctgttgggccagtgccataagcttcatgaagcgatgcctttcttattcgacgcattggacgatgaaacagaacttctgctaccagacaacctaacgcgtaccgactcaattctgcgtgggttggtagacggtatccctgaagaggactggcaacaggtagaagtgattggctggctttaccaattctacatttctgaaaagaaagatcaggtcatcggaaaagtggtcaaaagtgaagacattcctgccgctactcagctatttacacctaactggattgtaaagtacctggtacaaaactcagtcggtcgtcaatggctgcaaacctacccagactctgccattaaaggccagatggaatactacattgagcctgctgaacaatctgacgaagttaaccaacagctaaaggctattacgccagaatctattgaacctgaaaccatcaaagtactcgatcccgcttgtggctcgggccacatactgattgaagcttacaacgtactaaaagccatctacgaagaacgaggtttccgctctcgtgatattccaaagatgatcctggagaacaacctctacggcctggacatagatgatcgtgcagcacagttgtctggctttgcgctgatgatgatggctagagatgacgataagcgtatttttacccgtaacgtgcgacttaatgtactgtcattgcaggaaagtaaccatattgatctgccgaccttatggaaagcactcaacctatcgggaagttggcaaaacggcacatcacaaggcttgttctcagatgaagaacaagatttaagctcgttcaatgcagacaaccgctaccaactgctgaagcgaacgttggcaaggttcactcaggccaagacctttggttctttgattgatgtacctagcgatgaccatgagcaattaaaagagctactgaacacgcttgtagagcttcaagagtcaggcgactcaatgcaaaagccagcagcgaagcaattgatagaatttgttcatcaggctttggttttatctattcgttacgatgcggtgattgccaatccaccttatatgggcggcaaaggcatgaattcagatttgaaagagtttgctaagaaaaactatccaaatagtaaatctgatttgtttgctatttttatggagcgagcatttaaattgctatcacaatatggatttaatgctcaaattaacatgcaatcatggatgtttttgtcgagttatgaacggctaagaagtaacatacttgacaataatacgctaataacaatggcgcatttaggtccgcgtgcatttagtcaaattagtggtgaagtagttcaaacaacagcatgggtttttaataaaaagcacattgatggatatcagccgacaatttacagactgacgttaggtagtgaagcagacaaaaaacagaatttacttgctagaaactttcagcattcttcaattaggctggaggatttcaaaaagattccaggcagcccaattgcatattggataacaaataacgaactcgatgcatttagtagtgggacaaagttaggagatattgccgactcatcgaatggtattcaaactggtaataacgataccttcgtgaggttgtggtctgaagtgtcttcggaaaaattaggtaaaaagtggtttccttatatgaaaggaggtcagtttagaaaatggtatggaaaccaagagtatgttgttaactggtctgataatggtaatgctataagatcaatgagtaattcctgtgttagaggagaggctaattactttaaggaaaatataacttggtcagatgtcacttctggtaatctttcggcaaggtatacagaggaaggttctgtatttgatgcttcaggaccatctgcgtttattgaagaaaaaagtactctttttgctgtgttgggcttgcttaatacagaattagcgaatgcttggtcaaaaattcttaatccgactctccattttcaatctggagattttcgaaagcttcctttgtcaaagtctttaaatttagctgaagcaagaaaaattgttgcggctctaattgagatctcaaaatctgattgggatagtcaagaattatcaagaagttttatgagtcatccgttagtttcttgtgataatcgtattgttgattcttggagtaaatacaaaaataactgtgaatctacagttgaaaaatgctttgagctagaaatgaagaatgagctcttacacagggacagttttggactatctcgtggcgatttactcactaaaaaagaagaagttagtctttattctaatccacattataactacggatcatatgattatggcaggtttcaatgtgactcgttggtgtcattaatatcatattcaattgggtgtatggtagggcgtttttctctcgataaaaaggggctaatatttgcaggttcaaataatcgaggttttgacttactggatgctgagggtgcttataaaaaatttcctgccgatgaggatggcatcattccattaacagatcaagaatggttcaaggacgacgcaaccaatcgtgtccgtgagtttgttcaagtcgtttggggtgatgatcatctgcaagaaaacttggatttcgtcgccgaatcactatgcctaaatgccattcaaccaaagaaatctgaattagcgttggagacgattcgccgttatttatcgactcagttctataaagatcacctgaagacttacaaaaaacgccctatttattggctgtttagctcaggcaaacagaaggcttttgagtgcctggtttacctgcaccgttacaacgagggcacgctttctcgcatgcgtaccgagtatgtcaccccgttactaggcaaatacgatgcttatgcagagcaacttgagaagcagattgaaacggcagactcgaccagtgaagcgaaccgctttaagaaaaagttggacgccttaatcaagaaacaggtcgagctacgagagtttgatgacaagctaaaacactacgccgatatgcgtatttccctggatctcgatgatggtgtgaaagtgaattacggcaagtttggtgatctgttggctgaagtaaaggccattactggttcggccccggaggttaactaa

SEQ ID NO: 287584 - DNA, 1020 bp, Morganella morganii
atgaaagacgatataacctgtgaaatactggcgctgtcacaaacctacaataatggcacagagattactgatgatactacagaccgtgaatcactccgactgatagcgttatataccactgcattaattaaaagaaagagtcagcctgctccttttaaagggtactgctttgctaataaattacatatcaaggccactaaaaccggtcagttattttatgaattaatacaaaacattctttctctttcccgtgtcaccggtaaccgtcgcaaattacatccggttatttcgctgattgtttctcttgctgaaaaatatcatattcgttatgttccgatgctgtcggaatactatcctttctcagaggaggatattaaacagttaaatgaagcctattgtgaatttattcagtccgtggacagtaaagagtataaaactgctgtcagtacctttaagaacagtgcccgcaagaactaccgtttatgctgccgctatattgaaaacctgtttgagcgccatgcaaagctgctggtggtacggacagacctgtcttacggaaagcgggtcagccacaaagttacagccggggatttaacccgtcaccggattgccctgtacaaagcaatacagcggttacccctgtttaaacactgcgtcggttatatcctgaaactggaatacggtcgtgagaaaggctttcactaccactgtctgtttttcttcaacggccagcacgtcagacgggatattacgatagccgggctcatcggtgagttttggcaggaaaccatcactgacggacaggggatctactttaactgtaaccgttataaatcagattaccgtatctgcggtatcggcatgctgcaccgcactgagagcctccggcgggaaggcctgatgaccgcggtgaactatatctgcaaaacagaccagtgggtgaaacttcaggtaccggggattagccggacattctggcggggaaccatcagaaacaaacggcgcaaaacacgccggtaa

SEQ ID NO: 287585 - DNA, 969 bp, Morganella morganii
atgaccattatcgccgcatattattacaacgaaggtaagcgagtccgtgaaatcaggctcgatgagcacgtcgaactaaacgagaatcgctcgggcttctgctggatcgcgcttagcgagcccaccgcagacgaactcagcgcgatccagacgacgtataacctccatcctttggcgatcgacaacgccatgcacccgctgtgcccgcccaagctcgaggtctacaacgatgagttgtacgtcgtcgcccagaccgccgagctggtcggcgaccggatcagctacggcaagatggcgatcttcaccggtcacaatcaccttatcaccgtgcggcacggcaatgccggagcgctgggcaaacttcgggagcaactcgaggcatcgccgacgcagttcggcaagggtgtcgactatgtgctgcacgcgatcttgcaccgagtggtcgaccagtatctgcccatcttcgaaatgatcgaggacgacgtcctggcgatggagcgacggtcgctgcacgatttcctcgggccagaagaggtggcgcgaatcttcgaactaaggtccgaactcacgcggttccagcgcacgctcggggctatggccgagctggtgcgaaagctcgttcgcggccactttccctgcatcagcgccgaaatgacaccatatttccacgacgtcgcggaccatgtccaccgcgtgcagtccatggtcgacggcctcctgcttgtcctgtccacggtcttggaggccagcagccttctggaagcgcaaaggatcggtgtggtcactcgccagctcgcggcctgggcggcgatcttggcggtcccgacggcgatcgccggaatatatggcatgaacttcaagcacatgccggaactggacacgccatatggctacttcgtcgtgctcggagtgatagcggtgttctgccttctcctattcatgcgcttcaagaaggccaagtggctatga

SEQ ID NO: 287586 - DNA, 705 bp, Morganella morganii; identical to SEQ ID NO: 127112

SEQ ID NO: 287587 - DNA, 540 bp, Morganella morganii; identical to SEQ ID NO: 127111

SEQ ID NO: 287588 - DNA, 444 bp, Morganella morganii; identical to SEQ ID NO: 127110

SEQ ID NO: 287589 - DNA, 765 bp, Morganella morganii
ttgacttcctctgttgcgcttctactcaaagaattaaggctgccggcgttcgtcaggcactatgaaaaactctggcaaaccgcggtagaaaaaggctggtcgcacagtgactaccttgcggcattatgcgaatacgagctcgcagagcgctttacacggcgcacacaaagctgggtacgcgaagggaggctggcaccgggaaaaaccttaagcactctggataacagcgtgctcagccggacaaatcaagcgctcatcgccaagttgcaccaagacctgtcctgggcacatcacgccgataatatcctgctgattggccccagtggcaccggcaaaacacacatagccaatgcattgggttaccggctgattgagcaaggcatacgctgcaaactgtttccagccattggcttggtacaacagttacaacaagccaagcgcgaactggatctgatgagcgagatgagcaagctggataagtatcaggtgatcatcattgatgacattggttatgtgaaaaaaaccgatgcagaaacccaggtactgtttgaatttatcgcgcatcgatatgaaagcggtagcctgatcatcacagccaatcacccgtttagtgcatgggatcagatcttcccagacagcatgatgacggtagcggccatagatcggctgatccaccacgcgacaattatagaattagaaggagaaagctatcgaaaacaacatcagttaaaacaagctggaagtaggaaaaatgagaaaacctaa

SEQ ID NO: 287590 - DNA, 1479 bp, Morganella morganii
atgcagcatcgccaacaaggcatgactcaagaaatcgctgctgcgaagtctgccatttccacccgcactgcccgacgtattgagcagtccaacaccttaccccgcgctaaagctgatagagattggcgcacccgcgaagatccactggaagccgtatgggaaaccgatctggttgttcttttaaacgctaaaccagagcttacgcctattactttgctggagcatttgcaggcgctctatccaaaccaatatgaccagcgaattctgagaacattgcagcgtcgggttaagaaatggaaagcactacatggcccggagaaagatgtcatcttccgccagcaagctcaacccggtttacagggcttctctgattttactcatcctgatagcccgatcaccattaagcagcaaccctttgctcatttgctgtatcagttccgcctcgcttatagcggctggcgttccatcactgtggttcagggtggtgagagctattctgccttatctaccggtttacagcgtgcgctgacgcaggctggtggctgtccggtggagcatcgcaccgatagcctcagtgccgccaggaacaatacgcaaaatgtctggacagatgcctatcaggacttgtgcgagcattacaacatgacgccaacgcgcaataacctggggcaatcgcatgagaacggcgtagtggagtgcgctaatggctcatttaaacgccgtctggcgcagcacctgctacttcgcggccacagtgactttgacagtatcgaagcctaccaggcctttattgatcaaatcgtcggcaagctaaaccagcgctcacgcagccgctttttagaagagcagcaagccctgcaagccttaccggagtatggtgctgttgattacaccttactgagtattaaagtcacccgcagtgccaccatagaagtgcgccgggtggtgtacagcgtgccatcacgattgattggcgagcgcctgcaggtacggctgtatcatgacaaactggtgctctatgtgggccagcaggtggcgctgaccttgccacgaatttacccggcacccggccaaagccgtgcacgttgtatcaactaccggcatattatccgctcactggctgcgaaaccgcaggcgtttcgttactcgcaactgcgggatgatatcttacctgacgacaattaccggcagttgtggcagttagtggatgatgcgttaccagcacaggatgcctgtaaatggatagtcacggtgttatggctggcgagcgaatacgatagcgaacaagagctgggagagaccttgttgcaagaggccagagccggtctgtttgaaagtgccaaaaccattcaggagcgcttttacaccccgcaaagcgcaccagacattaagacaaagcaacataacctgcaaagttatgatgcactgctaacgtcattaaaggcacaggcgaaacacgatgtggaggtgccattttga

SEQ ID NO: 287591 - DNA, 2967 bp, Morganella morganii; identical to SEQ ID NO: 92420

SEQ ID NO: 287592 - DNA, 501 bp, Morganella morganii; identical to SEQ ID NO: 85998

SEQ ID NO: 287593 - DNA, 372 bp, Morganella morganii; identical to SEQ ID NO: 85999

SEQ ID NO: 287594 - DNA, 558 bp, Morganella morganii; identical to SEQ ID NO: 86000

SEQ ID NO: 287595 - DNA, 642 bp, Morganella morganii
atgtcctgcaaacgtaaaattccgctcggagaaaacgtgctggatgcagcacaaaagcggattgaatggctgtttgatacttttgaacaaatcaccctttccttttccggcggcaaagactccaccgttctttttcatctggttgcagcagaggccagaagacggcaccggaaattcaatgtcatgtttctcgactgggaagtacagtattccgctactatcagccatgttgctgccatgaaatcactctatgccgactgtactcagcggttttactggatagcgctgcctgtcaccaccgaaagtggtatttcccagtatgaaccggcctggacggcctgggaacccggtaaaaaatgggtccggcaaccaccggaagatgccattactgaccctgatttctttcccttctatcatccggggattatttttgaagattttactccctcatttaatcagtggatcaccggagatcatcacagctctgtcatactgctggggatccgcgccgatgaatcattaaaccggtttctcgccatcagtaataaccggaaactgcgttatgcgatgatatcccgtggacaaccgcatcaccggaaggattctattatatgggttacccgatttatgactggcatgtga

SEQ ID NO: 287596 - DNA, 318 bp, Morganella morganii
atgaacaaatatagtgacaaatcggattttgaaattaataaggctgtggctgttgctattggaaaggttataggcataagaccagactccaatattatatatttaattggtggtgatgagcttatagaattcgacccctgcaacaacccggcggacgcatggccgattattaatgagtatggtattagccttatatatcaagagagagaattccagtttgcaactaacgacggaaatatagagtgcagcattagcaatccattaaaagccgcaatgattattttcctgatgatgaaggatgcggagaatgaaagctga

SEQ ID NO: 287597 - DNA, 279 bp, Morganella morganii
atggataatatgtatgctgcattttgcgcgtggtttaaagattatcacggatttaacccgtcagtagcgccagactatagccacttggttggctctcgcagagtggcgtttgaggcaggatataagactgctcttaattcactaaatattaaacttccggtaaaagaagaaagcccagcggataataataattatgcacatggatataaccgcgcaataaccgagtgccacgatgcaattaagcgccagggatttactgtcaaattaactctgaaataa

SEQ ID NO: 287598 - DNA, 684 bp, Morganella morganii
atgaaagagcacggaataattttcaacgctgagatggttcgcgccatcctcgatggccggaagacgcagacgcgtataatcatgaagccacagccagtacctattaacggtggcgataatcatgtgtggtattgcgaaaaaatagatgcgagccttgatgttaaagatgctttacaagatggaaatgttggctggtatggtttgatttcttctgtttgcccactcggtggagttggcgaccgtctttatgtcagagagaaattctctcgccttgaatcatttggtttctttgattccgcagtgccttatgaggttcctgatttctggtactgggcggatggcgaaccggaatggggtaactggactaggccacaatcaggcgcagtcatgccacgtaatgccagcagaatcagcctcgaagtaactggtgttcgcgttgagcggttgcgtgacgctgacgatatgaccctacttgatgaattgggagacatgctagatgactgccacagcgtagcaggacgggcatttaaccacgctgaacattacgatattgctggtatcgacgttggcatgatgccagaaatgcacgggtttaaagcgtggtgggacaaagtaaatggcagtgggagtttcgactccaatccgtgggtatgggttatcgaatttaagcagattcaggaatga

SEQ ID NO: 287599 - DNA, 264 bp, Morganella morganii
atgtggccgtttagaaaaaaagaaattaccgaagttgtctatttacagaccacggtatgtgaaacaccgatatggcttgattttgaaaaagaaccacctcccatctcacatgatgagttaatcattaaagacagcaaaggacgaatgcttatcgctcgatatctgtcgggtgattgctggggcggcgactgcggtttttattttcacgacgatagaagagtgaagtatttcaaagtagtcaaatggatgaaaatccctgactaa

SEQ ID NO: 287600 - DNA, 237 bp, Morganella morganii
gtgacagataaactttacacctacggaaatacgccagataaaaagttaccgccaatttacggaaaagacggagcgcgtgatatcgcatcactgcgcgacatgttcgcagcaaaagccatgcagggaattttgtctaaccctggtcagttagataacgttaataaagaatctgctgaatgggtatcgagagatgcatatctggtggcagacgcaatgctcagagcaagggagaaataa

SEQ ID NO: 287601 - DNA, 948 bp, Morganella morganii
atgaatgaagacatcaataaaaaaactttgtctatagatggcaggatttcctttatcaaaaataaggtagactcattacgaaattctggctctacctttgctgacaaattatatctttcctcgcttgaatctcacttaagtgaccttaatggaattgctttaaaagaatcattaaaccatccattcagggactttcttgagctaagactaaaaggcgcggtagtggatttgggcacgatacctttgggaattttatctgccttctctaaaaatctagaggggctaattcttaaagcaactaacaaaatatcttcgggtaaagaccaaagatcagctcccaaagctttaaaacaaacaatagatttaaggctggcaaacataagtcatggttctactaggttaggcgtttcgtttaactcaaattcagctgataacggtgaaatgtttgagactacaacaagcaaggctgttagtgacattttcatgttgttagaatcgactagtgatgatgatttcattaacaacatctcagagattggctataattcagccttatctctaagggaaatcatcaatgaatgtagagataatgatattacatttgatatgtcttggactggtccattcagcaatggtacgaaacaggtcactgttaacaaaaatcacttagaaaggcttcatgatagactcaatacgactcaagttattaagccaagaaaagaaagaatatctggtgaattagccgtcttatccaagtatgggaaatttgatgtgttgcttgatgacggatcaaaaataaaagttgatttccctgtagataagcttgacgaaatacaaaaaatgcataaagttggctcaagaatgacattcgatgcagaggtaacagaaatatttaatacttctatacatcaaaccaggcagaactatcgactaatatctataaaataa

SEQ ID NO: 287602 - DNA, 468 bp, Morganella morganii
atggataaaagcagttatcctcctttacttgattctggttttcacattatggattgtgaaaaaattaaagaaatttgtgttagtgcttttccagaatcacagcgaagaggaatattatataatagtttccagaatttactatcaggcttcaatagaattaattctattattcattgcatatcagagatatgggttgatggttcatttacgacagaaaagccagaaccagatgatatagatattttagttgttctagacccatccctgttaaatcagtttcctgaagaatatcacggcgctatttcgcaacttcttgatagaaaatttgtaaaattaaattataatattgatgtgctactactgtacaaaaacacaccgagttataacacagatagaagctattggcgtggttggtttggctttgatagagaagaatccccaaaagggttgataaggattgatctatga

SEQ ID NO: 287603 - DNA, 378 bp, Morganella morganii
gtgtcaccgatcgcagttgagctttacgggtacgtaacggataactgtgactggaaatttggcaggcacattgcgtcacgggcggaggttgcagcagagcttggcgtgacggagagaagcattcagcgggcgaacaaggaacttgagtcggcagggttaattaaattcaaacgcgggatttacgctgtgaatcctgagtttaactggggagggcgaagctggaatatttcaaaatcctgttactacacgatgggagtcaaaggcgctcaggtgattgattttaatcatgcagcagaggcgattaattcaaaaaagcttgaggagattggccgcagcgctctgaggggaacgcgcagccgtaaatcacaaggaaattaa

SEQ ID NO: 287604 - DNA, 207 bp, Morganella morganii
atggaaccaacggattttgaaaggtggtgcgcgggagagattggctattcgcctgagcacatcatgacgcagcggagagagaatatcttcggcggcactgaatacaagcatggtgagattggcatcagatatcgcgcatggaacgcaggcgtaatgagcatgctgccatatcagacactggcaaaaggagccaccaatgaagggtaa

SEQ ID NO: 287605 - DNA, 225 bp, Morganella morganii
atgaagggtaagggaacggactttaaagcgctgatgtgggcgtatgcaggtgaacgaatggcacagcggcaacgttatattaaaacaggcagaggcagagttgattacaaccgtaaattacacaaaccataccggtgtgaacgtgtactcgacaagctgcttaaaatcgaaatgaaaagattttgtctggtcataaagcaaggagccaccaatgaactggattaa

SEQ ID NO: 287606 - DNA, 201 bp, Morganella morganii
atgaactggattaagtgttcggaaagaatgcctaagtacggacagagggtgattatagcctctgaatctggcgttacatcaggatattacgatgatggtcgctatctgaaaaagcaggttggcaaatggcattccggagaccggctgcttggtgaggatgtaacccactggatgccactgccacaaccaccggaggagtga

SEQ ID NO: 287607 - DNA, 189 bp, Morganella morganii
atgaatacagaaactgagatttattatgatgctgatgatgtttggtcgtgctgggttatcgtcgtttctgacagcatgggtagtctttatttttatacatcagcaaaaccgacaaagcgtcaggttcggaaaatcaaaaaagatagcctgagaattctggcaattgaccgggagaatttactgaaatga

SEQ ID NO: 287608 - DNA, 444 bp, Morganella morganii
atgcaaaaacagacattcctactcaggaatgcgcgaatactcagcaatctcaaagcagcactcgacaatcttccgctcaacgacgattttcccctcgaagtaaaaatctcagactcatcccgaacgcttccgcaaaacgatatgttccacgcactgtgtggcaacgtcgcagagcagcgcatcgtgtgggctggtaatgcatggggattacaggactggaaatgtatttttgtgtccggtcacgcgaaagccacaggcagagacgggaaacttattcctggactggagggcgagattgtaccgctggcgagagaaagtaccgcaagcatgggtaagaagcgcatgacaagcttaatcgagtattcgcaggcgtgggctataggtgagggagtaaagccccgcacaacgcgatacaacttcaattattacgggcatcaggaatag

SEQ ID NO: 287609 - DNA, 393 bp, Morganella morganii
atgaaaggtgagaattacgatctgtacacagaaataattaaacgctgtcgtgattgcagtgaactcacaaataaaaccgttgcgctgattatggggacggatacccggcgcgctgcactttacatgcgaaagttgagcgatatcggatgcgtgaaagttatcggccggcggatgtcgcaaagatacaacagcccaatataccgctttgatgagtatgcagtaacacggcttaaatcgtattttttcgatgtaaaaatgattgacgaaacggctccgccggaagtgaaagagagattgccagttgcaaaagtacgttgtcatgcattcgaaccgggtttcgggcggtcgtttatcaacaatatcgacacaatgctgcgggaggtgcgggcgtga

SEQ ID NO: 287610 - DNA, 123 bp, Morganella morganii
atgacttgcgccctatgcggtaaagaactcgcagacgacgaaacatacgcctgtgagcaatgtgctgatgactgccagcatctggaggttgtcgataaaatcagaggggagagtgatgcctag

SEQ ID NO: 287611 - DNA, 159 bp, Morganella morganii
atgcctagaaatcggacaaagtataaacacaagcacaaatacccgaagaaggataaccaggcaaagaaagaccatggcactgagtttattgctcggtatgtcccgtttgtattgtgctgggtgctgttcgccctggctgtaggtatcagtttatcgtga

SEQ ID NO: 287612 - DNA, 132 bp, Morganella morganii
atgtggctaatttacgaaaagaagcgcggggcagagaatgccaaattcgcattccgggagtgtgtaacggcaaccctgaaactgtggtattggctcattatcggatggttgggttatgcggcaccggaatga

SEQ ID NO: 287613 - DNA, 210 bp, Morganella morganii
atgacagcatttactgatatttcctcggcaatcgaagaagcccgctggctcaggcaggaaacaaagcatcaccacgtagtcacacaaagaagagacggacacctcacagtacggcaggaagccggtgaaagtaaggaatcgttactgaggaaggcatacagcacccggtacgactgccacaagcacactgtattgccggaggtaagatga

SEQ ID NO: 287614 - DNA, 504 bp, Morganella morganii
atgagctatatcggagaaaaggaactcacaaaggatcagttggactggcttaatcagtggctggaactgtggggtgcgtgggttcactcgggcaggattgatatccgcaaaataaatatgatttataagtttatgcagacggtagagccggataaaaacccgaccagaccaatgtgtaatgacgatgacggaatgttgatttctcaggtcgtagattccgtcatcgccactgacgcacaggcgtatgcgatattactcagttactatgccaacgggtcatctaagctggcgattgcatcttactatcacggagttgcaaaaccacgcaaaatgcaaacgaggggagggaataaaatcaggcgtccgtcactcgggacttgtcgtaatgaggtcaacgataaactcaaggcggctcaatgggttttgtatgaaccgttgcgaattgcaatgaacagtcgcaaacgagtgggtaaaatacgtaaaataaccgaactttgctattga

SEQ ID NO: 287615 - DNA, 312 bp, Morganella morganii
atgaaaaagatgcctaacgacccgaataactacggctggttcagtagtctgctgatagtcatcatgactttactcggcactgctgccagttgtgcctataaagccctgaatggtgaagtcatcagctggggcgttttctttcttcagatggttgtctctgtttttgccggtgcgctggtcttcctcgctgccagttattatacatgggttccggagctgtccggcggcattgcaggtctggcgggatggtcaggtgctgagttcattaaggcgcttgagaaacggataaaaaggaaaattgataatgagtag

SEQ ID NO: 287616 - DNA, 834 bp, Morganella morganii
atgaaaaaagactcgagcattaatgtatggcaggctaatggcatccctcgactagaattctgtagcgccgaaagagccgctaaattactcaattgcgatataacagatattcatcaatggattgacttagatgttattcagaaatgtattgcgctacccaaaataatgagcggtaaattaagtttatgtactgatgacgatatcgatataaccagtctagatgggcaggggtttttgtgtttaagttttggtacaggtatctctcagttttggtgcggagcagatgatgaaatagaaaaagaaaaagctttgggagggtactggcatgaggtagatgtgcaaatatcaggtgtttgggaggcgcgccaattaagagttgatggtaaatcaattataggaggggtaagtgagaatacatttagaaaaaatgtatttattcccgtggagtttaatgaaaatgtcaaatttataagtgttgtaactgatgatgttttagaatttactccagatgattacttgattattgctgatgatatagaaaaattatacaacgcaggctgtaatggaagtcgattatttgatcctgaagcaattggcaattataaaaatgaagatataccacaacaacaagagcaagaatttaaattaacaatccatcaagtcgatatgattcaaggattaatgagactcattggcttctcagacgatgaaataacaaagggatctgcgtctgatttaaattcacggctatcagaaatggctacaaggaagcgagttacctgcagaacgccagacccaaaaacatgggaaaagtggcgaaaaaaaatgaagtag

SEQ ID NO: 287617 - DNA, 354 bp, Morganella morganii
atgctagatattgctgaagcacttaaggctcgtgaaaatgagtttattagtctgagggaattaattacgcgcattaggttgcaacaaccacatgttagcgagtcacaaatagccgactttttatatattgaaaatgctaataggcagctaccggagtgggttaagaaaggtattgcgtcaactattgagggaacagatggcgggtatgaagatgtagagttagaggcattgctcaaagttattactgaggaaacatatatgccagaagttactccgcctgttagtcaacctccggctcaaaaatcttcggttcaagaacctccgatggattttgatgacgatattccattttga

SEQ ID NO: 287618 - DNA, 456 bp, Morganella morganii
atggctggctggttgaataacgatcattggtctgcacctaattttgataagtatgggtttagacgctcagatttaaaagagtttgccgaaaaagtggggatagatttatctattccactggaagatgttatcccaaatgtttcaactaatgttgataacaagcccacaagtgaagctgatgtagaaaaattaaagatggaagtcgactcactaagaaaacaagtccgtaaacttgaaagcgaacgacctattcttttaaagaaatatcgagaagatgacccgctttatttggcaattcaaatcagaaatagcgagtgggtaaaatatgatccagaaaacgaccgcatgaccagaggaaatcaagaagcgattattaaggaattagaagataataaaaaattttcaaatgcccaagctaaagcgattgagcaggtggcttgccctatcaaacgctaa

SEQ ID NO: 287619 - DNA, 219 bp, Morganella morganii
atgccagcaattactacacagaaagaaagtctcatccgtctgccggaagtcatccggcgtaccggctgctctaagccgtggctgtacaaactcattgatgccggcaaattcccgaaacaggtaaaaatcggctctcgttccatcgcctttgttgaatcagaggttgatgcgtgggtagcgaataaaatcgcagaatcccgctccggggaggtgctgtaa

SEQ ID NO: 287620 - DNA, 684 bp, Morganella morganii
atgaaaaagaaaatgaccgtaatgggtcagggcttcgctcactctgaaattagttcagaagctattttggttcagcacaaaacggaaccgaggattgatagccgcctgtttgccggacgtattggaattaagcataaaaacctttttgaattaataaaaaagaatacaaagaatttacgtcagtttggcacgcttccgtttcaaacggagacgtgctcacactcaaccggggcgagtatcaataaatacgcactactcaatgaaaatcagttcgattttatgtgccgtattgtccgtggacgggatcacgaaaaaatgactcagttcaagctggacgttaccaaagcattcagtaaaaagcgtgctgctgaacctatccgccgtgagtatcttcctcattaccatgaatcgcgtgatgcgctgagagatctgggtgcggaacggcatcactatatcaatttggccagaacggaaaaccgtgccgccggattgctgacaggtgagcgccacggtgctgatgaacagcagttagggctattggtttgtatgcagaaaatcgaacaggcggcatttcaggatgcaatgagtgccggattatcaccgactcaggcattacgtgaggtgagtaaacgtattgagcagttcgccatgttgatgagtcctgtcagccggataggaggctga

SEQ ID NO: 287621 - DNA, 300 bp, Morganella morganii
atggtaatgaccgggatagatgtgatgaagcagaaaaggcagcaggcaactaaaataactgtatcaggaaccgtcacaaaagcccctcagcgggttaagacggcgacaggtaaagtaatggcaacactgaccattcaggcagagagcgaacgccgcagcccctatccgctaaagctggtggcatttgatatgaacgcactggaactaatgacctgccagaaagggagccagattattgccactggctggcatgaatggtttaacgggtatcagcttaccggagtgactataactcattga

SEQ ID NO: 287622 - DNA, 1074 bp, Morganella morganii
atggataacttacaatatcaagcatttagtgaaattaacttagatgatacttttttctcatcccttaaatcagattataaacatggtttcatcgactggtttaataagaaatcaaagcaatcaaatgaaaaagcctatgtattatatgaagataatggaagcatagatggttttttatatttaaaaatagaaagtggagtcattgatgacgtttcaccacctataaaagaaggtaagcatttaaaaataggaacatttaaatttaatccgaagggaacattgcgaggacaaagatttttaaagaaaatttttgataatgcgattacatttggggttgatgatatatatgttactgtatttgataaacatgactatctcattagactttttaaaaaatatggtttccatgagtgtgctttaaaagaaacggctaatggtaatgagattgttttgctaaaagaattaacatcaaatgaatcaagtggtgatatattatgcgattaccccagatttcctttctcacaaaaacagaataaatttttactatctatttatcctgaatttcattcgatattatttccagactctattctgcttacagaatcaccagatattttagaagatgtttcacatactaatagtatcagaaaggtgtatatctgcgggatgaaatcagcgatgaatttaagaccttatgatttattggttatatacagaacaggcgatggtaaagggtcagcatattatcggtctgtggcgacatctatctgcgtggtggaaaatattaaaacagtaaatgattttgtttcggaggagtcatttgtcgattattgtataaaatactcagttttcacaaaagaacaattatataaaatatatagagagaaaaggtacccatatataataacattcacatataatttggcattaccaaaaagattaaatagagcgtctcttattaatagcgtgggtcttgacgagaatgcatactggggtatactgaatataagtgatgaacaattttccagaatattaaacttaagtgaatctaatgaaagtattattatcaattaa

SEQ ID NO: 287623 - DNA, 564 bp, Morganella morganii
atgagtgagctgaattatctggaaaagctactgaatggtgttggggttgagtggaaacccattggaacagaaataaaaactgtaacagcgccatctaagcttaagagtcaatcttatcgtcttacaggaagacttccaataattgatcagggtttagagtttattgcaggttacactgatgaagatgtgacacctataaacaatggagaatacataatttttggtgatcattcagaacatattaaatatgttgatttcccctttgttcaaggtgctgatgggataaagattcttagagcaatttcagctaataccaaatatatttattatgcttttttaactttttacacaaaggaattgagctataaaaggcactggtcaacagcacagcaaacactaatccccatcccttgcccaaatgatcctgaaaaatcccgggcaattcaatctgaaatcgtccggattttggatacattcagcacccttaccgctgagcttaccgctgagcttaccgtacgtaaaaaacagtacaactactatcgcgaccagttgcttagtttttga

SEQ ID NO: 287624 - DNA, 156 bp, Morganella morganii
atgggggttttcctgatcggtattttgaaaaatggtctgaacctcatcggtgtctcgaactacttcgtcaatatcgttatcggtatggttatcctcattgcaatttgtatcactcactacaaaaaacgcaaagagacggacgtaggttttgtttaa

SEQ ID NO: 287625 - DNA, 423 bp, Morganella morganii
atgagtatgaaacttgtcaagaccaacgatgacgcaattctgacattgcctctgttcctggagcatgtcccggccgggtttccgtcaccggcggcggactatatcgaggaccgcataaacctgaacagtgagctgatccggcatcctgaaagcacctacctgctcagggttgaaggtagttcgatgatagatgcaaatatctttgatggtgatgtggttatcgtggacagcgcggtaaccgctgctgaaggtgatatagtaattgccagttttgaaggtgagtttactgtcaaaaaattgcagctgtctcctgtgcctatgttgatcccgatgaatccggattatcagcctatcgcaatcagcagtgagcaggatttacagattttcggcgtggtcacctacatcattcaccgggcgcagtga

SEQ ID NO: 287626 - DNA, 702 bp, Morganella morganii
gtggatgataactacttctctgaatggggaactggtatccatatgaactactcagatacccacggaatgcggatgtttgttgctggcagaaacggcagggtcattgtcaacgtgcgatattcatccggtgaaatgatttggaacacgttgtgggggcaaaccaatacgacagtggatggtagtggatttttgaaggtatcatccccaattatccaaatccacccagacggtagtttcgacatcaacgacgaatccgaaggcgctgaagtcagccgaacagctaccggccaatatcacattaccggtatactcggttataactcagatggtgcctggggtgtaaacggtggtatctcggtaccgaaagacaataacggccttgagctggtttatgtcgatgaccgcgtactggaagacggcagtatcatcatcgaaacctgtcaccgtcagcatgcgcatttaccggaccgtttccagaactggcgactgaaagaggtcaccccggaaggtgaacgcattttctaccaggatggcgaaccgtgtgacctgccggaatctacccgcctcgatgtgcgcgtggaaatgccgcagggctcagtgtggaatgtgaagcagcgtgaactggccgaacagatggaacatgaacaggcagaacggaaggctcaggaaatagtggagcaggccggagacgcagaggaataa

SEQ ID NO: 287627 - DNA, 1056 bp, Morganella morganii; identical to SEQ ID NO: 284263

SEQ ID NO: 287628 - DNA, 477 bp, Morganella morganii; identical to SEQ ID NO: 284264

SEQ ID NO: 287629 - DNA, 528 bp, Morganella morganii
atgcctttacctcctaatccgctggctcctgtcaaaggcgccggcacaacgctgtggatttataccggcaaagacgacccgaccaaaaacccgctggcagacgaaggctggacgcgcctggcgaaaatcaaagagcttcagccgggtgaaatcagcgctgacagttacgacgatacctatctggatgatgaggacgccgactggaaagcaaccgctcagggtgaaaagtcagccggtgaagccaatatcacgctggcctggaaacccggcgagcagggacagaaagacctggtcagctggtttgataccggtgatgtccgttattacaaaatccgctatccgaacggcgcggttgatctgttcaaaggatgggtcagcagcctgggtaaatcggtaccggcaaaagaggtgatcacccgtaccatcaaaatcaccaactccggccgcccggcactggcggaagaaatgaaaccggctgaaggtgaaacccgttcagtaccaaaaagtaaagagacatcaggagaataa

SEQ ID NO: 287630 - DNA, 540 bp, Morganella morganii
atgcgcgtcatggatgacgcgcctgagcgcacagggaggtgtttacagcggcttttcgttttgccggttatcagcccggccccggtgctgagcgtttcacccccctttgttaacaacaggccaccgaaccaaagttcgcatcattccatccgcagcaaaagtaaaaggcagataaccggcagagagacgaaaagcatgcgcgtcatggatgacgcgcctgagcgcacagggaggtgtttacagcggcttttcgttttgccggttatcagcccggccccggtgctgagcgtttcacccccctttgttaacaacaggccaccgaaccaaagttcgcatcattccatccgcagcaaaagtaaaaggcagataaccggcagagagacgaaaagcatgcgcgtcatggatgacgcgcctgagcgcacagggaagtgtttacagagacttttcgttttgccggttatcagcccggtcccggtgctgagcattccgccttctttattaacaacagactcaggtgctgagcattccccctctatttaa

SEQ ID NO: 287631 - DNA, 414 bp, Morganella morganii
atgagtgataaaataactatttcccggggagaacactggggtgtaaaagtggctcataaaacaaaatggctaatcaaaaaattaaaggcattcgataagagctgcgtggcaagagccaaaagcaaaaatacgccgggttggctgggacatattccactggtatccataactcttgcggtcatcgcattactggcttatttcagtttgtacatcctattcgcttttggaatgctggtaattttgttttctgtagtagaaaactttgggaatagcatttcagatataataaatactgaaagtacttccgattacttaacaaattcagatgatgactatggttctgtgtatatgagcggaaatcagggggatggatggtacacagatgattcaggaaccattaaattggatgattag

SEQ ID NO: 287632 - DNA, 975 bp, Morganella morganii
atgaaaaaatctgaccgtaaacgctgtccggctgcggataagcctgttcgcgatatttatcaggaagtgactgaccgtattgtgaccgcactggaaaaaggcacctgcccgtggaaacggccatggcggccggcagaagggacgggcaccggttttccggtgaacgccctgaccggtcatccctatcaggggatgaatgtgctgttgttatggttgtcggcggcagagcagggctttggttgtgatacttggttgacttaccgtcaggcacagcaactgggtggttatgtccgtaaaggcgaaatggcgaccgataccgtgatattcaaaccgctgaacgtgccggcaaaagaccgtcacggtgagccgctgcgggatgaacacggtgaggtggtgatgacggagataccaatgataaaggcgaatccgttatttaacatcgcccagtgtgatgacctgccggcacatttttacgaaaaacggcgacaacccggagaggtgacgacaggaataaccctgccggccacgcaccgggcactggatatcctgaatgccagcggcgtgaaggtgaccagtgcggcgcagaaccgggcgtattacagtccgtcacaggaccggattgtgatgccactgtcgtcacagtttgaccgggatgccgattactgggctaccttactgcatgaactggtgcacagtaccggtcatcagtcccggctggcccgtgaaggcattacctcatcgtccctgaaatttggtgacccgctgtacagttttgaggagctggttgcagaaatgggcagcgcttttctctgtgcgcagttaagcgttgagggagaggtgaatcatgaaagttatcttgacagctggctgcgggtactgaaagcggacaaaaaagcgttgttccgggcagccgggcaggcccgtcaggcctgtgagtttttactgaatacggccacctcccgacaggccgcgtag

SEQ ID NO: 287633 - DNA, 441 bp, Morganella morganii; identical to SEQ ID NO: 284192

SEQ ID NO: 287634 - DNA, 1269 bp, Morganella morganii
atgagtattcatagtgccgatacaaataaatcacccggactgaccagcggaaccatgcttgttatagcaacagtcgttggcggcggtatgttttctttgccgattgcgatggccggtgtctggttttccggtgccaccgttattttgattttagttgcaattatgatgttactgaccggtctgatgttagttgaagttaacctgcattttgaaccgggcgccagctttaataccttcaccaccgagttactgggcaaaaaatggaatattgtcgtgggtattgccttcgggtttgtactctatattctgacgtatgcctatatctccgggtcatccgctgttctgactcagacgatattaaaatataccggtgtcgccctgccgataaaagccgcggtcgtgattgtcgcctgtctggtggctgcgattgtctggtacagctcattatgggtcggacgtattaccaccattttaattttcggtaagtttatcgcgttctttgccaccttctccggactggttgcacacgtggaaattgccaatctgctggattccgcatcagtggcaatacccggaacgaaatatctgccttatgttctgatgacactgccgttctgtattatttcgtttggcttccacggtaacgtgccgagcctggtgaagttgtacggcaaaaccaaattccgctttattacccgttcaattattatcgggacaatatttgcggtactgctgtatatcttctggctgggtgtcacgatgggcaatatcagccgtgccaacttctctccgattattgccaaaggcgggaacattgatgtgttcgttgaggctctcggcgggaggatgtcagggaaaaccatggatcttatcctgacattcttcggtaactttgcggtggccagttccctgctggcagcaacactcggcctgtttgactatattgccgacctgctgaactttaaaaatgacagcgccggtcgtttcaaaacagcggtagtgacgtatctgccaccggcggtggtgtgtttcttcttcccgaacggattcgtttatgccatcggttatgccggtctggcctttactatctggagtgtgattttaccgccgttcctggtaaaagcctcccgcaaacgctacagcgacagcgataccatttaccgttcgccgtgtaacagcgcggtactgaatctggtgattgtctgcggtgcgattgtgtatctgacggtcattctggatgtgttcggctggctgccggcatttaaataa

SEQ ID NO: 287635 - DNA, 591 bp, Morganella morganii
gtgatatctttcggcgggaactggtttccgggcggaataacactgattggccgttcatcgagtaccgcgccggtatctatccggtcgtatttgtccggatcatgcatggccgccgatatcgtgaacgtgccgtcatcattctcagtcacgctcaccacccggtactgctgggcgtacagctcatctgattccgttacccagacacattccggttccggcgtttcactgtattccgtggtaacggttataacgttatccgtgaccatctggatggtgcgggcctgtgatttaccggacggaagattcagcatcagcctgtcacccggcgcggcatccggtttgcggtcgagggtgatactccggccattcaccgcactgacgcggccgccggtcactttccctgataagttttcatccgccaccgcaatgatgtaccccggctgcgggatattaccgtccagccccacaccgaatgtcactacccggtctttgttattagtgaggattccccagcggcctttgcggttggcctctgactggcgggtgcagccaatcgccgtcatttccagctggttgaagccgaaccggtaa

SEQ ID NO: 287636 - DNA, 597 bp, Morganella morganii
ttgctggatgtgacagccacggcaggtaaaggggcgctggagccggtacgggtggtgtacagcggggaagtcagcacacagcgtgacagtcagaccgtcagacgcagcgggcaggacggcgggaccgccggcaatacggccccggcggcagccggaaccggggagcgtagagcgaaaccccgttatccggccccgttacctgtcttactgacccgttatgccgcccagagtctgtatgcgccgttaagaaccgtggagccggtgcccggcgtacagccgttatcactgagcttacccggaacactgacggcactttacccgtcagcgccgctgaccgcgcagccactggccggctggcaggcggcggagtaccgggtggtggcggtgaaactgaccaaccagtccgctcagaaagttattctggatccccgtcagttgcaggggcagtttgtcagcgccacgttccagcatcagtggctggatgtgaagggcacaccggaggataccaccacggtatatctggtgatgaaaggcaaaccggataaggcatttccggcggagccgcctgtccggggaacgggagggaaagcccgatga

SEQ ID NO: 287637 - DNA, 1497 bp, Morganella morganii
atgaaagtgacatccaatacgctggtcaaaatactggtgccgtctgcactggcgctggcggtgctgatcggcatcaaaagctgtcagccggagacgccggccggcaacggcgggcaggacagtctgtctcagtcgattaatgatcttgacccgggggagctgaagtcgctcgggattgagggggataccccagccgatacgctgaggacattgattggcaccatgaaaacggtgcgtgaccgtcaggcggagctgattgcccaaaacgagaaactgctggaagagaacacgcagttgcgtaaccggcaacagaatgtatcggggcagatccagtctgcggtggcctctgtccgtcaggaagcggagagtcagcagcgtgctctgcaacaggagcaacagacgctgatgcggcgtctggataccctgggggcgtcactgaccgccccgtcaggtcagccggcacccggcggcggacagggcgatattccgctgggactggggctggatgcacagggcagcgggctgacggtgaaagacgggttgttgtgggccgagccacaggatgctcagccggctgaaccgggccggatggtgaacggacaaccggctaaaccggcgtttccgacgtcttttctggaggataacgccattacccgtcagaaagcagaactggaccgggtggccaaaaatcagcgcacgctgtccggtagagcggacggtgaggcgcatactgaaccggcttacacgatacccgaaaatgccactctggtgggcagtcaggcgatgacggcgttgctgggccgggtgcccatcgacggtaaagtgaccgatccgtatccgttcaaggtggtggtgggaaaagacaacctcacggcgaacggcattgagttaccagatgtggaaggggcggtgatcagcggctcggccaccggtgactggacattgtcctgtgtgcgcggggatatcacttcgatcacctttgtctttacggacggcacggtacgcacggtgccgaagccggctgaccggacggacggtggcagtcaggccggcagcggacagaatgcccgcaataacggcgggtcgctcggctggatctcggatgagagcgggatcccgtgtatcagcggtgagcgtaaaaccaatgccggcacttatctgccgaccctgtttgccctgacggcagccgcctcggccggggatgctatgtcacagagccagtataccgcgcagaacaacggttacggtatcacatcctcgctgtccggggatgcgggaaaagccgcgctgggcagtgccatcggcggcggttttaaggatgtggctgactgggtgaaatcccgctacgggcagacctttgatgcggtgtatgtgccgccggggcagaaagtcgcggtgcatatcagccgtcagatcccggtggattatgaatcacagggacgccgggtgaactacggcttttcactgacagagggtgaggaaggaggtctggagtga

SEQ ID NO: 287638 - DNA, 414 bp, Morganella morganii
gtgaataattccgatttgcgtgagtttgataatgtgattattagtcttggcacaaatgattttgttcaatatggtccggaagaatggcggaaatattacagtctggtatttcaattaattgctgagattcaaaataaaaatccgttagcgacaattatctggatatctccgccacatttaaaaaatccgctgcatgagcgttatttaatgcatacccggcatattattaagcacagtgcgatattattaaatattcattatctggatattaatcagcctcatattttgggaacgcaatggcaatctgttattcataatgaaactgtacgaacagatgatggaatccatattacccgtaaagggggagtacgggtgatcagagaagcggtaaaaatcctgaatgggcaggattga

SEQ ID NO: 287639 - DNA, 798 bp, Morganella morganii
atgcaactgttccagattttcccgggtaatggtctccagcaccggcgccagcccggtccccggctgggaactgcccggctggtttgcctcaccgccgctctgacaatccgccggattggtgcaggtgcggaccgatttgctgcccagcacctgtgtcaccacctgagccgcctgctcactgttggtaaaccgccggcacgccgccccggtacactggccggccggcaccgaagccgtgctggttgccggcagaccgttcatgatattaaagccggcctgcgcaaaatcctgcgccggcacaatggctttctgacccgcaccgccccgtttctcccctcctatccacggcacgccggccttaccgtccggctttttttccacctgattcatcgtcccgaccgcatcaccatccccgctgttgatgatgtttctggcttcttcaagtattgccgcctgggtccactgattgttctcggaaaaatccatcatccgtttggccatgttctggcagctcagctgcgccttatcaaacgccacattggcctgcaacaccccgttggtcaacatttcatacagaccgggattcgcccgctggatagccatcgccggcagactggccaccgccccggtggcattctggatcacctcactcatcagattcttaaagccggccgtcaccccgttcagctgattgcccacggtggttttgatatcaaaattgccgcacatcagatcactgttccagcccatgctcatccccagacgttgcagattactgcgccccggtggctgggataa

SEQ ID NO: 287640 - DNA, 1653 bp, Morganella morganii
atgacacaaatccgtcattcagcaccgaagaccggcaataactacaccacggatatcactgtcagtcagcgcagcaaccgggcggtactgaaaaccctggcggacacaccggagaaagcggaagccctgttcaccccgggcggacaacagacacagttacagccgggacaaaccctgtcctggacaacacgcggcgagctgcaacaggtcacgccggtggtgcgtaacggtgctgccggtgatcgcgaaagctaccgttatgatgcgggcagtcagcgtatcctgaaaactgccgtacagaaaaccggtaacagcacacagacacagcaggtgatctatctgccggggctggagctgcgaagcggaaaagaaaattatcaggtgatctgcgccggtgttgccgggcgggcacaggtacggctgctgcattggccggatggtaaaaaagatcatcagcggttcagttacgacaatctgatcggcagcagcggcctggaaacggatggcgacggtaacctgctgagtcaggaagaatattatccgttcggcggcacgtccgtgctggtggccggtgcggacagcggcattgactacaaaacccaccgttattccggcaaagagcgggatgcgaccgggctgtattactacggctaccgctattatcagccgtgggcagggcgctggctgagttcagatccggcgggaaccgttgacgggctgaatctgttccggatggtgaggaataatcctgtgacgttaagagatgatgacgggttaaaacctgttaataatatgccgccggcacctccgcttccggtctccggaggaacacctttaccgccgccacctcccgtgatgagcggagctccgttgcctccgcccccaatgccgggcggagcacaattacctccgccaccgccaacgatggcaggaggaaatccgccaccgccgccaatgatgggctcaaaaccaacaggagcaaaaaagaaatggactatcaaggaagaccctgcactgtataaacaacaaggcggagaatacccgtactattcatctttcagtatcactttgcagaaactgaatatcggccattacagtgaaattgatgatatggataaatttgtcagtgcatggagagataccggccgtaatatgaaacccgccgccagagatatcaatcatgagaaagccattgaggttcagtctgttatgggaaaaattgatgcggaatggtccgggtataataaagcaaatgtcagtgaaacatttcgtggtgatacgccggttattacaggaagttatccatggcttgccgattttattaaggaaaccggcaacagtgcggaggctgtgactaaagttatggattcggatattcggtctcagctgattatgtctacagcaaaagatccgggaatgggatatgtatcgaataaatcaattatgtggcattttgaactggaagaagggcatgccggtgtttctgaaggattgtatgcatcagaaggtgaggtgactttccctatctataacaaaatgaaggttacatcactgagttatattccggaaggacaatcttatatgaataatgcggaacggtttggtactgcacaccggtatattattaacgcaaaaatgttaccgaaatcataa

SEQ ID NO: 287641 - DNA, 639 bp, Morganella morganii
atgcgtaaaaattccctgctcatgcttgtcctgctgctgttttccgtgccgttaccggcgcgggaggtgccgccgggctaccgtgaggtggcccggcaggagaatgtaccggcagaagcgctgtattccctggcactgacggagtcatcctggacattaccggcacatcacccgcaggccggtgaaatccatccctggccgtggacgctgaatgtggccggtaaaggataccgttatccgacacggcaggccgcctggcaggccttacaggcatttttacagacgacatcccccaagcgcatcgatgtgggcattgcacaggtcaatttaggctggaacgggcatcacttccgttccacctgggaggcctttgatccttataccaatctgcatgtggcagcccgtattctgaagcactgttatgacgcgtcaccgggcagctggctccgtgctgccggctgttatcaccatccggcgggcggtcagcccgccacccgttataaaggtatcgtccggcgtcagctggcaacactgacgggcggtacccaacccgtccccgctcatttaccggtagccattgcagaacgaccggtatcgtttgtgtggatagaaccggagaacaaaaccaatgcgaaataa

SEQ ID NO: 287642 - DNA, 525 bp, Morganella morganii
atgaaaaaattaacagtatccataggcagtctgggtagcgcggctgccggtgattatgtgagctttaatatctggcagggcaaacgactactggtcagtgacaagattgcaggtaaacattccggtacattccatcgtgagtatgatgtggattatacccagggtgagccactgcgcatcgaaagcaatgcaccggctggctgtgctgtctgtgtccatatggtgccgtgtgatgaactatttcattcatttaatgccgccggtatggtggatgcagcatctaaagacacagatatttataaattgatcgcaaaaagatttgcgttttatcaccccaacggtgagcctgtttcagtgacagggtgccccggcagagatggtaaaacattagaacagcgcgttaccgatctggaagaaaggctgaccactaagcaacaagaggccagcctttgtcatgaaattgaaaacaaggtttgctcagtttcagtgaatacgaaatgtactatttcttatcagcaagactaa

SEQ ID NO: 287643 - DNA, 690 bp, Morganella morganii
gtgttcggtgcgccggatattttgcggttccatgcatacaacatcccacatacagaggcagaaattactgccgctggtggggatccggaaaagttaccggcgaaatcaatctggtggcagggtgaagagtaccgtgcgtggccggtgcagatcgagggtctggaagcttcaacaaccggatccggtgcgcagccgaagttatcggtggcaaacctcgatgggtcaatcaccgcgctctgcctggcatacgatgacatgctgaaggctaaagtcacgatacacgatactttggcgcactatctggatgcggcgaattttccggatggcaacccgtcggcagatcctgcccaggaaaaagtctcggtcttttatatcgacagcaaatcctcggaaaccaatgaggttatcgagtttgatttagccagtccgatggatttgcagggagtgttgatcccgacgcgacaactgcatgcaatgtgtacctggtgcatacgcggcaaatacagatccggtgacggctgtgattatgccggtcagaacgggtattttgacaaacacggcaaccgcgtggatgacccggcacaggatcagtgcagcggtatgctgaataccggttgcttcccccgtttcgggaaaaataatccgatcccgttcggcggctttccgggaacatcactactgaggaaatag

SEQ ID NO: 287644 - DNA, 486 bp, Morganella morganii; identical to SEQ ID NO: 27141

SEQ ID NO: 287645 - DNA, 273 bp, Morganella morganii; identical to SEQ ID NO: 284215

SEQ ID NO: 287646 - DNA, 216 bp, Morganella morganii
atgtgtacctggtgcatacgcggcaaatacaaatccggtgacggttgtgattatgccgggcagaacgggtattttgacaaacacggtaaccgcgtggatgacccggcacaggatcagtgcagcggcatgctgaataccggctgctttccccgtttcgggaaaaataatccgatcccgttcggcggctttccgggaacctcattactgaggaaataa

SEQ ID NO: 287647 - DNA, 231 bp, Morganella morganii
atgatcgttaccggttggttgatatttcgccttcacaggcacagcgttacccgctggaacaaattgttcacctacgtattcctgcgtccgtctccccgacagtcggagatgcgctgcattatgccctgcgtgattccggatatcgtctgtgcacgtccgatggacaggcgaaccgtctttaccgtctgccgttacccgctgttcagtatcagatggggccggttcgcctga

SEQ ID NO: 287648 - DNA, 435 bp, Morganella morganii
atgggtgaaacaaattatattttcagtgcggttctgaatggctttttgccgttggtgtggaaaaaagagaaagaggcagcaggcacatggcctgatgatgcagttgaaatcagctatgaagattatttgaaatttacggccgccgcaccggaaggaaaaatgctgggttcggataagaaaggtaatcctgtgtgggttgatgtaccgccactgacacatgaacagcatgttgctatcgcggaggcgaaaaaacaggcactgattgccgaagttcacaccgaaacagaaatgctccggactaaactggcacttaagcgcatcaagccagacgaagaagccctgttaatcgcctggctggattatctggacgaactggaggcagtggacgtatccaccgccccggatattatctggccggtgaagccggtggtgtag

SEQ ID NO: 287649 - DNA, 402 bp, Morganella morganii
atgaacagagaaagctttagccttataaaaatattcggctccattcctgttaaccctgaaagatttaagcaattagacaaaaaactaaaatggctgggtatctgcgaagagggtaagagtttttgtgtcagttgcggaacaacaacgccgtctgtccctcgctcccatcatcctgaatgcctttcttatagtgatatggattcatatccggaatatgaaaatgagataggtatttgtcctgactgcggctcagaagatggtttgtcgataaacagtaattgcgatcttggtatatcagagatcagttgctgtgactgtcagttcattttccagaaagaagtgagcgaagaagatttaacatccttatttgttaaaaaatacaaacaacgcctcgctaaatag

SEQ ID NO: 287650 - DNA, 219 bp, Morganella morganii
atgaaaattctttggggtgttgttgttatttgcgctgtcattgggttgcttgatggtctcctcccggctattaccatggccaatagtgccccacaacaagccgcaggcgctgctatcggcattgcttgggcagtgattccgtactgtttagtcaaagctatcagtatgatgaaaccaagagtagtaattgttgaaagcgcagatggcggtagaaaatga

SEQ ID NO: 287651 - DNA, 345 bp, Morganella morganii
atgaaaccgacccgcatattattatttattttatttcctgcattatcttctgccgctggccttgacagtttttttagtgacaacccagacctcagcggtaatatctttgttaaagaggctatctatgagcaggcgcaggcgattgctgtcgagcgctcttggcgtgaagaaactaatgaggatttaccaaatgatgtacggaaaagactatcttcggatggttatgagtatgcccttcttagcatgagaaccttaaagtcaatctgtaaagatagcgaacttatggatgtcaataatttgaccaacaaagaatgcgtacttatagataattacaaagaaaaatag

SEQ ID NO: 287652 - DNA, 126 bp, Morganella morganii
atgacggggaggttacgggtagggttctgtctggacggcgaatccaccagcggacacaaattaatcaatccggtggtacactccgatttagcgtgtacccaagggtgtacccctagaaaatattga

SEQ ID NO: 287653 - DNA, 606 bp, Morganella morganii
atgatcgccattttattcacgattgtactgtatatcagcctggcgctggtattgctcggtaatctctcgccgtttcaactggtccgttatgcggataccgctgtggctcaggtggcttatcccgtatggggaaaaaccggttttgtgattgtggccgccgccgcgctgctggcgacaacatccgccattaatgccaccctgttttccgccttcaatatcaccgacagaatgtgcagcaccggtattctgccggattcctggggcaaaacggtattccggcagggaacaacagtgaatattctgctcattctgctgacactgctgctggcgctgttcctgaatctcagtgatctggccaatgtcgccagttttacgtttcttctgtgctatctgatggtgctggtggtggcgtggcgtcagagcgcagttatccgggcatcaaaactcattaccgggaccgggattgtccttgtcaccgctgtattggctggttttgtggtgacgttgctgagcggaggatttatttctgtcagtgtgattgccggggcccttattctctgtctgtttgccggttatctgcggaaacggagccggaaagatgaatga

SEQ ID NO: 287654 - DNA, 837 bp, Morganella morganii
atgaaaagttatcctgattatgttgataatattattatagattattatgaatcagatttaatttcagactttaaaattcctccaccagagcaaagtaagtcagaacttgatagtgatggctgtttttttgactctaatttatggaatgataacctttcagaaaaagacattattcataagatgatttttaatcataaaatgaggattatttggcccgcattaactaaacgagccagtgaatgccaatcgccaactattttttataaaaggttggctgctgaaataaatgaagcatatattggaccaagtgattgggagttacttacacagaagcaaaaagaagataaaatagaaaagataaaaaaactatcatttgaattatgtaaggagatatctaatacaccattagatttatctgtgatgaatttcgccaaccataaatcattttttgaacggtttaagttaattgcaaataataagattcaaaatgaaaatataaattattatttagataaattctgcatgcgagtgaatgataactatataccaaaaaataataatgacgcagccgttgggtgggcgtgggcgagtgtaggagttacctcgccatctgttggttctgtattacttgatataaatgaaagagctaaaaattttgaatgtgactctattttaaaaagaaaaaatcaaataatgaaagtatttttcataaggaaaatatctatgttttttctagatgtatttgaaactcctttacataatattaccgctgtaattagtggtgtttttttagatgaagatatatcaatagatgaggttagatctataacgagatga

SEQ ID NO: 287655 - DNA, 300 bp, Morganella morganii
atggctgatatttatgatgtagtagtccgccacgatctgggccggctgagtactgaagacctgaaagatattatccggaattcagaggaagcctgtaacggccttgcgctggcaatgaaaacagtcggtaaactggcttttcactccctgaacagtgaagaatgttcggaccatgaggctcgggaccacctcagcgggttaagtgacctgatgatgtacctgccgcggatagtgagcggcatccagcagaatttattaacagcacagtatgaaatcagccgccgcggggtgcagtcatga

SEQ ID NO: 287656 - DNA, 351 bp, Morganella morganii
gtgaacgcaaaaccgcagttatggccaacgggtgagcaattcacccgtgaggtaattattcagacaaacactgacccggtagcggtgatgatcacctacaccgtgccaccttttgaggcagttgtcgaagcctggcagaatacggacccggcaaaaagctacccgcagttacggcagtttattatcggctgggatttgcaggatacactgacagatgatgtgttagtgccgtttctgacatcatacagcgggacatacgaggccattctgaatggctggtgtgagtatatgaaagatacgctgtccgctaatcagtctctgtttttaggtgcgcccgtatcggtcaactga

SEQ ID NO: 287657 - DNA, 132 bp, Morganella morganii
atggatcttgcaacactggttacagaaggaatgaagcttatcggacgcggcgatttggtgccggagacagcggctttcgacaatctcattatcgctgggggaacagcaggtcattcatattgcggtggttga

SEQ ID NO: 287658 - DNA, 312 bp, Morganella morganii
atgaacaatacagcagtacccgcgtcaccggcggaagtctggcagacactgctgacttacctgctgcaacagcactacggcctcactctgaacgacacggaattcagtgatgagcgcgtgattgaggcctgcctcagccgggggatgtcattgtgtgaggcactgaatgcctttgcggagaaatacgccctggtccgcaccgaccggcacaacaacggtatcactgcgaccgatattctgcgggcacggaaggcaaccggtctgataacacgccgcagcagccatatcgcccgcagacactgcaccgtataa

SEQ ID NO: 287659 - DNA, 1536 bp, Morganella morganii
atgaacgacacctcttctgacgacatccttctgctgaaacagcgcctggccgaacaggaagcgttgatccacgccctgcaggaaaagctgagcaaccgggaacgcgaaatagaccatctgcaggcgcaactggataagctgcgccggatgaacttcggcagtcgttccgaaaaggtatcccgccgtatcgcgcaaatggaagctgacctgaacctgctgcagcaggaaagcgatacgctgaccggccgggtggatgacccggcagtgcagcgcccgctgcgtcagacccgcacccgcaaaccgttccctgagtcactcccacgggatgagaagcggctgctgccgactgagccgtgttgcccggagtgcggtggttcgctgagttacctgggtgaggatgccgccgaacagctggagctgatgcgcagcgccttccgggttatccggacagtccgtgaaaagcatgcctgccgtcggtgcgatcgcatcgttcaggccccggctccttcgcgccccatcgaacgggggatcgccggaccggggctgctggcccgagtgctgacctcaaagtatgcagagcacacaccgctgtatcgccagtcggagatctatgcccgccagggtgtagtgttgagtcgttctgtactgtcgggctgggtggatgcgtgttgtcgtctgctggcaccgctggatgaagcccttcagcactatgtcctgaccgacggcaaactccatgctgacgatacgcctgtcccggtgctgttgccgggcaataagaagacgaagaccgggcgcttatggacgtacgttcgagacgaccgcaacgccggatcagcgctggcccccgcagtgtggttcgcttacagcccggacagaaaaggtatccaccctcagacccatcttgcaggcttcagtggcgtactgcaggctgatgcctacgccgggttcaacgagctctaccgcgacggccatataaaggaagccgcgtgctgggcccatgcccgccgaaaaatccacgatgttcacgtccgtaccccgtcagccctgacggaggaggcgctgaaacggatcggcgagctgtatgccatcgagtcggagctcagaggtaaaagagcagaggaacggcaggcagtccggcaccaaaaagtgctgccgctgctggcgtcactggaggggtggctgcgggagaaacagaaaaccctctcaaggcactcagaactggcgaaggcgttcgggtatgcgctgaaccagtggccggcgctgacccgctatgcagaagatggctgggtggaggtggataataacattgccgaaaacgccctacgactggtcagtctggggagaaaaaactggctgttcttcggctcggatcatggtggtgagcgcggtgcgtcactgtacagtcttatcgggacgtgcaaattaaacggcgtggatccggaacgctatctgcatcatgtacttgatgtcatcgccgactggcctgtgaaccgggtgggtgctctgctcccgtggcgggttactctgcctgcctga

SEQ ID NO: 287660 - DNA, 348 bp, Morganella morganii; identical to SEQ ID NO: 140631

SEQ ID NO: 287661 - DNA, 384 bp, Morganella morganii; identical to SEQ ID NO: 18029

SEQ ID NO: 287662 - DNA, 1005 bp, Morganella morganii
atgcctaggctgatccccgaaaaccagtacacctctactggctggcatagttcctacagaaagagggcgcggggtggcgttatggaaggtaactataattcatttataatatttaaaaatatgatttctggtaaatcacataaagaaatattacaggaagctctcccattagttagtaagaatgatattgattattattttattagagggtttattgaatttattgaggatactgacagtattgttaatattttttcaaaagtaataaactttgcggaagatgaaattataaagtcaggtaataaaaaccttctcctaatgataactgaatttaaagctcttgctgagttagctaagaatgatcaacataaattacttgagttagctaatcgttttaaagagttatcatcaaaatataatgatgcgaatttaatatataaaacatttgatcctaagttaattagtgatggtggtaggtatttcttatcagtgattaataaattttttattaaggaagtccctccgagtaatgaggttttaatttcgttcttagaaaagaaaccaatagctggttatgaaagttactatgccaggttggaacaatcaacaacagatatggttaatgcattgggattgccagtgaatgtatttaaaccaattctatatcaaatagtattacatttgaaaaataaagagcataaatttgcttatgaattagcaacattatgcttttatcatactatatctcttgagcatgcttataaagtcggaaaaggcgctccaaaaagattgggtgcaaaaggtggacgtaaggagcatttaaggaaaaatttttgtttaaatgaggctgagcttaaatggagagaagcgccttcaatgtcattagaagaaatgagcatatttatatatagcaaatgcaaatctcattacaacgattcacctaaggccaaaacaattaaagattggttaagaaataccagttttaggccagtaaaaaccgcttaa

SEQ ID NO: 287663 - DNA, 219 bp, Morganella morganii
atgtcagtaattactacacagaaagaaagtctcatccgtctgccagaagttatccggcgtaccggctgctctaagccgtggctgtacaaacttattgatgccggtcaattcccgaaacaggtaaaaattggctcccgttccatcgcctttgttgaatcagaggttgatgcgtgggtagcgaataaaatcgcagaatcccgctccggggaggtgctgtaa

SEQ ID NO: 287664 - DNA, 300 bp, Morganella morganii
atggtaatgaccgggataaatgtgatgaaacagaaaagacagcaaacggccaaagtgacggtctcggggttcatcaccaaaccacctcagcgggttaagacggcctctgggaaagtaatggcaacactgaccatccaggcagaaagcgaacgccgcagcccctatccgctaaagctggtggcatttgatgatgaagctctgctattgatgacctgccagaaaggaagcaggattaccgctaccggttggtcccgctggtataacggttaccaacttgctggtgctcagataataccttag

SEQ ID NO: 287665 - DNA, 540 bp, Morganella morganii
atgtctttagaaattgatatgaaattacaagatttatatgagcaggaaaataaatattgggaacccagaacagcaatccttaaagagcagagaaataaggcagctaatgaaataaaaaaagccataatttctttttttgaaggaaaggggtttgtaatatcaggatcaggccacaaatctaaagctacatataaatcaggggttgaagtagatattgatacaaaggatttagaaactccttatgttggttctgatgggatatgtacagttaaatataaaaatcaagaacttattgtttcctatgtagttagtaatgggaatctaccccaggaaccaatggtttcaggaagatccaaagaagatttggatatgaaaaaaataaaattttatgaggaaacccttctgccggcactggataagatcggagtttcagatcttgacggttcgtacacactaacatcttcagtaactgtatcaggtacaaaacaacgcaaaaaacacaatagcgttgatgaattgttatctgattttttcagttaa

SEQ ID NO: 287666 - DNA, 162 bp, Morganella morganii
atggcgttccccgaaaatatcaacgggttagcccttggtcagtacgccaaacgtatcgactcgctttcaggacggcttgagttcctgatctcacaaatagtgctcctttatatcaaagagactaaaaaactttatagaacaataatatccaaatctggataa

SEQ ID NO: 287667 - DNA, 1347 bp, Morganella morganii
atgactaaattatttaaagtcccctttgcaacacaaggggaccgcgctgctattcctgatgaagtccgggccgatggcgcggtttcctatacccagggttacgggtatgactacgagcgggaccaggccacagatccggctgccaaagatattgaacgtgagaagatgaacagcctgttccacgatatcacggaagcggtcggcgaaatgcagtccttcggagtgccggtctggcaggaggccggtaaaccgtatgctgtccgcagtattgtgtaccacaaaaataaaacctggcagtcaaaaattgaaaataacaccaccgaaccggttgccggaacggcatgggcagaactgaaagcagatttgaccgccggagaggtgggcgcttacagcaaaggtgagtctgatcagaaattccagcctgcgggtaattatctgccggaaggttacagttattccaaagcggaatctgatactaatttccaaccgaaaggtaattatgccactaaatctgaattgattaacgggttggcaggtaaacaaccggttggtgattatgcaactaaaacagagagtaacggaaaactagctaaagataaaaatggtgcggatataccggataaaagcgaatttatcaataatctcggtttgagtgaaaaatttcagccgaagggaaactaccaaccggcggggaattattatgtttttagtgatattacaacaatgccggaacgcggtttcaatggggttttttcaggcggagtgagtgttaaatatatcaaagggttttcaatatcatcaggaagcggagggtctgatacagcgcagctatatattgaccataaagcagggctgacagttagatatttaaataataatggggcagtaaatgaggataagattgtcggtattcctattggcgccactattgaatggcagtcagcagtagccattcctgacggttttttaataaatgatggtcgcgagtttaatgcatctttatacccaatgcttgccaaagtttttccggatctgaaactccctgatgacagaggactttttaaacgcgcattagacaatgggagaggatatgattccggacgaaaactcgggagttttcaaaatgatgcaatgcaaaatttaaccgggaattttggtaacccgacaattgaaggcggtgatttctcagaaggagtattccggcattcagtaaataaaggcggacgtgctgctggtgccaatgcaaactcaatttcgtactcttttgatgcttcccggcaagtaaggacagctcatgaattcagaccggtaaataaagcggttatttatattacaagggttatttaa

SEQ ID NO: 287668 - DNA, 420 bp, Morganella morganii
atgactaataaatttgaagcaatcgaaaaagcatcaaagggtgaaatcactatcgaaatgcgccctgtgtatgttgtctcaggtgccaatcatgcttacctcagtcagggcggcgcactgaataaactggcctacattatcgctgaaaagcagtttcatgcggaaggtaagcatacaaacgaaccggctcaaccgcaccaatttgaggatggtgcgaccgcatggaaagcaggagcaccacgggatgaatttatcgaacgcaaaaacgaagtactgaacgaattaaaagcagcactgcgtcatgaaaacgaaattgttaaattaaatggtgaatatgaaaaagcaaaaaacaatgccactgctgcacaggaaaagttgtctatagcatcatggaaattaaagtcagccattaataaataa

SEQ ID NO: 287669 - DNA, 447 bp, Morganella morganii
atgtacacaaatgaagatattttgaacgaatgccaaaaggctcagcttttggttaagttgtatgagttcagcaaagaaaatggtgagttgagtgaaaatgaagatgcgctatctgtacgcatgatcgcagaaattatcaattcaatcgctactaccgcaacggcaccgcaaaaatcagatgcgctgaatgatgtcacaccatcacacagcagcttaccgcagcgcttaaaacacgccatgaaagcggcaggattaacacagaaagaactggcagaacgcgccggagtatcgcagggactgataagcaaactggttctcggtaaggcggaagaaagcagaaagattcttgctatctctcatgccttgaacgtaacacctgactggctactgtacggaacgggcgaaatgtactcagctaatttttctgccgatgatcgtgaggtttaa

SEQ ID NO: 287670 - DNA, 393 bp, Morganella morganii
atgagtagcttcagattcagtaagcgcagtgaagataacctgaaaggcgtcaatcctgatctggtgaaagttatccgccggacattggaaattacgccggtcgatttcattgtcattgaggggttacgaaccgaggcacggcaaaagcaactggttgctgagaagaaatcacagaccatgaaaagccgacacctgaccggccatgcagtcgacattatcccagttaacaccaagtggcagattgaagaattcaagccgctgctgagagccgtcaagcaggccgctgacgagttaggtgtaaagctccggttcggcatcaactggaagaatgacccatcactgccgattgaaacccgtttcattgatgcgcctcacgttgagattccggtatga

SEQ ID NO: 287671 - DNA, 183 bp, Morganella morganii
atgaagcatttcaaaattgacgccaaagggtgtggtgaatccgctgttgtcacggtggagtatggcgggttgctggcagaggctaagcgtgttggttgcgttcgtaaaatctccgtttcaggccgcggtaacgtcaggcagataaaaaccatcgcaaagatattcatgagagcacttaattaa

SEQ ID NO: 287672 - DNA, 390 bp, Morganella morganii
atgagttttagtgatattggatttctcaagatgccacctccggcttccttaagaattgaaaacctagctagtgacttccatgtacgcgtactcacatgggtaaatgatttccacaggtcattgtccgatgaatacgaagttggcggacagctcgttagttttggcagagaggttgaattttcatttacagatatatccttctggaatcctgcccttatatcgtttaaaggaatactacacgatggaagcccagttgagctcgtgcagcatgtgtcacaaataaacgttttacttattagacagaaaagagcaaacaaggaagaacccaaaaggcctataggatttgctagttgggatgagtacgacaagttcgctctagataaccaatag

SEQ ID NO: 287673 - DNA, 462 bp, Morganella morganii
atgtttaagtacatttgtgctttatctgttcttctttctggatattcgttttcagcggtaaacaataatgacatggggttatacagagataacaattacaatgtgttagctttggctggcggatataattgtggtgtttattcgttacccaagaatattgaaaatattgatgattacaataatgttaggattggatctgcaacggtagaaataaccccatacagcggagataacagcgtcatggttaacgtcaaccttgataccggcgtgacagtaacctctccgcgacttcctgttgtaaacaaaagctccacaggcactatttatgctgtaaaaaatgaagatctgttcttcatgtatggcgcaactgagtcggaaggaattggtatctttattcaggatgaaaggaaaggcagtgagaaaagtttgcgcatcgctgggtgtaagtacgatgataaataa

SEQ ID NO: 287674 - DNA, 654 bp, Morganella morganii
gtgtttttgtggagacgaaaaaagaaaaggctcgaagctgcccgttacgatctgactaagtttcatgatgctctggaaagttatctccccatcctggctaggaagaaaaagcacctcgttgttaaggatgattacggctatacagattcatcaaaatgggattcagagagaaaattgtttctgaaaaaattcagttggttcccatgcacaacgaaatactattcaggattaccggcggaagaatatgacttttgtctggacaaaattgtcgatgactacattgcaaagaacccatctctggcatgggacagcaatatgagccctgctgaatacgaaaccttctgtgctgacaccctgaataacaatgggtgggatgcaaaaaccactgtggcaactggtgatcagggtgtggatgtcattgcagaaaagggaggggtaaaagttgccattcagtgcaaaaaatactcatctgccgttggcaataaagcagtccaggaagtggcggcggggatgtcatactggggcgctgatatagccgcagtggtaagcactgctggatatactcggtcagccagggagttggcatccgtccacaatgtgtatttgttgcatcacgacgatctaaaagatttagaacaaatcataaacaactaa

SEQ ID NO: 287675 - DNA, 942 bp, Morganella morganii
atggacacaaaaaaaagagcacaaaaagcagccgctatgtcagccatcgttagatcagctccgatgccaactcacactggggcgctggcaactggcctgtcctgtgcggttctcccagacggtcgcagagttgtttctatgcagggggctagtggactagctgaaacgttcggagtttcggttggttcgaaaatgcctcgctgggttcctggtggtgagagtggtcaactcccatatgttctgcaagcaaatgagatccagccatacatccccctggaattgcggcagcagatatctgaacccatcgtatataaaaataccggcgctggtgtgtcgtatggggtagatgtaaccctgctaccggcaatttgtgaagcctggattgaggcagatcgtgatggcgcgttgagactcaagcaccatgtaaacaccgcgataaaagccaatgccctatataaagcactagcaagggttggcgcagttgccttggttgatgaggccactgggtaccaaaaagagcgagaaagagacgctctcgccaaattactcgaagagtttattgccaaagaaatgcgaccgtgggttagcacatacccagcagatttctttgaagaactttgccgcctgagaaaagttccgttcaaggctaacatgcgaaaacctcagtattttggttacctggtgaataacatcacatatgaccgcatggctcccgacttgagagaagtgctaaaagccgagagagccaaggccaagaaaagtggagcgaaaatgcatcagtttttatccgaaggcactggttacggcatgctgcaaaaacgccttactggcatcaccacattaatgaaagcctgtgacgagtatgatgattttataaccttgctcgacaaggttcatccagtaatgaaatcaccaaaagatgaaacagaaacagaagaatag

SEQ ID NO: 287676 - DNA, 207 bp, Morganella morganii
atgaaagaaaaactaaccgcaagagctaaggctaatggaagatcgctaaactctgaaatggtaatgaccctgcaagaatctttagaaagagcagacccaaagccaaaaagtagcgctgaacacgccgcagccatccaggcagaggaagtgaaaaagatggtgttcgacacgctggttaaaatttacggggataaggatgacaagtga

SEQ ID NO: 287677 - DNA, 171 bp, Morganella morganii
atgaagagccaaaataataaacagaaagttgttcgtatgtcagaggatttaatttggaaaattaaggaagccgcagcgcgcggacgccgtagcgagaatcaggaaatgttgatgcggttggaaatgtcgtttgacacccgagtagagaagatgatgaaagattgcctgtaa

SEQ ID NO: 287678 - DNA, 162 bp, Morganella morganii
atgaatggtcaaaaaagagcagggcaatttcagttgcgattaacagagcacctgaaagaaaaggtagtggaattagctaaaggcgatggaatatctcaaaacgcaattcttaatcaagcggtagcctggtatgtaaaagcaagagagaaagatgttgcctaa

SEQ ID NO: 287679 - DNA, 1014 bp, Morganella morganii
atgtctgttcatcacacccaatccgttattctgaccggcgaccgtatcaccgggccgttacacctcggacactataccggctcgctgcaacagcgggtcagacttcagcattctgccgtgcagtatattctgatggcggatatgcagggactgacggataacggtgcgcaacccgaaaaagtaaaccgttatttttatgatgtagcggcggattacctggcggcaggcatcgatcccgcccattcggtgatttgtctgcaatcggcgctgcccgcactggctgaactgacactgctgtatctcaatctggtgaccgtttcccggctggagcggaatccgacggttaaacaggaaatcattcagaagcagttctcccgtacactgccggccggatttctgatttatccggtcagccaggcggcggatatcactgcgtttaaagctgatctggtgccggtcggggaagatcaactgccgatgattgaacaaaccaatgagattgtcagcaaaatcaatcatgttaccgggcaggaattactggttcactgccgtgctgaagtcggtaaaaccggccgcctgccggggattgacggtaacggtaagatgtccaaatcactgggaaatgccattaatctctctgtcagtgcggatgacctgacgcgtgccgtcaatgctatgtttaccgatccgcagcatctgcgggtgtctgatcccggccggattgagggcaatgtggtgtttgcgtatcttgatgcgtttcatccggatacagccctggttgctgagatgaaagcccgttatcaggcgggcggtttaggcgacagggagtgcaaatcagtgctgaacgagtgcctgcaggcactgctggcaccgatccgtgaggagcgggcgcgactgatggcggataagtcttatctgctctcggttatccgccgcgggacagaaaaagcgcgggaagtgacacagcagacgctggatcaggtaaaaagaggaatggggctgcttattttttga

SEQ ID NO: 287680 - DNA, 2091 bp, Morganella morganii
atgattgtcgagcagatgaaatacaagctctccgtggaagcggggggctttcttgatgctacccggaagataaaaaacgaaacggaggacatgaagaccaaggttaagcgcaataccggcgaagtcacaaaaggctttggtgagcttaatctgggtattcagaaattcagtaccgaagggaagaacgcatttaccagtgtaatgagcggtgcggctaaattccttggtgtggccgtcactctggaaggtgcaagacgtgcatttgtcagcacaacggattccctgattacgctgggtacgcaggcggcgtggctggggatgaacgcaaagcatctggatgcctttaatcgcgcagctgagtcggtcggttcatcaagagaggctgttggttctgcacttggtcgcatgaatgagtgggacatctggagcaaaaccaacgtaggtccagctccggcatatctggctgcaatgtaccagctgcaaagtgagtctgcagtaaacatcatgaacgggaagaatgccgaggagaaaacactcagggcattcgaggcaataaaaaacctcaaaaatgaatcccgcgcccaacagctttacacatctgcattgggcctgagtgatccagcattatttcggtctatccgtaacggaaaatttcaggcggcgtttgaagaatataaagataaatcctcttataccgaacaagcggaaagacaagcggagcaagtcagaaaaataatgactgatcttaatgttgaagtgaaagccctgaatgatgctttatatctcaacttcggcgataaggtcgtcgagaacctgaaaaagcttaccacttggatcaacgagaaccgcgacggaatcatcgggttcttccgcgaattcagagacgttgccactgagcttattgatgcgctgggcggcatgagcggcacgcttgctattttaatcgcgtataaaatgggcggacttccggcggctgcggctgttgcttacggtatcgccgcagagaaatcagataaaaatgaccagccgaccaatctggaatcgcggcttacaggctccgggatgtcgtcaccagctgtagccaaaagctcacccggacttttcttgcacccgctaatgcgcggctctgagcgtgttcttatccgtcctgagcaggacgctctttacatgaaaatgtattcagccgaagagcgaaaactaatggatgaagctgccagatacccccgggaagatcagttaaaaaatattcaggactatgagcagcactggtataccgtttcatggctcaacgtggataaagcggccaaggaaaacaaagaggcaaaagaagctgaacaccggcgggaactgctgttcggtaccggctcagaggttgcgggagaatctaagcctaccggaaggactgacgttatcggcggacggttaggttcaggtagaaagctaaaaagtggtgagacgtataaatacgaaaccggtgagtattacgacgcgaacggcaacattgctaaccctgtagaaacagacgccggaacaatatcaatggatcgcttgttggacgcggttgctttccgtgagtcgcgcggcaatccggcagctaaaaatccacattcaacagcaacaggagcatggcaatttgttgaaggaacagccagagataacggattaaccgtaaaccactctgccggaattgatgaccgtctggaccctgaaaaggctagggccgcagccgatattctgatgcgtaaattgctaaagcaatacaacggaaacgttgctgatgcgctgtttgcgtacgcaggcggaggcggcggagtgaacagagtattgcgcggtgacaaaggtggattgaacaacgagtcggtggagtctgtttataagctggctgaatacttcgacggaattaatttcgaagcgtcaaaggttcaccagactttacaggtgaccagtcagcctcagtctcagcctcagttttacgtcaacaatatggaaataaacagccaacctgaatctgttgatgctctctcaaactccatacaggaacaagcatcccgcgccggaatgaatgtctcattcgatacaatggggaggtga

SEQ ID NO: 287681 - DNA, 1020 bp, Morganella morganii
atgaatgacgatataacctgtgaaatactagcactgtcacaaatctacaataacggtacagagattaccgatgacacaacagaccgtgagttattccggttgatagcgttacatactactgcattaattaaaagaaagagtcagcctttaccctttagtgcgtactattttggtgataaattacaaataaaggccactaaaaccggtcggttgttttatgaattaatacaaaacattctttctctttcccgtgttaccggcaaccggcgtaaattacatccggttattccgctcattgtttctcttgctgagaaatatcatattcgttatgttccgatgctgtcggaatactatcctgactcagaggaggtaattaaacagctaaatgaagcctattgtgaatttattcagtcagtggacagtaaagagtataaaaccgctgtcagtacctttaagagcagtgcccgcaagaattaccggttatgttgccgctatattgaaaacctgtttgagcgccatgcaaagctgttggtggtacggacagacctgtcttacggaaaacggatcagtcacagagtcacggccggggatttaacccgtcaccggattgccctgtacaaagcaatacagcggttacccctgtttaaacactgcgtcggttatatcctgaaactggaatacggtcgtgaaaaaggctttcactaccactgtctgtttttcttcaacggccagcatgtcagacaggatatcacgatagccaggctcatcggtgagttttggcaggaaaccatcaccgagggacaggggctctactttaactgcaaccgctttaaatcagattaccgtatctgcggcattggcatgctgcaccgcagtgagagccagcgacgggaaggcctgatgaccgctgtgaactatatctgcaaaacagaccagtgggtgaaactgcaggtgccggggatcgaccggacattctggcggggaaccatcagaaacaaacggcgtaaaacacgccggtaa

SEQ ID NO: 287682 - DNA, 222 bp, Morganella morganii
atgaataccactgataccaccactgccccttccctgctcgacgaaccactcgtggacatgaaattcatcaccaaatttaccggatcaacggacaagtggttttacaagctgatacaggaaggccagttcccgaaaccgattaaactgggacgcagttcccgctggctgaaaagtcaggttgaagcctggttacaggcccgtattgacgcatcctgtgaatga

SEQ ID NO: 287683 - DNA, 1179 bp, Morganella morganii
atgaaacataaaatgaaacataaaatcctagtatttatagctcactatctacctgcttataaagctggcgggcctcttcgtactattgaaaatatggttgcgcatttagctgatgattttgattttctcattattacgggcgatcgagacttaaaggacagcgagccatacgttcaagttgaattagaaaagtggttagatgttggtcgtgccaaggtatattatgtcccacaaaataaatcgaccgttaaatactatcaaaaactcatttctaccttagagtttgatattgcatatctcaatagcttctttgctactgattttacaattaaacccctacttgcactaagaaaaacaagcaagaaccctattctcttagcaccgaggggagagttttcacaaggggcaatgagtataaaaagtatgaagaagcgctgttacctggcgttattctcctggatatataaatcgcttaaatttcaagcctcaagcgtatttgaagctaacgatattttaaaaaacctgccttggttagcgcaaaaaaacatatataccgctttagacttacctcaaaagtacatctatgatgaaaattctttacaatataatagctctacactattaaaaatgattttcctatcacggatatcccctatgaaaaatttagactccgcgctaaatatactccaagagatttctcagcctatacaatttgatatttatggaccgatagaagatctccctttttggcaaagatgctcggagaaaatcgctaaactaccagcaaatatcacagtgacatattgtggtgcattggaccctcgagcggttgcaactacgattgccaaatatgacttattctttttacccacaaagggtgaaaattacggacatgtgatagcagagtcattaagtgtcggcacacctgttttaatcagcaatctaactccttggcaaaatttacaacaacatggcttaggctgggagtttccattgaataacccagagaaattcattgcaaccattgaaatgcttgcggtcagtagcatagccacaaaaaatgaactacgttctaaagtatataaaaatgcgcataaaatattatcttcttcaacagaggtagataaaaacagaaaaatgtttttacaaattatagacagcagagagagtgtaaattaa

SEQ ID NO: 287684 - DNA, 1041 bp, Morganella morganii
atgtcttttaaaaataaaactctattgattaccggtggtaccggctcgtttggtaacgccgtgctgaaacgttttttaaatagtgatattaaagaaatccgaattttctctcgcgatgagaagaaacaagatgatatgcgaaaatattactcaaatgataagctgaaattttatattggggatgttcgcgattatcaaagtgtattaaatgcaactcgtggtgtagactttatctatcatgcagcggctttaaagcaagtcccctcttgtgaattctatccactagaggctttaaaaaccaatgtacttggtactgagaatgtcctcgaggcggcgattcaaaacaatgttgaacgtgtggtttgtctgagcacagataaggcagtctacccaattaacgcaatgggtatatctaaagcaatgatggaaaaagttatcgtagcgaagagtcgcaatcttgaacataccaataccactatctgtgcaacgcgctacggcaatgttatggcttcacgtggttctgttattcctttattccttcgtcaaatattcactgaacaaccgatcacaatcactgatgcaagtatgactcgttttatgatgacgttagatgatgctgttgatttagtgcttcatgctttcgaacatggtgaaaatggtgatatttttgttcaaaaagcacctgctgctacgattcaaaccttgactgatgctttattgcaggtgacaggaaaaacggatcatgaggtgaacattataggcactcgtcatggtgaaaaactttttgaagcactatgtagccgtgaagaaatgtttgttgctgaagaccaaggtggttattaccgcatccctgctgataatcgagatttaaattactcgaaatatcatgaagaaggtgagaaagatctatctctggtagaagactataactctcacaatacagagcgcctcgatgtagagggaatgaagaaactgctaagaaaacttgacttcatccgtgagattgaagccggtaatatcgttgttccggaaggtgtataa

SEQ ID NO: 287685 - DNA, 843 bp, Morganella morganii
atgcttggttatagcattttttctaatctgtcagattccaatgatcttgatgtttatggaactgttagaagtattgatggccttgagaaatactttccatcggttgataaattgctttttaatgtcgatataaaagagtttaatactcttgaagaagtattaaagcaagctaagccagatgtagttatcaattgtattggattgatcaagcagcatgatgtgtctaaacaacatgttgaagcaattgaggttaattcacttcttccacataagattgctcaggtttgcaatagtatagacgcgagactaattcacttctcaacagattgtgtgtttgatggcaaagcaggtgactacgttgaagcagatttaccaactgcgacagatttgtatggtaaatctaagtgtcttggtgaagtggattacggaaatcatattactttacgcacatcaatcatcgggcatgagcttaaatcttcagtgagtttggttgattggttcttaagtcaagaaggttctgtaagagggttttctaaagcggttttctctggtttaccaactgcctatgttgcgaaagtactaaaagagtatgtgttaccaaacacatctttgtctggactttatcaactatcggtcgaaccaattgataagtactctttaatttctaaaatttctgaagtttatagtaaacatattgaaattgagaagttcgaaggcttcgttattgatcgttctctaaattcatcaaagtttcgtgaagaaacagggttcgcaccaccgacttgggaagagcttgtcgaatttatgcatgaagattacatcaagagatacaacaatgagtag

SEQ ID NO: 287686 - DNA, 1131 bp, Morganella morganii
atgagtagattaaaagtagtaacagtcgttggcactcgtcctgaaattattcgcctttcaagaaccattgcaaaattggatgaatatacggatcacactctggttcatactggtcagaactatgattatgaacttaatcaaatcttttttgatgatctaggtattcgttctccagatgtttttctagagtgtgcaggtggtacagcagctgaaacaatggctcaggttattagcaagtcagataagttattcgaagaaattaaacctgaagctgtattgattcttggtgatacaaacagcgcactatcagcaatttcagctaaacgcaaaaagatccctattttccatatggaagctggtaatcgctgtttcgacttgcgtgttcccgaagaaattaaccgtaaaattgtcgatcatatctctgacgtgaacttaccatacagtgacattgcacgtgactacttattacgtgaaggtattagccctgatttcattgtaaaaactggtagcccaatggatgaggttttgaatcactatggagaaaaaatttctcagtctgatgtattagagcgccttgagttgaacactgaaggttatttcttggttagtgttcaccgtgaagaaaatgtagattcaaagcgtaatatcaataactacgtattggcattaaatactatcgcggaaaaatataacctcccaattattgtatctactcatcctagaacgagaaagaaaatcgaactcttaaaccttgagttccatcctctggttcgtttaatgaagccgctgggctttagtgattacattcgccttcagaaagaagctaaagtagtacttagcgatagcggtacgattacggaagaatcctctattttgaattttcctgcgatcaatattcgtgaagcccaagaacgaccggaaggttttgaagaaggtgccgtcatgtttacagggatgagtgtagaaagaattcttcaagcaattcaaatcctagaagctcaaccaagaggtgaacagcggttactgaataaggttgctgactatattgcaccaaatgtttctgacaaggtgcttcgcacgatcctaagttacacagactatgtaaatcgagttgtttggaagaagctgtaa

SEQ ID NO: 287687 - DNA, 1242 bp, Morganella morganii
atgcatctagcattagttattgacgattacttgccacatagcacacgtgtggccgccaagatgttccatgaacttgcattggaatacatcgatcttagtcatcaagttactataattactccacattttgataagggagctccctgtctaattaaagacgagatcgatggtgtcaatgtatggcgttttttttctgggccaataaaagatgtgggcaaaatcactcgtgcgattaatgaaacacttctttcaaacagagcgtggagagcaattgctaatcaagtcaaagaggacacatttgatggtgtggtgtattactcgccatctattttctttggttctttagttgaaaaaataaaaaaacgttgtaattgtggtagttatttagttttaagagatttttttcctcagtgggcgatagattctgggctaattaaatcaggttccattattgagcgttactttagatattttgaggctttgtcctataaacatgctgatatgatcggcgtgatgtcgcaaaaaaaccttgatattttcaatgatattaacttaggtcgatatccagtttctattttaagaaattgggcgagtttaactccccataaagcttcgccacaggtttacaacttgcgtgaaaaattaggtcttttagaccaagttatctacttctatggtggaaatataggtcatgctcaagatatggcaaaccttatacgcttggcaaaggggatgaggcaagatagcaaagctcattttctctttgttggtcagggtgatgaggttgagcttatccaagacttagcgagacagtgggagttgagtaattttagctacctaccttcggtagaccaagtcgagtttaaagagatcttagcgcaagtcgatgtcgggttgttttctttgtctgcgaaacatacggcacataatttccctggaaagttacttggttatatggttcagtctctacccatccttggtagtgtgaaccaaggtaacgacttgatgactctcgttaatgcaagtggggctggctttattacagtgaatggtgatgatgaacagtttttagcaaatgcgcgccaacttcagaaaaatgttgagttaaggcgtgaaatggggtcggcgggctatcgtttgctggaacatgagtttgcggtatcacgtattgcttcaaccatcttatcctctttggagaaagtgaatgagaattctagacaagcagtttttaaccagtcttga

SEQ ID NO: 287688 - DNA, 414 bp, Morganella morganii
atgagaattctagacaagcagtttttaaccagtcttgaatgctcggcggtaactagcccgcgtaaacgtgcacacctaaacttgcataatagcttcgaggaaaaggtacaacggttatttattgcccttactaaaggcagttatgttaagcctcattatcacgaattacctcatcagtgggagatgtttgtggtgatggagggggtcgttgaagtggtgatatacagcaaagatgggcaggagaaacagcgtttacttgtcggggatggacagagttgtaaagcgattgaaattcagcccatggatattcatagtgtggcgtgtatatctaacaaagcattgatgcttgaaataaaggaaggtccttttgatccagctattggaaaagtggccgtaaacttttctaccaaataa

SEQ ID NO: 287689 - DNA, 210 bp, Morganella morganii
gtgcggagcccgcagagcaacggaatggcggaaagcttcgtgaagacaatgaaacgggactatatcagtgtgatgccaaaaccagaccgggaagtggcgctgattaaccttgccgttgccttcgaacattataatgaacagcatccccacagtgcgctgggatatcgctcaccacgtgagtatcgtcgtcggcgtgagtcgttaacttaa

SEQ ID NO: 287690 - DNA, 1260 bp, Morganella morganii
atgagaaaccatacttctttaaaaaaaaatgcattatcattattaataatgcaggttattaactatcttgttcctttgattaccttaccttatctcgccaggacgttaggtatagtccaatatggagcattaaatttatctttaagtttgattcaatatggcgtcatttttattacatttggattcaacttaagtgcaactcgtgatatagcaaaaaacagaggtaatacacaaataataagtaaaattttttgggagacaatttcttcaaagatcttattgttatttttttcttgcattatactatattatagtacagaatttattgatgggttcaattccattagatatctcactgtgatatttttcatgcaattaatatctgttgctattgacccgctatggttttttcaaggtatagaaagacttgtaaaaatatcgataataacggcaataattagattaatcaatatacctttattactcttttttgtacatggccctcatgatgttgagaaagttgcagttattcaatctttactattactattgacctctataataaatttgtatttaattaaaaaagaaaatattttaatgaaaattaaaataaaagaattaaaaatagtgcactcattaatatcctccttacccttatttgtaggtgccgcagctattagcctctacaatacgagtacaccactaattttagggttaatgagtaattacaatgaggtaggtatatattctgccggattcaaaatacaaatggctgcagtgggagtatttactatattagggcaagtaatttaccctagggcaaacaacttattttcaaaaagaacacaggatggatatatttttgtaaaaaaattacttatttatatgttacctgttctattattatcacttttaatattttatgtcatggtccctcctttaatagtaatggttctaggtcaagattttattggttcaagtgaagtagtgaaaatcatgtctccaatgttagtattggttccttattctattgtgttgtcaaacaatttattattaccattagggcataaacacatctattatatattacctatatttataggtttattgcatattttatacacaataatattaagtgataagtttggtgcgattggtgccgcatattcaatgctaataacagaagcaattacgcttataacactaattacatattgttatataaaaacagatataaaaaagggatatatcagtgtttga

SEQ ID NO: 287691 - DNA, 606 bp, Morganella morganii
gtgtttgaatcactagttctatacaattttatttttctaactagctcttttttattttattatagtgagaagttaaaatacagatttgatagaaggatattaatactcatagcttggcttataatagtgattccggctgcaattagatataatataggggtggattatcgggggtatgtatctatatataatgatatagtaactaaaaatgaatcgtatgttgagcctgggtttaagttaatcattactcttgcatcatatttatttaatgcacctgaagggttattcttaattagtagtatattaatctatacggttttattcctgtcttatccaaaaaaaaattcctatgtgattaattatatgtttattggaatgttttatttattatcatatacattcattaggagttatatcgcactaagctttactatgttaggcattatgatactaattgaaaataaacgccattcaatcctcatatatttcatgttaatctctttagcaataacctttcataaaagtgcagcaatactacttattcttccatttcttaacaactcgtttatcattggtttttttaaaaaatttagctgcattatttaa

SEQ ID NO: 287692 - DNA, 123 bp, Morganella morganii
atgaccaaaacaaaaagtagactgattggcaataatgtctttttgaaaaagtacaaatacacaaaaaaatatgacagacataataagtttgattataggtttcaagttatcaatttgaattaa

SEQ ID NO: 287693 - DNA, 390 bp, Morganella morganii
atgtcaggacatccacacgctgaccttatggctaaggcggcagagatagcgaagacggataaagagtggtatcggcactttgaaataaagacactgcattttgatgcctggagcgagatgtgcaacgaggtatttttcgtcaatgacgaataccgtcttaaaccccgcttcatcgacattaacgatcatcaggttccggagccggtgcgggaattgccgaataatgatgatttactttggattgccgatatcacgcaaccaactgccgatcagttgatgtggacgggccatccatcagacattttgatgcttgagcgcggaattcttcacctaaccaaagaggcagcagaagcccactcagccgccctgctctctttcacacagaagtaa

SEQ ID NO: 287694 - DNA, 345 bp, Morganella morganii
gtgaatagtgactttaaaaagtctgtcttagttgcagacgcgcaggcttcaatcgaagaaagacagctgaatagtataaaaatgatggtacaaggtttgataaactttgtggtaactagtttcgaacagctaggcattgataagttgcatgaacttaccgatccatcacttgatgagttggcgtccataattcaagaattgagcgctgaagcaaaaaaacatgaagatatcaatcttcagcaaacactgttgtttgctgaaatattaattaacgacattaagatgaaaaacccagaaatgtgtgcgaatagttcgcatatgctgaaaaaagcaagcattttctaa

SEQ ID NO: 287695 - DNA, 297 bp, Morganella morganii; identical to SEQ ID NO: 281101

SEQ ID NO: 287696 - DNA, 243 bp, Morganella morganii
atggagtggattaagacgagtgagcaacttcccgaaatggaagtaccggtattggccggatggtttagcgagtacagaggtaaatttgtctggcactgttttttgcggtcagaccctgatggtgagggctggttatggtctataagcaccgatgattttctaagcgatgaaagttttttcattctggataatgaatatccaataacccactggatgccactgccacaaccaccggaggagtga

SEQ ID NO: 287697 - DNA, 210 bp, Morganella morganii
atggaaccaacggattttgaaaagtggtgtgcggaagaaactgggattccgatttttatgattgtgagccaacgcaaaaataattcatgcggcatcgatgggtatgattactgggaaattaacagcagataccgcgcctacatggccggagttcgcagcagactgccgtaccagacaccgccaaaaggagatgaagatggagtggattaa

SEQ ID NO: 287698 - DNA, 135 bp, Morganella morganii
gtggaatgccaactgtgcagtaaagaactggccgaagatgaaacgtggctgtgcgaccagtgcgccggtgaatgtccgcatctggaagtggtcgagaagacaaaaggagatggtgatgccgaggaagagaattaa

SEQ ID NO: 287699 - DNA, 297 bp, Morganella morganii; identical to SEQ ID NO: 281101

SEQ ID NO: 287700 - DNA, 654 bp, Morganella morganii
atgtcacaccagatgacttacgcggattcacacaatgccacttcttcgccggtgtcggagtgtggtcacttgccctgcgccgagcaggatggccggataacaaaccggtatggacaggaagttgtccgtgccaacctttcagcgcggcaggcaaaggaaatgggtttgctgacgagcggcacctttggcctgcattcttccacctcatcagcgagtgcaagcctaacgttatctttggtgagcaggttgcaagtaaagacgggctcgattggctcgaccttgttcaaactgacttggaagcaaaggactactccacggcagcggtcgatttatgcgctgcgggcttcggtgcgccgcatatcagacagcgactgttctgggtgggcaacgccaacaaccagggaatggaaggaatgcggggatgtgagtcagtcattcttccggaaggacgggaaaatgcggaacgacacactgtaccgccagctatggctgcacatgtttgggatggatggcaggccgtcacgggagcagataaaaaatctcgaatgctgccacctgactttggcgagagaactgatgatgctgccggtcgggtgggaaaactccgcgcctacggaaatgccatcgtcgcgccggtcgcggaagagttcataa

SEQ ID NO: 287701 - DNA, 198 bp, Morganella morganii
atgacagaggtatacgaacacgcatcaatacgtgtagaaatggcgagcgatgcgactatcagggattattttgcagcaaaggctatgcagggattattgtcagaccctgacgctggcatgcttgatgatgacatgagccgatgggctatgctttcttacaaaatggcagacgcaatgcttagagcaagagagaaatag

SEQ ID NO: 287702 - DNA, 441 bp, Morganella morganii
atgcacattggatggtattacttacacgaaaatggcgacctgatttacaagccagggagtgattctattgctgatatccgcgactctgactttgcaaaatgttcatggccaatttaccagcacgatagaaaatctgcgtgggatttattggttgaggccagcgcactcggggccaataaagagcgcattaatgaattggctgaaaagtggaaatgcaatgatgacgacgctgataattatgcgggagttattggccttcatattaaagctgacggttcgtcatggtgcgcccatctgatggactttattaatttgcaggaatctccggctggctttggtgaaacaaagcttgaagcaatggctagcctggctgttcagcttggtgttacaggcggtcacatatggagaaaaacattctcagattatgttgctggcgaataa

SEQ ID NO: 287703 - DNA, 576 bp, Morganella morganii
atggctgatttatttgattttgcagaagaaaaaaggaatagaatatctgtatctaatggctctttgtttaccctgtcatttgaaaatgaagtaaatgagccatataatcatcccaaagaggatgttattaatggtgtagatatgaccagagaagaactagatgcaaaactagctcagaataaagccgaggttcaggctatagcctctggtatgcgtgaggaaatggccgcttggcgtgaaacacagaacgcgcaaatggttcaaatgaacgctacgctaacttccatgtctgcaaaaatagatgcaaaatttgaagttctagacgctaaaattgatagtgtcgacaaatctctaggtggcagaattgacggcctaaatatagcagtatcaggaattcaatcaggcatcagtattagactggctgtattcagtgcgtttatagcggtgttacttgctgtagctagttggtggatatcgtcaaaccaaccatctccgcagccaccacaacatcagccagctgttgtccatgtccctgccccagcggaaccgccacagcctataaataattctaaatag

SEQ ID NO: 287704 - DNA, 450 bp, Morganella morganii
atgagttcacaattagaaaataacaaggcacaagaattaattagctttgtcaccccattcgtagatcataatgagctcattcagcccgtaactagattttttgttaaatcatatcctgcttcaattagtgtgaagttacagattggattgattaacctaaagaaaaattcaagatatagcataaagttattcataacacctcaccatttattcacgaaggttggcaatgaatttgagctaagcaatccttttcaggaaatgttttctggtgttattacaacaaaagatactgatatcaatatcattgacgggcagctaaatatcaatatagaagatgtaattatacagacagaaggcatttactctgtcgagtgtaaactttttgattccaagaatgaaaatactgaattaaattcattaaaatcattttttgtcgtgtcagtgggataa

SEQ ID NO: 287705 - DNA, 261 bp, Morganella morganii
atgaaaactgaatatatctatatctgtgctcaggcgtactgcaatgaccagggtagtggcatcgaatattacaccgactatgagcgctttgataatcgaaatgacgccattaaaaacggctggaagcaacgggaatcagacgatttcaatatcggtgtcctggttaacggccgccttgtttcggtcgactggatggctaaaccaattgataccgacccggaaacattacggaaaatcgaagaccagcttgagctgtattaa

SEQ ID NO: 287706 - DNA, 459 bp, Morganella morganii
atgaaagacagaatcaaattcagcgacgaaatgttagccgctgttattgacgacaggaagacgcagacgcggcgaataatgaagcctcagccggtattaaacggaaacttctatgaggtctttggcgcgggttggagtaaaggtatcaagcgcgttactgtcgcaccagggcacagtttagagcgaaactttccgtatggtctggttgataaaaaaatcccgttcgcagacaaagactgcaatatcaaaggtgaaattgagattgtcgatgtctggttgcagcaggtgcaagatatcagcgaagaagatgcaatagcggaaggcgttgttactggccgctatggtaatgaaggcaactggctgagaggattttatgcgctcgaagaatgtgagagccgcgcagtgcaggtaatggctgtgcggaatgttgaattagtatgtgcggaggttttcagatga

SEQ ID NO: 287707 - DNA, 198 bp, Morganella morganii
atgaatattgatatagactcctttgctttatatattggagttaaggcggggtatttagctgcactatatagaaccacttgtgaattagaaggattacctttacctgaaagaaaccggcatggtaaagtaaaaatggcagaagtgttagtttttaaacaacattttgaagataaaaaatccagaaaaacgcaacgataa

SEQ ID NO: 287708 - DNA, 174 bp, Morganella morganii
atgtcccaatctcttgattttgataaggcacttaaagcactccagtttggtcggacattaaccggcaaggacgatgttttaactgaatcgccctttacggagttggaatatcaacaatataccgatattttcctgtatataaacataaacaccataatgaaaaataatcgataa

SEQ ID NO: 287709 - DNA, 420 bp, Morganella morganii
atgacaaattacaaatatagcgctaagaatgacgttttcatcccgacatcattcattgccgaatatgagaaatccgggtgggatttttctgatgcgattgatgttgatgatgatgtttatcttgagttcattacccctcctgccggtaaagtcagggtggcaggtaaggacggattgcctgcatgggaagatattcctccgccgacaaaagagcagcttattgaacaggcggaggcgaaaaaacaggcgctgatagccgaggtaaacacggagacagaaatgctccgggctaaactggcacttaagcgcatcaagccggacgaactggaattgttaaacgcctggctggactatctggatctgctggaagctgtggacacatctaccgcgccggatatctcctggcctgttaaaccttaa

SEQ ID NO: 287710 - DNA, 369 bp, Morganella morganii; identical to SEQ ID NO: 281580

SEQ ID NO: 287711 - DNA, 462 bp, Morganella morganii
atggtgatgattgaaccaaattcgataaaatttgatgattattatattaaaggtaaggataagccaagattatattcgaatgattttattaataaaataataaatgagcacttaaagtatgattttggatatgaggcagttaaggggttttgtttttttgataaaaagggaatggatgaattatctaaaacaatactgagtaaagagaaatattatagagttaatggaaaaactggcactataatttcagtgaatgctgaacaacgtgtaatcaatttgttctgtttttattcaccatacgaattagatcaggataatttttttaataatagagtttgttctgcattagataaattaccagtacaaagaggggattattctggctataaagtctacttgagtaaattaccgattaacagtgattttaaagttactggtgtcgattttattgttgagttataa

SEQ ID NO: 287712 - DNA, 618 bp, Morganella morganii
atggctgagtacaacacagaaattcagtatgcggtatttgatgaaaacgggctggctatcgcgccgggatgggctgaagtgtattgctgccacccgctgacgcgggaatataccgggaaaagcatggatgaggtaccgttagggttcagtctgaaagctgatgtctattcggataaaccggaattacccgcaccgggatttgccattgtccgcagtgaggacggtaaacgctggctgcatgtggaagaccatcgcggtaaaaccggttatgacaaaaccacaaaagaaaaaatccagataaacactatcggtgcattgccggataatctgacattgcttgaaccgcaaactctttttgataagtggaatggaaaaatatgggtgacagataaagctgaacagcacgcgtatgaggttgctattgctgatagtcagaagcaatcactgttggctgaagctgagcaggcaattgccatgctggaacgtaaaatacgcctcaacatggcaactgaaacagaccggaaaaagctgacagaatgggaaatttacagtgtgaaagtcattgacaccgataaatccaccgcacctaatatcgactggccgcagaaaccgcagtaa

SEQ ID NO: 287713 - DNA, 969 bp, Morganella morganii
atgagcttcgattataaaaaagagcgtgtaaattgccataataattttcccaaccagtttttatttgaaacggagaggaaatttaaggaactaattgataaaaattgcggggtaactcctttcactccgataaaaataaattacaatgatgattttatatttcaaacatgtattggtcattttatagatggtcttgagctcttaccttttaggcctgactacatgtttgatcaatgctttaaagtaattgatttggcaggtaaaagtcaattccccagctcaaaaggaataaaaggcattgtacagggattaggtaataaactacttaaattaccgaacaataaatgggttgatattattaatttactttctttaaacatacccatatcaacggcaagttatatcgtaagaaggatatttgaatccgaaagcattcgcttgaaaaataatgatgaccataaatccagattagctaaaagagctaaagactgttttattcccggtcagtatgatgaatttattagaaagtttacttttgattccaacgggatgttttcaagcaaaattgctttagaacctaccaacttatcaaatgccaccaaatttttgttaatgatgctgagatgtcaaaaaggacataagcctaaagacccaacttaccctctacttgatctatctaatgtcaataaccattttttaccaaataaaaaatgtgaatttatcacatcgatacttttatataacattagaaatgaccgagctcacggatcgacactaagtccattcaggagtagcagatccaatattgatagatacgaaggatattattacataatgctttgcgcttacataatatctcttggtatatttgaattaaataaattcggtggattcacatcaagtgaaatatataattgctgtcacgacaacataaataaaataaaaaaattatttcatccaaagaaataa

SEQ ID NO: 287714 - DNA, 930 bp, Morganella morganii
atggaaatggattgtatacctgctggtatggaactcttccctgccgctgatgaagaacaatgggagtttataaaaaaaatcataaatgattgtgactattacttacttattattggtggtcgttatggctcgttagctaatgacggtattagttatacagaaaaagagttcgattatgctgtttcacaaggaataaaaatcgttgctctaattcacgaggatcctgaaaaccttgttgtcagtaaatctgaaatcgatccgataaaaatagaaaaattaaacaaattcaaagaaaaagtaaaaacgggtcggatggtaaaattttggaaaacaacttcagaattacctggcatgatgtccttaagcctgaataaaactatgaaaatgtatcctgctgttgggtgggttagagcgaatcaggttgcaagtaatgagttgctgacagaaataaatcaacttagaaaagaaaactccgcgttaaaattaatgaataaagaaaactccactactgaactaattgaccaaagtgaattaaccaatattgattctcaactaaccattactggaaaatattcaattttctccgccgccagaagagaacgcttgtattatgaatttacatccattgtttcttggaggaaattattttcattaatatccccatacttaataaaacatcctaatgataaaaaagtcaaacaaataatgtctgataatttatatagcttaagtgattcttatacagaaaacgcatcccctattattgacgaccaattatttcaaacaataacaattcaatttgaagcctatggattaattaaaactagttatagtaaaacaacagaaggaggaatggcattattctggaggttaacagagaaaggaaagaaattcatgatagaaaatagaattattaaaaatggagattga

SEQ ID NO: 287715 - DNA, 1119 bp, Morganella morganii
atggcacgaaaatttgttatacaaaaacctcagtcaaatgaggagctatttaaatcattagtaattaacgctattgattttttagatgcatcaattgacaatttagataaaagacccaaaaattcaattattgatttttatactgctattgagctttttttaaaagcaagattaatgcgagagcattggacgcttatattagaagatccaggaaatgcacatagtcaaaactttagcgtgggtgactttaaatcagtttaccttgatggagctgttaaacggctaagatctattctcggtataaatcttgatgataaagttatagataatttcaaagcgttgggtgagcacagaaatcaaattgttcatttcgcgcatacagaatattcaaatcagcaagcaaataaagctggtgtagtagcgcagcaatggtcttcatggcattatttatataacctcttatcggtagattggaaagacatctttttagagtatcaaaaaagcatagaacgtattcataaaagaatgctcactcagaaagaatttctgagtgcacgatttgctgaactctctcaagaaattgaaataaatataagacaaggaaaaaaagtcgttaattgcgatcaatgtaatctacctgcaggtatagttaatgataatcatacgtggggagatgattatgaatgcttggtatgcgaatcacaaggtgtagctttggaaaaggttcgggataccctagattgtcctcaatgtagtaatccttttgaattttttagccgtgatgttaataaatgcccgacatgcagccacaaaatagacacaaatttattaattagactgtgtaaagcaaagtataaaacaggtgatgattggtgggagcctggtggagaggtcattgcaggatgccatcaatgtcaacatatccctgattctgttttttatattgaaggacagtggagttgcgtttcatgttttgatcgtggatggtctgcaattaactgtccacattgtgacgcgtatgttactggagatatggatagaattaaatattttgcttgttataaatgtgaagataaacagagggcttcgattttatcaacggcgggcgttaatttataa

SEQ ID NO: 287716 - DNA, 489 bp, Morganella morganii
atggaacaggttttattctttgtttattgcagtgccagagataatttatccgtacaactaattatcaacgtgtcagaaaatgacgactacctacaaggaattagcgttaggcaagatgacgcgggtcagttaaaaacatttagaaaagaccgtgttgttgaatacttcaaatctcttgaagatgctcaagagtttatatccagcggtgtagaggctggattttttactattaaagaaccaaaaccagaaacattcgatgttcatttcacaggatttcgccaagctgataaagctattcttgaagcaatggcctcaactgcaaatatggaagttcgcaaatccgtcacaaaaaacctaagtctgttgtgctatggctacaacgcaagtcagatgaagatggataaagctcgcggtatgggtgtaatcatccttaacgaagagcaattccggcgtttcgttgaaactggcgattttacggatcacagataa

SEQ ID NO: 287717 - DNA, 252 bp, Morganella morganii
atgaccatacctgcacctgtttttatgccagttaaaagttgtgaagccgataacgcctttgttatcgaatgtttagttaagcacaaccgcatggatgaacgccgcatagttgctgatcgctatgcatcccgcatgcgcactcttggcatgctggccagacgggacaaactggattaccaccagattgcagaactgcttgagagggaagccgaacgggcagagaacgaaatccgggagagcgaccatgcctga

SEQ ID NO: 287718 - DNA, 1044 bp, Morganella morganii
atgttaaatcaacgtgctcgtgagtttttaaaacagcacaaagcggggcttgaaaagtcctacggtatcgatgatgcatcaaaatattttgcattatctgacccgaaagaaacgcaactacgtgctgcactgctggaatcagtggaattcttaaatctgattttctgtgcggatgtcgaccagttatcgggtcaggtagtcgcagccggtaacccggggatttataccggacgtaaaaaaggcggtcgttttatccgtgaaaacggtgtatccggcaacgaatttaaattggttgaaacggactctggtgcggctctgccgtgggatttactgtcagtctgggcaaacgcaggcggggagaatgagtttttccagcttatgcaggaatttaccaatgaatcttttgcgctcgatatgctgcgcatcgggtttaacggtacccatgtggcagaaagtacagacccggataaataccctaacggtgaagacgtcaatatcggctggcacgaaattgcccgtaaatggaatgacggtaagcagatcatcactgaggctgtttctcttgatgatgatggtgactaccgttcactggatgcaatggctcaggacatcatcaatacctgtattccgtcacaataccgtactgacccgcgtctgacggttcttgtcggtgctgatttggtcgccgctgaacaaagtcgtttatataacgccgctgaccgcccgagtgaaaaaattgctgcgcagttactggggtcaactatcgcaggccgtccggcgtatgtgccgccgtttatgccgggcaagcgcatggtggtgacaattcctaaatttatgcatatctacacgcagcgtaatacacgtcagcgtaaagctgaatttgtggaagaccgtaaacagtacgaaaacaaatatctgcgtaatgaaggatatgccctgcaatatccggaactttacggtgcggttgatgagtctgcggtgactatcgggaaaatcaccgaaccggcagagaagctggatattgatcaggaaggtactgagtaa

SEQ ID NO: 287719 - DNA, 1182 bp, Morganella morganii
atgaacagacccgatatcgactatgaaaaagtgctgcatgacagcggcatgccggttaccgaagatgagatccgggcagagtttgaacaaaccgttgccgatgagggactgataaccaacacatcccgcatgtctccgttctggcggctgataacaatcaccgtcattaagccgattctctggctgaaagaagccctggtcaatgtggtgatgcgcaatatgtatctggccacagctaccggtgtctggctggatatgttcgcctggggcgtaaacctgaagcgcaaaccggcaaccgcggcttccggggtgatccgtttttacaaagccgccggtgcgccggtggtgacagtaccgaaaggcacggtgattcagacagaacggattgccggtgtgatttacagcgtcagtaccacggaagcagcagaaataccggcgggaacgcaaagcggtttgatcccggtgacggcagatgccccgggcggcgctcataacctcgccccgggctatttccgtattctgccggttgccgtggccggtgttgagcgggtgcagaatgaggatgactggctgaccacgccgggcggggatgcggaaagtgacaatgatttgcgtgatcgctgccgcaaccagtacaacctggtcggaaactaccatacggacgcggtatacgcgggcatgattgccgggattgtcggcctgagcattgaccggattttctttttgcatgatgcgccgcgcggtccgggcacggccaatgcttatttactgctggacagtggcgtaatcagccagccgtttatcgacaaagtaaacgattatgtgaccaatcaggggcaccacggccacggcgacgacatgcagtgcatgccgctgccggaaacccatcatgatctggtgctgaccctgtttgtggacaacatcgccaactttaccggcgaacagctggaaaaactgaaaaaagagaccggcgacatggtgcgctgcgcgttccgggaaaacagcttttatgacgtgaaacagacatggccatattcgcggttttcgttctcaaacctcgggcgcgaactgcaccgggcatttccggatattcagtcgctgacattttcactcgcggacatcatcagtgaactgagtgtgccgcgcctgaaatcgctctctgtggtggtgaaaaatgtctga

SEQ ID NO: 287720 - DNA, 618 bp, Morganella morganii
atggcaaattacaacacggatattcagtatgcggtatttgacgaaaacgggttggctattgtgccgggatgggctgaagtgtattgctgccactcgctgacacgggaatataccggtaaaagcatggatgaggtaccgctgggattcagtctgaaagctgacgcctatcctgataaaccggaattacccgcgacggggttcgccattatccgtagtgaggacggtaaacgctggctacatgttgaagaccatcgtgggaaaaccggttatgacaaaactacaaaagaaaaaattctgataaacactgttggtgtgctgccggataatctgactctctctgacccgcaaacgccttttgataaatggaacggtaaaaaatgggtgacggataaagcggaacaacatgcgtattatgctgcactggccgaaaatcagaaacaggcactgctggctgacgctgaacaggagattgccatgctggagcgtaaaatacgcctcaatatggcaactgacacggaccgggaaaaactgacagaatgggaaattttcagcataaaagtatctgatactgacgtatcagccgctccggatatcatctggccggagaaaccggaatga

SEQ ID NO: 287721 - DNA, 756 bp, Morganella morganii
atgagcatcccgcgctggcaccggcaaaacatgagtatggcggcagatatgccgccgatcacctgttcaattctgccggtgcatccgtttgtctatggtgttggccagaccaacgaatccggcagctatttaagcccagtcaacgcggtgaattatatcgccggaaaacttgccggggccggtcagatatcggtactggtgctgatggtcaccggcaaaacctttgcggaatttatgcagtcactttcggccttttcggcggttttcccgctgccggtattttctcaggttgaacggatggccagaacggcggaaacgttggcgacgacaaaaatgcagttgcccggcaaaatggccggtggtttgccgttgccgcagtcactttccacatcaaccagccgaatggccgggaatgcgcagttgattgaagcggccaaagctgccgccggtaaaccggtcagcccggacagcctgaaatccgcactctctgatttcggcaccctgaaagataacgccctgaaacagatgggtgacgcacttgccgggctgatgggtaaatcggcctctgtatgggcgttttccggaacggatgatgccacggtactggccgaaaagatgaaaaaagacatcccggagccggatgccgtttacacactggcgaccctgttcgccggtcacgaaattgatgcattaacaaggatgttaagcaatgcagacgatagtcctcgccctgaacggcgaagcgatcccgcttaa

SEQ ID NO: 287722 - DNA, 171 bp, Morganella morganii
atgaataacaacacagaaactgaagtggctaagcgcctgcttgaagagcttattattgccgaggggctaataagggaaatctgtgatattaagaagataacaccgccaagcgcatcgttacgcagaatgcaaaaagtaataaaagatgcgagcgacattatcaataagtaa

SEQ ID NO: 287723 - DNA, 987 bp, Morganella morganii
ttgacattcgatgattacatcaatcatttcaatgttaggttaaattatagccaagctgcatcagaaaatgaaggtgtagaaaaacacatattaatacagatgttagaaaagtatgaaaatttcaaattagataatgaattaatcagtcaagagtctattgttcgcatagttaaagatggctatttcaataaaatcagcattaatgaatacattaaaaattcaaatttaataaaagaaaaacctgatacaccatcttggtataagttaagttattttgactggataagtgacaaagaaatagatgaagcacttattgaactacatgatgatttttacaacaggaaattctatttgttaggtgatatattccatatgataaacttcttattattagaggaaaatatatccaatacagaaccaaattatggaaaaatagaaagtgattgcatagaatatattgatgatttatttatacagggaaaacttgaaaaaagaaatccaaataaaagccatgaagaaacagataacaatggttataatgggacgtcttactggataatcgatgactatagacaatattcaaataaactacgtgattatttggataaaaagtcctacgagttatttaataacgatgtattaaaatataatattattgaaaaaatcacaattgacttagagtcattattgtcagattttactcgagataataataactatggtgaattatgtgaaattccattatttcatactatcccgcctaaagaatttgtaagcacttggctaactttgcctaatagcaaacaaaataaaatcagtatgatgtttaaacgtcgctattctttcggaaacctacaatctactctagcagctgaaaaagagtggattcgtaatgtgcttttagaattagatagagcagctagttcaatgaaacattttcataaatacagagttgaacgattaaagatgcatataccgacagaatag

SEQ ID NO: 287724 - DNA, 2355 bp, Morganella morganii
atgaaagtgatcgttaagcgtctagaagtgcgtaattttaaagtgtttgaaaagcttgagttaacccttgaaagtgatcatctcgtcgttcttgatggccccaacggtttcggtaaatcatctttttttgacgctatggaactcctgttgactggaaaaatccgtcgctatattgagcttgaagaactgacagtggatcgacgtagcctgaaaacaggctgcccctggctattcaaacaagcaagtgtaaatgactggctttcaattcgtgcggagattgtagtagatggtcagagctatttccttgagagagcagccagtaaagctgtactggacgagcataaaggcgtaactgatttaaggatacctctttatgaattagtagactttagcgcggaacgtgttgaagccatttcacaggaagaaacttatctttctaccttactcggtgaacagtatgagcgcgactttgaattattccattatgtcgagcaagaagaaaatactcggttgttaaaacaaaaggaaaaagacagacagggtcagattgcacaccttttcgatattggcgatattcaggacaaaattaataacattacacaggcatcggccaaaatcggaaatttgtgtaacccccagaaaagaaatgaactgaaacaacttaaagataaatgggaaatagctaagcagcagttgctaccggcaggcagttctgtcacatacgaaagaattattgaagttacggatcagccatgggaccgtgatgtagtagagtttgacgtacaacaatttgaacagtggctatcagcagatggagaattgtttcgcctcaggcgttttgtagaaaattttaagcattataaaaaccaactatataataatgaattggtgaataaactcctccccaaaaaggaactacaacagcgtctgttaatgttttatcgtcctcttgaaaacatagaaaaatgggttgcagaggtcgcttgttttgatgctgtactagcaataagtgacgccttcaaagatataataaaggccattagcgaggatcgcctgtcaatcactgatccattggtgccactccttcctgcctctatcacagcagaggaatttcagcaacaggtcgccggactcaaacaacagttgaccaccgcagacaaagttcaggaatgccacgcggaattaatacagacacgtgagcaactgttgaatgcattcagggagcatcagacacattgcgattccacaaatatttgtccgacatgcgggcatccttggccaacggtagcagcacttctcgaaggaatcgaaagtcagagcaaatcacttgaaactttagctgctcaacaaaataatcaattctcacaagcactagtaagcttcagacgcaactggcaggagcctattgaacttgctctgcaggcctgtctggagcaaaagaaagagatcgttgaacgtaagcgccagctcgcaagcctaacagaagagcaaatccagtggctggaagattattatcgacagcttcagacggcaggtatcagtattcaggatcttctatctgagaatttcgagcctgtaacgcagcaagcaacagacgaactagaacgtcagatccgggaaaggtttaaacctttcgacgatagctgcatttttgatgattacgagaagatttatcgtgaaatatttaaaaacgatccacaggctgttgaacaagttaccctccaacggcttgaattaaaaaaagtctatctgggacaacagcatgccattgcgtcttctaaatttatcttggagtgtgaacagcagtataacaaagaagatctgctgatcaaaaaagccacaagatttaaagagtatctacgcaagctcaaaaaaatatatgaagacgagaaaagattatatcttgaatccatagtcaaagagattgagatcctttttcatatctattctggccgtcttatgcaaagttatcagcaagggctaggtatttttatagaaaatgatggtaactcaattgctttcaatgaaacacctgggcatgggcatgatgctgtcttttccatgagttcgggccagctttcagcactggttttatcatttacgttagcgctgaatcagcggtacgcaaaacacactctgttgctagtagacgatcctgtccagacactggatgaaatcaatgtggcaggatttgtagatttactgcgtactgaatcccaagatcgccagataattatgtcaacgcatgaagatcgtatgtcggcgtatttccgttataaatataaaaaattcggcatgtcagcaggcaggatcaactttatggagcaggcacgcttagttatcgatggtcaataa

SEQ ID NO: 287725 - DNA, 705 bp, Morganella morganii
atgcagaatctgattgaacaattgctggaatcagaaggattgacgcgtaagctttccacggacttggcgttatacgaatacaacagcactggaaagacaaattattggctggtaatccacggcgaaccaataatcactcctgaaatacaggctggatggttaagtaaatgcaaaaacgctacagccaatcctgcccttgagaaaaacatcaatttattgattgtatggaatactgacagcagcaaagtgctcgccagtaaacgagttcaccatatagaagaagacagctatttctttaaaaagcacgtacttccttacactaccgaagaattcgaagcactacgtcaacaaatcgacactcagggatttgcaacagtttttcgtgaatcaattactactcctaacacctttactgaatataaatcaaactaccaggaaggaggctggcaaagcctattatacaggcttgcaataaagcttccatttatcgcagttaatagttctggtaattccgatctagccagtctcgagcgaaatattcgggaaaaaatccagcgtacagctaatcctggtgtactggttgcaacagattcagctattgactctcttgcaaatcagatcgcatcgccgaatgtgcagccggaagatttattgaccttcatggatgagaaactgtctgaggcaggctatgaaagtgatcgttaa

SEQ ID NO: 287726 - DNA, 1221 bp, Morganella morganii
atgatgtcctcagactatgaagcgaaccgggatttgaaactgcagttagaaagtcaggatgacttcgcgatttttcgtcaccagcaatgtctttcaatgcatcaggtcaaagcgtacaaggagacgcgtttttctgcctacagtgatggcatcaaggctcaaagggataatgcgaggcagcggggagtgccgctcgcttatttccatgtcgcacgttcagtaacgaatattccggcaacgtttgggacagactatgggccagtgagattttatacctaccccattcctcccgatgaagcagggaatgtcacacaatcgttttgctctctgaatcaagtagacatatttattcgaaatgaactctccaacctgcttgctaatgtagcagggcaacccgcttggaaaaattatattgtcgcgaatattcagaatacgctggaagcaatagtgaactcaaaggtcattatgacccacagcaagatacatgaatcagctcgccatcaggccgtaatcgcagccagcgaattcatcaacttttcagaactatatggtgtaatcgaagcagatgattatgctcggtttgagaatgagacattcttccttagccgtctgcagattgatatcggcacatactaccaggagttttgtgaacgccaagacagcctctcccagacatcatgtcaaaagttagatgactatctggctgctattacttcgctgaatgttgagggaatgaaggcattcctgcgagcaactatgccgcatagaaagggacgttttaaaacacttagtgaatttaaggatcaatcactcgatcgtgatgcaatgcgacttgggatgtttacgattttctggaaactagttcagactgcacgtaatgatggctctgatgttgcattctcgtggctaaatgacgggcttttctactatccgacaggtatccaccatgctgcggagcatcaggagagtatctgtcatgacatcatgcaacaggcaattagtgaagatgtggagtgtctatttgagtgcggcgtacttatcactagcgccatagacagaccttcaatctctgatgtaatcataggcattgacgctactgagggagtggataccgctgaacacgaattactgagggaaaaccgcatcggcaattataagaaggtggctatgatttctttaaacaatgtacctgagagtttgaaagatgcagaatctgattga

SEQ ID NO: 287727 - DNA, 252 bp, Morganella morganii
atggcaacgtacaaaatggagctttatatattgtacttacacaatgagccctgtgaatttatcgggtatgtttgctgggatgatataaaagaccggctggatgaatttgtttctctggaagatgatattcaggaatatggtttttttgttgaagaattatccggcctgttacataaggacagtgatgctcagggatatttattccgctgtctgcattgtaaaaaattgcgtctgcattttgattttagttaa

SEQ ID NO: 287728 - DNA, 153 bp, Morganella morganii
atgggctggtttgaggccgctgacttaatcgttaaaggaatggaaggggcaatcgctgccaagaccgtcacttacgatttcgaacgtctgatggaaggagctaagctcctgaaatgctcagagtttggtgacgcaatcattaaacacatgtaa

SEQ ID NO: 287729 - DNA, 1683 bp, Morganella morganii
atgaaccatatagataaaaaaccagaagaagacgattatgaaaatagattgcacaggaggttaaaaatacttcaagagcaattaaaaaaaggagtggtaaaaattaaagaaggactcagtatagaagatagcttacttgcagtaagatacagacctgatggggaaatagatttaaatactgttgacggcacggtacgctctatggccttggctattgctgctattcatgatagagaggaaataaaaaaggaaatatctcttaatgaaattcaaaaaatttacttttcttttgttgatgctaattttggtgaattttacaaggaaatggtaaggcataaattaacgccacatcaagttgcacttggtttaactcgtaataatgattttatgagtaatattaaagggggttttagagagtttctcgatgcaattaatgaattctggaattctgttggagagattgcacatattcatgtggaggatatgcgtggcaatattaaagctgtgtttgggggagatcttttcccagcacatgatgaaaatatagcttcaaaatgtggtgtttatacagatataatagttttgccagatccatttttacgttcaaagcatatttttgagaataactcatatgaagattgtatttattatcttgtaaagcacgctatgaatattcttaaatataaagatttggcttgtgtcgaatttgaaacaccgattgtagtcattattccagatttgtctattttacaagaaagtgaaaaaaaattttttggaatgcttggacgtcaagatgcattaattcatgctggtaaactattcggtagggattttgagtcttttgacgagttaatggatttcggaggctcgctagacacgatcgaaagagctgtggcagaaattaaagatgcaaacagagttcttttcgatacagattggaaaggagatgtagaaacacagctaaaaagagctttagaaaacaagcattacaaaccttttacttcttctcctggtattcttttagcttctcagtcagttagtaggatgagtattagtaacgaactattaattaaatcaagacaactaaatggcacgcctataattgatgctcctacctcatggcaatacctggtttggaaaatggaatatgatgctggtcgagcagaaaatgagttaaattcagagggactacatattattaaaggattgggtgagctggcgcgtaatgagatgcaatggttgggtaatataccttcttattcattaatagaattaaggaaacaaggagctatggatgaaataagaaatatcttaggggacggtgtcaatgaaataatccaatctaacccgcaagatttctctaagagcaaaaatcagatattggataatattgattctgcattcaaacaacataaagaaaatattaataaattaactaagaaaaaatggaaatttgcaggggtggatataggttcttggcttgttgttggctctttggaggtcactgcagccataacaggaacaccagtatgggggttaactaccattgcggcaaatcaattcttagatgttccaaaattaaaagatattccaaattccattaaaaatattattgatgaaaataataaggtaaaaaaatccccagtaggatttcttttcaagattaaaaagcagtattcataa

SEQ ID NO: 287730 - DNA, 3285 bp, Morganella morganii
atgtatgattcaattacttcgcagttaattcagtctacccccgatcttcctggattagaccgagagtctcttcctgactatttatctaaagcatatgctgaaattatttctagtcgtgtcttattgcgaaatggagaagctaatatagatgatttggttgaaacggttaaattttcgttacgtttagcaagaactaatgaggctttagtttcaatctcacccgcacgtgaagataagaaatctgcaagttttgttgcagctacagcataccaattggcatatcaagcaaccatattgcatcattctaatgttaattattcatatgttactttgaaatctatcagcccagacgtatcagcaatgttgctttttctcatctctgaagcgtttgcggatgcttcagaaataagccgcataataaagttaccagaagatgatttactacagtatgaagtgatatggcatttaataatgttatcacaaggaaacgttgaaaaaattactgcccgtaagcgtcctccccaaaaaaaacttgtaataggggaaggggctcaactggctagtaatgctttatattatagaatattatgtggcgttcgtggacttgcctttattctgcaaggacgttgtattaaagaaatagttgatccaattgctgttttttctgaagtaaaagaattttcatcattaactgtcgatattccatttcaatctgaaactctcgaaagccaggaactttttccaggaccatttcatttagctagcttattaatagctacaggaaatgcattgttggatagtgctgttgtaaaaataatacctcccaatggagttgatagaggatcatggttagatgctatgaagactctggcaaaaactcgtccattcctatggaaaaatcacaaggatgcgatcgaacgtggttatttaaatagtggtgtatccgcagcaattggttttcctacaggttcagggaaatcaacaacagcacagcttaagcttcatgcgactctgcttagaggatgtaaagcagtatttttagctcctacacatgctttagtggagcagactacccgagatttgaagaaggtatttccaagagtgggagtcaaaggcgaaagatctgatgaccttgatctgctagatagcagtaatgacttaccagatataatggtaatgactccagaagcatgtctccttgcaacacatttggatcctgaaagatttattgacgttggagtatttatttttgatgaatgccatttgattcatcctaaaagcagtgatgataggcgtgctattgatgcaatgttatgtattctagggtttgctagagtagctcctgatgcagatatagtattaatgtctgcaatgatgaagaatacgaaagaattaagtgattggctatctgagttgactaatcgtttatccatagcattagataattcttggaaaccgactcgtcaattaagaggttgtatagtttatgactccaatcgtttaagaacactagaaaagctactccgtaacgagagattaaaaaagccgaagggtagtgttcctgctgagttaaagcgacaattaacggctacaccattagctttttttagtgttaaacaaacttgggcttctatggatcgtcgtgattacgcaaaagtccctttttcctcaaaatcattagagctatcaactaatacgcgatgggggctaactccaaactctggagttgttgcatcatcgatagcagcagaagctgctaaagcaggtattagaactctagtattctcgcagtcaattccaaacgctgtatcaatcgccgaaaaagcatcggctaaaattcctccgtgtagtttagatttaacagatgatgaaaaaaaagcttatgagattgcagtagatgaagttggttctcctgaaaaactttatataaagctgagtaatggaaaactcgtaaatcgtgctggatgtcatcatgggcagttattaccagaagaacgatttctcgcagagtcattatacaaacgtgaaggtgcattagcagttttagccgctacaccaactcttggtcaagggatgaacttgcctgcagatttagtgatcattgcggaagatagtcagtttaatgtggcttctggcagtcgggatatcctcaagccagaagatttgttgaactcagctgggcgagcaggaagagctggagaaagtgctacaggtattgtattagtaattccaggaaaagttgtaggaataaatgataaagaaaaaaaaataggagctcggtggactactctccgtgaaatttttagtcagtcagatcaatgtattattttggatgaccctctaacatcgataatggaccgtatacacaatcaagtggaaaaagttggagatctagaacgatatgtagttgcaagattagctgagacggaaaaagaacaagagaaaaaatcggaagtaactcacggtttaagaagaagtttcgcagcttttagacaaaagcaagagggcaatacagagtggattactagtcgaatagctgccgctagatctattctagataatgatgatattgactccagtgcggagtctcaggcattgcgtgatctagcttctatgttaggtcttcctgaagatgtattaaaagaaattattgattctttgatttctgatgacttcacaagctttgagacagtggagctaattgtcacatggatgtttgactggctttctaggcatcctcagagtatgtatcgccttctaaagccagagaatttcgagtcactatttgatagtaattataattcgctacaggatgatgttgaaaaagcaaagtttgcaatccctttgatatcttctgctctctctctttggatgcagggacaaacacttattgaaatacaaaaagtgttttcttcaaaaactagggatttgaaatatacaacaagtgcaagaaagtttgttatcaaaatagtaccggatttagcacatttaatgagtgtaccacttcaggttttactaaggtatgttaacgatgaaactacaagttcatcagaggcttgccccgcattaaactatgttagccttgcagttaaaaaagggttgagtagtgctgaaatggttacttatgcttttcagaacgaaggtaaaaatttacctcgccgtgagttacatcgaggttttttaaagattcaaccatacttaggcaatttcagcgtcggtgaaaaattgatagaattagaatcacgtgttaaaaatgctatttcgcaaaaaaatgctagggactaa

SEQ ID NO: 287731 - DNA, 789 bp, Morganella morganii
atgccaatttcatttaaaccgattgaagaaaaagatagttggtttggagctgcttggtcaattgaggatgaagctaaattagctagcatcatcgctcgtgttgcaattgggcagtctagggttgcggaaaaaattcttaaggctactagttattcttccgttaattaccccaaaagtggatatgatgctgccagacagttattgatagttaagccaggtgaaaaaccatatcatagagatggctgggtgtttcaggttatttcatgggttgcagctcataaatcctacaaaaatgcacttataagagcacctcaaatgattaaagcagataaaggcctagatggttttcttattgaaactgactctaaaggaatatcaaaagccgttatttttgaggataaagctacagagaatccaagaaataaaatcaaaaattctgttttacccgaatttaaaacctttgaaaaaggtgagcgagataatgagctaatcgcttcagtggtgtcattgcttgaacggtcgggatgtgcagatcctgatattattgttgctgagatcttatggaatgaaaagcgagcttatcggattgctataactgtcgacgacacccattctaccaaagcggggttgcggaacttatttaaaggatatgatgtttttgttgctggtgattggggtaaacgtagaggagatattctccaccaaaacaactttcgaaactggatagatacgttgtcccaaaaggcaatagagattatcaatatggaggagagttatagtaatgtatga

SEQ ID NO: 287732 - DNA, 3666 bp, Morganella morganii
atgaatactgcgaaactaaaaaagtatgcccctcaagcaagacgtgaatttatcaccgcagtttcaaaacaactaaaccagctaggtatatacagcgacaaacaaatatctgaggcaaaacaagaaggctcagtattactaattgaaggaaaaacctttgagcctagcgtaaaaaatgccagagagcgattggtcaaaaaggttcaggtaatgggctataaccagctagtggaacaaatagcctatacctggttcaaccgtttgtgtgctattcgctatatggagatccatgactacttaggtcacggttttcgtgttttgtcgcatccagacacccctaaaggctttgaaattatcgaccatgcgcaagacgctgcggatgaactcggattagatagagctcgcattattgaactcaagcttgtgggcaacaaagacgaagagctttatcgtgaactgctgttgggccagtgccataagcttcatgaagcgatgcctttcttatttgacgcattggacgatgaaacagaacttctgctaccagataatctaacgcgtacagactcaattctgcgtggattggtagacggcatccctgaagaagactggcaacaggtagaagttattggctggctttaccaattctacatctctgaaaagaaagatcaggtaatgggtaaggtagtcaaaagtgaagacatccctgctgcaacccagctatttacacccaactggattgtgaagtacctggtacaaaactcagtcggtcgtcaatggctgcaaacctatccagattctgccataaaaacgcagatggaatactacattgagcctgctgaacaatctgacgaagttaaccaacaactaaaagctattacgcctgaatccatcgaacctgaaaccatcaaagtactcgatcccgcttgtggctcgggccacatattgattgaagcctacaacgtactaaaagccatctacgaagaacgtggtttccgttctcgtgacattccaaagatgattctggagaacaacctctacggcctggacatagatgatcgtgcagcgcaattgtctggctttgcgctgatgatgatggcaagagatgacgataagcgtatttttacccgtaacgtgcgactcaatgtactgtcattgcaggaaagtaaccatattgacctaccgaccttatggaaagcactcaacctatcgggaagttggcaaagcggcacatcgcaaggactgttctctgacgaagagcaagatttaagctcgttcaatgccgacaaccgctaccaactgctgaagcgaacattggcaaggttcactcaggccaagacctttggttctttgattgatgttccaagcgatgagcatgaacagctaaaagagctactaatcacgcttgtcgagcttcaagagtcaggcgactcaatgcaaaagcctgcggcgaagcaattgattgaatttgtgcatcaggcattggttctgtcgattcgttacgatgctgtgattgcaaatcctccttatatgggagcaaaaggaatgaatgcagatcttaaagattttgctaagaaatactatccaaacagtaaatctgatttgtttgctatttttatggagcgggcattttcattacttttaaaatatggatttaatgcccaaataaacatgcagtcatggatgtttttgtctagctatgagcaactaagaagtaatttattgaagaatcatactattattaccatggctcatttaggtgctcgcgcatttagccagattagtggtgaagtagttcaaacaaccgcttggattattcgaaatcagcatatcaagaatacccagcctactttttataggctgatagatggcaatgaagaagataaacaaaaagcattgctaaatagagagaataaattttctgctacttctcaggaagatttcaaaatgattccaggaagcccgattgcttattggttgccacaacctgctttgaaagcattggaccgaacgatgccacttgaacaaataagtgaaccaagaaaaggcatgtgtactagggacaacgatttctttgttagattatggcatgaggtttctttttcagaaatagggttcaatatctcatctcgtgaggaagccagcagctctaaaagaaagtggttcccttaccagaagggtggagagtttaggcagtggtatggaaatcatagtagtattgttgattgggaaaacgatggctatacattactcaatatggagagtttaggctggaaaggtaactcaacaaatcacaatttagactatatatttaagcccgctgtgatatggtcaaaaataacatctgcaatccctaattttagatattcgccaaatggatttttatttgatgatgcatctggattatgttcgataaatgaaaaatctgatactaaggctgttctagcgtttctttgtagtaaagtcggtcaattttatatgagcgtgattaaccccacactcaacattcaaccaggaaatatggcatcaatgccatttctgaaaactgataaatacattgacatagacctaatattggaaatttctaaacaagattgggattcttatgaagtttcttgggattttctggattttccattgttgaaagccgaatacaagcaggcatgtataaaagcatcttactgcaatgttaacgagtattggaagagcttgttggaaacgatgcacaaattggaagaagaaaataaccgaatttatattaacgcttatggcttacagaacgaattgtcccctgaggttccacttagcgaggttacactgaattgcaacccatattatcgttacggcaaggataaaagcgaaagtgaacttgaagcactgcttcaggctgatacctgctgtgaattggtgtcatattcagttggttgtatgatgggtcgttattccctcgacagtcatggtctcgtctatgcccacacagctaacgaagtttttgaacagcttgttgccgaaggagcttacaaaacattcccagctgataaagatggaattattccattaactgacaaagaatggttcaaagacgatgtaaccaatcgtttccgtgagtttgtccaagttgtttggggtgaagaacacttacaagaaaatctcgattttgtcgctgaatcactttgcttaaacgccattaaacccaagaaatcagaattagcactggaaacgattcgccgctatttatcgactcagttctataaagatcacttgaagacttacaaaaaacgccctatttactggctgtttagttctggtaagcagaaggcttttgagtgcctggtttacctgcaccgttacaacgagggcacgctttctcgcatgcgtaccgagtatgtcaccccgttactaggcaaatacgatgcttatgcagagcaacttgagaagcagattgaaacggcagactcgaccagtgaagcgaaccgctttaagaaagagttggacgccttaatcaagaaacaggtcgagctacgagcgtttgatgacaagctaaaacactacgccgatatgcgtatttccctggatctcgatgatggtgtgaaagtgaattacggcaagtttggtgatctgttggctgaagtaaaggccattactggttcggccccggaggttaactaa

SEQ ID NO: 287733 - DNA, 738 bp, Morganella morganii
atgataacgagtattttagttacaggtgaaggtagttcagatatgggaggatcaaataatggccattctatatctagcggagcatcttacaatctcggtccaatggcattgctggctgttcgtttattgcgaaatcttctacctccgtggaatgaagaatacttagattttcaatcaccaactaattggattacctgtatctctggtaatgaattggcacgtcgggcaaagagtgttcgtaaacatcgaccaagtaaaaaattaaaaaaaggcttcattgaacatgcaaacagagccacaacaatggctgactatgcaaaagataatggacatcagttgattttctactttcatgatgccgataagtgtgatttctctgatttacatcaatccgtcatacttggcttaaatggaaccgatgacgtgcatgggataccgatgatacccaaaccaacttcagaagcatggttaatatgtggtctaaaacaagatccatacgctcattgtactgctttagaaacacagttatcgggaaatgatgccgcatcagataataatgctcctaagaaagttttagctcgattgttagggtatgaagcaacgacagaccagcaatatgaactggtaaatgggattgatgtcacacacatagacatgcctagttacaaccagtttaaaacagatttgaccacagccattgaagatgtttgtggtcacggaacagcgagaacattatga

SEQ ID NO: 287734 - DNA, 1170 bp, Morganella morganii
atgattaaaagaatcagcgttagcacattcaagtctttagttgattttgagttaaaccttgactcaaagtttaattgtattattggtttaaacggcgcagggaaaagttcggttttacaattatttagttatgtatctgctcttatagatggaaaaattgaccgttggctaactgaaagaggttgggaagaaaaagatgttgcttctcatttcttccccacacgagaaacgtttgatcttgcactcgatatagagctttcagataagcaattgcgttgggaagctacttacaactggaaaagaggcttatgtacaagtgagaccctaactgatttagtcgatggtcagcagctgttacgtctatatcagggaagactcaaaactaagcgtcacagttttcctgatctgattttcaaatattcaggttcgatattgtctgctttggatgattcagctttaccgcaagaagccatcatttttcgaaattttatgagtaatattgacagtcatgaccttttatcgcctaaggtcatgcgttcaggtcgttttgcttcagcaggaaaaattggtagtgctggagagtatctaattagttatatccataaccttgataagaattcacaaaatattttattaaaaaacctatatggctattttcctcaagtagtgaaaattgaaactaaaactgagttaaatggcacattaagtcttttgttaacagagcggttttataatgaggatgggtctcacatcgatgttgtaaccaatgccaagcacatcaacgatggcatgttgcgtattttaatcatactgacaagtcaaagatctagttcgagattccagcaatttgatgaagttgagaatggtgttaactctgaaataacagaaaaactggtcgaggcattcataaactcacctcagcaagtgttgattacaacgcatagtccaatggtattgaattatatagaagataaattagcggaaagttctataacacttgtttataaaaataaacaaggacataccaaggcaaccaaattatttgccttaccatctctgactaagaaacttaattcgctggctcctggtgatgccatgcttgacgtgtacctaaaagatactgccgaagaagctgagcttctggcaaattcatctaaagtaagagagtaa

SEQ ID NO: 287735 - DNA, 234 bp, Morganella morganii
atgcaaaacaatgtattgatgtcattatgcgagtccggccttcgcaccatcggagcatcaatagacgtcaacgggcgtctttttttgtgcctgaaatccagtatccgcaaggctttcctcgctttttcactcaacctaagtcaacctgattcaatctacatcaacttactgatgcgggtacaactgcaggtatatcccagttcgattatgtttgtatccacacagaacccttga

SEQ ID NO: 287736 - DNA, 1308 bp, Morganella morganii
atgatcgtgaaaaaaaatgaaatgaacaatataaaagcgatcccaacaggttataagcaaactgaggctgggataatcccagaggattgggatgtatttcttttaggggatgtatttgatttcaaaaatggacttaataaagggaaagaatactttggagttggaactcccataataaactatatggatgtttacatttccggaggcatctactccagttttgttcaaggaaaagtattagttactcaggaagagaaaaaaaattacagtgctcgcaaaggagatgtgttttttactcgcacatcagaaacagtcgaagagattggattatcttctgttctattagatgaaattaaagatgctgtctttagtggattcattctgcgtggccgacagaaaacagatgttttcgttcatagctttatgaaatattgttttcgagctgagaatttacggagacaaattaaaaacactgcctcctacacaactagagcactgactaatggctcaatgctgtctaaggttattgcgcctgcccctaataaaaaagagcaaagtgcgatcggcaaggtactttctgataccgatacactgattactgccctcgagcagttaatcacaaaaaaaaaggccatcaaaaccgccaccatgcagcagctactgactggtcgaactcgcttgccacagttttctaaatatcataatgggactctcaaaaactataaaaccagcgaactagggaaaatcccgaaagattggaagatcaatagcgttggggatttattctctatttctgcgggaggagacttgagggtcgatgagttttcagatattaaatctgaattacatccacaccctatttattcaaatgctattagcaattttggcctatatggatattgtcaaagttacgattacataggggactacttaacaatcacagcgcgaggaggaattggccacgctgtagcacgaaaaggcagtttctgcgcaataggccgcttattggtcttaagcccaaaaggaacttccaacgtaaaattttttgaagagtatataaatcagtacttatcgtttgcgaatgaaagcactggagttcctcagcttactgctcctcaagctgcaaaatacttagttaattgccctagcattgaagaacaaaccgccatagccaccatcctctcagatatggacgcggaactcgttacattagaaaaaaaactagccaaagtccgcgatataaaacaaggaatgatgcagcagctgctgactggccgtatccgtttacctttggaacagcagccatga

SEQ ID NO: 287737 - DNA, 141 bp, Morganella morganii
atgctgacagaacgggggatatcgctgatggaagtcattattgttttatttattatggcattacctgtttcatttattaatatttcatgggaaagccacagagagcggcgttatctgacagaaacggctgcgttgttttag

SEQ ID NO: 287738 - DNA, 5916 bp, Morganella morganii
atggacgttctgcgttttatcctccgcttaccttttattttgctgcgtctggcggctcgcagtcttgtttatctctttactctgctgggttttctgctgcgcccgttcaccggacggatccgctgggcggtgccgggctgggtgacctttgccggtaatcagcttgcccggctggagcggggtgtaaaccgctatccgaaaaccatatctgccttattattgctgactgctgcggtggcagcgggcagttattacacctggcactggtatcagaacaaaccgaagccggtggatgttgcgccgctggtggtgcaggatatttccgcgtctgtgcagcgcccttcggcggttaattataaccgtgacgataattcagcgcagattgtggtggtgacattctcccgctctgccgcaccggtgacactgatcggcaaaccggtcacggccggtattaccctgacccccgcaatggaaggtgagtggcagtggcgtaatgaccgtaagctggtattcacggcgaaaaaaaccttcccgatggggaaaacctacaccgtcgatatggatgccaaaacactgctggctccgcaggtggcgttaacagagaaacaaaaaacctttaccacccctgagttttattatcgcggcggccgggcggagttctatcaggatccgcaagatccgatgaaaaaacacgccattatcggcctgaccttcaatgcccccgctgatgtcaaaaatctggaatcgcgtctgtctatgacccgtgacggcaagccggtgccgtataccgtcacttatgatgataaaaaactcaaagcctggatccactccgggcagctggcactcaatgatacagacagcgaagtgttgctgacagtcagagccggtgtcggggcggccgttccggccaataccacggacaaagatgaaaccttccgcgtgatcgtgccgaaccgctacagtctggatgtgacgggcatcgatagtcagctggtggaatcagatgacggaaaagatcgccgcgccctgattgtgtcattctctgacccagtgaatgaaaaacagatcacaaaagcggttcgtgcccgtctgctgccggaaaaacaccctgattataattctgaggggatttacgacgactggaaatcagatgatatcagcgaaaaagtcattgccttatcagagccggtgacgctgactccggatgacagcgagcaggagaatcaggcggcattcagcttcagttataacgccccggccaaccgctggctgctggtggaaatcaccggcggtatgagttcggcgggcggttattacctgaaaacatcacgctatctgccggtacgcatcccggattacccgaaaacactgcgttttatgtctgacggggcactgctgtcgatgaaaggtgaaaaacagatcaccgtcgcggcacgtaacttcccgggcctgcagctggatgtgaaacgggtgatcccgggccagttacagcacatcgtctcctttaaggataaaaactttacctcaacggattttaaccgcctgagtgatgaatactttacggagcactttacttatcagacggcgctgtctgccgccaatcccggcgatattcagtacaaaggtatcgacctgagcaaatacctctcagctgacccatccgcaaaacgcggcatattcctgctgagcctgcgggcgtgggatccggctaaaccggcggaagccccggaagcggaaagctatgacgaaggggatgaggattacgaagaggatgcggttctcgactcgcgctttgtggtggtcactgatatggggatcatcgcgaaatcctcccccgacggctcgcgggatgtgttcgtgcagtccgtgtataccggtgagccggtcagtggcgcaaaagtttctgtggtggccaaaaacggcaccacactgctgagccgtacaaccggcagtgacggccacgccgcattcccgccgctgcatgatttccgtaatgagcagatggcggtgatgttcctggcggaaaaagagggggatgtctccttcctgccggtcaatgcctggtatgaccgccagccggatttctcgcgctttgatatttacggcgacgaaaccccggaaaatccgcgcaccctcagcagctatcttttctcagatcgcggtatttaccggccgggggaaacctttcatgccgggcttatcacccgtacctatgactggaaaacctcgctgaccggcatcccgctgcgggcggagatccgcgacccgcgtgacactctgatgcattcacagcagattattctggatgccaccggtttcagcgaactgagctacaccacatcggaaaactctccgaccggcgactggaatatctatctctatctggaaggtaaagatgagaatgacctgcgtctgctcggtaccaccaccgtggtggtgaaagagtttgagccggacagcatgaaagtggcactgaaactgacgccggatcgtcagcagggctgggtgaaaccggaggaattacaggcggcggttgatgtgcagaacctgttcggcaccccggcgcagaatcgtcgtatcgcgacaaaaatgaccatgcggccggtttatccgtcattcacgcagtatccggattaccgtttctatgaaaacagccgcagtacggataactttgaaacccagctggaagagcgtaccaccgatgaaaacggtgccgcaccgctggcgttaggactggaaaactacgcggaagcgacctatcagctacagctgttcaccgaagcgtttgagccgggcagcggccgttcagtcacggcagcggcacgggtactggtctccccgcatgattcgctggtgggtatcaaagcggacggcgacacggattacatcagtaaggatgcagtgcggaagctgaatctgattgcggtggatccgtcactgacccgcatcgaaaaaaccaatctgaaactggtgcttctggaacagaaatacatttccgtgctgatgcgccagccgtccggggtcttcaaatatcagtccagactgaaagaaacccggattgatgaacagccgctgaccatcagcagcgccggcactgatatcacactgaatacctcgaaacccggtcactttatcttacaggcggaagatgctgacggtaatgtgctgaacagaaccgactacaccgtcgccggtaacgcgaacatcacccgctcgctggatcgcaatgcggaactgcagctgacgctgaataaagaggaatacaaaccgggcgaagagattgaaattgctgtcagcgcgccgtacaccggcagcggtattatcaccattgagcgcgacaaagtgtatcagtgggtgtggttccgtgcggacaccaccaactcagtgcagaaaatccgcgtaccggcagagctgaccggcaacggctatgttaacgtgcagtttgtccgtgatattaactccgatgaaatctttatgagcccgctgagcttcggcgtacagccgttccgcgtcagccatgaggcatttaacgcggggatcacgctgacatcgccggacgtcatgaaaccgggtgaaaacctggcggttcatgtgaaaaccacctcgccgcagaatgtggtggtctttgccattgatgagggcatattgcaggtggcacgttaccgcctgaaagatccgctcgactatttcttccgcaaacgggcgctggaagtgaaaagcactcagatcctcgacctgatcctgccggaattcagcaaaatgatggcgctgaccgcagcaccgggcggggatgccggagagggaatcgatctgcatcttaacccgttcaaacgtaagcgggatgaaccggtggcatactggtcggggatcaccgccgttgatggcgacgcggtctttaattatcaggtgccggattatttcaacggtaagatccgcgtgatggcagtatcggtttcacctgaccgcatcggccacacacagagcagcaccacggtacgggatgattttgtgctgacgccgaatattccggccatggtctccccgggggatgagtttgatgtctccctcggcatcgccaataacctgaccggcctgaacggcgaagcggtgccgctggatgtcaccgtcagcgccgatccggcactggaaatcaccggcagcagccatgagcagatcacgctcggtgagaagaaagaaacggtattgtcgttccgcctgaaagccaatgcgctgccgggcacggcggatattaccttccgcgtcacttccggggataaatcggcggtccgcacgcagaacctgtcagtccgtccggcctcggcttaccgcacccgctcgtctctcggacggatggacggtaaacagcaacgggtgacggcgctgcggcagatgtttgataactacgccaaacgggatgcgcgggtgtcatactcgccgatggtgatgagtgaggcgctgtcgcagtatctggataactatccgtataactgctcggagcagatcaccagccgcgccattccgctgctgttcagtcagcggaatccggaaatcagcacactgcagtcacagacggagatccgcaaacaactgcaacagaccatgaccacactgctgacgcggcagaacggccaggggggtatcggcgaatggcaggcgatgccggaaaccgatccgtttgtcacgctgtatgtggtgcagttcctgctggaagcacaggacgcggggtatccggtgcaggaatcgctgctcggctccgccaatatttacctgaagaaagtggcggcgaacccgatgctcaatacgcaggatgatctgcggatgcgcgcctttgctgtctacctgctgacccgtcagggcgaagtcaccaccgggctgctggctgaggtgcagacacggatgcagagcagttatccggattcgtggcaggcagatcctggcgcgctgtatctcgcggcatcctacaaaatgctgaagatggataaacaggcggatatgatgctggcgccgacctggaaagccctgaacacggcttacagcaaagcatggtggacacggagctacctcgatccgctggtgcaggacagcacacggctctatctgatcgtccgtcacttcccggaaaaagtgtctgctatcccgccgcaactgctggaaaacatggtgctgcgctttaaagaggagcgttacaccacctattcagcggccatgagtattctggcaatggaatactacagccgtcatatgcagcagagcggggcacaagccggtgaactcactatcagcgttctgaaaggcacagaagcgcctgaagtgatttcggtgatgaaaaatgcctccgcgaccggaaaattcagcgacggtgtcagtgaaatccgctttgataatccgtcggataacccggcctggtatgtggtgacagaatccggttttgaccgcacaccgccgcaggctgcggtggcgaaagggctggaaatcagccgtgattacctgaatgaaaaaggtgaggtgataaccagtgcggcgcagggtgaaaaagtctatgtccgtctgcatatccgcgccaacgccaaacagggactgaataatattgtggtggcggatctgctgccgggcgggtttgaggtggtgcgtcaggatccggaagcagcggacagcctgcagctgtcacagctcccgttcagcagcggccgccgctgggtgccggatttcagtgatgcacgcgaggacagagtgcttatctacggcagtgccgcagcggatagtcaggaatttatctatcagataaaaccggtgaatacagggcgctttatcattccgccggcgttcggcgaagccatgtatgaccgggagattcaggcgcagtctgcggcagccggggtatttacggttctgccgcctgccgcagataaaccctga

SEQ ID NO: 287739 - DNA, 579 bp, Morganella morganii
ttgaacggagcaatcaatggttgtgaggaattagcaactacctattttaaagggtttcaagaaagaagttatgatctaatttctgaagttgattctgaaattaaaaaaataaaagatgctgaaagtaaaaatgtggaagattcagtttttaaatttacggataacaaattgaaagagatcgctatttcttcggctgctagtaaatttataaaaacattaggtttcgttgatgcagctacagaatttattgattatgatgctaaggggcatgattctgaagagggtgtatataataccgaagagagagagggatctggaagggttgaacatgtaactaatttatcaaaaccagagcattggagcatgcaatttaacaatactattaatagaaaaattaataaagcaaatatctcacctgataaagttttatttgaaaaagatccggatatcatacaagcaatgggcaatattataagatttgctaataaaaaacgttcagtaaatattcgtgataattttatgaaaaataaatgtgaaggtatcgagaaggatagcaatggaggtaagaaagataattaa

SEQ ID NO: 287740 - DNA, 468 bp, Morganella morganii
atgttttacatatataatataaaatttaggtggctgaccgtgtcgatacatgacaccttttataataaaatgtgcatactaatgcgaaaaacaatatttcattgttttaaaagaggttttacagtgactaagaaaggtattttcattattttattacttatttcagtaatggttatggttgttttatatcaaactaaagaagtctccatagtttcccatgggagaaacgtttccagcataaaagaagatacaactgaacgaccaccatcatggtatatggataattccagtaacagattcggtgttgatcatgacaaaataaccccattaaatttagggatgacactcccaactgacttttcttttaatggttccgattgggagatagcaacgctaaatgcgctatttattgtgcaggaagcaggaagcaggaagcaggaagcaggaagcaggaagcaggaagtataa

SEQ ID NO: 287741 - DNA, 222 bp, Morganella morganii
atgagcaaatatcgtgacaaatcagactttgaaattaataaggcagtggctgaggaattaattcaatccggcttcattattggtgttgaatatcatgacaaacatatattagttatagataagtatgctaataattatccattcgacccatgcaacaacccagcggacgcaatgccgattattttcgataataatatatcgttaatttttagtcacagataa

SEQ ID NO: 287742 - DNA, 234 bp, Morganella morganii
atgagcaacaaacattatgatatgacagtatttggtattgattacaaactttatgccagagagtcaggtgatgcttatttaacattccatttagaggataactctaaatttcctccaattgataatagccatgcaaataagctcatacttaacttaaagttatataacggggtaaacaagaaagccgtggtagccagagctccacttgggagatttatgatgaaattcctttga

SEQ ID NO: 287743 - DNA, 459 bp, Morganella morganii
atgaatcaggatctcaacacacaggatctgtctgcaccggcagccggtattgacccggtagtacaggtcatgggcggtaacagtgatatcgcactggatttggtggtaattattgataccagcggctcaatgtcagatgagtccgccgatctgagccgtgaaatagacgcagcgatagagaaagcggcagcccgctgtccgtctcagctgcgggcgactttcctgggcattcagggtacctggaccggcacaaagtttgatcagacagtgagtgattatctgattggcaaaggcgcatccgagggaaacttacaggccagaaaaccatttacagaggctgatggccgtgaccatgccgggaataaggaggatttatgccgcgcggttattgatgccagtaaatattttgactggcgtcccggcgcccggcgcccggcgcgccatttttgtactgggtga

SEQ ID NO: 287744 - DNA, 465 bp, Morganella morganii
atgacgacaatcgcatgggatggcaaaacgcttgcttctgatagccaatcgcaggttggaagcatgatagtaagtaaaaatgagcaaaagatcttccccgcaacatctaaatggtctattaacggacatcctgtgaaggctatcgcaatagctggggataacgcagcaacccatgaaattataaatcacttacaggaaggactgttattcgactctgagttttctcaaataacagactttaatttaatcgcagtggttagagacggtttcgcctttgttgttagtaaaaacaaaggtgataccagggcatatattttcgatgtatttgaagagttcgctatcggttcaggtgatgtatatgcaatggctgcaatgaaaagtgggaaaactgccgcagaagccattgtggttgcgatgtcgctagatgtttatagcggtggcgaggttcattcttttcagtgttga

SEQ ID NO: 287745 - DNA, 444 bp, Morganella morganii
atgcaaaaacagacattcctactcaggaatgcgcagatactcagaaaccttaaggcagcactcgacagtctcccgctaaacgaagaattccccctcgaagtaaaaatctcagatccaaagcgaacccttccccaaaatgacatgtttcatgcgctgtgcggcaacgtagcagagcagggcattgtatgggctggcagtacgtgggagttgcaggactggaaatgtattttcgtctccgggcacgcaaaggcaaccggcaaggacgggaagttaattacggggctagaaggcgagattgtaccgctggcgagagagagcaccgcgaacatgggtaaaaagcgcatgacaagcttaatagagtattcgcaggcgtgggctgtaggtgaaggcgtaaaacctcgcacaacgcgatacagcttcaattattacgggcatcaggaatag

SEQ ID NO: 287746 - DNA, 408 bp, Morganella morganii; identical to SEQ ID NO: 280885

SEQ ID NO: 287747 - DNA, 198 bp, Morganella morganii
atgcaagtcaccatccgtcgatttccctgtgctcgtgttcgagcgttcgttcacgtcgaacgtgtcttcgaggccgcgtgcggcataggtgacgatctcgtcgagcctgtcctgctggccgaggtctgccagcgtgaagcggtctgtccgcatcttcaccaatgccctctgcggagccgggcgacggcgacggaatag

SEQ ID NO: 287748 - DNA, 1053 bp, Morganella morganii
atgcgccctgctgagttttccccggaagagatcgtcgcggctggtgaagcccttgtggccgctggtcgcaatgtgaccggctttgccctgcgccagaaggtcggtggcggcaaccccaatcgcctcaagcaagtctgggacgagcatttggctgcgaagaacacgacggaggctgagcctgtggcggagctaccggtcgaggtggctgaggaagtcgctgctgtcaccaagtcgctgacagagcgacttgcgacgttggccgtcgagctgaacgacaaggcggtcaaggctgctgagcgccgggtcgccgaagtgttgcgcactgctggtgagcagcgtgagcaggcggagcgggagctggtcgatgccgcacagacggttgacgagctggagacacggttggacgagtcgcaggcggaagttgaatcgctggaaaggcggctcagtgaggctcagtctcatgggcaggcgcaggctgtcgagctggcccagttgcgtgagcgtctggttgccactgagcaagctgcacgggccactgctgatgcccacgaagccgtgcgctcggagctggatgctgcccgtcgcgacgcaggcgtgaagatcgaggcgctgcgggatgagctggctcagttgcgtgagcgattggcggcgtctgaacaagcggccaaggttgcagcggaaactcacgctcgcgagctggagcaggcgcactctgaaacgaagacggtacgggccgagcttgatgtggctcgtcgtgaggcggcagagaagattgaggcgctgcgaggtgagttggccgagcagaaggccaaagccgctgcggatgctcaggcacacgccgattaccgggcgcggatggagcaggatgcagcgcggattaccgagctgctggggcaggcaaaagaggctcaggaggttgctcggcatgatgcggcagaagcccgtgaatctgctgcaaagctggcgggtcagttggaggctgtacaggctcagaatgccactctacttgcggctgtccagcagaggtctgatcgcggttcgggtggcaaatga

SEQ ID NO: 287749 - DNA, 180 bp, Morganella morganii
atgagtcaaggatgtgcgtcgggtgatgtgaggctgctgaccccggcagagctggatgctttgcgtgatgaaatgcaacgtgatggcgagtgggcgcgtgaagagctagctcgtcgtcgagcggcaaggattgccacggttcaagccgcgcttgaggatgacgacaatgccgacacctga

SEQ ID NO: 287750 - DNA, 222 bp, Morganella morganii; identical to SEQ ID NO: 268649

SEQ ID NO: 287751 - DNA, 456 bp, Morganella morganii
gtgatcctgttcctcgacttcgacggcgtgctgcatcccgaatacgatggccaggccaccccggcagacgtagtgttctgccacctgtcacgcttcgaggccgtcatgcgcgatcatccagaagtggagatcgtcatcagttcgacgtggcgcgagcagttcccgctcgatgacctgcgggcgcggttctcgcccgacattgctgcccggatcgtcggagcaacaccaatcaccccgcgcattgatggcaaatacctgccagcccggcgcgagggtgaaatcctcgactggttaaggcacgccgagcgcgagcatgagccgtggctggctctggatgatgcggcgtggcagttccagcggcaccgcgaccggctgattgcctgcacttggtatgttggctttgatgacgccgcagaggcggcgctgcgggcggtgctagccgaggacaaggcgtga

SEQ ID NO: 287752 - DNA, 702 bp, Morganella morganii
atgaacgatctacagcgagcagccgccagagcacgccccgcgcttgccgttctgtccgccgagattggtgagccatccccggatacggtgcaggcgctgacaatcatcaagcagatgctggacgacatcgaggccgggcagcatccactcgaccgccccgacgactggccccagcgtgaccgctggccggatcgtccgcactgggacaggtggcggtgggcaatcaagacgctggccgttgccagcggtacaaccgcccattgctgcccgaaatatgaatacatgcgcgtcgataccagacaggcgcggtctgatgccctgaccgtggcattgcttgatgttgcagacgtgatcgagctggcaagcgtccgagagcctagcggcaccatcgacagcttcctcggcctgtgtgcgggcaggactaccccggccttaaccatcgacgacatgaacaagattgcggcggcaggctgggccggtagtttcgccatgacccgcgaggaactgattgcagccgttccggtgcatgagcgtgatggcagacctctctacgtcattctcgacgatattcctcaaccgtggcgggatcagttttgggcggcgctgcgcggctcacaatgccccaaggttgatggcgtcgagcgtgcggcctacgtttgggattggcaaagctgggtgcgcgaccttgaggacaagacgtga

SEQ ID NO: 287753 - DNA, 327 bp, Morganella morganii
atggctacactcaccgttgagcaggtcgagcagatcagcgcaaagctgaaagaactgcctgccgttgagaacaagaaacgcccggtcagcaagcaagaggccatcaagctgcttgcaaaggacatcaaagcaatgcaggcccgtggctatacgctggagcaggtcagcgagcagctaaagcagcttggtgtatctctggcaacaccaacgctccgcagctacctgaaaagagccggaagcggaacggcaacacgcaagaaaggcagcgaagcgggtagtgcaaccgctatcgaagatcagcaacaacctgctcagccaacggcatag

SEQ ID NO: 287754 - DNA, 849 bp, Morganella morganii
atgacacatgccggaacgcttcgcgccccgacctgtatcattcaatggacgccacttgttcggcgctgcgcttctcacaagatggctctttcgtcctgccccctcgcgccgggggtggcgtttgcagcttgctatcaagcagttttcaagggggtcgcaagggtgccattcgtttgcattggcgatgagccgcttacagcaaagctcgcgctgcggttacagccagatgagcgcgatgcgctgcgtgctgaggcggatgcacgcggcgtcagcatgagcgcccttgtccgtgatctgtacttcggcgctcccgttgtcagtgatgtgaatcgtgatctggttgcagagttgatccggcttggtgctgtagttcgctccgcgtgggatgcttccgctgcaagccagtcaccctacttcccacctctcgcggaggccattgttgatctgcaaaagttcgctcggacgctggccggaaagatcaagccgagccgcgtccggcatgatcgcgccgctgatgttgtcgagttcgttggaaagtcagatggcgtggcactggcagctattgtgacgttgcgtcttctgcccgcagagaaagaccaacttgcgttggatgcggagatggcgggtattacacccggcgcactcgtgcgacgccggatattcggtcgcccggtgtctgcgaacatcaatcgcgtgatgcagcggcgtatccggtcgctgatggcgatgttgcaacatttcctcgcagagcatcgtagtcgggactaccacccagagatttatacgacgcggagtgtactggcggcgctcttcaagaggctgggacatgatctcaaagcacattcgtaa

SEQ ID NO: 287755 - DNA, 2211 bp, Morganella morganii
atgatctcaaagcacattcgtaacccagatgcgaaggccgcgaagcatcgccgcattatcaagctggtcgaatacatcatcaatccacagactgagagcgcgacggagaaatgcgtctatcacggcgcacgcgggttcatcactgccgaacggtcgatgcagcttggcgagatgatcgcactttcggaagatgccacgcgaagcaagaacactgtggagcattttgttctgagcttgcgggagggcgagaagccgacacctgagcaggtcgaggagatgataacgatctggctcagggagcttgggttgagcgattgtcagattatctatggtctgcacgaggacactgataactaccacctgcacatagcagtcaaccggatgcaccctgagcgactggagtgcataaagatcaacggtggcttctcgaaggaagcggagcatcgggcgattgcattgatcgagcacgcgcaaggctggaagtccgagaaaaatgctcgatacacggtgcttccagacggcacgctggcctaccgagccgagaacggtgaggttgtgccggatgcgggctggtcggctgatttggcactcagacggcggcaaaccgatgaccgtaaagagctgcggcgacggcatgagcgtgagcggcgagagttggaggctgttgaagctacgaaggcgcagcggcaggcggcgctcgatgagctgagaacacgccagcttgctgagcagttggcgcagaaaacgcagcagaaggcggagcgcgtggcattgcgtagcgccctccccgcctctcgggcacgtgaaaatgtcgcgatcagccagcgagccatcgacatcgaaactcgcacaggcgtgcagagtgccgagcgtaccgccaaagaggttgccgggccgatcttgcggtcggcatcgagttgggcgcagttgcacgcggagctggccgccgtggggtgcctcttcgagcgcgaagggagcggtgcgttgatctgggttggggacactcccgtcaaggccagccaagcctgccgaaagtcatccttgcctaagttggagaagcgtctgggtgcatatgagcctgctcccgaagggatggtgattgcagagcgggagctggagccactcaagccggatgcgcctcgcatgagcgactacatgcgcgagcggcggcagtacgagcggaagcggaaacaggaaacggcagcactgcgcgagcgtcatcgactggaacaagaggccgcgtggtcacgctacgaagcgcggcgcgatgcactgctggctggccatgcgggcaggaatcggtatgccttgggcgctgttgcacgcgctgagtggctggccgaacgggatgagctgatccagcggcagagcggcgagcgccaccggctgcggaaacggttgcctgctttccccggcgtcgaggattggtatcggcgactggatgagccaggactggccgaactttggcgacatcgaaatagcggtcaggcgctgctggtcggcgatgcggacacccctgccctgccccctcgggacatccgggcgttcgtggccgaggtgcgtgggcgtcaggttgtattccggcgaccggatgatgcaggccctgcatttgttgattgtggtcggcggatcgacgtgactgcctcgaatgatcgtgatgctgcacgggcggcgctgcaactggcgaaggcgaagtgggggcgggtcacggtcagcgggccacctgagtatcagcagatgatgctggagctggctgcggagatgggggtgcagattgcaaaccccgagctgcaagagcggctgaatgtggagatcgaacgccgcaggcccgtcccaccaacggcaaagccagactggtcacggtatcggtcagtggcttccggtggggtgcgctcccctgctcgaatgactggcgagcgcgatccgcggtggcctcaatttgagcgggccatgctccagatcgggcagttcgagctgggtgtgtcggctgtggtgctgatgggacagcttgagattgccaagggcacggtgactgagcgtcttgacgctgcggagcggtctggcaggtcggttgatgacgtggcccgcgagctggccaccgcagcagcgcgagccgaggccgaggcattccagcgacagcttgacgcggctgaacgagagcaggcgcgtcctgacatgcaccccgacgagccagaggggccgggttggtga

SEQ ID NO: 287756 - DNA, 549 bp, Morganella morganii
atgaccgaacggaaacacctgacccagctcgaagttgagcggctgattgcagccaccaaaggtagccgtcacgaggcccgtgaccgctgccttttgttgttgatgttccggcacggactgcgggtgtccgaggcgtgcgggatgcagctctcccaagtcgatgtcgagagcagggtgctccacgtttcccggctcaagatggggttgtccacgacccacccgctgcgcactgatgagctacgggcgatccgggcgtggctggccgagcgcaagcggatgaagccgggtaacgatgccttcttcgtttctgagcgacttggcccgttgaaccggcgcacggcgtgggatgcgatccgccgctatggcgagaaagcgggcctgccgctggctgcccacccgcatatgctgcggcacgcctgcggctacgagctggcgaaccaaggggcggatacgcggctgattcaggactatttggggcaccggaacatccagcacaccgtgcaatacacggcggcgaatccggcgcggtttgagaggctgtggcgatga

SEQ ID NO: 287757 - DNA, 1107 bp, Morganella morganii
atgtcgtccgttaatattcgcaagtccagcgcagcggacagattggaagttttcacacgcgggcaggatggatcgaccaaggtgactggtggccgcgtaaaggtcgccaaggccggaaacgcgctcatcgagcgcgacgactcgttgaactgctatccgcgttgggctgcgcctacctgcatcatcgtggatggcccatatgggcttggaaagtttcccggcgagccaaagactccggccaaccttgccgagtggtacgcgccccatgtcgcggcttggtctgcacacgccaacacggacactacgctttggttttggtgtacggaagtcggctgggcgctggtgcatccagtcttggaaatgcacggatggcagtacgaggaatgcaacatctgggacaagggcattgcgcatgtcgccggaaactgcaacagcaagactatccgaggcaccccggttgtgaccgaagtcgctgtgcgctacacgaagcgaaaccagctacccggtagcaacgggcaaatgctatccatcaaggattgggtacgccatgagtggcttcgtagcgggctgcccatgtcgaggtcaaatgacgcttgtggcgtcgcgaatgccgcgacccgcaagtatcttacccagtgtcatatgtggtatttcccgccaccggaagccatcgtgcgcatggccgaatactgcaacaagcatggacgcccgaccgaacgcccttacttctcccttgatgggcataacccagttaccgaagaggcttgggggaggatgcgtgccaagtggactcacacccacggcatcacaaacgtctggcaggagcaagctgttcacggtcgcgagcgcatacggacaggcgtgggctacctccatgccaaccagaagccactggctctgatgaagcgccagattattgcgtgcacagacctcggtgacgttgtctgggaacccttcggtggtctgtgttcggcctcgattgctgccctgcataccgggcggcgatccttcgccgcagaggtcaatccagattacttccaagtggccgcttcgcgccttgaagaagaattcaatagcatggaggaacgacgagaacatgtcgcctag

SEQ ID NO: 287758 - DNA, 933 bp, Morganella morganii
atgtcgcctagcacatcgcccacaccacccgctaagactggcgggccagatcgttcttggccccaccgcaagctctacgagaacgtcatcaagacgctttacgccttgccggaagagttccggacttcccttcggatttctgactttcgagcgacggacatttttaccctgaactctgcccttggagcctccatcgaggacgccgtcgtcaacggcttgaacagtctgcgcgaggtgtgggacccggacggccaatatgccctgtaccgcttcgagcgacaggcgcaggctttcccggatgtgcgactggtgacagaagcccccgatgaagaagccatcatcatggggatcgagctgaaaggctggttcgccttatccaaggaaggcgagccgacctttcgctataccgtgacgccgaacgcctgcgccgatgccgatttgctcgtggtctatccgtgggtgctcagtgacgtggtcgccggcagtccgaagctgctacggcccttcgtgggcgaggcacgctatgctgccgagctgcgcaattattactggcagaccatgcgagctgagcggggcggaaatggcggcatcaccccagccacccatcaagccccttaccctgccgtcaaaaccgatcaatgctcagaccgtgccaatgatgacggcggtggcaacttcgggcgcgtagcacgctatgggttgctggatgacttcgtgacctcaacggagaagcaagaggtatccggtattccggtgcgtgcttggctgaccttcttcaagattttcagtgataacgcccgtaacctcgatacggttgtgacctccatcgaaagcgccttgcgccgctatcgtgacattggcgacggagagaaggccgcgctggtggaatctttcgagcggatcgtggcgatcctcaagggtgagcatgactga

SEQ ID NO: 287759 - DNA, 588 bp, Morganella morganii
atgcaattcaaagtcacgctctacgtgaataagtcgttgggcgggatcacagtcgaagggaacaccgtccaatgcctccggcggacagacgagcgcacagccacaggacgccgacgccagcgagtcatctgcaccatcgaccgctgggcatcggagctttccgccgaagcccgcgaactgctcaccgaagaagagcaagcggaatgggccgcatggaaggttaaacacgatgcggagtaccgcaaaaagcagcttggtatcgccctagatgccgtcaccaagacgatggaagcggccaccacggcgctacgcgagtgcgtggctaaacctgctgaccccgctgcaatgtgggccgccatcgaggcgctatctgccgaactggagaaggctggccacgagaaacctaagcggccacgaggccgcccacggacgaatgatgacgacgacgatcaactcatcgagcactggccgatgggcactcagccgcctctgccgaatttcgccccaccgggcacagaggcacaccgccagtaccagagcctgctcgacagctttgaggcatatcgccgggcaaatgaagctagctag

SEQ ID NO: 287760 - DNA, 231 bp, Morganella morganii; identical to SEQ ID NO: 268637

SEQ ID NO: 287761 - DNA, 468 bp, Morganella morganii
atgagtacaactgccaagatcgacttcgcgccgggcctgttcgatgaagctgtgccgcccgaagagaagaaacccacccctaacttggaagactcttttccgagcacctacaaacccaaaagcttttggtggtggtacagaaagcaaatcctcaccacgctcgcgctgctgacagcggctggagctgccgcgtactttgtcatcaaccaccaagcggacacatcgccggttgttgaaggcccgttcctgctgcccacaattaaccagccgaaggcacaacctgtcctcacaacatcggctcggtcatgctacggagacgaagccatctgcacgacagccgtcactgatcgccctgccgacatgatgacctcgctggtcgccatgttgccgaaggcggaaaaagacaggcgataccgggtgtcggtcgtcatcgaggaactgggcgaatggcctcaatctggcgactga

SEQ ID NO: 287762 - DNA, 534 bp, Morganella morganii; identical to SEQ ID NO: 268635

SEQ ID NO: 287763 - DNA, 1119 bp, Morganella morganii
atgcacaagctgcttgctctggccgcactggtggccgtgactccggcgctggccgatacctgcatggtatcccccaccgaaaagcagaccgtctccgggcgcttcggcaagttccggggcggtggctccggcaactttggcagcgcgaaccagaagccgcacatgcacgatggtctggacttctcgaccagtggcgcgtcgcagcctctgtacgccacaacggacggcaagatcaccttcatcggcaaccggcgctcggcaggcaacgcgatcctcatcgagcgcagcaatggcgacgtggtggcgtactaccacatgagcggctttgccaccggcttgaaacagggcatggaggtcaaagccgggcagtacattggcctgtccggcaacacccccagcgacgcgatggtgaagcacctgcacttcacctacggcaccgcgcagaaagatgaggcccgcgccaaggctttcactcagagcgcatcgaaaggcaccttcaaccccggccaactcccgtccgccttcaaccagcaacaggggatcggctggaagaccgacccagccccgtatttctgcgcgactttcccgatccaagacggcaacccgcagcactacccgattctgggcaaggacaccaaggaacagcacgcgatcctgtttggtagcgtccctccgggcggcgtggccccgaacgtcaagttcgagccagcacaagtcgctgcggcgaatgcggacgcggcgctggccgctgccgagggcaagtctcccgccgagtggctgtctgacaaggacggctacggcacgctaccgaccgcgccgattggtggttacgacacgatgtccactcacgaaatgctactgacagaggcggggcgtcggttcagcgacgccgaatggaacaacaacatcaccaaggtatccagccgggcgctctgggtagatttcaaccgcgcagtaggcgtcagcaactacatggccgaagcgatctatcggaaaaaggagcgggtcgaagccctgctggctatctacacgtcacagaagaccgagcggctgcgcaagcagactgccgcagcacatgatcgggcgcaacgcggtgacgtttcgcgcagcatcaactga

SEQ ID NO: 287764 - DNA, 528 bp, Morganella morganii
atgcgtagcaagcacttcatcacaattgctgcggtggcgttttccagcgtcgtctgcggccagatgcccgtcccgctgctcgacaacgagccagccgcacccaacgcaacactctgggccgtggctggcccgatgttgcaggccgcgctggagtgccgcgaagacctgcccgaccatccagccacacgcgccctgctgccacgcaaaccagcaggcgaggaacagcactaccggctgacaccgcccaacgggttcaaggtattcggtctgccggtggccgagattgaggtctgggtcgatgacggcaacggcgaactgggccacggctacacctcacacatccgaggcaggacgctcgccgaagtcgccaaggctgccaagctgaacaagggtcgttcgttccccaaccgcaaaaccccgatgggtggcctgatggccgatcagcccttcgggccggaatcggtgcaactgacctgcaccattgacggcagctacgccgcccacgaaaacgagtaccgggagccatga

SEQ ID NO: 287765 - DNA, 189 bp, Morganella morganii
atgaaaaccgctgacagctatctcgtactgcgcgtctcgtggctgcgcgagcacgatcaggttattgctgagctggccgagctgtggctcgaccggcaggccaagcagcagcctgaccccaagcccatcaagcccatgcgcatcagggcacagcacaacagcgacatcaggagccatgcccatgcgtag

SEQ ID NO: 287766 - DNA, 237 bp, Morganella morganii
atggcccagattcaatccatcctacgtcgccttggccgcgagcgtgttaccaacatctgctgcgtgctcgggacatgtctcgccttgttcgtcgagcgcgatgcgctgatgaatggcccgcctgctgcccagctcggaaccatcgccctcgccatcgttgtcccgatcttgtacctgacgccgctggtctggctcgtttaccgctacctcgtgaggcccgcccatgaaaaccgctga

SEQ ID NO: 287767 - DNA, 606 bp, Morganella morganii
atgagtatcctgaatggagcaaagaaagctgcgaaattcactttcgtttcaatgccgctatccattttgggctgggggcagctcaagcggaatcacggtttcatccgtgacctttggcataccctgcggaatcctcgatgccctgaatgtgggcgtggagtcatgcaccgaccagccaacgctcaagctgacgacactgcgctttacccttgggaatgctccgcacgttgcggatttggcgtactagccccagaagaccctgccgaaatccgccgcattgttgatgcgcgaatggaggttcgaggcaagcaacgactggcctttcttgaggataaggagcgcagcaagttgattcgtagccatctgctcaaatcaagaggctattggatcgttgtcgcgcttgtcttcttgatggccgcatggcaactggctgtgggcgctccactgatggttgtcctgagcgtgctgtgcatgtgcctgccgttctctgtccatgcaatccgctggagctatcgggcgtggcaagtgcgctccggcacgctgttcgtggaaggcgcatttggccgctacgtccgcgacatgctctgggttcgggggattcagtga

SEQ ID NO: 287768 - DNA, 450 bp, Morganella morganii
atgtacaaaaccgatgaggcgtacacagccgaaagtcacggattggttgtaggcaaagcctacggtgttcgacaaggttacgactctggatggaacgatgccatcgctcatgtgcagcttcaattcgacgcagcactccgcgagcagcgcgagctggcctatgcactcaatgccctttcggtcatcgcgtattccgcgctggcggcattgaaagcagctcctgagcagcatcgcctcatggcgacggacatctacgcgaaagaggtcaaccggcttatgaaggcgggccccaaagcccccggcgcgattcgcgctgtgccgcacaccgacccagcactgcttgctcgtgaaagcgacattgctcacctcatgcagcaatggttcgagcactcactggcgctggcgaaacagcagcagcaccaccacgaaaacgactctcccagcccgtaa

SEQ ID NO: 287769 - DNA, 2889 bp, Morganella morganii
atggcacagatgccgttttctccgtgcgatgacgcaacgaattgcaccgatcacagcgtcgatatgctgcgcagcatcttcggcccggtgattgacgcgctggtcacgggagccgacccggataccgtcagcgccgcgagcaacgtcatcgcgaccatgatgggcttctttaatagcggcatcctgatcgtgggcacgctcatcgtcagctacgtcgcagtcatgggaacgctgaacacagccaacgatggcgaagtgatgggacgcaattggtcatcgctgtggacacccgtgcggatcgtggccgggggcgcggtgctgctccccacggctagcggtttcagcttcatccagcttgtcgtgctgatgtttgcgctgtggggggtaggctttgccaacggcacttacaagaccgggatggcgattggcgtgctgaatcctgatggagtcgtgcaaggagtcaatgatccggggagcttctacgggctgcgcgacttcggtaagcagtacctcgccgcatcctattgcgcccgcgcagcaaaccagatttatcccggcgcgcaggttagtgcagcccccagtgccgacaaaaccagtacgaatggcgggcgcaccgaatacctcttccatatcaaggatcgaaacgccacgacgaacttggggggtggagaaccgctgtgcggcactgtcagcatcagccagtacgccgcccagcccgcaaaagacacaaccgggattgaagcagctctggagcagctccgagtggcggcgcagaacgccaagattcaggccgctaccaaactcatgggcgatctggaggcatgggtaaacacatggccgaatgacatctcgggtgattggtcaaacgtggattcagcaacgttcaacgaactggtgaatgccgcggaaactcaagtagcagcggccctcatggctgcactgagtgacacaactggtgtgaaatcaggattccaatcgctcgccacgtcactgacggatgaaggctgggcgatgtctggaggctggtatcagcgcgtcggagaagtacgtgggcgcatcacagccatcacatcggagtcggttggctctgtctctgccccgtcgctgtccgcactgcccgctgatgcagcggccagccgacttatcggatcggtgacaacggtaactgaggccatcagcaaaaagtcggaagcgaagggaaattacaaggctccgaccagcggccccggcgacctcaccagcgtaatccccaaggacgctcagtccgacatcaacatcggctcgattaacgccgatttcgacgccaaggtgagcctctggatcaacagcttgatggaaagcatggtcgagatggcgaccggcgcgaacacctctggcaccacacctctctgcggcaccgctggccagatgggaggctctctcaaccgcatgaagtgcgtcggtgactacctcacggttgcccgcgccgggatcggcgcggcagatgtggcgatcaagacgggagcgaccgcgttgcgcgtcgtcgctggcacgctctcatccgtcaaaggcgtcggcaccggcctcgatctcgacaaggttgtgacgccgatctgggattgggtgatcgaggtgcccgtcaagcagcttgccatgatggcctcgtacatcgaaccgatggccttctactttggcgtttttctgcccagcctgccctacgtaattttcatgacagtggtggtcggctggattctggcggtgctccagtcgatcattgctgcgcccctgtgggcggtcatgcacatgacacctgaccgcacttttgtcggcagccaatcgcaaggctacctgctactgctgtcgctgttcgcccgcccggcgctggccgtagtcggcctgttcgccgccatgctcgtcagcgatccgatcatcgacttcattgccaagggcttctttgccatgcgcggtgcagtggtgacatcgactgggacggtcggtgcaatcgcgtcattcctgagctttgcttggtggttcatggtgttcgggctgaccctcctgcccgtgctttacatgaccttcggcctgccacaaatcctcccggatcatgtgctgcgctggatcggcgctggcgtgagcgacctcggcgaaacgcaagcagttggacagatgcgcagtggtatggcccatgcggcatccagcggcgctctaccaagcgggggaggaagtccgtcgcgacgtattggtggccacggtggaggcgagttgctccccggcaatggcagtggagatacgccgcccactggcaatggcggaggcgttcgcggtagcacgacgccaaaacgggcactgctgagtgcaggcgaccaaggcgttgccccgccagcaccggatgcttctgtaccgccgcctcaatcggataaccgctccggtaggcaaaaagtcagcgatgctgctggagtcgggctgggccgcgccatcaccggcaccgtaggtgcgagcgcccggagtgtagctcgtgccactgatgcagcgatctcgaccggcagtgccggagtcgcggcattccgagatgcagccaatagcggcgcaagccttgggcaacgtgtccgagcaggtctggctggtgcaggcgcagccgccgttactggatttggcggtgccgcgaccgcctccgccaatgattacgccgcatcaggccgcacggcccttgccgaaggtaaagcagcctactccgaaggagccgacgcacgcatcgcagcctacaaggcgtcgctgcacggcgaaaccgtcagcacaggcagcgaaggcgtcattggcgactcagggagcattgaccagtcttatgacagccgctactcggctcccccgaccgataccgatagcggcgaaccctcgccggacaaggagtga

SEQ ID NO: 287770 - DNA, 633 bp, Morganella morganii
gtgacgatctttgctgtggtcaataccaaaggcggcgtgggaaagaccacgaccgccgtccatctcgccacgatgctggcccggcagggcaagaccttgctgattgacggcgacccgcaggcgagtgccgcgagctgggccgcgtggcggcgagagaacgagggctacacacccagcccgacgacgacatgcctcgcgggcaaagcgatcttggccgaaggcaagcagcttgccagcggcttcgcgcatgtcgtggtggatgccggtggccgcgactcggtggggctgcgttccgctctgctgctcgcccaacgcgcagttattccgattggtgcttctaacctcgatgccgcagccatgaccgatctgctgacagtggtcgagctggctcgtgactacaaccccgacctcgatgtgcgcgtgttgctgacccgcgtcgatccgcgcaccaaggacgctgctgagatgctggagtttctggccgagcaggagctgactgtgctgccgaccaaggtttgcgagcgcgtggccttccgtcgcgccatcggcgaaggtgcgatcgtgcaggagctgggcaaggatcaggctgcgattgcggaaatggaagccttcttcaaggaggtgacggcgtga

SEQ ID NO: 287771 - DNA, 303 bp, Morganella morganii
gtgaagaagatgcgcggaaaacctgacctcacaggcattgccaccccactgaaagacccgaccgcttttctggaaggtggagcgggagatgttgctgacaaggcgcatcgggatgcacccaagcctgcggcacctgccgcagatgagcctcccgtgccgaccgtgcagaagctctttcggatgcggtgggacatcgccaaagccctcaaggatgccgcaagcgccgagtcagtgccgggccatcgggtgacggaaaccgagatcgttgagcggttgctcaaacagcatttcgggatcgaatga

SEQ ID NO: 287772 - DNA, 576 bp, Morganella morganii
atggttccctcgggtgagacaccgaccgtcaagtcgattgcccctccggcttttccttctacgtctcaacgccccccgaaactttgcacaaagccccgcgccaacggggcttttgctttttcggtgccttgtctctggtgctactcgatagccaactccggtttatccccgttgcacggggaacaatcaaatatccagctctgtctgcttgccccgcttcgtgcgtggcacccagccattagcgtctacttcaaacttgctcagaccacagacctgcaaagcagagatagcgccatccacggactggaagtaacgaaccccagtccgagccgcgctaaaaatccgctccccagcagccgtgcggataaccgcaatcaacccttgaccggcttcatccatacggacaaccacagactcaatagcacctgcgcttgccagctcacgaacaatggggacagtcactgttgcccgtttttctgtcatagccacggtttatacactccaatagacataaacgcaagatattcaatatcgacatggactagagtccatgttgagcgccttaagttgaattag

SEQ ID NO: 287773 - DNA, 1197 bp, Morganella morganii
atggctcgacaatccaccgtcgcagcacgcgacgaagcaccgacacagcgtttttttcagggcggcaccgccctgaatcgcgtgctgcttgaagccccgtacctgccccggtgctccgacgataagaccgccacgcgcatccgtcctcgtgagtacgcgattcgctatccctacatgcaggtcaatcgaccgggcatggtgagctggctgatcttcgaccttgaccactcaaacgcgctcatctgggaggatgcgggcttgccagcccccaacctgatcgtgcgcaaccggaagagtggccatagccacctgtactacgccatccccccggtctgcacgaccgaagcggcccgcagcaaacccatccagtacatgaaagccgtctatgaggcgttcgccatccgtctggacgcggacatgaagttccacagcgggccggtcgccaaaacccccggccatccgtggtggttcactcacgaactgcacagccacatctatgagctgggcgagctggccgactatgtggagctggtcaagtcgccgccgtggggtaaaaagccacggctcgatgaggtaagccattcgcggcactgcatcctgttcgagtacctgcgctactacgcctattccatcgtcaaccgcgagcgtgagagggggtcattctcaaccttcacgcggttgctggaagcctacgcgcacaacctgaacaacttccatcatttcggtttctccgaagacctgtcgtggtcctcgctgcgtgccacggtgaaatcggtcgcccgctggacatgggatcgttaccggggtgatagccgctgccatcgaggcgtgatgcagctcgacagggacttgccgctggttgagcggcagcgacttgcagccgcacgcacgcacgaggtcaggcagaaggccacagagtccaaggttcgggctgcctgccgccagctccagcagaagggcgaaaccctcactcaagccgctattgcgcgtctggcgggcctctctcgacagaccgtcgcggcctacaagcatgtcctgaccgaagtgctcaagccagcagttgtcgccgtattggaggtggtcgcagcacccagatcggatgttaagaatggtgtacatcaggtatctgccccccgtgcctccgtggttgatttgatcgccaaggggttggatttggagcctgtcgattcttcgtag

SEQ ID NO: 287774 - DNA, 315 bp, Morganella morganii
atggcaaagagatcatttagccccgagctgctggagtcgcttcggtcgatggttgtgacaaaagctcttgatgccctcgggctgcactggaagctcgatccggattttcagccggtgaaggatgcggccacgatccggttgcatgtcgcagttggtggccaggttttcgagttgctggtgactggtgccaagtttttcgatacccgtgcagacaaaggtggtggcggtgcgattgatctggctatgcacctcttgcggctcgacttcgttgcggcggttaagcggttgtcgtcctcgcgtgtttccagcgtttga

SEQ ID NO: 287775 - DNA, 423 bp, Morganella morganii
ttgtgccatggcgaaactgtcgtctgcagtcaccttaaccgcgtccagtttctctgcaagcgccttcgtttccgtgacggtgtagttgcggacttcgataatttccgctttcatcgcgccgctttcacgctgccagtagccccactggccgtaagcgttgttggcgttgttgataatggcctcaaaattatcatccgcctgcgactgcaggtctttgataatttgagagtcgcccagtccggcggccacttcatcaataatgttcgatgcatcgaactcggccacaccgcgcacaaagtcagtccagggggactgattgccggttttatctaccaggcgggcgcggaaataaaacgcggtaccggcggccagaccggccagttcgtgagaacgggacgggtacggcacatcggccagcagtaa

SEQ ID NO: 287776 - DNA, 1350 bp, Morganella morganii
atgaacgcaggattacacttcagcgagatcagtaaagaacaatttgatatttatttttacggccgctcaccttaccttaagacattctctgaggagatacgctggtttaaatatgaggggaatgggataacattattatccacaataattatatgcaatattgataaagattttaacgcaatagtattgggtcgggatttagataaaaaattcagagcaataaacgtcttggcttcatttgattcaatggatgtcttgcttaataatttaaacgatggcataccaaagatgctggcacagcaccagaatggtacattcatgcaaggcgatgaatcaaccaaacctttttcattattcttgagtaaagtcccagagaaaaaaaggaacatttatataaaaatgctcctcgaagaccctcttcatttccctgcctatattgttcttgaggaacttgcgtactggttcaaagatcctgatggaatatttataagggattttcaaagtgacgcatttaattcaaggttatttgagttatatttgaatgctgtattttatgaactcgactttgaaatgaatagagaatacaatcaaccagattttctgctatctaaatttggtgtggaaattgctgtagaggcagtaagcattgctgaagcagaagcccctcttgaaagaaaagtcattaacgatgagaagatggatgaattaagaaaacacgttctaaatgttatgccttttaagtttgcaagaagtttattaaaaaaagtccggcattgccctgagccagagagagttcattactgggaactcaaccatacaaagaacaaaccatttgtcatagcaatgcaggattattcgaaaagaatgtccatggccttctcaagcaaagccttgcagagctatttgtacgggattgatattgagtcaggcatttctattgaaagacatacagatgaaaatagaagtatcaagtcgaatttttttggctcagaacaaaataattatgtttctgccgttttactcactactcaagcaaccatacctaagtttaaccggatgggaattcttgcaggtgtagaggcgagtggattcaaagtgtacgttagtggtgttaaaacggatcaggatgcagacccacatccattttcagccgatgtaagtgaccctaattatcaagaaccatggtgtacagccatatacatgtaccataatccaaacgctatacaccctgttgactatcaattattcccaaatgtagttcatgtatttaaaaaggacgaacactttgaggagtacattcccagaaattatattctccaatcgactactatgatatgtaaaacggaataa

SEQ ID NO: 287777 - DNA, 201 bp, Morganella morganii
atgcgacctgaaatcacatcgataccggaaatgctggttaagcaccacgggaatcagactgcactggcgaacgagttgggagtaaaccggcatacggtcagaaagtttcatcgtgataccaggtgtgaaatgcacgttatctacaacggcgtgctgatgacaaaatccaagatgaaaggcaaccaggggaaagagcaatga

SEQ ID NO: 287778 - DNA, 333 bp, Morganella morganii
atgaaaataggagaatggctggtagcagcggtaattgtcatgatgatagtcgccggggtttcatggcaggcaacccggatagataggctgaaaacagagcgtgacgcactatctgaaaagctatcagcccagcaggtgattaataccaccacattaaccgcggtcgctacttttcaccgtatctccggagaggccatagatgccaagcgaaaaaacacactggacgcaaaggcagccaagaaagacatcaaagttattcttgtgggtaatgactgcgcttccgctgctgctcctagtggtctcattgaccggatgcggcagtacaaagactga

SEQ ID NO: 287779 - DNA, 165 bp, Morganella morganii
atgacacaaacaaactattggctaatcaaagaccttaatcataaccgtaagttactgaaaaccatttatcaatcaggtctgtcaatttactacaatactgacgcaattcatgacgctattgatgcaatcatagatgagttaaggcgacgagggtttaccttctaa

SEQ ID NO: 287780 - DNA, 387 bp, Morganella morganii
atgtcaggacacccacacgctgaccttatggctaaggcagcagagatagcgaagacagataaagagtggtggcggcactttgagtttaaaaatactaccggtatctggatgggcatgacagaaaatactggattttatgattttgctgaataccggctgaagccgcgctacatcgacattaacgggcatcaggttccggagccagtgcgggaaccgcttaaaatcgggcaggtgtattggttggcacgtatacatggtgccgttgatagcttcgagtgggagggtgaccacgaatgcagagcctggcttgagtgcggactcatccacctaaccaaagaagccgcagaagcccacgcagccgccctgttctctttcacacagaagtaa

SEQ ID NO: 287781 - DNA, 327 bp, Morganella morganii
atggaaaatgcaaatccacgcaaatcgtttaaccggtttgtgtcaaatcatctgatggcaacagctcatcaggcactgagaagcaccacacagacagtggttgcaaaactgctcggtgtacacgattcaacagtcttacgcagaacagaaaagttaccggagatatgcgagacattggccgcagccggtatcacagattttgttttgccaggcgagaagaaaatcagcgaggaagagtaccggtttctgtggaagcagatcggcgagctctctctgatgagaacaaaagaaaacgccccggctgttggagcagcagaggcgcattaa

SEQ ID NO: 287782 - DNA, 1650 bp, Morganella morganii
atgcaagtccgccattcagccccggcgaccggtaataactacaccacggatatcaccgtcagtcagcgcagtaaccgcgcggtactgaaaaccctggcggacacaccggagaaagcagaagccctgtttaccccgggcggacaacagacacagttacagccgggacaaactctgtcctggacaacgcgcggcgaactgaaacaggttacgccggtggtgcgcagcggtgctgctggtgatcgcgaaagttaccgttatgatgcgggcagccagcgtattctgaaaaccgccgtgcagaaaaccggcaacagtacacagacacagcaggtgatctatctgccggggctggagctgtaccgcggaaaagaaaactatcaggtgatctgcgccggtgttgccgggcgggcacaggtacggctgctgcactggcaggacggtaagaaagatcaccagcggttcagctacgacaatctgatcggcagcagcggcctggaaacggatggcgacggtaacctgctgagtcaggaagaatattatccgttcggcggcacgtccgtgctggtggccggtgcggacagcggcattgactacaaaacccaccgttattccggcaaagagcgggatgcgaccgggctgtattactacggctaccgctattatcagccgtgggcagggcgctggctgagttcagatccggcgggaaccgttgacgggctgaatctgttccggatggtgaggaataatccggtgacgttaagagatgatgacgggttaaaacctgttaataatatgccgccggcacctccgcttccggtctccggaggaacacctttaccgccgccacctcccgtgatgagcggagctccgttgcctccgccccctatgccgggcggagcacaattacctccgccaccgccaacgatggcaggaggaaatccgccaccgccgccaatgatgggctcaaaaccaacaggagcaaaaaagaaatggactatcaaggaagaccctgcactgtataaacaacaaggcggagaatacccgtactattcatctttcagtatcactttgcagaaactgaatatcggccattacagtgaaattgatgatatggataaatttgtcagtgcatggagagataccggccgtaatatgaaacccgccgccagagatatcaatcatgagaaagccattgaggttcagtctgttatgggaaaaattgatgcggaatggtccgggtataataaagcaaatgtcagtgaaacatttcgtggtgatacgccggttattacaggaagttatccatggcttgccgattttattaaggaaaccggcaacagtgcggaggctgtgactaaagttatggattcggatattcggtctcagctgattatgtctacagcaaaagatccgggaatgggatatgtatcgaataaatcaattatgtggcattttgaactggaagaagggcatgccggtgtttctgaaggattgtatgcatcagaaggtgaggtgactttccctatctataacaaaatgaaggttacatcactgagttatattccggaaggacaatcttatatgaataatgcggaacggtttggtactgcacaccggtatattattaacgcaaaaatgttaccgaaatcataa

SEQ ID NO: 287783 - DNA, 252 bp, Morganella morganii
atgctggctcatataaccgacaatcgtcgaagaatcaacaccaccagacagaaatgcaccgaatggaacatcagaacgcagtcgtatgcgtacggcatcatcgagtatgccgttaaactccgttatccattcatcctcagttttattaagctcagtattattttctatagaccaccaagtatgttcactaatattatttctggtaatatccagataagtaccaggcatgacatgataaatatctttaaataa

SEQ ID NO: 287784 - DNA, 471 bp, Morganella morganii
atggaagaagtttgccaggtaagacagaatagagatgttctgatcttttgcttcctgcaggttctgcggggagaggctcagcacgcagctgaacacaaagaacatcacagtcagtaccatcataatgtgagcgtacgccagaatgcgggagcattttttctccgcattttcgccgtactcttcacgcttggcgacagcaaaggcagagataatcggggaatggttaaaggagaacaccattaccggaatcgccagccacagcgttatcagcagaccatgaccggtgacactggccgtattgctgtcgaaagtgagggttttgaatacatcagtgctccagtgcgggatcagatacagcgccagcaccatcagaaccgccacaaacgggaataccagcacactcattgccttgacaatcgcggcctcaccgaagcggataatacacataatcccgatgatcagtaccagtga

SEQ ID NO: 287785 - DNA, 438 bp, Morganella morganii
atgcatctggttaacgataaaactttccacggtgttggtgatagccacactgtagaccagcagaatcgggtagatagcaaagaaatagagcagggtgataaggccgccggctttggaaccgaaatgctcttccaccacttcagtaatatcttcgcccggatttttgccggacagcacgaagcggcacataccacggtgtgcgaaaaaggtcatcgggaaggccagcacggccatgatgataagcgggatcagcccgccgataccggcgttaatcggcagaaacagtacgcctgcaccgatagcggtaccgtacagtccgagcatccagacggtatcggacttacgccatttgcgataatcattgctggtgtcagtcttgctgaccacaacctgcggttgtgttgtatccatagaagtctccaaaatgtacaacaataa

SEQ ID NO: 287786 - DNA, 405 bp, Morganella morganii
atgattgcctatatcgcaccgttagtcgcctttattgcgatcaccaacgcgttcctgggtcactatatgggtgcccgtgaaggctttaatggtctggttaacaaagcactgcgcgccaaaggtaaaagcattgcaccgtctaagctgaataaactgactgcactgtttatgctggtgacctcctggattgttgccacactggacccgagcattctgggcatgattgaaaccctgggcggcccgatcatcgccatgctgctgtttatcatgccgatgtacgctatccgcaaagtccctgcgatgcgtaaatatgccggtcacctgagcaacctgtttgtggtcgtgatcggtctcattgcaatttcagcagtgttttacaatctgtatcagctgttttttggctga

SEQ ID NO: 287787 - DNA, 210 bp, Morganella morganii
gtggttattgtggacagcgcggtaactgcggcggagggggatattgtgattgccagttttgacggagagtttactgtcaaaaaattgcaactgtcaccggtacctatgctgatcccgatgaatccggattatcagcctatcgcaatcagcagtgagcagaatttacagattttcggtgtggtcacctacatcatccatcgggcgcagtga

SEQ ID NO: 287788 - DNA, 540 bp, Morganella morganii
ttgtttgccgttttcggtttcctgagattgcagttttgctgtcaggcgctgtttttccgcatcccgctgagccagctgtttttccagctccgtcagcttctgcgtgatttttgccataccagcatttttatcctgcaacagcgcgagatttttctctgcctgagcattatcggatttcagcccggtaatctgcttttccagtgccgctttttctgccgccagtgctgccaggtcttttttcagcgcgtcgctctgtttgctgttttcaccggtcagcgcgaggattttgtcattcagctgctgtttttccgcatcccgctgagccagctgtttttccagttccgtcagcttctgcgtgatttttgccatatcggcatttttgctttccagcagcgcgagatttttatctgccagcgctttttctttattcagcgccgcaatctgtttttcaagatcggctttttcggctgtcagagccgtgacctgaccttccgcctgaccaaaacgggccaggttttcgcttatctgctgattgagtga

SEQ ID NO: 287789 - DNA, 225 bp, Morganella morganii
atgaaagtcttttggtgtaagagtactatcgtaatacgccttaaatgcagtaggtactttgaactttatatccttggaatcgaaagttcctcgcgcggcttgattatcttttttacctataagatcagtcaaagactctaccaattgacatacgtgttcatcgtcacttgggagaactggtttaagatcggtctcaactttttgcttaccactctctttcactaa

SEQ ID NO: 287790 - DNA, 594 bp, Morganella morganii
atgcgacattatattaccgggatatgcgctgttttactgtctgtcgccataatacccgccggttacggtgcgggaacgctgaatcaggcggctcagcagcttgaccggctggtgttgtatgatccgtcctatgaaaaaatcgcttatcccggcggggatgtttcaccccggaaaggggtatgttcggatgtggtgatccgcagttaccggaaaataggtatcgatctgcaaaaagaggtgcatgaagatatcaaaacggcgttttctctctacccgggccgtaaattgtggggacagacacggccggatacaaatattgatcaccgcagagtgcccaatctgatggtttttttcagccggaaaggagaaaccaaaccgatcacacaaaacgcggcggattatgtggctggtgacattgtgacctggcagctggataatggtcgtccgcatatcggtattgtgatcggtaaaactgcgctgttcagcggaaatccgctggtcatgcataatatcggcggcggacaggtcagtgaggatgtgctgttcagctggaaaatcaccgggcattaccggtataaagcagggaaagaatga

SEQ ID NO: 287791 - DNA, 348 bp, Morganella morganii
atgaacaaatatcgtgacaaatcagactttgagattaatttgcgtgtagctcagattattttcactgactctgaatacgacgtaattaaacaatcaatggaagttgttaaatttcagaatggaaacggcaaaggtatctgccatgttttcgacccctgcaacaacccggcggacgcattccctctaattatcgatgtgaaattatcaattcatcctgatttttataacgactgtgagtcatgggttgtcagaactgtccatattccgcctgttaaagataaaagtctgacaagggctatttgcattgcttatttaatgatgaaggatgcggagaatgaaaaagtatga

SEQ ID NO: 287792 - DNA, 159 bp, Morganella morganii
atgacaatcggatttgtattactactggtaatgcacggctctgctatgccttttaccgatgatatttatacgctcgaagaatgtgagagccgcgcagtgcaggtaatggctgtgcgggatgttgtcgtgatttgcggggaggttatccgtggagagtga

SEQ ID NO: 287793 - DNA, 591 bp, Morganella morganii
atgaacgaaagagattgggctgattggattgcaattggtgctagcgtgttgtcttcttttggtattttagctactatttttgtttattggttacaaaaaaaagatttagaaaaatcagagaaaagcagagaaaaagagatatccattagttacatgaatatattcaatgtatacgccaatgaactaaagataattgtaaatcaattaattatcatgcgaaacctattagttgaaaatgataattcatttgtggaatatattggcgggcatgacatacatatgttttctgtaaaagatatcacattgatggagttaggcaatcccagaatgtttaaatttgatagtacatctttatcctatatatattcaaattcagcctcagtaaatatacatatttcagaaaaatatctattcttatacaagcacagcattcaaataattacttgcattgagaatttaattttaacaattcattacgataacagcaaagaaaacatactgaaatattttagtgttttaagcttagataagtctatagatgaaattgatttatgcataaaggattttaataattactgccaaagcttatag

SEQ ID NO: 287794 - DNA, 234 bp, Morganella morganii
  misc_feature (213)..(222): n is a, c, g, or t
atgcttaataaaacgatgtatcatctttatctgtcagatgatcgaatatataactcagaagacgcctgtaaagaaaatgatttattatctgaatatcttacacgtcagcaggcagacaacttaaaaacaacagattggttccgtcgcagaaagaaatggaatattccttttcagtatcatgacctgaccatgatcagacagacaatacagacnnnnnnnnnngacttaccctga

SEQ ID NO: 287795 - DNA, 636 bp, Morganella morganii
atgtctctgcaattgtggatcgccaataaaaattactcttcctggtcgctgagaccctggtttttactgaaagccctgaatattccgtttgatgaacagttggccacctttgtaccgggcggcagcagttatgagaaatttctccgcttttccccgtccgggctggtgccgtgcctggtgactgcggataccacggtctgggattctctggcaatctgtgaatatattgcggaggattatccgcatgtctggccgcaggaaaaaaccgcccgtgcctgggcgcgctctgccgcggcagaaatgcattccgggtttaccacgctgcgccgtgagtgcccgctgaactgctcggaaagccgcccggccgcagagatgacaccggaattacagaaagagtgtcagcgtctggataagatctggtgtgagggattaacccggttcggtggcccgtggctggcaggggaaaatatcagtgcggcggatgctttttatgtgccggtggccctgcgggcacggacttatcagctgccgttttcagcggcggcacagacatggattgaccggatcctggcgcatcctgccatcattgagtggtgtgaggcggcagcgaaagaagcgaaaatcgaccacgactga

SEQ ID NO: 287796 - DNA, 438 bp, Morganella morganii
atggcgactatcacagcttatgacaatcctgctttaaattccgcgattcagaaatcgtggaagcgtttagtacccctgatgtttattttgtattttgtggcatttattgaccgtgtgaatgtgggctttgcgaaagatgccatgcaactggatatcgggctgtccgattccgcttttgcgctgggggcggggattttcttcgccgcttatgcactgttcgggatcccggcaaacctgatcctcaataaaatcggtgcacaaaagtggctgagtattacaacggttatctggggtgtgttatccgcaatgaccgggttcgtgaccaacgagacgcaatttattgtgctgcgttttctgctgggactgggtgaggcgggtttttatccgggaattttattactggcctccatctatttcccgaataaagtccgcggctag

SEQ ID NO: 287797 - DNA, 168 bp, Morganella morganii
atgaaacttcagaaagtattactctcagtagttctgggatctttatttgctgcgggtactgctatggcagaagatcctgtgcaaccaccagaagtaaaaagcggtctcggtaccgtgcattcctggatcagacagtggatttcggtgaaatcagccgtaacgaactga

SEQ ID NO: 287798 - DNA, 1440 bp, Morganella morganii
atgtttaaaaaaattaactttggcaaaagtgcaggtgaggaagaaagttcagagtatcctgcattattaaccgatggtttctataactttaataattcactagaaaaaatatccaatgaaagctattttttagttcagggttttaaaggttgcggaaagtcatctatagcagaaaaaatatgtattgaaaataaatcaaaacctaattttttcacagaactcatttatttgagagatttcccttttaaacgctttagtgagatatatccaagcaaagaagctgatgaggttaagtttcctaaatcatggcggtatttattactatccaagatattaaacaacataataaaatcgatgaaatcaaatcaatggagcgatgaagacaaaccaattagagaatcaatagataaactaaagtcattaggacttatatcatctggagatataaaccacctaacccttgacgcatcaaagaaagcatttaaaattaatttagccaatgtggttcaatataaaaatgaaaatatagagcataatgacacctatatattcttcgataacctaataaccatactcactgaggtaatagaaaaaacaaaaattggtgggattattttaattgatgggttagatgatgtaattctgaataatagattacaattaaaaacactttccgctttaatattcgaaactgggttcctaaataggttctttaagaaaggcaatttaaatataaagatatgcatattaatacgtgttgatttgtatgagagactacctagtggcaataaaaataaatcagctagagattcatcaattttaatgaattggtataatgatgtgatggatcacgaacaaactcatttagttaaagcagcgaacattcgaaccaaactttcattgggaaccggctattcattaagtgatttctttcccgaagaaatatcactttcatataacacaaacaaaaataccatctcatttttactggatcatacaagacatacaccacgtgatttttttcaattactcaagtcaattcaaaatcactataatccgtctattcctaatgctaaaatatctaatgatgaaatacttaaaggaataagagagtattcatatgattactttctgccagaaataagagatgaaattagtggttatatagatgaagaaatatttgaatattttttaacatctatatcaaaaataaaacagagggagtttaagtatgaaacactactagaaaatttccattcaaatggagaagaaataaaaaagttaaatgacttattaaaaaccttatttaaatgtagtgcaataggtcataaattctccgataataaatatgagtatgtattcagaaataaatatgcaaaattcgatcgagaaaaaacaatttgcctacatcgtggaatgtggaaagcactgaatttatag

SEQ ID NO: 287799 - DNA, 696 bp, Morganella morganii
atgcaaaggtcaactgacggtaaatcactatcgccacggctatatatagctgatgaagcaaaattttctcctactgagaaggatgatttacaggctttacaacttacagacataggttttgctgaagttttttttggtagttacccaattattgtcgagggtgatacggaacatgcagcctttatctctgcaattgtaaaaacgcaacatgaaatgtcaggtaaggtgagtattattcgcgctagaggtaaggcggttcttgtgccattaataaaaatgctgcatcattttaagactagttttgggattgtgcatgatattgattggccatatagaaaggatggttccaagaatggaatgtggacaataaatgaaacaattcgtaaagagatcctaaaatgcagggaaagtggtcataccgtttttcatcgctggagtatccctgattttgaacgttttctgggcggagatgaacttggaaaagataaaccttatgcagcctttaagcgtatatcttctgatgagttattgaaagagagagtgcaaagtcttatatcgagtctgtttgatggacatgattatgaccctattagatacgactcaaataacgattttatgtcccacattcttgaagaattaacatgttgggcaaaagaaaatgggcaggaaaatagtatgcgtattgttgggaaataa

SEQ ID NO: 287800 - DNA, 1059 bp, Morganella morganii
atgaaagaacaaagcattaattcatgggtcgatgaaaacttgcccaagtttgaactcttaggaaagcatatagcttttataattgagaacctccttcaacaaaatcaagtggactacctttctgttagttatagaactaaaacgaaggaaggtatactggagaaaattggtagaaaaaaatataaaaacccaacttatgagctaacagatatttccggtgtaaggataatattatacctagagtctgatatagctagagttagtgatgtgatcaagtccacattcaatattgacgttaagaatagcatggacaatgaaggcaggctatcctctgataaagtaggatatagatctgtacattatgtttgcgacattggtgaaaaaagaaacgccctgaaagagtatgagtatatctcaggcttgaactgcgaaattcaagtcagaactatgttacagcatgcctgggcagaattaacgcatgatcgtaattacaaacttggtgcaaacctaccattacagatccaaagaaaaattaatttatactccggcatgcttgaaattgcggatgaaggtttctctgagattgttaacgccattgaggaatataaagaatccataaaagataatgacttggaggaactattatctcaagaaataaactccatcaatctttcaaaatttgtacaagaaattagcaaaaaaataggtttggatttggttcctgtaaaggattggggtggttcaactactagtgatattatagaagaattagaatttaccggacttgacaattttaaattaattgcagattcaatccccgataattacgtcgagatatgtaaggtatactccccagataataacatatatggtttccttcgtgatgttatgctaattaataactttgagggtttaagtagaaaagaacctctaaattgggctttagtaggcgacgaaggcgaggaagaggctgaacatttgagagagttttattcccattttatgtcagcggaaaaagcttcacaattagttcatactttcgctgcaagtaatcaatag

SEQ ID NO: 287801 - DNA, 789 bp, Morganella morganii
atgagcaatctgattattgtcgatggtattaatgtgcgccgtgatatggccggtcgctattgcctgaatgatttgcatcgggccgctggtggagaggaaagacataagccgccttactggctgagaaatgcacagacagagcaacttattgccgagttgcaaatctgcgactcgggtacacagccggtaaatgtgttgcgtggtggcaccgagcagggcacctatgtgtgcaaagaactggtttatgcatatgcgatgtggatcagtccttcattcaatctgaaagtgatccgcacgttcgatgtggtggccggaacacagcaggcgatacagctggctgataaggttcaggccggagctatcctgctggagtctatggcgaaaacactgaatctctcgaattcctcaaagcttggcgggtatcagaagctgcaaaagatggctggtcttcctgatctggctccgtcctatacgattgatgcaccggcgggcgcggtggatggttccagcagaccgacaacatccttgactacactgctgaaaaatcacaatgccgcattgtctgcgaccagagcatacaaacgccttgctgagctggggattgtggaacagaaagcccggccaggatccagaggcacacagcgcctgttctggtcgataacaacgcggggactggcgtacggtaaaaatatgacatccccggcaaatccgcgggaaacgcagccgcatttctttgagagcaaatcagcggaacttctggcactgatgatgactccggcggtggcctga

SEQ ID NO: 287802 - DNA, 249 bp, Morganella morganii
gtgattagtttcaaaaattttaccgattgtaccgtcaacaggggcaacgattttattccctgccggtttgatggcaataccatcgccgacaattttttcagcgaaaacaacgtcaggcacgtcttcgatattcacaatctcaccggacagcggcgccacgatgtcaatcgtgccgctgtctttcttatcatccgaaaccagcgacttcagtttgtcaaacagacccatgaatactctcctaaatgttga

SEQ ID NO: 287803 - DNA, 186 bp, Morganella morganii
atgctgaatattatgaggctcaaaaccgggcagctctgtatctctgtatccgataaactcaataacatcttctgtttcccggggaagggtcattccgtagtgaatataacgtttgatatgaaccagatcattatgtgtgaatatacccgcaggccggaaagtatcgtcttcttcattcagaagtaa

SEQ ID NO: 287804 - DNA, 975 bp, Morganella morganii
atgaaaaaatctgaccgtaaacgccgtccggcagcggataagccggttcgcgatatttatcaggaagtgactgaccgtattgtggccgcgctggaaaaaggcacccgtccgtggaaacgaccatggcggccggcggaagggacaggcaccggttttccggtgaacgccctgaccggtcattcctaccaggggataaatgtgctgctgttatggttgtcggcggcggagcagggctttggttacgatatctggctgacttaccgtcaggcacagcaactgggtggccatgtccgtaaaggcgaaatggcgacgaatactgtgatattcaaaccggtgaaggtgccggcaaaagaccgtcacggtgagctgctgcgggatgaacacggtgaggtggtgatgacggaggtgccgatgataaaggcgaatccgttatttaacatagcccagtgtgatgacctgccggcgcatttttacgaaaaccggcgactacccggagaggagacagcagggataatcctgccggccacgcaccgggtgctggatatcctgaatgccagcggcgtgaaggtgaccagtgcggcgcagaaccgggcgtattacagtccgtcacaggaccggattgtgatgccgctgtcgtcacagtttgaccggaatgccgattaccaggccaccttactgcatgagttggtgcacagtaccggtcatccgtccaggctggcccgtgaaggcatcacctcatcgtccctgaagtttggtgacccgctgtacagttttgaggagctggttgcggaaatgggcagcgcttttctttgtgcgcagttaagcgtcgagggagaagtgaaccatgaaagctatcttgacagctggctgcgggtactgaaatcggacaaaaaagcgttgttccgggccgccgggcaggcccgccaggcctgtgagtttttactgaatgtggccgcatcccgacaggccgcgtag

SEQ ID NO: 287805 - DNA, 300 bp, Morganella morganii; identical to SEQ ID NO: 14540

SEQ ID NO: 287806 - DNA, 234 bp, Morganella morganii
gtgatttcagtattggtggcaaattcgaatgaattttaccgtgcagggattggtgccattatcacggcaacaccgggtatgaaaatggcgggggaggtcagggacagcaccggtgcagtgcgctggtgccgtgataatcatgcggatgtggcattgcttgatatcggttttccggtgatgagcggcctggaagctgcaaaaaaatcacccgctatacctcagaaaccaaagtga

SEQ ID NO: 287807 - DNA, 324 bp, Morganella morganii; identical to SEQ ID NO: 279134

SEQ ID NO: 287808 - DNA, 1227 bp, Morganella morganii
gtggatggttttgcagaaaataataccatcactaacaaagccactaaccgcggtaagcaggttgtcggcaaaaacggtactgccggtattaaaaatgacattaccaacggcagtcagtatgtggatggtcttgcagaaaacaataccatcaccaataaagctgataaacgtggtgagcaggttaccagcggtaccgccaacaataacaaactgaccaataccaatcagattgttaagaaaggcggcctggccaccgataacacccagaccggcaattctcacttaagcgttgaaaatggcggtgaagcgaaaaataacaccctcaacggtgatatcgatatgattgttgaggccaatggtaaagcgaccggcaaaactacttttaacggcaaaaaccatctgcatctgtatgcggccaccaccaatggtgcgtatgtggaagatcttgctctgagccagaccaaaggcaaaagctccgtcaccgtttatgaaggcactcaggaacacgatgccgtcactatcggtaccttaaacggtaaagcagcggtgaattttgaccaccggaccaatccggcaggccatactcagatgaatatcaataatctgggtaacaatgatccggcgcagtatgataacaccacgttagatttcaccatgaacagcaatatcctcaatggtaattctgactttatcaatactgataatgcttatggtcagcactatgtcaccatcattgagcggggcaccggtaaagaagccgttctgaatcgccttcagtctgctgatttcgcatatgtgaaaaacgtggccggtgacagcaatgcggtctttggtatgaaggatgcggacggcaaaatcctcaacctgatggatgccggtacttacattcataatattcagacccgtaccggtgccgataatgacaccacatggtcattcactgcaaccgatcgcctgacaccaagtgcccgtgcggtactcgcactgtccagtgcgccgcagctgatgtacaacaacgaagttgatcatctgcgtgcacgtctgcatatgctgcgtaccagcgacagtattgagaacggtctctggatgcagggtatcggcagcaataccaaagtggataaggatcagattcagtacaaactcagacacgccggtctggaactgggtgcggattatcagttagcgttaaacagtgacagcaaactggttctgggtggtttcacctga

SEQ ID NO: 287809 - DNA, 324 bp, Morganella morganii
atggatgcagcaatcaagagccagacttcatttaccagcgaactgggtgtcaatgccggtaaagacttcagctttgataacggcctggtgttctctccgtatgtgaaagcggcgtggaatcatcagtatgaagacggtaacgaagttgaatttaaccgttacaacaccattaacctggatttatccggcagtaccggtaaattcggtgccggtttcaatgcccgctacaacaacgtgaatatgttcatgaaattacagcacattgccggtgatgcagtttattcaccaatcaacggacagattggtatccgttataacttctga

SEQ ID NO: 287810 - DNA, 192 bp, Morganella morganii
atgcttaaagaaacatctgacaatcttgatcggtattacaccgacagccgcgggcggaaagttcacgttgtccggtttgaccggcaaaacagccgggtgattttcatgcgtgagggctatgaacatccgtgttttgaacctctgaaaacctttcaggagcggtatacacgcgtggatgaggtgaaaccatga

SEQ ID NO: 287811 - DNA, 261 bp, Morganella morganii; identical to SEQ ID NO: 281711

SEQ ID NO: 287812 - DNA, 360 bp, Morganella morganii
gtggtgcagttttattctgaactcagtaaagccgatccggaactggcggaaaatatccgcaatcgtacactgtatctggtgggcggaaaaaatgccccggtgatcccagcgggacaagtggcgtctcagtggctgattcactctcatcaggcagatatatttattggttaccggcactatcagaaaaaaatgtcagaacttcccggactcgcgacaatagctatcccggaggcgcataatgtcaaagcaatatattgtatggccttaatgtcgccgatagctcagacttttgctgattacctgttacagactgaatcacaacagatttttatggaaaatggttttgtgtctcttagttga

SEQ ID NO: 287813 - DNA, 537 bp, Morganella morganii
  misc_feature (481)..(490): n is a, c, g, or t
atgcaactactgaataagtctattattgttggtttagcatcaggagtactctgggcacttgatacaatacttgtagactataatatatcatcagtcgatacactaaaatatgctattcttttctctatttgtatcgccttccttcatgacctattctcatcgttatggttattttcgtttataactctatcaggaagaagtaaaaaattagttaactccctgaaacaacgagatagttacataatctgccttgcggctctcagtggtggccctatcggcatgagttgttacattttaggtatctattacagtaacgcttcaatagccgctactatatccactatttacccggcattaggttgcttgtttgcttatatatttctgagagtaaaaacaacttttgtaaatttcctgggacttttactggttattattactactgcatatattggcctaaaccttgatagttttaaccaaatannnnnnnnnncgcagtgggctggggactggaaagtaccatttgttcttatgcattaa

SEQ ID NO: 287814 - DNA, 132 bp, Morganella morganii
atggttaaccagtgctttattcgaggtatcaataggcaccaggatattcttgtacatattcttctctccggttttattctccacgatcaaatgtatggcattattgatcaaccaagggaaattatcgagtaa

SEQ ID NO: 287815 - DNA, 327 bp, Morganella morganii
  misc_feature (286)..(295): n is a, c, g, or t
atggacattatgcgggagcatccgtttgatctgctgataacccgtctggatgaacatcatgatcgtaatccggtattagaaattgaggataaacctgtagtatcaatcactcaggacaggttaaaagaactctatctggaacataagacggtaaaaggtcatttactcggccggtttatccgcagggatatcctgacagatgatatgttccctgaaatttattgctatgaagatgtggttattacagcaaatgttatttgcgctgctcagaatattctgatcacannnnnnnnnnatcacagatactcagatttattgctactataa

SEQ ID NO: 287816 - DNA, 213 bp, Morganella morganii
atgtcagccgccacgtcaaacctgttccagccgtataatgtcggtaaatttaacctcagtgcagctgtcggcggatataactccgaaaatgcggttgctgtcggcagcggctaccgtttcaataaaaatgtggcagttaaagccagcctggcaacctcaacatcaaacggcggtgatgtcatgtatggtgccggtatgaacctggagtggtaa

SEQ ID NO: 287817 - DNA, 186 bp, Morganella morganii
atgatcatagataagctcatatggggcaacccagtaccaggatacccgtcactgcttgtgtctattttgttcctgggtggtatccagttaatcgggataggtgtgcttggtgagtatattggacgtatttatactgaaagcaaaaagcgtcctaaatatttacttaagggtaaaaagaatgactaa

SEQ ID NO: 287818 - DNA, 258 bp, Morganella morganii
gtgaattcagccggtgaaggggctccggttgcacattattctgcggatgaaattcagtcattattttcggcacaaatacaggggtcggtggataaatacggcgatagtttcctgacggatgatccgtatgtactggcggaagacaagctgcaaacctgtcagatggaaattgatttaatggcggatgtgctgagagcaccgccccgtgaatccgcagaattgatccgctatgtgtttgcggatgactggccggaataa

SEQ ID NO: 287819 - DNA, 777 bp, Morganella morganii
atgattgatagagtcaatattaaagataatatgggggcgttagtgaaacatcctgaaattacatctctatttaaatactgccctatcggtaagaatcaattgagtgctcttgcacaacggaaaatttggtactcaaaaccggcaaaatttaatgatccttttgacaccaaatttactgtgacagggagaaggcatgtgttcgaacaggaagtggactctcaaaaattatctcacatttttggtgaagacatgtctgatgcgatggtttttcaaaaaaaacctcttgatgaacatttggtcacttttcagagtggtatagaaaatttaggtattctttcactagcaagctgtgagacaaacttactaatgtggtcgcattatgcttctgcacataaaggcatgtgcttagaatttaaacgcgttaataatacagccttagcagacgatgaaaaaacaaaacctatgaggtataataatagttatccatcgatacaagcaacttctcttttaagtgaaacaagtgctctgtccaataaaataagaatattacacacaaaatctaaacattgggaatacgagcaagagtggagacatatagttgaacagggtgataagttatatccttggccagcagcattaacgtcgatctattttggatgcaaggcagatatgtcagatataaatttggtaaaaagtattattgctgatataaatgttaaatactataaagctgaactatacaaggaggaatttggtatttattttaaagaaatataa

SEQ ID NO: 287820 - DNA, 1098 bp, Morganella morganii
atgaaacgactgattaggaatccaggaaagttcgaagcactggaggtgtttacagcattcagccgtgagcacgattataaactgcaatcaccagaagatactgaaaagttccttaaacagtttggtgaatcactcaaagtttcgcagcaaaatcagattctgcttcacggtaaacgcatggaagcatgctttggtcaagttgcagccggcttgcatggctgccgtctgataaaaagtgaagatactggtgatgtcatttctgatgaaaccgacattttgttgcctgattatagactggtactgagggacggtacgcaaatatttgttgaggtgaaaaacagtgctctccttaatcctacttcaacatatctacttagaaaggattacgttgaaaagcttcagagttatagtgagctaaatggcatccctttatattttgcaatatattaccgttgtctcagagtgtggacattactacctgtgagttcttttattgaattgaagcataaatacaaaacaactccaatacactctcttgcacaaaatgaaatggcaatgcttggcgatatgaatattgggtcgaagcctcctcttgtctttgaattggtcgctgataggacaaaagatatttattttgatgaaaacaatcgttctcggtttatatatgatgatttgaggatacactgtgacgggaaggtaattgaagagtatgaagagaaaaaaattgcgttttatttgatgcgatttggtcagtgggaatgttgtggaccagaggtggtaatgaatgatgacggaaaacttgatagtgtgcgtttcatattcactcctaaatctccagaggaatttgagcagaatggctttgctatgttaggtagcctcagttcaatgataacagaagcattcaacgagcacactgtatatgataaagaggtcactgctataacgtcgaaagctgatccagacgtattctctattgtgattcccgaaaattacaaaggtaaaactcttagtttgtggcgcttcgtgatggaagcaaaccatgattttaaaatagagcctgaggatataattcattacgaaaatatggcggatacataa

SEQ ID NO: 287821 - DNA, 948 bp, Morganella morganii
atgacctttattgactggctaatgctaaatcaacacaatgacaacctagtcaaggctatcgaatcactgcgagcaaccaccgattatgtaaaagaatatgttttcccggttgcgattgcatttgcttctgcttttttcggtggattatcggctgtctacatcaatagaagacaagaactacaaaaaattgcaagagataacttagtagcatctatacaggccatagctcttgcacaagattgcttgagtaatttggtatctatcaagtccaactacctcgagatagacagtgatgagccattaatcagagctgctaaatttccaacaataattactaagtttacatatgtagaatttaacaccaacagcttgtactttgtccgacaaataccaacagcgaacaaaaagctaattgaatcctttatgtggaaagtcaaacatcgtattttacgaattaagataaaaataccacaaccagaagagttacggggaacatggcgtaactgtgtcagagttagctctatgttcaagaactataatgaaataatgggattacttcattttaggaatgaactttacgagcaggtcaaagataagatttcgatgtacgatgatggactaacgcttgaacatatccgaactattcttggtaagaagttatgcggtgggttaattgatataactgagacttctatagcgttgatagatcatgtgatgtttgagttttatcacttcttgttagagtttccggaagtagcagagagtaacattgagttaagcaggatcagggaatggggaagtgtaccaacctacgaaaacaatcaggatgcatttttgaaatgtatggaaccgattaagcaaccagattttaaaaaattccgtgtctacacaggtatgacagaacagcaagcacgaaacaagtatactttcaagtcatggtctgactaa

SEQ ID NO: 287822 - DNA, 495 bp, Morganella morganii
atgaaaaacatagccattgcactgattgctctggctgtctctttcgctgccggttggttgaccggcggtgttctgcatgataaccggcagatgaaagggcagatcaccggtcatcaactggatgaaaaagatgtggtcacaaatatcgagctacgccatcaggcggatgaccgccagcagataaatatcggggaatatcaggaggggaaaaagagtgatacgatacgcacagacgctctgcttgatcgggtgtttaatcattttgaccgcatgcagcagccaaccggtaccgcgaaagcagaagttacagatcccggttacaccgatacctgccgaactgagagagacaaagccggtgaactttctcgacaactacgaagcacacttgaaaagtatgggcgtgaagctcagcgggctgatgagaatacccggctccttaatctctgtatcattgacctgaaagcgaaggaaaaactgctcgaaaattactggtga

SEQ ID NO: 287823 - DNA, 459 bp, Morganella morganii
atgtcagatcaggttaaacaaaaaatctttaaggatggtttcgttaatacaggggcgcgagggatccggaataacaatccggggaatatcgactatcacgcgtcaaataagtggcaggggcagttgccgttcgataaatccattgagccgcgcttctgtcgttttcagtctcatgagtatgggatccgtgcactgatctcattgctgcgcaattatcagcgtaaatacggactgaaaaatatcgccggtcttatcaaccgttgggcgccgaagaatgaaaaccagaccggggtatacatcaacggggtatcgaaagagctgggagttgcgccgactgataccatcaacatgatggacaaagccacggcgatcggtatggctaaagccattatccggcatgagaatggtcagcaaccgtatgttgatgaagtgtttgaacgtgcctgggtacttctgtga

SEQ ID NO: 287824 - DNA, 273 bp, Morganella morganii
atgcttgagaagctgttaatcatcctgaatgccgcgatctgttcagtgatttttgtccgggtatttacgttcagacgtaacgggcggcagcactgcacaaaaggggcatggatagcctggctcgtactttcatactcagcgagtgtgccggtgcgggcgtactttgatcccatctatcacgctgatttcaccagcgtgatttcaaactctcttatttgtgcagcggtgctggtgtaccgcggcaatgtcatgtcattttttaaagcggggtga

SEQ ID NO: 287825 - DNA, 927 bp, Morganella morganii
atgagcttaataatttatatcattatttctttatgtattggtctttgggtatgggtacagcgtgacaagtttatattgaactcagacagtttacataaacaatggctatttagattagctattgttttccctttagcttccagcttgtattttatagtatggctaggtgcatcatacccctttagatttgatgcttatggatacagcacatttctggaaataaataaattctcattgggaatattagctttatctccaatattaggcgcttttgttgtatatgcacataggtcaattcaaactactaagcagattgaagtaactgagaaaaaaaacaaagttgatatatactttagtactagaaaatacattaatgaacaattaaatttattcaaaacaattgacaatgaagaaattcaccaaccaaatgcgctatataataaagcattcaatctaacaaacaatcatgaagatatacctaataaagaattctttgattacattaacaatagtataaagactttagctgattcattcttatccgtaagagataacataattgatatccgtttatttatagaaaaaaatgaattcagaatagatatttccacaatcaggatatcacatcaaatgagtagcttaaaaaaatatctagatataggaagtaattctgaatttgatttagcatcaaaatgtattgattatcttaaaagacatgatattgaaatactaaatgagaaaagtaatttttatgaattcaactattcattacttattgcaggtgaaatttattctcttttaaattcaataaaggaaataattttaatattatcttcagaaaaagatattgataccgtactacctagctttagctatgctttgggttcttgtactctaaaaagcatgacggtatcacttgctgaataa

SEQ ID NO: 287826 - DNA, 264 bp, Morganella morganii
atgaccatacctgcacctgtttttatgccagcagattccggctccatcgataacgcagtaattcaggataaatatatccggaaattcatagaaaaagagcgcgctgacgaacgccgcacccgcgcggatggttttgcttcccgtctgcgctttctctcaatgatggctatccgtgaaaagctggattacagcgcaatagcgcagttgcttgaaagtgaagcgagtgagatggagagacagattcaggagtggaaccatgcctga

SEQ ID NO: 287827 - DNA, 222 bp, Morganella morganii
atgcctgatgaaatcgattatgccaatgaccacgccgcgcttgtacttgagcggaatatagcctccgcccgtattactgccgtcggtatagcagcgtttgaatgtgaatgctgcggcaatccaatccctgaagcccgccgccttgctgtgccgggctgcaccatgtgtattgattgccaggcaacccatgaactgaaacagcaacattaccggagcgtgtga

SEQ ID NO: 287828 - DNA, 807 bp, Morganella morganii
atggcagagaaaacaatcctcaaatgggcgggttcaaaagtcggcattatagaacagctgcgcccgtacctgccaaaaacaaagcgcctcgttgaaccgttcgccggttcctgtgcagtgatgatgaatactgactatgagcagtatttaattgctgatgtgaataacgatttaatcactatgtatcagcaaatagcgtcagataacattgatgtggttttatgtgtatcacgtaatctttttgatatggaatcttttcacccgggatattatctggaaagggatttttttaataataataaacgtgtattgctaccagagtttatcgcagcatatttcatatatttaaaccgtcactgttataacggattgtgccgctacaatcagtctggtggttttaatgttccgtgtggaaattataaaaagacttattttcctgaaaaagaaataatcactttttcggataaggcaaatagagctgacattaaatgccaaagctgggcagaaacgctgttgcagacctgtgccggtgacggtatttattgtgatcccccttatatgggcaccggttttacccggtaccacaccgaaggttttaatgatggtgatcaggccgctcttgccgaagcgttgcaagccctgcatgccaccaaaggcaatccggtcacagtatcaaactcgctggccgcaaaagagctgtatgcagatttaggcttcactatccacgaaatagaagcaccgcgaaaaatatcggcgaacggaaaccgcaaaccggtcaccgaaattattgccacactcggggcgtaa

SEQ ID NO: 287829 - DNA, 357 bp, Morganella morganii
atgaaaatgaattattacaaagataaaacaaataaagtatgggcgtatgacgatgaacaagtccgggagggatgggtacgtgatgggctcttgaaaatatccgagtcggaagcaaataaaattttatttccggaaccgacaaaagagcagttaattgaacaggcagaggcaaaaaaacaattcctgatcaccgaagctacacaaaaaacccatctctggcagacacaattaacgctcggcatcatcatcactgaagacaaagccagcctcacagagtggatgctgtacgtgcaaaaagtccaggcggtagacacatcctccgctccggatatcatctggccggagaaaccggaatga

SEQ ID NO: 287830 - DNA, 612 bp, Morganella morganii
atgaaattaaagacgatctcagcccttgcggtatccgctgttgttctggccggttgccagaatatgaattatgacaccctggcacagtccggcggccagttatttcaggcggccaccttaaccgatgcggatatggtgaaactgacggacggtgcctgcaaagagatggacgcaaaaaataacattgcaccggcctccggaaaatacgcggcacgcatggacaaaatcgccaaatcattaggttccgatgtgaacggcacaaaagtgaattacaaggtctatatgaccaatgaaccgaatgcctgggcgatggcgaacggttgtgtccgtgtttacagcggcctgatggatatcatgaatgataatgaaatcgaaggtgtcctggggcatgaattaggacacgtcggcctgggtcacacccgtaaagcaatgcaggttgcctatgctgcggtggcggcaaaaaccgcggcgggttcagcgggcggtctggccaccgggtttgaaaagcttgcgaaaatggataaagggcagaacagcatatttgattctcacccgccgaccgcagagcgcgcagagaatatccgcaaccggatcgcggcagataaacagtaa

SEQ ID NO: 287831 - DNA, 918 bp, Morganella morganii
atgatatttcttaagacagaaaatggatctgtaaagctggataagtgggatagcattacctctaaacccacatttcaaaaaaaactctcaaacgaaaaacacacgcttgagaaaataatcggttactacgaggttaaagaaaaagttcattgctcactttcaacctgtaatcagcctcacaataaaggttatatagtagtaacatcagaaaatattgagactgttattggtaataagtgtggaaaaaatatatttggtattgagtttgatactctctcttccgatttcgacaaattccgattacacgaagagcgcaaagctattatcgcgcaagggaagataaaatgtccggcctggctatctgagcttgagtcgcttaagttcaaaggcagagacatattatgggcaaccataaatatagaaaagctatcgaactcacgattcgttggtcagactggcgcaacagaaataagaaatatagcaaaaacacaaaattcagatattagttatgacacctcaaaaattgataaaaaattaaaagaattattatttacgttcaacagggattttcaagaaagtggagaggccctacaatcaatacacattggtaggatgaggaatatccacgtcctcatgccggaaaataatctaaaatctctttattcatctatttatgaagacattcaacagttgaacggtatcatccctgatgaatctccaagcccattgctggcagaaacatcacaaagaaccaacaccatcgaaacaaggcttagtcagctaaaagtattgttcaaagatgccaagttgtttctgcagcgaaaaaacctgaatttaattcaggagaagctaaataagatggagaatgtctcatcagaagacaaatcagcctttcaagctttcttaaatacattgtaa

SEQ ID NO: 287832 - DNA, 687 bp, Morganella morganii
atgactggacaattagacgaagtagcaaagcagatcttgggaactcttttggtagatttttctgaccgagggttaacagctaaggatttaaaaaatgggtatcaaggacctaatattaaggcattagctactgcagtatgtagcatggctgactttaatacagtcgattttgatgttgcatttggcgaccttgaaaaaaccaagatgattaaaactggcccaatagccatgatggagaacgatccaaatagtcatgttgtctttattgggacatatagtaaacgcgagtatgtttatctgactgaagctggttataaagagtctcggaaagccccaaaccgtccgaaacatattcagcgcattgttaataatctaaccattactggtggtcatttcagcaatacgcagttaggacaaggagaagttgtatctcagtctcagagtgttacaaccaatacgggatctgaggttgtcgcaaagctgatttctatccttgaagaaaaaggacaagtcgtgagtagtgctcaacgttctgaaattgcagcagttgtgtcagcagcgaatgaaggtgatggcaaacaagccaaatcgttactggcaaaagtctgcggtccgatttgggaatctgttcaacccgttatgtggcctattgttggtgagttagtcaaaaaaagtcttgggttgtaa

SEQ ID NO: 287833 - DNA, 2214 bp, Morganella morganii
atgaccgtatcaaccgaacttagccatgaagagtacaccggcaacggtgttaccactgatttcgacttccgcttccgtatctttgaagccaaacacctgattgtgtctgttgttgacactaacggtaccgaacgcattctgacgaacggtactgactacacgctgcgtggggtgggtgcttaccgtggtgggaaggtaatcttaaaaatgccgttggcgcagagctggaaaatcggtattgcccgggatctgccggcagtgcaggaaaccgacctgcgcaaccaggggaaattttttgcagaggtgcatgaggatgcgtttgattacctgaccatgcttattcagaagtcgctgagctttctgtctctgtgcctgcgcaagccgagctttatagctgatcactatgatgccaaaggcgataaaatttctaacctcggaaagccggtaaaagacggtgacgcggttgatctcggcaccatgaaggagcacatcggcgcgaaagataaacgctctctgcgtgtggctgataaggatattccggtgttgcctaatgccgccaaccgtgccaataagttgctgtcatttgataatgacggaaatccggttgttgctgtgccggagtccgggagtgcggcagatgtgctggttgtactgggtaaatctgacgggttcaatctgattggcgggctgacagaaaactacctgcgcgtatttgataatgtcgctgatatggtgacagaaactaaattgccacttggcgctaccgttaaggctcgcgggtactacacacctgatgatggtggcgctggcgtttataccatcacaaataacacacctgatacactcgtaaacgtccgtcttgataacggcttgacggcaacactggatgttaagagtggcgtagatatcctgtcagtaggcgctcaggccggtactgatatcggcagtattctggttggacttcaggatattgcagcagtgaagactatcctgatccccaaaatgtcatttgattgtaatagccagattaaggttaagaagaacttccgcttttctggaggcgctcagttaattaaccgaaccctgcgtgatgactggtttgtatttgaacatgataatatagaattcagcacggaagggtacgggaataaagcgcggattgcagttgataataaattgactggctggaattatgcagttgcattggttttgggaaaaaataacctgagaaacttagccatctgtaacgttaacttatctgggtgttatgctgatttttccggtacggctttagaattaagggctgatttaagtagagatggtggacaggaaaccgatccatctcagccgggtcgtaaatggaacagtatctgttggagcaaatttaataacttaactttgggttattgcaatactgggttgcgcgtgacagcgtaccaagcgaaaaaaaatgatgtacttggtcctaatattggtgatggagggtcatggatcacatcatgccaatttaatgacgccaagatagatggagccaggaggggggtggaaatatcctgcattcctattaacgtgggaacttacccatataacactcaagttgctgaaataaaggtttattttgtacagcaatggatgaatgattcaaaagaggctgtttatatcgataacgctgggcaaaatagggtagagttttttgcctgggattatagtggttatcctactaaacctggctatgctgtggtcgttaaaggtgatgatgggcgcgataattttatttccgggaatatggctcttaagcatatttctttttcatcacaccagaacacatataactcgttgtatagaaccatggaatataaacctgcgttacatcgacgcgtatgtgcaataaagcattcaggatctggtgcgtatgaaattgagcgcgggtaccatgtttctgctggagtgaatggagtacacgtttccccaactgattcactggcattgattgttgaatatgagcctggttttgataatggcatgaatccttatgttatttgtcaggataccaataatactaaaggatactcattaaaacctttttataatcaaggaaaggcatcggatgggaaagcttggttctatatcgttaagaatagcggtggaacagtatcatcgttatctgaagtgccggttggtgcaatattttttattgagataatttgtatgtaa

SEQ ID NO: 287834 - DNA, 573 bp, Morganella morganii
atgaatgatgaattgttgcatgaattaataaaagcaatttctgaattatcaaaggaagacagtctttggaaaatattaacaccttcaatttcaaccatacttggggctttacttactggatttttggcctttatgggtgtttcgcggcagatcagtaaaaatcaaaattattcagatagacttttttataacaaaaaaagagaagatatatatctactggtaaacaaacacaggaagatgctcgaaagactgtatcaatgcgccgtaataaatgtcactctactgagaaaagagttagcgtcaatacccgatacaaatgaaaacatccagaatatcaatatgataatatctatatatttaggaaaaattcataatgagcgacagctattcaatgatgcaaatagattattgacagatttttattatgattttgccaatggcaaaatttattcaagtggtgtccttccagaaaatacaaagactgagttgtttcagatgcatgaccgatgtttagaaatattaggccatgtgcaagaacgcgccgttaactacgataaaatattggataaataa

SEQ ID NO: 287835 - DNA, 651 bp, Morganella morganii
atggaaattatattaattattgtcggcattgttgcagttattatttatcttattaatcagaataaaacccgcacttctgatcgcaccatcgtgacacatcaccgaaccattaaaaccgatgacggtgaaataaaagtacagcgtactcaggttgtagacagtacatccacgcaataccacggctccaatactcccggcattgcaaaacagactgagtatgacctacatacaaccaatgactacaataagcagattaatgtaacacctccgcagactcacgctctacaggaaaaacctgctattgatgtcattccggttcaggtgcaacgccctgtcattcatcagccaatatctgtagcaacgactcctgcgcgtcaaattgaacaatcaaaaccagtggaagccgacaagaaaaaatgccctcgctgttgccgcagtctacagtttgataaatacggtaaatcacagaagtataatgatggtatgacgctgtggtgtcttgaatgcctgaaagcccctcgtgacacaccaaaaatgaagtattgccctaagtgcggaaagcgtcgatataaaaccagtttttgtgctaacagtaagcgtaaagatggcctgacgctgtggtgtaaagaatgtatggataaatcgaaatga

SEQ ID NO: 287836 - DNA, 420 bp, Morganella morganii
atgtttggactattccgcaagaaagaaaaaaatacattagatgaagttgaaaggatggcaaacgacctcgggttttctgtaaccagtgcaggtaaagccctgtgctttatgagccttaaaagtgactacagtagctcggaaacgctatcaaatcttctcgttattcatgttgcaaagcaaataagcgaattaccattaaatgaaattatcactgaaaatatgatgttcacgcttaataattttgttgcatacatcaacgatagatatagtcgtcgctatataaaaaagtttttatatgaaaatgactttagagccatcattacaatgatcgcgttagatagtaatagtttagctcttgctgataaaatagttgagcagaataaccctataagccagtctattctgctctctcctatttag

SEQ ID NO: 287837 - DNA, 3396 bp, Morganella morganii
atgccgctatatgaatttaatgacgaatctgtattacccgctaatgtcaacgctattcagcagcccgatccggtctacggtaacaatgaaaaaccggcatggtatgccccggttaatccgtttgatgacagcaatgaaacaaagcaactgcgggaagccgcgttccgtattgataactcagtcggcagcctgatagccaccattccgtttaaccagtttgaatctgtagaggggtataacccgtttgaagatgataacactctgtctggctatgaagattacgctgatgcgtttattcactccggatcgccacaggagacgtcagccataaagcaacgcatcaaccgtcagatgcaggacagaacgttgctcagtgaggcaggcggggcgggatttaccagcagtctggctatgggtgttattgacccgataaatgtggcagcgatgtttatacccggaggcatcgctgtccgtggcggcagtgttgccggaacagccggtacctttgcattatcaaatgcagctgccggagtggcatcagaatctgtacttaacgccacacaggaaactcgtaccctgactgaaagtgctattaacgtcactatggatgccgcactcggcggtattatgggatcagcggtacaactggtaaaaaaccgtggtgcacttgcggggaagttccgtaatgatgtgatgggtgaacaacaaccgcagccacaaaatattccaaataatattcctggtgacagaagcatcggcgcagctgaggtatttaataccacgctggagcaggaagctattaacggaccgtcatttattaataaaactatgaatgtcagcccggtcggtcgtgtggctcagtcaccatcaaaaatcgcccgtcagattaaccagcaacttactgaaaataattttacctacgccaaaaatgaagaggggatcgcctcgtttggtgcggtagaaacagctgtgcgcggctatgacacgctgatttataaacaggttgaatctacccgcgatttttataagcagtataagcaggctgcccgtgctggtggtgatacaaaaatgagccacatcgagttcagcgaagcggtcggtgatgctatgcgcaacggcgataatcatgccataccacaggtggcagaggcagcacgaactatccgcccgattgtggagcagactaaaaaccggatggttgagctgggtattctgcgtgagggtgtgaaagtcaccacggctgacagctacttcccgcgtatctataagttcgacaagatcctcagtgaccgctcagaatttaaaggcactattgcggactggctcggtgagatgaaccagatagcggtcaataaagcacagggcagcctggacaaagccagcgccggattagaacgtgccaaccgtgcgcgaccggcagcggaaaagctgggtgctgaaattaaagaagcggaacgctggtcaggcaaaaaagtcgaattgctgggtgatgttgataaaaatgtaaagctgatcagtgaaaaacaggcggttacagcagagataaacgcacttaataacgcgggtaagcagacaaaaaaacagcggaaccggctgtcgcaactggagaaaaaactatcccgtatcgaggatgccgaaggtaaattaccggcattgcagcgtaatcttgagatcctggataagccacggcagttccgtaacgaacatgcacggctgacacgccatgccaactcactggcccgctttgatagtcgtcgtcaggcagctttacgccgcatgagtctgcttgagcgtgaagaactggaagccgcagcggatgatatcgttaacaaaattatcggcgcacctgccggtattgtgccgggtgaattgatcccggacggattgacaaagcatgcaggctttaccaaatcgcgcaccctgagcattccggacgagcggataaaaaactatcttgaatctgatgttaattatgtgattgaaaactacgtgcggcaggttgcccctgaaatcgaactgacgaaaaaattcgggcgtgttgatatggatggtcagacaaaagccatcacggaagattacaatcgcctgatcgcggaagccgccacatcaaaagaacgggcaaaactggaaaaacgccgtgatgcagatttacgggatatcagggcaatgcgtgaccgcctgctgggaacctacggcgcaccgaaagatccgtccagcttatttgtccgtgctggtcgcatagcgcgtcatgttaactttcttcgcttgctcggcggtatgactatctcatcactcccggatatggcccgtccgattatgcagcacggtttgcgtaccgcactgaaaccattgggtaagatgctgactgacatcagcgccatgcgtatcgctaaggctgatttacgggaaatgggtgtcgggttggaatatgcactgtccagcagatcaaaggtaatcgctgatctgaatgacccgtatagtcgccgcactttccttgagcgtgggctggaatggtcatcacagaagttcggtaacttcaccctgatgaaccagtacaccgacactatgaaaatgtggtccggtctgattacgcaatctaaggtactcaacgctgctaatgcggttgctggtggtaaagcactgagcaaaggcgagcgtactaagctggcacacctcggtattgatgaatccatgctgcgccgtattgccgaccagaacagccgccacggtgaggatttggacggtttgttaacgggtcacagccatttgtgggatgaccgcgttgtacgtgaggcattccagtcagcgattctgaaagatgtccgtaccgcagtgatcacgcccggcattggtgacacaccgctgatgatgagcagcgagctgggtaaaatcgtgatgcagtttaaaacgttcttctttgccacccataaccgcgcgctggtgtccgggattcagtccggtgatgcatcgttctactacggcgcattattacaggtcgggctgggttcgatggtctatgtgctgaaatctatgatggcagggcgtgaaatcaatacagagcccgccaacctggtaaaagagggattggattggtcaggcatgatgggttggctgggtgagcctaacaacgtattggaaaacctcagcggcggcacctacggtatgagcgccatgtttggtggtccaccagcatcccgctatcagagccgtaacggtatcggtgcgttattgggaccgacctttgaccttggcggcgatataaaaaatatcaccgctggtgttctgaatggtgaatttgatgatcgcgaagtgagatctgtacgcaagttattacctttccagaacctgttttatttggcaccattattgaatcaggttgaagatcagatgaaataa

SEQ ID NO: 287838 - DNA, 342 bp, Morganella morganii
atgtcacgatacagaattttaaagaaatcatttctcggcggacgtctgctttatcccggtgaagaagttgagttcaccggtacaccgggcagcaatcttgagctgattgtttctgatgaacaggttgcatcgcctgccggtgatggtggtaccgacactggtaaccacggtgatggcagtaacggttccggtacatcaggcggtgatagtggtaccgatgcggaattgactgcactgaaagatcagtacactcagttgtttggcaagaatccgcatcacaacgcgggagccgataagctccgtgctgatatcgacgcgaaacgtaaagagctgggggtataa

SEQ ID NO: 287839 - DNA, 675 bp, Morganella morganii
atgaacttatggcagcgcttaatgatgcgccgcctgtgtgaagaacagcacacagagggtggtgacaatggcggagcagcgacgggagcagatggcacacaaactggcgcggatacatcagcagctggtaacaaagattcttctgcaggcaatgagcagaacaagggcgttgatcagcaggccaaagaccagaaaaccgatgctgataaaccagccgtagccgcgccggaaaaatatgaatttaaagccggtgaagggcaggagctggacgccgaagcagttaagcaatttgaaccgattgccaaagagctgaacctgagcaatgaccaggcacaaaagctggtggatgtgtacagcagcaagatcatgccacagttggttaagcagcaggcggaacagtggcaacagcagattgaacagtgggcggagcaggttaaggcagataaagccctcggttctgaagagtctatcggctctgcacagaaagcaatggataagttcggtacacctgagctgaaaacgtatttgaacgataccggcctcggaaaccatccggagctggtgcgcatctttgccaatatcggcaaagccatgtcagaagacggtcttgtcactggcaatagtggcggcgggcaaagtgccgctgctgtgttattcgggccaaccggaaaataa

SEQ ID NO: 287840 - DNA, 324 bp, Morganella morganii
atgaccgatccacaggaaagctatctgctcacgccggaagaagaagtcgggctggcgatagagcgccgtgagcaacagaaacgcgctgatgctgatttaaaagccgttatgtcgacggaagagggacgccggtttatgtgggtgctgctgagtgacagcaatgtattcagttgttcatttacacaggatccgtatctgacagcctttaaagagggctgccgtaactttggtttacaggtatttgaggggcttcatcgtgtctgccctgaactttacgcactgatggcgggtgaagccgcaaaacaacaggagaaacaatcatga

SEQ ID NO: 287841 - DNA, 423 bp, Morganella morganii
atgcgggttcaggattatatcgtgcgtgtcctggaggttgagcagaatctcaccacgcggcaactgacggacgccatccggaaagactgcaagcgaaacatcggcatatcgtcagttcgctatgcgctcgaccagcttcaccgctggggtgtgataggtcgcaggcgggattcgtataacttcatccactggctgcggtatgactaccgggaagggcttgaaaatcaggcacagacccggcgggagaatatcgcaaaggcattccggcgcagccatgagcgcagtgaggcgacagcatcaaagccgcgtgtgactgagcgaaagccatgtgagcgccgtccgattgagcagaccggcgaaccggcacggatgcagaaactgtttgattcactgctgaaaaaggtcagaagcaatgcgggttaa

SEQ ID NO: 287842 - DNA, 222 bp, Morganella morganii
atggaatatttcgattttcatgcattctggaatgggcttaacaaagaagatcgtgttgcatttgcggaaaaggcgggtttaaccgttggttatatcaggtcacatctgagctatgcccgcaggcagccaggactgcgcactatcaaccggttacaccaggcatgtattgatcatggtgtacccgtaacaacagaggggttgatacggttcttcacccgctga

SEQ ID NO: 287843 - DNA, 1707 bp, Morganella morganii
atggcagcaaccaataaaaaacgcatggacgctaatttagccgcggcgataatgcagtccggtggcgatacctatcttgatatcgcaaaagcaacaacggacctgattgcccgcatcaacggcgataaagccaaacctgagctggcgaaatacgacaacattgttttccgtgtcggcatcgcagcgacatcatcaacctgcttacagtcactgcctgatgatcagtgcatcgctgcactgtcacacatcatcagtaatatcgataagtaccctgccaccagcgataagaagcagtattttgaatcgctgtgtgttgctgacatatctcctgctgcaaaaaatgataaacaaacagtttatccatcagatgagccggagaaaatgataaccacacaagagtgccaggcagccgctgagctgccacactttgaacccggtcgttaccctgagatcaccaacgatgattaccactcatcaaacggcatcagcagcaccatgctgaaagatgcccgcatcagcttgatgtattaccaccgccgccacattacaaaagtaatccagcgcgaacgctctgaggcgttggatttcggcagcctgtttcacacgctggtactggagccggaaaaattggatgaagaattcagtcttcaaccggtcattcccgcaggagcattcaccaataccgaatccatgaagaaatggattgaaagccataacgccgggttggtccctgttatgacaccggagcagctaaaggcagagattgaggcgcataacgccacgctgccgcagcctatcccgctgtcaggctctgttgatgaaatcggtagtctgtatgtatcactgccggatgctttccgtaccattcctgagcatgaaaaacataccgccgccgcaatgaaagcctgtatcaaaatgttcaataacaccctgccggtgccgctgaaaacatccggcagtcgtgaagcgctgttagagcagcttgcggagattaatcaggagctggttgacgctgaacgcagcaagccggagccggttaaaacctcaggtaaaaaagaagacctggcacaaagcattaaagccgcatacccagaagcggttttcgctgatgaattaatgcaggcgtggcaggctgacggatcccgcatccggatttatgacgggcagttggcgcttggtaaagccatgcagcaggcggtgtatgagcaccctgagatcaagcctctgattaaccatcccggccgcgctgtggaagtcagctattacggtattgatgaagataccggtattgaagtccgtgtccgccctgaccttgaaatatccaccacggacagccgtatcgggttcgacctgaaatccgtatcactcggacgtttcaagcaggatgcaatagaagccgcaatccgccgggaaatcttcaatcgtgattatcacgtcagcgctgccatgtattgcgatattgccgagctcgaccagttcttctggatattcgtcaacaaagacgagaattacaactgggtcgcagtcgtcgaagccacaccggatttactggagctcgggcgcctggagtacaaacagaccctgcgtgatatccgccaggccatggataccgatgtatggccgggaccggtcaccaacaccatatctatgggcctgggcgatttcgatatgcgccgtctggaagccctccggctgaatgccgcttaa

SEQ ID NO: 287844 - DNA, 504 bp, Morganella morganii
atgagtcagacaacaattattgcagtatggccaaatgaaaaatctgaatgtgttgaggagctgaaaaatgcgtggggaagcgctcccgtggtatggaatgacatggcaattcgctatttagattgccgggataacggattctggtcatgtatagataaggtatggccgctttataagcgtggtgacattccactgcaccaccgcgctgttcttgccatgacgtacgacaattgctatgtgaaacaagagcactacgccaaagcagctgaacttgtaagaatgtacctgtctgatttcccgcctgacccacaacgcgttcatcactggtcacgtattgctgaaatatttgaaagtacccctgattgccctgcaattggtttttggatgacatccgtgtgtgaaaatccatttaacggtgaatggaatgacgatgaagaaaagtacgagcagcctgactggtcaaagtactggagtgtgttcgataaacttgagtcagaaaattaa

SEQ ID NO: 287845 - DNA, 261 bp, Morganella morganii
atgatcccattaacaaaacccatcgattttaaagaagtcagccgcattaccgggctgtcccgcaccactatttacacctatgagcgcgaaggtaacttcccgaagcgcacagcactgactcaacgcgcagtccgctgggaagaaagcgaggtaatgcagtgggttgctgaccgtcggacgaacccggtaactccggacgactccattcacaaagcacgggcaaaaaggatggaaaaacttgaacagcagcgcgcgctttga

SEQ ID NO: 287846 - DNA, 156 bp, Morganella morganii
atgataatcggatttgtattactactggtaatgcacggctctgctgtgcctgttactgatgatatttatacgctcgcagaatgtgagaatagagcccggaaattaatgacagtccgggattttgaattagtgtgtgcggaggtggttcgtgactaa

SEQ ID NO: 287847 - DNA, 177 bp, Morganella morganii
atgctaatccttgcgttctacctgtggattgccggttatctcttctcaaaactgagcaggagcgccggaaaccgtaccgacatagcagccagtgtgctttattccacattctggctgccggtcggtgccgcttacctttcttccctgatcgccggcaaggtgctgggcgacgagtaa

SEQ ID NO: 287848 - DNA, 1308 bp, Morganella morganii
ttgacggtatatgtgacggtatcaaaaaataaaaccactataaaccggctgagataccgtcagaaaaataaaaactatgacggtattaagagagagaataccgacgtgctgactgatacaaaattaaaaagtatgaagccacaggacaggctttataaggtgtctgatcgtgatggtttgtatgttgctgtcacaaaaaacggaacaatttcattcagatatgattatcgttttaacggtcgcagggaaacggtgacatttggtaaatacggggctgacggtatcacgctggcgcaggcccgcgaattactgaatgaggctaaaaagcagctgaatgcaggtatatcacctgctgccagcaagcgtgacggtattgatgtcaaaaagggtgcgacggtattcagcgaatataccgtcagatatatgcagaacgtccggctggcggactctacacgggcaatgaaagtctctgtgattgagcgtgacattgaaccggtattcggcaggctggcgcttgatgagatcaccacgcaacggctgcgcgcattgtgtgaaaaaatttgcgaccgtggggggcatgcgaccgcgctgctggttcgtgagattgtcggcgctgtgtttgattacgccattgatcgtggctatgagattagtaaccctgctgcaagcatcaaagcatcctctatcgcgacctttgtaccgcgtgaacgcgctatgacagagaaagaaattgggttgtttttccgtgaacttgaaaactatagttgttatccgacactgaaactggcggttaaatttgtcctgttaaccatggtgcgtaaatcggagtttctccacgcccaatggacggagatcgatttcaaacggtcacagtgggagatcccgaaagagcgcatgaaaaagcgcagaagccatattatttatctctcccggcaggcgatggatatcatgaccgggtttaaggtctgcgcgatggggagcgaatacctgatcccggggcgctatgacatccgtaagccgctgtcgaacgcggcactgaataatgtgattgatggtgtggttaaacggataaatgcgaaaggtgtcagttttgaaccactgacggtgcacgacctgcgacgcaccgccagtacattactgcatgaagcagggtttaacactgattggatagagaagtgtctggcccacgaacaaaaaggcgtccgtgccgtgtacaacaaagcggaatacgcggagcagcgccgcgacatgctgcaacagtgggcagatatggttgacgggtggatagaagagggtaaagagggataa

SEQ ID NO: 287849 - DNA, 396 bp, Morganella morganii
atgcacattatttcagggttaggactgattatttgtggttttattatgttaagttggatgcttactcaaagaggttttacttattatttttcatgggtagggcttgactttagtggtattaagcaagatataaaaacgttgactagtttccgactgcccgatgcacattcgggaggtattgccagtacaatccaaggatttggagttctagcattgctaattgtagcactttcaggtggcctatggttcttgttgaataccatgcagtcaaatctggctgaaacagtaatccactggcataagttctttactactttcattgaggtctatttttatgcacatggtgcaatgggagttttgcatattttaattgaaaaatataagccgctcagttaa

SEQ ID NO: 287850 - DNA, 2481 bp, Morganella morganii
atgagcaagtttttagacagattccgttattttaagcagcgcggggaaaccttctccggcgaccacggacaagagctgaacgtcaaccgcgactgggaagatggttaccgcagccgctggcagcatgacaaaattgtccgttccacccacggcgtgaactgtaccggttcatgcagctggaaaatctatgtgaaaaacgggctggtgacctgggagacgcagcagacggactacccgcgtacccgtcctgatctgccggatcatgagccgcgcggctgtccgcgcggtgccagctattcctggtatctgtacagcgcaaaccgcgtgaagtatccgatggtgcgcaaacgcctgatcaaactgtggcgtgaggccaaagcacagcacgcggatccggtcgatgcgtgggcatccattattaatgatgaggcaaaagccaaaagctacaaacaggcacgcggccgcggcggttttgtccgctccgactggcaggaagtgaatgaaatgattgcggcagccaatattgtgactgccaaacagttcggccctgaccgtattatcggcttctcgccgatcccggcgatgtcgatggtctcctatgcttccggtgcccgttatttatccctgatcggcggtgcctgcctgagtttctatgactggtactgcgacttaccgccggcctccccgcaaacctggggtgagcagactgacgtgccggaatcagcagactggtataactcctcttatctgattgcctggggttccaacgtcccgcagacccgtaccccggatgcgcacttcttcaccgaagttcgttataaaggtaccaaaactgtcgcgatcacgcccgattatgctgaaatcgccaaactgtgtgaccagtggctgaacccgaaacagggtacagacagtgccgttgcactggcgatgggtcatgtgatcctcaatgagttccacgcgaagcgtcaggcggaatacttcaccagttatgtccgcacttacagcgatatgccgatgctggtgatgctggatccgcgtgcggaaggcggctatgtgccgggccgtatgctgcgggcatctgatctggtggattctctcggcgagaaagaaaatgctgagtggaaaactattgccattgatgagaacagtcagcaactggtggcaccacagggctctatcgggttccgctgggacaaatcccgtaaatggaacctggagccgcgtgacggcaagagcggtgatgagatcaccatgcagctgagcctgctggataagcacgatgaagttgctgatgtcgcttttccgtatttcggcggcattgaaaatgagttctttgaaggtgtggcactggatgaagtgctgatgcacaaactgccggtgaaagtggtacgtctggcagacggcagtgaagtccgtgtggcgagtgttttcgatttaaccctcgccaactacggtatcgatcgcggcctggacgatgtgaactgcgcggcggattacagtgaaatcaaggcctataccccagcctgggcagagaaagtgaccggcgtcagccagcatcacatctcccgcattgcccgtgagtttgccgataacgccgagaaaacccacggccgttcaatggtgatcgtcggtgccggtatcaaccactggtatcacatggatatgacctaccgcggcatcatcaatatgctggtgttctgcggctgcgtcggccagagcggcggcggctggtcacactatgtgggtcaggaaaaactgcgtccgcagaccggctggttaccgctggcgttcgggctggactggtcacgcccaccgcgtcatatgaacagcacctctttcttctataaccactcaagccagtggcgttatgaaactgttcagccgcaggagcttctctccccgctggcggataaatcccgcttcagcggcagcctgctggacttcaacatccgcgctgagcgcatgggctggctgccgtccgcaccgcagctgaacgtgaacccgctgactatcgcggcgagagcaaaagaagccggtcaggatccgcaggcttacaccgcagaagcactgaagagcggcactatccgctttgcggcggaacagccggataatccgcagaacttcccgcgtaacctgtttatctggcgctccaacctgctcggttccgccggtaaaggccatgagtatctgctgaaatacctgctcggcaccgaaaacggtctgctgggtaaagatctcggcgaacagggcagcgtgaaaccggaagaagcggaatgggtggataatgccccggaaggaaaagtggatctggtggtgacactcgatttccgcatgtccagcacctgtctgttctccgatatcgtgctgccgaccgccacctggtatgaaaaagatgatatgaacacctcggatatgcatccgttcattcatccgctgaccgctgcggtcgatccggcctgggaatccaaaaccgactggtaa

SEQ ID NO: 287851 - DNA, 1170 bp, Morganella morganii
atggctgacgaattaggacgagtgactttttttgaggttgaacggtttgggttctaccaatttctggaaaaagagggaagcgatagtagaaaaaatcgtgcagaaaaacagaatatttctgtggaggcaattcttgaaaagctctatgagtgggtcaatggtaacagctttgagaatacacttcctttggtctcggatggtagattaaaaaagaaagtttattgtagaaacgcatataaatgcccagatactggggatttcttttttgttttatggaaatctgaggttgatggaaatggaaacatacagggggttgatgcttctgcaaatgtatcctcaagtgttagtgatgtcattttattaccttctgagcaaaaaggtggcaaaaagtacatttggggaaaaccttgttattattggtatatttccagtataaataagtttgctgcaattaaatttccgcattcaaatacagatacttatctttttgctcgatacgtgaaggattttgttaactttagaatggattactccggaaggaaggtatccgcaatcaaaagagataactccgctggtaaagagtattcgtatcagacggcaacctttgctagcgatgatggtgaggggcgagttcgttttctatttgattataaattgtttatgaaaaaagctaataaaattagcctaaaagcacgaagagagaaaataacgcatattgttatcagggatactataggtgcatatgtgcctgatgagcgagcgtggtggtcaaagatgatagactatttaccaggctataaggcagaaaaaccaaatctaaagcgagaaaagcaaattgaattagttctcgaggagacacctacagtatctcagctggatgatctgtatgaattttatatggatggattcactggtgattcatcatggaacaatataggatttaaagaaggtggtaagtatagcccaccaaaatggcttgatgagtatgttcttagggaaacaatttcagcaccgtactcagcagctagtaaacagcacatctcagcggaaaccttagccaatttgattgctgttcagcgtgatgttttattgcagggattggatttggtggaagatgaagaaccaatagatcatcaaagtgataagtcagttgcagtagcagggggataa

SEQ ID NO: 287852 - DNA, 513 bp, Morganella morganii
atgaagatatggcaatggttggtgcattgcgcgatgatagttgccatgtttgggttggcttccgtagcgtgcccccatattaaatatattgatattaccaatattattactgtactacagaatatatcagcaatagtatttgctataacaggagtatggatagcatatttatatccaaatgccattgctgggcttactagaaatgaaaaaatagactttttcgctagtaagagtgatgctaaaaaagtcgaatcattggtgctgattataataatatcagctttagttttagttggtatcgctgtgttctatttgatatctactacaattaaggggacgtcattatattatgaatatcaatcaattttaaaattcattggaacgtcctatatattttctctgctttatattgagataatatgtatcctgatgattgtattaaatagtatttcatttatgaatggattgtaccggtttttagctgataaggagctggatgaaaagctaaaatag

SEQ ID NO: 287853 - DNA, 462 bp, Morganella morganii
atgtctgatttaaataatttactatcattttctgtaggtgtggctgctcccttgattacacaatttgtaatgtattacattactaataaacataacaacaggaaaataaagatggaggatgttaattcagctatcaatataattatacagttaacagattttattaatgatagttatgaatttataaaatcccaatatgttacaaataatgatggtcacacagtaagaattggtggggatgctccagagtttaattataacaatgatctggacttgaagtttcttgatgaaaaaaccgcttttagtatagcggttttgcctacaagaataaaatatataaagaatcaggtttctgtatactttgaatatacagatcaagtaattgaaataagggcgaaaatatgtaatagatttaagcttcctgaggataaattatttgatctgagcaatgtttattcatag

SEQ ID NO: 287854 - DNA, 447 bp, Morganella morganii
atgaccgttatcaatgaagactacatgtatttaattattaaaaaaatatctaacctccacgacattcctattgaagggagcattaaccggcttgattataataaagtatataatcgagctggattaatatttgctttggaagtagtactggaagagcacagaaatacctatgctacttcatggagtcctttgaaagggaaaattgcccttcagcatttacttttaatgaaatacaaatggactctcgatgttattaatatgttaaagctacaagatattataatgttacttcaagaagagcttaactataataaattaccagaatcagctcaaaagatactaagtaactttagagcatataaactcgtagattatttccccacaatatcagacgctgaatgggatccagaccttattgaacaattgcccaaaactattcagtggtaa

SEQ ID NO: 287855 - DNA, 1803 bp, Morganella morganii
  misc_feature (1696)..(1705): n is a, c, g, or t
gtggaatcgattaccaaactttaccagaccccgctgccatctacccgtactggccctttgtataatgcgttctcatatccaacaaagatttcaccagaagctatagcggtttacattgctacgcacaccgagcccggtgcaacagtgttagacgcatttgctggtagtggtaccacaggcttagccactctgctctgtgaccgccctacactcgaaatgaagcgaatggcggaaagcctcggcgcatcaccaaagtggggaccacgtaatgcacaactttttgacattggaacattagggtcattcgtatctcagaccatgtgcaatcctcctgatcctgacgaatatgcagatgcagtgaaggagctatgtaaacaagctgagttacaattgggttggttatacagtattaaagatgccaatggccaagtaggcatgctccgccatgctatttggtctgatgtactaatctgccctaactgtaatactgagacctcactttgggatgccagtgtgaaaactaatcccatcaaaatggctgattctttcatttgtaagggttgccagaagctcgtatctattgaagcttgtgaaagagccacagagacaatctctgatgttttcggaagtacacagtgcaccaaaaaacgagtgttagctcgcgtgcatggacgttgcggaacaacaaagtggcagaggcctccaactgatgaagactatgagattttagctcgcattgccgaaatgcagcctccaacatcagccccaaacgttgaaattgaatggggagaactgcgacgctcaggctatcattttgggatagataagctccatcatttctatacaaagcgtaatttcattgcgatggctttactaatggagctagtcaataactttaatgaaagcgttcgagaggccttgcggcttcttgtccttagctacaatgcgagccattcgacactcatgactcgtgtagtgctaaaaaaaggacaaaatgactttgtacttacgggcgctcaaagtggcgtgctctacatcagcggctttccagttgaaaaaaatcttatagagggtattcgtcgcaaatctaattcgttcataaactcgttccggcttttatacggtagtcaaagtcaggtaactgttcataatgttagcagtgaaactatgccactcaaggacaattccgtggattacgctttcactgaccctcctttcggcgattatattccatacgctgagctcaatcagctcaatgagctttggctagggcgttccactgaccgtaaacgtgaagtcattgtgagcccttctcaagctaagggagtgaaagaatacggcagtatgatgggtacagtattcaaagaaatgtctagggtactgaagcatgacgcattagctaccgtagtatttcactccgcacattcggagatatggagagctctagttcaagcttataccgaagcaggattcgcagtggaagcaacaagcgtacttgataaaattcaggcaagttttaaacaagtagtttcgaatgtttctgttaagggtgaccctctattattgttatctaagcgcagccaagaacgttcagagtctaagacttgtgatttaatcgccgctgagataatcaataatgctaaaaatgatttgaaacccgatccacagcgtctctattcacaatttgtgggaagannnnnnnnnncgagctgggcagcaacgttactatggatgcaaaaaccttttatgcacttgctcaaaccaacggtttatgtgtcaaaggaaccagtacgtgatgagtaa

SEQ ID NO: 287856 - DNA, 585 bp, Morganella morganii
ttgagagaactttaccttgcactgactggcgggacgctgaaaggaccgttaaatatcgaatatgttggaggtcggggattaacgacaggagcaacagccggaacatcaatttatcatgaactgtatctgcttggaaaactggttgcctggtggggaattataaacagtaacgaattagtgcttgaaaacagagtcgctggtaaaaaattaattattggccccgatggtttcaaaattgacggtaaaaatattgcgactacagatcagctttttggtgtcggacaaacctacaaaaatctgacgtccagtcgtcaaaataaagtctggtataccaacaccgacagtaagccccgcattatccatgtcgaatcaaacagaaccggcacacaataccctttcagtattgatattcagattattgatacgggtggacagaatcgcggggattaccgctggacagcggcggatgaggtggtttctctgacggctatagttccgcccggagcaagatatagcgtcaatggaggatggggacagccgacagaatgggctgttattaacttctggttggagtactcgctatga

SEQ ID NO: 287857 - DNA, 510 bp, Morganella morganii
atggcgattagtacggatgaaaaaattttagggctggcactgctggctgaacggcagcaaaaagagctggctgacgctatcgcggtcatgagtgaatcagtggctgagtttaaatcagtgtcagcgaatgtatctcagcaggtcaggcaagaggtgacccgtgaaattcagcagatggatctcggacggttactgagtgagcagacggcggcaacatttaaatcggtagaggagactgcgttactgattcagaagcaggccagtgtgattaatcaggagacgttttcagcgagagaaaagctcctgtatgagtacaggcaattaaaaaaccggttttggtggttcattggtgccggagttatttttgcagccggtctgacagcgtttaattcttggtatttcaatcaggaattgagccggttaagtacaggtcagcatatcctttatgaatctatcagtgaattgtctgagaaagtagaatctctgaatgtgacaaaaaaaggtaaatag

SEQ ID NO: 287858 - DNA, 210 bp, Morganella morganii
atgcaaacagaacctaccatcaccagcaatatgtccgccgacgatgtcgcactgtggatcaccgaaaaagcccaggcgcttcaaaagctgcaatcactacgtgcagaacgtgacagagagatccgcgaccacgaacgcaccattagtcgactcgatgaagatatcatcaagtgggaagaccgctgtgctttaacagtacaaccgcagtaa

SEQ ID NO: 287859 - DNA, 384 bp, Morganella morganii; identical to SEQ ID NO: 280046

SEQ ID NO: 287860 - DNA, 201 bp, Morganella morganii
atgagcagattaactcattcagaaccagaaaagcaatttaaatgcctcgttattggtaatgaaccatttcgttatgttgaaagcatacctgctggtggcatagcggacaactaccgggaagcaccggaaatggtagagcgggcagagctgaaagaatactggtcaaaatactattaccgcagcggaggacaggatgcctaa

SEQ ID NO: 287861 - DNA, 447 bp, Morganella morganii
atgaaacctaagttttggaagctatctcaaggatatggtgtattcaactttgaagatttgcttaattcgatagaagaacgtttagtctatgtacaccgagatactgccgcaaaaggacgctctgaaattcctcaaggggaaaactttatcaacgcaaagattggtgattacttttacttaactcatggtaacactggcggtatatatctattgggccaatttacaggtccagctaattatttttcttatgaacctggttggatagacaggccttttcgaattgttgcaagagctatccatcaaaatccatatgttggaccagaaaaatggtggacaccaaaccataattcaacttttgttgaaattcctactaatgaaattgcgctttttgaagaggtgatattacaaccttacttcgacattactcttaaaaaatataggttttag

SEQ ID NO: 287862 - DNA, 1233 bp, Morganella morganii
atggcgcgtacaacaacaccactcaccgacacaaaaatcaaaacagccaagcctaccgacaaggaatacaccctacaagatggcaacgggctctacttgctgataaagccctccggttccaagatatggcgatttaactattatcgaccaatcactaagaaaagaaccctgatcagttttggtagttatcccgcagtaagcctcgcagatgcccgacaaaaaagagaaaatgccaaagaactcctcgccaagggcatagacccgcaagagcataaacaagcagaagaacagcgtctctttgaggaaaagaacaataccttcgaaaagatcgctagtagctggtttcaaataaaatccaaatcaaacctgcaagaaactactctaaaagatatctggcgctccctcgaactacacgtcttccctaccgttggcaataccgccatcaccgaacttaaagcacgtcactttatcaccgcactagagcccttaaaggcacagggcaagcttgaatcagttaagcgcgtggctcagcgtattaatgaggtcatgtactacgcggttaacgttggttttattgatgctaacccagccgctaaaatcaccgcagcatttgaaaatccagtagtcaaaaatctaccggcactgcgacctgaacaactaccagagctaatgtcagcattacagggcgtcaacatcgagcgtcaaacatactgtttactgcaatggcagctattgaccatgactcgcccagcagaggcggctgaagcaacatgggatgaaatagataccgacaataagttatggactatcccttcctcacgcatgaagatgaaacgggaacacataatcccgctatcaccacaagctctagctatccttgaaatcatgaaacctatcagtggtcatagagagcacgtattcccaagcatgaaatcacctcataccaaaccgatgaacagccaaacagtaaatgccgccattaagcgcgttggttttgccgggcgtctggtagctcatggttttcgctcaatagcatcaaccgcgttaaacgagaaaggctttccacctgatgtgattgaagcagctctagcccatattgatagtaatgaggttcgacgtgcttataacagggctacctacttggaacagcgtcgtgaaatgatggattggtggggggagtttgtggaggaagcctcccataaaaaacaaataacaacaaatggttatagctag

SEQ ID NO: 287863 - DNA, 576 bp, Morganella morganii
atgacattcataaaatgtgcacatgccttattacttggcgggctgttatcagcggcagcaggtctgacggcatttcccgcatcaggtaaaaccggtgatgaaaaccggatgaaaattaatatatcgggcacggtggtggctaccggaaaatgtgttttcaataattcgtctccgcaggatattgattttggtgatgtgcgtttctcttcagtggcgggcgtgaacaatattgaaggcagctataccagggagctggatgtggcaatgacgtgtaccggtgacactgccggtactacccgctttcgcatgaacacaataaaaggatcagctatcgcagacggcagttacggatcgttaccggtgattgtcggcggtattcagtcggccagtccgaatctggctgtccgtttattcgtgaacggtaaacagcaaagtattaatgaggattttattgtggatattcagaatcagcctgtgctggaagcggaattggttcagctgcgtccggataataatacctggacggacggccagtcggttgaatctcacgccacattagtgatgagttttgattag

SEQ ID NO: 287864 - DNA, 1650 bp, Morganella morganii
gtggctgccgcaggccaagatacctcccggctttccgcattgattgatcatttcgataacctacctgaacccgcttttgatcaacttctccaggctcttgcctcccaacctatttcagaactccccgaagaacaacgactttcgatttggaaccatctcacgaaattcacaaacaaacaccggcggttctctgatgcgaaatgggcattgcccgacgaactgattacccgcattgaacaagttgccgagaaactctcacccactaacccgttcaatttatatcagcacttttttacagatcgtgactttgatctctacgaaggtaatggcgattgggaggagcagcgcaagaaactcgaaatgcgacgtgaaacggccattttagaaatctttcagcaagatggtgttgagagtgttatccgatttgctgaatccgtttcttcggccaatcaggtagggtacgcgcttggcgttattgccgattcagtcattgaacaaactcttttgcctcacttcctagattcagcggacaacaggcacaaggcattggtgagcggttttatctggcggcgttaccacctcaaaggctggaggtggtgcgacgacatcaataaatttgattggtcgccggagcaagtgggccaattcttggcttgcttgccgtttaccaaaaaagcatgggatcgtgcttctgaatggcttcagacccacgagagtgaatattggatgcgcacaggcgcgaatgcctatcaggccgatggtgatcttgccattgcaattgagaaactgattgaacatggcaggccacatgcggcaatcaactgcttggacaggatgcgcaatgacaagcagccaatcgatagtaagcaatgtgttcgagcgttgctcgcggcactttcctccagtgagcccagctacggcatggacgggtatcagatcgtcgaactgatcaagtttcttcaggcagagccttcagttaacctggacgacctctttagagtcgagtgggcatatattcccttgctcgaccgtcatggaggagctgcaccccaactccttgaaagcaggctggccaatgaccccgagttcttttccgaggtaatccgactgatttaccgatccaagaaagaagatcagtccccgaaggaacccatcggggactccaaggcaatcgcaacaaatgcctggcggttgctccgtgagtggaagacaccgccggggtcacaagaagatggaacgttcagcgatgagcgtttcaccgaatggctccaaagggtaaaggaagtctgtacggaatctggccacttggaagttgcactcattaatattggcgaagtcttgattcacaccccacctgctccagacggcttatggatacaccgcgctgtcgctgctgcactgaatgaccgtgaggctgatgatatgcgtaatggctttagaacagggacatataactcacgcggagttcattgggttgacccaaccggcaaacaggagagagaactggctgaacagtttcggaataaagccgaagaaatagagaacgctgggtttcagcgatttgcagttaccttaagaggtttggcggacggttacgaccgcgaagctgaacgaattattaacgatcacaaagacagggaagatgagtaa

SEQ ID NO: 287865 - DNA, 1797 bp, Morganella morganii; identical to SEQ ID NO: 120698

SEQ ID NO: 287866 - DNA, 825 bp, Morganella morganii
  misc_feature (688)..(697): n is a, c, g, or t
atgaacaaattaatcaaaaaatcacacggacacccggtagtaacaacagacgtgatcgccaatgagtttggccggcaacacaaaaacgttctgcaggatgtcagaaatctggttgaaagcgggcatttaggagagcttgatttcaagccctcctcgtatatctcgaaacagcgtaaagagcttccttgttatgaactgactgagcgcggattccttatcgttatgccattcattggcggggagaaagcaaaagacgggcaggttcgtctggttgatagtttcatccagttccgtgaaaaggcagcaaaagaagctcaagtacaggttgagcgcaatgttgcccgagtggaatacaagccgatgactgatgctgttaagcaaagcaaggtggatgaaggcaaagatccggcaccgtatcatttcagcaatgaggccgacctgattaaccgcattgttctgggcacatcatcagctaaattccggaaggacaaagacatcggtaaaacagagccgatacgggattatctttcccatcagcaaatcagggcaatcactgagcttcagcgtgcgaacacggtgtttatcacaatgggctgggactttgagcagcgcaagggctcgctaaccggcctgttcgataaaaaccacaagaaagcattgctggaagaaacgcatctgctgaatgcgnnnnnnnnnnattttcggcctgaactaccgccgtcactatcaggcattgctggaagaaacgcatctgctgaatgcgtaaaaatgcgttatcgggtaaatcaacggaatagaccgccgagcggtcttttttatgggtga

SEQ ID NO: 287867 - DNA, 441 bp, Morganella morganii
atgaagcccctaggggcactactggttatcatggttgtgatagcggcttttctggccgatgcgttaggtgatgtcaaaaaagaacgtgacagtctttctagccagctatctgagcaggtcgccatcaacaaagactacaaatcccgcattcagtcacttcacgaactcgacaccatgtacacgcaggagttaaccaatgccaaaactgaaattgatagcctgcgtgatgctgttaagtctggcactaagcgcgtgtacatcaaagccgagtgtccaaaggtcggaaccaataccgccgaaggcggaagcaatgaagccgccccacgacttagtgaagcaactgaacaggattattggcgtctcagagaaatgatggctgagaacgaaaagcagaccctgtatctgcaggactacataaagactcagtgcctcgctaaatag

SEQ ID NO: 287868 - DNA, 315 bp, Morganella morganii
  misc_feature (196)..(205): n is a, c, g, or t
atgagtacgggcgtcgatgcgcagacctgcaagctggtcgtgctggatcaaaatattcagtccataaccaaatttaagcaaatcatcgggcgcggtacgcgtatcaacgaaaagtacggtaagttgtggttcaccattctcgactttaaaaaagcaaccgaactgtttgcggatgagcgctttgacggtgtgcccnnnnnnnnnntgaagcgcgggaagataccgctgactatcaggttaaccgcgacaggtctgaaggctgtggtgaattccatagtgacgatgatgacgacaaagtccgtaagttctatgtga

SEQ ID NO: 287869 - DNA, 372 bp, Morganella morganii
gtgcgtgttgatatcgatgtcgatgttcagggctggcggccggttaaaggtcaactggataaatacggcaaagagattaaagaccgtatatacaatctgaaggattttgaccgcacgctggttattgatgagcgtactatgctggtggcgaagactatcaccgattacctgaaacgtaccaacccgatggataaaaccattgttttctgtaacgatattgatcatgcagagcggatgcgtcatgcgctggtggtgcttaatcctgagcaggtattgaagaacgaaaaatacgtgatgaaaattaccggtgacgatgatatcggcaaagcacagctggataactttattaatccgaaaagccttatccggtga

SEQ ID NO: 287870 - DNA, 327 bp, Morganella morganii
atgccaagcgaaaaaacacactggacgcacaggcagccaagaaagacgtcaaagttattcttgtgggtaatgactgcgcttccgctgctgctcctggtggtctcattgaccggatgcggcagtacaaagactgagtatgtatcagcccctcacgtcccaatccctgcaagcctgactactgactgcccgatgccggatattcccgacaaaatgacgtggggcgatatagcggaatacaacatcgaactgatgtcagtgatcaaggcatgtaatctggataagcgggcaataagggagattgagcagcaacgacaggagatgaaatga

SEQ ID NO: 287871 - DNA, 639 bp, Morganella morganii
atgcttggcatttatattttttcgtaccttatatcagtaaataaaatagatagtaagtatgcattactgtctgtgtttgttgtatttgttgtattaaacccaagaacatcaaatttaattgaattcacattaggcttgaatgtaaacaacttattcatgattgatggtgtttttatttattacttactttacgctgtatccggagccattataggcaacatggcaataaaaaaagagttaaaattaaacaaatatacagccattctttccattattatatccactgtatgtatatcattcctgacgctaaaaacatatgaagatggatcttacaatgaaatatcattttacgacttcaactcccctcttgtgtttattttatcattatcgatattctattttattttttcagtaaaatcattcttagttgaaagagccgtggtatctgtgatagctgaaaactctttggctatttatggtattcatgcctttgttctgtcaatcgtgaaaagatttatagattacaaactacacaatgcatttttatttataccgcttatttttgtgcttgtcgtatcaataagtttaatcttctcactggcattgaaattaattgataaaaaaagattattcacttaa

SEQ ID NO: 287872 - DNA, 165 bp, Morganella morganii
atgaacgcatacgcagcacaggatgctcaggaagagcggcaacggattgccgaacagcgcaggaagcgcgaacaggaagaaatggaagactactggtttcgtgaaagtgtcggattgccaacaggacgggtaccggcagaatttctgagcggagaattcacatga

SEQ ID NO: 287873 - DNA, 672 bp, Morganella morganii
atgaaactaagagtggtagatacagaaacttgtgattttgacggtgggattgttgagattgccagtattgacatagttgatggtgaaattgacctctccacacagcaatcacatctcgttaatccacataagccaatatctataaacgccatggctgttcatcatattacggacgaaatgattcagtcatcgccggttatcagtgacgtgatcggaagctatcacgggtctgattatctggtagcccacaatgccgattttgacaaacggatgatgccggatatggaagctccgttcatttgcacactgaaattagctcgtcgtctatggcctgatatggagagccatagcaaccaatatctgagatatgcactcaacctcgacgttaatgttcctgacggacttcacgcgcaccgtgcgctatatgactgcatagttactgcggcgctgatgcagatgatccttgaatgttcaggatggactttcaatgaaatgattgaaattagcaatcagccttctctgttgaataaattacggttcggaaaatataaaggaatgacatttaccgaagtgaaaaaagaaaaccccgggtatctggattggttatcaaaacaggatgatcttgatccggatgtggcgttctctttggattactggaggagcagacaatga

SEQ ID NO: 287874 - DNA, 168 bp, Morganella morganii
atgaaacaacggtttaattacagcgctgtgcacaaaaacatcgcacgtgaccgatttaaccgaacagtcaccgaacagggaattaagtgtattcgccagatgtttgaggaagcgaaagtaagaacggaacacagggaagaattgctgggaggtaagcggcatgggtaa

SEQ ID NO: 287875 - DNA, 144 bp, Morganella morganii
atggataaaaatcgtccggtgatttgttatcggtgcctgcatgtctatgacattaattccgtgaaattgagccggaacaaaaagcaccctgaaattttagaaaagaaatgccctgagtgcagatgcacactgtatttcagctaa

SEQ ID NO: 287876 - DNA, 192 bp, Morganella morganii
atggaatggattaagtgctcggaaagaatgccggaggcgggtatttatgttttagctctacttaacggctctccgcaggtgctgttttttgatccccgcataaatatatgggatgacggtgattttcactcattcataaatcctagaaaggtgacccactggatgccactgccacaaccaccggaggagtga

SEQ ID NO: 287877 - DNA, 216 bp, Morganella morganii
atgaaattagaaaaaggcaaagtttacagaatctcaacggatgcactggattggtatcacgcacacgaccgcgccgagtatcactcgacctttgcgcgtgaatcagatggcgagccactgcatcactttatcatcaggtttactaccggcgaccttgaaatgacgctgtttttatctgacgacataaccggattggctgatagacaggaaatctga

SEQ ID NO: 287878 - DNA, 264 bp, Morganella morganii
atgaactttaagaacctaacgccggaatcgcagcaggcagcaagagagacactctctgaaatattgaagctggaacgcgatcgttgttacgaattggtaacagggcaaagcaaagaaattgccatattcgtgaaagaggcttttattgagcttgaaaaggggacggcggaacaatgcggccagacatcacctaaaattgaatgtgtactgagcgcgtctacggctaatgggcttggaattcagcttggtaaagcacttccctag

SEQ ID NO: 287879 - DNA, 459 bp, Morganella morganii
atggtgtggttactgtatctggttgctctgtgggtgcttttgccagaatcattttttgaattcattaacgcaaaacctatcattggctcggtaaataatatcaacgccattctttttattattccggccagctttattctttcagatgtaacaaagagaatttgtaaaatatctgatgcagcatctggtgtatttaaatcccgaattgaaagtaatcaaagaaagcgggatgtcacactccaatgtgaaaaacttagtcatggcgaaataaacttaattagcaagtttgctgagcaaggttcacagatgctttatatcccgccaggtgataggttcctgcaatctcttttgatgaaagggctgattcagagatacggcagggagtccactatggaagatggacttatcgtatatttatataagcttgatgattttgtttggtctaaataccgaaactag

SEQ ID NO: 287880 - DNA, 888 bp, Morganella morganii
atgacaaaacagtcagttaccagactgaagccaggtaaaatactcgacacactgggggcaatgaaaaatagcctgacgcgagtatcacagcgtattgctgaatatatcctgtttcatcctgttgaagtcactcagctttccatcgcacaactttcccgggcgactaaagctggcgaagcaactgtagtacgtttttgccgcactctgggctataagggctttcaggactttaaaatggatttagccattgaaatggcgacatcggatagtgaagaatcaccaatccttgatgctgaagttaaccatcaggatgatatccatactataggtttaaaattacaagcaaccatcaataatgtgttatcagaaacattaaatttacttgatatgacgcaagttaaaggcgctgtaaatgcgttgctatcatcgaattatgtttttatctgcggcgtgggttcctcggggatcacagcagaggatctaaaaaataaactgatgcgtattggatatcgggtggatgctgttaccaattaccattttatgtatatgcaggcttccttattgaaaccgggtgatatcgcgatcggtatcagccattccggaaattcaccggaaacagttcatgcactgaaacttgcaaaagaagcaggggctaccacaattgtgctaacgcataatttaggttcacacattatggaatatgccaattattatctgattaatggtaatcgccaggggaaattacaaggtgattctattggtacaaaaacagcacaactgtttgttttagatttactgtataccctacttgtccaggctcagcctgaaatggtcaaagagcaaaaactgcgtacactaaatgcattgaaaagtaccaattcagcatga

SEQ ID NO: 287881 - DNA, 177 bp, Morganella morganii
atgaatgaccagttttacacatgcagagaaaaggataatttcatgctccgtttaccgaaaagaatgaaggatgaaattaaacatatagctgaaatggacggcatatcgattaactcagccattgtgcagcgattatcccgaagtttaagagaagaaaggttaaagaatgcaaactga

SEQ ID NO: 287882 - DNA, 372 bp, Morganella morganii
atggagacaataccaaccggagaggtggggaatttttatagcgaaggtgacgagttaattaataagactaatcaggaaatgttgcccgcaattttatcatcagcaaaagccaaccaaaagcgcgctgaccactttttacgagccggagccatgtatggcgacgcatctttaatcatcaaaggtcacttgcacagtgtcgtggccagtgcgttatgtagcgtacttgccttgtatgattgtaactcagttgaattaggtgagttggttgcagggaagcgagactggcttgatgaaaccagcgatatcaacagtttcaatgaagctataaaaacaatcatgaaattcgcacagttgcctagcgatattgagtga

SEQ ID NO: 287883 - DNA, 387 bp, Morganella morganii
atgtcaggacatccacatgctgaccttatggctaaggcagcagagatagcgaggacggatcagtattggcagcgacattttgaggagaaatttcacagcactgataagtggaatccaatgtcagacgccttctttcaaacgcacagagaataccgcctgaaacctcgcactatcgacattaacgggcatcaggttcctgagccggtgcgggaacctctgaagaccgggcaggagtattggcggttatctatacctcacagcgttgataccttcgaatgggaagatgatgacagagacaacctctggcttgagctcggactcatccacttaacccgagaagcagcagaagcccacagagccgccatgctctctttcacacagaagtaa

SEQ ID NO: 287884 - DNA, 165 bp, Morganella morganii
atgccgatgtttaaagtaacgtgcaaatggaacggaaagccatgggaaaatgatatcgaggcgcttgatgaagccgactgcacagagcacatgtatctgttcggtgtgctgattggcaaagccgatatccaagacctgaaaataactgagataacggaggaataa

SEQ ID NO: 287885 - DNA, 282 bp, Morganella morganii
gtgaccgtgaaacaaacaccactggatgcacaaacgattattccggcggcggttgagtcatgggcccggggcgaaaccgaaggggacggcgggctggtcgtcggtcgtgaggtttccccgtttgagatagcggccggtattaatgcgtctgagccgcgtctgtttgtcacccgggtggagctgtcccccaacggtacggactggtcatccgatacttacccagtaaagctgactgaggttgccggaatcagccgcagtgcggtacaggtggtgtttgtatga

SEQ ID NO: 287886 - DNA, 462 bp, Morganella morganii
  misc_feature (273)..(282): n is a, c, g, or t
atgatattatcattttgcagctttgagataatatcactatactccggcgccataaattcgggggaaacttttagcatccagctgtttggttcatacagaaacaactcagataccggtaaacgggtagtcaggctaagtgcatctgcaatactatcagggattgttaatgcagtatcagaatatccagtttttttcccctgttctgtaccggaaaaccggacactggcaacctgccctgtcccgttatacgttaaagaagatacattattattnnnnnnnnnnatatttatcccacttaagtttattgaattctgtcaggtttgtagcacggtaagacatcggtttataaaattgttcctgagttccgtatttcgttatgtcccgttgtgctgcatagatgatttcttctttcttatctttttccggaaatgcatacttcgtttcaatgtatcctccggatga

SEQ ID NO: 287887 - DNA, 771 bp, Morganella morganii
atgacaacatatcaaaatcgatggcttcataaatttgaattaaaaaaaaataattgggtttatgttccttcatcagaagcaagagatcagggttcggcttttttgaaagatctattactaaaatggacgccgcctatttattattatcatctgagaaatggcgggcatatatcagcattacaagtacatttaaatagtaaatattttgctcatatagatttaaaacatttttttaactcaactggaagaagtcgaataacaagagtactaagagaattttatccatttgaacaagcaagagaaatagcaagattttcaacagtgaaaaatctagtttccttatgcccatcacatgttattccttatggtttcgtccaatcccccatgattgcaactatttgtttagacaaaagtttacttggaaagacaataagaaaactatttaatagaaaagatataaaaataagcgtatatatggatgatattataatttcatcattatctttagatattgtagaaagtgtatactctcaacttttaagatgcataaaaaaatctcattacttaataaatgaagataagtcgcaaccacccgcaaaaaatatagttgtatttaatattaacttgtcaagaaataatataaaaataacagaaactcgagttattgaacttcttataaattacgtaactacgaaatctgtacatgtcaaggaagggataaaatcttatgtaaaaaaaataaatatcgatcaagtagatattttcaaatga

SEQ ID NO: 287888 - DNA, 219 bp, Morganella morganii
atgatgtgtaaaaaaaattatgacttagttaatgagcgaattgatgtggcaacaaaggttactaagcttgcttcccaagtagtcttgtttcttactgcttgcgttcgctttgctgatgtagtaatcgactttgttgctaagcattccgacctcattaacatggtcttcaactacttattaaatagacatgacaacatatcaaaatcgatggcttcataa

SEQ ID NO: 287889 - DNA, 1233 bp, Morganella morganii
atgagcactaaactcgattttgacgctacaaaacttttcgagtccctgaaataccagatccatgtagcgatcgattattgccacacattagagaagaatgatgtgctatggatagaggtatgcggtgatgtcactatagaagaacgcgaccaaatagaggtcaaaaattacagtgatgagttgactgacgggcatgaaaatttttggaataccctaaataattggctgaagcctgattttcaccatcagcaatacgctaatttaatccttctgactactcaagcatatggcgaacgagcatctctaaaaaactgggaggaaatgggtgttaaccagcgtttgagtacactggaagccattcataaaagtgccgaagctcgctttgaaaaagctaatcagttaaatgatgaaagcaaaaatgaacaaggcggagagaaaacagaaggaaatactgttaagcgtaaaaacatcaagccatcaaaatcacttcagcttcagcgtaaagttctagcaaaggatattcgagactcactgctagaagcgttgccaaagatcaagattattactaaacaacccgatcttctagagctactcgatagatataagagacgttatctaaaaggtgtaatgccacaccgaatggattcattcttagatgacctattcggatttatgactagtgcactcaaaattacaggatactggaaatttacagtcgatgaatttgataaaaaatttgcagagctcaccgcaagatacttaattgggacattaaaatttccaagtattaacagcgagtcggttgaattagaagcggcgaatattaatgtccgagcgcggcgcttcgccatgaaactggatgaaataggcggagatgatgaattaattttagaagcaacggctgatttactgcatgcacaacaatatattgctgaagtgattaaggattacactacatcacaaaaagatattgatgactattgtaaaaaccagttacggatgcaccgctctagtcgtttaagcgctatgtgtaaatgcaatgccgcgtcatctcctgaggagctacaaagggcatcctgtgccttctacggtaagcgttgtgctgaagcagttactccttttagcacttatgattctactccagtcgaattccgcaatggtatttatcacatactagccgacgaagaacccagaaatcctttatctgaatttcattggaggctctggaaatga

SEQ ID NO: 287890 - DNA, 462 bp, Morganella morganii
atgatagcaacccctattgaacatcttttcaaccttcaacgatctccaattgtattggctcccgttattcaccaattcttcgcaaactcccagtctcgcgaaaaagatttgttgctcagttatttaattctacccatggtgttatatccagcgatgcaagaatatttacttaaggtaaaaaaaacgagtaacttacgtacgatgtgtaaagaacaatctaggcttgtaggcttaatccaaaacactcaacagttcaaaccattgacccatgcatcattgcttattctaaaaacagaacaaaaaattgaaattactgatgatcttgcggtgaaattattaagcgatgttaacgttgctaatgccaatccggtgcaactcgaagccgctcgtcgtttgtctatggttttcgctgatgtagacatcgtttccatttacaggacgttaggatttaaatcactatga

SEQ ID NO: 287891 - DNA, 195 bp, Morganella morganii
atgaaatgtttcttacgctatattggtgttgtagatacccaagaaaagatccataagatatattttgaacccggacttaatataatcacaggcaaatcctccacaggcaaaagtgcaatccttgaaatttttgattactgtttaggcagctccgaggatactattccggatggcaagatcactgaacgcaaatag

SEQ ID NO: 287892 - DNA, 540 bp, Morganella morganii
gtgtctgatattaattattattttgacgaaacaaatccgctgcacccgttttacggtgatgcctatgcgaacaaaaattccttcgccccggccaatgccttgcgtattaagccggaatttattgctggtttccatccttgcgagcatatggggaagtgggtgcaaattccggattatcgcggaattacagtatatgaaacggacaccgccagggaattagaggttaaagaactgggtgaattacccgaaggtgtgactactattgcgccggatgtggattttccgaagtggaacggtaaaaagtgggtgacagataaagcagcgaaaaaggaaagcgacatcgcggcggcagaagcccaaaagcaatacctgattgccgaagtgcagacagaaacccagatgctgcaaacaaaactgacacttggccgcatcaaagatgatgaaaaggcgctgttaaacgcctggctggattatctggacgaactggaggcagtggacgtatccaccgccccggatattatctggccggtgaagccctaa

SEQ ID NO: 287893 - DNA, 156 bp, Morganella morganii
atgaaaatagcatttcttttggtagagcgtcgtgaaataaaacgcgagcttgagcggatatcgtggaatgactttatcggcagaatgtggctcacatcacagctgatgagagttgatgctttgttaactgaaatgggtgttgagccagatgactga

SEQ ID NO: 287894 - DNA, 375 bp, Morganella morganii
atggaatttaagggaacgccggggccgtggatggcaacggaatattatgctgactcaacagatgttgttgacagtaacgggttctctcatgtgtcagctacaaatctggcggtcttgtctggatggcatgagaaaggctaccgccactggagtgattcagaaaaagcccacaggaaaatccccagggaagagcagagagctaatgcccgcctaattgcagcagcgccggacttgctgtattcgctgcaaaaattactcactgaatacaaattcacacgctcgcagcttaatggtgataccgaagaagaccttgttgatgtcttatgtgttagtaatgcgatggctgcaatcaacaaagcacttggccgcgaatag

SEQ ID NO: 287895 - DNA, 360 bp, Morganella morganii
atgtcattatccgatctatcagatgaagaatttaaagagttaaagaaaaacgtatgggccaagagtacctatgttgataaagcatctaatgatgatgggttcagaaaagatgattgtggtgcatggataaaatggagtgactatggtcaggatggggaatttgattgggaaatagatcatattattcctgtatctaaaaaaggcagtgataatatagaaaatctgagacctttacaccatagtaataatgcatcaaaaggtgatagcgataaagattcggacccggcaaaggtaaccagtatttatggtaagagaaaaaataaaaaactcagtgatgatggtacatatattgatatgtga

SEQ ID NO: 287896 - DNA, 336 bp, Morganella morganii
atgtcattttctcaggaattaatcgattctgtatggaataaagtaaccgttcaacctggtaatgatcctggtgttttcaggaaagatcaatgcggtgcatggatacaaaagagtgaatatggtaacagggacagtaaatatagatgggaggtcgaccatattaccgcagttacaaatggcggaactgatattctaagtaatttacggccactgcattggggaaataattcctccagaggtaaggggcgtttaaatacacagttacccgctgtgacatctgaaggtacagacaacattcagttgaatgctgataatattacttattctaaaatgtaa

SEQ ID NO: 287897 - DNA, 828 bp, Morganella morganii
atgaaagtaattagcttcatcaacatgaagggtggtgtcggtaaaacaacagttgcaattaatgtggctcattgtttagccggtagatatgggaaaaaaatacttcttgtagatatggatcctcagtttaatgcaactcagtgtatcatctcacctgctgattatgtgaaacatatgcaattaggtaaagatactgcgtgcactatattccaagctgacagggtgattgtcagcactgtcactggtccagaaaaaatatgtgaaaaaaaactaaaagacatattgccggttactatttcaagtcagcttgatattttaccgggaagtttagaactccatagaattgaggtttctgctggtagtggacttgaattcaaattaaaacgatatctagaaactgtgtcagataaatatgattatgttattatagatacaccaccaacaccatctatttggatgtatagtgctttaatttcatcagattactacataatacctgttaaacctgagccattgtcaataacaggaatagaccttttagatagtattattgaggataaaaagcaaaactttgcactttcaatagaatgtgcgggagttgtacttaatatggttgaagagcaaacgttagtatataaagactcaaggaatttcctcgaaaataataaacgatggcgtaatttaatttttacttcatttttacctaaaagaactgctatttcaaagaaacaaacatcatcaaagcatattttagatataaatgattcggttttacatatgaagctcgtgagagttgtcgatgaaattattgaaagaacacatagctga

SEQ ID NO: 287898 - DNA, 282 bp, Morganella morganii
gtgacagtgaaaaaaacatcactggatgcgcagacggttattccggcggcggttgagtcatgggcccggggtgaaactgaaggggatggcgggctggtcgtcggtcgtgaggtttccccgtttgaaatatcggccggtattaatgcttctgagcctcgtctgtttgtcacacgggtggaactgtccaccaacggcacggactggttatccgatacttacccggtaaagttgactgaagttgccagaatcagccgcagtgcggtgcaggtggtatttgtatga

SEQ ID NO: 287899 - DNA, 1566 bp, Morganella morganii
atggctgccaagcaaaatatcccagcacaattacgtttgaaggatatacagatccgaaggctcaaaggtatttcgagttgtaacattacatttcctgcaaacaaaaaagtcactgccattatgggaattaatggctctggtaagtctaccatcattcatgcccttgcctgttgttataaacctcgaaatgtcacttcaaaggaaaataaccgattttctgatttttttactccacacgatgataacaactggcgcgacagtggctttactgtccagttttacgcaggaagtctaaacaatcaggggaacaaaatttcatttgaaaccacgccagcaccgaatgatgtatttactcaaatgtactctaaagttagtcgttggaaaccaatttatgcacgacgtcccgtcaaggaatcgctttatttggggctacaaacgctaggtaccttgtcagacgatctggcagcttcccgccatgcgagatatataagtcaaaacttcgaacctgcatgcatcaaacaaaaaatactggagtcaatgtgtcgtgtacttgaagcggattactctgatctgatgacctgtgtgaccaatagcggttacacctttagtaaatttaccaaaaatggtattacatacaccgaacataccatgggagcaggagaaaaacgggtttttgaagtactgaaagcagcgcatgacccactcttgcgaccgaacggcttattgctaattgacgaactggatgtacttttgcatgaaaaggcatttaaaaaactagttgaagaactaattgtcatagccgaggaagctttgcttgaaattgtcttttcaacgcacagagaatccatcgttcagttcagaagagcaataaatattgtcagcatttttaatatgggaactggggtaactgcgtttccgggggtatcatctaatgcactacgacagctaaccgatattcagcctgaaatgataagtgtttttgtggaagatgaactggcacgcacagctatcaatgtacttcttgagcgagaggcactgaccgataaggtgaatgttgagctgttcggtgcagcagagaactctgcagtagtcttggctggactaatgcttgccggtaaagacattaataaggttatatgtgttctggacggcgatgtttaccggacagtcccagagaggtgtaaaatcgtaaacaagtgtttgactggaacagataaaagagaacaacgtcgtgcggttatcaccaggatttttgagttcagccttactgatttccctcaaaaaggcgctccggaatataatcataaacgctggtttgacgcgatagatccgaccactgtttcggcggaagagttagctgaatataccaaactcagacagttttccatgtcgattaatggactcaatgattggcacgaatattatgacaggctcaattatctagctagaaaatttaacatcgaacatactatccttagctatatcagcaaatactccccgatgtggaataattatatttcagcggttcgtcgggaaattattgaccgagctgctggactagaatga

SEQ ID NO: 287900 - DNA, 354 bp, Morganella morganii
atgcattttcagttaatacatggtctgccgttcggcaaagaagaagacgcagagcttcagtttgatgtggaactgcgtcagctcactgccggtgacattatcgatgcggaagccgccagtgaacgtgtggtgattactccggaaggcccggcattattatccagtccgtcccgcatgggatttgaactgctgcgccgttctgtcggacgtatcggtaaaattcaggggccattaccgatggagatgctgaaaacactgcatcaggcagatattgagctgttgctgactgaagcggaagcgcgccggaaagcggcactgaaaaccgctgaacaggcggcaggctcggggcgatag

SEQ ID NO: 287901 - DNA, 177 bp, Morganella morganii
atgacagaactgcatttaaagcccgttaccgggctgactgtccgtgaccctgaaaccatgcagccgctggctgaaaaaggggaacgcaagccccgcaccgcttactggctgcgccgtcttaaagatggtgatgtgaccgaagttacggctgcgcagaataaaggaaccaaatcatga

SEQ ID NO: 287902 - DNA, 708 bp, Morganella morganii
atgcgcaaaaatattcaggcagccattttttcacatgccgaacgtgaatacccccgcgagtgctgcggggtgatcgcccaaaagtcccgtgtggtgaaatactttccgtgccgaaatgtcgcggtttctccggaggaacattttgtcttatcgccggaagattacgctgcggcggaagattggggcacagtgaccggtattgttcacagtcacccggatgcaaccacccggccgtcagaactggataaagcacagtgtgatgctcttggtgtgccgtggtatatcgtcagctggccggagggggatctgcggactgttcagccgcgcggtgagctgccattactcggtcggccgtttgtactcgggtttaccgactgctgggggctggtcatgagctggttccggcaggaacactgcattgaactgccggattaccgggtggattatccctggtgggaacagggggaaaaccgttatgcggacaactggcaggaggccggatttattcaggttgatgatccgcaacccagcgatatgattgtgatgcaggtgcaggcaccagtggccaatcatgctggtattctgctggatgataatatgctgcttcatcatttatacggacacctgagtcagcgggtaccatatggcggttattggcgcgaccgcacagttatggtactgagacataaaatcttcatgactggctaa

SEQ ID NO: 287903 - DNA, 855 bp, Morganella morganii
atgcaaagaggagttgttgtttcttctgagttaataactcgcaataaaaatgatagcgggtttactatacagcgcacaattaatccagtagagatgaattatcttgctctctactgggataaaatagttatcccgtcaaataatataattcacactggagtttctaatgaagacgtttttatggaaagcggtattttagaaaggcctagatattcaattaatggtgcttttaataccgatgattaccctgatctccaagtgaagcttcagtcaaaaacagttgatgttcttagagagaaaagccctgattcagattggcggatacaccaatttggaggtgattttttatcaagagatagcttcttttctgagtcagccagaatagagctggcaaatttactacccgtcccttcagttgatgtgcacattcatgaaatattagagtttaaggaaaggagagcttcagagctggtggctcttcattcttatagtgatgatttataccttgagatattaaattcaggcgacccagatttaaccaaagcgaaaacaatgtctaaattaaaaaaaacaatatcagatattgataagcttaataatgagagttggcggtcaccaataaaatttaacctacagataagtaacgaggtagatatcgctaaaataaagtcactttacttaacagtggctggtgcagcaacaacaggtcatccactggagtcattaatagttggagggttgtgtacatttttagaggggtttgtaagtctaaaggttggattgcagagcgtcaggcctggtggtggtaatgagcttatttatttatccaatgcaagaaaagaaacgataatctaa

SEQ ID NO: 287904 - DNA, 705 bp, Morganella morganii
atgtctagatttgtaagttctgattttgaatcattaaggttatttttaatagagtatggtttgaaagatacatgccagaatatagagtttttgaagattctaaaatctatacataagtcatatctttcacttttagttttttattcggaattaaaaattaatcatagcaatgattttgatagtgagattctaaatagaatggctgaaacgtgttctgattttggtaattcaattttattgactactcatggaatgtataaacaagcgagtatgtcaaatcgaagtgcaattgaaaacttcgcaaaatcaatatgttacgctcacgataatacagtgatatctgattttagtgtgcgcagtgtatttagtaaaacaagtagtttaagttatttttcagataaaactttaaatgataaatttaatttaattacgtctatctattctaatttatgctcttatacgcacaccgcaaccataactaacatgtctcacattagtgcattaaatgatcttcctaaatttaatatagaaaaatcaacagagatttctactttgtataaaaaattagttaagtgctgtctctatatttatattcgtatttatagagggtatttttttaaattctcaccagataatcgtgacattatatttgaaattttttcacctaaagaacgactgggtataatggaggcggaagccttctga

SEQ ID NO: 287905 - DNA, 459 bp, Morganella morganii; identical to SEQ ID NO: 104977

SEQ ID NO: 287906 - DNA, 705 bp, Morganella morganii; identical to SEQ ID NO: 8686

SEQ ID NO: 287907 - DNA, 315 bp, Morganella morganii; identical to SEQ ID NO: 35584

SEQ ID NO: 287908 - DNA, 660 bp, Morganella morganii; identical to SEQ ID NO: 35583

SEQ ID NO: 287909 - DNA, 1191 bp, Morganella morganii; identical to SEQ ID NO: 198466

SEQ ID NO: 287910 - DNA, 129 bp, Morganella morganii; identical to SEQ ID NO: 33085

SEQ ID NO: 287911 - DNA, 279 bp, Morganella morganii; identical to SEQ ID NO: 33086

SEQ ID NO: 287912 - DNA, 705 bp, Morganella morganii; identical to SEQ ID NO: 8686

SEQ ID NO: 287913 - DNA, 135 bp, Morganella morganii
atgaatagagaattatacgaaaaagaatatgaaatctatttcaactctttaaattacggagacgaggttttaagttttgatgaatttgttgagtgtatgaaatgttttgagaatgaaaaggaggttagcgactaa

SEQ ID NO: 287914 - DNA, 213 bp, Morganella morganii
atgaaatctatcttaaacttgacttatccagccatttttaaattcgctttcacaaaagcggaaatcaaagacggtaaagcgttcatgaatacatacggtatcaaacaagcgtttgaagtgaaaagtcatgccgagcttgaaaccctaatccagtctatcgccacaaaatgcggcgtaaatccttccaatgttaattttgaaattatcgactaa

SEQ ID NO: 287915 - DNA, 471 bp, Morganella morganii
atggaaatcgttaaagtatttcagcatggcgttgaactagggacgcttccatcggatgattatttgaaaataagaaatgaagttagtcaggataagcgaacattattattacaatatgctatttatgttattgcatttttcaattatttattttcaatagtgaaaattgctttcgttttaaccttaagtttaatattgtatttgtttttatttgattatcatgagtttactaatagtcttttgacgctagaatcatcgataatctttctcagtatttataaatttttttctgcttttggttttattgctgcaattatttatgcttttccatttatttttaatcctacaaaattctttaaatcattaggttattacaatgtaaaagaagaaaaaatttcagagaggttacggctattgtttgaaagtcctgtagctggctttgtttatgtgaagaaagtcaatgaacaatag

SEQ ID NO: 287916 - DNA, 228 bp, Morganella morganii
atgaaaaacgctttatttgttgctgtgatggttatcgggatggttactttgtctggttgtaaagaagaaacaaagtcttatgggtggtatctggataataaagaggatgcttatcgggtacatgagaaatgtcaaaaatcaggggagggttctgataactgcgaaaatgctcgcagggcatataacgcccatgaagatgccagaaaatggggatattctttaaaataa

SEQ ID NO: 287917 - DNA, 369 bp, Morganella morganii
atgttcggaaatctgcaccggattgcctcgcggtatgttccgcagcaaaccgtactctggtaccgcttcaaaagccgagagcctgacgaacggggccatgatcagaacgcgtattatgacccggttgaggttcgcgggagctggcaggcggtggatacccgggacattcagtctatggggctggacaccagtcaggtataccgccgcttgtatacgtcccacgatatcagcgccattcagcgcggtgcttcaccggattatctggtcttcggcggcaaacgctacgatgtgaccggggatgctgactggtatgcacaggacggctggaagtcggttatctgcattgaggcaggcaatcatgacggataa

SEQ ID NO: 287918 - DNA, 132 bp, Morganella morganii
atggtgtgtacagatacccgcgagattttttgctttctccgcctcactattgcctgcatacacaaagcgttcggttacctcagctttctgcccggcggtctgttccgtgatactcagcagacgcccggctga

SEQ ID NO: 287919 - DNA, 315 bp, Morganella morganii
atggtgaatgaacaggggcagattgggtacgacataccacctgaaaaaacgatcagtgaggaggacgcggcaaaaatggcgcaggccatgaccgcacatctttacggtgtgtcaaatgacccgatgaaccctgtcaccagtcaggcgatcagcaatcagtcgacgaccagtaatgaaacaaatatcagtatcggtgaacttaaggtcgaaacacaggcaacggatgcacagggtatggcggcgggagccaaagatgcactcggatctcagttgcaggactttggacatcagacaaatacggggctggggaaatga

SEQ ID NO: 287920 - DNA, 429 bp, Morganella morganii
gtgaacccgaccgactttccgttagtgtctttccgtgccatctataaggcttttgccgcagtacctgatgatgaaatttttatcattgcactggaagcactaaattacttttccccctgccgtggagtctgcacaaattcagcgtggatgctggtcgtcgcgcatatgctcgacctgaacggccgtattgctgacggggaatcaccgaccggtgtcgtgaccagtgtcacgattgataaagtcagtgtgtcctacaccgcaccgcctgccggttctgactggtcgcactggttcaagatgagtacctatggccagcagtttctggcgctgataaaacggtgcagtgtaccgcgttaccacggcggcggcggggaacgggctgcatttcgcggggcctttggccgattcacgcggggaggtcaccggtga

SEQ ID NO: 287921 - DNA, 219 bp, Morganella morganii
gtgacaaaactggcacaactgaaagccgtgtatgacgagttggcaaagaagcagcttaaggttggtttttttgcgcattcaaaatacccggacggcacacctgtcgcgtatgtggcggcgattcaggaactcggttatccggctggggcgtcagttttttcgtccggcaatgacagaacaccggcaggaatacagtcagttaaccgggcggaccgttaa

SEQ ID NO: 287922 - DNA, 429 bp, Morganella morganii
gtggacccgtccgactttccgttagtgtctttccgtgccatctataaggttttttccgcagtgcctgatgatgaaatttttatcattgcactggaagcactgaactacttctccccctgccgtggtgtctgcacaaattcagcgtggatgctggtcgtcgcgcatatgcttgaccttaacggccgtattgctgacggggaatcaccgaccggtgtcgtgaccagtatcacgattgataaagtcagcgtgtcctacaccgcaccgcccgccggttccgactggtcgcactggttcaagatgagtacctacggccagcagtttctggcgctgatcaaacgatgcagtgtaccgcgttaccacggcggcggcggggaacgggcggcatttcgcggtgcgttcgggcgcttcacgcggggaggtcaccggtga

SEQ ID NO: 287923 - DNA, 693 bp, Morganella morganii
atgaacaaaccaaacagtgaccaggcgaatgacggcagtctcgccgggcagtttatggctgcgttccgtaatctgctgatgaatattgatgacatgcttcccgccaccgtagtgagttacgacgatgcgacaaaccgggcggtaataaaaccgctggtgatgatggtcaccacggaagggaagcggatcgggcgtggcgcactgcctaatatcccggtattccggttcggcggcggcgggttctttatccggatgccggtaaagccgggggatttcggctggctgaaagcgaacgaccgggatatcagcctgatttttcagcgcggcggcctggaggatgaaccgaatacggccaggctgcatacattcagtgatgccatgtttttccctgacacgctcaaaggctgggtgatcgacggcaaaaacgcggatgcactggtggtgcagtcaacagacggttctgtgtgcttatccctgcatgccgataaagcggtgctggacacaccgttgtttgaggttaatgcaccggaaaccatttacaccggcaatgtgacgattaacggtaaccacgcagtcaacggcaacagtgattcaaacggcggcactatgaggcataacggcaaagatatcggttcaacgcataaacacagcggtatccagcggggtaatgaggattcaggggagccggtatga

SEQ ID NO: 287924 - DNA, 435 bp, Morganella morganii
atgagtgagattgcagctgatattgcccgtgactgtaacgtgaccctgaattttcaggcaacggataaaaatatcggtaactggtatttctgcggtccggcgctgaaacaggttgagcggctgcaggaagccggaaatgtgaaagcgttcattgatgatgatgtcctgtatgtcaaagacagtgataaggcactttccggaagactgcggatcctcagtcagaaaagcggcatggtcggtataccgaaagccacggagaagggggttgatgtcacctaccttatcgacggggaatcctccctcggcggcatgctgcgtctggacagcaaatataaccccgccctgaacggggattacattatcgagcagctcaaattcgatattgcttctcacgacgatcctttcttttatcaggcaacctgcaaacgggcctga

SEQ ID NO: 287925 - DNA, 816 bp, Morganella morganii
atgattgatttgcgccggatccgctgcggtattgaacttaacgggcgtatgcagtggtatgagggattgcgcatccgggccagcggcaccaaatatgccaatccgctgcagaacgaatgcacggtgaatattgacggactgaacgcggaaacccgcactatgctgctgaccgaaaccagtccgttcgccggcaataaatcctcaccccggattgttgttgaggccggtcgttccggtaccggtattttccggatctacaccggcgatattgtcagtgctgaaatctcatcaccaccggatgtgacgctgacgctgaaagcgaaaaccaacaacgccagctcacgggatattgtgtcaccggaaggtaagcaactggcaaaaatgagtgagattgcagctgatattgcccgtgactgtaacgtgaccctgaattttcaggcaacggataaaaatatcggcaactggtatttctgcggtccggcgctgaaacaggttgagcggttgcaggaagccggaaatgtaaaagcgttcattgatgatgatgtcctgtatgtcaaagacagtgataaggcactttccggaagactgcggatcctcagtcagaaaagcggcatggtcggtataccgaaagccacggagaagggggttgatgtcacctaccttatcgacggggaatcctccctcggcggcatgctgcgtctggacagcaaatataaccccacgctgaacggggattacattatcgagcagctcaaattcgatattgcttctcacgacgatcctttcttttatcaggcaacctgcaaacgggcctga

SEQ ID NO: 287926 - DNA, 435 bp, Morganella morganii
atgagtgagattgcagctgatattgcccgtgactgtaacgtgaccctgaattttcaggcaacggataaaaatatcggcaactggtatttctgcggtccggcgctgaaacaggttgagcggttgcaggaagccggaaatgtaaaagcgttcattgatgatgatgtcctgtatgtcaaagacagtgataaggcactttccggaagactgcggatcctcagtcagaaaagcggcatggtcggtataccgaaagccacggagaagggggttgatgtcacctaccttatcgacggggaatcctccctcggcggcatgctgcgtctggacagcaaatataaccccacgctgaacggggattacattatcgagcagctcaaattcgatattgcttctcacgacgatcctttcttttatcaggcaacctgcaaacgggcctga

SEQ ID NO: 287927 - DNA, 252 bp, Morganella morganii
atgctgatagtgaatttttaccacgatgaaatcccggatatggctgatgcggtgaaactctccctgcgttttaccgaatggcggacgattgagccggaatacggtgaactgccgccgcgtaaagtcgcgaagaaagagcagagcagcacggtaaaccgggggaaagtccagacaaaagaggcggacactgccacgaagaaaaaagggtctgttgcaacccgtatcgcagatggtgactggagtctttcatga

SEQ ID NO: 287928 - DNA, 282 bp, Morganella morganii
atgccgccagagaaaacgatcagcgaggaggatgcggccaaaatggcgcaggccatgaccgcgcagctgtacggcatgtcaaatcacccgctgaaccctgtcaccagtcaggcgatcagcaaccagtcagctgtccgtaatgaaacgaacgtcagtatcggtgagcttaaggttgaaacacaggcaacggatgcgcaggggatggcggcgggagccaaagatgcactcggctctcagttacaggatttggggcaccagacaaatacggggctggggaaatga

SEQ ID NO: 287929 - DNA, 1524 bp, Morganella morganii
atgaatattggtattgtaattggtgttgaaaattataaaagcgatatttacgacaatcttacagcttgcaaaaatgatgcggagctgtttaaagatgttttagaaagcgtaaaggattttgaagaaatcctttacctaaataatgatgaccctggaacattaataaaaagaaatattgctgactttatcgaaaaatataaagaaaaagaaatttctgagtttatattttattttagtggacatggcgaaagatttgaagatgattttttctatttaccttctgattttgacaaaaaaagaagagaaacaacaggtctacgaaattcagaactagatgaatggatgaaatccatatctccaaagctatgcgtaaagattgttgatgcttgctttagtgggactcagtacataaagagtgaatttaacacagaaaataacctaaagaaatcagcaaaagagcatggcctgaatgatatttatttctggttttcttccagagatgatgaggtatcatatgctgggacagaatttagtcaatttacagaaagtatcctgacttcgttgctagatagaaatggagaaattcgatatagagaaattatggatgcagtagctgatgattttgcaaactcaggaagttcttcacctatttttgttactcaatcaactaacttagaaaaatttggtttagtttcaaatgatacacatcaattaatttataaagcctttggtatcaaattagatgatgaaacaaaagaaaataatgatagtaagccttcgctaccattagaagaagataaacaacccagtactaatgtttacgatttagtatcaataaaatcaaaagaaatttgtttcgatgagggaagtttacgaaattttgttaaagaatttaattcaaaattatcatcttggaatcaagatataaaaaaattatatacaattaaaattgataactcagtttcaagttacgatgttccaaacaacactaagttgggggagtggcttgaaagtaataaagaaaagaactattacgctgttgcaacttttgatacagaagattatgaggttgaagaatacaagcaattgcctaaaaagccgagaggaatatcgggttatctttcagatttagatcgttttgggatgttaggtggacttgatgatgggaaagaatataaattagaaaaagtaattaaaaagagaacgtttgtagatggttttgcgtacagtcattacatggatgatagaattctgcatgtatcctttgagcctttatttgaaatagttgatcctatatgcctttatgtggttccattttattcaaacaaagatgcaatgataagcttttcttatgaatttctaaaaaggcagagttgggatgagtatttcagaccgcaatgtaataagtggagaaatataaaagttaatattaattcaacagattcagctaacgcagcagctcaacatatacaaaaagaggttgaaggatggctaaaagatagtatcagcaagattattgaatga

SEQ ID NO: 287930 - DNA, 1512 bp, Morganella morganii
atgaattggaatcagttgcttaataacgcaagaaggaaaactaaatttgaacttttagtggcaaagggtacatatcctgaaactcaatggggaatgaatgaaaaaaaaggacaaagagaagagattgagcgtgattatgatagaattttgtttttagctcctactcgtcgtctagcagataagacacaggtttttccactagaacaaaatgatagtgttcgtactaggttaactcattcttatgaggtttcgaaccttgcaagaagtgtaggtacgcaacttgcgtatgaatatccagatctttttcctaataatcatgtagatatgagaaatgggacacttacacgtactattccatctctcttggctgctattggattggctcacgatttgggtaatcctccgttcgggcatcagggagaaagcgcgataagaacttggttttcaaataaagtaaatgaagttttgattgcccatgaaaataaaaaaatccctgtcatatataatgactttgtaaaatttgatggtaactcccaaactattagattgttaactcagttacagatattaaatgataattatggagtgaatttaacatactcagtattagctgcaatattaaaataccctcagtcatctgattatgttgaaaaaaataaaaagatagtttgggataaacatggttatttttactctgaaaaagaaatagttgaagacatatggaaagaaactggattgaaagaaggagttaggcatccacttacatatataatggaagcatgtgatgatatagcatattctgttctcgatgctgaagatattgttaagaaaggattggcctcttattatgatttaataaatcatcttaatcattttatatcttgtcagagtgagtttgataagataaatcataaaaaagggttagatttaattaacgatctttgtaaatatagtaaatctaaacatgaagaattttctaatccaaaattagatttgacgccttccgaactaaatgatttgtctatgcaaatgtttagagttcaggggattaaaatattaattgaatcagtaattaatgcatttgttaaaaatgcatctgcttttatggatgataataatgttatttcagatttaatatctattagtgatgggaggtttttatgtaaagcattaaaatcgtttgataaaaaatggggatacaaaaataaagaagtacttaagttagaattaaaaggacataattatatatgtggtctgatggatatgttatggataggaattcatggtaaattaaaagagaacaatgaaagctatcaatctgaaacaccatttggtaagtatgcatatgggcgtatatcagaaaattataggagagtctttgaggatgataaaaataaacttccaactatatataaggaatttcaattgcttactgatgccatttcaggtatgacagatggttatcttatatcactatataatgaattatcagcattgcgggagtatagatag

SEQ ID NO: 287931 - DNA, 903 bp, Morganella morganii
atgagatttgataaagcccctcatgtccaagcattaaagaaacgagtagatcgtttctttaatagtgaaacctcagttagaactgaggttcacgattttattggttttttcattaaaaataaaatcaatattttttcatttggggggcttgttagagatattggcttattttcagttcgtgattttgagtcggatgttgatttagttgtagatatagatagagaaactctttgctatttaataaatacgctagataaaactcttaaattaagagttaaggaaaataaatttggtggattccgtataaataaaaatgattggtattttgatatttggtgtgcaaaagatacatgggcaataaaagaaaattatgtaaaatatacaggtattgagagtttattaaaaacaacttttttaaactgggattctgttttatttaacctcaacgataagaagttgatatgtgaaagaaattattttgataatctcactggaggtgaattagatttagttttaagttataccccgaatgaattgggggcactagttagagttatgagggcgatatatggtaagggtgttaggaaattacatgatagagccgtttgttttatatataatggcttttgtaattacagtaaaaaggagattatgaaatatgagaagttgtcatataacaattctttcttagatgagagaaaattaaataatataaaaagacatattatgggttgtaatttagatgactccaattctaaacagttaaatattaaattggatgttaatgtaatatcacttgagtcgaatgatttgtttgaaaaaattaataataaattaaaaaaagatggtgataacaatcatgtgagtgaaactaaacaactatggctggatatatttgattga

SEQ ID NO: 287932 - DNA, 144 bp, Morganella morganii
atgaaaggtaaaataacaataagcagaccatcatatggtgatggccgtgatgtcattaatattcaggttcgcgatgatgtatcaaggattaaatttcttgatattgagattgattgcgccgacttcgccagggcagtaacttga

SEQ ID NO: 287933 - DNA, 477 bp, Morganella morganii
atggatatatcacaagcaggaattgaattaatgcagcacgctctcggcattaaccagcaaaacagaaaaccatacaggaactattttctttcatccggcaaaaatgaagaatgggagagtttaattaaaagtgggctggccgcatcaaatccagcaccgaaggaattttgtggtgatatttattataaagttaccgacaccggaattaatatagccatttctaaattaccagagccaagaaaattaactaaatatgacgaatatcttgatgcggatacgtgtgtatcattcagcgaatggcttggcattaagttgccagaatatgaacaccgatatcgtgacagcaaatacgaatacagaatgtatcgcgaaattcgagaccaatggtggaatttaacacgcatagaaggcgaatggatgccaactatgaaagccgccaaagcaagttataaggaagctctgaaagccagcaggtag

SEQ ID NO: 287934 - DNA, 372 bp, Morganella morganii
atgaaaagtgaatatgtgatgcacagacaagtgatgaaatttgtcacgccagaaccagacccgaaagatatctgtaacctttgtggcggtcacgtcggtaaagataatttaattcaaggacaggcagcaagtatctgttttgactgcgcagatttagcgaagcagttagcggatgaaaagcggaaagaaatagctgaaaaggaaattcagcaaatggcaaaagacttgtcactacaaaatataaccaccgacaaaggaaacgttggtattgctgacacaggcatggcaactgcttatatgtatgccgatcgcctatataaagccgggtacagaaaatcagcaccagaaattaagcagattaaggaagggtga

SEQ ID NO: 287935 - DNA, 756 bp, Morganella morganii
atgatccattatcacggcgggccgataacgcctgatacctgcgcgataagagcatggaaagcgcgtcacgcatttatcagtttcgcccacccttcacagttaaatctcgcatcagaaatatgtcagtcattcgcagttgataatggggcgtttactgcatggaaagcagctggccgcaacaaaattgactggtctgattattacggtttcgttgaaaaatggaagcgtcacccgcgctttgacttcgcaattatccccgatgttatcgacggcggagaggaagagaacgatgctctgttagcagagtggccacacggtgatttctacggtgttccggtgtggcacatgaatgaatctgatgaccggtttattcgcctgtgccatgaatatccccgcgttgctatcggcagttgtggtgagtatgacgttaggcggccaaaggcatcagtcgccaggatgaaagaccttatccggcatgttgtcgatgaaaacggatttccggcagcaaagttacacggactgagaatgcttaacccgcagatatttactcagttaccgctggcatcagctgacagtaccaacgtggcacgaaatatcgggatagataaatcatggtctggttcttactctccggcatcaaaagagaccagggcggcgttattggtggaacgtattgagtcgaacaacagcgccagttctctgaactactgtgaagagaaagaccgctttgactatcaactacaattggcggtttag

SEQ ID NO: 287936 - DNA, 2577 bp, Morganella morganii
atgacaaagcaacgtaaactggggcttgctctgcttattgctattgcattgtccggcggggcctggctgacgtattctgtgacgtccggcagcaccccggcagataaaggctatgagctgtatttatccggggatactgacggggcattccgttatttttccgcagaagcggaaaaggatccgcaggcagcctatgcattgtctgtgatgtatctcaacggctacgatgcaccggccaatgcgttactcggttatcagtggctggaacgggccgcgaatgccggtaataaaagtgccttatacaacctcggttattaccgctatcacggtataacacaggataccgcgcgggatcagtacggtattacctccctgaaagccgcggcacaggccggtgtccgcgaagctcaggaattactgggcactatttaccttctcgataaatacggcaatattccgtcggaggcagaacaggcgcggaaatatatgactgcggccgcagatcagggatcgttttttgcaaaattcgcgctgggttatatcgcgtatgaatatgataaagattataaaaaagcggtcggtattctgacaccgttgctcagcgagcaatttaccctgcctgctatgctgctttccggaatatatgaaaaaggcggtcacggaatagaagccgatccgggacaggcaaaaaaataccgctatatggcattttcacaaatcagctcactcagtgaagatgatttgatgccgaaagcattatctctctacggttcagaaacggcagatgaaataaccgcccggctggcaaaactggagaaaatggcggagaacggcaatcagcatgcccgttatgccctctatgatacttatatgcagggagcgggtgttatcgcagataaagaaaaagccctccgctatttactgccgctgattaatcaaaaagatccgaaagccctttatacctggtatcttgataccaaaacaaatcctgaatatctgacagccgcagctgatgccggatatcccgatgccctttatctgctttatcaaatccaccgtaatatccgttttgatgatgccttcggttatgaccgggagcgtgcggcgaaataccttaaacaggctgcgaataccggacatcacgatgcattaatcgatattattgaggatattgtcagcagctatcagtttccggataacgacaccaacgcacaggtatctgcctatttagccaaattactggaaaaatatccggatgacccggaggcgctgatgctggcttccgcacgttacggtgatcaggaagggaatatttatgatccggtccgggccttcgaactgaataaaaaatcggctgaattatctcccctgccggattcacaggatcaactggcctataaatacgccagaggtatcggagttgatcaggatatgaaaaaagcggtcgggatctataaatccctgctgagagatccctattttcaggataaggcttaccggcgtttaacggatctctatttttcctttgataccggcggtgaaattgatgaaaaagagattatcgcgttcctgaaaaaagatatcgaagaaaatgataactaccgccaggcgtatttttatgccgattatctgttacaggaagatccggtaaaaaaccgtaaacaggctatggaactgtatctgaaagccggcgaatatacccccagtgctgatgttcacctggcaaaatcgcttatttctctcaataccggcaataatgaacaggctttaaagctggcgctggaaataatgaaaagcggatatgcccgctccctgctgacggaaaaagaatggcatgatgtcacgcagattgtattctccgaaggtaaaaacaacccccttgccagacaattctgggtcctgcttgccctgcgggataataacgctgaagcgcagaaactgattgaaccgctgctgggtcaggatccggttgtcacgtattactatgcgaagctgaaactggaagatgcggaagataaaccggatatgaccgatgagatcctgcgtccggatattgaactgatgatgaaagcggcagcgctgggcaacacagacgccggtgaatacatggtgaatcgtctgaagagcgcgacccgctccggcacgcagagcaacctgaatcaggcgtttctgcgggtaaccggactgacagaacgcgatattgtgccccggctgacacagtgtgcagatgccggaggatgggcctgtatgtatgaattgggcgagatctattatgaaggtaaatacggtgtaaaagctgacctgaatacctccgtcgcctggtacgaaaaaattcctgatcgcgattaccgtttcacagaatcacgcctgagcaaagtcaaaaagagccgtgacaccctggcagacctgaatgcccgcgtacagaaaggggatgctgaagccgcctatgaattatcttatgcctggaggaacggcaaccacggcctgattcaggatccggaaaaatcacggtattacctgaaaatggcagccgaaggcggtaacgaaaatgctgtcaccacactgattgatgactaa

SEQ ID NO: 287937 - DNA, 2070 bp, Morganella morganii
ttgcttctgtcgctgtatgacaaactcccgggaaccggcaataacagctatctgcgtgatctgggtacacagtacctgcagggcagcaatcttgtcagcgcagatcgtcagaaagcccgttattatttcagcaaagccggtgattacggtgctcacgagctgaaagcaatggatcagcttgaaataaatgtaaaactggcggatgaaagcccgaatgctgcttatgaaaccggttatgcttattttctcgggcgcggcacacaaaaagatctgcagcaagccctgccatacctgcaaaaggcagcagatgccggtcataactatgccacaatcctgctggcagatacctatgaaaagggagagtacgataaagagatacagcgccggattatcacaccggactgggataaagccattgtcctgatacgtgcctacaaagggccgcgtgatgtatcagaaaatattgcattctatgagagtacgataaaaccggcactggccggagacagcagcgccatgaacgccgccggggaacactataagagcagcggctattatgataccgcccgttactggtttgaaaaaagcgcggaaagcggttatctgcctgcattctgcgctctggccggggcgactgaaagcaatgacggtaaaatggcggtattacgccgtggtacggagaaaggtgacagttgctccgataccatgctggccatcatgcagctcagagagaaccacataacaccggattcaccggagtgggccggtattatcacccgggtggaaaacggtctgaaaaacagtgatgaagaggtgtcaaaagccgcgtttgaagcactgactcagctgtatcgcggcactctcagagatgacaacggcagctatctgtataaggcagacaacaaaaaatatctcacactgctggaatcggaggcagataaacgggcagatgcacaaatcgacctgttctattattaccggcagaataatgacatggataaagcactgtcttatctgcaaaaaggccatgatagcggcgatatcgctgccacagaaacactctacgaatactatatgtcgccggaatattgccgccgtgacaatgccgatcccgctaaagcggagcagtatctgacggagtggctgaaaaaatcggactatccggaaaataccgataaccatatgctgatgccgccggaagagcggaccaaagccatgggtgatgcgtggcttgaaggcttctgtaaccgggcaccggatcctgacaaagctatcgcgtggtatacccgctcactgacgtataacaacacacatgccctgaaaggtatgtatgacgcgcagatagtgaagaagaatgctccggaaacctattactacggttcactcgccggtgtcagctcccgggagggggacgaccttatcgccacactgacggatgcagaacgcgaaaccgtgctgcagcgtattaagaaaaagcaggtgtatgagcaatacggtcgttatgagcaggaaattgaagcgaagcggcaaaaagcagaaagcggtgacggcccggcggcattctcgctgggggtaaactatgcccgtggcgaacacgttccggaagatacggaaaaaatgctctattactataagctggccggtaaaaacgggtacgcccgtgcttacaacgtgctgggtaatctctaccgtaaaccgaatgagcgcgggatcccggtcgacggtaaaaaagccctcgcgtattttgatgcgggggcaaaactgggcgacagcaataccgcacacctcgccggggatatgctctatttcggccaggccgggctggaaaaagattatccgcaggccgcccgctattatgaaatgacctctcttgaacagggcagtcatcatgaaatggcgaaatacaaagtcgcgtggatgtactatcacaaaatggccggtaccggcagcgatgatgatctgcgaaaagcacgggataacctgatattgtcggcaaaatacggcaataaagatgccgaagaagctttaaaagagtgggatttctcacgtatcagcgataaaaataaataa

SEQ ID NO: 287938 - DNA, 753 bp, Morganella morganii
atgtctctggggggaaataccggtgacagtaaggcttatgtgccgaaaagcggttattacatcaccaaagtttactggtgcggaaggccggaaaatatggatacctgcagtaaggcgaaaggttccgtcatactggtgggggacagggtctggctggagcaagccaaatcgtttgatgagcaaaaaatctttaataatgatcaaaccaaaaaagcgccttcagccggtggttactgtttcacaatagaagatacggaaacggggtatgaataccgcggctatatgggctatggccctgacggccggggtaagttctgcgaggatgcttataagttacccgtcgaaccaccgaaatgcaccctgaacggcggtacggatctggatgttcatctgggaaaactggaacgcatggatattgccgttaaatccggtacaacaaccccggtaacaaaagacatctctattaaatgtgacggtaatattgtttatgacgccaatatgaaactggagttcaccccgatctccgtcagcaatgaacaggtaatcagcacgtcaaccacaggtctgggtgttgctgtgttatataatggcaggacggttcagccgggacagacatttccgctgagttatcagcccggtattcataccctgaagctgggttttgaagcagtgcgtgacccggctgttgcggcgacagacctgaaaaccggggattttacggcgaatgctgttttggttttcacggagcagtaa

SEQ ID NO: 287939 - DNA, 243 bp, Morganella morganii
atggctgatatggggctggatttgtccggttttgctgaactgtcccgtgatctggaatcactcagccgggctgaaaatacccgtgtgctgcgggaagcgacgaaagccgcagcggatatgctgcgggatgaggtccggcggagcgctcctgtcaggaccggaaaactggcgcgtaatatcgttaagcgccgcatcggcggagccgttatctcagccggaatttacgtcgaagatcagcagtaa

SEQ ID NO: 287940 - DNA, 1914 bp, Morganella morganii
atggttaatgatattaaaattccctttcagaaaaaggagcaattttatacatggattagccatggggtggctgacagtccatctgtaagttcagaaaatctgattatagattatagcaatacaattaatgtagagagtaagatccctgaaaaacactatccggtaaatgagattatcagagatggttttagtcatcatttagctgcagaaaatatattgttgaattcttcatcaatagatttgaagtcaaaaataggtgcaattaataatttaaatgttcaggctaaagagaaaatttattcacgtgaaagtacattggtagcgggtaagtcattatcattaacagcagatagtattgaacttgaaaataccaatataaagtccggtgagctgtctcttattgcaaagaaaggcgatgtaatatactcaacaggaatcaggcctgtatttacatctgacatttctgcgctgcctctgttacatgcacctggtggcatctatgcagatgcaggaggtgatattacattcaaaaatatagcattcacattaaatagtcatgtggatttatcttcccgaaaaaatatactgattgattttgatccgaaaacgatatcaggaatatccacaaaaaagtcagattatgaaataaaatcactgtcagataaatttcaggaatggacactttcagattatatcaccctgaatgccggaagtgatattgctattaatggtacagatattagcagcaaaaatgatataggtttttattccggcggaaatatagatattacctttgataaaaaatgggaaggccgtagtgatatctatgcaagatatttaaggcccaaaatacgcattcattcagaaagaaactttattattaactctgccggagatgtaaatctattgaatgcaggcctgcatgctgatgagtctttattattgttttctggcggggagtttagcctggcagggattccttattcagcaataaggtattcttatgatgattacattgataatcgctatgtaagttcttatcttacagcaaagaaaaatattacattagtggcggaaggtgatgttaatctgcatgcagcaatactctcctctgatgatgatatatatattcatagcagtggaaatattcagttgggatctgaaaaaatacactatcgtcagaaaagacgtaattatctggaagatacatatcgccatgtcagtacactggtaaaaagcaagaacaaattaacactattgtctgaaggcagtgttttatttcagggtgctgagcttatttctgatggtgtaatggatatctcggcaaagggcgggtatttatatgcacaggcaatggaagaaacgagtcattatgaagataagaaaaagaaatgtaatcgttggacattctgtataacaaaaaaagaagttacaaaggtaaagcatgaagtaaaaaataaaacgacagaatttacatcgaaagaagatattaatttaatcgccctggatgatatcacacttgaagctgcaaaaatttcagcagctaaaaatgccaggctgaaaagtatctcagggaaaattaattttaaagctgttaacgactcactttatgagcaaaccgtcagccattccagggggttctacattacccgccgtgatcaggggcactcgctgagccgctggcggttaccgcagatttattacggcggaaatttatctgttgatgcagcaaaaggcataaccgcagacagtaaaacattcagcattcctgaatttaaagaatccgcaatgatgctgagcagccataccggaaccggttggctgaaagaactgataacccgcgatgatgttcagtggaaccgggttgctgatgcctatcagcgctgggactataaagagcagcaccttaattag

SEQ ID NO: 287941 - DNA, 225 bp, Morganella morganii
atgccgattctacattatatgtcaaatagcagtacgccagaagtggatatccgtacaggctttaccacaaatatgttcatcttccgctttattgaccgtatttcacatgaaattaaacaggtcactgcagtgagtgacaaacacgcgcgggaagttttgggtggagatctgatattcgcagctcgttttcgtcagaacgataactgccaggttacgggacgctga

SEQ ID NO: 287942 - DNA, 729 bp, Morganella morganii
atggcaacctaccgtatcgaccccgacctcgcatttatcggtcagtgcagcaatgaggacctcggtctgctggtctccgttctgacacacgacagtaaagacggcaaaaaacgtctggcggaatctctgaccacctcaccggaatatcagctcttttaccctgaccatcagaaatactggcctgccatctgtgccgaactgcaggccttcggggccaacagtctggtcacgctgctgcgcggcaacaaaggcgtgctctaccgtgaaatcctgcacgatgtctgcgacaagctgaaagtgaactacaacaaagaaagtccggtggaaaccaccgagctgaacctgctgatgaaagtcctggaaaagagcctgcgggagatgtcacaggacgagctggtccgttttgcggacggactgaaactgaatctgtccgcaccaaccccgcagcttattctgctcgcggtgcaggcggccgtcaccagctccggtgtcgcagccctgcagtttgccaccgttgctgctgtcggggtgattgaggcgatgggcggcattgccacctgggggacactctttgccgccaaccgggcactgggggtactggccggtcctgtcgggattgcgctgagctccgcctggctgatagccgatatcgccggtcccgcttaccgggtcaccgttccggcctgcatcattgtggcgtacctgcgccagaaggccctggcggcctga

SEQ ID NO: 287943 - DNA, 1020 bp, Morganella morganii
atgaatgacgatataacctgtgaaatactggcgctgtcacaaatctacaataacggtacagagattacctatgatacaacagaccgtgagttattccggttgatagcgttacacaccactgcattaactaaaagaaagtgtcagtctttaccttttagtgcgtgctattttggtgataaattacaaataaaggccactaaaaccggtcagtttttttatgaattaatacaaaacattatttcactttcccgtatcaccggtaaccggcgtaagttacatccggttattccgctgattgtttctcttgctgaaaaatatcatatccgtcctgttccgatgttgttggaatactatcctgactctgaggaggatattaaacagctaaatgacacctatagtgagtttattcagttagtggacagcaaagagtataaaaccgctgtcagtacctttaagaacagcgcccgcaagaattaccggttctgttgccgctatattgaaaacctgtttgagcgccatgcaaagctgttggtggtacggacagacctgtcttacggaaaatgggtcagtcacaaagtcactgccggggatttaacccgtcaccggattgccctgtacaaagcaatacagcggttacccctgtttaaacactgcgtcggttatatcctgaagctggaatacggtcgtgagaaaggctttcactaccactgcctgtttttcttcaacggccagcatgtcagacaggatattacgatagccaggcttatcggtgagttttggcaggaaactatcaccgaaggacaggggatctactttaactgcaaccgttataaatcagattaccgtatctgcggcattggcatgctgcaccgcagtgagagtcgccgccgggaaggcctgatgaccgctgtgaactatatctgcaaaacagaccagtgggtgaaactgcaggtgccggggatcgaccggacattctggcggggaaccatcagaaacaaacggcgtaaaacacgccggtaa

SEQ ID NO: 287944 - DNA, 684 bp, Morganella morganii
gtggctgaaactaagaatattgatgcagttgctggaattatttccaataaaatatttagggaattaaaatgggagactagtaaacatactgatcttaattggtcgtgttgtttagactcgcatctcaaacataaccaaaaagaaaaaacacaccctactgatgtagtatttttctataaagatccgtacagtgatgtatatcaatatattcagacagatcttaagtcttattcaaataagactataacagattctcaatatgggaagatacaatctacaataaaaagcttagctcaacaggtagattgtagtgttagaaaccctgagtggaaaaaattatttttgaatgaaatcactgaaaaatttcaagtccatggaatgctttttatatacaatcatgacaacgaatatgataaagaattgcttcataaactatcaagtattctaaactcagagcttaaattcccaattaactcctgcctctttattttagatccaattacaatccggtttctattaagtatgaccgaagatatagcgaaacgaagaagttatgaagattatgatgggcagttaaccgaaatactatgggaaaaaattcctaaatgggatagttgtagtttttttatcctgataagcataacaaattcgcatctaaagataggttgttacccgcgactctag

SEQ ID NO: 287945 - DNA, 483 bp, Morganella morganii
atgaaaaaaactattattttactcatcacgtttttgttttctattccggcgatatcattaacacaccaggaatacttccacgacataaagcaaaaatcagagcaaggtgatgccaatgctcaacttgagctatattttgcatatcagctaggaaggggtgtcagacagaatgaaagtgaagggataaagtggctggagaaatctgctgagaatggcaatgtaaaatcacaagggcttattgggacgtattatctgcatggaataggtgtaagacaagattttaccaaagctataaaatggttcaccgctgccagtgagcaaggcgatgatggatctctgtttgcattagctggcatgtacgaagaagggaatggcgtaaaaaaagacatgtccagagccaaagaatattacggggtagcttgtgataatggcagtcagatcggatgcgacgcgtacgcaaaactaaaccaaaaaggttattag

SEQ ID NO: 287946 - DNA, 378 bp, Morganella morganii
atgaatgagaacaatgtagtaaaattcgatgagtttgttaaattccttaacgaaaagtctgaatctcatgtttgtccgatttgtggtgatgcaaaatgggatctatttacccctgaccattgggtcgctaaatctaacgatgggaaggtgatgaaccatatagtatatacactaccaggaacggatagattccatgatagtgatgcgccgagccaattgcgtcaatcgcctatactcaatgtgcttgttatgagttgccaatcctgtggatatataaatttatttaactacaataaagtaaaagatattatagagttatctaaaaaaacagagggtgatgagaatatggggaaaaataatgaatcatccggaatttaa

SEQ ID NO: 287947 - DNA, 513 bp, Morganella morganii
atgaatcatccggaatttaaaagccacaaccaattagaaaaagcaccatcgcctccggagtattatccggcccctgttgacttagggagtcataccgcgtcatactactcacaagcgccagcagttcgggtaatccatgtgaccaatggaagtgagactactaatatgattaacataagtaaatctcaattttattttagtgctttgtctattattggctctcttgttttcactatagcatgtacgacttggcttttatcaaatcacataagcaattcagttaacgatacaagaaaagaattacaatcatcgataacttcgaataagcaagaattgataactttgataaattccgccgatgctagaaataacgacagatttaaccgtattgacactcaatttgataaagttgatgcgaaaatagacaagctggaattaaagattgatagcaccttcaaagaaacaaatgcaaacatcagtgatataaaagatttgataactaaaaataagtaa

SEQ ID NO: 287948 - DNA, 135 bp, Morganella morganii
atgactatcaatcagaacgttttccgtctggcgcaagcacaggcgcgggtagctatacgccagaaatgcgatgacatctggtggttagcaatggaattactcagagaaagttacgggaggcaggtatgcagataa

SEQ ID NO: 287949 - DNA, 159 bp, Morganella morganii
atgaacacatacgcagcacaggagcagcaaaagcaacggattgctgagcagcgcaggaagcgcgaacaggaagaaagggatgattactggtttcgtgaaagtgtcggattaccaacaggacgggtaccggcagattttctgagcggagaattcacatga

SEQ ID NO: 287950 - DNA, 222 bp, Morganella morganii
atgaaggtgacgattaccggtgagttcgtcatggaagaatggactgaccgtgagggaaataaacggtcaacaccggtgattatcgttaatcaactggactttggcggcaatcaggcaggaggccagaaaccgcagcagccgcaacagcaacagcgacgggtacaacaaccaccggcacagaacgagccgccaatggattttgacgacgatattccgttctga

SEQ ID NO: 287951 - DNA, 477 bp, Morganella morganii
atgaaagagaggggagtcaaattcagcgacgagatgttagcagccgttatgggcggcagaaagacgcagatgcggccactgattgagccacagccaaaagtaacagaaaagagactacgtgaactggatgcatggcaggagggttacaccctgtctgagcaggtgtgtgaagcatggcggcatgaccttattaataatgactgtccgtatggtcaggctggtgacattatcccgttcgcagacaaagacggcaatatcaaaggggaaattgagattgtcgatgtctggttgcagcaggcacaggatattaccttgggcgatatttgcaaagaggttggatgcgggctttacgactttgagccagcaaatttcggtttcgaagtttgggaagctgtttggaaattaatccacagtgaagaaagctggcaggctaacccattggtatgggtgatcgaatttaagcgggtaataccatga

SEQ ID NO: 287952 - DNA, 963 bp, Morganella morganii
atgacaaaatttggcgagttattaaaagcatcacaaaataatgaaatgcttattcatggtaaaagagtagaagctctctttaggaaccttgccgctggactgggcggctgtaaattcatcaaatctgaggatgcaggagaaggcttcactgccgatgctgatatacaaccaccagattataagttgatacttaacgatggcactcatatattcgttgaagtaaagaattgtaatcaaaatagtcctaaatcctctgtttttttacataaagacaacattgataaaattgaaaggtatagtaaacttcatggcatacctgtctattatgcgatctactatcgttgtataaaccgctggactatgctccccaaaagtgcatttatcgaacataagcgtaaatatgcaacaaacttaattcattcaatcgcaaataatactatgagtatgcttggcgacttgatgattggcacaaaaccagatttagtcttcgagcttatagcagacaaaaataaagacgtatcaattgacgataataatcaagtaaaattcatcattggcgatgcaaaaatctactgtaatggtcatgaagttgatgaccgctatgaaaaaaacatagcgttttacttcatgcgttttggggattgggattgcggtgaggcggaagcagttttagatgataataaagaattatatagcgtaaggtatactttcagacctatagatcctgaaaatactgaacgaaatggttttaacatcatcggtaatctcagttcgatgattaccactgcgttcaacgagctaacggtaaacgagcaacaagtaacctccatcgatacaatgctggatccacgtgctatttcaataaccataccagacggttacaaggggaagaacttacctttatggtttatgagccaagaaccaaacactgagttcaacacgctagagcatactggtgaataa

SEQ ID NO: 287953 - DNA, 309 bp, Morganella morganii
atgaagtcaataaaggttaaaatcatctgtaccgcctgccgcaaagactgcggtgaagctatgttcgctattagcgatcatctgcaactgtgttttgactgtgtagatactgcaaagcaaaaggcagatgaatggcgcaaaaacgcagaagtcagagaaataactgcactatccgtaattattgagcgcacatttacagattacagcagagataaagccatgaatcttgcgggtgacatatattctgccggctatcgaaaattaactgggaacgataacaatgaccaaattcaaacatctgatgattga

SEQ ID NO: 287954 - DNA, 639 bp, Morganella morganii
atgataaaagtaaaaatttttcaaacagataaacttctggcgagagactttactcttagtaaagttaactctaaaagctataatgacaatgatggatttggttttatcattcacgatgattttcctgattattgcaaaattcaatatattgaaaaaaatacaattgaaagactaattgaaacgccattaggtgatttaagtactattcaagaggtaacatattataaattcttctttatattaagatatgtatctaacaattcaataatatttttgaaccctcctagaaatatgaaatacgcttcagatgttgttcgtagtcttattccagaaggctaccatgtaagccagcttaaattagatttaaaacttacaattgaaaatattaaacatacacgtaaggggaatttaaagggagtcacacttagcaatattctatatgatactcagacctatgctaaaacaaaattaaactcaatagatgatttatatgatttttactctaaaaattttatgggaacacttgcaaaagtagatagtgctatttttcaaattgacggtaaggtttatgaattgacagaatcgggacgaataattttccaaggtgatgatattgagtgtgtatttgacgttctttaa

SEQ ID NO: 287955 - DNA, 1236 bp, Morganella morganii
atgaataagtatcaagcaacaatattttcaactgatggcgatatatatacagctctgcaatcaaataaagttaagctttcagataactctattcgtgaaattgcatttaatcgtggagtgttatttccatcaaatattgaaagagatatattaatagaaaaagtatctgaactaccattctcatattctcatgttgtatcaattcaggaccgattggcaacaaatacgaatcatgaaatatattcgatcttacgtatttatgaaggttttgatgttaataatctctatgacgtagtagaggatgtgaaatctgacagaaaatataaaaatagagaagaaaatataattcacagtggtggccttggtacatacacagttgaagtaaagtatacagaatacgattttaggcgaggcaaatttcagcaaaaaaaactaaattatggaaaaataagctttatcaaatctaagaatttcacatcggtacgattcactcaaacaaaaaaaatcacaagtatcttacatgatatccttaattgttataaggccaaagttttaggaacaattaatatacagcatatcgaccttgcacatatatcagaccagaaactgaggaatatgttcgctaagaatctctatgactttgacaacaaatttacactcgatgggtttagttattttagtcttgagaaagttaggttaagtagaataaaaaccatacttgaagatgaaactgatgagttgaatagccctcatttcgatttaagctcagattccgatggcgatgaggaagatgaaaattcacaaggaatgataagtaaaagggaggaagataaaaaagatgaacacaataaggtatttagacttaataatgcatcttatgacggacattctttagttgacgctaagcagattgaggaactgtgcgatgaaggtttctatagaagcttcataaggtggaaatcacgaatcaccttactaaataacaatccggtagttacctttgaaatagggtttgaggacaagcatttttgccgtgaaattaagataagaatactccataaacaatattcatattcagggaatgataaagaaaaagttgaacctcatgagtttgatcagattataaaatccttagaggatagaatatttaatgcaaacgatttaattatagaagaactggcaaagcaaacatcatcgccaattaagatcttaaaaaaagattcggaggttgagtaa

SEQ ID NO: 287956 - DNA, 396 bp, Morganella morganii
atgattctctatctcaaaattgcaactgatatcccggcgggtactgcaatcacgacccgctacatcatggacaaatacaaagtgtcacgcagcaaaagccagtcggcaatcagattactggaggctgccgggattgtcagtgcgggcgagcggcggagcggtatcaaaatagtctatacggttctgcccggagcttcggaaaaaatcgcggcatacggtgagcatgtgaggatgtgccgcgtgcttgcaggaaatacctgcagggcggtacgggtagtcaaagggagcccttacgacagggaagagcgcgattttgtatctgcacataaccggttgtttacggcactggcggcaaagcgccgggagatgaaacagggcagaggggtttggcgatga

SEQ ID NO: 287957 - DNA, 756 bp, Morganella morganii
atgatccattatcacggcgggccgataacgcctgatacatgcgcgataagagcatggaaagcgcgtcacgcatttatcagtttcgcccacccttcacagttaaatctcgcatcagaaatatgccagtcattcgcagttgataatggtgcgtttactgcatggaaagcagctggccgcaacaaaattgactggtctgattattacggtttcgttgaaaaatggaagcgtcacccgcgctttgacttcgcgattatccccgatgttatcgacggcggagaggaggaaaacgatgctctgttagcagagtggccacacggtgatttctacggtgtgccggtgtggcacatgaatgaatctgatgaccgatttattcgcctgtgccatgaatatccccgcgttgctatcggcagttgtggtgagtatgacgttcggcggccaaaggcatcagtcgccaggatgaaagaccttatccggcatgttgtcgatggaaacggatttccggcagcaaagttacacggcctgagaatgcttaacccgcagatatttactcaattaccgctggcatcagctgacagcaccaatgtggcacgaaatatcgggatagataaatcatggtctggttcttattctccggcatcaaaagagactcgggcggcgctattggtggaacgcatcgaatcgaacaacagcgccagctctctgaactactgtgaagagaaagatcgctttgactatcaactgcaactggctgtttga

SEQ ID NO: 287958 - DNA, 582 bp, Morganella morganii
atgaacgaaagagattgggctgattggattgcaattggtgctaacgtgttgtcttcattaggaataattgtttctgttgccatttatttatgtcaaaaatcaagtgaaaacaaaaagcaaaaagaaattgacatgaagttatttcattttattaaaattaaggcgctttaccttgtaagtaaattagataaagttttgtatttagttaagaatgaaaatgaatacatgcatataaggatagagaatggagtcatatgctacaatgagatattagaggatcaaaacattgcacattgtaaagtagacctaagaatttcaaataagaatgactttctagataggcatggagtgcaggcaagtctggacttatttaaatttatcatagagattgattcatcaagcgagaagtttattaataaaacatcatggtatattacatatggacacgaatacataggaagttatatacctgaaatatctgataactttcaagcggacgtagagagaagtttactaattgatttcttaaataaaacaaaagatacaattaaattaaaactgaataagttttccattcgatag

SEQ ID NO: 287959 - DNA, 159 bp, Morganella morganii
atgacaatcggatttgtattactactggtgatgcaccgctctgctgtgcctgttaccgatgatatttatacactcgaagaatgtgagagccgcgcagtgcagatggtggctgtgaggaatgttgacgtgatttgcggggaggttatccatggagagtga

SEQ ID NO: 287960 - DNA, 345 bp, Morganella morganii
atgaacaaatatcgtgacaaatcagactttgaaattaataaggcagtggctgaggaattaattcaatccggcttcattattggtgttgaatatcatgacaaacatatattagttatggataagtatgctaataattatccattcgacccctgcaacaacccggcagatgcatggccgattattattgagaatggtattgcaattcacccatataaaactgcaactccttcggcatttgatgccgaaattggcgaattccacgggcacgctgtattcaatgaaaatatataccgtgccgctatggaagtattcctgatgatgaaggattcggagaatgaaaaatag

SEQ ID NO: 287961 - DNA, 537 bp, Morganella morganii
atggccggatatgcaagtaaaacagcccctgaacacaaggatagctggcaaactcccgaatggcttttcacggctctggatctggagttcggattttatctggatgccgcagcgagtgatatcaatgcactttgttcccggtacctgactgaacaggatgacgctctcaaatcggagtgggtcagttatggtgctatctggtgtaacccgccatacagcaatatccgtccgtgggtggaaaaggcagccgaacaatcccgcatgcagaatcagcctgtcgtaatgctggtaccggaagacatgtctgttggctggtttctggaggcactgaaaacggttgatgaaatccgggtcattaccggcggacgtatcaatttcgttaatcccgtcaccggcaaggagaaaaagggtaacagcaagggttcaatgtttcttatctggcgtccgtttatcaccccgcgccggttgtcttctttcgcgctgaaacaggaattggaagcgatcgggaattggtatctggcggaggtgtctgcatga

SEQ ID NO: 287962 - DNA, 618 bp, Morganella morganii
atgagatatggcgcacaggtttataacaacggaacggaggaaatactctcaccctatgaatcctccgttttttataaaagaatgagaataaccccgggggttacccggctgtttctgagaacagagcaatcgacgccgcttatttttatccgtgcggtgagctttaccggagtatctctgaacggattgtgtgacgttactgtggtgaataattactggtgcgtcgatcttaaaggcgatcccggtatgccgtttgatatttatatttttgtaaaatcatcttattacgtttctgtcttccctcaaaaatgggggatacgtatttataataatggcttactgacgcacgcatccagtcaaaggccactgcggatactgacgggaaataattttaattctcagtctggtcaggcagacaccggagttccgtgtgcagttttaatatcaacacttggtattcttggtcttcaggatgatcacggaggtaaaacggtaagaattaccgggtgtggcgctggcaacaaagcgatatggaattcaatgattgttgccgggcaaatgtcgtctacaaatattggtagtcagtatttttatatagacaccagggaatacatttaa

SEQ ID NO: 287963 - DNA, 261 bp, Morganella morganii
atgtcatggggaatagaaatatatgatactgacgggaagcctataaaagtcactgggacaagttttgttctcgatcagtttagtgtgacgagtgacggatcccgaacttattcaaatatccctcaaggaaaaacattatcagtttccgcaattaatattaatcccagcataaccggtacacttattaatacaaatggtaatactgtcagttggaaatgtggcaataatgctaatgtagtaataatggtgatgatcacatga

SEQ ID NO: 287964 - DNA, 255 bp, Morganella morganii
atgaaaaaattaatagtgattataactgcaataatggtatccgggtgtgcaaccagttacgaaaaagtaaactgtacgggggtttacagtattaaaacaccaggcatgggtaatgatgtgctcgttaaatttgatcagcgccgacagaccagacggggagatctttatcatcaggttcctcagcttggatttaaaattaatggtgggtgggtaagaccggaatatattgagggattttcatgtcatggggaatag

SEQ ID NO: 287965 - DNA, 450 bp, Morganella morganii
atgagtgcgctcataacccgaggtggttttacccttcacccggccgtccacaacggttttccagctgccgccgtcagtctgcaaatcaatggcgtatttcacctcgttgccgaccatatccccgttatcctcctggcggaacagggacggccatttcaggcggacgcggaccgcagacaactgcgggttagtaaacgcatgcgcccacggtgtgctgctctgcacggtggtaccaaccgtgatttcattctccgccgccggcatcccctgaatataggtttgcgcctgggtgcccggacggtattcccacaccacgcccgggaagttttccgatccgtcagcattcagcagcggcgtaccatccagaaagatatttttcccggtcagttccccggcaaattctccctcaccgagggcgatcagcaattttgctttggcaacggactgtaa

SEQ ID NO: 287966 - DNA, 762 bp, Morganella morganii
atgtctcatttaagagataagatacgtaatcttataaatataaaaaatggcaaccctttaactaaagatacaatgagattatttccctcatgggtttctaatatttcagatacatttaaatactcacttattgataaagaaacagcgtatcaactaaacagttttttagacattagcgtatgcccatattgcaatagtgaggaaattgaacaagtaaaagatgatacagacactgcctgctacagagcagcatttgatcatttcataccaaagtacaaatatccattaatttcttttagtttatttaatttaatccctagctgctctaagtgcaatagtacgtataaaaaagcactcgacccgatcatgaccccattttctaatccttttcttgatggtataaatgacattcaactttttaattttgtttatgatattaattatatatatagagatggtaacattaatgataacgatattcaaatcacactaaagaaacaaaaaaataacatcgataaaaatatgagcatacttcacataaataatagatataacttaaacaatagaaagaggatagcacggttaattgcaaagagagcatttgacctaaacgcttatgaagaaaatttcaatatagaaccaactcttttcgctactttcggttacgaaactaatgtcgagccgctaaagcacatacataaaaaactcaagcaagatgcaatattagtattttgtaataaaaaagtaccattaattgaatag

SEQ ID NO: 287967 - DNA, 708 bp, Morganella morganii
atgatgcgtaaaaacattcaggcggccatttttgcacacgcagaacgtgaatacccacgcgagtgctgcggggtgatcgcgcaaaaatcccgagtggtgaaatactttccctgccgcaatgtcgcggccacgccggaagagcacttcgtattatcaccggaggattatgctgctgcggaggattgggggacggtgaccggtattgtgcacagtcacccggacgccactacccagccgtcagaactggacaaagcacagtgtgatgccctcggtgtgccgtggtatatcgtcagctggccggaaggggatctgcggactgttcagccacgcggtgagcagccattacttgggcgaccttttgtgctcgggtttactgactgctgggggctggtaatgagttggttcaggcaggagcgtggcattgaactaccggattacagggtggattatccctggtgggagcagggtgagaaccgttacgccgataactggcgggaggcggaatttattcaggtcgatgatccgcagctcggtgatgtcatcgtgatgcagatacaagcgccggtcgccaatcatgccggtattttattgcctgacaacatgctcctgcatcacttgtacggacatctgagccagcgtgtgccgtatggtggttactggcgcgatcgcacagttatggtactgagacacaaaattttcatgacataa

SEQ ID NO: 287968 - DNA, 597 bp, Morganella morganii
atggcaaaaatagagttgagcggtgtgctgggtaaaacattcggtaaaacacatcagcgtcttgtcagtaccacgtccgaagccgtccgtgcgctgtgctgcactgttccgggctttgaacagttcctgaataccagcaaatcacgaggcttaacgtatgcggtatttcgcggtaaaaagaatatcggggtggatgacctcggttttccggtgacggatgatgttatccggattgtgccggtggtgatcggcagcaagcgcgggggattattccagactatattcggcgcggtgctggtggctgctgccggtcttatgactcccggcggcataattgcagcctttagcgccggtggtatggcgggctttatggctacaaccggcgcagcgatgatgttgggcggcattattcagatgttgtccccgcagccaaacggtatagccatgaaagaccagggcgaaaacaaaccgtcctatgcgttcggtgcaccgaccaacaccgtttctcagggctatccggtaccgatcggttacggtaaacgccgcatcgggggagccgttatctcagccggaatttacgtcgaagatcagcagtaa

SEQ ID NO: 287969 - DNA, 390 bp, Morganella morganii
atgatcgaaagtgacattaagtcgtctctttccgctatcaccgcaatgcccgtttttcccctgttattaccgaaagatgcacaggaaggtatcacctttcagcgtatcagtgatccgcggtattccgctggtatggtcaccactcatcttattgtggcgcgttttcaaatcagtattcacgtgctgaatgattacgaaaaagccctgctgctggataaagccatccgtgatgcctgggagtcaatccagcatggttacatcggtaattacccggtgcagaccgtgcagcgtggtggctttcagcaggaacgggaagagctgacaaaaaacactgtccgctggtcagttatacgggattttatcatcacttatccggaggatgccgtgtga

SEQ ID NO: 287970 - DNA, 648 bp, Morganella morganii
gtggaccaccgatgcctgaccggatgccatatcccactgcgcgcggatggagttctgcgccagcgccagaccatcttcagctttaacctgtaccgcatccagtttctctgcaagtgccttcgtttccgtgaccgtgtagttgcggacttcgatgatttctgctttcatcgcgccgttttcgcgctgccagtagccccactggccgtatgcgttgttggcgttgttgatgatggcttcgaagttgtcatccgcctgcgaccgcaggtctttgataatttgagagtcgcccagcccggcggccacttcatcaataatgttcgatgcatcgaactcggccacaccgcgcacaaactcagtccagggggactggttaccggttttatccaccagccgggcgcggaaataaaacgcggtaccggcggccagaccggccagttcatgagagcgggacgggtacggcacatcagccagcagcaacaggttctgcccgtcattggttttgctgtactgaatttcagttttcagggtatcttccgtgaatttcccgaactcccagttcagtttgatcccgaataccagtgtggacgcacggaagttcagtggcatcggcggatcacccaccttgccggtcagccggatttcctctga

SEQ ID NO: 287971 - DNA, 1989 bp, Morganella morganii
atgtctaactattgctttataactccagaagctcaggtgttagttgagtcagttgggattttacaaaacatacaagaattttcaaaaaacaataaaaaacaaacttatgttttgtgtaagcctttatcgaaagaagattcaagttacgattataatgaagcttgtgttatctttatttcaggaatgaagccctgttttattaacactggtggcgataacgatggatttgacgactatattgaagatttttatgatgatgtgtcctttctttcagagaaatatcaatatagaagaaaaattggcagaaagaaaaaatggcatgagttattcaaaaaatttgatttttatgatctggatttcgaacaattatttattaataatccaacagacaaaagggttgctgatttaattacctctttagttactggtagcattaatgatgtttcaaaagtaaacctagaggctgagagcttactagatgttgttaaatctaagatagttctttttgatactgatcagactggatttttatttaaaactagtacaaataaaaagtacgtaatacaaggtctagctggctctggtaaaacagagctgttattacataaactcaaagaaatatattcgaatgaagatgatgctagaattgcattcacctgtcataataaaatattagcctctagtatgagaagcagaatccctgaattttttaactttatgaaagttgaacgacaaatagaatgggaaagtaagatattctgttttagctcttggggaagtggaagaaatcctacatcaggaatgtatcgatatatttgctcagaatatgacatttcttttggtactcttcaagctggtacttttgatattctgtgcaagaaagctatcaatgaaataaaaaacaaccagaaagagggtaaagttaaatatatttttgattatgttttcatcgatgaaagtcaagattttgatgagagcttcattgagctttgtgaattggttactgaaaagaaagtatttgtagcaggtgatgtattccaaaacatatttagacctatagatgatgatgtccgaaaagctgatttactgttgaaaaaatgctatcgaaccgaccctagaaacttaatgttctcacatgcactgggtatgggactatacgaaaatcctgttttgcgttggttgaaagataatgaatgggatgcttgtggatataattacaaacaacacggtaaacgggctattgtgagtcgagacccgctaagacgctttgaagatatacctgatgagtttagggcaacttcattaacacaagttgatgatgataacaaaattgcaaaatcaatttttaccattgttgaaaaaatcaaatctgagcatgaaaatgtttgtcctggtgatattgcggtactttttctagatacatctaaatatatttataatataataccagagttatcacatattatttcagataaatttggttgggatgtaaatatctcctatgaaagtaaagttaatgaccctagtaaattctttatttccaatataaataatgctaaagggttagaatttccgtttgtaatatgttttgcaatgaacttaaacaaaaaaacctcattcagaaatggcctttatacaatgatggcaagatcatttttagaaagtcatttagtcttaggaactaaagctgatagtgagttaattagtaaactaaactctggtctggattgtatgtatactaatggatacatggagttacgtgtaccaactgatgaagaaattgaaagccaacaagctgtattagtttgggatgaaaaaccaacaattgaatcactagttatagaatattgtgaagagcatgaagctagcccaaggctaaaagctaaacttttacaacgaatgacagaaattttgggtggcgaagaatatgatagtgaatactttaactctctgattgaaatagaatataagaggaatgttaagctatga

SEQ ID NO: 287972 - DNA, 1080 bp, Morganella morganii
gtgaagaaaataattgttggtgcgtttatttctactgctattgtgatgatttcagggtgtatgccaaaagttaaaagcgcatcattcattggagatacgttaaattgccaatatgcagttgcgaatattgtcgatggagatgctaaatttaccgctggaattaccgcagatagtatttactcatctaataatcaattcgccacaacgatgtttagccgcattggatttattgaatcgccagtgttaacaaaaaaagataacggagttttaatctcagaagatggtgagctaattttcaccatgagtgaggataggtcaaatttcacaattataaataaagataaaaaagtgcttcaccaatgggataagtgtgatagcgggtatggcactagtacaaaatcagtggaaacagaaaagaaaaacacagattggataaaaaacagcccagtaacatcggggatggagtgtgatgattatgaagactcaacttttagttttggtgataaaacaaaattagttgctggaaaaactattttttcaaaaaaaagaattttatccaatagctcaagggtttgcactgcaacaactgacattcatcgtgacaataaaatgtcagtaatgatagttgaaaaagccaaagtaaataacatagatgtttcagtttaccactctgatggttctggaagtataggtggtgattatagcgacaaagcgtcttggcattatgcatgcgaaaaagataagatgaatgataaagtcgagtgttatatgtaccaaggtggcttttatatattcaaagatagtggtggatacactgttttggtaggaaaggatcatttccctggacgaagcgtgcaagttagaattgggaaaggtaaaccgttcacgactggcgataatggcaatttcagtaagacagcatcaaaaaatatcattaatgcggcattaaaaaatgactcgatggcaaccagatatactgagtggccttatgatacaccaatagataatgatgttaatttagattatttcaatgatgcgcttcaactgctaaataatatctatagtaattatataaaatag

SEQ ID NO: 287973 - DNA, 3510 bp, Morganella morganii
atgggcaaaggcggcggcggtggaagcacaccaagactggttgatgacaatctgaaaaataagcaattcctgaatgttattgatttggtgtcagagggtcctgttgaagggccggttggcggaatgcagggattcatgttgaacggaacgccggtagtcgataaacagggtaatccgaatattcgcggggttgaggttcagtggaaatctggcacgcagtctcagtccccgcttgatggcttcccgtttgtagaaaaagaaatacctgtgaacgtggaagtgaaaaaagaaacaccgatactgcgtgcggtatctgatcaggaggttgaccgcatccgctttacgttgggtgtttctgcgctggtgaaacaggatgataaaggtaatcaggaaaatacttctgttcagatgctcgtcgaaattaatgcaggcagcggatggatgacagagaaagaaattacaataggccctgggaagataagcgggcagtaccttgaatcgcatattattaatgcgccaaaacaaaagccgtttcagataagagtatcccgcctcactgaggatagtaaaagtgaccttctcaaaaatgggacggtgtgggccagctatacagaaatcacagatgctaaattctcatacccaaactccgctgtggttggtatgcgcattgataaatctcagtacggcgatactcctaaccgtacatatcatatcaaaggactgattgttcaggttccggataattatgacccggaaacacgcagctataacggtatatggacgggaaggtttaagcctgcatggacggacaatcccgcatggattttttacgatctggtgaccaatgagcgctacgggattggctccatgatggggagctttggttgtgaccggtttgctttatatgcgatagccaggtattgcgatgaaatggtttcagatggattcggtggcaaagagccgcgattcactttcaatgcctatattacctcacagcgaaaagcgaaagatgttattgatgatttagcatctgtatttcgcggtatgcctttatgggacgggttgcagttaacctgttttcaggacagagcagcagatcctgaatggacatacacaaattcaaatgttatcgacggaaaattcagctatacatcaacagctaaaagtgcaagacacaacgcaatagaggtttcatggattaatccggataacggctggcaggaagagagagaattcatacaggatgacgggcttatcatcagacttggcgggcttaatgttaagaaagtaacagctttcggttgtaccagccgggggcaggcccatcgtgtcggtaaatggattctggaaacagaaaagcttgagactgaaagtgtaacattctcaactttcagggagggtattaactgtcttccgggtgacatcattgaagtggctgatgattcatttgcgggttcaaaagtcggtggtcgggttttagatgttgttggcagcagagtaaaaacagatgcacctataaaatggtcttctggtgataagggatattttgcctaccttggcggcagcgggaagttcatcagaacagaaatatcatcagtagatggcgacattgttatcctgaagagcgaaccagccggactgcaaaaattcggtgtgttttctgtatcgaaaaacacgctgattacacgaatgttccgggttctgactattactgaagataaagacggtaactatcagtttaactgcattcttcacgaaccacaaaaagagcgcattgttgacgatggcgtcgatttcaccggcaatccatcgacacaaaatacggtcaggattcctgacattgagcgactttcagtagcctatatcaatgacagctctcaggtgcaggcgagagctatgtgggccacaacaacagttaaccgaaatattacttacgttgtctctgtttataaaaatgacaaggttgtccttaccggcgaaacgtctgatcttgaatattatttcaacggattggccgctggggaatatctggttggtgtacgcggcaaagataaaaatggaatgctgggaagcgagtcgaaagtgctgatggttattggtgcgccagcggccccttcgtttatcagggttgaatcaggcttctttgaagtgaaattgataccacatatcagtgccccgcacacactgaataccgagtttgaattttggttttccggtgagcagagaatcaccaacattaacaacattgaacaggaggctgaattccttggcagagcaaaagtatggtcaaaggggcagttaaaaccggggcatgattactggttttatgttcgcagtattaatgaatacgggaaatcgtattttgtggaggaaaaaggacaggccaataataacacgcaggaaattctggatgttgtacaaaaagagctcgaagactcagctatcatcaaagatctgcagtcgcaggcggatgacaacttcgaagccatcatcaataacgccaataacgcttacgggcagtggaattactggcagcgtgaaaacggttcgatgaaagccgaaattatcgaagtccgcaactacacggtcacggaaacaacggcacttgcagagaaactggatgcggtacaggttaaagctgaagacggtctggcgctggcgcagaactccatccgtgcgcagtgggacatggctgccggtgaagcatcggtggttcacgatatgaaagtccgcattcattacaacggtgaggactattccgccggcatggtaatcggggccgaactgaaaggcggggaggtgaacacgctgatcgggtttaatgcgcagcagtttgcattttataacccggtgaataaatcgatggatttgttcatgtacatgaagggcggacaggtgtttatccgggaggcttttctggatgaggcgtggataaagagcctgctggtgatagataagcttcagtctgaaaactatgacgccggtaaaaagggattcctgattgatgccaaaactgggaaagcggaacttaacgataccattattcgcggaacgctgtatgccacagatggtgaattcgccgggaccgtctacgcacaacggataatcggtgacgttgttacggccggtatttatcctgccgcgagcgcagggagtatatacggtgacggcggagactggacgacagttaaatcgacattgacgtatgtcggcggtatgccttacgccatagcactggttttaccaactattattgttggcgtagagcagtatcagggataccccctgggaagattgcaggggaccgaggtaaacatacgtattgacggcgttgcgcagtcagtcgccgggtttagtgatgtccgctcagcggttattttcatttctgcgggaaggcgtgatgtgaaaatagaggttgagtaccgtgtcagacataccggttctgtcggcgttcgcctggcttatggcgttgttcttgcctgtaagtacaattcagcatcattcaaatga

SEQ ID NO: 287974 - DNA, 564 bp, Morganella morganii; identical to SEQ ID NO: 277899

SEQ ID NO: 287975 - DNA, 132 bp, Morganella morganii
atgaccatagatactgtcgttatgattgctcatgtgcttcatgtttctgtaaacgagttactgagtgattaccttgcctcagaatacagtgacatcatgcttttaatgaaccatcgtaatacagatagatag

SEQ ID NO: 287976 - DNA, 915 bp, Morganella morganii
atgaaaatatcattagtcgtcccggtatttaatgaagaagaagcaatacctatcttctacaaaactgtccgtgaaaatgaagaactaaaaaagcatgaagtcgaaatcatcttcatcaatgacggtagcaaggattcaacagaaggtatcatcaatgcactggctattgcagacaacctggttaagccactgagcttcacgcgtaactttggcaaagaacccgctctgtttgctggcctcgaccacgctacaggcgatgctgttatccccatagatgttgacctgcaagaccctatcgatgtcatccctgttctcattgagaaatggcaggaaggcgctgacgttgttctggcaaaacgcacagaccgatcaaccgatggatggttaaaacgtaaaaccgccgagtggttctataagctgcacaataaaatcagcacaccgaaaatcgaagaaaacgttggtgatttccggctgatgtcacgcgaaacggtagaaaacatcaagctgctgccagagcgcaacctgttcatgaaaggtgttctgtcatgggtcggcggtaacgttgatattgtggaatacacccgcgccgaacgctcagcaggtgaatcgaaatttaatggctggaagctgtggaatctcgcacttgaaggcatcaccagcttctccactttcccgctccgcatgtggacatacatcggcctgtttgttgccgcgctgtcatttgtgtacggaggatggatgatcgtagataaactgatatggggcaacccggtaccaggatatccgtcactgcttgtgtctattttgttcctaggtggtatccagttaatcgggataggtgtgcttggtgagtatattggccgaatttatactgaaagcaaaaagcgtcctaaatatttgttgaaaaggaagtaa

SEQ ID NO: 287977 - DNA, 789 bp, Morganella morganii
atgagcaatctgattattgtcgatggtattaatgtgcgccgggatatggctggtcgctattgcctgaatgatttgcaccgggccgctggtggagaggaaagacataagccgccttactggctgagaaatgcacagacagagcaacttattgccgagttgcaaatctgcgactcgggtacacagccggtaaatgtgttgcgtggtggcaccgagcagggcacctatgtgtgcaaagaactggtttatgcctatgcgatgtggatcagtccttcattcaatctgaaagtgatccgcacgttcgatgtggtggccggaacacagcaggcgatacagctggctgataaggttcaggccggagctatcctgctggagtctatggcgaaaacactgaatctctcgaattcctcaaaactgggcgggtatcagaaactgcaaaaaatggcgggtcttccggatctggctccctcctatgcgattgatgcaccggcgggcgcggtggatggctccagcagaccgacaacctctctgactacgctgctgaaaaatcacaatgcagccttgtctgcgactaaagcatacaaacgccttgctgagctggggattgtggaacagaaagcccggcccggatccagaggcacacagcgcctgttctggtcggtaacgacgcggggactggcatacggtaaaaacatgacatccccggcaaacccacgggaaacgcagcctcatttctttgagagcaaatcggcagaattgctggcactgatgatgactccggcggtggcctga

SEQ ID NO: 287978 - DNA, 159 bp, Morganella morganii; identical to SEQ ID NO: 283632

SEQ ID NO: 287979 - DNA, 294 bp, Morganella morganii
atgggcttcacggatgtgataggcgatcggggcaccgtcgctgtcaatctccaccccgccgcgtatattcggcatatcaaaattctgctgcgggttactcaggcggtcgggatcaataatctgaactgtcgtcgcataacgggccttaccgtgaccaagccggtcaggacggtactgcagaaccgccagcgcgtcaccgtccagcaacttgtgacggaaagccagccgcagcatctgcgatacggtctgtttacgttcaacatcacagtaccggcccttgtcatttgcccatga

SEQ ID NO: 287980 - DNA, 189 bp, Morganella morganii
atgcgtatgacagaaaaatactcaagcccctttgcttatgcgtgggggttcattgctgccactttcggtgtgatgtccctggatcagtgggcagtccttatcggcattatctgcactgtcgggacgtttgccgttaattggtattacaagcgtaaagagttcctgcgtaaaacgggtggggaatcatga

SEQ ID NO: 287981 - DNA, 216 bp, Morganella morganii
atgagcgccaaaggttgctgttacgataatgcctgtgcggagagcttcttccacacgctgaaagtggaatgcatccacggtgaacgctttatcaactgggatatgatgcggacagcagtatttaattacatcgaatgcgattacaatcggtggcgtcgtcacagtacctgtggcggcctcagcccggaacaatttgaaaacgaaaacctcgcttag

SEQ ID NO: 287982 - DNA, 639 bp, Morganella morganii
atgattgagtacaaatttgatatagatgaatcttatatggatagattttttaagccgattaaaaataaaatccagataatagaactattgatgaatagtattaagtatatgcttattaatccgacaattaaagaaagtaacgctaagggtaagattatagttagaattgataaaatgagtagaatattttttgtgaaatctgataaatatttctcaattatgttcccattttgcattaataaaaatgaaggctactcattcaaatttagaaacgagatggaagttgataatcgaattacatctgaggttatatcattaataaatgagccgagtttttatagtagctgtagcttggaatttattgagaaaatatccttatatcaagaggatagttgtaatgagaattattggagttttttgagagagttacttatgatggaagatggatatttaaggtatgactatgataggactaactatgaaaaacatggtaaaaaagacatacatcccttacatcactacgacttattttatggtagtaattctacttttaaaattggattgagacgaaaaatatcagaggcagattttttagacttgctgaacataaaaaccgattgtaagtttattaattgttag

SEQ ID NO: 287983 - DNA, 288 bp, Morganella morganii
atgaaaactgactacggcgggagcacaacaccaaaggaattgcgtgatttgtggcaaactcccatcccgttattctcagcactggacgctgaattcggtttttaccttgatgccgccgccgataaaaataataccctctgctctcattatctcaccgaaaaagacaacgcattaaactccgactggcaaagctacggctcaatatggtgcaacccaccgtatagcgacatacagccgtgggtcgcaaagctgccgaacagtgcggggagcaactgcagccggtcgtga

SEQ ID NO: 287984 - DNA, 276 bp, Morganella morganii
atggatatatcacggcagcagtttgaagaatttattaaattacataccgaccctaaagaattaaaagacaggttggttatggttaatgccggaaagaattaccgcaatgtgcagactgatttaatgtggattgcatggaaagaatcgcgcagtgcattaaaattagtcggctatatttctcctgttggtttggtgaatataagaagaaaccagcctgtattaataacccagtataaatcaaagtcaaccataccactctatcacttagataaataa

SEQ ID NO: 287985 - DNA, 1071 bp, Morganella morganii
atgacggaagagacaaaaaaaaccgaagaattatccctggtgataaacggcaagcgcatttccggctgggacagtgtccgggttacccgcggtattgaacggctgccgaatgattttgaaatcagcctgatggattactacccggcaacggatgaaaagcagctgtttaagccgggcgatccttgtgaggtgtttctcggtcaggatcgggttattaccggttatatcgatacgtggaacgggcagatcaataaaaatcagcatcagataagtgtctccggcaggggtaagtgtcaggacctggtggactgctcagccaactggccgaataacgtaatcagtcagtcaaacgccctgcaaatcgcgcagaaactggcgaagtggtacgacatcgaggtatcgagcacggtttctgatggcgggttacaggttgtcccgcaattcaccctgaactggggtgaatcctcacaacaggtgatcgagcgctgctgccggtattctgcgctgctgtattacgaacagccggacggaaacctgctgctgacccgcgtcagtgacaaggtggcggccagcggcgtggagcaggggaaaaatatcgaaagtgctgatttctcggattccatggcagagcgctattccgattataccggcgtgtcattgtctgttaccccgtttgccggagatgtgtcagcggtacagaacgcctcggcgcgggatccggaagcgggaaaaatgcggtaccggaattatatcaccatcatcgaaagcaccctgatcaccgctaaacgggagcaggagagtatcgactgggaaatgaaccgccgttacggccgctccaaaatcctgagtgtgatggtggacagctggcgggacgcctcagggaagctgtgggagccgaatacgctgatcccgatagatatccccgttctgggtgtcacggataaattctggacgctttctgatgtgacctatctgcgggatgctggcgggacacgcgcaacattacagctgatgccgccggaagcattcattgctgaaccgtatgaattttaccaggtaataagggtgtga

SEQ ID NO: 287986 - DNA, 864 bp, Morganella morganii
atggatgaaagtccaaatgaaagtcaaagtagaataattattagtatagatgatcttgataaatcatggctgagtgatagtgcaattaggtatgatttcatcaatgctcttcttgatgcgtttaaagaattaattgatttgaagtcagttaagatattgatttcaataagaacagatatccttatgggtatttacaacacaaatctgagacaagaagaaaaagatagatcacttataattccaatagaatggaatagacgagaattaacagaagttcttgataagagaattaattatcttttaaagcataagtattcatccagaactgaagtcgcgttctctgatatatttaacttctccgttagacaaaaaaatgcagctgattacattcttgataagacaatgctcagaccaagggatgctatagatttcgttaatttttgcttaatgcagggagatggcagaacagaactaaatgaagatatggttattgaggcggaggaaaaatattatacatcacgcaaagctgcattgaataaagaatggatgagtcaatataagaatgttctgagttacattgatagtatatcgcttattcaaagtgataggtttaaggctgatgagttaaataaagacgatatccttggttttttaattgacagagtgtcaaataacgatccagttgatgagaaaatatcaactgacataagattattattaaatgtgtggttcactattggtttaataggtatagaaaaaacaaatacccttgttatatattctagctttgacaagccaagcttggatattagcgattacaataaaacatttgttgtgcatccattattttaccgcattgattga

SEQ ID NO: 287987 - DNA, 1401 bp, Morganella morganii
atgccaattatcaaagatgccatatctgatgtactcggcattgagccggactggaattggtctgaacacctgcagcaggcttcattccgtggtgtgccgttcggtgtgattagcggtgaaagtgttttcggtcgtcgccaggccattcatgaatatgcctaccgtgatcaatcctggatagaggatatggggcgcagcaaccggcggatcaccataaagggattcctgattcaggacagcctggtgtatgacgcgccggacgttattacccagcgtgacaatctggtggccgcctgtgaagccggtgaggtcggaacgctggttcatccgacactcggggaaatgaccgtcagtgtgactgaaagcggcctgcgggtgtctgaaaacgcagaaagcggtcgggtgtttgagtttgagctggtggttatcgagtccggcctgaaagtgttcgccatcaccgacagtgaaaaaaccggtgaactgacgttcgggcagtggctgaaagaagcagcacataccaccctgaagacgatcgccatgattaaaggtgaggtcaggtcagtcacgcagatgatgaaaacgctaaaacagactgcggatttttgggtaaatatggtcagcagttcagttgatgaggtcactaatctcagcaactcgctgaacagcgtattcggcagcaataaatacggtcgctatcagaaaggcagcgcgggcggggcggtgtccggtgcgaccggcaagcgcatacatcagggtgatgctgatgaccgtgaaattatcgataaaacgctgaatcaggccattattgaccggcaacggctggataaaacactcagcgcggtcagtgatgctgaaacccccgaagatgtgattgcacagatacagcgggtgtttgtcatcctgataacaatggatggtgacaccggccagaagatgcggatcctgaatgcattatcccgtttccgcaatccggaatatcagcagacggagcaggataagagaattgccgcactgactgaaatgatgctggttgtgctggctgcatcggcactttccgtggtggccggtcagtctgacccgacaaacagtaccgaggccgccggatatcagcgggaggtctgtgaatcccttgatgatgccatgactatcaccggggatctggcgctggatgacatctatcttactctcctgaaccggcgcgaacaggttgtcattttcttcaccgataaaggctccgaacgcggccgcctgtcgtcttacgctctgccgtcggtgctgccgtctctcaatgtggctaaccgcctgtatcaggatgcaacccgcagcgacgagctggtgatggagattcagccccggcacccggcgtttatgccggtcagatttaaggccctgaaaaaatga

SEQ ID NO: 287988 - DNA, 924 bp, Morganella morganii
atgagtcaggagagatccaccaaggcattaccattagttttagatattgatgtcaaacaagatggggtaattaacggaattgaaatgggtgttcttggtaatgggataccctatctaacgcagagtagcctagctaaggtttgcggagtccaacgcctcaggataaaagaaataactgatgaatgggctgagtctgtagctcataatatttttaaaaaaggtaaaatgacctatataggttcttaccttatcaaggaaggatttaacgaagacaggctatacataccaatcatgaaaaacggcgtcgagaaccacgcctatcccgacattgtttgtatggcaatacttgaatattacgcctttgaatccaaagctgccgataacgaaattgcgataaaatcctatcgagatttaaccaaaaaagggttacgcaattatatctatgaatcattaaactacacccctgatgacccatggaagttttaccatgaccgagtatctttattaaaatcaaagaatactgttccagatggatattttatagttttcaatgaaatatctgggatgatggttgatttaataacatcaggattggtgattaatcaacatacagtacctgatggaagtgtcggcaatcactggggaagacactggaacaacagcgagcttggtaagcaatacggacacaggtgcgagtgtgagcactattatccagaagagtttgctcaatcaaaatccaatcctcaaattatcaatgcctatcccaacgaggcgctccctgagtttaggcgctggtttaaacatgagtacctacaaaccaagttcccgaaatatattttaacaaaagcaaacttgctaccaaaaggaaagcaagacgctcaactattaattgatgcattgaaattaaaagaaattagtaactaa

SEQ ID NO: 287989 - DNA, 168 bp, Morganella morganii
atgaaacaacggtttaattacagcgctgtgcataaaaacaacgcacgtgaccgatttaaccgaacagtcaccgaacagggaattaagtgtattcgccagatgtttgaggaggcgaaagtaagaacggaacacagggaagaattgctgggaggtaagcggcatgggtaa

SEQ ID NO: 287990 - DNA, 771 bp, Morganella morganii
atgataatattcagaaaaataaatggaaaaaatgtacctatcaaaaaatcatatacaataccaaatgttagctgcagaacttgtagtaaacgtgtttttttctatgcaaatgcttttggttcgaaagtattatttgattctctgggcccaccttggcccatccacccatgctttgaaaaaaaatcaaaagaagaacgagtaattaataaagaaaaaatcagtgatggatgctgggagccagtcattgtcatcaactctatatttactagttctggcaaccttagagttgaaggatatatagataaattaaaaatacaatttaccattaataaaaaatcacatatcacactcattctagataatgaagatataaaatatatcccaatatatgctaacaaacaaaaaatgttaatacaactacataattcaaaaacaacttacaatacaaaattccgatacagagacccttcccaaactcataaaatagacattaaagctcaccttcctcatgaggaatacacttgtgatgtaaaaaaaataaaacgtctatatatagtaaatatctactttaatggaaagctagtcaaaaaataccccatacagaataacttctatagattatactttggtaacaataactcactgaaagtgaaaaaatacacacataacggtgatattcatttcaaagcactatccataacaaaaggcctttatatacaactacctaaattaaaaaaaattcatgggcactatgattataatatagaataa

SEQ ID NO: 287991 - DNA, 234 bp, Morganella morganii
atggctgcacatctggccttcaatacccgaatgtcttcatctgaagctatcagcaccctgaaagcaatgggtgcggtacagcccgcaacacagcgcgcatcgctcgacagccgcatgcgggcagagcagcaggtacgcatcagtccggatgctcaggcaccggcagcgggtaccgccgccgcgctggttcatcagatgaccagtctttataacagcaacaagggagcgaaataa

SEQ ID NO: 287992 - DNA, 396 bp, Morganella morganii
atgtgcagccatatccggacgaccggcagcagccttgctgccaaagatgcgggcacagcgcttgcgttcagcgcggcggccttttttcacatctttattttcatcgtcgtcttcggcgtcttcgtcatcaccttcggcgtcttcatcatcttcggcgtccggatcatcgtcgtcgccttcggcttttttggctttgcgtccctgcttttcgtcgtcctgctcttctgcatcctcacgatcttcatcgtcttccgcatcttcgtcgcgctcgtcctcttccgctttgcggcctttggctttgcgcacttttttatcttcatcctcttccgaggctctggcttttttacccaggccgatcagatgagcaaaggtaaacttattgtctgccatagttaa

SEQ ID NO: 287993 - DNA, 297 bp, Morganella morganii
atgaagacaaaacaaacctcaatggaattaatccattacgaaaaaggcgaagataaaaagtcaaaaaagtacatggtgagccataacgacggaaaaacaaagctggagatggaactgaccgttacctgtgatttgtcatatttttgcggcggcgtcgaagttgaaatggctatggatgattttccgtatttcgataatgaaactgatgcggtattgaagtatgccgactggcttgagcgacttggaatagcactgagacgggaagcgaaaagggcaattaagcgaggcgtgtcgtga

SEQ ID NO: 287994 - DNA, 426 bp, Morganella morganii
atgacacgcggaatccgtaataacaatccggggaatatccggcacagtaaatcgaagtggcaggggctggctccgctgcaaacagatactcagttctgcacattcatttccgttgagtatggcatccgtgcgctgatgaagttgttgcagacctattcaaaatatcagggcaagccgggaatcggctgcggaaaaatcgacacggtggaagaaatcattgagcgctgggcaccggcggcagacaacaaccacactgaaaattacatcagtcgtgtctgcaaagaaaccgggtttaaacgtcatgattgtctgaatctgcatgataaaaaaacatctgttgcgctggcgaaagcgattgtgcaggtagagaacggcaagcagccatatacaccggaagtttttgaaaaggcattttcactgttatga

SEQ ID NO: 287995 - DNA, 471 bp, Morganella morganii
atgagcaaattacagcagctgactgattttctgaaaaagaacctgccggaaggtgtgtgttccgtggaattcagcagcgaaatggacagtattcagtttatcccggcacagcgtgatctcggcaatggtcagtaccggatgcacatccagcaatataacgcggtaatcgcctgggggcgtttcccgtataagcaggtagacccgcgctatatcggcatcctgatcgatgcctggctgaatgaaaatgacgatattgatgatatccggctggatttagcccgtccgtcaatggatgtcgatattaatgacgggcatcaggcggttgtagttgttgaattgcagcttgccgagaacgtcagcatgcgtgaagacgaaaacggtattgtgccgatggacggcaagcgctggactctgtgtgagccggaacactggattgccgaagatgctgaaattaccgggtccagacaatga

SEQ ID NO: 287996 - DNA, 213 bp, Morganella morganii
gtgattgacttagatgatgttacgactcttgagcggatagccgttatcgcccggctggccactggtggcagctgcacacagcgtgaaaaaaatattctgatgatgatggttgttgatttggccgaaacagagaagggtaaagcgatacaggaagaaaaaagccacctcccggcggcttgtttgtcaggcgacactcgcattaatcagatttag

SEQ ID NO: 287997 - DNA, 816 bp, Morganella morganii
atggcagagaaaacaatcctcaaatgggccggttcaaaggtaggcatcatggaacagctgcgcccgcatctgccaaaaacaagacgcttggttgagccattcgccggttcctgtgccgtgatgatgaatactgactatgaagagtatttaattgcggacgtgaatagagatctgattaatttatacaagattattcgatattccgactgcaattcttttatttcagttgccgctggaatttttaagggtgctaataaagaggatgaatactacagaatacgggattgttttaatgaagacagaaaatcaatcgtgttctttgatcccggtgaaatggcggtgtggtttttatatttaaacaggcacggttatagaggactatgcagatatagtaagaaaaccggatttaacgttccgtttggtggttacagaaaaacttattttccggaaaaagagatcggtgcattttcggctaaggcagttaaagcgggtattatctgccagggctgggcggaaacgctattgcagacctgcgccggtgacggtatttattgtgatccaccttatatgggcaccgggtttaccaagtatcacaccgaaggttttaatgatggtgatcaggtcgctcttgccgaagcgctgcaagccctgcatgccaccaaaggcaatccggtcacagtatcaaactcgctggccgcaaaagagctgtatgcagatttaggattcacgatccacgaaatagaagcaccacgcaaaatttctgtggacggaaacagaaagccggtcaccgaaatcattgcaacactcggggcgtaa

SEQ ID NO: 287998 - DNA, 231 bp, Morganella morganii
atgcgtccaaacattacaatcagcatccctgatccatacatcacgcttgaggattactgtgaaagatatggagttcctataacaaccgcgcgtgacatgattgcggacggtcggctcccggtaagagggcgagtaacatctccgttaaagcgcagtaaggtatttgtcaatatggcagccctgacaattgaagcgctgagttcttgtaacatttcactggaagcgaagtga

SEQ ID NO: 287999 - DNA, 930 bp, Morganella morganii
atgagcaaagcaaaaagtaaaacaacagaaaaaaacactgacttgattgaggaagtatctgaatcagatgcacctgaacaaaaaacttgctttattatcatgcctattgcagaccatcctagttatgaaaatggtcattttcatcgtgtatatgagtatttaataaaacctgcatgtgaaaatgctggctataaagcaataagagccgatgacagcaaagcatctcacatgattatgtttgatatactaaaaaaaatagtccagtgcgatatggccatctgtgatttaagtactaaaaatgcaaatgttttctatgaacttggattaagacaagcctttaataaaaagacaattttgataacagatggaaaagaaaaagctccttttgatatatctggattcagatacgtccaatattcaccaacacttcgtgttgaccagtgtactcaggatataaataaaataacagaaatgttaaatgaaacaacagtagcttctgaaaatgatgtgaattcaattgttaaattattagaaatcgaaccagcaagaatcaccccaaaggcattaagcgctgaggattcactattatttaacctagtaatttcaatcgaagaaagacttaatcgccttgattccacattaaataaaaatcagaaaaacaatataaaaacaatggattcttcagatttaaacttacgtataaatcacaatgcacctgcaggaaatgattttttattttcgttcataggcaaccctcaaaacgacctaaacaattttgtcttttaccttgaaaatacctaccttggtagagtttgttcttttaacccatttaatgtttcattcatagatgaaaataaagttgttcgatcattcagtaagttcgatcctataattgataaaatatcaatccataataaaactattgattag

SEQ ID NO: 288000 - DNA, 1029 bp, Morganella morganii
atgacgataaaaaaattagtaaatggtcaatggtatttagatgtctaccccgacggtaaaaagaacggagtaggtaagcgcatccgcaaaaccttttcgactaaaggcgaggcacttgcctatgagcgatttatccttgaagaagcgggcaaccgcccgtggattgacggcaaagaggatcgccggtcattaaaggacctggtagatatctggttcggctcacacggcattacgctggatgatggggaaaggcgtaaatcttcgatgtactttgccagtgatagcatgggatcaccattggccagtgaattcaccgcacagcttttcaccatttaccgggaaaagcggttatcagggaagatagccagaacatcccgcgtcgaaaaggtatcaccccgcacaatgaaccttgaactgtcttatttccgggccatgtttaacgagctaacccggatgggtcaatggccatttgataacccggtaaacacaatccgggcattcaagacagaagaaacagagatggcatttctgaccgctgatgaaatcgacctgttattatctgaatgtgataagagttcatctgtacatttgtctactgtggttaaagtgtgtttatcaactggggcacgatggtcagaagcggaagggctgaaaaaaaccaatatcagtaaataccgtatcacctataccaaaaccaaaggcaaccgcaacagaacagtgccgatcagccaggagctttatgacctgctgccaaaaaataaaggggcgttgttttcgcagtgttactatgcctttcgcagtgctatgaacagaacaggcattgaacttcctgacggacaattatctcacgttctccggcacacctttgccagtcactttatgatgaacggcggtaacattctggtactgcaaaaaatccttggtcatactgatatcaagatgacaatgcgctatgcacacttcgccccggaccatctggaagaagccgtaaaactgaacccactggcgaaaagaggcagtcttgaataa

SEQ ID NO: 288001 - DNA, 744 bp, Morganella morganii
atggatacaagtgattttactgacgcaattgataatttgaagaaaagagcatcttctgcccgaaaaacgaggtcaataattgcatcggtactatttattctttctgttattatttttggaattatatatataaatacaactagtggacttgctaagggtatgagtgatgtctacaagcaattagcacaaaatggtaataacaagatcgatagtggtattgaagatatatattccaatatagtcaatgcttcaaatttaccagaaactgtacaaccaacaaaaatcgataaatcaaataatttagataaaattaaattattacaagcttcaccagatgaattagataaacttattaaaaatgtggaaataaaatctagacttatggatagttatgcaaattggaaaggtgtgcaatataagttaggtcaggggaaggatgaccaacgtataattaatagtgtcacaacatcagttgcaacaattgcgttttctatatgctcaatattgttacttgtatttcttgttaaaatctcagtgatgtttatgaggtattatgcacaactggcagagctttacgattcccaagctttagctttaattgtatcggaaggaaatacaaataaagctatttcctttgctaaggaattttctccaaaagttatttctatcggaaaatcaccagatagtatttacgaaaaagcatttgaaatgataggtaatataattaataaaaaagaaagttag

SEQ ID NO: 288002 - DNA, 984 bp, Morganella morganii
atgcctaaagctgtttcattgttctcaggctgcggtggttcggatgcggggctaacgaatgctgggtttaatatcgtcatggcaaacgatatcttgccttatgcgaaggaggtttatcttgcaaaccagcctgagacagattatctcattcaggacattcggactgtagaaaaatttccaagtgccgaacttcttgttggttgctatccttgtcaaggatttagccaaggcggagctcgccttgctgatagaagcataaattttctatacaaggaatttgctagggcgctcacaagtattcaacccaaagcatttattgtagaaaatgtttctggcatgaaaaacagtacctttcagcacttactaaaagatcaaattaatcgattttctaatgcaggtactattggatacaacgttgtttggaatgtattgaaggcccatcactatggtgtgccacaggaacgtaaaagattaattattgttggtattagaaatgattttaattataaatatgaatttcctgaacctactcatggagaagggaattgcttgccatatgtcacaattggtgaagcattaaaaggtttgcctgaatggcctacaggagaatattgtgatgacccatttcattggtattacctatctaggaacagacgtcgtggttggaatgaggtaagtaaaactattgtaagtaaccttcgccatattccactacacccaatcagcccagaactaaagaaaatagaggctgataagtgggagtttgttaccaatctaccagcaaggcgcttctcttatagagaagcagctattttacaaggatttagtaaaaactatactaaccatggcgagaatttaatttttcctgaaatggaaaattttgggttggccagaatactaaaagaacggtataaggtcgtaggtaatgctgttcctcccccattatttgaagcagtagtgaaaaatattcctgacatttggtaa

SEQ ID NO: 288003 - DNA, 957 bp, Morganella morganii
gtgaattatggattgcgatctaaattacaacgtttcgctaatgatgcagatcaagctgaattaaacgcattacttgatgttaatgcaacaattgattctggaatagaggatgaccaaattgctggaacaatttatgatgaattagatgattttgatgggcaacctgaagaagattggatgaaagaggatcaaggtaaagatttattaatcgggcaaatagctgaacaaattcaatggcgtgaaaatattcttaaagacgcatatccctttgaatataaatcaaaccacttaacattaaaaaaatcaccttctcttgtttatttattctgcttgtgtatctcaatgatcaataatttgactaaaggggataatgttcgccttccacggtactttgagattatggccggccgtcttttcactaaattcttgagtattcatgcaaatcatatgcatactggttggcctagatcagaaggaaatcctattagttataaagagttggcaataaaattaaatgggttaatttcatctaacacaaaggaatggtcttggcgtgtagagaatggtttaagtgatgacgacgcacttagaatcaaagattgcggagttgattttataacatgggttgattttcttgatggtagagatggacgtctttttgcattagggcaatgtgcctgtggtaatgattggcctactaagtttaacgatataaaaattgagaaattaacaccatggttccaccctcttacatacatcaaatgtgtaaaagtattttcaacaccttatgtattagtagatgaaatgctaagagaagccagcgcagaagcaggaattgtctttgaccggctgcgtttgacaattgctcatgaccgattcaaagatgatttaaatgatatgcaaagtgagcttaatgcattgatcgaattttgcaagaaattaaaaaaggccctatag

SEQ ID NO: 288004 - DNA, 1176 bp, Morganella morganii
atgaagaaaaaatcaatgggcgtggaagcaaaactgagacataaagatgttagttacatatcacttgaagatttggatcttgatgttgaaaaccctcgattcggtgaagattcatcatcttctgatactcaagttgatgtcttaaataatatagttaaaaactatggtgttacagatgtaattagttcaatcgcagttaatggctatttttcagccgagcctatggttgtaagaaaaaatggaaataaaagatatacggttatggaaggtaatcgaaggttagctgcttgtcttatactaaaaaatgatgatcgagcaagagatcaggtgaatttacatcagcagtatatcacaaagtatatctcacatggagaaccaaaaatagatcctattcctgcaatcatatttgaagatgatgacggtatagataaaaaatctctgatatcttatttaggtgtaaggcatatagtatcaactaaagattgggattcatatgccaaagctgcttggatagctagaactattaaagatggagatatgagcgtaagcgatatttccacaatgattggagatcgtaatagtaccataaaaagacttttatctggttataattttataaagcagatggagtctacgggtaaatataataaggatgatagcgttaaaaagggtcgagggagtaatactagctatcctttttcatgggtatatacattattaggatataaaagcattcaggattttgtcgggttatcagaagaccctacaatatctcatcctattaatgaaaataaattagataatgcaaaattacttatgacagcaatgtttggtaataaaaacaaaggacaaaattcacaagttaaagattctcgtaatctaggtgtattagcagaaatagttgcctctccagaaaaaattattctactcaagcaaggaaaagctgttgatgagataaatgatttaactcagcctatcggagataggctgacaaaccttatgcttgagataagagggagattagatgaatgtatcactagagttgggcgtgaggacttatcaagtcaagatgcaataaatttaaatagttatcttgaacaaattagtaagcaatttaggtctttcagaacagcaattaataatgctattagtggaaatgattcagaaggattttaa

SEQ ID NO: 288005 - DNA, 729 bp, Morganella morganii
atggcaacctaccgtatcgaccccgacctcgcatttatcggtcagtgcagcaatgaggacctcggtctgctggtctctgtcctgactcacgacagtaaagacggcaaaaaacggctggcggagtctctgaccgcctcaccggaatatcagctcttttatcccgaccatcagaagtactggcctgccatctgtgccgagctgcaggccttcggggccaacagtctggtcacgctgctgcgcggtaacaaaggcgtgctttaccgtgaaatcctgcacgatgtctgcgacaagctgaaagtgaaccacaacaaagaaagcccggtggaaaccaccgaacttaacctgctgatgaaagtactggagaaaagcctgcgggagatgtcacaggacgagctggttcgttttgcggacggactgaaactgaatctgtccgcaccgaccccgcagcttatcctgctcgcggttcaggccgccgtcaccagctccggtgtcgcggcgctgcagtttgccacaattgccgctgtcggtgtgattgaggcgatgggcggtatcgccacgtgggggacactctttgccgccaaccgggcactgggggtactggccggtcccgtcgggattgcgctgagctccgcctggctgatagccgatatcgccggtcccgcttaccgggtcaccgttccggcctgcattattgtggcatacctgcgccagaaggccctggcggcctga

SEQ ID NO: 288006 - DNA, 213 bp, Morganella morganii
atgtctgtttttaaattaatggctaccacgctgggtgtggcaacggtagctttagctacttactgcgcctggcaggccgctgctgaggcggtggataatgaggataccacttcagcggaaaagctggcggcagggctcagtgctgcgctggcctgctcagccgtgctgggtggtacccttgaccgtctgctggggcggctctttcaccgctga

SEQ ID NO: 288007 - DNA, 450 bp, Morganella morganii
atggccaaaggtctgcgaaataataatagcaccccaagcagtgaggggacaccatttccaagtggtgaaaacgcacaatttcaatggattcttaatgcaatagcatcactgcaggattcatctgagtcgatgcaccataagttagatagccatattgacaatttaaatataaagattgacagcaaccataagtatgttagtgaaacaatagtagaaaaaaataaagcagtagaagaaaaaattctacttaagcatgaaatgctggaaattaaacttcaaagtaatcatcaattattatgtgaaaaaattgaaaaagttgaacctgttattttaaataatttaaatgaaaagcaaaaaaattcaaatagatgggtgatagggttgctggtaacatgcgctagccttttagtcgcaattggcggtgttgttattcggttattggttaaataa

SEQ ID NO: 288008 - DNA, 165 bp, Morganella morganii; identical to SEQ ID NO: 281067

SEQ ID NO: 288009 - DNA, 156 bp, Morganella morganii
atgtgttttaaagcttggattgcgggagccaataataataaggtcagctttaatctgttgagatacgtcgattatgatgtcggcagcactaccaatcttaacgagcagggatacctggttatcggggataccgaatttacttacaacttcttttag

SEQ ID NO: 288010 - DNA, 654 bp, Morganella morganii
gtgccaaaaccgaagaataaccgggtccgatggctcgagccacgggaagcaaaacgcctgatcgatgaatgcagtgaacctcttaaatctgttgtgacatttgctctggctaccggcctgcggcgctccaatattattaacctggaatggtcacaaatagatatgccgagaaaagtagcgtggattcccccggatcagaccaaatcagggaaagcattgggtgttgctcttaacgacactgcgtgccgcgtcctgcgtgagcagataggcaatcacacaaagtatgtttttgtgcatacgaaggctaaaaacagatctgacggctcaatgactccggttgtcagaaaaatgcgcgttgacggtaatactgcgttcaggactgcacttaaacgtgccggtatagaaaacttccgttttcacgaccttcgccacacatgggcgagctggttaattcaggcaggagtaccgctgtccgtattgcagaaaatggggggatgggaatcaatagaaatggtacgccggtatgctcacctggcaccggatcatctgagccagcatgcgcagcaaatcgatgctgtttttggtgaggatgtcccaaatatgtcccacccgacccagatcgtggttggtgagcacaaaagaaaaacccgctaa

SEQ ID NO: 288011 - DNA, 1689 bp, Morganella morganii
atgaaagatgagatactgaaaaattttatagttgacttttgtgagcaaaatgaatattcatctttagataaagatgagcagttcgaaaaattctcaaattataatgttatatctaagttatacccacgagaactagatattgatgatctttctactggcggtggtgatgatttagcaatagatggtgctgctattatagtaaatggttcgattgttaatagtgaagaggaaatagatttccttcttaaaaggaatgggagtattgatgtaatttttgctcttgtgcaatctaaaaattctagtagatttaaaggggatcaggtcggtaattttatttttggtgttaagagcttatttgatgacaaaccatcaattccagagaatgaaaaaatagttaagataagaaggttaaagaataaaatatatcaaaattctattaatttttcaaagtctccagaattaaaactattttttgtaactactggtgaatggaaggaaccagctcaaatacaaggaaaagcagatagggaacttagtgaacttgatagtaggagtcttttttctaataagtcgaagattgaattttatgacgcagaaaggctaaagcagtcataccgggaactaagtaggaaaacggtcaaggaaattccatttaatacacagattgtgttacctgatgtggcggatgaattaaatgtcagacaatcttttataggttgcgttccagttaaagattatatagaactaataacaaatgatgatggtcttcttgctaaaggattattttatgataatgtaagggattatcaaggtaataataaaataaatcaagaaattagtaagacattgaaggatgatttattgcaatcattgcttcccttacttaataatggcattacaattatttcaaaaaaagtcgataaggttgggactaaattaaagctatcagactttcaaattgttaatggatgccaatcaagcaatgtaatatttgaaaataaaagtattgtaaaagatgatgtttatcttattgtcaaaataatagaaactaatgatcagcatgttattaataatataataagggcaactaatagacaaactgaagttagggatgaagcatttgagtcactcaaaccattccacaaagatttggaagaatattataaagccttatctaaaggatatactaatccaatctattatgagagacgttctaaacaatatcttggtcatccacaaataaagccatctcaaattgtaactttagctgcacaagttaaagcatatgtatcactagtactagaacaacctcaaagcacgcatcgttattatggtgaaatattatcaagcaataaaaataaactattcattgtttcaagtgacatgaaggtttattatacatcagcattgattgtaaatagactggaggttttatttaaatcaagaggggtaaatagaaagtataaggattataaatatcatatagcatttgtatcatatgccatgatgatgaaggaatataagaatataaatagtattttatcagtttctaaagatattgataaaatgaaggatatatttatatcagcatgcaaagtaatagaaaaagtacaaggggaatcaagattaaatagagaagattcaattcgaagtcgggagtttactaataaattaaaagcaatgatatag

SEQ ID NO: 288012 - DNA, 123 bp, Morganella morganii
atgagtgcgggcagtacaccggagaatgatccgcggggagacagtgactatgatactccgtggaaattgcagccggatcagcaattacagccaggattcagtgaaagactgaacacactgtaa

SEQ ID NO: 288013 - DNA, 630 bp, Morganella morganii
atggcttttgaattaacttacagacccctcgaagacgggtcgaataaaatttatcttcacagaagtttggaaaacccttcattactaattcctgaaaaagagatagggtgttttctagttctccagtcctcatatgcactacatgaaaccattggcctttcagcccagaacttaaatatttcatggcaggccaaccaagattacctatcgtcaaattgtgccggagtggctcctctggcttgttatcctatttatttgattacagttggagatggtgaaaatgaaaatcttgtttacatcggcaaaatatcatccaagagctcacgattctcctcaggccacagcgcaattacaaagttacaccaccctaaatatgataaattgtcaaaacgaatatatttgtgctgcgttgtttttttaaaaaacagccaaaccattccaatagaatggattaaaccttttgattttgctgaaaaactactgagtgactttgaagcgaatttaatttattggaataagccagaattgaatacgcaacatataaacaaagaacctacatttgaatatgggcaagttcatgcacaaaatgtaaccggtgcaacttatttttggtatgataaattcatttag

SEQ ID NO: 288014 - DNA, 234 bp, Morganella morganii
atgaagaaagaagacggcatatcaaaatataagctaaataaaattgccactgagtcattgagaaatactatccgtcttcattttgattctgtactactctatgaaaatggatcatatcctagcgcacttcagctttctgtcttggctcttgaagagttctcaaaggccaattggatagatcactacatctggacatctgaaactaatgaaggctatctaagggaggaattctag

SEQ ID NO: 288015 - DNA, 1008 bp, Morganella morganii
atgaaaaagcctgacaagattagaaaatttgaagttgttgattttttagggaacgggaattttggttttgtatttcaagcttatgaccctctccttaaagctgaccgagccataaagctaatacaagttccaaagccagaaaaatttgtagaggctgttaaagaagcacaaacactggaggcttgtaggcacaagcatattgttgatgttaaagaagttgatgttttcttctatgaaggaatcccgtgtgtttacatagccatggaatatttggcgaaaggttccattcaaaagcatttagagaatcgatttatttcaatccaagatgcactgagaattgtatctgaagctcttttgggattagagcatgcccacaataacaatgtgcttcatagagatattaagcctggtaacatcctatttggagacaatggggaagcgaaattgtcagactttggtttggcgctcgactatcatgttgatccttccgataccatgggttatcggcctcaccagccattagaggttatagaatgtaatcctatggataaactgagtgatatatatgctatggggattactctatttcgactcatcaacaacattcctgagattaagtttaatttttcaacgatggcagagtggcacgcagctgtaaaggccaacaggtatccagaaaggaactatcaacctcacgttcctagaaaaataaaaacggtagtaaacaaagcaattaataatgatcctaagaagcgttttcaaagtgccagcgagttcaggcaagcgatagaaaagattgttatttcgattgattggcgaccaattgacgataatacatgggtaggggcagatctgaatggagatagctatgagataataaagcaacgtaaaaaaagcggatggactattgaatacaaacgaaatggaagaagagtgaaagagaactgtcaaagagaactatcagatgctcaggcaatatctgaattcttcaaaatgattagcatatga

SEQ ID NO: 288016 - DNA, 456 bp, Morganella morganii
atggtgaaaagtataggatttaattttacaactaacgattttagatattgtgttctcgaaaaaaatgtaagtgacgtcgtattcattgaaaaagataagattagctatcctaaagcgttagatgttgcatctacagcgggatggcttgaaacccagattttcctacttcttgataaacacttccccaacactgttggctataaactaccattaactctcaactcaacaaagccaatacagaactcactttttcctctcgggattttaaatttgtgttgcaaaaagagaaatataaaaattagtcattttaccagccaaggtattaacgcaacaaaatttggccttacgaaaaaagataatgtttatgaatatgtggataatcatattggcctgcatccaccatattgggataaatccaccaaagatgcggcgctggttgcgtggttcctattatga

SEQ ID NO: 288017 - DNA, 357 bp, Morganella morganii
atggatcttaatgatgaggttctgactacaaaagaagcatctcagttattgaaatgctctgaacgtgaggtgcgccggttaatcagaactggcgaactcacagccagccagcggaagaccagaggcgaaaacggaagggttatttacggccggtatcgcatgctgaagtcggattgtcttgcttatgcgatcagcattcatgaaaataacctggtgaatactgattgtcgtgacaaatcgaaggagagattaaaatcatgtcaatcaaactacggtacggcgtgtggcactgtgatttcgtttcagcaggcggaacgagagttagaaaaagccttggcacgtcagaccgcgaattag

SEQ ID NO: 288018 - DNA, 1128 bp, Morganella morganii
atggctcaggcatttattaacaacaatatactgacatgggcgaggtgcagggcatctctctctgtagattatattgctaaaaaatttaataagcctgttgatgtaataatagcttgggaagaagggagagagcccatctctttcgcccaagcccagaaatacgccaatataacaaaaataccgtttggttacctataccttgatacacctcccgtggaaaaattacccataccagatagaagaaccattggtagccggaataatcgtataagtatcgagctaaaagatactatcagtgatgctttgattaaacaggactggtacagagaatacgccatcagtaacggtcttccagacgttaaacttgttggcgcaattccagctaacagcaagccaaaggatattgctgcggcaataagaaaatatatagatttgcaaatcccaccaacaaagggtcagtggagagacttcttttccatactggtaaaaaaaatagaatcccagggcgttctggtcatgcggagcggagttgttaatagcaataataccaggccaataagcgttgatgatttcagagggttttgtatcgctgataaaattgcgccggttatctttgtcaatattaatgatgccaaagctgctcaaatattcactctaatccatgaattgtctcatttgcttttaggtcaatctgcaatttctgatttatctataagctccaaggaagggaaagaggaaatgatatgtaatgccgcagcggcggaatacttaactcctgaaaatatttttctagaagaatggaatgaaaacttattttttgaagaaaatatagcgaaattaaaagatattttccgtgtgagtagttgggttgtagcccggagggctttagattttaaattaataaataagaatgaatatagtagtttcgtcagtaaaataaacgaaaaaataaaatcaaatggcgggaattacaacagaaatcaaaaggttagagttagtgaacgactaacgctagcagttgcatctcaagctcttgaaggaaaaatccttcttagagaagctcatagtctaacagggattcagccgaataaattatatgaatttgctcataaggagttgaagctttga

SEQ ID NO: 288019 - DNA, 510 bp, Morganella morganii
ttgagctatctaattgatgcaaatatattcattcaagcccagcaggattattactgttttgatttatgtcctggattttggcaatttatggagtctaaatttaggtctggagaagtaataagtatacgtaatgtttacgatgaattgcaaaagcgagatgataaagtatgcgattggtcaaatgaaattaaacattgttttcaatcagttgacgatcatgatacacaaaaaacatttagtgaaatagctaattacgtattcacggaatactctcctaggcatgaaaatagtttgccacatatacagaaatttctatcagttgccgacccatggattatagcaaaagccaaaacaacaaattccattgtcgtaactcacgaagtaagaaacacaaccaatggatgcagacctaaaatacctgatatttgtgactattttaatgtaaaaacgataagaaccaatgaacttcttagaaattttcaggttcaatttattttgtctcaacaataa

SEQ ID NO: 288020 - DNA, 324 bp, Morganella morganii
atgaacatcggcgaattactcacaattactaacctgtctggactgaccaaaaaagagcttaccgacacagctatttacagtggcgcagcatctgacaatttaattgaaggcatcggtgccgtcggtacattaatgttcgaatcgtcgtgtaataaagactttaatttaaacaatgatacgttgggaaaattaggattactgattcaggaatcgatgcttattgccgaggcgctgggcattaattcagtctcagccggaaatgaaataaagtctcgctctgcccccccccctgcacactcaggaaccagagggacagagaaatag

SEQ ID NO: 288021 - DNA, 1140 bp, Morganella morganii
atgagctaccaactgatcggcggccgctgtgagtatgccttaaaaaaccttccggataactcagtggatgcaatcgtaaccgatcccccgtatggcatcgggtttatgtcaaataagtgggattattcggtgccgaccgttgaacagtgggcggaatgcctgcgggtattaaagccgggtggacacttactggcatttggcggcagccggacatatcaccgcctggtggtaaacatcgaggatgccggttttgagatacgtgatcaaattatgtggatttacggcagcggtttcccgaaatcgaaaaaccttgatggtgagcataagggcaaaggaacggcattaaaaccagctcatgagcccatcgttatggcacgtaagccgttcagcaccacgattctggataatgtcaccgagtacggtactggtgttctgaatattgacttgtgccgtgtaccgacagatgaaatgttggctggtggttctggtggcctactgtctgatatgcgtgacgggaaagtacctgcaggtgatgaatggacacagaacaacgagggacgctggcctgcaaatgtgatccatgacggcagcgatgaggtgatagcggcatttcctgatgcaaaagggcagcagggaaaggccagaaatgatggttcagacaatggcaataaagtgtacggcgaactgaaaaatgtagtttcaaaccctgagccacgcactgaatcagtaacatcagcggcaagatttttttactgtgcaaaagtcagtaaatcagaccgtgatgcaggcatggagcggttcatttctgccacggcatccgaaatgactggtggccgcgcagagggcagtatcggaatcaataacccgagagccggagccgggcgcaccagtggtgctaaaaatacacacccgacagtgaagccggtggatttaatgcgctacctctgtcgcctggtaacgcctataggcgggactgttcttgatccgttcatggggtcaggtagcaccggcaaagccgccattgctgaggggttccggtttatcgggatagagatggaccctgaccatctggttactgcggcggcccgtattggatatgccgcaaaagaggcagctcgattaagttttactcaaatttga

SEQ ID NO: 288022 - DNA, 348 bp, Morganella morganii
atgaacaaatatcgtgacaaatcagactttgagattaataaggccgtggctgttaatattaattgcactgacgctgttttagaaaagttcggtagcatatatatcagtgatggagatagaggagcgatggtgagcttctccccctgcaacaacccagcggacgccatgccgattattattgagaataaaatatgcatggcctatgacgtatttgcagaagagcgcgatggtgggagttgggtggcgcaacatgcatatggtttttctgatgaacgggtgagaagcgacaattattatcgcgcggctatgatttgtttcctgatgatgaaggatgcggagaataaataa

SEQ ID NO: 288023 - DNA, 633 bp, Morganella morganii
atgaaagagcacggaataattttcaacgcagagatggtacgcgccattctcgacggccggaagacgcagacgcggcgtgtggtaagtgatcgacatcttcacctgatcgacgtcgcatcacaattaggtgaatgctaccccctggaatgcggcatcgaccatgcaaacagccagagctattaccgtgggttatgtccactcggtggagttggcgaccggctgtgggtgcgtgaaacatggcaatgtgggttatgcacagagtcaacttttgcgtacaaagctacacataaacccactgatcttgaggagggctggaacgaaaaaattaagtggcgcccatcatcacaaatgccacgctgggcttctcgcatacagctggaaatcaccggcgtttgtgttgagcggttgcaggatatcagtgaagaagatgcaatagcggaaggcgttgttactggccgatatggcaatgaaggcaactggctgagaggcttttatgcacccggaggcaatcagccacatcagaatgcaaaatccgcgtatagcgagatatggcgttcaatttatggtgtagaggcctggtataaaaacccgtggtgctgggttgtcgaatttaagcagattcaggaggagtga

SEQ ID NO: 288024 - DNA, 204 bp, Morganella morganii
atgaaaattctaaccaggagagaggcaatcgcgcagggagcgagacgtttttacaccggtaagccatgccgtcatgggcatgatgcagagaggtttacgagcaatggcgcttgtgtcgaatgcatagcgcttaactcagctgtataccggaaagaggtcagcagattattgaaactggcaagagcgcaggaggtagcacgatga

SEQ ID NO: 288025 - DNA, 813 bp, Morganella morganii
atgaaatatatacttgtttttctattttttgtatcaggctcagcgcttgccaaatgtgataagaataattttgaccaatgtaaaacgtgcgatcaattgagtaaagcagttgatttgtcggaaccggatagaggagattattacagaggtgcattatggaacggattgtatgcttcttatgtgcggaattgtccagcggtggctgagaagctgctggagcatggagcaacaccatcattaggcggagcaaacgccgctttgcctgttgtagtttctggtaaatggccgcacgacaataaaaaaataaatgaagattggttggctctattgattaaatataaagtgaatatcaatcatattcctaatgaaagacgctcgtcttatgaaatatatttaaataacaaagagttaattgaataccctgatatttggcagaaatttatggattatagtcatccggctcctattgatatggcaaggaatattgagtggtgtagcgataaggaaagaatgccaattttatttaaagttctcgatatttgcacgctaaacgaaatccacgagttggatgataacatttctccggcatctgacattgcagacgcagtaatggaatcctgtaaagaagaccttaagtatgtttcagatgcatttctttgccaagccttagaggctgataagaagataagtgacaatgaaaaaattgaatggtttaaagaaatggaaacaaaggcatacaatgatatttactcgaaaagacgcaaaattataatgaaaaaaatattagaaattagaagtaataatcgaaattaa

SEQ ID NO: 288026 - DNA, 495 bp, Morganella morganii
atgaagatttgtaatgtaatggttgttgcaatttttatgtctttttatgcaatagccgacgtcagtgtgataggtattactataaataaagatacaaaggaagatgttgtcagtaaatatgaagtaatatcagaaaatggtaatgtgcttacattgaatgaaaaaaacatccctcttgatgatgtctcatcagctgttgttgcattagaaaataataaagtcaaagcagttctgcttgcgatacaaaaaagcaaatttgattatttttataatttactgaaaggtaaatataagttaaccaaaaaagaaataccttacgtaggtaataaatatgcttcttttatcaaggatgacgtcatgattttactggatgctccgcatctatcatttgaaatggatttgttatatatagacagggaatatgacaaatctctaaaaaagagacagaaggaaaaaaaagaaaatgagaagaaacaggattcggaacagctttaa

SEQ ID NO: 288027 - DNA, 249 bp, Morganella morganii
atgataataacagggttggctgtcgggtttattatgattcatattggtgtatggcgatattatcattgtaaaaacagaaccggaaaaacaatcagtatcggtatcattatagccggtgttctggttattgccggagtgtttgcagttgatgcagtaaacgataaagaaaacccttgccggaagacctcaggcaaatatcacagtgaagaatgtaaacctcttgtgttatcagatggtatttactcctga

SEQ ID NO: 288028 - DNA, 165 bp, Morganella morganii
atgaaaacgtaccctctgctgcagttattaaccggcctcgttttcttcctgatatcattgtatgttcccggcgtcccggctgaggtggtgatgtttgccttatctgtcggcggacttgctgtactgacaggtaaatatattcagtccgatattcaggccggttaa

SEQ ID NO: 288029 - DNA, 225 bp, Morganella morganii
atgaaaaagaacacgactgtttcagtacggaaagaggttacagaagcagatatatcagtgatgtcgtcagatcttaacagtaactggtgcgcagccggaaaagcggggaaagggaaaactgtctcagcggcatttttacagcagatgcgcgatttaaacgcatcaacggtgcagattgtcatgatgaacagtaatgtcagacttaacctgaaaaaagggggctga

SEQ ID NO: 288030 - DNA, 534 bp, Morganella morganii
atgacgctcagttactcagttactcagttactcagttactcagttactcagttactcagttactcagtaatgttagttctcaataacatggttatctatatgatagataaaaaatattttttttatctttgcatgatgcttatgagctttgattcatctgctaaatatctattcatcggagacagcctgactcttagtttagcaaaaggtgcgaaagaacaggacgttctggaatattattacctggacagatccggactgatgaatggggcattttatgattggctggcgttcgtacaacggatgccggtcagttcccctgatttaatcattgtatcgctgggtgctaatgatggtctggctgcctatgccgctaacccttacagccaaaagatcagacagtttatttccacacgttacccaaaagccagtatcaacgggattgttctgcgtactgctgacggtatgcactacacgccggaagccggtaaactgatttcagaacaaatttaccgggctgtccggcaaaactaa

SEQ ID NO: 288031 - DNA, 312 bp, Morganella morganii
atgcacgtcatatcgaaagaaccttttttagaagcaacaaaacaataccctaatgatgctcaggccattaaagccctctatcgtgtagtcaaagaaaatgatttttcttcacctgaagatttacgaaaaattctgcccagtcttgataatttcaaataccgtaataaatggtgggttctagatgtgggaggaaacaatctccgggttattgcttacattaactttgttaacaagcgattttacgttaagcatatcactacacacactgaatacgacaaactgactcgttactacagggaacacaaagaatga

SEQ ID NO: 288032 - DNA, 420 bp, Morganella morganii
atgattacagatacagcaaaagcaatcaccgccgcaaaagacttagttgcagcggtgccttttttaggcggaaactcctcagagaaagactaccgtgacgctctgggtttaatggattatcttatcgaatacgatgatgagagtccgctcattgacttcctggctgggaaaattgcagattatgaagacacatgtgaagattttgctgaatttaacaattccatcacagaaacctctatgggtgttgccttgttgcgaacactgattgaccagtacaaactatcttattctgacctgaaaaatgaaataggctccaagtcacttatcagtcagatcctttcagggcagcgggctttgactatttctcatattaaagcactgtcagccagatttggtatcagacctgaatggtttctttga

SEQ ID NO: 288033 - DNA, 885 bp, Morganella morganii
ttgccggtagtacagaactttctgtatacgcatatttctgaccagtacagcccgttttataccaaagtgattagtcgggtgtgtgattccatccacgtacttgatggcctgctgtatcacgaaagtgaccttgaaataacagagcattacaccgatacggcaggcttcacagaacatgttttcgcactgatgcatctgttggggttcgcttttgcaccaaggatcaggggtcttcacgacaagcggttgtttattcaggggaaggttgataaatatcctgcgctacagtcaattatttccacaactccactgaatatcaaagagatagaaatgcactggaatgaaattctgaggctggcgacctcgataaagcagggaacggtgaccgcttctctgatgctgaaaaaactggccagctatccgaaacagaatgggcttgctaaggcactgagggaaatcggtcgcattgaacgaacactgtttatgctggactggttccgcgatccttcactacgtcgcagagttcaggcaggactgaacaaaggggaagcccagaatgcccttgccagagccgttttcatgcatcgtctgggcgaaataagggatcgtggccaggaaaaccagagttaccgcgccagtggacttacgctgctcacagccgcgatcacattgtggaatactgtgtatatagaaaacgccattaatttactgaaaaagaaagggctacatatcaatgatcagttgctgtcacacttgtctccgttgggctgggagcacattaatctgacgggggactatatctggcgaaacaataaaaaacttgctgaagggaagtatcgttctttgcggccagttgatgtcagccagtacaaaaaatcatcttaa

SEQ ID NO: 288034 - DNA, 804 bp, Morganella morganii
atgaccaaatttaagaccggctttttgctcgaaagaattccctatattcgcatgggtgatcaaactgatcccgtgatcgtgattaacggtgggcaaggttttgtacgcaaacacagctttgaccggatgctccgagacgcaaagcgtgtcgcacgtatgttgccgccaacacagggcttcatcctgattggctacgatcagcagcccgaagcaaaggcgacgattgaaacgattgtgacagactatgagcgcgccatcagagacatgaaggtctcggcgttttcgctcatagggatatcctatggcggattgctggcgacaaagcttgcggcagcgcgtaaagggtgggttaagaagctgattctggtggcgagcgctcacaagttcagcgagaacggcgaaaacaggataaatcgacaaatccagttcgcccaacaggagcagtactacgagctgatcaatgactttgcggcaatattccgcaatcccctgctgaatttgttactgaagataaagctctgggtggactgcaacaaacttacagaaaaaatgaactccggtgacgttattgtgcgatatcttcaattgataatgcaggctgagccagtcgacctgacctcgatcacagcaaggacattgattatcggaggggaactggatcagttttttggcgacggcatgatggaggctgcccgaaatggtataccagacgccaagctacatgttcttgaaggacaaactcacatggctccggttgaatgtagccgacagttacggagattcctgacggaatttctcgattga

SEQ ID NO: 288035 - DNA, 435 bp, Morganella morganii
atgaaaggttcatgtttatgtggaaaaatcgcatttgaaatatcggtaattccatcaaagttttatcgttgccattgctcgctttgcaggaagcaaagcggggttggttataatctcgcgactattataaatgccaatgatttcttttggacccaaggagatagcggcattttctcatggtgtaaatcaactggttaccgtacggatttttgctcgacatgtggctctaccgtacccaatttgttgcgagatttaccttatgtctgggtacctattggtttgttagataaacattttgatatgcaatgtgctggagattactgcactgatgatgccatgccttgggatataactcgctcgggcataagtcatagcggaccagtaagttcactgacatcacttttaagaaacttagacatacttaaaccagaataa

SEQ ID NO: 288036 - DNA, 1026 bp, Morganella morganii
atgttactgaaagtcggcgaactggcacgccgttccggtattaccgttcgcacactacactactacgacaatattggtttgctgatcccttctgcgcgctccgactccggctaccggttgtataaccgggccgatatcgcccgtctgcatcatatcctggcgctacgccgcatgggagtgacgctggccgaggtcggggcgattctggaacgttcggatctgacgctgccaacggtgcttgagcggcagattgccatgctgaatcagcaactggcgcaaatcaccgcgctgcgcgatcgcctgcagacgatgcagctgcaattgacggcgggcgatgatccggaactgaacgactggctgacaacgttggagttaatgactatgtatgataaatatttcactgctgatgaactggcgcagctgccgttttatcaggccgatacgcaacgccagcaagaatgggcggcaatggtacagcaggtgcatgaactgatggcaaacggcacgccggcggaggatccgcaggcgcagcgcatcgcgcgccgctggatgctaactctggagcgcgacactgccggcaatccggcgtttctcacgcgtctgaacgccatgtacgccgatgagccgtcaatgcgtgaacagatcggtatcacgccggccatgaccgactatatcacccgtgcatttgctgaaaccaagctgacaatttatcagaaatatctgtccgaagaagagtatgcctatgtccgcaaacactatttcgaccgcatgcaggagtggccggcgctgatcgctcgcctccaatcagccctcaacgacggcatcgcaccggacagcgcacatgcccgccaagtggccgccgactggctggcgctgttccgttcttacgctggtgaaaatccagccacgcagatgaaaatccgccgggcaatggagcaggaacccacgctgagcgaaggcacctggcttacaccaccactactggcttatttgcgtgaagctgtcatcaatttgaatcaaaaataa

SEQ ID NO: 288037 - DNA, 240 bp, Morganella morganii
atgagtagaacccggaagggtttcgctagcaccagcgcaggcgtttctccatttcgggggcataacgctgaatccagcgataaaggggatgtgatcgacattcacgccgcgttcggccagcatttcctgcagctcacgatagcggatgccatatttgcagtaccagcgtactgcccagagaatgatgtctcgctgaaaatgccggcctttaaatatattcatgggaaacgtcactggtga

SEQ ID NO: 288038 - DNA, 1206 bp, Morganella morganii
atgtatattccccgacccgcaaaactcctctttcagattgatgatggctggaaccgctttctcatcaatcgcggccatactatcccccaatggaccaaactggtcattgagcgcatgctcgcctgcggcaccggcgctatggggatacgccgttattgctgtgagtctgctcactgtacccacaccaaatatttctgccagagctgcaaaagcaaaggctgcagcgcctgcggcatgaaagccaccgagcaatggattgctgagcagcaacacatcctgcctgactgcgaatggcagcacatcaccttcaccatgcccgataaactctggccggcgtttaatcttaactggccgttactcaatcagctttttgcctgtgccgccaataccctgctgaaatgggctcaaaagctcaatatcgaaatcggcctgttcgtcgccctgcacacctacggacgtcagcttaaccagcaccctcacatccacttatcggtcacccgtggcggattatgccggaaatacggcatctggcggctaatctttttcaaaaagaaagtggttgagcgctactggcgccgggccgttaccgccctgttacgccggtactatgcctcactgaatttacccgccgccggctaccgacatatccgtgactaccgagaatggtgtcagtttctggaatcgcagtatcagcgtcgctggaaaattcactttgcgaagaaaaccaaacatgtccggcaaaacgtcaattatctcggccgttacctgaaacgtcccccggtagcggcgtcaaaactgcgccattacaacggcgagaccgttgttcaccattattacgaccaccggacggggcagcacacaaagcagcatctgagccaggaagagatgctgtggcgttacagcagtcatgtcccgtcgaagcattttaagatggtgcggtattacggctttctggccaaccgtaagcgggggactttactgccgaaagtgtatgcggccctcggtatggcgatgaaagaaaagccgccgaaaccgggctttgcgtcgctgatgaaacaatttacccgcgttgacccgtaccagtgcgtgctgtgtggcggcaggatggtgtttaacagagcagaagcgggtatcagggcagaaagattgctggagatgcggcgtcaggaatttaaaaagcagcgatggctgcggcaggcagcatag

SEQ ID NO: 288039 - DNA, 261 bp, Morganella morganii
atggaaaaattaaaaaacattaataacccaacgttattaaatgaaaggttgggctccctgataaaaaaactgagaaaatcaagaaaaatgagtggcgaagttcttgctggttttattggtgttagtcagcagcaattatctcgctacgaacgtggagaatcagaactaacgataaaaaaaatagcatatatttcaatggcttttaatatgaatatatggcaatttatggatattttatatattacgatgcaggagaattaa

SEQ ID NO: 288040 - DNA, 159 bp, Morganella morganii
atgtttatgaaatcaatgttaacagtattaatcgcagctataatatttgttgctggctgcgataaccaatcaaacgaaaaaggaaatggctcaatagaacaggctaaagataagtcagccgaactctccgattccgccaaagaaacatggaatgattga

SEQ ID NO: 288041 - DNA, 576 bp, Morganella morganii
atgcttaaagatgaagcaagcatcgtgacacccaacaggctccggcggcagttcaaccccgaagtgccgaatgagcgttgggtaacggacatcacctacattcgaactcacaaaggttggctgtatctggccgtggttgttgacctgttcgcaagaaaacccgttggctgggcaatgtcattttctccgggcagcaaaagcaaactggccaccaaagcgctggaaatggcatgggaaagacgcgataagccatccgggctcatgttccacagtgatcagggtagctactatacaagcaggcagttccgacagttactgtggcgatataggatcaggcagagtataagcaggtgtggaaactgctgggataacagtccgatggagcgtttcttcagaagcctgaaaaaggagtgggtgccggtgatcagcttcagtgaagctgatcatgcaatgacggattatatcgtcagctattacagcaaactcagaccacatgaatataacgttggattaccaccaaacgaatcagaaaaccgataccggataaactctaaagccgtggccggttttagttga

SEQ ID NO: 288042 - DNA, 4710 bp, Morganella morganii
atgaataaatacaaagaaaattctattagtttttttaacaaaaacactatcacatgtgcgctacttataactataagtggcggggcacaagcaggtactcaacaaaataatttgaacagtgaaattatatcgctggaaaataaaatcggtgcgcagggggtatctggtacagatatcagtaatggcggagacggagaacacgcttatatcatcacaacaaaagaaaatactgttaccatcgcagaaaatatcgacatcaaaggcggtcaaggcggaaacggtggtaatggaaaacaaggtagtaatagtagccgtggtactgatggtataaataccaccaccggtaatggtggtaatggaagcaatggtagcgatgctggcgcaggaggtaacggtagtaatggaggtaacgcaggtgatggcatcattactgatgaagtaactattttaaataatggctccatttctggtggtaatggcggagccggaggtaacggtgcaaatggtgttagaggagggaacggaggtaccggaggctacggtttgaatggtggtcaaggtggtaatgctggtaacgggggttccggtggtgccggcggtaaaagtagtaatggtggtaatggcattaaaggaaacaatttaaatattgaaaatcatggaataatttcaggtgggaacggagggaatggcggtagcggcggcaacggaggtaacggtgcatcaggtggtgatgcaggcaacggttcgactgccacagttcccggtttgggtggcaatggaggccatggcggaaaaggcagtaatgcaggtagcggcgaagacggcagtgcgggaggaaatggtatcaatggtgataactcaattatcattaatactaaaaatatttttggcggcaatggcggcaatggaggcaaaggcggcaatggtggtgatagtggatatggaggttatggtggccggggaggcttaaataatggaatcactagcggtaatggtggtgaagcttatgacgcagagaatgctgccgatggtggtaacggtggtcgtggcggtaatggaatcagcggcaatgatttaaaaattagtaatagtggcactatgaccggcgggaatggaggtaatggaggtaatggaggtaacggtggtggcggtggtaatggtggtggtggcgccaataattcaggtactccttatgattctaatggtcgtggtagtgatggtgccaatggaggatttggaggttttggcgggcaaggtggatctggtggtaatggtatcagcggagaccatttaaacgttgaaaataccggaactatttctggtggtaatggcggaaacggaggcagtggcggtaatggaggatacggagggtatggaggtggaggataccagccggctaaaaatatcagagtcagcaatggaggtaatggtaataaaggtaataaaggtaataaaggagggtatggaggagatgctattattggcaactatgtggaaatcgtaaacagccagaatatttttggaggtaacggaggtaacggaggtaacggaggtaacggaggtaacggaggtaacggaggggctttaaatagcgtaggggatgttggcaattcgggtaagggcgatgatagcggttctggtggtaatgccgggaacggaggagatggtataactggtggttattcaaagataaaaaatagtggaattatcaccggaggtaaaggagggagcggtggaaatggtggaagcggtaccggaggtggaagtggttttgttggttatggcaatgggagtgccagcggaaatggcggggatggagggaatggaggtaacggtggtaaaggtataagtggacgtgattcagaaattgaaaataacggaagcatcacaggtggtaatggtggcaatggtggcaatggtggtaacggcaatacgccagactcctcaaaagactccggcggtaatggcggaacaggtggtgacggaaataatggcggagacggcatcagtggtagtaatttaacgatagctaacagcggctcaataaccggaggtaacggtggtaatggcggcaatggcggtaatatacctttagctaagaataaaactgcaaaaaatggagggaaagccggtgatggcgggaaaggtggtgccggaggaaacgccatcagtggtgataatttaactataacaaacaacggtacaatcactggaggtaatggttctgctggagggaaaggcgggactaatagtagtatctggaatcctaacccaccaggtaataaaggaagcggggagaatggtggggatggtataaatggtagtgatttaacaataaccaacagcggtacaattgcagcaggcagagatactgacggaaacataattaactcagcagccattcgtgcactaaacggaacaaactccttggtgcttgagtctggcagcgaaattaacggtaatattgtgttatccgacgcagagaaccaggggggaaactcgctgattatcaccaacaatgctgagacaacagtaaatggtaacctccaggcgggagaaaaaacctcagtaactctgaaaggaggtaatgtaatctttgccggcgatggggttcaggctggaaatatgaacttttcggataacgcggtattgaatttcagggataaaggttctgcacaagcagtattggccacatttagcaacacaacgataaccaccgatattactgaatggaatacagaagatacagatggtattactctgctaagcacagaaaaaggtataaccggttatgaaggtgcgcttaccactaactcattactgactgaaggcgcaatagattttgcaggagtggaactggttggggaggaaaacgccgctcaaagtctgatatataaattgaagtggctgagtgaaaaagatgattcttacggtacatttgaccttaaagaaggagcaacgctgaatcttaatttagcgttaaatgataatacaaccgttacacctgcaaatgaaaatggatggaatggaaaagacctgactaagtcaggatttggtacattaatactgtcccagaaaaatggttatacaggaagtaccctggtaaccaagggtatactgaaaactgcaacagaagaggccattgctcacagcagcaacgttacgattgaaaaagaaggtgtactgaatctgtctggtaataaccagacactgaataatcttaataattatggctcaatatacttgtctgattcacaaataaaggaccaggagggagctgaaccaatttctgtaactgttacgggagatatggaaaatagcggaactctgtacatcaataacacggacacaagtgctgatagtgttgccggtaatacctatacccagaacggtaactggcatggtaatgatggtatagtggtcatgaaatttttgccgggcagtgatagcacagtagcggataggttaaacattaaaggtgatgctacaggaagcactaatgttgtactaaccgcaaagttaggtgggaggggagaggctacaattaatgggattaaactcattcaggtcgacggtgtatcctcatcgggtgcatttaagtctaatacagttgctgctggtgtgtatgactacacattacaaaaaggtagccagacaggtcaggatatagaaagttggtacttaactaacaaactagagtcaggaaatccagacacacaaataaaaaactaccgccctgaaagtggagcatatacagcaaatctggtagcggcaaatactctttttaactcgaccctacatgatcgccagggtgagactggttacataaatactcagaaagaacctaaacagatgaccagagtctggatgcgtaatgtcggtgggcataacaaattccgaatggcagacgaccaaaacaaaaccaagtcaaaccgttacgtgttgcagataggcggtgatattgcccaatggagtaatactggtactgaccaaattaatttgggtttaatggtgggatatgcaaggcaaaacgggactactgagaatcaatacagcggacgtaaggctaaaagtcatatcagtggttacagcactgggatatatgggacatacttccagaatgaaaaggaacaaaatggcctgtatatagatagttggttacaatatagttggtttaataatgaagttatgggggaccaacttgctgacgaaaaataccatagtaatggtctgacagcatctctggaaagcggttataccattccggttggttcagctgatattcagagagataacctttttaatcaattttatatccaaccgaaagcccaggtgatttggatgggagtaaaagcaaatgagcaccgtgaagataacggtactttagttaaaggggttggtaacaacaacttacaaagtcgtcttggagtcagggctgtaatgaatgccaagagtaaagataaagatgcaatccttcaatttcagccatttattgaagttaactgggttcataacacaaaagattttggtgtaagaatggatggacagacagtactatctcacggaagccgtaatgttgctgaagttaaaactggattagatggtaaaatatctcaaaacatgaatatatgggcaaacgtatcataccagtcgggtagtaaaggctacaaagatacacaaggaatgctgggagttaaatatactttctga

SEQ ID NO: 288043 - DNA, 1389 bp, Morganella morganii
atggcaacctggaatcagagtattaaccccggaagctttcttgctggtattggtcaatttaatgaaaacgcaccaaaggcaagtgatgccaatgcaaccatagccatgatccgtgagaataacgagctacgcagaaacggcggcgataattatatattgcaaggtttgcagggactgcaatcagtaaaagagagcgtcgatggatatcagcaaaaagagagaatgtctgaatttctgcaaaaatacggaaaggccagagcagccggtgacatccccagcatgcgtggtctttttgctgaataccctgaaatgggtgagcaaatcggcaagggaatgacagggatatctgccgacacaaaagagtcgataggtaacttggcggcggggttccgtactgcggctgcaaccggatctggcgatcagttcgttgccaaaaacgcggcggagttcctgcgagtcggggttgaccctgctgatttgcagaagcgcttaaaggaagacccaaattcagcggttgaattagccgattgggttggccttagcgcggtaggtcatgaaaagtattttgacattattggggctaaagagggaaggcagattgaccgagaaaaactggctgaaacaaccagaagtaatcaagcgggcgaggcgctaactgctcgcggtcaggatgttcaggtgagaggtcagaacctaagttaccagtcagcaatgacaggacactctattgccagggaacggctgaatctcgaccgtgaattaaaagcaatggagacacaggagaaggtattagaccgccgattagccagggaaacaaacgagctcaagagaacggagcttgagcaaaagcttgatggtattcgaacccaaaaagaggcagccaaggcagaacggtatgacaccgttgcaagtcaggtggattcggcagacagggcaataaaaacggctcagagcatcattaattcacctggctttacagggtattttggtgtgaacgtaaacccgtttggtagccggttcttacctggtactgacgcatccgacacttcggccatggttgatactctgaaatctcagggatttatgtctggtattcagcagatgcgaggcatgggcgcactgtctgatgctgagggtcggaaggttatggatgcaattggtagccttgattcaggcatgtcagagaagcaggcaaagaaatcaattgagggaattatcgaaactttcgagcaggggaaaaaacggttggaaagcagatatcctgatgaattcagtaaatactcaggcgaaattaaccagagtaaatacggcttgccgataggccaccaggaaggcgggtatacgtataaaggcggagacccttcagataaaaataactggagcaaataa

SEQ ID NO: 288044 - DNA, 315 bp, Morganella morganii
atgacaatattcagtgaattgcatcagtggttacttgaagacaaaacaagatggttcattgtatggtttacgggtgcagtgatggtatttttctttatttcagttgtgagccggtatgtcgaaacagagaacaaaattccgttttacaagacatttaccgcatcgctgctttggttgccgtttgtggcgatgtttattatcagtgcggtatggtatctgctggaaattatttataaccggtttacactgtggcaggaaaaaccgatggtaaaagtaacggtcagtcaaccaaacccgccaccaaagaaaccataa

SEQ ID NO: 288045 - DNA, 189 bp, Morganella morganii
atgaatttacttgattgcacagtcactaaagttatttctgcacctattcatcgtatcagtgaacacggtgattactggtatgtagcggtagagagcgagtgttgcggggatatatcagaaacccgcctgatgtttcaatcaaaagaagaagctgaagaagtaacggttggcttccagttcctggggtaa

SEQ ID NO: 288046 - DNA, 1056 bp, Morganella morganii
atgagcaatattgatatttttagtaccaacgtgttaattcaggtcgtcccaaatctgatgaccagtcagaactggctgctggataagtttttcccgaatgttatcgaatttgatactgagaaagtttccattgatgtggatgtgggtaagcgccgtatggcaccattcgtgtctccgctggtggagggtaaattggttgaatcgcgtaaataccagaccaacacatttacccctgcgtacattaaagacaaacgtgcaccagatctgcgcaaacctatccgccgccagattggtgaacgcatcggcgggcagatgacagcctcagagcgtgaaatgctgaacctgcagttcgagctggcagaccaggttgatatgctcaatcgccgcctggaatggatggcagccagcgcactccagactggtactgtaaccgtggcaggtgacgggtatgaaactcaggtggtggacttcggtcgttcggctgatcttactatcaccctgagtggagccgacaagtggccaacaaaaattgcaatcggtgaaaccaacactaaaccgactgacgatattgaggactggtcgcagcgcatgctgaaagaatccggtgcagcggcaacagatatcgtgttcaccaccaaatcgtggaaagcattccgtctggatacatcagtgaaagacagtgccattgtattccccgcacagtctccgttcggtaaccagattaacccgggcactcaggtacagaaaggtgctgtctacaaagggcgctggggtaactatgacctgtgggtgtacaacgactggtttattgacccagtcgacggcaaagaaaaaccgatgattaccgatggttcagtgatcatgtccggtgctgacctgatggggacccgtgcattcggtgccattatcgatcctgcattcacttacggcccgatggcgtttgcacctaaatcatggctcgaacacgaccctgcacaacgcatcctgttgatgcagtctgcgccgctggtcatcccgagccgtgttaacgcatcactgtgtgccgttgtggtttaa

SEQ ID NO: 288047 - DNA, 135 bp, Morganella morganii
atgagcctgtcgtattccaatgctcttattgttgctaatagtaaaaagccgcacacagctcttgtgttaagtgataacgagatgattgatactgtggcggcgcgtttgttactgaatcagcttacttgccagtaa

SEQ ID NO: 288048 - DNA, 582 bp, Morganella morganii
atgcgagccacacagaaatccccgaactccacgtcatcttctgggtcaaccagtatcagcattccttccgggaagctaggtcgtccaccctgcggagccgtcattgaatgcccctcaacttcaagccagaaagctttcttactggcttttttggctgttggtacccaatcaattgcatctttttccgtgtatgaatttccattttccgtgaaagcgccagcctgtactttcgtgaaaagtggatactcatatgtatctccaatagatgccgatttttgtgaggacaccgcgttaaacatcgctcttatttctttagaaagtgacggactaaaatcatcaaccgagacatcaagagcaactgccaatttggcagcattctctgcgttaagagcattaacgccatttagcagctgggctactgcactttgtcccatcccaatggcatcaccaagagactcttgggataacccaagccccttttttttggcatcaaaaatcgcctttaaccggatggcgtcggctatctgttcatcagtgagaggtttctttttcataaacccatattatcaccaatggagataa

SEQ ID NO: 288049 - DNA, 477 bp, Morganella morganii
atgaacaaaataaaaatcttattattatcgttattgatttcggggtgtagtgttccgggactgaccagtcatacagatcactctttagatataaaggatataaaaataggtgacaatcttacatgtaatagtgccgccggagatgtatttggagaagtaagattatgtcatatcgagatcaatacatatggaggtaccaaagtagtatccaacagcgttacgttacttaatgaaaaggtggcagcagttaaattagcactatctcaggcaactgggttcagccagaccagtgtgcttaatgctatgatgaaaaaatttggtccccctgcccatggagctatgccaaaggtttatatctggaccaataacggcaacactttgtatcttgatgaaatcaaaggtgtagttgtgatgtatggtaaagaccttgatcgtatacaaagtattatggctgctgaagacactaaagacttataa

SEQ ID NO: 288050 - DNA, 321 bp, Morganella morganii
atgaactgcatcaacagtattgttggccaacgcatccgtcgcttaagatgtgaccatgggctaaaggcaaaagcattagcaaaactacttggtatatcgcaacaacaggtatcaaggtatgagaggggtatcaataaaatagatgccagtattatatttaaggtaataaatatattcagtgttccttatgagtatttatttcctgatccagagatggaagattttactcagacaaaaaactcgggattattgcaaataataaatcaggctgcttttaactcaacagtgatagatatttcacgcaaaaacagtatcagctga

SEQ ID NO: 288051 - DNA, 411 bp, Morganella morganii
atgacatgcagcaagtggcaaattagcgatgacctttgggaaaaaatggctccactgctccctgaacacaaaacccatcatccgctggggacgcatcgtaagcgcgttgataatcgtgctgcaatgaacgccattttcttcgtgctcagatcaggttgtcagtggaatgcccttaatgcgacaggcatttgctcatcgagttctgctcatcgtcgcttccaggagtggcgcgatgccggagttttcgagcgattctggcagaatggactgcttgcctgcgaaaagctggacgtcattgactggtcatggttgtcgatggatggctgcatgacaaaatcgccgttggctggctcaaaaaaacaggacgcaaccctaccgacaggggtaaacaaggcatcaagcgcagcctga

SEQ ID NO: 288052 - DNA, 396 bp, Morganella morganii
atgaccgatgcgaacgggttgccgctcgcactcgttgtgtcaggggcgaatacccacgacataaagttggttgaagatacgcttgatgcgctacaaacgggcaggccgggatacaggctccgtttatgtatggataaaggctatgaagcagaatggctggaaaactgcctgcaagcacgtcgttatgaacctcatatacagtcacggaaggatgagtcagaggcgctcaaaaataccgacttcaaggctcatcggtgggttgttgagagaacacatagttggatgaatcgctttcgtcgcgtactgacacgttgggagaagaaggtcgaaaactacgaagcgatgctgcattttgcatgcagcataattgtctggaataaaatcctattgggatag

SEQ ID NO: 288053 - DNA, 189 bp, Morganella morganii
atgatgacccgtaaaagtatcgataccgtcctgctctccgttgctgctgataagttatctcagcgtgaatgggactggattaagctgatgaagcccatggagccgccttcagtgatggtcgcccgcgctatactggaacaccgtaatgacaccggggcactcagccgcctgccggctactgaggcgtga

SEQ ID NO: 288054 - DNA, 1200 bp, Morganella morganii
gtgctttccggtttttccccgcgcccgctcaaaaaactctttacggctaaccagtgctggacctcctttctcgatgccggtgggatgcgcgatatcgaagtggaagctgtcaccaaaatgctcgcctgcggcacccgcatcgccggcgtgaaggaatatgcctgcgataatcccggttgccggcatgtcagatacatcaccaacgcctgccacagccgtgcatgcccgtcctgcggtaaaaaggccaccgatttgtggattgccgcccagcttaaccggctgccggactgtgactggcaacatctggttttcaccctgcccgacaccctgtggccgctgtttgaagtcaaccgctggctgcttaacgacctctgccgtctggcggtcgataatctgctgtatgccgccgggatgcgcgggctggatatcggtattttctgcgctatccatacctacggacgccggcttaactggcaccctcacattcatgtttccgtcacctgcggcggcattgatacgcacggaaagtggaagaaaatcagcttccgcaaggatgccatgcgcgcccgctggatgtggaatatccgtcagatgttgctgagtgcctggtctgagggtatcgcgctgccggcctccctgccgcatatcaccaccgaatctcagtggcgcagtctggtgctgaccgccggcggaaaatactggcacgtgtatatgtcaaaaaagacggcgagcggtaaaaacaccgtgaaatacctggggcggtatctgaaaaagccaccgatagccggctcccggctggcgcactacgccggcagtgccacgctgagctttcgttaccacgaccacaatacaggtgagcaggccaccgagaagctgacgcagagggaaatcgtgggtcggctgaagcagcatataccggaaaagctcttccggatggtgcgttattttggttttctgtccaaccgggtgtgcggggaaaaactgccgcaggtgtaccgtgcgctggggatgaaaaagccggaggcggcaccgaaagtgtgttacgcgcaaatgagtaagcagttcctgcggcgcgacccgttcgaatgcatcctgtgcggtggccatatggtttaccgccgggcaatatccggtctgaatgcaggagagctgaaaattcacgcgcgggagatcagtctgatgaggtatatcccggcctga

SEQ ID NO: 288055 - DNA, 348 bp, Morganella morganii
atgaaacagttaaattacaaaggttataccggaacgatagagccggattttgaaaataacattctgttcggaaaactggcttttattcgtgatttagtgacctatgaggcgaacactctcgcagagttggaaaaagagtttaaaacctcagtggatttgtatttacaggcatgtaaggaagacggaaaaaaaccagatattccctttaaaggcgttttcaatgtccgggttaatccggatttacaccggaaagccgcagaacgggcaagcgaggaagatatcacgcttaacgcttttgtcagtaaagcattggaaaaagaaattaatagtcatcactccggggcttaa

SEQ ID NO: 288056 - DNA, 246 bp, Morganella morganii
atgggtaagacggaaaaattaatcagcaaactatcaaacagtaaaaaaacgtttgactggtcagaattagtaagcctgctttcttctctcgggtatcaaaaaaaagaaattgaaggttcacgggttcgctttattcatcccgatcgtaacatgatattgcttcacagaccgcatccggaaaatcacattaagtgcggtgcgctgaaagcagtaaaaaccattttgaaagatgaggggatattataa

SEQ ID NO: 288057 - DNA, 555 bp, Morganella morganii
atggcggtcatcggctatattcgcgtatcaacaactgaccaaaacagcgatttacagcgaaatgcgctcatcagcataaattgcgatcagatttttgaggacaaaatgagcggtaaaaccgccgtcaggccgggactgaaacgggcattaaagaccattcagccgggcgatacactggcagtgtggaaactggacaggctcgggcgcagtgtcaaaaacctgatagcgctgatatctgatctgcacgaacgcggcgcacacttccgatcactgacggacagtatcgacaccagtacggctatggggcgctttttctttcacgtcatgtcggcactggcagaaatggaacgcgaactgatagtggagcggacactggccggattggccgcagcgagagcacagggcagagtcggcggaagaccggcggcgctgacacagaatgaccgggagcaaatcggccgtcttctggataaaggatactcccggcagcagctggcaattatttatggtgtgggggtatcgacgatgtatcgatattttccggtgggtgggtga

SEQ ID NO: 288058 - DNA, 2721 bp, Morganella morganii
atgagcagaaacctccgtttacaggtcgtgttaaatgccgtcgataaattaacacggcctttccgcagtgcgcaggaatccaacaaacgactggcgggcgctgtccgtcagtcccgtgacgcactgaaagacctgaaccggcaggccggacaaattgacggcttccgcaaaacaaagcagcaactcaccgaaacaaatcaggcttatcaggcggcaacacaacgtgtcgctgccctcgcccgcgaaatgaacgcctccggcaaccccacgcggcagcagtccgaagcactgaaacgggcgcagcgtgaagccggtcaactgaaaacccgctttgaacaactacagcgatccgcccagcaacagcgcacaaccttgcaggccagcggcatctcgacaaaccaactcgggcaggcacagcgccgcctgaacagcgacattgcccgcaccactcagcaactgcaacggcaggaacagcagctgcgccgcagcgccgaacaggaacgccggatggcagcggccaaaggcagctatcagaaaacaatggatgtccggaataaaatggccggatccggcgcaacagccatggcgaccggcggcgcggcgttatatgccgggaagaaatttatggcgccgggctatgagtttgaaaccgggatgtcaaaagtacaggcgctgacccggctggataaagactcaaaagagtataaggcgctgcgtgaacaggcacggcaactgggggcaactaccgcattcacggcaaacgaagtggcacaggggcagtcattctatgccatggcagggtttaaaccggagcagatacagaacgccatgaaaggcaccctgtcgatgtcccttgccggtgatatcgaccttgccaccacagccgatatcgggtcaaacatcctgaccggctttaagctgaactctgacgaaatgaaccgtgtcagtgatacgctcgttgccacctttacccggtcaaacacgaacctgaatatgttgggcgacacgatgaaatatgtcgcgccggtcgcctccgggctgggtgtggatctggaaaccgctgctgttgccgccggtaagctgggtgatgccggtattcagggcagtatggccggtaccagtctgcgatcaattctcggtcgcctcgctgagccgccaaaacaggccgctgacgcactggaagaactgaacatcaagacacgggatgccaagggcaacttacgcggcctgcctgaaattcttgctgatctggataaaaaaacaaagaaaatgggtaccgcgcaacgcgccgggtacttcaaacacattgcgggtgaggaagcattctccgctctgtcagtactgacagaccaggcaggcagcggcgagctgcaaaaaatgatcgccgaagtcaaagcggccaaaggtgaagctcagaaagtggccgataccatgaccgataaccttgacggtgatttaaaaaacctcacctcagcatgggaagatgtcggtatccagatattcggcggtgttgacagcccgctgcgggatatcgcgaaatccattaccgatattatcagtaaagtcggggactgggcgaaacgcaatccggagctggcgaacacactgacgaaaattgccctggcactcggcgtgatcctcgccgtgggcggcgcgattgttctgatgctggccgcgatgctcggcccagtcgctatgctgaaactcagtatgtcggttctcggcatcaagggtgccggtgcgtttggcctgctggctaaaggtatcaaatttgtcagcatggccctgttcggcatagggaaagccctgctgaccaacccgatattccttatcggtgccgtaatcgccggtatcgtatacctcatttacaaaaactgggatcgcttaggcccgtggtttgcgcagttgtgggaaggtataaaaacaaaagcgtctgcgttctgggagagcttcacaacctacatttcaggggcatgggaccggataaaggcggcgttcagcgaaaagtgggaatcgttcaaaaaaggtatgtctgatctctggcaaaacattaaagacagcttcggccgccgctgggatgaagttgttaccgacttcaaaaatattccggacaaactgaaagaaacggcatccgcgatgattgataaaatcattgccggcatcaatgaaaaatgggaagacctgaaaaataaatttgccgaaatcaagcaaatggcaaaagacgctcttacgccggactggttaaaagaagcaaaacaggatccgaagtttgttaacgccgtagaggctacgcagaaaaccactatgtccggcggtatccgtaatgccaactggacgctcccggacaaaaagtttgcaggagcctatgattccggtggacgtattccgcgcggtcagtggggtattgttggtgagaacgggccggaagtggtggatggcccggcaaatgtgaccggccggaaaaatacggcagcactggcaatgctggcactgagcaccctttcacagccgatagctgcggcaccggcacaaactgctggcggttctgtcagcagcgcgtattcatcacagcagaatgccgcgccggtcatcaacatctacccgacaccggcgcattccgcacaggatattgcccgcgaagttgcccgtcagttggatgcgcacgccagaaagcagcaggccagccgccgcagcgggtacagtgacacagaggagttttaa

SEQ ID NO: 288059 - DNA, 351 bp, Morganella morganii
atgaaatactacaaagatgaaaatgatattgtttacgcattaaatccggacgaagacccggaaatatggcttgatatgaaagtcactgaaatatcagaagatgaagccgatattttatgtcaacctaaactgacaccagagcagatgattgaaattgcagaggagcaaaagaagtatctgctgtcagaagcggcggagtcgatagctccgctgcaggatgccgtcgatttaggtatggcgacgacgggagaagaagcgttgctgaaagagtggaaaaaataccgggtgatgctgaatcgcgttgatgcttcacttgccacggatatcgactggccgcaaaaaccgcagtaa

SEQ ID NO: 288060 - DNA, 963 bp, Morganella morganii
atggatatgacaataaagcctagttcaaaaaaaatgaagtcattaagaataggattttatacaagcagtgacgctacgaagaaaaatagcgactccctcgttccatctgcttttgaaaaattgtttaatgactgtggtgttatagatggtaagtataagactttcaataatggggatagaaatctaaaggttacgactattattaaggataatgaggcttgcttttactacggatttatgagcataactagaaatagcgctcacttggcatatatcgctgatgttgactggaaagaagagaaaattccactatctccaacccagcaattatcagaaagagcttattttttatactactataatactgacatactaatattatctcaaaaccacttaggccctaaagctactgacttatcttatgtattgttctgtgagtcgggtgctacttcgcctgtatctttttccgcaatatggaaagaagagagcattaaagagctgttcgaaactggaactatattaaaaacttgtgaattgacaattgcagcacctagagacttcaacaaaactaggtataacatgcaaaatcaactatctaaacaggtcgttgatatgatgtcaggtagtggatcatcacatttagatatcacactaagaggagagtcatcatcagtagatactggctttgagtggctttcagaggatgtaaaaaagagcctaaaagagctactggaaaaatttactggcgataataaagctccagacataaaaaaagccgacgttattagaaaaggacaaaatcggaaaactagcctagtagatcaggtattgattcacactaagaatgttaggcttcaatccgatggatatcctgatgaccttgatgttaaaaatatattgattcaatctaggcttgaaaataaaaagtacctagttcaatatgaagttaaaacctcattctag

SEQ ID NO: 288061 - DNA, 438 bp, Morganella morganii
atgagccaaacaaagatttttttaattaaatcaattgttgtggcgcttttggtgatctctagtaaaaatttcacaataactatggatcatagcgccatagtatctattgctggggtcgtatctaccatttcaggaatattatttggtttcgtcttggctgcaatatccatcttaagcagctcatcatcccaagatgggatagtagatgcactaaaaaagaacaacgcgtttaaagagcttattcatggtctcttgaatactggaataacgctaattattgcatgtctttttacattgatatcaatgttcctacctaacgacaactcgctgatatcagatttaacttttttactcatcggtttatattacatactaatatccgttgttacattcctgctgtgctggagaaaattaagctggatattccctcatatgtaa

SEQ ID NO: 288062 - DNA, 663 bp, Morganella morganii
atgtgtaagtgcaaagtttccggttgtgaccgtcaagccatgtataagtcgcagatggtttgccaaatgcattatttcaggatgatgagaaccggaagctacgaaaagaaaggtcggtcgttcagaacccataatgcgaagggatatcagatgttatatctgccagatcacccattggcaatgaagaatggatatgcatatgaacaccgcgtcgttatgcatcagttacatggcgacagaccgatgagttgcgaaagatgcaggaagtcagtgaattgggctaccgttcatgtcgatcatataaacgaaaatatcagtgataactcaccggaaaatctcaggtttctatgcaacgggtgcaatgtcatgcgaaccaggagtcgccaggttgagcaccagagaagtgggcgagtggcaattacatgcaatgggttaacactcaccgcgactgagtggagcaggatgccaggcgtttccgtgtcacacgcaactattaccagaagaataaaaagtggcgcttctccctatgatgctatttacggagaaaaggctacgcataaatcgacatcacccggtgggcaatacaccccgaagtaccaaaataaccatgcggacaaatgcctgaggaaactgaaggagctgaaatcatgttcacagacatag

SEQ ID NO: 288063 - DNA, 642 bp, Morganella morganii
atggcaaagcaaccgcggcgaaaatgcctgatatgccgggcatggtttcacccgaaattcagtaacgaatggtggtgctgtccggaacatggtgctgagttggcaataaagcgacgaagcaaggaaagggaaaaggctgaagcaaaattaagaaaggagcagcagcaaaaagaacgtgaagaaaaagacaaactcaaaatccgcaagttagcagtaaaacccacatcgtatttccggcagcaagcccaaacagcatttaaccaatttatccgactcagagaccgtgatgagccatgcatcagctgcggtgaaaccaatccacctgatttacatggtgggcagtgggattgcggtcatttcctgtctgttggttcgcatcctgagctcaggtttgatgaacgcaacgcatataagcaatgcaaatcatgtaatgccggggccggtaaattctcacacaaaaatgccaccgtcacgcagaaatacgagttgcggttggttgagaggtttggacaggagttagttgactggttacgcggtccgcatgagataccgcactggaagcgagaggattatatccgaattcgcgatgagtacagagccaaagtgaaggaactgaagaaaaaaggagacttcaatgtgtaa

SEQ ID NO: 288064 - DNA, 222 bp, Morganella morganii
atggaatggattgagagaggcaggtctacaccggtcactgaaggtaagtatttcgtttttggttcacatggaagaacaactgcttggtggaagccggatatcaggaaattttgtgatgcagaatccggagagaatgaaggtatgcaggactgggatggcgaagtataccttgtcacgcactggatgccattaccagaaaaaccacaaccaccggaggagtga

SEQ ID NO: 288065 - DNA, 210 bp, Morganella morganii
atggaaccaacggattttgaaaagtggtgtgctggggagcttggctattcgcctgagtggatcatgatgcagcggaaaataaactttttcggcggacatgaatacagccacggtgagattgcgaaaagataccgcgcctacatggccggagttctcagcagactgccgtaccagacaccgccaaaaggagatgaagatggaatggattga

SEQ ID NO: 288066 - DNA, 276 bp, Morganella morganii
atggaatttaaaggtacgccggggccgtggttacatgcagacagccacggccttaatgaaacagcaggtggtgccattcacggagacggaaaaacactttgcctggttctcggaaagggcatcggaaaggaaaaagctactgctaatgcgaaactgatggcggcagcaccggaaatgattgattttctgctccgaatcaacggcgcttattatctgtctgataaacatcaatccgaattaaatagcgtcatcaacaaagcacttggccgcgaatag

SEQ ID NO: 288067 - DNA, 297 bp, Morganella morganii
atgaaagtttatatagcaggcccgatgtctggccttgttaactgcaaccgagataagttcaatcgcatggcagaacgccttaccgagtgtggacacgtagctcttaatccggccattttgccggacggactatcgcaagccgattatatggccgtgtgtatatccatgcttcagcgctgcgatgccatcttgatgttaaatggatggcagggtagtgagggcgcaaaagctgagcacgctttagctaagaagctcggattggatttcatcacgttaaacgagccattctttccgtaa

SEQ ID NO: 288068 - DNA, 540 bp, Morganella morganii
atgaaagctgattacggcgggagcacaacaccaaaggaattgcgtgatttatggcaaactcccctcccgttattctcagcactggacgctgaattcggtttttaccttgatgccgccgccgataaaaataataccctctgctctcattatctcaccgaaaaagacaacgcattaaactcagactggcaaagctacggttctatatggtgcaacccgccgtatagcaacatacagccgtgggtaagcaaagccgccgagcaatgcatgggtcaattacagccggtcgtgatgctggttccggctgatacttcagtgggctggtttaaatcggcactggataccgtcgatgaagtcagatttattaccggtggccggatatcgtttattaacgccggcacaaacaaaccggtgaacggaaacaacaaaggttcgatgcttttaatctggcgcccgttcacccagccccgcaggataattaccacagttaaccgtgatgacctgatggatatcggcaaccggttactggaagcacaaatctga

SEQ ID NO: 288069 - DNA, 207 bp, Morganella morganii
atgaatagagatgaggcatttaaagcgttattagacggcaaaaaagtaactcacaaatatttcacaattgatgaatatattcaaatcgtaaatggtcaaattgtatgtgaacaaggttgtaatatgcatgagcatttcttttacactgatttcatgtcagatggatttcatatttataatggtgataacaatgaaaaaatatcgtga

SEQ ID NO: 288070 - DNA, 936 bp, Morganella morganii
atggttttaggaattacgtcacatcaagattcattcaaccatagcttatctttttttcaaaaaagaggatggtctttaatacttggtgtagaagatgaagaatatattcaatcagtactcactacaatgagcgcacatgtgtctaatttaaataatacttttgatatagcttttattacagccttaccacatatcgaatatgaagccttaatgtcattaccattaaaatgggagctgcatcatgaaataaatgatgataatgtctatcacaaatctatattaacacaatcagatggaagcgaacgaaccgttattgctacttgcttatcacacatgggtatagcaacagcagctgctgcaactgcaagtatatgtgtaaagttttcccctaagctaatagtgatgactggaatctgtgcaggtattgaaggtagagtcaatttaggcgatatattaattgcggatccatcttgggattggcggagtggtaaattaacttttgttgatggaaatgcaaaatttttaagccaacccactcagatagctatagaaccatcaattaggagaaaaattcaacatatctcttcctcaaacatctatatgaatgacatatattcaaattggaatgaaactagaccatcttacaatcccaaagttcacataggtccgatcgctactggagctgtagtcctagaagatcctcatacagtggaattaattaagtctcaaaatcgttcaactaacggcatcgagatggaggcttttggtgttatgacggcggctttcaatgcaggtccaaataggcctaatgtattaatagcaaaatccgtatgtgattttgctaatcctgaaaagaatgatgattggcaaaaatatgcagcatatacaagctcaacttttgcatataaatttatagtaaatgactacaaattttaa

SEQ ID NO: 288071 - DNA, 651 bp, Morganella morganii
gtggttgagcgttactggcgcagggcggttatcaccctgttacgtcagcactatgctgagctggatttaacgacccccggttatctgcatatccgggattaccgggaatggtgtcagtttctggagtcacaatatcagcgtcgctggaaaattcactttgccaaaaggacaaaatatgcccggcagaatgtcaattatctcgggcgttatctgaaacgtccgccggtagccgcgtcaaaactgcgccattacaacggtggtaccgttgttcaccattattacgaccaccggacggggcggcacaaaacccagcatctgagccaggaagagatgctgtggcgttacagcagccatatcccgtcgaagcattttaagatggtgcggtattatggctttctggcgaaccgtaagcgggggagtttactgccggaagtgtatgcggcactggacatgaaggtgaaggagaaaccgccgaaaccgggctttgcctctctgatgaaacagtttacgcgcaccgatccgtaccagtgcgtgctgtgcggcggcaggatggtatttaacagtgcggaagcgggtgtcagggcagaaagattgctggagatacggcgtcaggaatttaaaaagcagcgatggctgcgacaggccgcatag

SEQ ID NO: 288072 - DNA, 141 bp, Morganella morganii; identical to SEQ ID NO: 278135

SEQ ID NO: 288073 - DNA, 312 bp, Morganella morganii
gtgaagcaggccgctaaatactggcctcgccgtgagcgacttgatcaggctatcgactatgtgaacacagaatccggcgagggtatcgattttaaaggtgagcaatcacaggagcgtgatgtcactccggccgcagaaaatcagttacaggatatagctgatctgatgattaaggttgatggtgaatggagcgatacattcctcgcattcatcagcaaaaaattcaaccgctctatctcccacccggaacagctcactgtatttgaggctaacaccatcatcgatatgctcaggaaaaaggcaggcgaataa

SEQ ID NO: 288074 - DNA, 312 bp, Morganella morganii
gtgaagcaggccgctaaatactggcctcgccgtgagcgactagatcaggccatcgattatgtgaacacggaatccggcgaaggtatcgattttaaaggtgagcaatcacaggagcgtgatgtcactccggccggagaaaatcagttacaggatatcgctgatctgatgattaaagttgatggtgaatggagcgatacattcctcgcgttcatcagcaaaaaattcaaccgccctatctcccacccggaacagctcaccgtatttgaggccaacaccatcatcgacatgctaaggaagaaggcaggcgaataa

SEQ ID NO: 288075 - DNA, 177 bp, Morganella morganii
atgccaaaactgaaattgataacctgcgtgatgctgttaagtctggcactaagcgcttgtacatcaaagccgagtgtccaaaggtcggaaccgataccaccgaaagcggaagcaatgaagccgccccacgacttagtgaagcaactgaacaagattattggcgtctcagagaaatga

SEQ ID NO: 288076 - DNA, 132 bp, Morganella morganii
atggatagaaaacacacagaagatatatcagaaaatacaacaacgaccagtgtggggacaaattattacaagcaggcaattaatttattccgccttagatatatattgccaagcaatgaaattacaccctaa

SEQ ID NO: 288077 - DNA, 246 bp, Morganella morganii
atggataacaagatattggagatagcaaaatacttaaaaaataaaataaccgctggcgagggagctgatgaatacaattggcaagaaataattgatgtttgtaatgagattgagcgtattcataatttaaagcctgttggctatatttcccctattggtttagtgaatataagaagaaatcaaccggtgatacttggtcagtttcacaagatatcaaccataccactctaccgcctagacaaataa

SEQ ID NO: 288078 - DNA, 477 bp, Morganella morganii
atggcgactatcacagcttatgacaatcctgctttaaattccgcgattcagaaatcgtggaagcgtttagtacccctgatgtttattttgtattttgtggcatttattgaccgtgtgaatgtgggctttgcgaaagatgccatgcaactggatatcgggctgtccgattccgcctttgcactgggggcgggaattttcttcgctgcttatgcactgttcgggatcccggcaaacctgatcctcaataaaatcggtgcacaaaagtggctgagtattacaacggttatctggggtgtgttatccgcaatgaccgggttcgtgaccaacgagacgcaatttattgtgctgcgtttcctgctgggactgggtgaggcgggcttttatccgggaattttgttactggcctccatctatttcccgaataaagtccgcggctcggtgatggcatttttgtcctcggcgtgccgctggcattga

SEQ ID NO: 288079 - DNA, 894 bp, Morganella morganii
atgtccagaaataaaaaacttgtgtatagtgcattaaacataactattcaccctcattcaccaaaaaaatacgttaacttatttaaagacgcttccaagttaagaaaaactgttcatttgagtggtgattcgtatgcgatattgaggtttttttctaaaacctttggtagtacatcagatatagaaccgtatgaaggtgagatcttaaaatatacagatattagtaaagatgctgattggtatagtattgataccaatgacctggctacggatgaagagaaagcaagaatagtaatacctgagcatctaaaaccaaacgcttcatctttttcgtttgtttttttaccagaagctcacttattagtatatgaagcttgttacaataaaaaaaacatttctcacattcagatggagaaattttttaatacattgttttcggatgaaaaaataaaagaaaaatatggtgaggttaatgttacaagccttactgaaccagatgagattgaaaaaatgctttccctgcagggaataaaaaaaataactatggttacccgtagacctaatcctgacgatattaataacgcggagcgtgaatttaaagaaaggctcaaaagaataaatgttattgaagaagaaaaaacattaaaggcggagagtaatagcgacatttctcccgatcaagaattaaagatagaggccttaattgcttctcgaaatggtagagtaacaatcaagagacaggattatgaaggcttttctgaagagttatcaagtgctaataaacctctcaggcgttacgaggtttatgatcctaatattgagttgccaattgacattcttctgaaaaaagcgaggtctatttatgatgactttagacagtggctggccaaatga

SEQ ID NO: 288080 - DNA, 537 bp, Morganella morganii
atgatagatataattaagagatactggtcaatttatggaggctttattgcgctatttaaaagtggttatttttacttggcgcttatcttcacctctgtgttattccctgcctggtcaaaaataggttggtgggcggatgttttatcactacttcctaatttgcttggtttttctcttggtggactcgcaattttacttgctgtaggtgatgatggatttaaaaaactcattgcggggcgtagtaaaaatagtggcccgtctccatacatggaggcttgtacagcatttgttcactttatatttttgcaaataatcgctattcttatagcattactggctaaaacatatgggaatattcttccgggagtgtggagtaaaaatttattattagcaatgagttactttggatattttatatttatttattctattttctgtactctggcggcagtttttgctgtatttagagtcgctgattggtttgatgagtatataactaaatttaactcatctaataacaaagatgataaaaaataa

SEQ ID NO: 288081 - DNA, 234 bp, Morganella morganii
atgttcgaactgataaccatagatgtttcttcggatacacccataggtcttggagaaaagcaatacaaagtacatcctcgcattggtgaatgggttgaaatagaggtaaacagcgtaggaactatgtttgaagttgttatgattgcccactcagatagtggcgatggctctgatgtatatattaaaaaaattggcaattcatctcaggcagttaaagatatttgtaataaataa

SEQ ID NO: 288082 - DNA, 192 bp, Morganella morganii
atgcgcatgtctgacaaatattccagccctacagcatatgcctgggggcttataacctctgcctttggcattttatctctggatcagtgggccattgttgccgggatcatctgtaccgtcggtacgttcctggttaactggtattacaaacggaaggaattccagttgaaaaccggagaacatcatgaataa

SEQ ID NO: 288083 - DNA, 477 bp, Morganella morganii
atgaataagcgattggttaaaaaggtcatggccgcttgtgctgccggggcaattgccggtgcgctggtgttgatccccgcatatgaaggtgttgagtatacgccttatcgtgatgtggccggagtgctcaccgtatgttatggccataccggcagtgatattcagcccggcaagctgtacacggacgttgaatgcaaggccctgttgcacgacgacctgacgaaagtccggcgcgcggttgatccgatgatcaaagtgccgattgacgacaacactcgagcggccatttattcatttgcatataacaccggaacaggtgcgttctcacgttccacgttgctgcggaaactcaatgccggtgatatcgccggtgcatgtgacgaaatgaagcgctggacatttgctggtggtaagcagtggcaggggctgattaaccggcgggatacggagaacgcgatatgccacggaaccctttaa

SEQ ID NO: 288084 - DNA, 543 bp, Morganella morganii
atgaaaaaggcaatcacgatattacttaacgggtggatgtgggctgttgtgtttttcggtctgtggatgttcagcatgctgtcagccgaacaaacggaaagccaacataaagataaggttatcactgaccagcaaaaggtgattgataacgctcacaccagcatcgatatttttgatcgcgtggcaaccgcaaacgccagccgaagtatgcagatagaagctaaatcacaggagaagcagattgaataccgtaccattatccggaaagagccgacctgtaatatgtatattcctcagcctgtttctgatgggctgctcagccacgtctacgccatccgtgaatcagcgatgcgttcctatccaggtatcactgactcagccggtactagctccgttgccacccgccgactaacatattgtcaggcggtagagtggatagagccgctgctgacagcgttaggtaaggcgaacgggcagttgatggatatacggaaagcggatgcggagagatgcagaaattacgaaaatataacatttgaatag

SEQ ID NO: 288085 - DNA, 504 bp, Morganella morganii
atgtttgattggattagtctatctgtgaattcagctgttgggttaattacggggggggttgcggcagttatcacatcacgaattgccataaataaattttataaagaaaaatggtgggaaagaaaaagtcagtcttacaatacattgattgatgcattaatagagatggaagccatttacaaaaaggcctttaggcactatgaaactatttttacaaatgaacgttcaggtaatgaaagtgaaccggatgttaaatttgattgggggcgatataatgaattaagtactatgattcgccgtatttatatactggctccaatatctttgagtaaaaaagcaaaagaacttttagaagaatattttatagagtcagagttatctgaatactcagtacatgaagagggttatcacgattttctcgcatatgatgacttaagcaagacaataaattcaattattaattcaatcatctatgatgcaagaaaagaattaagattcaattaa

SEQ ID NO: 288086 - DNA, 471 bp, Morganella morganii
atgccgggaccaccgaaaaccccatcacacctgcgtttggtcagaggtaatccatcaaaacgcccgatcaataaaaaagaaccaaaaccgccgtcaggggtacccccaacaccgaaacattttactaagcagggaaaatactggtttaagcggataggtgaagaactcaatgcgatgggtgtcatgagttcgatggatgccaaagcattggagctgctgatcgaggcgtacaccgaataccgccagcactgcgatacgctggacgaacaaggctacacctacacaacacagagtgatggcggtccactgataaaagcacaccccgcggcggcaatgaaagctgatgcatggaaacggatccgcgcgatgctctccgagttcggtatgaccccggcagcccgccagaaggtaacgattaacacaccagctgaagaagaccctttcgaggcatttctgaaacaaagaaaatga

SEQ ID NO: 288087 - DNA, 1731 bp, Morganella morganii
atggcaaccgtagcagacgggatccggtacgccgagcaggtggttgccggagaaatagttacgggcgaactgatacgcctggcgtgtcagcggtttcttgatgatctggaatacggccctgagcgcggtatttatttcatggaggaacgcgcccggcatattctggatttttaccagttcgtcccgcatgtcaaaggggcgctggcaggtaagccgatagagctgatgccgtggcatacctttattctgattaatatttttggttttgtgatcccgctggttgatgaactcaccggcgaggctcagtacgacgatgacggggatccggtgctggttcgccggttccgaacggcctataacgaagttgcacgtaaaaacgctaaatccaccctctcatccggtatcggtctgtacatgaccggcgctgacggtgagggtggcgccgaggtttactcggcggccaccacccgtgaccaggcccgtattgtgtttgaagatgcaaaaaacatggtcaaaaaggccaagagttcactcggccgcctgtttgaatttaataagctggcgatttaccaggagcggtctgcatccaagtttgagccgctgtccagtgacgcaaataacctcgacggcctgaatattcactgcggcattgtggacgaacttcatgcccacaaaacccgtgatgtgtgggatgtgctggaaaccgcgaccggtgcccgtcttcaatccctgctgtttgcgatcaccacagcgggatttaaccgcgagggcatctgctacgaactgcgggattacgccatcaaggtgctgcggggcgtggtggaggatgacacctttttcgcggcaatttacacaccggatgaggatgatgacccgttcgatgaaagcatctggataaaagccaatccggggctgggtgtctgtaagcgttttgacgatatgcgccgcctggcgaaaaaggcaaaagagcagattgcggcccggcctaatttcctgaccaagcacctcaatatgtgggtgaatgccgaatccgcctggatggataccggtaagtgggacagctgccctgaaaatgcgccggatgatgagctgaaaaattacccggtctgggttggtgtggatctgtcaaacaaaatcgatgtgaccgcagccgttaaagtgtatgaggatccgcgcggacaactgcatatgaagtgcaaattctggctgccggaggacagagtagtgactgcaccgaagcatatcgctgacctgtatcggaaatggggagctgccggttatcttgaactgacggacggtgaggttgtcgatcacgacatcatcaaagccgacattctggcatggtgcgaaggtgaggatttacgtgaactcggttttgacccgtggagtgccgttcagttctcccgtcgcctggcggaagaaggtattccgctggtggaggtggcgcagacggtgaaaaacctgtctgaatcgatgaaaaccgttcaggccgatgtatattccggcaaatttcaccatgaccacaacccggtaatgtcctggatgatgtcgaacgtgacggtaaaaccggacagaaatgacaacattttcccgaacaaatcgacaccggaaaacaaaattgacgggccgtttgccttgtttactgccaaatcacgccagatggtgaacggcggggacagcagcgacttcctttcctctctggatcctgacgaagaaattctattcctatga

SEQ ID NO: 288088 - DNA, 1002 bp, Morganella morganii
atggctgaatcattaaatctgcaaactgacgttgtcaggcagcatacggtccctcgttttttgttgaaacactttagttctcagggaaaaggtaagcgtctacggttacacgcttttgataaggcatccgggcgtgcctatgctacaacacccgatgacgccaccgtgcgtaatacgttctacaacctcgataatcatccaaaccgactcagtcttgagccattgctggggatttacgagcatgatgcagcaccggtgattgccgacctactgaaacataaggatattcgccaacttactgaagatgagcgatacaaactagccgtattcgttgcagtgcaacgcgcacgtactttcggagagaagcagcgtattgtaggtgtgatctcaatgcttactaataagctttccgctaacggcgcgacaaaggaacagatcgtagaaactctaggattatcgtccgaaggcgatttcaaagacatttttctacgacaacttgtccaacaaacctcacacataagtcatctgctggaaaaagactggtacctccttgaaactacagaagaacatccattctatatatcagataatcctgtggttctgcagaatctcaatgactgtgggccatacggtaatctcggactggccatacgaggcatagaaatctacctgccattgtcgtccacaatgatgctggctatgtattgcccttccattcgggaacaaatgatctgtcataagcagaagattgagtatctcattgcatacgcaccgcaacagatcccgactcatatgcgcccttttgaaatgcttaggcacattaaggggtttacggactatcttctcaagccgttgctccccaaacacgtcatgcgatacaactcattgcagataaagtttgctgaacagtatgtattttgtggaaaaaacgatttttctctgatccagcaaatgttggctgatgacaaaagataccaatcaggccctaggtttacgctgtaa

SEQ ID NO: 288089 - DNA, 864 bp, Morganella morganii
atgatcttcgaagatgctgcattcgacagagcaattagttttggtgcctgtatcaaatctattgaaaatgttcttggtaatgatattgatcaacaaattaagaaaatttattccgccagttctgaaaagaaaacttaccctcttttaagagataaatcctgggatagtgaattttcgaaagtgttggagatcgaggatataaaagctccaacacccggtaaaggaagaatgcctgaagaggaacttaatttcgaaaatataacacataaagattattccatacaaagtctaatcaaacctcgtctatgggatagaacacgctggcaaggagtaggtttcgctcaattaaaatcgtgttatccagggttatatctattatttaaacaccccgatataggtgaggatatttttaaagatcttatatcatcagtaggcttggtagatagtaaagccagattacgggtttgtattgtcaagggcatctcagttaaaaacccaactcattatagagtactaatatctgaaaatatgatgacaaccccattaactaaaagaatgacaatgatcagtagaattaatacgatgactcctgatagcaatgtcaatctagaaagatttcttactgcgtatcaggcctgtggaaaattctatcttggatgtgatgcgatgttaaaaaatattgttcctgagcatccacaaagagatagtttagggatagaaatgagtacgttagatgttaggtgggcttgggaaattgggttaaatgatgttgattgtattggggttaatttaaaagaagatgacccctatattcctaatgatgtagctgagatcccattattgcaattgataaacagtaaataa

SEQ ID NO: 288090 - DNA, 828 bp, Morganella morganii
atgccgtgggaaaccgcactgcttaacacaggtggccggtgcacctacggtgtttataacgaacaggggaattttgctgtcagtccggatgacatgatccacatccgggcgctgggtaataaccagcggatggggctcagtccgatagtgcagcatgcggaaaccatcggcatggggatgtccggtcagaaatacaccagttctttcttcggcggtaatgcccgtccggccggtattgtttcggttaagggggaactgcaggaaaaaggctgggaccgccttaagtcaatgtggcagaaagcgtctgcagcgctgcgcagtcaggaaaacaaaaccatgctgttgcctgctgacctggattacaaagccctgactgtttccccggtggatgctcagttgatcgatatgctgaagctgaaccgctccatgattgctgggatttttaacgtaccggcacacatgatcaatgatctggaaaaggcgacattctccaacatttccgaacaatccattcagtttgtccggtatacggtcatgccttgggtggtgaactgggaacaggagcttaacaggcggttgttcacccggcaggagcgctgcgccggattttatgtccggtttaatctggccggattactgcgcggaaccccgagagagcgggctgaattttatcattacgccattactgacggctggatgagccggaatgaggcgcgggcatttgaggatatgaacccggttgacggactggatgagatgctggtcagcgttaatgccgcacaaccggacggcagtaaatcagaaggtggtgaaaaagatgagcagtaa

SEQ ID NO: 288091 - DNA, 609 bp, Morganella morganii
atgagcagtaatgaaagagaaacccgcagctacagcggtgagatccgggccgccccgggggaagaggataaaccggcccacattatcggtctggcttcggtgtttaactccctgtccgagccgatgtggggattccgcgaaattatcaaacccggcgcatttgacgatgtgctgaatgatgatgtgcgggcgctgttcaatcatgaccgcaattatatcctcggccggtctgcttccggaacgttatcgctgagtatcagcgaacagggactggcctacgatattacggtgccggatacacaaactatccgggaccttgtggttgctccgatgttacgcggggatgtcagtcagagttcgttcgcgttcaacgtggcggtgaacggcgatgactggtatcaggatgatgacggcatggttgtccgtgaaattcaccggatctcccgtctctatgatgtcagtccggtgacttatccggcctatctggccgcaaattcaaccgtgcggtcaatggaggcgtggaaagaagcacgcgacagcggcggtatagccaaagctgtcaatgaaaaactggcgcgtgagcgtcttctcactttaatgaatgtataa

SEQ ID NO: 288092 - DNA, 351 bp, Morganella morganii
atgccaccacgcataccccgcgcctgccgcaaacgaggctgcgccaagacaaccaccgatcgcagcggatactgtgaagagcaccgcaatactggctgggagaaccaccagcagggtaagagccgtcacgaacgtggctacggaacgaagtgggaccgtctgcgtactggggtgctgaacagggataaacatctgtgtcagcagtgcctgcgcgaaggacgggcaaccgaggcgaagacagtcgaccacatcacacccaaggctcacgggggaaccgatgcggaaagcaatctgcaaagcctgtgctggccatgtcactaccggaagaccgcaacggagagaacacgatga

SEQ ID NO: 288093 - DNA, 192 bp, Morganella morganii; identical to SEQ ID NO: 278613

SEQ ID NO: 288094 - DNA, 153 bp, Morganella morganii
atgagcctgtcgtattccaatgctcttattgttgctaatggtaaaaagccgcacacagctcttgtgttaagtgataacgagatgattgatactgtggcggcgtatatgaaaaaggccgcactgggcgacctttgtaatacgtattacttttaa

SEQ ID NO: 288095 - DNA, 705 bp, Morganella morganii
atgaaagagcatggaataattttcaatgctgagatggtacgcgccattctcgatggccggaagacacagacgcggcggattgttaaaacagttccgactactcacgactttcacggctgggtaatgtccagtacatgcgcgaaagatgaaggtaaagcgtgctgggctatcggtaattcaccgttactcaaagacccgattcgccttaattgccctctcggcaagattggcgaccgtttgtgggtacgtgaaacatggatgcctgatgcaccccgcgacggtacgtggagtgatgttgagttttatggatgcaaaaactcaccattaagcatgatacccgagcgttaccgtagtccaggacactgcatttatcgcgcaacctggaaaggccacgaacttatcggatggactccatctatccatatgcctcgctgggcttcacgcatactgctggaaataaccggcgttcgtgttgagcggttacaggatatcagtgaagatgatgctgtagcggaaggcgttgttactggccgctatggtaatgaaggtaactggatgaagggcttttatgcgcccggaggcaatcagccacatcagaatgcaaaatccgcatatagcgagatatggcgttcaatttacggtgtagaggcctggtataaaaacccgtggtgctgggttgtcgagtttaagcagattcaggaatga

SEQ ID NO: 288096 - DNA, 234 bp, Morganella morganii
atgtcagaacgtccattaaaagttaaatgtattcgtgatgacggttgccagttctggactgagggtaacgagtatccagctgaattttacatacccggttctctcatgattggagatgatgataaccctgacgccgaatggtcagcatcactcgttgatggaagtgaattttatacagttgacggccttgattatttggctcagttcgaactacaggatagcggggagaaatag

SEQ ID NO: 288097 - DNA, 219 bp, Morganella morganii
atggcttggcaaatgcacatgtggtgttcaccactgagcggaaatatttatttcggtaatgtaaatattgccaccggaaatgtgagaaaaggaaaaattaacgttactgatgatgccgttcgctcagtggccgagcatctgtatttaaccggtaatgaagaaaaatacacaacaaatgatggggtgaaaataaccatcagtgtgaaagtggagaaataa

SEQ ID NO: 288098 - DNA, 705 bp, Morganella morganii
atggattttttaaattgggttagaaatgtgatcgcttcatttttcgagcaccttcctcaatatgctgcattaatcaccgcgagtgtggcaatttcgttatttttaataaaagaacacaaagaaaagaaaaaaagagaaagtgatgaaataagggaaagagaaagaagtgaaagggaattacatgcagttcgttctgttataggaaaagaggcattttcaatgttagagcaggttatttttttcattaagctacatgaagaaattaaagatgcagttatggtgagagctcaagtcatgcctgataatttgtggcggcagatacatataggttatgatggtgatgcggcatatagctcatttattctgattccaaaatcgccagtgagttttaatcattcatttaccgtgagtgcaataaaaataaatccggaactttataatcatattaataaattaaatacagctataagtgtaatgtgcactagtatcgactcgtgtattggttttgcgatagcaaacgatactgacggtgtaaagaaaattgcggatatgatagtaaacggaaatatagaaaacaattctaatattgctagaaatgcagtaaatagtatttgtgtatttagtaaggaactatctgtttttaatggatttcctaaagcatcaaaaaaaatcaaatcagcaatagggattgatttggaaaagtga

SEQ ID NO: 288099 - DNA, 303 bp, Morganella morganii
atggatgataaaccaataagagatgtggagagagaaaaaagcagtgcggtcatgaattccaaaatggggctatatctattttttgcaggaattatcatgataatagccaaatttatttggggtactgacgtgagcactgggctggctggagcagtttctggtggaggattagtctactgggggatgaattacagcaaagccagtgatttaagcagaaagctagataatttgtgttataaaaaatatggtaaatcacataaagattcatataacgaaattcttgatgatgagggggtggggtga

SEQ ID NO: 288100 - DNA, 573 bp, Morganella morganii
atgaatgatgaattattgaatgaattaataaatgctattgttaatttatcaaaagaagacagtttatggaaaacatgggctccagcaatttctaccgtcttcggagctttgcttactggtatttttgctttttatgccgtctcatggcagataaataaaaatcacgcttattcgaataaaatgctgctaaacacaaaaaaagaagagctgtatatctatctggatttgataaaaaaagaaattttgcatacaaggtctattttgataaacgcccccacaattgctgatggagcggttatattagggaagccagatcagcaagatcttatacataagataaacatggtcatatctatttaccttaggcaattaaaccagttaagagattcactaaataaaagttataatgtttatggtttaacttgtggatttttataccagcaatctaagaatggacatcacgtaaacggtgagcaaatagagaatttactaggaatatcaggtgattgtctagagaaaattgatgcattgcaaatcgaaactgtcaacctggatgttcataaatcccagtaa

SEQ ID NO: 288101 - DNA, 495 bp, Morganella morganii
atgaaaaacatagccattgcactgatcgctctggctgtctctttcgctgctggctggtgggccagcagtaccctgcatgataaccggcagatgaaagggcagatcgccggtcagcagcaggatgagaaagatgtggccacaaatatcgaactgcgccgggaggcagacgaacggcagcaggtaagcatcggggaatatcaggatggaaaaaagagtgatacgatacgcacagaggctctgcttgatcgggtgcttcatcattttgaccgcatgcagcagccagccggtaccgagaaagcagaagttgcagatcccggccacgccgatacctgcagaactgagagagacaaagccggtgaactttctcgacaactacgaagcacacttgaaaagtatgggcgtgaagctcagcgggctgatgagaatacccggctccttaatctctgtatcattgacctgaaagcgaaagaaaaactgctcgaaaattaccggtga

SEQ ID NO: 288102 - DNA, 807 bp, Morganella morganii
atgaccgccattgttttccctcatgtttgttgtaatggtgggattattacggatttatccggttatggctgcactcccggaaaccttggtttaggagagttaacaaaacgcttcgtcattcttaactctgccgaaagccaggtaagaagcggaaacggtaagcgctttatttatgtgaatgacgacgggcgctttggtgtggcaggtgaaacaggctcaggatggggcgtaaataaagacggtgttatgaatggcgtcatggttcctgttgcctgcggtggcacaggcgggaagacggccggagaggcgattaagaatctcgggatagacctgatgaccgttcctgtcggcgcgtctgttatctggagctcatcagcggcgatacctgctaatttctggcctaatgaagggcgctctttttcagctccggaataccctgaactggcaacagtttttccggatttaaaacttcccgatgacagagggatgtacatccgtatagcggataacggcaaaggcattgataaaaacagaaccgtgggaacctttcaggattatcagatgaaggatgcggtcggatatatcaacgggcgctctgctaatgctgatataaccggtgcttttgtgtccggcgatggcgtattttctctgtcggcaaaaagtggctcattatataaagacgtcgttatcggaacgaacgacagagcagcggattatatcaaattcgacttgtcccgtgttatgccgaccggcgaccagattaacgtaaaaaacacatcaaagattttaattacgagggttaaataa

SEQ ID NO: 288103 - DNA, 621 bp, Morganella morganii
atgtcttacacaacagatatccagaatgcacaattcgatgaaaacggactggctgttgttcctggctgggctaaaatttaccgctgtcatccgagcacccgcgaatatattggagcggcgatggataatgttccctatggtggctctgtggttgctgatgcttaccttgatgagcctgagataccgacagtgaaaaatatggctattgtccgttcacctgacggaaaatcatggctacatgttccggattatcgcggttctgtggcgtatgacaaagagacaaagcaacagactgaaattacagatctgggtgaactgcctgataacctgacgctggacgcacctaaaaccccgtttgataaatggaacggtaaaaaatgggtgacagataagtccgagcagctggcgtatgagatcgctgttgccgaaagtcagaaacagtcgctgttggcagaagctgagcaggaaattgccatgctggaacgtaaggtacgcctcaacatggctactgatgaagacaaggtaaaattgactgagtgggaaatttacagtgtgagagtcactgataccgacacatccgccggtgccggtactaaatggccggtgaagccggtcgtgtag

SEQ ID NO: 288104 - DNA, 738 bp, Morganella morganii
atgcgattaattttagctatatttactatgcttttatctttcaatgctttttcggtctcttgcactgatgattacagaagatgggggagcgaccaatttaggtttcctgatgctcgcgattcacttagccttaatatacatggaaaggtttgttataaagggagggatatatcgagttgggcggctggcgaaggaatgattgcaacaagtggagttatccctgataggaatactgtgctcgcattactgactgtaaatgaagtaaacccaacatcatataaagcaaaaagtagagtgcgtgttatttttataaacgcccttggtcagccggtaaagtatgactttattaaagaaaattattcgaatgaacaccctgaaaaagaattaactgatatgagattcactagttatgactttgaaaaaggaatcgtttattttgagtctccggcgtgggcaacaagcatggcaattcatgcatttgaagttcctttcgacggtgattacagcaaagtaaaagagaaatttataattgatggaagtattaaatatcatgtgatgtctaccttgacagccaaggatagagaggagttcttcaggcacctgatagtaacccgcagtgtttataaagaaggtaaaggccgagaatacattgattatattgtatctccggaaggaaaggttatttgtgaagctgaaacagacgcccctaattgggtaacaagaattagatgtaaatag

SEQ ID NO: 288105 - DNA, 333 bp, Morganella morganii
atgaaagtaacagtagaacataacggcgaaatcatcaggtaccgtgacaacaagaacggaacagggatgtcatcacgcggttatctgacagacggtacacagcagaagattgttaccgccctgattgacgcattgacgcaggctaatggtgaaatatcattgcagccgccattacagcaaatcaatctgactgtatcagacgagcagattaagaaagtagcggaagaactgcgggaggtgatgactgcgaagacttcactgagattcccctctggtatcgaaatagattgccctgaaattaagattacgggcagcattaacaccacccggtag

SEQ ID NO: 288106 - DNA, 285 bp, Morganella morganii
atggctaactttactgttcgggttgaactgcgtgatgctgacagttcagactacgatgatctgtataacaaaatgtcagataatgggttttctaaatttattaccggtgacaccggcgtcagatatcagttgccagatgctgaatactcatattcatctgacacagaaggcagaaggcaggtaagagatctggcattcagaattgcccgcgaagtaaatgatgaccctgccgtgttagtcactcagtcaaatggccgttcgtggaaaggtctggagtcagcttaa

SEQ ID NO: 288107 - DNA, 249 bp, Morganella morganii
atgagtattaaaagaaccatcgcaagcaaagttatttatcagaccaatgaaccaacaacgcaattttatagactgtcagaagagtcacgccagaaggcgcgcgaggtattagccggaatgctgttagccaaataccaaagcggtttcgatttaccggataatatcgtgacgcatctgggacaccgagttcgcgaagcctttgtagcccttgaaacagaaaggcccacccgcggaagcggtgaagattaa

SEQ ID NO: 288108 - DNA, 624 bp, Morganella morganii
atgctattcagcattcctgctttgtcttggtggattcattatatcttggggttaaaagtgaaagataaaaaaattattattgttcacggttacactgcttcaccgtcagataattggtttcaatggttaaaagagtctctggaatctttgggggctacagtaaatattcctttgatgccagactcacattcaccagacccgaagaaatggcagcaacatctgatagatgctgaaataaagattgataaaaacactatttttattgggcacagccttggttgtattaccgtgctgaaatttctgactgaacaggcacctaagggagccacaataggtgggtacattttagtatctgggtttgatcatagtttggaatcattacccgagctacacgctcacgttcaggagccattagattacgataaactaatcgaaatatcagataaaagaatttcggtaatatcgtctaatgactgggttgttaatccacaggcatctaaggatttagccaatgcgttacaaacgcagattcttattgtaaacgatgcgggacattttttggatagagaggggtatactgaattccccgcactgagagaactgattaaatctacttttttgtag

SEQ ID NO: 288109 - DNA, 726 bp, Morganella morganii
atgttacgcttaggaattttattggatggagcaaaaccaattggagaagggattaatggcgccttaagagggtttgctatagttgatgatgatgaaattccagtggtggccaagcaactacctgagaaggaaataatttgcgaaatattatgcgctaagttagggctgctactagatctacccataccggagccattacttctcgtgaactcgcaaagagaatacctattcggaagcactgatatcagttacccaaatcttgcacactacttaaatattgaacatgatggtgaattagcacttaaacttttaagaaaatggattcatttaaaaaaatcatctttctttgatgaattgatttttaatgccgacagacatgagggaaatatactttttgacggtgcggaatttagccttattgatcatggccttgcattgcatgagggatacccggatgacttcaaatggaataatattctattctcatttatgcttaatggctgtgattcagatagtgataagtgtaaaataaaaaacgaggcaaaggcttggagtgaccaattaactgaaataaatatcattgataacattgagttagaaatttccaatataaattcacctcacaaagaaacattgataaacatcttgaccaaaagaaaaaaaatgttactttcatttatcaatagcaggctcccttcacaacaaatggattatgtaaatgtttga

SEQ ID NO: 288110 - DNA, 1146 bp, Morganella morganii
atgaaaatcagaaccgcaatgctgtacgcgctggtgatcctgctgctggccggactgaccgcaatcgcctggtattattggctgacacagggcggcagtgtgctgctgccggtgtttgttgctttgctgagcctgtgtctggcggtttacgggctgatcaaaactgcatggcgggcagagacggatgtgcagcagttacagcggcagcagcaacggcgtgaactgcgccactatctgaaacagaccggccgccgcctgcggcgcagcggtggtgtaccccggcggaacccgggccggatcagtacttactggctgttgtgtgaggatctgccgcaggcacaggcctgtatgcgtcagcacggatttaccccggtggcgcaggagcaggagccgttctgctatcaggcgggtaatacggtggtccgcatcagcacaccggcgtggctcaccggtgacggcggccgggagagtgcacggcaactggtgcgcctgaatccgtctcagccgctgaacggatttattttactgtcaccggcgcctgcatttgccgcactcattgaagagcaggcggtacagtccgggcagcagcaccataccgcctgtattgccttttctgttttgctcggatgccgtccgccgctgcatctgatgcttcccggtctcggcaatgtgcctgcactgcgccgctggtatgcggatccgcagcgggcacagttttgtcacagcacggatttcagccgtgagcgaagggtactgccggatgccccgtttgcacagtttactgctgatttaatgctgtcattacagcaggaacaattcaccgcgctgacagcagaacaaccggagcataatgcggcggtgttgtcatttcccgcgcgactggcggcacatcttcatcagcggacgctgtatgcggcagcattacagcaccagcgctcagccggcacgcatctggtgctgtcatcggcattgttgtgtgcggcggaatgcgcgcatcagcatatcgccacaccgttgtttgaacgggtcattcatggccgtgatgaggttatttgtcaggtacgggaacggcgcaggctgatcggctattgcctggcagtaattttatgcctggcgggcacagccgctgccggtgtcgtgcagtga

SEQ ID NO: 288111 - DNA, 192 bp, Morganella morganii
atgcgcatgcctgacaaatattccagccctacagcatatgcctgggggcttataacctctgcctttggcattttatctctggatcaatgggccattgttgccgggatcatctgtaccgtcggtacgttcctggttaactggtattacaaacggaaggaattccagctgaaagccggagaacatcatgaataa

SEQ ID NO: 288112 - DNA, 477 bp, Morganella morganii
atgaataagcgattggttaaaaaggtaatggctgcttgtactgccggggcaattgccggtgcgctggtactgatccccgcatatgaaggtgttgagtatacgccttatcgtgatgtggccggagtgctcaccgtatgttatggccataccggcagtgatattcagcccggcaagctgtacacggaagctgaatgcaaggccctattgcatgacgacctgacgaaagtccggcgcgcggttgatcctatgattaaagtgccgattgatgacaatacccgggcggccatctattcatttgtctacaacgtcggtcccggcgcgttctcgcgctccactatgctgcggaaactcaacgccggtgatatcgccggtgcgtgtgacgaaatgaagcgctggacattttccggtggtaagcggtggcagggtctgattaaccggcgcgagacggagaaagcgatatgtcacggaaccccataa

SEQ ID NO: 288113 - DNA, 291 bp, Morganella morganii
atgacagctccttttatccttaatgaagcatcaaaactgccgcgtgatgagatactgaagagattggaaactctttatgaagatggatcgatgactgaaattgaacgtggaatttatcgccaaatcaaagagaaaggtatcgatagtctttcagagaaacagctttggcattttgagaatggaatgatctcggaatgtgttgaaaaatgttctatcaacggatgtactaatcctacctatcctggtaacgcttattgtggcatgcatagtgttgagtttggtgaggactga

SEQ ID NO: 288114 - DNA, 1185 bp, Morganella morganii
atgagtggtaagaatatgaagaaaaagattgacgacctcgtaaataacatatgtcagaatgtagttggcggggagttaacacaacttggggaattgtttacaccatactttcttaatgaactatcagaaataatttatgaaaatgagtgccttaaaaaccccgaattaattattaacgtagactctcagctatgctggattgacaaagcaccttacgcacaattatgtagtcgaactccattcgatagaaaagttgaacttggtgatgcaatgtttatctttgatgagcagtttgtgaatacacgattgcaaagtgttttaaatgaaaaaaataaagcgtttattttacaggcaaaaataacagataatgaaactcatacctgccatgttcctgttacaacatataatgttttgaaaaaaaacagtacttataaagaatttcagctttacagccaatggtcaaaatttgatatctcctattcatccaatacaaaaaaagttgaagagagtaatgttgacttaatgagtgctccaaattccgatgcctgtcgatttgcgtggtatggggttgctgcctcgacgagaaatgccaactcgtcaccgagctggccctgtcgatggatggttggaaaagctttaatgaatgacccatgtgacaaaactttaggagagttgctcagtggtttttaccaggatcatattatcgatggtagtcaggttggagagtattttaataatgctaaccattttaattccgcttggggaaaggttgtttaccatgttcttgcccgcagccagcaacttgggaaaccgtcttatttcccctcaagtgtcacaactcaaaatcgtttgatatcatcaaaaatggtctttcatgcgcctcagttaattactctatttacatcattcggcctaaacggccaaaggcttgtaggatctttattctatattctgtcattaaatcctcctctttcatttagccatgcatttcaacagatactattggggatggtttcgccaaaaaatttcaaccacttatttaactctgcaattgctattctgaagttgcctcccactgtcacgacgagtgtgattgggtcatataaacctagaaagttcccaatagtacgcgtgacagtgaaacgccaagaaaatgaaaaaataaatagtaagtatatgagctaa

SEQ ID NO: 288115 - DNA, 2337 bp, Morganella morganii
atgagtaagctatttttccgtctggcaacatggcgcgctcgtcgtcgcgcgaagcataatgctgacatgataaggaacgaacggccagaaggcgggattggggctgaggctccgattcgggcagcatccgaagatcgccttagaagggctgaatttgcggctcgtatagccgacgtactttcggaacttagcttgcgcgaaggccgagtgttcgctattcgtgggggatggggttttggcaaatcgtcactgaaaaacctaatcaccgaactgctcgatgctaagagcagtggagcggactggctcgactttaacccatggcaatggggtgatggtgactcaatcgcccgcgcgctatttggccagatagcagatcgtttgggaggcgagcattcgaaggcagcactcgaccgtgcccaagcacttcgacgttacggagctatccttaccggggttagtaagcctcttaaagaggcagggagttcaggccttctaatatcgacaattctcacaaatgcctcggttatagcgatcgcgtcggctattggatatgaccttccgacagttgcaaaggttgctgctgttcttgcctttctctcggtcggagtacctcttctcggacgcgtgctatcgtatctcggtcaagaccatagcggtgagtccctcgacaaggtacgcacagcgcttgaggctcgtcttcgcgaacttgaccggccgctggttgtcttcgtcgacgacattgaccggcttgaacctgagcagatcaggatgttgcttcggcaggtaaaggcgaatgctaatctaccgaatattgtttttgtgctccttttccagcccagtatagtagaacgagcactagatccggttgctgataatgacggccgagccttccttgaaaaggtcgtgcaggctagctttgatttaccagttgtcccggcatcgttcgtgcatcgcatgttcgaggaggagctctctaaaatggcagggttctacgcaactgaggccaacgggttctctcagaggcgctggggcaacgcttgcattggttgcatccagcccctccttcgcaacattcgtgatgcacgtcgtctcatatcttccattgctgtacacatgccactgcatgtggtcggcgacgtgttcgaggtgaacattgtagatttcctgcttcttgaaacactccgggttttcgaacctgacctccacgatgcactgttccgtgagagaggattggttctccaggaagggcgcttcttccgtagtggtcggcaggaggtgggtcaagcagctaaggaacttctggagatcgtctcagaagagcgccgcaatatcatttgtgaaatgcttaaagacttatttcctcccctcgaatgggcgtatggggggacgaactatgcagacggcttccatcgccagtggttgacggagaaacgagtatgcacttcgcgctacttctcacgttactttgaactgcagacgtcggttggagaaatatctgagcgccgtttcgttgattttctcaatgcaacagcgacagaggacgagctcttttctgaaatcgcagccgtcgaagctgacggtctgctgaattcgctcgttgcgaggctagatgaatccgtcgaccgattaccaaccgagaacgctgctgttctgctctctggaatgttcagaattgctgaaaaactcgcaggcacgaatagcggctctttcgactcgttatatgtagcagcatggcgagcgacaagttggtacttgaagcgaattcctgagaatgttcgaggcggtttagctcttgaagcactccgtaaaactgaagcgctatccgttacctcaatcctgatccatctcagcgatcccaccgatcagaatgagggtgagagtggagccttcgagccagcgttagatctcaacaccgttgtggcaatgaaagctgaatggttacggttaataaggatccgcgcagcagacggcgatgcgctgatcgctgagccggttctcatatcactgctcgatcgctggaaaaactatacagattcaatggacgaacctcgagagtgggtgaggaaagccattcaaaccaaccaaggcttcgcaaccatggtcacacgcctgatgagccgaggtacgagccatacctacggtgatcgcgtctccacgcagtacaacagtttcaataaagagacaattgacgactttattggcattgatgtggcgaaggctaagtgtgacgcgattaatcccgctcaattccctgagcatgaagaggccctgcgaacgctgcttagatatctcgaaaagtggcttgggttgagagaaaatgatattttcgatttctag

SEQ ID NO: 288116 - DNA, 216 bp, Morganella morganii
atggcagaagttacggtaacagatgatttacttgatgtgattgggaaagccattcaaacgatgctgaccagtatcaaagagaataccggggcatgcagaggatctgacatcaaaaaggttgcctcagtgatttatgagacaaccaaacatttaaacgatgatagcgaagtcgatgatgctatttatgcttttctcgctctatcaatatcctcgtga

SEQ ID NO: 288117 - DNA, 237 bp, Morganella morganii
atgaccgaaataaatgagttaaaaaaagagatcgagagtatgaaatctgagttgaccgcccataaaattcttatttcctcactcttggtacattttcctgagtcaaccaatcgcgccaagcttatgtctacgttttgtaaaatttccaaagccaatggtgtagcgcaaactactgattcatttttaaatctcggttatttcacgaggatattgatagagcgagaaaagcataaatag

SEQ ID NO: 288118 - DNA, 153 bp, Morganella morganii
atggctctgaatgatgtgaaagttcgtgctgccaagtctgaaacaaaagcctataagcttaaagacagtgacggtatggttgtagtggctgtgaatggagcgctggcgggtggggttaaggtggctcaggatagtatgaggaaaataacataa

SEQ ID NO: 288119 - DNA, 669 bp, Morganella morganii
atgtcagatgataatgtcttgaaagaattttttaaatctctaaatgaacaggaaaagccattttttcagcttttaaaagatgatcggctaggtataatattacgttcagctgtaaatgaactaaatttaatgtattataaaaatcatagtgaatacaacgagacatttagtcaggaggaatattattacatatttaaattgggtgtttctcgattaattaaattagctcttgaagcacgagcctcgtttgaagtccctgctataatgtttctgcaaaactctgaaataagcgctgaaacacataatattgtaagaggcttaggaatgatagagcatggcaggagaattgcgcagtcagtttattctggccaaactaaaatagaaaaaacgggaggggagtttaaaataaccataccatcaatacttgttgatgaagaaagtcatgaaaaacacatatctgattattataaagatcaatacagaaaaaatttcattgaaatttataaatcaaagttcatagaaaaattcaaagtagatgttgacaataagttgtttgatttggtttatccatatgaaactcattttatagggtatgaatccgcacctattctagacgaattttttttttgggctcacctattcagagcttttcaatcaagatggatttga

SEQ ID NO: 288120 - DNA, 879 bp, Morganella morganii
atgtcggtaattgaaaagcatttaagattttcagaaaaactcacaacaaaacatactacaataaagttagagaatattctaacagtttcagtaaatacagacgaatttatagaaagcatgtgtgctgcaattaattactttgggtcttcattaaaagggcatactccgcttgaattaaacgacgcgcgtaaaatttttgaagtgatttcttatagcagaagaaacataaaactattagacaatcctggagcggagctaccaatggtgattcaaagctcggatgaaagttttttcttctgtattgcagcaagatatagttcaccgttacaataccttcataactccttgagattttattttattaaggattatgataagcagcaacagtcacgagaacaagtattacaaagagcaatagaagctgctttgaataaaagtttcagtaatttacaataccaagaaaatataaatataaaagagaatggtaaaatattaactgatatagacttagttgttgtcgaaaaaaacacaggggtggtttttctttgtcaattaaaacatcaagaactttatggtgctgacctacacgcgaaatatgttcgaaccaccagattaaaaaaacaagcatcggattggcttacttcgattaacaactggttaaacagcataactgaaataaaactaaggaaatcattgcaaatcaccaagcatgtaccaaaattaaagatatataaattatttataacaaaacattatgcctatccactcaaagagttatcagacgaagatacagcgtattgtaattgggcgcagtttatttatgcaattcaacttatagatgatgacaaggggggggggaagatagtatctcatctttag

SEQ ID NO: 288121 - DNA, 825 bp, Morganella morganii
atggatcgccaccaccagcccttcgaggaaataaaaaaaactgatgagtcaggcattgagttttggtctgctcgagaattatctaagcttctcgagtactccgaatatcgccatttcactccagtattagaccgagctaaagaggcttgtttgcatagcggtcacaatattgaagaccatttcgaggatgtcctcgatatggtcaatattggatcaggtgctcaaagaaagcttaaggatgtaatattatctcgttacgcctgctatctcgttgtgcaaaatggtgatcctagtaaacccgtcattgccgcagggcaaacctatttcgctctccaaaccagacgacaagaactctctgataacgaagaattcagacgcttaaaagaagacgaaaaacgcttattcctacggaatgaactaaaggagcataacaagctgttagttgaaacagcccagcaagcaggagtagaaacaagcgtcgattttgctatctttcaaaaccatggataccaggggctgtatggcggcttagatcataaaggaatccaccaacgtaaggggttaaaaaaatcacaacgaattttagaccatatgggttctaccgagttagctgccaacctgtttagagcaactcaagctgaagaaaagttaagacgcgacaatgtaaaaagcaaaaccgttgcaaaccaaactcattttgatgttggtcgaaaggttagagacaccatccgcgagttaggtggcacaatgccggaagatttaccctctcctgaaaaaagcatcaagcagttagaatcagcggcaaagaaagctctcaaaaaatag

SEQ ID NO: 288122 - DNA, 243 bp, Morganella morganii
atgaccagacaccttattcctattataataaaaagtagtttcagaactatcagaccgcccctgaagtcaggtgaagatattgcaccggtatcgaaactggccgccgtcaacaaacagcgctgtgaacatcagcaactgccgggtaaaaaaacacagaaacggaaacccgggaaagagtacttattgagccagaaacttctcaaggaactgacgcgtacgtggttgctcaggattggtaaataa

SEQ ID NO: 288123 - DNA, 1206 bp, Morganella morganii
atgtatattccccgacccgcaaagcttctctttcagattgatgacgactggaaccgccttctcatcaatcgtggtcatactatccccgaatggaccaaactggtcattgagcgcatgcttgcctgcggcaccggagccatgggtattcgccgttattgctgtgagtctgctcactgcacacacaccaaatatttctgtcagagctgcaaaagcaaaggctgcagcgcctgcggcatgaaagccaccgagcaatggatagcagagcagcaacacatcctgcctgactgcgaatggcagcacatcaccttcaccatgcccgataaactctggccggcgtttaatcttaactggccgttgctgaatcaactttttacctgtgccgccaacacgttgctgaaatgggctgaaaaactcaatatcgaaatcgggctgttcgtcgccctgcacacttacggacgccagcttaaccaacatccgcatatccatttatcggtcacccgtggcggattatgccggaaatacggcatctggcggccggtatttttcaaaaagaaagtggttgagcgttactggcgcagggcggttatcaccctgttacgtcagcactatgctgagctggatttaacgacccccggttatctgcatatccgggattaccgggaatggtgtcagtttctggagtcacaatatcagcgtcgctggaaaattcactttgccaaaaggacaaaatatgcccggcagaatgtcaattatctcgggcgttatctgaaacgtccgccggtagccgcgtcaaaactgcgccattacaacggtggtaccgttgttcaccattattacgaccaccggacggggcggcacaaaacccagcatctgagccaggaagagatgctgtggcgttacagcagccatatcccgtcgaagcattttaagatggtgcggtattatggctttctggcgaaccgtaagcgggagagtttactgccggaagtgtatgcggcactggacatgaaggtgaaggagaaaccgccgaaaccgggctttgcctctctgatgaaacagtttacgcgcaccgatccgtaccagtgcgtgctgtgcggcggcaggatggtatttaacagtgcggaagcgggtgtcagggcagaaagattgctggagatacggcgtcaggaatttaaaaagcagcgatggctgcgacaggccgcatag

SEQ ID NO: 288124 - DNA, 342 bp, Morganella morganii
atgaatatcgatgcccttagatacttagtgaatgaagagcctgaaattatagaaggcgaggccagatcctgtaatcttagtgaagagaccacaagtggaatagcacgtcaagtcgcagaccaaggagttgatagcttaagctctaaccaactttattactttgatagagcaattcgaccactgattgaaaatttacactgtatcgggttccacaaggaggaatttggtgaatgtaatgccccattacccaatgaacaactatatgattactacgctaacgatgaaactttctgtgagagttgccgctcaacacgagatagatatcattatttaatatcataa

SEQ ID NO: 288125 - DNA, 516 bp, Morganella morganii
atgaacaaacgagccagattactcttaacagcaacctctatagcaccagtatgcataacacttgctttcattgggtacattaaagggtcaatgtggcttgtatactcatcattgactgtttgtattttaagctttttactatgtattttttttatatggtatgctaaacgtaaattagttgagttgacaaaaaatattagttcaatctctcctgctaacaaagaggtaactaattatttcattagctatctttttccacttttaggtactgattcaatttccaccgattggaaatatgctatatttttctatatgtcattattattttatatttcattttctgaaaactataatttcaaccccctattatctattattggatataagttttatgaagctgaggatgatactggcgtcggatttgttttaatatcaaaggaagttatttcagatatatcaaatagaaggttcacagttattcaactaactgattacacttacttacatattgggtga

SEQ ID NO: 288126 - DNA, 861 bp, Morganella morganii
atggataaagatgttgctattcctatagtgagaatagatacagataaagatactgataaaaaggttactgatatattcaagcagcaactggattatttcaattgccattacgaccaaaaaattgagttctacgctgggtataccccaagatacaatgaatgtttctatttggataattttgatgaggctgctgcattaatagacgcaataaatagaaatacagcaatacccatccttgaccacaaaaaaatcccaatgtccaaaataaaatgcttatttgtatgcactgaattcccaaacaatccagataaaatagccattcaggcatttaataaaagtcaagtattaaatattgagcgttctctatggctaagcaaaaacactttttccatgatggaaggtgtggggtttaatatagatgaaaaattagttgcggttatcgaaggaaaaataattcgctttaaaagttttcaaagactaagagcaatatttgatatggaaaaatacttcagtgaagcaaccgatgaagatgtaaaatcgttcagccaaaactgcaaattcaaaactaacgatgggttcgatttactatctgttgctgatacagtagttcgaacaaaaataaccctaattaataattctggcgtcttaaatgttgatataaaaaaattaaaagcggccgcaaagaaggtaaaatttaaattagaaacaactgaagatgcatctggtgttgaagttatcgttatgccaacgacaaaaaaagaaataaaaaacttactgacttttcttgatgaggattatttcacctctgaaattagtaaaagaatttttaaatccaactcaaaaagacccgttagtgaataa

SEQ ID NO: 288127 - DNA, 222 bp, Morganella morganii
atgaataccatcaataccaccacagccacttccctgcttgacgacccgctcgtggatatgaaagagatcaccaaattaaccggattaacggataagtggttttacaagcagatacaggagggcaagtttccgaaaccgattaaactgggccgcagttcccgctggctgaaaagtgaagtagaagcctggctacaggcacgtattgccgggtcacggaattaa

SEQ ID NO: 288128 - DNA, 2823 bp, Morganella morganii
atgaaacaagacgctttattctctagtgatagcaccccgcagtcccaaacagcgggtccagtaatctgtttgggaaaaactttcactaacgaccaagaacgccgcgaatattttctggcattgctagctgaaaagctcaaagatccagaatttcgtaaaattgaaggttttcccatcggtaacgatgacgatatattaaatctaagcgatcctccatattacaccgcctgtcctaatccatggattggcgattttattgcagagtgggaggcacaaaagcctgcatgcgacgaagaatatcatcgagaaccttttgctacagatgtcagtgaagggaaaaatgatcctatttataatgcccactcttaccatactaaggtacctcataaggccattatgcgatatatcctgcattatacaaatccaggagatatcgtttttgatggcttttgtggcaccggaatgactggtgttgctgctcagatgtgtggagataaggaggcggtcgcttcactgggttatcaagtcaaaattgatggcactattttacagcaagagatcgatgaaaacggtgaaattatatggaaagcattttcaaaattagggccaagaaaagcagtactaaatgacttatctcctgcggcaacatttatagcctataactataacgtacctgtagaggttcagtcttttgaacaagaagtacaactgttattgcaagaagtagaaaaagaatatgaatggatgtatgttacaaagcatacagatgggaaaataggtaaagtcaactacactgtttggagtgaagtatattcttgcccagggtgctccagtgagataatttattataaagaagcattttctgaaaaagacgatggtataactacgtattcagatatatttaaatgttcacattgcaatatattagtcgctaaaaagccttcaaaaaattcaggagctagtgcgcttactcgggttttagtaaccacgaatgatgcatcatcctcagtaataaaaaaacaaaaaatagttcctgttaaaataaattatagtattggaacaactaggtatgaaaagtttgttgacactgatgatttgaaaaaaatagaggaatcagaaaaattcatcattaaatctattttacctatatttagaatgccagaaggggatgagtgtagacgtaatgatgatgaaggtattacgcatgtacaccatttctatacgaataggaccctagctataataactcaaattattaaaagatgtaattctaaacatattgattttattattgggagcatgctgcccaagttgacaataatgaaccgctacatgccgcaacatggtagtcgcgcactagtcggaccaatggcgaataccctttatgtaccaccagtctccgttgaaaataatcctttagagcaatttaaatttcagtttaagaaagttattcaagccctcaataacaaatcaggctctatcattacaaatcaaggtatccaatctacaaaaataaaaccggatagtattgactacatatttattgatccaccatttggtgccaacataatgtattctgaattaaactatattagagagtcatggtttcgggtattcacgaataataaaccagaagcaattcaaaacaaaacacaaaaaaaagatggagagacataccgatctctgatgtgtgaaagctttaaactagcttatacatcactcaaaccaggaagatggatcaccgttgaattttcgaacacaaaagcatctgtttggaatagtatacaaaatgccctttcagacgcaggatttattgttgctgctgtcacaatgttagatactgctcgaggagggttacatgcaatgttaggccctactgcagttaaaaaccctctggttataactgcttataagcctaatagcggattcgagacgagatttgaaactgaggccatttccgaagaaggggtatgggattttattcgtactcatttaaaatatttgcctgtttcaaaaattcaaaataatactatccaaataatttctgaacgagacccacgtatcctctttgatcagctcattgcctactatgtacgcaaaggttatcaagttcctttggatagtaaagaatttcaaataggtcttatgcagcgcttttttgagcgtgatggcatgttctttcttcctgagcaactcgccgaatatgataaaaagaaactctcttctggtgaactcattcaggcatcactttttgttaaagatgaagcctcggctattgcatggttacgtcagcttataaaaaacaaaccccaaacttttgcagatattaatcctcagtttatgcaacaactgggtggatggagcaaaaatgaaattgttctggatttacgggaactgttgactcagaatttcatttgttttgacggccaggatgaagtgcctgatcaaattcacagctatctctctagcaactggaaagaactacgtaaccttcagaaaaataatccagcattagttgccaaagctaaggatcgttggtatgtccccgatcctaataaggcaggggatttggaaaagctacgagaaaaatcattacttaaagagtttgaagggtacaaagatatcaagaaaaagctcaaagtattccgtatcgaagccgtgcgtgttggcttcaagaaactatgggaacaacaggaattcaccaccttaataactattgctgaaaaattgccaaataatgtactggaagaagatcctgttctgctgatgtattacgaccaagcagtaaccttaagccaaaccgataccgataacgaatggtga

SEQ ID NO: 288129 - DNA, 1965 bp, Morganella morganii
atgacctggcaggatgacgttattcataaaataaatttggatggagcttttgtttacatcataaacgatccagatggactactatacgagcctgtaatagaaacctcacttcaagaaaaaaatgcgctcatttttgatgatgatgacccattagcattacgtctggcctatgaaacatggcgtagtggtgagaataaaatatctttccttattcgactgacggttgagcgtgatatttttatacctcatgatattcaacatgagtcaaaaacgattgatttccatctatcagaatttttccaggatattgattcaaatgttctaagattaatacctcctacgttatatcagtcagtcatggatgcgctgaaattattttcaccgggtaggctaagcccacaatccagtctggattttttattgcgccatatatatagaattgcacctgaggtgatccaatccagtgcggatcttgttagattgttgattagaaagcattatatcggcattgcaatgccggttcaaattgaaaagagactaatttatctactgagtttagtgccgagttttggtttatggaatgttagtcaactaatatccaataaaagttatttttttgatttccttcaaaagcaatgggaaatatatttacacaatgaagaaaatagtcttacatccattaaatttcgaccagacgctcaactaattattccttttgccgatggtgatgttcgcgtttttattgataacctgtttgctgaaggcattataaaaccagtggcgataaataatttaccgcttgggcactgggcatcattcgctgtattaaaagaacccaaaataacagaacatgaacgggtactacacctacttaataatgctcaaaaattattcagccaatactcagaagaaaaggcaaatacagatttttggttagaacagtctcgttcacttggtatcatgaatgcaattttttatcaaaataaaaaatttcctgccgttgaagttttgcttgatgacattaaagaattaaacactaatgttgatgaattatttcagcactggttacaaatcaactttatgaagatacaagcgataccaaccgttcgatacccatgtatgttacataaagtgccagattggatatcacgtagaatagactcagggaataaagtttgtttgctggttttagatggcatgggcgctcgtcaatggccattaatacgtaagcaattacaaatctccgagaatattttaatagaagagcattcttgttttgcatgggtgccaaccataacttcaatttcacgtcaagccttattctcagggaaacgtccattttgctttagcgagtcattactgactacaagcaaagaagagcaactgtggttaaattattggcttgataaaggtttagacaaacgagaagttaagtatgcaaagaaaattgagaactattcagtcgatgattggcaatcactagttgggtcgctatcagttaaaattgccggctttgtcataaactttatcgatgaacagatgcacggtatgaaaatgggaatggctggcttaaatgtagtagttgatagctggttggcagaatggaaattcaaagaaaaaatttcagatctactggacaatggatttgaagttataattacttcagaccatggaaatcaagaggctattggtatgggttatatcaatgaaggagtcaaagctgagactcgaggagaacgagtacgaatatataatgaccccagtttgcgagacagctctgctgcaaactatcaagattctgtgatagtatggcccggtcctgagatgggcctgccaaaaggaacataccctttgctagcctactctgataaagcctttaaaagtaaaggggacgtcgttgtagggcatggaggaatcagcctccatgaggcaatagtgcctttcattattgttaacaaaaagtag

SEQ ID NO: 288130 - DNA, 2028 bp, Morganella morganii
atggctgagatgtccggcggctctgcggacggtatggctgcgagcatgtccaacctcagcaaatcgctgtgggatttggtcactatcggggattcctcggtgctgccgtacttcaatgcgctgaatgtcggcgtggtggattcaggcggtaagctgcgcgacctcgacgctatcctgctggatgtggccgacagcctttccggtatgtcccgcccgcaggcgtacaacattgctaaaaacatgggctttgatgagggcacgattaacaccctgctgcaaggccgtgacgcaatgcaggagatgctggacacgcagcgcggcctggttatctccggcgaggaagagctggaaatcagccgtcagctcaacaaacagaatgcgaaggtccggcaaggctgggaggggctgaaaaccctgctggcaaactacctgatgccgacactgctgaaattctctgaggtgatcaccggtgtgctgatgttcctgaacaagaacagagacacggctgtaatggtgtttaagggcatcgggattgtgctgggtgtcctgcttatcccgctggtgataaaagccgctgcggcctttctggggctgtttgcgtcaatcgggctggttcccctcgctttgtttgctctcggtgccggtctctggctgctgtatgacgattataaaaaatggaaagaaggcggcgaatcactgctgggtgaatattgggctaagtgggataaaaccattacctatattctgatgaagctggatcagttcgaaagatggttcaaaggaaccactatcgggcaatggtttaccgaccaggagggaaacctcaataaactggaactagcgtttgctgcgtttgccacctatattgctggcaaatgggcaacaaagatgctgggcgcattcgggcgtgtatctaaaggtgcggccaaagtcggcaaaggcctcggaaaaggaatgctagggaaagctggtggagtggcggcagcgacatatgtagcctcggatttggtcgattatgcactgaatgaagcgttcggcggatttgattggtatcaaaggatcaggactgctcccaccttcggttatttaggtcaagcggttattggtgaaggggatgcccgttgggtggatggtgtttgggttgataaccggggaaaacaaaacggtgcgcgcctgactgaaaatacactggatataccgacaggagaccctgaaagagatacgcttgccgccaaagtgtcaaaaggtgaattaagcctggacgaggctaatgatatcctgatgaatggttatgatatttcatctgatgctgatggtgaggacggcagcgttgccagaaatcataacgagagaggcttgcgctataacagcccgctaaaccttgcttatgctaatcagcagggcgcagataatatcggtggctgggctaaatttgatacggaatataacggaatacgagccagcgcaaaccagttgaagatgtattatgacggcacatcacgcgccgctggttatcagaaactgcaaacggtgtgggatatcattcacaaatgggcacccaagggacatgggaaaaatgatccggtcgcatactcaaatacagtggcttccgggatgggggttggcgttcacgataaaattaatctgaatgacccgtcggtgatgtatgacctgatgaaagaaatgtctaaaatggaaaataaggggaaatttccgtattccaaagggctggttatgtctgccattaacggcaccggtgatccggcggtaaatctggcaaataaaatcaatagctttaatgactttatttccaatcccattgcgccgaacgcagccgcaggaacccggcaaattatggctaattcacagatgcttcagcctggcaacaaaaccgttaataaccgtgttgaggctaactttggagatattaatatcaatacttcatcagcgacagtcagcggtaacgtggcagatgcgaccacatccgcccgcgaaaacatgttccagctgatcacaccaatgagttaa

SEQ ID NO: 288131 - DNA, 1038 bp, Morganella morganii
gtgaataacgccgaacctattgatatttcaacatttgaacaatttgagcaatatgtaaacaacgctatcagtgatagtaactttagtttagatatagctaatttaaaatttagtatatttgattcattcaagatgaaaattgaaggagatcagacaaaatactttggtggtgtaagttcaacattagcgcaggggatgagtgactttcaggtagagttaaacaaaatctttgctatcgttcgatacaacacggataatcttcaaagattatcttctcaggataaaaaagatttagaacttactttcctcgtcaatgctggatgtactgagatcatatcaagcttgactgaattggtaaaaacaattggagatgcgggggcaaaagttatgaacggaatgactccaaatcaaaaaacactttgtatcctatttactgtcgctgtgattggcggaggatggggtgtttccaattatgcgaataatctccacgaagaaactatggctcagatacaagcgcagcaagttgtttccggacagcaggctgagattgacaggttggaaactctcaaaaatgggatgctggatgccatcaatgccaccaataataatgaattgaaagagaaaacagtcggtattgaaaatcacggcgcaaaagcatatgccgatatcgtaaaatcagccagtgatgctgataagataacctttagtggtttgacagacattccactagaccaaggtggtatacaggacgttatcaaaaatccgatagaaaagcttgaaaataaagaagatacaatagaagttgaaattgagagtataaaaagaaacattgatagcctcactgtcgcgtgtagaattccaggcatggattatgtgttttcaataagtgttaacactagtttcattgataaagatgagtcagatttattgtttgatgctatgaaagaatcaaaaacagtaaaaatattaggtaattataaaacaagagctggcgtcattgaaaaaggtaacgcatcatcaataactccttctaactaa

SEQ ID NO: 288132 - DNA, 732 bp, Morganella morganii
atgagtgataatttgctatatttattggtatgtgaggggccgtctgatatatcaataataagaaaagttacagaggaattatgccagcgtaatggaaaaaatgttgaaattcgtcacatcgctccgcaacaggatagtactggctcatgggagaggcatggctggacagccgtattgagatggtgtggcatgaatgggtataagagtgaagagcacttggctactattgctccgaatatcagagcaaccgcacgtagtcgttattggaaagctatggttaaattatctggagcgaacggactaattattcaaatggatacggatatcgtttctgagttaagagtcttaccccagaaatttgatccggtaacagatgatagaagaatgtattgtcaaaattcgataaataccaagctgggcttaacaagcaatgatgaagacctgattttgctacttccttcttattcgacagaaacgtggatattagcatcattagatgaacaacatgaagtttttaaaggtattaaaaaaccaattaaatttgaagaaataacaaattgtgagcaaatgttattaaatgcagggtgtaaaaaggaaagaaaaaatgggaaaattaaattaaaaaaaacttatgatatttatatgacatatggagatgaaataaaaaacaacattgatagagtcagggaaaggtgttgtgaatttgatttatactgcactaactttgaataa

SEQ ID NO: 288133 - DNA, 198 bp, Morganella morganii
atggcacatgaaattaaattagaggtagctgaaaaaaaagcatttcaactaaacactctgttgtatgtgctgcgcgatatggattttaacgacctggatggtcaacaaatatcagctttagtcgaactggcgtcatcactatcagacccggtttcatcctggttgatcgaagaaaacgcacagagagaggtggcgtga

SEQ ID NO: 288134 - DNA, 2262 bp, Morganella morganii
gtgcgcactgactacactaacaaagaaaatcttaaagaacttcttaacacaattgacccctggaatgaaagtccgacgtggctgaacaaccttcatccattcctcattgaggtcagtcaggcggatttagaaacacgctcgtcttatgagtttcaacagcgattgtggaggcagaatccaatcagcaacgctgggcagggagcaatagatgtcagtaaagcgattgcggacaatacctttcgccattgggtagcagaaaaatcaatggaatcactggatgacaaaagtccagatgattgcgcaatttggctagatgacttttatcacgaccttctaaagaatattcgcccgttcactacagcaactccttatttgctggtcatgcgggctctggctgcattttggcctcgcaagctaacgagcgtgagtagttctacgccagcatatgaaatcgccaggatatggtttggcaatgtgcagttaaacatagtgagattgcagttggagataaccaagcacatgaatgaattgcttggggagccgggggaggatttaagggaagttgcagcacgaatgactttaccgtggctatcgttagtaacggttcgccagaatgaagacagcggccagccggaagctctgagtaaaaccggagagattaccctgcagcatcaacctgccgaacaacgtcgtaaaggactaacgtcacttaaaggcggtctgagtactatcaaaagtgtgctgtattttttagaggtacctaaatcacgcaatgatttaattgattttctacaggaagaatttcctgaatcaaaaagcagcactctgaataccattatcagcatcctcagcaacgaattctttgtgattgaaaaagagggggatatatttagcctctcctcccgtggggtagcgtttctccgaacgcaggatccacaagaactaatcccggtaatgatcacgcatatactgggtgtggatcatgtactgtgtgcgatgaaagacggaagcaaaagttttacgcagttattgcttttactccgcaaagttcattttggatggacctcagaaacagtaccccgttcaatactaagctggcttattcaactcggcttagttaaaaaggacgaaatgaaaaccttcagtcttacggaggaaggccttggatgggctaaccgcattacgtggcagcccgaattcttacctcaagcgcctatcattgaaacagacctggacgtggaagagatttcacctgagatcagtgttaattgtcttaaaataaatgccatcatcaatgacgtgataaaagatagtgcattccggaaacgtcaggttgagcaacttcatttgggactttgggcacacaaacagcggcacttcgcaatactggccggtctttcaggatcgggtaaaacacaactcgcgctgagatacgctcagtcgctaagcactcatcaccctgccccttcctctgataaagagaaaaaaacttggtttgttcaacccgtacaacccggttggtacgacccatctgcacttctgggctatataaaccctctgagaccagaaagttatacccgtaccccgttactgaactttttgctgaaagcggctaattcaccagaaatcccgttcgtcgttatactcgatgaaatgaatctctcgcacccggagcattatttcgcgcccttcctatctgcgatggaatcaggaacacaaataatgcttcacagtgaaggcgatatgtttgatggtgtgcccgctcgcctgaattatccttctaatgtcgcttttatcggaacattgaacatggatgaaacaacgcttaacctatctgataaagtgcttgaccgagcttggactatggagttttgggagatcgacctgaaaaatttcccaagatggggtagctacggactcagtgcagaagaacaggattacattagggatgttttaacttcgctgatggattacttaaagcctgagcgcctgcactttggttggcgcaccgtagaagatgtgctcagtcacatttcacttgcacgacagctgacttctttcaatcttatagatgcccttgatgatgtcatttatgcacgcgttttgcctaagcttcgtggctcagatagtgttcgtctgagaaaaatgcttcatgactgtcatgccctctgtctgaaactcaacttaccacggtgtgcaaataaactaatatccttatctgctgacctggaggatgcaggtatgatgaggttctggcgctga

SEQ ID NO: 288135 - DNA, 1824 bp, Morganella morganii
atgcctcataattctactttcgattacaaaccacatttaaaatctgcatatatcgatcctattaggacagtaacggttattgacgatgaatatccaacaattgatgatttgattttaagtagcaaagatgatttttctcaagaaaatatttatcgactaaaagaaataattgatatcagtcggagtgaggaatataactggcttttagatgtttacaatggtaaagaacaaaaggtccgagaaggtactgtatctaatcgtctttaccacagtgatttattaatcttagactatcatttagatggtgaagattctggatattgtaagaaatctatagatattataaagaacttatctgagaatcgtcattttaatattgttgcggtacataccaagggttatgatgggcaaaaaggttccgttaacgaagttctgattgatattattacgtcattacaaaaaagaccaacaatcagtattttaaatgagaaagtcaagtccaaggtagatgaaagtttagatgagtgggaaatcgacaagccagggattagagacgaattggttaattccatctcaactatagatttattatttttaattcacaaatatgattctgacttatgttcaggtaattttcagaatgaaacccttgatgtgttcgatgatatatatgggaaaaaagccgataacataaacatacaaaaaccattgattttaaaatggattatctcagaaaagcttgataggtatgcagatcaattcaatgacaagacctcaaagttttttgattggggaataaataatgactgtaattggattaaaacagaagacttatttatcacggtccttggtaaaaaagatacaccaatcagtgagataccaaaccaacttttagaagcattatcaaattcgaagccacatccgcataagcttattttgtcaaagctcagaggtgagattgaaagtaatggtagctacgctgcaagtaacatactaaataagaaatttttacaagctgcatggttaaaagaacttcttgagaacaaagatgaacacgcaataaaaacggctgcatggcaagctgttactaaattgtgggaagaattagcatacgaaattaaagtaggattggatcaatttacaatcaacctagtccgagagctaaaaaaaatagactcccccttagactattttatcgataaatctacacttgatgatgaattagaacagatcaaacatgcaaattgtttcagctgttctaaaaaaatcacatctcatcatctggttaccggacatgttttaaaattcaagaacaatcactggctatgtttaactcccatgtgtgatcttgttcctggtcaaaaaaacagaaataatttactccctgttacgctcgtgaagatgtacgatgcgaaagttgcattaaccaatactcgccaaaacatgcaaaaagagctcaatttggatagtctaccttcaattaacgacgatgaagctattaggcaaatattaaattactcgactcaaaacaatctattattcattcagactgagttggatggtaaaatacaaatccttagttttactgttgggcttgatggaaaagcaaaccctaaagcaatggattgttatatagaaaaccaaggtattttttctgaagagaacacaataacgctcaaatatgctgagccaacaaataacgaaatgaatgtgacatctgtagaagcaaaaatagttgcggagttacgctacgaatatgcattaaacttattggggagactcggtgtatccaaatcccgagtaggattagattttatcaattaa

SEQ ID NO: 288136 - DNA, 900 bp, Morganella morganii
atgcttaaggctgactcactaagaaaaagagagttttacaccaattacattttccgtaatttaaatgaagaactgttaccaacgttcaggtcagggataatacttggtgaagatgaattaaatgatttaatcagaaagaacacggataataaaaaggaaagaaaagattttatcaggcgagccaatgtagcctataaagaatcactgacagaggaccggttttttgactggattaataatgaacgtattgcgctatatgttattcagtttatacataactatatatatgatgactaccttcagagcctggcagtaaaaacaggaccgggatacagaaatcattatccgcattttggtaaaacaccccacatccggaagatgggactgccggaaacaccatatggattaaggcaactgaaagacacaataaaatcatactttgacaggctgaacataccactggatgttaaagaattacttattgatcatatcaggactgattggttcaatcagaatacagactggctgttctggattgaaaataaaaacaagacacaagttgactgggccgtggagtatattcgtggtcatttcaaatcagaggataacgatatgttgtattactacaacccatcatccgctttaaacagaatatacggtttctttgatatcatcctaacatcaaatgagtcacgtgagctttttattattaaaatgaaaaaagcatgggcacagagtcgctacagagaaagtgttaaagataagaaagttataaatacgtatgtcagtaatgacgtaaaggaaaaactgaaagaaatcgtcagatccggcaataaaaaaacaactgaagtcatctctgatttaatcaggagagaatatgaccggttgaaaaaaagataa

SEQ ID NO: 288137 - DNA, 216 bp, Morganella morganii
atgaaaactatcaaattatcgcaaggtgaagtgactcgctaccggattgaccatgccgcagcaaatgaagccgggcatattctgtctatggttttctactggcgggcagatacagcggaggatgcggtaaacgcattgctgaccagcgcaccggaatacgggctgtcagatatcagaattgaacgggtgttactggtcagggagggcatgaaatga

SEQ ID NO: 288138 - DNA, 249 bp, Morganella morganii
gtgatctggcacacccaaggcagcggcaagagcattctgatggtaatgattgccaagttggctgcatttacgtggtttattaatgacggttacagccagattgctcaaatgcaacggattgaagcggtctggcagaaaaaagccccgcaggctgatatatcgcgttgtgacggcaaaccctgcgttaaggtcgataccggcagtacatacggtgataaagagaatacctggatgattatcaaaaaataa

SEQ ID NO: 288139 - DNA, 438 bp, Morganella morganii
atgcaaaagagtactgaacataaaaatgtcgcggtgatcacaccatatggcgcacaaaaaaagctattgcgtacactactcggacaggtgtgtgaggaaagctacggtgagtatcaattaggcccttatcatattcgaatcaataccgtggatagtttccagggaagcgaagccgaaattgtgttgtactcagtggtgcgaacccatggcaatctgcgctttattcttgattggaaacgtttaaacgtcgcttgctctcgagcgaaagagaacttaatcttttttggggattacactttcctgaggagaaaatgctcccctaacggtgaacgtaatcttttcgctgaagtgatcgaacagatacccgatgcgggtaaaattctgcacaagtcgaaaaatcctcgacctcaacacgggaaaaatatcagtagtgattaa

SEQ ID NO: 288140 - DNA, 795 bp, Morganella morganii
atgagcatccgtcacgcctgccgggccctatcgctgagcagaacggtgtatttttacaaaccggatacccggcgggatgaaccggtgatacaggcgctgacagaggaggcagaacgttatccccgttacgggtttaaaaagctgtttcagatcctgcgcaggcagggcaacgggtggaatcataagcgcgttcaccggatctattgtctgctgaagctgaactttcgccgtaaaggcaaacaacgtctgcctgtgcgtaatccggcaccactggcaacgccggaggcactgaatcagagctggtcggttgattttatgcatgatgcgctgatctgtggcaggcgtttccggacgttcaatatcgtggatgattttaatcgtgaagccctggcgatagaaattgatctgaatatcccggcccaacgtgttgtccgggtattggacagaatagttgcaacacgcggatacccggtgaaaatgcggatggataatggtccggagcttatatcactgacactcgcacactgggcggaagagcatggcgtgatactggagtttattaaaccgggtaaaccgactcagaatgcctttatcgaacgttttaaccgaacatatcggaccgaaatactggatttttatctgttccagacactgaatgaagtacgggagatcacggaacactggctgagggaatataaccgggagcgtccgcatgaatccctgaataatctgacaccggaagaataccggttattagctgaaaataacgaaatctcaaaaagtgtgtggaactga

SEQ ID NO: 288141 - DNA, 450 bp, Morganella morganii
atgaaaagaagtctgacactgcttggttgtttactgctgtccgccccggtttttgcactacacatgcacggtgaggtgcaacctgaccgttacacttattacctgaccccggaatacgggcagcagctgaaaatgcagaacgacagcaaaggccgaaacgccgggtggaagccacttcccgccggagagctggaaagtgagaccagagcagatttgtccaaaggctatccggctccggtggccatgacctgtatcagcagtatttattataataccggtgctcaggccaactggctgaaggtgggctgtatcgacaataacggtctggagtataagacagaccaaaaatggccgccgaaatccgtcgcggagcgggtctgtaaagccggagagggagactgtgcgtccttcctgcagatggatactgacagctggtccggtccgcagtaa

SEQ ID NO: 288142 - DNA, 213 bp, Morganella morganii
atggctccctacaagctgatttattttcagcgggactggtatctgtgcggggaatggcagtctgccctgcgggtgttccggttcagtcagttgcagaacattgccgtgtccggacgccgcttccgtcaggatgcggttatcgcacggacagtcacccggcccgaatttatcaccgcattaccccattatcagtttatccgttcattaccttaa

SEQ ID NO: 288143 - DNA, 213 bp, Morganella morganii
atgtctgtttttaaattaatggccaccacgctcggtgtggtaacggtggcgttagccacatactgcgcctggcaggctgcggctgaggcggcagacaatgaagatgcctccgcagcggaaaagctggcggcggggcttagtgccgcgctggcctgctcagccgtgctgggcggtacccttgaccgtctgctgggccggctctttccccgctga

SEQ ID NO: 288144 - DNA, 318 bp, Morganella morganii
atggttgccgtgctgtatatccgtgaaaccaccgcaaagaacgggatgccttgctaccgcaatcacggggtcatgctgccgctcctgccggactgtgaacggatagcgatggcgaatcatatcgagggcgcaatgacagaacgccacggttcagacaacgcagagcacatcgtcagcctgtacgcctcaatgattgacggcagcggcacgttacgcctgtctgagtggggctctgacattatggacaccatacacggggcaatagcgcaggacgtggcaggcggtgtgccggaacagccggaactgcggacacactga

SEQ ID NO: 288145 - DNA, 726 bp, Morganella morganii
atgaaaaagaacaaagcggagaagcagcaatcaaaaataaccggccgtcatgaccgtgttatgactcagcttgacagccagcgccgggaagtaaatgagaaaatacagcatatcaccccgcagatgctggcctttaattatacaggagagcaaaaacgggtgcggatcaatacccgtgatctgattttgccgtccggcacacaagagcctctgtcactgaccatttccggtggtgaacactggcatattgccgggcgcaacggctgcggaaaatccacattactgaaagtactggcgggcctgctcacggcaaaatccggggagtactccctgcacggccgtctgcgatatctggatcagcacctggcgctgctgaataaagccctgccggtcacagaagcactgtgcgagtttgatccggccattccggcacaaacctggcgcacccatctgggtgcattgcggatccggggtgataaggggttaattccgctgtcacagttaagcggcggtgaacaactgaaagtcacattgctggcattaacattatccgaacctttgccggatattttattgctggatgaaccggataaccacctggatctcgattcccggttattactggaaaatgtactgcgcagttataaaggagcattattactggtcagtcatgatgaggcatttactgaaaattgtgccattacccatacactgaccttagcctga

SEQ ID NO: 288146 - DNA, 177 bp, Morganella morganii; identical to SEQ ID NO: 277426

SEQ ID NO: 288147 - DNA, 993 bp, Morganella morganii
atgactaataagccaatgagtcacttatatgaaaaagttaaaagtgctggttttacaataccatatataaagaaactactgccagagtggtgggatgatgctttagccgaatccccctccggtcggcagtttgctagtttatttttgtctaaaagatttagtttatctcatgaaagcttcagggatgatgctgctcagcccgtgttcaacttaggtggtaatcaccgatttaaacatagaattaatgttggtgaagatgacctgaatgtagcaaccgcaatcgcatattcagctgcgagaattgcggctgaaaattttaaagtgccttacgatgatactgtcaatttagattggaagatcgttagaaataaactcctagagagtaatcaatgggtatctttatctgttttggttgatttttgtcactctgttggcattcctgtggttttggttaagaaccttccacctaaatgtacaaaaatggcaggggttgctctacaggtattagggcgtccagttattgttttaacccaaggaagaaaacacggctttatgctttttgatttggctcatgagttaggtcatatagcgaaaggtcatctaaacgatgacaatgggggcgtgtttgtagatagaaaaatagattctcaggcgacagatacgttggaggcggaagctaacagttacgcatttggtattttgagtggtaaagaaaatctgcaagttggctcgaaatatattttaaatgcaaaagaattggcggaggctgcccggatattcggccatgacaatcatacagatccaacacatattattctgaattatggatatatgaaaaatgtttggccagtagctacaaatgcattaaaaatcgtttgtaagaatgagccagatgatcaggatgtagtaagaaaatcatttatggaatcaattgattacgatgttatcaatgatgatgatttagaactcatagaaaaattatgtggggaatag

SEQ ID NO: 288148 - DNA, 648 bp, Morganella morganii
gtgattgttctttcagataatgatgtcattttaaagttggcacaatgtgatttgattcaatatcttccagagattattgatgaaaacccaaacgatatattcgttagcccaacggcaaaatttcaactgcttcctaagaatccggaaaaagctataaaaaggtgtgggacaaaagaaatttatgagcgtgtagcccgttttcttaatgatgttcaggtcatagacgaaatcaaaaatgaacaattactcagtgagttaggtgagatcccccatattgatattggtgagcagcagttgttggcgtcatgtgttgagaagccagaatcactatttatgaccggtgataaaagatgcctgaaagccgtaatggagcacaaaaaaatagtagcaacggtacatgccaggctcattaactcggtcattacttttgagagcgctctgctgttgtccgttaaattgctcggtttttctaactttcagacgcaaataagccagcatcctaaaatggatggtatgcttaatttggcaatgcgttctacagaagataagcaggtgtgtgagtgcttgttttcgtatacaagagaattttacgattaccttgcttttaaagaccgcttaccagctcaagatgcatacctaatgatgtaa

SEQ ID NO: 288149 - DNA, 1206 bp, Morganella morganii
atgagtatggataataaagtgccggatattcggtttaaagggtttagcggggagtgggaaacttcgatgctttcaaatcttgcattatttaatccgaaaagtgagttacctgagaggtttaagtatgtagatttagagtctgtcaaagggacatcgttaatagggtatagcgttgaatcaagagagagtgcaccttcgagagcacaacgccttgcaagaatgggtgatgtattttatcaaacagtaagaccataccaaaaaaataactatttatttcagctggctgagcctgactatgtattttcaacaggctatgcccaattgcgaccttattttaatggtaattacctactgaatctcattcaaagagattcatttgttaaaaatgtattagatagctgtacaggtacaagttacccagcgattaatgcttcagtattagctacactagaggttaactatcccgagagcgggaaagaacaaacgcagatcggtagctacttccaaaagcttgacgtgcttattaatcaacaccagcaaaagcatgacaaactcaataatattaaaaaagccatgttgaaaaaaatgtttccaaaacaaggagaaaccatcccagaaattcgttttaaagggtttggtggggcatggggaaagaatatactggaagatatttgcgatgtgagagatggtactcatgcttcaccgcagtatcataaaaatggatttccgttagttacatcaaaaaatgttaaaaatggatatataaattatgatgatgttcagtatatttctaaaattgattttgatgaaataaataagaggtctaaagttgatgttaatgacatcttgatgggaatgattggtactataggtaatattgctttaattagggaggattctgaatttgcaataaaaaatgtggctttaattaaagataaaaatctaatatattttttatacatctattattttttacaatcgccgacgataatccagcagttggaggatagtgcaagcggtggaacacagaaatttatttcgctaagcaatgtacgctgtttgctaatttacttacctgaaagagaagaacaagccgccatcggcaattatttccaaaaactcgatacactaatcaaccagcaccaacagcaaatcactaaactcaataacatcaaacaagcctgcttaagcaaaatgtttgtataa

SEQ ID NO: 288150 - DNA, 312 bp, Morganella morganii
atgataaacagaaaagagaaaaaaacattaagggagcaaaaaaaaaacatactatttattaatataaaatcaagtgtgtcattcacattaaaaacggtggtattatcatttattgctggtgtttttatacaaaaaaataacaacgccacacttattacagatatcaccatttctttgttcatatcactgttaatatacataactatggctgtgttttttttcaaaaaaataacattatgtataaaactaacaatcatttatatcaaaataaaaatcaaaaaattaatcaccagagtcttcggaaagtattaa

SEQ ID NO: 288151 - DNA, 2085 bp, Morganella morganii
atgcgaatcgaaaaaattcgagtcgagggatttcgcctccttcaagacgttgaaataatgctggaagatacttccacagtgatcgtaggtcgcaataacagtggcaaaacatctttcactgagatttttgaaagatttgccagtgataacggagcacgattccgtcttgaagatttctcacctgttcagcgtaataaatttttcaatgcaaaattactaagggaacaaggtgccaaagcggaggatgtccttgcggcacttccgaccatatctcttactcttaccttccgttacgacactacatccacaaatcttgggccactctccccatttattattgatcttgatactgattcgacaactgcgattgtatgtattgaatacaaaacttctctagcggacctccatattttatttaatgtccaaccatcgcctgatggtgttgaaccaagagtttacttcttccgttcattacgagaaacattgtccaaggcatataacacccatgtttcagccatagaccccacagatcaaaaaaatagacgtaacttcgatagttctagtaatttggcaacattgatgcaatgcaatttcgttcgagcacaaagaaccctcgatcatgttaagcatggtgatacagatgtgataggtaaattactcaatacactttttaagactgcatccactccgactgcagccttgagcgatcaggaacttgccggaaaactgagagaatctgttgagggtattgagcgcggtatgcagggtagtttcgatgagatgctgaaaaatctgcttcccgcaatggaagttctgggttttccgagtctcaacgacaccgagcttcgtcctgaaacctcattgaacattgaggctctcctcactggtcacacaaaggttgtctacaccggtactgatggggtacatcttccagaaggctataacggattaggtacacgtaacctcatttatatgctcctgcagctcgaaagttaccataaattataccgagcaagaccggtctgtccggctacgcatcttattttcatcgaagaaccagaggcacatttacaccctcagatgcaagaagtatttattgcccagcttaatgctgcgataaaaaaactatccgcaagttatcccaacgagccagtgtggaatgttcagttcattatctcgacacattcacctcacgttgcaaatgcagcatccttcgaggccgtgcggtattttctcaatgaagcaccaaccccccaaaagcctcgccagacaaaagttaaagatttcaaaaagggattagactgcatttcacctgaagaccaaaacttcctacaccagtacatgacactgaccaaatgtgatttgtattttgcagataaagccatattggtcgaaggaacaactgaacggctgttaatgcctaagctatgcgaattagtcgataaatcgcttgacgataaacacaagttagccaggcagtacataactaatatcgaagtgggaggtgcctatgcacacatattttacccattattagattttctcgaactcaaaacattggtcataacggatatcgattcaacccagccggtggaaaaactaagtaaacaaggaaaaaaaattacaacctgggaaaaatgccctgtcgcagagggccaacgcacatctaatgcagcaatcaaatactggtttcgacccgaagagcacccgcataacgaacaatggcatatcacacctgctgaactgcttttaaaaacagccacagagaaaataaaaggataccgccgcattacttatcaaatagcagaaaaccccaaaacgggaatcagtgcacgaagctatgaagacgcgcttgttttggcaaacccagaactatttacatggcctaaagagcaggatacagcgactgaagcatgggaaatagccaagacactcgggaaagctgatacagccttgcagttcgctattcgcgaaaaagaatgggtggtgccgcgttatattcatgagggcctgacttggctttcggaaccactccctacgcctgaccaagcaaatgatgcgctagctgcttcggagactgtatga

SEQ ID NO: 288152 - DNA, 1731 bp, Morganella morganii
atgataaagggcaaagacaatcctgctctgatagctgcagaggaagctcaaagaaaaatcaatgatgcccttgctgcaggacaaagctttcgactggaggcgggtgcaggagcaggcaaaacctattcgcttgtagccgcactaaagcgtttgattgaagagcaggggtcgactctcgtacggcatgggcaaaaggtagcttgtattacctatactgaagttgcccgaaatgaaattgcacaggaaatcgaagagcatccagccattctggttaataccattcatggtttctcatgggcattcctacgcccatttcagaaagcgttgcgtgaactcttaggggaaatggaggataagcaagaaaagattgagcaaggcggtggtattggatcaaagtcagttgaatatgatatgggcttctttggtgtcgacgaaaacagaatttcactgagtcacgatgatattccgaatatgatggcaaaacttttacaaagggataaattccggctaattttcagccagcagttcccagtgatctttatcgatgaatatcaggatacgcatcgtcaatttatggaagcaattactgaatacttcctgaaaccagctaagggccccttggtgggcctttttggcgaccattggcaaactatttacagaagtgagtacgaacttgccaagtatcccattaaagagatcgctaagggttctaactttcgttctgtcccagcaattgtcaatgtattaaacaagttacgacctgaactgtgtcaggaagttcataaccctgaagcaaaaggcgaggctcgattcttccacactaataactacaaaggagagcggactaatgaccgacactccaaaggagatctgctccccgatctagctcgacaaacacgtatagccttgatggatagactacaggctgagggctgggacttacgtaaaacaaaagtactcatgctcacccacaacgtacttgctgctgagcaaggatatccaggcatcgtcaaagtattcaatggacgaaatgatctctttgccaaaaaagaagatcctcttatcaaattctttgctgaaaacgtggaacctatgtgtgaagcctattgcgaatcccgctatggagacttattcagaatatatgggtctgcaccagccataactcaacaccaggataaagctgattggcgaagagatatggatattttgaggactctacgcgaagaagggacgatcggacaagtcattgatcacctaaaaattacgaggcgtccagctccaccagaccgagtattgcgtcgagacgaagaattcaattctatagatggcgttccggtgccagaaggagcatccgcgctaaagagatacagtaaacttaggagtgttaattataaagaagttattgaaattactaaatttattgaaaatcagacagcttttgcaacacagcacagtgtcaaaggggcggaatttgagaatgtactggttattttagggggaggatggaaccattacaattggccattacttctggaactcatcaaaactaaagctcttactgaaaaaaataccaagggcttttatcgcgcacggaacctactctatgtatctctctcccgaccgatggtaaggcttgctgtacttgccacacaaactatgtcaagtaaagccttagagtcagtagaagagctttttggaagcgaaaatgttgaagggctggtcatctcataa

SEQ ID NO: 288153 - DNA, 213 bp, Morganella morganii
atggcgataaaaaccaaaaatacagcctcacctgaagcgtttacttttcgggggtgcagaaaggttactgtttgtgaagatggcgtatccagaggtattgcatctgatcgtaacggaaaaaccgtcacttttacgactccgggaggaaaagcgcctgattttcaaaaagaggctgtttttaatattctgctgaagtcaatgaagaccttataa

SEQ ID NO: 288154 - DNA, 570 bp, Morganella morganii
gtgccggaacaaacgataggggattatggtaaatccgcgattaagcaagcaaatgaacttcttcgtcaggccaataaacctgttttggttgatcttttaaatacggaagacctggagtggtgtatagctgcgatgaggaatgttacgcctgaaaggcagctaccatggcaccagatggggtatatgctgagagaagaaaatgcattcaatttttgttttaaactgacagataaagcgcaccgtgtcgccggagcctgcctttgtgaatactgtccggctgataacgttctgaacgttgaaatgttgcagaatttccggattacgccatcggttttggatggcaatctgtttcggtttgcactgtatacaatagttttatttctcctggagtgcaggggaaagggagtacggataatgtttccagttaaccgaaaggttgcatcatactatattgaaaaatttgatttttatgatatcacggatgataacaccggagatattttgtaccgtgatacaagtgatctaatcgcatggtttgtgcgggatgcggctttggttgaaggtgagtga

SEQ ID NO: 288155 - DNA, 297 bp, Morganella morganii
atgctaaaacacataaacagtttcagagatacatggctggaagactttttccggcactcaacgccacaccggaaaatccctccgggcattcataacacgctggcacggaagctggatattatcaacgctgctgtttcgtacctggatttgcgatcaccgcccggtaaccggtatgaagaactttccggaaagctacaaggttactcatcaatacgggtgaaccagcaataccgcctgatatttaaatgggtggacggaaaagcagaggatctctatttggatccgcacgaatactga

SEQ ID NO: 288156 - DNA, 279 bp, Morganella morganii
atgcatccgaaccaaaacacactgatgcctgacaactattttcctgatgacggcaaatggattcaggaaatgctgttgcagttatcaccgggagccagaaacagggcgctggtggcttactcagcggtgtatcaggaacggtgggaagcagagcctattccgtacaggaaagacaacgcagcacgcagggaagcgaataaacggctcagggaatacgtcaggaagtttaacagagccatgcagggttacaccgcagacccacagaaagttgcgggataa

SEQ ID NO: 288157 - DNA, 354 bp, Morganella morganii
atgaccgtttctcagactagaaaaaatagtacaccaattaaagtttattgtttgccagatgaaaaagcgcaaatccaagaaaatgcagaagcatctggcttaagtgtagcgagtttcattcgtaaagtagcaatgggttatcaggttgagtctattgtagatattgaacaggttgtagagcttagccgagtaaatgctgatcttggtcgacttggtgggttacttaaactgtggttagctaacaatccacgcacagttgatttttcaccctcattgataaaaacgttgcttgctaaaatagaatcaaccagacaagaactaagaaatatcatggatagaatcttggataaataa

SEQ ID NO: 288158 - DNA, 795 bp, Morganella morganii
atgaagttaatgctccgagtattttcatcactgagagggattttagcagctaaaaaatcattagcagcttccttcctggcgtccatcatggcattaccggcgacagccggtatccctgtaattgatggtactaatgtggtgcagaccacaatcagcgcagtcaacaacgttcaggctgtggcaaaacagatccagcagtaccagacgcagctgcaacagtatgaaaacatgctcaaaaatacagtcgcacctgcagcctatatctgggatcaggccaattcaaccatcaacaaattgttgcaggcgcaggacactcttaattactacaaaaatcaggccgggagtcttgattcatatctgaaacgttatcaggacgtgaattactaccgctcagcaccgtgctttaacagtaatgttgattgtactgcggatcaaataagcgcactgcgcaaagctgaacagaacagttctgaggcacgtaaaaaggccaacgacgctgtgtttaaggctctcgacgaacagcaggaaacactgcaaagcgatgctgataacctggcagatttgcaaactcaggcaaccggcgcacaagggcaaatggaagctattcaggccgctaaccagcttgccagtgctcaaacgaaccagttgttgcaaatccgctcacttctggttgcccagcaaaacgctgcagcaacactggcacaggctcaggctgataaagaagcccaacaaatagtcgctgatgaaaaagcgttagctggcgagaacacaccaagcccgaagcgaatttggtga

SEQ ID NO: 288159 - DNA, 3204 bp, Morganella morganii
atgaagcaatccgcatacacatcgattcgagaaaaacgtcttcagccttggaagggtgaagaagaagtccggtttgcctggaacaaggccctagaagacgcaacgggtttacatctttttgcagaacgtgatcgtaatgatgctagttacaatcacgtcataattgaatacaaagcgcctggatattttaaaggcaagaaagatagtcctgcgttcctgaatgccacaaaagagcggctgctaccttatatagtaaaaaaagcaacagagacaaaaatccctgagtcagactttatcggtattgcgatagatggagaacatatttgttttgcccaagtcattaatggtgagatcaatacccaacacttgatgccattttctcctgaatccgtagaaatggtagttgatgctcttcgttcggatactcgtaaagggcttactacagaaaatttactcgctgattttggtcatggttctgctaacgcgagagccttcatgcagcagctctccaatggactcgctcagcaacttgctatcagcggaaataacaaaataaaaatgctctttgccgaatggcgcactttgtacggccaggttgctgacctttccatagtgcaagctgaagccattacaaaagagctgaaatttacttggtctggatcaccatcagaatcaatttctgctcggctctttgttcttcatacctacaactcaatgctgatcaaactgctggcagctgagataatctctgcgcatgggctgacttcaatagaacaaccagcgcaaagcatggcagcattgaagaatgacgctcagatgctcgagtttctcggctcagcgatagaacgctccactcttttccaagaagcaggaattaatggcttcgttgaggaggccattttcagttggtatctcgatgttgccagcttgaatacggtccctgaattgctaccaaccttaagacgcttgctttccgttttatcactttaccgtcttgatcagctctctcaaacacgtgatgtattacgtgatttgtatcaagggttggtaccaggtaaattgcgtcagagtttgggtgagttttatacacctgactggttagttgacttcaccttgaataaagtcagcgagccgagccttatgacaaaaagagtccttgacccaacttgtgggtcaggagcttttttactggctgtcattcgtaagaagcgtcaattggctaaagataaaaatcttagcgccagggaaacattgaaacttatctgtgacactgtatggggttttgatctcaatccactggctgtacagacagcaagagtaaactttcttattgaagtcgctgatttattatcgcaatgcccgggccaagagctagaggttccagttctaatggctgatgcaatatattctccagcatcgacacccaaaacatctgatgccatcattcagtatcgtattggcagccaatttgcaaagctagatattcacttgccagctgctctggcacttgatcgcatcaaccttgatgtcatgtttaatcgcatgggtaaagatgtcgagctggggctcgattttgatgagtccatggataaagtgaggaaagcacattacttttccaatgatcagctcaaagaatgggatgcccctctgcgttacacatacgatcaaatattaaatctgcatcgccagaattggaatggaatatggttcagaattgtcagaaactttttttggtcagctaccgcagggcaattcgacctagtgatcggtaatccgccgtgggtgagatggtctaaattaccagatttatatcgtgagcgcgtaaaaccgacatgtgagcactacgggattttctcgaatactcgaatgcacggcggtaatgagctcgatatttccgccatgatcacctatacagtcgcagacaaatggcttaacgccggtgggcgtctggcatttgtcatcacaggtacgttatttaaaaatccatcatcagcaggtttcagaacattcaaaattgagccttcacgcgaggattctttatacattcaaccgatatcagttgatgatatgaaaggtctcaagccttttgaagatgccagtaaccacacgacgattgcggtattcgaaaagtcaaaaaatacgccagaataccccgtatcatatcgagtttggagtcctagtatcggtaaaaaacgggctataaaatcttcgcagactcttgaagaggtcatgggcactattcagtatgaagaaaaagaggcctttcctgttaatgaacctggttcaccatgggcgatattagcaccagaccgatttgaagcgataaaatatctatcccgtcaatgctcatggaccaagggcaggaaaggaattacaaccgaccttaacggtgttttcttcgtacctatcctgaaggtgaatgaaaatcatgttcaaattcgaagccgaccagaggctggtaaaaaagatataggcccagttaagcaggcttgggtagaggctacagatctttaccctctcattaagggggcaggcgattttgatgagtgctatctcaaaatcgatgcgcctgattttgacaataaagaccgtcttttcacatttgttcccaatacagggatatcaactgccgattatgcagaagcagaagaacgcctaaataagcatgagcttagaaagactgcagcttggttcgattcatttgaaccagttctgcaagcacgttcaacttatcgcagacaaatgaaaggtgcacctttccatgccgtatataacgttggtgattacacatttaagccatggaaggtcatctggcccgaaatgtcttcgtcattctatgctgctgtagccgggagtgccgatgtacctctaataggaacacgcccttacatacctgatcataaggtctatttctcagcctttgatgacaaagaaacagcctattatctgtgtggactattgaattctcaaactgttcaggaatggattaatgcacataatgtttcaatacaggttgctgacgtgtttaagcatttagatttacctaaattccaaagtgataacaatcttcatgttcgtctcgctgaacaagtcatgtccgctcaccaagagcacaacaaagacacacgcaaatctatcatcagcgaaatcaaaatattggcggaagatatactgacaaaatggagtaaacaacttccgggataa

SEQ ID NO: 288160 - DNA, 153 bp, Morganella morganii
atgaaacaatttgacggtttgcagtcactgcagcaatcgctttccggtctaccgctctgggcatcggagcgtattctgcagcggataaaccagcttactcactacgagcccgtgatcggcattatgggtaaaaccgtggccagttttagttga

SEQ ID NO: 288161 - DNA, 1320 bp, Morganella morganii
atgtcgatagctcctcaggtttttccacacacagctatttctacgtggagcggatttgtctatcagggcaagctggcgttataccattgcctgaatatgatgtccgcaagttatgaagcaaatcgggatttgagattgcaattggaaagccaagatgacttcgcaatttttcgtggtcaacaatgcttgtcaatgcaccaagttaaagcatacaaggacacacgcttttcagcttaccgggaaggaatctcgactcaacgagataatgcaaggcagcgaggagccgcactcgcttattttcatgttgcacgccaaataacggatatcccggctacgtttgacgcagattatgtaccagtgagtttttatacttatcccgttttgcctgatgataatgccacgcaatccttttgcccactgaatgatgtggacagattgattcggaataagcttgttaacctacttagctcactttctgaagttgatattctgcctgcttggaaaattaatctcgttgaaaaaattcagaatgcgcttgaagccatagtgaattcacaggtcattctaacccatagcaagatacatgtgtccactcgtcatcaggccgaaattgcagccaacgaattcatcgagttttcagaactgtatgatgtaatcgaagcagatgattatgctccgtttgaggatgaagcattcttccttagccgtctgcagattgatattggtacatactaccaggagttttgtgaacgccagaacggcctctcccaggcagcatgtaaaaagttagatgactatctggctgctatcactgcactagatgttgaaggaatgaagacatttctgcgggcaactatgccgcataaaaaagggcgttttaaaacacttagtgaatttaaggatcaatcacttgatcgtgatgcaatgcgactaggaatgtttacgattttctggaaactgattcaggctgcacgcaacgaaggttcgaatgttgcattctcgtggctaaatgacgggcttttctattatccaacaggtattcaccatgctgcagagcatcaggaaagtatctgtcatgacataatgcaacaggcaattagtgaagatgtggagtgtttatttgagtgcggtgcacttataaccagcgccatagacataccttcaatctcagatgtactcgtaggtatcgactctactgagggagtggatactgctgaacacgaattgctgagggaaaatcgtatcggtaattataagaaggtgtctatggtttctttaaacaatgtacctgagagtttgaaagatgcagaacctgattga

SEQ ID NO: 288162 - DNA, 3561 bp, Morganella morganii
atggaaagtgataaacataatttacttttttcacggatagttgagcaggcacttccgggattttcagataaattatcagcaagaaaaaatgaaaaatcggttattacccgtctgaagcagggaaaaaaagggctgatggctgactatctcggactcggatatccggatgctgaaatattgcataatcgtctggcagttgcagttcatactgtggcccgtaaacaacgggaattacgtcagatcagtgagtttcgttcaccgcgcgaagaaaaaggactgaaagcattaaccctgcaattaacttatgaagatcaattctcgccaaactgggcgggaaatactttaccggatgcgatagattcaggccacggcgctgttgcttatctttatgacctgcttacatttgtggaaagaaagattgacccggaaggagacagtgataaagcgatcacactcaaacagcgcagaccggatatttataatattttactgaatgaagagaatgtaaacggaagtatttccaaaattcagattattaatcaaattatcagtactgcaataagtcagcaggaaaaaaatgaagatcctgagaaactgatgctgaatgtgcgctatccttaccggtttccgtttgaaaactatctgaatcagatttatgccgtattggatgagtatgatttatcaataggtgatattaaacggcgctgtgatcctcaggcgccttatttcacacagccgggtttgcacgggacgaattcagattctgcactctggctggacagccatttaggaccgggtctgcgtgaaattttgctggcggtaccacaagtaaaaaatagccaggaagaagataatacgccatattttaaacaaaactttggtgtcgaacagtttacggacttgctgaacagcacggttttttgtcagcaattaaaactggagcgaagtgatctggagctattgttttcctgcggggaatatgtaccgcatttatctcaaaatgttgatcctaaaacgattacaggctatgaaactgagcagggaagagaggtttctcccgctgtatatggatcagtttttattaataataatatatctccggctatcaaaatcgacagtaatatcagtgataatcatactttcgaaaatatggatgagagccggtgcgaacgtattgaacgttttttacgtctttcccgtgctctggatttaccgtataacgagctggatacattactgacttctgttatacgggctgaacataatcaggtagacaaagaccttactattaccggaaataccttgcgggcaatcggtttatttgtgagccttaacagaaaactaaaatgtactgtcagccagttttctgttctgtatgatggtatttcaatttacagtcaggggaaaaacatcagtgattttgaccggttgtttaataatgatgatcgctttagttaccgttttattattgatgataaaaagatggaagagcgggatattaaccgcatatgcagtgtatttggtattaactatgataccttttcctatctggcactgctgacccgggaagttctggggctggatgtattaacccgcagccggaaagttatttctgccatttatcgtcctgtaattttggctgacctgctgaaaataaaaccattggaattactcgcattactgaaatcaatgaattccgatgctcagtttgatcgtttatttaccgggataccggaaaaccgggtttacggagtatttgagcaggcggatattaccagtgcgattagtgctttggtcagtatccatgcatggcggatagagaataaattatcggtagcacagatctttaactggattactcctgcaattgttgatgagcaggaagataatactgaacgggaactattccgtcagattaaacaaaatacagaaaatatgttattcagtgatgaggcattacatcttgccggggtgccaaaggatatagaatgggtttcattattacatattttgattaatgatcagggcattgttaaggacacggatgacggtcttgactgggaaagttataaatcctatgcactggatattatcactcaggtggtaaggaaagaattagtaaatacaacgacagaagaacagggtaatgttattgatacaattttatcgatacttttagaaaaaaggtctgctcagtggaaaagtgtgagtgggttacttgagggatatctcggaaataaaacggacagtattatcccggcattgtactggtgcggaagtaataccagctattttctgaaaaacatcctggatatacctgatgataatatgttgtctgcggaggggaataagataatgaggttattgtcatctctgcggcgttatagtgacattattgctcatttccgtcttgagccagccatgatgtcacagttattatctcatgataataataaatggtacggaatgaaaacagaaaaacctgatttacagttactttaccggctttctgtatacaggaagttgattgatgatggtaaacaaccggctgataaattattaaattatctttctcttattaattcactcccgatagatagccgcagtgatgaaatacgcctgtatcgtgatcaggcactgaataaattatcgcttttcatgggatggagtattaatgagttattaactgcagcacagtatgtcgcgccagaaaatgccatcatccggacattaccgcaaattattctcgttaaacaaattcattcagtctgcctgaaaacggggatgagcgcccgcagtgttatttcgctgtttaatctgaatgaagatagtaaatcatcactgtatcagtctgttgctgatcaggtaatggaaagtctggctccgcaggatgtatcactttacagcaatgatgaatccagtcagggtgacctgaccgtaagtgtttcagccgggaagacaacactgctggtttacagtgaaaatcaagaagaagagcaggtggcggaagatgaaacacgactgactgttaccttgcagacgctggaaagtaagccgctggagggaatacctgtttcatgggaaaaaatatctgagcagggtgaattatccggaactgaaagtacaacagataaatcgggccgggcttcaatgacattaaaagccgggcagcagcagggggttgcattaattaaagcacattatggtgtgaagaatataccgttacctctgatcagaattgattgtgatatcagtacgctgggtgcaacaggtattgagaccgtaccggaatatccggttgatattccggcagacgggaaaacgaaggtcaacattaccgcattcttccgtgacacctacgataacccgggaatagataaaaatatccgctgggaaacaaccggaggccgttttatttataaaggcggaattacagataatcacggaacttgtcacgcaatattagtcagtgatgaacctgctgatgtcacagtgcgtgtattttatgaaaatatacctgaagaatacactgaagctaatatttcttttatttcagcatag

SEQ ID NO: 288163 - DNA, 2355 bp, Morganella morganii
atgaaattgatcgttaaacgtctaaaagtacgtaattttaaagtttttgagaaactagagctaattcttgaaagtgaacatctcgtcgttcttgatggacctaatgggttcggtaaatcgtctttttttgacgctttggagctgctactgacaggaaaaattcggcgctatattgaacttgaagagataacagtagaccgacgtagcttgaaaacgggctgcccatggttatttaaaaatgcgaaggatgatgattggctttcaatccgtgccgagatcttggttgatgggagcattttttttctcgagagagcggccagcaaagcagtgttggatgaacataaaggtgttactgatttaaagcttcctctttatgaattaaccgatttcaacgccgagcgaggtgaagccatttctcaagaagaatcatatctttctgccttactcggagaacagtataaacgtgatttcgaattgtttcattatgtagagcaagaagaaaacactcgattgctaaaacgaaaggaaaaagatagacagggccagattgcgcatcttttcgacattggtgacatccaggacaaaattaataatattaatttggcatcaacaaaaattggtaaattgtgtaacccacagaaatatgccgaattgaaacagcgtagagacaaatgggaatcggctaagcagcagatgttaccgacaggtatttcagttgcatatgacaggattatcactattacagatcagccatgggatcgtgaggttttggaggtcgatgtacaacaattcgaacagtggctatctgcagatggagaactattccgaattcgacgttttactgagaatttcgaacaatatgaaaatcatttatataacaatgaattgatgagacttttactccctaaaccggagttacaacagcgattcttgatgtattatcgacctctcaagcaaagggaaaaatggcaagaggaagttgcttgttttgaatctgctttggcactaagtgaagaatttaaaaacacaataaaggccattagtgaggagcgtttggtgattgctgctccgctggttaacctccttccagagaccctttcgtcagaggagtttcatcaacaggttgctgggctcaagctacagttagccaatacagataaagttcaggaatgttatgcagctttgctccagacgcgtgagcaaatggtaagtactttcagggaacatcaatcccactgcgatttaacgaatatttgtcctacgtgtggacacctttggccgaccgcagatgcattacttgaaggaattgaaaaccagcgtataacgctagaaaatttagccgaacaacaaaatgatcaattctcaaaagcattagctaattttagacgaaactggcaggagcccattgaaattgttctgcagaaatatctggagcaaaataaagaaagtattgaacgtaaacgtcagcttacgagcctctcagaagaacaaattcattggctggaaaattatcataaacatctattagctgcaggtatcaatcttcaggacttattgagcgagaattttgaacctgtaacgcaacacgtgttagatgaacttgggcgtcgagttcacgaaaaatttagaccagtggatgatagccaaatccatgatgacttcgagagaatttttcgcgaagtatttaacaaagagtctgtagcagttaaagaagttactatcaaaaagattgaattaaagaaagactatttaggacagcagcaatctattgcattgtctaaatatgtctcagaatgtgagtcggagtataataaagcagaagcactaattaaaaaagctgataagctgaaaggacatttgcagaaaattaaaaaggtctatgaaagtgagaaaagattatatctcgaatctatagttaaagagatagagattctatttcatatctattcaggtcgtcttatgcaaagttatcagcagggattaggtatcttcatagaaaatgatggtaattctatcgctttcaatgaaactccagggcatgagtatgatgcagtcttttccatgagttccggacagctttctgcattggtactatcctttacccttgccttgaatcagcgatacgccaaacactctttgttgctcgtagatgatcctgttcagactctggatgaaattaatgttgcaggctttgtcgagttgttacgcactgaattccgagatcgtcagataattatgtcaacacatgaagaccgtatgtcagcatattttcgttataaatataagaaatttggattgtcagcaggaaggatcaactttatggaagaagctcgttcaaatattgttagtgaataa

SEQ ID NO: 288164 - DNA, 258 bp, Morganella morganii
atgaggacgataaatgctgcaccttcaactgtcggagagattttatacgaagaattcttgaaaccgttggatatgcctcccgcaagacttgctgaactgatggatacaacatatgaaaaaatttgggaaataattaaaaatgagcgagatataactcatgacgaatctactcaactctcgataattttcaacacagatgcatatttttggattaaactacaaggcctgcgtgacacatggtttaataaacaaaagtaa

SEQ ID NO: 288165 - DNA, 312 bp, Morganella morganii
atggtaaaacgtataagacggcttttcagcgcagaattcaaacttgaagcggctcaactggtgcttgaccaaaactattccgtggtagaggccgccaacgcgatgggcgtcggtaaatcaaccatggacaaatgggttcggcaactcaagctagaacgcaagggcatttcaccgaaagcgtcacccatgacgcctgagcaggttgaaatccgtgaattaaaaaagaaaatcgcgcaacttgaagagcataatgagatcttaaaaaaggctacagcgctggtgatgtcggactctctgaacaattctcgctga

SEQ ID NO: 288166 - DNA, 186 bp, Morganella morganii
atgaatctaaacactcgttttgaaagatcgacatttaaagatattgatccaagggagggagtaaactataccctctatgataatatgttttcgaatgattgtgatctaaatttaattaagcatttgatttcagaaaaaaacaagaagctcaaaactctcttgattcgattcgcagtgatgttttga

SEQ ID NO: 288167 - DNA, 366 bp, Morganella morganii
atgaacaaatatcgtgacaagtcagattttgagattaattgccaagttctggcaatatttgaaccagatattgaacacatgtgcttaagcaatgatgaaaagtcattttatcattgtggatttgatggtaatggattctatgaaactatcattccagactattgcaacaacccggctgacgcataccctattatctttgaaaacaaaataaacattaatttcagggagtcaataaagactggggtaatggtggaattgtctggttggagtgaggtttattcaataaacgaaaacccactacgcgccgctatggaagtattcctgatgatgaaagaggcggagaatgagaataacaacaacagttaa

SEQ ID NO: 288168 - DNA, 942 bp, Morganella morganii
atggcaaacgaactggtcgttatcgaaccagcgacagcgctcgacctttttacagcgccggataaggttcagatactgctgtctggtatccgggagaaagcactcgcagagcaggcattactcgatactgatttatcgaaagccaagaatcgcgatgctattaaatctctagcctacaaagtaacgcagtcaaaaacatacatcgacaaagccggaaaggctgtcgttgatgagctgaaagaactgccgaaaaaagtggatgccagtcgcaaacagtgccgggatgagctcgacgcactgagcgaagaaattcgccagccggtaacagcctgggaagatgcagaaaaagcgcgcgtagcagcggaagaactggttaagcaaattgagcgtgaccatgaagaagcattgcagatgaatgagctgtatgacctgcgtaaagccgaagaagaacgcaaacgcattgagcatgagaacgaaatcaagcgtcaggcggcagagcaggcacgaatcgaagctgaacagaaagcacagcgtgaccgtgaagcggcagaacttaaagccaagcaggagcgtgaagctgcggaattaaaagcacgacaggaagtcgaggccgcagctaagcgcgaacgtgaggccagagaggcgcaggaacgcgcagaacgtgaaaagcaggaagctatcgcgaaggctgagcgtgaaaagctggccgcagtggaagcggagcggcgcaaggcagaggaagccgaacgcgcacgactggcggagattgagcgccagaagcaagaagaattgaagcgccaggcgaacaaagagcatcagcgcaaatttaaccgcgaggctttacaggcactgactgcagcaggatttgacgataaaaccgcaacaaaattccttgagatggtaatcaaaggcgaagtccctcacctctcaatgaactactaa

SEQ ID NO: 288169 - DNA, 231 bp, Morganella morganii
atgacattcgtagttgagtatgaagacggcaaggagccgaaaatcgaaaaggatttggacgtgctgggtggtcggctgactgccgcggcattttacgattaccgggatgacttgctgggtgaggatgaggccgaagcggttaatgaatgcctcggcaattctgattttcatgaggtgtgtgattttcatggtgtcagtgcagagtcaatcctcagaaagctcggaaactga

SEQ ID NO: 288170 - DNA, 1083 bp, Morganella morganii
atggcaaacgagcaataccaaaaaggaaagaaaaaattatcctactcaaaaactcaaataaaacgagcgggtgaaaatataagaaaatccattgatattgaggaatcagttgagattataagaaacttcagagcagctcatttatatccacttatggttataaagaatttagtatggagacatgctaaaaatcattcaccacgggcaattatagcaagaagattaaaaaggctcccaactattatagataagctatccagaaaaacattagatgggaaaagcgaaaactctatagcaataaccagaatgcaggatattggaggatgcagagtaattgttgaaaacaaagatgaattattaaagttgaataatgcactaaacgaaagtaagacattacataaaataaaaaaaataaatgattacaccgctcaaaaaaagaaaacagggtataggggaattcacagagtttaccagtgttatggtaataaagatatccatgactggaagggttttctcattgaagtccaattgcggacaaagctacagcacttatgggctacaacaatagaagttgttgatttatgcgaaggtaaaactcttaaaacaaatccatttactgctgataaagattggatggagtttttccaagtaatgagtgattttttagctaatgatgatggatttatcatgctagataatagagaaaaactaaatttaaaaaagagactaatatatttaaatgataaattaacagctattgataaactactttcattcaataaagtattttcaaatcaagagctaatgaaatctcattcaaatcatcgatttgtagtgttggctatcgataaaaacaaaaaaaccgtgttatgttttttctttaaggaaagcgaaaaaaaacatgcattaaccatgtattccaaaatggaagataatgaaatttataatggcctatttgtagaaattgatgatataaaaaacctacaaaaagcatatcctaactacctgattgatactactttttttgtcgaaaaatataagtactacacgacatcaacttactgggtaaaccccaagagataa

SEQ ID NO: 288171 - DNA, 426 bp, Morganella morganii
atggctttacagaaagagcacagtttgaatggctttgtttttactcatgacctaaacagttttggtggcaggtgggttcgagactggtactttaaacctaaagatgctaaagagtggtgcccatattatttgccttccgtgacggttaaaaaaaatgatgttgttgagtttttaaaaaagaaggaagaagccaatgattactataataaatggctgctttctgcaagcgatgttgaagcagctgaaaggcgactacagcttgcacagcaacgagttgaaaaggtcactgaccccaattgggactgcaagggcaataacccgaacaaagaaagtagaataattaaaaatgcgatgagtgaattaaatagtgctaaattttctttagaaagagctaaagcattgaagaaaaggctaagcggtcagtga

SEQ ID NO: 288172 - DNA, 345 bp, Morganella morganii
atgaaagcgttagctattgttgcgttagtgtttgcggcattatccatttttattccactcggcggggtgtttatcgctatgttgtgtagtgtgcttgccttaattacattttacaaatacgctacattatccggaataacatttggattaaatattatttctactgcgtttttgacgccaagcatcgcaattaccgcggctagcatgcatcagaatggtgagaatggtattggtttgtattggttctatgtcgggttccacatcgttctgtttatcgctgcggttattgtttctatgattctcaagaagaaggccgctaaaaaggcagcagtagcaactgcatag

SEQ ID NO: 288173 - DNA, 360 bp, Morganella morganii
gtgaaaaaggttgttgcaatattactcgcttctgttgtctcatcgtcggcgcttgcatctagtggcagtctgaatgatttttttgataaaaaccaaaacctgaaaaaaagtacggcgcttcgtatagccatcactagccaagcagaaggaacggcattaatggatggcgaaatggtatcttctgggtctgaatacatgaaagccgtaaaggaagtgaaaggtaagatgcgggaaaatgggtacgattatgctgttatcgcagtgagagagattcaatcactttgtgaaaacgacatggccgacatgtactccctatcccccaaagactgcgaactcattaagcagtacaaagaggattga

SEQ ID NO: 288174 - DNA, 4578 bp, Morganella morganii; identical to SEQ ID NO: 283295

SEQ ID NO: 288175 - DNA, 474 bp, Morganella morganii
atgttgaaaggtgaaagagtagttattaaaaaagatgatattttttggggtaaaatagtcttgctcactgatcggattcaatctctttcttataataacaatataattatctatttgtatttaaaagcagttgccttatttcatttaggtaattataaagatagtgatgacttatttaaaaccttatctaggaactctgattcaatcagtggttccagacgagtgttcaaaagtttcttaatggcgaataaaaatgggattcgtaaattttctggtgagataatacaccttgatattgtaagaaatagaggtgaaatttatattgatgaaataaacactaaaataactatactccctagtgattttggcctatcaaataataacaaaggtgagtttataaatgatttccatatagcatttaatttcatcaaccctgtcgctgacaacgaaaaattttacaaaggtcatttataa

SEQ ID NO: 288176 - DNA, 903 bp, Morganella morganii
atgaatatagttagttgcgaaagaaaaattgatgaaataaatagtgttctcaccgtgttattcaacgataactctatattattcttcccaaaaactaatgttataaagccagatttttccaataaagaattatcatttctacgattaatatcgtggctgtatacaatttattttgaagttggaaaattatctttaagtacaataaacaaatccatgagtactgaagaacaacaaaaatttaagaaacacaaaactgtggtacaaaattatagaaccattcttcaacataatattgatgtatcctcaagtacacgagactttaaattgtcaaaagactgttgtgcttgggccaaggaaacgtgtggaaaaaacattcctagcacagaagatgattgggcaaaaatgtccgaagcgatgattaatgaaaccaatgaaatattttcttttatacttagaacattagaagacatgactgattcccccttgaaaaaagaaattttcatgagcaactgggaagtcactgttaataaaaacataccaggtcatgaatttgacaatcacattcaaagaatcattaattttattgatgtaagcagttttgatattgtgtcataccgaaataaaaacatagaaagctggagaaaatatatatatacactggattctagcgctgattatagctttgaaataaaaaaaatcgtagagtcatccattattaaagattttattcatgtaatcccattttcaattgatataatagaatccaaattctatctatcaaaagagatatttaaactaatttatgaacatcttgataggaaattactttgcagcgacgactgcattgatgaaatattaattgatatacaagaaaaatttaaagaatataaaaaaagcaattag

SEQ ID NO: 288177 - DNA, 915 bp, Morganella morganii
atgacaatgttatataaatataccacctgtgatttgggtttaaaaattatagataatcaatcattttattggtcaaatgtttcaagctttaatgatccattcgagtgtctttatttaactgagaacaatatccagactcacgccagaactatcgctgtttgtttatcaattggttttccaattttacagactcaagacattggtgacttaatagaaaaacacaacaacaacccaaaaattaaatcactatccacactgcgcgaggtaataaatgaatgccatactaaatacatgaaaaacaaaacttcaaaatgctatttcgacatagaaaagaaaatatataatacgctaatagaaaataaagaaatgatgccggattttgaaaaagtctttcttgataactcttattcaaatgcatctaaaaaaatatttaataaacatggaattttatgcctctctgaatcaaaaaataatatactgatgtggtctcattatgctaaaaatcatagtggagttatgttcgagttaaataaaaataaacttgaactagatcaatcaatctccatggaaaaaataaaatatcaagataacatccctatatgtaactatgatgaacttcttggtataaacccgagcctatcagaaaacaaaggacttttcgaaaaaagtattttaataaaatcaggatcttggtcatatgaagatgaagttagattattaagaaaaatatcaaatgacgataggttacatccatttccaaaagaatcgtttaatgccatttacctaggttgtaaaatagaaagtgagaaaaaaaaagaaattataagaaaagtaaaagaaacattacctgaaaccttattattccaaacgaagataagtaatagtgattacaaattagatagttatcaaatctaa

SEQ ID NO: 288178 - DNA, 699 bp, Morganella morganii; identical to SEQ ID NO: 277961

SEQ ID NO: 288179 - DNA, 195 bp, Morganella morganii
atggaaattacaatccgtatattctcatttgctatatttttaatcattgcatttggtagcgttttaattattcagtatgttgttgtgagcaaaatgttccctgtttttaataattactcattacgaaaaagaacgctgattatggttatcgttttatttatatcaatccagattgcaatgctcttgaataaataa

SEQ ID NO: 288180 - DNA, 1068 bp, Morganella morganii
atgagcggaggtatttttgaaggagttgaaaagaaccttatcggtgggctgactaatgtagctcaagggcaaatgatgatctactccaatatgatgatggggctggcggtaatgtcagctacaatctacatcatatggcgaggataccagaccttagctggcaagctctccacgccagtggaagacacaatgtgggacattatgaggatggcgatcatcctgtcctttgtggctaatttgggcggttatcttgatggcgtgattgatgccattaacggactgaaagagggcttttctggaggtgataacatttggcggatgttagatagtctctggcaaaacgcaaaattcttgggaaaaacattacatgatttggatgattcagaatttattaaagatgagggcacaattgctgaattgtttgtatggggtggtacttttgcgctgatgattgtaacggcttttgtatcaatggttgctgaaatcacgattatgttactcagtgtcactgcgcccatattcatcttttgcctgatgtatggtttccttcgccctatgtttaacaactggttacagaacattttcgcagcaatactgactatcttgttctctgcgctttctctgaggattgttattatttatacagattcagtaatgacaaccgctatagacggtgctgcgagggcgaatattgttcaacttggtgcccaggtatgcttgtctggtatttgtgcggcaatattggtgtatatctctgcaagaattgcttctgcactggcaggagcgagtgctacagccactatgcagggggcggcggctatcggtattggcgctgctgcatacggtgttggaaaaatggctggcggtgccaaagacaaattggaaaaaaacattgatggctggaacgcccatgatgatggtgccaaaagagcgcccaaaggtggagcattaggttataacgccgccaaggcacgtaaatacgcgattgagcagatgattgctaggaacgaagcgcgagaaattgctcggtctagggaagaggctataaaaaaatacggagctaaataa

SEQ ID NO: 288181 - DNA, 279 bp, Morganella morganii; identical to SEQ ID NO: 25471

SEQ ID NO: 288182 - DNA, 225 bp, Morganella morganii
atggctgacatgaagactaccacacagacccgtgtaatcgatctcgagatccttgaggaggtcatcactcgcgcagaatttgcgcatagtctggctggattaattactgaatccgctaattttaaaaaactttcagagcatcaacagaacgcgctaatggcattaatgacttttacgtatgatgtcaaaaatgctatatctgaattaatgaactcagccgagtga

SEQ ID NO: 288183 - DNA, 969 bp, Morganella morganii
atgtcagaagataaattcctgtcggagtacagcccgaaagattcggtttgggactcacatcgtgcgtttactgattctgtcggtggtatttaccggagtgctgctgaatttgagcgttatgcagagcgtatggcctcctgtagcggtttattgcgttttggttggtctacgctcatggagactggagagacgcgcttaaggcttcgtagtgcgcaattctgtcgtgtccgtcattgtcctgtctgccagtggagaagaacgctcatgtggcaagcccgtttttaccaggctcttccaaaaattgttgctcaattccccagttcgcgctggttgttcctgacgttaactgtcaggaactgtgaaatagggattttaggggatactctgacactaatgaatgccgcatttaaacgtatggagaagcgtaaagaacttgctcctctccaaggatggattagagcgactgaagtaactcggggaaaagatggtagtgcacatccgcactttcactgtttgctgatggtgcctccatcatggttctctggtgttgcttatgtcaaacaagctcgttgggtggagctatggagagattgtctacgggtgaattacgaaccgaacgttgatattaggactgtgaaaatgaaaacaggcgaagtagtggccaacgttgcggaacagctacagagcgccgttgctgaaaccctgaaatattctgttaaaccggaagatatggctaacgatcctgattggtttcttgaattgacgcggcagcttcataagcgtcgtttcatttcgacaggtggggcacttaagaacattttgcagcttgacagggaaaccaatgaggatctggtcattgccgatgaaatgggggatggcacagatgatggcaaacgtactgcgtttgtttgggattccgggaggcgccgttacaggcgcgccccggagaaagatagattcgataactga

SEQ ID NO: 288184 - DNA, 192 bp, Morganella morganii; identical to SEQ ID NO: 278789

SEQ ID NO: 288185 - DNA, 312 bp, Morganella morganii; identical to SEQ ID NO: 282883

SEQ ID NO: 288186 - DNA, 654 bp, Morganella morganii
gtgccaaaaccgaagaataaccgggtccgatggctcgagccacgggaagcgaaacgcctgatcgatgaatgcagtgaacctcttaaatctgttgtgacatttgctctggctaccggcctgcggcgctccaatattattaacctggaatggtcacaaatagatatgccgagaaaagtagcgtggattcccccggatcagaccaaatcagggaaagcattgggtgttgctcttaacgacactgcgtgccgcgtcctgcgtgagcagataggcaatcacacaaagtatgtttttgtgcatacgaaggctaaaaacagatctgacggctcaatgactccggttgtcagaaaaatgcgcgttgacggtaatactgcgttcaggactgcacttaaacgtgccggtatagaaaacttccgttttcacgaccttcgccatacatgggcgagctggttaattcaggcaggagtaccgctgtccgtattgcaggaaatggggggatgggaatcaatagaaatggtacgccggtatgctcacctggcaccgggtcatctgagccagcatgcgcagcaaatcgatgctgtttttggtgaggatgtcccaaatatgtcccacccgaccctgatcgtggttggtgagcacaaaagaaaaacccgctaa

SEQ ID NO: 288187 - DNA, 198 bp, Morganella morganii
atgaaagacagatcgcatgatacggctatggctgagtacttccgcgccgatccaacctatgcagcggaactgcttgccgaagtccgccgcgacggcaacccggccgagctggccattctgttgcggcagatgggcacggcctcggaaggttgcgcgaaatcggattacgccgatacagggggcgctctacctcgctga

SEQ ID NO: 288188 - DNA, 243 bp, Morganella morganii
atgaccgaccatcaaaatgcaaatactgaacgtcgccctcaacgccgtggccgcgcatcgttcgtggcggtactggatgaggtgcggaaggagcacgaacgcggggtaccgctggtatggatttatgaggcattcgcggaccggctcgaaatgggatacacccagttcaccaaatacgtcacacgatacatcaagcaaggtcagccaatcctcgctccctacaagcacgacgggaagcgatga

SEQ ID NO: 288189 - DNA, 900 bp, Morganella morganii
gtgagcaagtatgacttgactcacgcccggcacgacccggtgcattgtcttgcccccggtctgttccgtagcctcaaacgtggcgaacgcaagcgtagcaagctggacgttgtatatgactacggcaacggcaagcgtatcgagttcagtgggccggaaccgctgggggccgacgatctccgcattctgcaaggactggtagcaatggctggaccttctggccttgtgctttctcccgatcctcagacagaagccggtcggcagctgcggctatttctcgaacccaagtgggaagccgtccagcaggatgcgatggtggtcaagggtagctatcggtcgctggcccgtgaggttggctatgcagatatcgacaatactaggcctgtacgcgattgcattgagaggctctggaaagtctctatcattgcgcaaaatggaaggaggcggcagggcttccgtttgctgtccgagtacgcaagtgatgagcaggacggcaagctgtatgtggcattgaaccctcttattgctcgcgcaatcatgggtgggcagcacatccgcatagacatggccgaagttaggaagctacagaccgaccccgcccgcctgattcatcaacgactatgcggctggattgacctcggtaagtcggggcgggtagagctggacacgctatgcggctatgtttggccggatgaaccgacgaacccgaataccatcaaaaaacgccgccagacggcacgcaaggcgctggccgagcttgctgccgtgggttggaagctggacgagtatgctaagggcaaatgggaaatcgggcgacccaaggcatccgactgtaacgctgctcccccctgtttaacggcaccccaccccctgtttaacagtacccaaccccctgtttaa

SEQ ID NO: 288190 - DNA, 774 bp, Morganella morganii
gtggctcccggagccacgggtaagagcttctgggcgctggaagcggcaatggccatcgcgtgcagcgttgccggtggcgatcttttaaggctttccccggccggtactggccgcgtggtctattgcgccggagaagacccgaaagtcgcacttgtgcgccgcattcattccattggccaacacctgaacccgcagtcacgcgaagccatcgcgcagaacctcactcttgagccgatcatgggtaggcgcttgaacgtgatggatgagcggcaccttgctcgcgtcattgaattttgcgccggtgcccggttgatcgtactggataccctgagccgcattcatgatagggacgagaacagcaatggtgacatggcaaggcttgtcgccactcttgagcatattgcggccagtaccggggcgtcagttctgtatctgcaccatgtcagcaagggcagtgcccgcgatgggcagacggatcaacagcaagcggcacgaggcgcatccgctctaatcgacaatgcccgctggtgcggcttcgtcgcaaagatgaccgaggacgaggccaagagcctcagcgaccgcgcctatgaccgtcagcccatcggcaacgaccggcgcggcttctttgtccgttttggtgtcagcaaacagaattacgactctaccccgcatgaccaatggtatgaacggcgggatggcggtgtgttgctgccggtggagctgttggacgccaagcagggcagcggaaaggggcgtcaacgtgagcaagtatga

SEQ ID NO: 288191 - DNA, 357 bp, Morganella morganii
atgaacaaatatcgtgacaaatcagactttgagattaatttgcgtgtagctcagattattttcactgactctgaatacgacgtaattaaacaatcaatggaagttgttaaatttcagaatggaaacggcaaaggtacttgccatgctttcgacccatgcaataaaccggcggacgcaatgccgattattaaagataaccttatatcactcgaacatgacgggatagcttggcaggttagctgtgtgcgacaccctggaataagcgtctgggatggatgtgaaaactacaacgataatttttatcgcaaggctatggaattatttttgctgatgaaggatgcggagaatgaaaaatga

SEQ ID NO: 288192 - DNA, 942 bp, Morganella morganii
atggcaaacgaactggtcgttatcgaaccagcgacagcgctcgacctttttacagcgccggataaggttcaggtactgctgtctggtatccgggagaaagcactcgcagagcaggcattactcgatactgatttatcgaaagccaagaatcgcgatgctatcaaatcactggcctacaaagttacgcagtcaaaaacatacatcgacaaagccggaaaggctgtcgttgatgagctgaaagaactgccgaaaaaagtggatgccagtcgcaaacagtgccgggatgagctcgacgcactgagcgaagaaatccgccagccggtaacagcctgggaagatgcagaaaaggcgcgtgtagcagcggaagaactggttaagcaaattgagcgtgaccatgaagaagcactgcagatgaatgagctgcatgacctgcgtaaagccgaagaagagcgcaaacgcattgagcatgagaacgaaatcaagcgtcaggcggcagagcaggcacgaatcgaagccgaacagaaagcacagcgtgaccgtgaagcggcggagctgaaagccaaacaggagcgtgaagcggcggaattaaaagcacgacaggaagtcgatgccgcagctaagcgcgaacgtgaggccagagaggcgcaggaacgcgcagaacgtgaaaagcaggaagcaatcgcgaaggctgaacgtgaaaaactggccgcagttgaagcggagcggcgcaaggcagaggaagccgaacgagcacgactggcagaagttgagcgccagaagcaggaagagttaaagcgccaggctgatactgcgcacagggctaaagtaaataaccaggcgatgcaggatttaatcgccgcaggcatccccgaaggttgcgcaaaggcatgcatcattgccatagccaaaggatccgtatcatcagtaaaaatcaattactga

SEQ ID NO: 288193 - DNA, 300 bp, Morganella morganii
atgtcaaaattaaaaccgttatcaggacggagtttaaagacagtgagtgcgctgttactcctgtttcccctggcattgttgggaagttgcagcaatacgaaagagacattcgtgcccgcgccggtggtgccgattccgccacaactgaccgctgattgcctgctgccggttattcctgacgaactgacctatggcggcgcaatcctgttgctgaccgatgccatgaagtcgatagcagactgcaatcacgataagcgggcaatacgggagattgaacaacaaaggcaggtgatgaaatga

SEQ ID NO: 288194 - DNA, 468 bp, Morganella morganii
atgatccctgagattgtcgcttctatgtctgctgttcgagaaagcttgaatttgttgaaagttattaatgaagcaaaaaatgaaactgaattaagaaacgccacatttgagctgcaaagaaaattacaagatattcaaatggataatttacggctcatcgaccttgtgtatgaaagcaaggcgcgaataacagaacttgagaaggaaataaataataaaatttcctttgagagcaaggttgaaggttattctccgtatacatttgaatctggtacatttacctatatcaataattctgctattgacggcagcgatgcccctcgatacctgtgtgcatcctgctatgagaaatcgatagtatcgatacttcagccatgtaaaggcaccattgcatttcttcattctttttgccctcactgtaaaaatacatatagaacaaataaagcaccaccgacaaaatttgtgtga

SEQ ID NO: 288195 - DNA, 531 bp, Morganella morganii
  misc_feature (449)..(458): n is a, c, g, or t
gtgacatattccaaagacgagaatagaaaaaacaaagcgatacgagccgatatttacggtgaggcaatgttttttctaatcccagttttaggattattttgtgtttcaattgcaaaaaattcggcatcgataaaagatattttctactatctacttaccacatctgattggtctcttatgtcaacagttatatttggacaatgtgctcataaaatggcaaaaattgttccaatgatgcaaagaaatataaatagctcacaatactctttctatgttgcaaaaagaatattcttgatagttgtatcaatgctaacatattcaattattatatttttcccaaatatatatcttggcattattcaaataataatatttctacttgcaatatttatttttctacaagatagctttgccacccataaactactagataaaaataacacaaactnnnnnnnnnnagccctcccctgcgagggcttttttgtgcctgccccccgtatatgtgatctacaccggattttgacgatttaa

SEQ ID NO: 288196 - DNA, 531 bp, Morganella morganii
atgaggttagaaccgattatagatattgaacaattaggaatattgctgtctaatttttcaattctaaactctagactcaaagatgatgaaagtgcatatattgccgctggggctgtaaatgataatgacttttgtgactacaaaaaaatcaatactagatttacgtttgttggaactgtagatgatgttttatctaataaaattaagcatcataaacgaaagtcaaaattttatgttaatgtatccgttaataaaggagataccgtttggaagctagaagaaatcgaaacaaaaaatatattttcagctaaaatagcaaatgaggactggttggaaaaatatcagtctggctttatagatcctattggccccaaagatctaatggtagccattatagaatatgatgagatacttactacaatagaaaataaaaacaagaaatctaaattcaaaaatgttagaataattgaggttattgatgtaattaagaccaaggggtatcaaagtgacatattccaaagacgagaatag

SEQ ID NO: 288197 - DNA, 909 bp, Morganella morganii
atggaaaaatcaaaaagatatcacttcaccagtagcgatagcttcttcaaaataataatgaggagagagttgttattattcaatgcttttagcatgaaagataaaaatgaaattatttccggactaaatcttgcgacaaaagcgcttaatatcgtttgtagtagatatgaagatagcaacttatcagaatcagctaaaaaggcaaaaaaccacatattatccttatgcaaggatataaaaaataaatacctttgggataattacgctttaaactccaccggtttcgctttagagtttaatgaggatgaaataaaaagcaatatatgtccatacaatgaaaatagatttgaatccggggccatagactggggtgtaaaagagcaattcgttccatacatgactggctttataaataatgaacctataaaaaacgtcatatatgatgaagatgagttcgttaataatttagccaatatcttatatgatagattttcaacaccagataaaaaagaaactgattgtacttcatggattctttttttaattttctcatcatcagcgtcctataaacacaaaggttattcaccagaaagagaaactcgactatttttcagcctatcacatactgctataaactataatttaacttcattttttagcaattatttttatgatatagaaaaactaataatggatgaaaggaagtacattccacttcatttaaatcctttagaggaaacatcaccgaatgatgaaaacaaacataaaataataatgtctgggaaatatccattcgccacattaaataaggttataatcggaagcaaaaacaaatcaagcgtcgatgaaattaaaaatttcctgacaaaaaataatttccctgatgtttttgttgaaaaaatagaataa

SEQ ID NO: 288198 - DNA, 1074 bp, Morganella morganii
atggataatataatcgtagaaatagataccaaaaagcttgattttgaccctcaaaacccaaggtttttccgtcttaatgatgctggtaatgcttcaacagttatagaagagatgctggatgatgagagtgttcatgatctgatgctatcaataggtcaacaaggctatttcccaggtgaacctttattggcagtagaagatggcgataaatatattgttgtcgaaggaaacagacggctagctgcagtcaaacttttaaatggagatttacacgcccctaaaagaaaattaaaaggggttttagaaattattgatgatacaacacataaacctaaaaaactcccttgcataatctataaaaatagagaagatgttttaaggtatatcggttatcgacacataactggggttaaagagtgggattctttatctaaggcaaaatacctaaaagaattatgtgatactttttataaaaatgaagaaaaagatattgttttaaaaaatttggcacgtgaaattggtagtaggccccattatgttgctacacttctaaccgcacttaacttatatgaagtagcacatgaaagtgactttttcgatttaccgatgaaagccgcagatgttgaattctcatatataacaactgctcttggttattcaaaaataacaaattggcttggactgaaagacaagaaagattttatagatccagaattaaatgaagaaaatctaaaacgtattttttcttggtttttcgtgccagatcaacaaggaagaacaattattggagaatctcgaagaataaaagacattgcggcagttgttgaaaaaaacgaagcaatcgatgttcttatgaaaagttcaaatctggatgaggcatatttatatactagtggagaaaaagtagcactagataaagcattaaatgctgctagtgttaaattaagagttgtctgggatatgcttttaaaagccaaagaaataactgcagaacatgaggagtcggcttcagatatttttgacatgtctaaaaacataagaaatcaaatcagaagcaaaagggaggatgattaa

SEQ ID NO: 288199 - DNA, 1029 bp, Morganella morganii
atgattactaatcttgatagtatgccctcgaacgaaccatatttgtgggctgattatgttgagatattggcattaattaatttagaccactcattcagtcgtggagatctctatagcactttacaggctcaacctgaggcgatcttagctgaagctgaggaagcagaaaatgagagcattgatgataccgaagatgaaaatgatgctaatgtacgccgtagagcgcgacggagtgttagtcgagcatacgtggatagaaaatggaatttcgctataaactttgttcggcaacgtattgaactttttggtgatagttacccattcacactttcagatgataatgatacagttgaaatacgtgatattactggattagagttaagccatttagaaaaattatatttagctttactaatctgtgcaaatataaaatatgttcaattaggaagtagaaggcaagtaactcatagcttcgagctaataagcttaccaatatttgaaagtttaatgccaaatggcagcattataaaagcttgctgggctgcaggtggacaacaagcaccatatacaggaaccttatttaacaaatttacaaatattgcttcagatatacgttgcagtgccaactttaaggcccgtgattttagtcgaggaaatagtggtgatggtggactcgatattatagcttggcacccaatgggtgattcaagagatgcaattcctatttcttttgttcaatgcggctgctcgcaagaagaatgggaggccaagcaacttgaagcttctccagcaatgctttatagcaagttccctgtagcccatagatgggcaacgtactattttttacctcaggatttaagatggattgatggtgaatgggctcataaaagtaaactaggcgatgcaatttttgttgatcgcctgagactgattaatctaacaaggaacgcggaatttattgatcacagtatgaatattgaatatttagatactatactaaatattgaaaatgaaattgcagtagcttaa

SEQ ID NO: 288200 - DNA, 939 bp, Morganella morganii
atgcctagtgtagtttcattgtttacgggatgtggtggctcagatgccggtttagtcaatgccggttttaatgtacttatggctaatgatatattgccgtatgctcgtgatgtataccttgctaaccatcctgagactgactatagactaggtgatgttggcggtataacgtctttcccgacagcagatctcctagtcggttgttatccatgccaaggatttagccaaggtggtgtacgaaaggctgatcgaaaaatcaatactctttaccttgaatttgcacgggcactgaaggttatcaggcccaaggctttcattgttgagaatgtttctggtatggttagaagtaatttcgaacacttattaaaagatcagtttaaagtatttactgaggccggatataaagttaagtcaaaaattttaaatgcttcccattttggtgtagcacagaaccgtaaaagaatctttatcgtgggtatacatgagaggtttggggtagagtatacgtttccacaagctcgctacggtgacgggttaatgccatatacgacaattaaagatgcgattggtgatttacctaagtggccaattggtgagttttatgatgctgattttcattggtattatatgtcacgtaaccgccgccaaggttgggatcaaatttctaaaacaatagttgctaaccctagacatatgccactccacccaattagtcccgagttggaaaagctaggacctgataagtggcgtttcattactgatgagccagctaggcgtttcagttaccatgaagcgggaagactacaaggtttcggtgatattatatttcctgaaaccgaacgttcaactatgaatatgaggtacacagtggttggtaatgctgtaccgcctcccttattcgaggcggtagcaaacaatctcccagatatatgggattaa

SEQ ID NO: 288201 - DNA, 648 bp, Morganella morganii
atggaatatattctaagaaaaacaattagattcttatcaaaaaataaatttgaagtcatgtcattagttatttcaacttatgccttgtacacatcaatgagtgctatacgttatacgcaatctatatatgaaaataatcaaaaattgataatatactctgtaaaatacaattccaatgatgactattttgttcttaaacctcttggtgaaaataaaaaaattctatctttagaaatcacataccctaataaattcaatccacaaattgacttaatcagtaccagtgggaaatacaaaccaaatgaagaaatactgaataaattaaaagaactggctaaacaaaaattaaattcatcgagttataagatagacatacctgttaatatagcttcacgatacgctgttgatggcgaagcattgagcgattcatctaattatatagtttctttttatatagatatagaaaaaaaagaagagtatataaatgcaaaacttattgatgttgaatttactttttctcaacgatatccgactggattcttatttatagttttaaattcaatcttccctgatgagagtttggatattgactatatgtatgaaaataataccatatggcaatctattaactttgtcggctttacgtga

SEQ ID NO: 288202 - DNA, 876 bp, Morganella morganii
atgaagaaaaaatctgtacttataactgatctagataatactttgtttgattggtttagtgtttggtatcatagttttagtgcaatgctagatgaggtcgtgaatattacacagatacctaaatctgtattaatttctcaaattaaacctatacatcaaaaatatggaactgccgagtatgcatttgtcttagaaaaaataccagtattaaaagatatatatggggatagaactaaaataagagctgctttagattcggcaattcaggcttatagagctgaaagaaagaaatatctacaactgtatccaactgtaatggatactttgctatttttaaagaataagaaagtaaaggtagttggatatactgaatcaaaggagttttactctaactatagagtgtttaagctagagttggacgggatgattgatattttattttctcctgaagatcatgaaatacctgagggtgttataaaaagtaataattataatttaaagcgtactattaatagacatacaccatatggagaaataaaacctaaccctaatattttaaaagatattgttaaccaactgggtgtttgtattgatgattgtatctatattggcgatagtgaaatgaaagatatatatatggcacaatctgttggtatggattgtgtttttgcaaaatatggaacaagtcattttgaaaataacaaggtgggctatgagcttctgagggctgtaactcattggacagatgaagatgtattaagagaaaaagaaataactgaaaataactcatcgttaaatataatgccaacatttgtagcggataagttttcagatattttatctttctttgacttcgtagaatgcaagggtaattaa

SEQ ID NO: 288203 - DNA, 1320 bp, Morganella morganii
atgtactcgttgttaatggataacatgatgagcagagattacaagcagtatatagaagatgtaactgatgatatcaaaacatgtattgaaaccctggaatgccaaccgatactctttgttggttctggtttcagccggagatacgcggatggtttggattgggctggtttaattaaaaaattaatatctgaatgtcctgaagttgataagcagtttgctttttacaaacaaagaaatgagtctttaattgatattggcagtattttaagtgataaatatgcgagctgggcttggggagacggtagtatacatttcccaaaggaattatttgatgagagctacaaggctagtatctacattaaatatattatttcacaatattgcaaagagttgaagataattgagtctgagcagtgtaaaagagaagtggaatccctacaggaaatttgccctcattcaataattactactaattacgataatgtaataaatgaaatatttccagaatatcaggatattatcgggcaggaggtgttaaaaaccagctacgatagtataggtgaaatatttaaaattcatggttcttgtgaaaaaccaagttctttagtgtttgatagggaagattatgataacttcgttaaaaagaaaaagtatttaagtgcaaaattactcactttttttgcagagcacccattgttgtttataggttatagtgctgaagatgataatattaaaagtataatttctgatatagatgagatcatatctgataatgagacaataattcctaacatatatatgctcaaaagagatgataaaaatgtaagaataaaatatatagtagcaaatgattttacatgggtttataaggcgttcgccgctcagccatctatgaaaaatgtcagtcctaaggtgctaagagcacttttggcaagaaattacaagttagttaacagcgatataccaaagcatacggctcagcttgattactcaagattaacatcccttgcgtgtgaaaatggtgagttagaaaaattatacggaattactgatggtgattcatatgatgcattttcagcaaattattgttatatcatgagtgatctggcatcgcagcttgggtatagcagttggaattatgctcagcaattgttacaaaaaataaaagaagtttcgggtattgatattaaggctacgaataaccaataccatcaacttgtaacgacagggaaaaagggagctgtacacaaatactccagggaagctttacagcttttgatgaaagcgaaaaataatcagccttttgaggtcgatgtttag

SEQ ID NO: 288204 - DNA, 630 bp, Morganella morganii
atggtgaagtggccaaggcgaaaatgcctgatatgccgcgactggtttcacccgaagtttagtaacgaatggtggtgctgtccggagcatggtgctgagttggcaataaagcgacgaagcagggaaagggaaaaggctgaagccaaattaagaaaggagcagcagcaaaaagaacgtgaagcaaaagataaattaaaaatccgcaagttagcagtaaaacctacctcatatttccggcagcaagcacaaacagcgtttaaccaattcatcagactcagagaccgcgatgaaccatgcatcagctgtggtgaacctaatccgcctgatttacatggtgggcagtgggactgcggtcattttctgtctgtcgggtcacatcctgagctgcggtttgaggagcgaaatgcctacaagcaatgtaaatcatgcaatgcgggggccggtaaattctcacacaaaaataacactgtaacgcagaaatacgagttacggctgattgaaaaatttggacaggagttagttgactggttacgcggtccgcatgagataccgcactggaagcgggaagactatatccgtatacgcgatgagtaccgtgcgaaagtgagggtgttaaagcgtgagacctga

SEQ ID NO: 288205 - DNA, 366 bp, Morganella morganii
  misc_feature (4)..(13): n is a, c, g, or t
atgnnnnnnnnnnaagtggctgaaaaacgcgaaagtatgcagtcgttattgttacctccacccgcccagcaagcctttgctgaagcggcgttgacctaccgctttggtgaagagttccagcccgtcacacgagagcaaattctacagcctcgacgctttgaagataaaaaagaagacctttggacggtgtaccaacgtctacaagaaaacctgattaaagggggattatcaggcagaactgcaaaaggtaaacgcgctcgtactcgttcggtgaatgggattgatggtgatatcaaactcaataaagccttatgggtgatggcagataccttatttaaccaactcactccccgccaccccaactaa

SEQ ID NO: 288206 - DNA, 690 bp, Morganella morganii
  misc_feature (652)..(661): n is a, c, g, or t
atgaataaaattgagtctgagtgtttagttgaatcagcattagctagccaactctactcgttcctaggcgatatagatactagggtgagatggcgagcggcacatagtattagagcgtcagccaggatgggtgattttaagacaattgtggcgttaactgctttgtatgaacgtaaatctatgtccggctatcgtgaagataatgtgcctttctattggttgtcagcgcgtctttggctcatcgttacacttgatcgaattgcatctgaggtaccggaagctattgctcctgtcgcacgctggttgttgagcattgcgactgaccaaaacttcccgcatgtactaatgcgccattttgctaaatcctgtttaataaagcttctttcaaacggttttattgactttgatgagcaggaaagaacagcattgcatgctatcaatacttcagaactaactgccaacaaatcgaaacgtagagtttctcgtggaggatttcatgagaaaggtaaagagagaaaatttgaatttgattcgttagataccctccgatatgtatacccaggcgcgatagagtgttttgctgatgttgacgaagaaatttttcttgacgaggcagagtcttggatcatggatcgctgggatagtggcaccnnnnnnnnnnatatgggaaaacgaacaaagaaagcataa

SEQ ID NO: 288207 - DNA, 252 bp, Morganella morganii
atgagcgagtatgtcgaaatagtttgcgttgttgatttttgtacttttaaaggacgtaacagggtcaggccatacgataactctgtattttcttctgatcaatggattgagtgcgctaaagaaattagtcaacaacaccctgtaggaacaaaggtgaagttgtatgtaaaagaaaaagcaaatgccgaccctagtataaattctgaccatctttactccagctataaatggccatataaaatactgaaataa

SEQ ID NO: 288208 - DNA, 423 bp, Morganella morganii
atgtacatcccagttgttatccataaggatgctgattcggattacggcgtaacagttcctgatattcctggatgcttttcttatggtgaaaccatagatgaagctataaaaaatactcaagacgctattacttttcatctcaatggattattagaagataatgaaaaatttgattttaattttcgtagtattgaatcattaaggaatgatgattcttaccgaaatgatgatagtagtatatttacgcttgtaccgttagacacggacagcctgactaatgacgtagttagagtcaatataagttggcctaagtatcttgtatttatacttgatcgcttattaaagaaaaccggagagactcgttctggatatctggctaaattagttctaaccgatattagaaacagaaacgatagtttatga

SEQ ID NO: 288209 - DNA, 132 bp, Morganella morganii
atggctaaagatagtaaaggtagaaaattcaatagaattcccgctcataacagaacattatctaatggtactattgtttacgtaaaagaacatattagaagtaacagaaaagattcatctggtgcaaaataa

SEQ ID NO: 288210 - DNA, 198 bp, Morganella morganii
atgaaacccttattcaaacttcagttatccggtgaaaaaattcaggtcacggacgttaatatcatgctggaactctctgccacctggcggggatttgttaccgtcaaaacagacgcggattacgccggggaactggtgcggctggatgccggttaccgagtccgcagtcagaaagaacccggtacaaaatcagattga

SEQ ID NO: 288211 - DNA, 1257 bp, Morganella morganii
atgaaaaagcaaagggtttctcaagtgtttgttcctgggggaatgccaaaattaacttacgttgagcgtacacaaggtgaaataagagcaaaacttgaaagcgcaaaagataacttgtgtaaattagttacccttacaggccaaactaaatcaggtaaaacagttctaactcaaatgatattcccatttacggatcctaatgtgatctggatagatggtggtagtattaccgcagaaaatgatatttgggaacaagtattagacggattagatgtttatcccagtgaagaagtaaatacttctgatttggcatctacagtagtatcaggaaaagcaaacgtaactgcaaatatcctgattgcaaaaggtagcggtgaacttggagtttctcaaaatgaaggctctactaggggtaaaaaatcagttcgaaatataacttccaaaaatgcagctattaaagctctttcagatagccaagccagtttaataattgatgatttccattacttagacagagatatgcagggtagttttgtcagagctgtaaaaccactagtatttcatggtgtgcctgttgtgcttattgctatacctcatcggagatatgatgctattaaagttgagagggaaattactggtcgattagaaaatattatgatgccatattggtctattgatgaattgaaacaaatagcgactataggttttcctctgttgaatatagatgtttctcctacaatagtgaatctactaacttcagaagctttgggtagtccgcacttaatgcaagaattttgtaagagtttatgtgccgattattcgataaaagagacctctgaacaaaaaataaaaatatcgaaggttgatgattcattattcaaaggtgtagcagagtcaacaggtaaggttgtatttgataaattggcaactgggcctcgtcagcgttctgacagattaatgaggttgttaaaaaatggtgaacgagtagacatatacaaagttgttttatacgcgctctcaaaaatgaaacctggaatgcaaactatccagtatgaagagttacgaagtgcaattcgagatatagtagctgaggcacctccacaggcacatgaagttactcgtgtactggaaaaaatgagtgaaattgcctctaatgaagaagcatctaccccagttatagattgggaacgagaagaacaaaagttacacatcacagacccattctttgccttttatcttaaatggcgagataattaa

SEQ ID NO: 288212 - DNA, 666 bp, Morganella morganii
atgtctcagtatcatctcgaatttgaaaaaccaatcattgagctggaagaaaaaatcgccgcattgcagtcatttaaagagcgcagcagcgatttggggtttgatccggatgatgaaattgcctgcctgcggaaaaaatgcgaaaaactgacccaatcgatttatgcggatctcggtgcatgggagattgtccggctggcccgtcatccgctgcggccctataccctggattatatcagtcttatttttacggattttcaggcgcttgccggtgatcgcgcctttgcggatgataaagcaattgtcggcgggctggcacgccttgaaggccgtccggtgatggttatcggtcatcagaaagggcgggatactaaagaaaagttactgcgcaatttcggcatgccgtcaccggaaggctaccgcaaggcgctgcgtctgatgaaaatggctgaacgttttcatatgccggtgctgatgtttatcgattccgccggtgcctatcccggcgaaggctgctccggcggggcgctggggattggtgtcggtgatcgcatcaatatgctgcaatacagtacctatgcggcgatttcgccggaagggtgcgcctctattctgtgtggaaaagcgcggataaagcgccgcaggctgctgaaaccatggggatga

SEQ ID NO: 288213 - DNA, 207 bp, Morganella morganii
atggggtacgatttaatgacctcatttgccagtgtcgccgcctgtattaataatatggggctggggttcgggttaacagcacccgggttcggggagatctctccggcggcaaaatatctgctctgttttgctatgttattaggccgcctggagatatataccctgctggtgctgttatcggtcagtttctggcgtaactggccgtag

SEQ ID NO: 288214 - DNA, 198 bp, Morganella morganii
atgaaagacagatcgcatgacacggcgatggccgagcacttccgcgccgatccgacctatgcagcggagttgcttgccgaagtccgccgcgacggcaccccggccgaggtggccattttgttgcggcagatggccacggcctcggcaggtgatgcaaggtcggaggacgccgatacagggcgcactctacctctctga

SEQ ID NO: 288215 - DNA, 1953 bp, Morganella morganii
atgatcgcacatcgcatcaaccgtgaacgcaaggcctcaagcccagcccggttaatcaagtatatggtagcggccaagggcggcattgacccgacgagctgggagcgcacggccgattacattctggattccgccaatggcacgaccgagggcgagaaggtcgccagctaccgcgttaccaactgcggcacggatgatccggcagatgccgcaatcttaatccaagccacgcaagcggctaacaccaggtcgaaggcggaaaagacctaccactttgtctattccttcccgcccggcgagcagccagaccttgagacgctgcacgccatcgaagacgaactatgcgctgccatcggcctcgatgagcaccagcgtgtatcagcggttcatatcgacaccgataacctgcatgtgcatgtggccatcaacaaggttcacccgaccgggttacagaacatcgaaccctattacgatcagttccgcctgatggaggcctgtgagcgtcttgaggtagagcatggcttgcaaagaacgtttcatggtctggaggcaaagcagcggcatcagaaccgcgacattgagctgttgccagcgaaagccccagagcagcgcgacagcctattccgtgaacaccttagaaacgcttacgacctcagcatatcgaagcctcctgaagccaaaaccctgaacgggttgcgcaagctgtccgatacccgtctacagaggcagtcagcagataaagcggagccagtccgcatcggcgcgaaggtggccagcgtggaggcgcagtccggcatcgagacgctgaccgggtatgcggcccgcgaactggccccggcgatgcgacaggcgacgagctggcaggagctgcacgacgcagcggcagaacacggcctagaggttcaccagcgcggcgctggccttgtcatcggcgagccagattcaggcatttgggcgaaggccagcaacgtcggccgcgacctttccatgaaggccctaaccgaccgtcttggcccgttccagccttccgaacggcaggccgaggcgaaggcgaaccgcaagcggtacgagccacgaccccggcgaccggacaacccgacgactgcgggcctgttcagccagtaccagcgtgagcgacaggcggccattctggcccgccgtcagggcctcgaccagatcaagcgcgagagtgcggctttcaatgcgcaggtgaggcagtggagccagacagagcgaatgcttttgaaggtcgcgggcaaggggccgaccaaacgcctgatgtacggcactatcaaacagcaggccgacgcctcgcgccagaagaaccggcagagcgcagacgctcgccgtcaggcgctgttcaaacagacgacgatgcccacttgggccgactggctgacgcagcaggccgagcgaggcaacgccgaggcgctggccgtgctgcgcgaccgcgaggaacggacacgccgctggaacggggagctactgaccgccgaccgggccgacaaggccaaggctgtcgttctcgacaagctcaagcccaaggcccggaaagacgggacgatggcgtacagcaccatcgacggcggcatggtgatcgaccggaagacgcacgttcaggcgcagaaagccacgaccggcgcggcactggttgcgctcgaactggcatccaagcggttcgagggccaagccctcatcgtggaaggcacagacgagttccggcttgaagtcgcccagctcgccggtatgcacggcctcaaggtcacgttcaccgatccggcgatggagcagatgcgccgcgagacggccgagcacaaggaaatggagaaggcctttcaggccgaggtgcacggccagacgggcacccaagtgcgtgagggaagcaagtcggcggcggcaacgcctcagcgtgccaagaaacgaccagaaggcaggtctaacgatctgatataa

SEQ ID NO: 288216 - DNA, 381 bp, Morganella morganii
atggccggtgaaaatgcgattgaggctatcaagccgcattcgcgtgggacacgtccacggcgggagcgaattgaggtttgggtcagcattgatgagaaaaaagagttagccgaaagggccgatcaggcgggattgtcgaatgccgctttccttcgcgctgttgggctgaatctgcctataggttcacgggccgatttggaagctgtccgccagttggcaaaggtgaatggcgacctgggccgggtggccggattgctgaaattgtggctcgctgagaaacgcggtcagggcgcgcgaccgattgacgtagaagcgatgatgatggatttccgcgcaatccaagaggacatgcgggcgctcatggggaggatttccaaatga

SEQ ID NO: 288217 - DNA, 753 bp, Morganella morganii
atgagcggtggtaatgctgtgacccccaccagtactagcgcacaggcgcgggtaatgctctatcagcctagccagcgcccgcgattgcgcgagggtgattggacagacacatcatttggccgctgccgcgtggcaggcaggctaggccagaggcacgccgatattgtggaagcggtcctgtactgcgcagaacgtcggcgccctgtctctgacggcggcgtagagctgctggtagaccccgctcgggtgagaaagactctttccgacagccgctacagctttacgcagatcgaaaagctgttggccgagctgcgagcggcgacgatcacaattgagacgccacaattcgatttcccaataatcgggggattgattgatcacgttatcccatcgcccatgacacggcctgatcccctaacggggggagagcggaatctgtggagagtgcgccttggcgtagcgctggtgatgctgcttgagcatgacttgagtctgtactacgacccagcccccattgctcgcctacagcatggcatcagccaagcagtcgcaaggcacgtcttgagccacaaaatagagccgacaggcggttggtatcttgataccgttatcgtggccgttgctgggatcgtgccgagcaaagcaatgcgcgatgcacgattcaggctgagagaagatgccgacgaattgaaggcgctcggcctgattctagatggcgaccggttgaggaaaaaaggtactggtgacgcctaa

SEQ ID NO: 288218 - DNA, 897 bp, Morganella morganii
gtggcgattgacttacgggcagcgttcgagaacgaaccgcccgcactagactttatttggccgggcttccttgctgggacagtaggcgcgttggtggctcccggagccactggtaagagcttctgggcgctggaagcggcaatgtcggtcgcctgtgctgcgaccgttgaaagcagagcggccggtggtgacttggtagggcttgcacctgcgaaagctggtcgcgtcgtctattacgccggagaagaccccgagccagcgctgattgggcgaattcactctgttggcaagcacctcggtcaagaagctcgcgaagccatcatagaaaacctcatggtcatgccgatcatgggaaaactaatggacgtcacgaagagaagtaagcgggcccagataatcgagcaatgcgaaggcgctcggctaatcgttctggacacattgagccgcattcattcccttgatgagaatagcaacggcgatatggcccggcttgtcgctatgcttgaggaaattgcgaccattactaaagcgtcagtgctttatctgcaccatgtcagcaaaggcagcgcccgcgacgggcaggccgatcagcagcaggcagtacgtggtgcgtcggctcttgtcgataatccccgatggtgcggtttcgttgccaaaatgactgaaaaagaagcgcagaaccatactgaccgcgtctacgaccgacagcctatcggggaaaaccgccggaagttctttgttcgtttcggcgttagcaaacagaactacgccgagattgacgatgatcgttggtatcagcgtcatgacggcggcgtgttgctgccggtggaattggcggcggtgacgaaggaacgcactctgcacgtcgtaagtgggagtgacgatgagcggtggtaa

SEQ ID NO: 288219 - DNA, 1065 bp, Morganella morganii
atgaaaacaatctctttatttaataacaaaggcggtgttggtaaaacaaccttaacttggaatctgagtgtatcgttatcagcaaaaggaaaatcagttttgttgatagactttgatccacaatgcaatttatctattgcattgttaggagaaaaaggtttttcaaaactgttagaaaaggatgcgagtaatccatatggtaagacaataagagcattttgccaaccattcattcaacaagatattcaacctattgtccatactttccctccctttcatcctatggaaaaaggttctggtcgtttagacatagtcccaggggatttttggctgaataatttgtcggatataattagtgttggtactgatttaatagcagggaacgcagtaactagatttttaatacctagtttgatagctagtaaagcacaggaattaaatggttgcgaatatgattatgttctcattgatgttccgccatcatttaatactattgttcgttcagcgctatattgctctgattattttctcgtgccgtgtaccgcagatatattttcagcttactgccttggtcttattggtgaaacactaccaaaatttagagatgattgggaacagggcgtgaaaagaagttcagctcaaagtaatgtgcttataaattctaaaggtgctcctaaatttgcagggtggatatttaatgggtttgataaaagaaaaaaagcaggggaatctgtttcttcagagattgctgctgatgccgcacatagagatagaataattgattctgtaaaaaatgatcttcgaccaaaattaaatactataagtacatatccggctgtagctgactttgttagtaacgaaccggtgataaaggttgaagaccttaatgtaatggctcctgatagtattttacagggggttccacttcggtatttatcaactgtaaagccaaccagagaagtgttggcaagaggggcttggtctggtcctcagacaagtctaatgaaaaaaatggcagatgagcatgatattttagctgactatataataaaaaattttgcataa

SEQ ID NO: 288220 - DNA, 315 bp, Morganella morganii
atgaaaagtaaagagcaaataaaaaaagatttagtttcaaactctatgtttgaaatgtcagaaagtgaggtaagagaacatctgaagccaataataaaaaaagaacaagaaagagaaatgttacaagataaaaaagatagtttactcgcatatgcaacaatgaaaattgatattatcaatgatgctattaactttggtattaatgtaaatagtaataaaaaaaatattcttaactggagggagtatagagtcaaattagattcgatagatgtttcattgggtgatgatataatatggccagaattttatgaatga

SEQ ID NO: 288221 - DNA, 897 bp, Morganella morganii
atggctaagaatgaatttttacctttcggtacagccgaaggggctaacgtgctttccaatcaggaatatgaagctctggcagccaggcataacgggttcaccagcggtgtggccaaatccaaagagctgaacaaagtctggcggcaggcatcattaatcgcgtctgcagtcgcgcagtttattgtggataccgatcagaaagacctgcttgataccggtgatttttcggatattaaagccagactgacttcagcgattaacctgatcatcagtaatggagattacgtcaccaatccgtatttaaagctggaactgcttaaaaaaatcgataaggtcgatatcactcagcagctgggaaatgataccagcaaagtggcgtcacaagatcttctgaccacagaactcggtaaaaaagctggggttgctgaggtcaacggcaaactggataaatcaaaggtaactaactcgctggttaacagcagagaacttgttccgactacggcactgttgattgataatctggaattaaaacagcccgcaggagattatcaagaagcaggatttagttattctaaatatgactcggactcacggtatcagggaaaaggggatggtatcggatatggacaaaaatggaaagatgttaaaaacgaacgtgcagtcagaacaaattacaccaacgatttagctaagccgatttctatttttgttcgtttaggggaaagtgagtctcaaggggtaggaattattattgatggtgtaaccgctgcattatttactgctgcgggacctaatgtatctcagggagcaacagctatagttccaccagggtcaaggtactatgtatatgcgccatcaggtaaagaaaatatttttgaatggactgaattgaggtaa

SEQ ID NO: 288222 - DNA, 546 bp, Morganella morganii
atgagtagtggagtgcgtatccggacagacaatgcggcaaaggttcttgaggcactgcgccagcttggtgatcgcgacgtgctggtcggtatccctgcagaggacagcgacagggaagatgcaccgtttggtaatgcggggatcggatatctcaacgaaacggggtctccggcgcagaacattcccgcccgtcctcatctgcaacccggcatacgttcggttgacgacaaaacagtcacagaactgaaagccgctgcggatgccattcttgacggtgacatcagtaaagcggaacgcgccctgaaccgcgcgggacagatagctgtaaacggggtgcaggcgtatatcaccaacgctgatttcgtcccgctggcggacggcacagtggcatcgcgtgcccgacgcggacggaagggggcagccggagaactggaaagcagggctgccggtaatgcgccgggtaatgccggtgggcgcccgctgattgacaccggtaaataccggcaggcgataacctacgtggtcagaaacaagaaggaggaataa

SEQ ID NO: 288223 - DNA, 408 bp, Morganella morganii
atggcaagaaaccaaacactgccgacggtcggacaggtaagaagtgactgtccgctcttcgctgatgaagtccggttcccggacagacagatcgcgtttcgtctgaacctggccgataaacttctgagcgaaaaatcgtccgggcgggagctgttcccgtactgggtggaattgtttgttatgcattatctctcactttgggatgccgataacctgtccgccgcgatgggcgggaccggcggagccaataccggtgttgctgcgtccgagtccgttgataaggtcagtgtcagttatgacaacagcatgacacttaaccctgacgccggattctggaataacagccggtatggtgcggaattctatgaactgctgatgctgttcggtgccggaggtcgtcagttatga

SEQ ID NO: 288224 - DNA, 348 bp, Morganella morganii
atgaaaattcaggtgaacacaccgtttaatctcacgctgggtagtggtgaaacgctcagtttctccgccggtgtgcatgaggtcagcaaagaagtaggcgagcactggtttaccctggcgcacggcagcgtgctgtcggcagacggtacgccggattatcaggcgttatccgcagaactgcaggagcagaacgaagcgttgttgaacctcctggcggaaaaggaacatgaaatcgcggcactgcaggagcagaacgaagccctgaaaaacaaatccggcgcaaacccggcgggagatgacgatggcaagaaaccaaacactgccgacggtcggacaggtaagaagtga

SEQ ID NO: 288225 - DNA, 492 bp, Morganella morganii
atgaaccaaaaaccttacatgttccggatgcctgcgggtattgccggggccgtgtcacgttatcaggacctgactattgaaccggtattactgaaatccgataccgcgttccctgcgtatggtctggccgggaagtacgacggtgattatttcgtaccgctggcagaaggagataaggccgacgtcatccgcggcatttatgtccgcccgtacccgacgacagaaactacggattttgtccgccaggtggggaaaggcaaaaacttccccggggatgcactcaaacgcggctatatgacggtagcggttgcagacgcaagcgcactgaaaaaaggcggcaaagtgtttgtgcgagtcaaggcgactgacgatgaaccggccgggtcctttaccgatacgctcattgatggcgaaacggtcgaaatgccgggcgcggaatttaccggtgccggtgacgccagcggcaatgctgaaatttcttacaagatttaa

SEQ ID NO: 288226 - DNA, 219 bp, Morganella morganii
atgaccagagccgtagttgaaagactgatatcactatctcatgacccaaataacgaagtaaaagcagccgcagcatatgcgttaggtgaatcaggaggcgcggtacggtcagtgatcgaacgactactgcaaatgactcacgatcctgatttgagcgtcaaactatctgcaacgaaagcattaggccgacttttccgaccttcatctataaaaaaataa

SEQ ID NO: 288227 - DNA, 216 bp, Morganella morganii
atgacaatgaaaaaacagaaaattaaaccgtgtccgttttgtggatgtgctgatatcacgatacacgcccccagcagtcacggacttacgctgtttggtattgcgtgtgacgaatgtggtgcgcggattaagcggtttgatgaattggaagcaatagttgcgtggaatcgaagaatcgcatttacagagtacgaaaaaatcagggaggttaattga

SEQ ID NO: 288228 - DNA, 411 bp, Morganella morganii
ttgaaagagatcgctatttcttcggctgctagtaaatttataaaaacattaggtttcgttgatgcagctacagaatttattgattatgatgctaaggggcatgattctgaagagggtgtatataataccgaagagagagagggatctggaagggttgaacatgtaactaatttatcaaaaccagagcattggagcatgcaatttaacaatactattaatagaaaaattaataaagcaaatatctcacctgataaagttttatttgaaaaagatccggatatcatacaagcaatgggcaatattataagatttgctaataaaaaacgttcagtaaatattcgtgataattttatgaaaaataaatgtgaaggtatcgagaaggatagcaatggaggtaagaaagataattaa

SEQ ID NO: 288229 - DNA, 276 bp, Morganella morganii
atgattttatttctgaattacgtgaaggttataatacgattggaggccactagtgccctggattatgaatccgagcatgtaattatgcgcaatatgcacaaaatttgtcagagcagaacggttatcatcatagctcaccgcttatcaacagtaaaaaatgcagatcgcattattgtgatggaaaaaggacaaattattgagcaaggaaaacacaaggatctcctctgtaatcctgaaagcctttatcactatttatatcagttacaatcagattag

SEQ ID NO: 288230 - DNA, 198 bp, Morganella morganii
gtgaaagccagggaagccacctcaattaactggggagacaacccgccaagttttcacgaaatcaggagccttgcagccaggctgtataccgacgaaaaaggtggtgagttcgctcagcgcctgttgggtcataaatctgccatgatgacggctaaataccaggacaatcgtggcagtgaatgggttaaagtgctgtaa

SEQ ID NO: 288231 - DNA, 1419 bp, Morganella morganii
atgattgaaacgctcttaaagatacacagagattctgaagaagtagattttaaagagatatggaggagtggtatttttgtttttgactccaatgttctacttgatctttataggcttcctgaaatagcgactaaagatttaattgatgttttaagtaatgaacagtttaatagcagagtctggataggatttcaagggttgcttgagtttttgaataaccggcatgagactataagtgatcaaaaaaataaattcaccactgttaaaaaactactaaatgaatcaattggtcagtatgattctatttttgaaaatttgaaaaatgaattgtctactttaaaactcaaacaacgtcattcattaatagatccggataaatttctcacattagagaatattcaaggagggaaagaattccttgagtcattcattgaggacttgtcaacattagaaaataaacagtcagatgtaaatgatgaagataaaataaaagcatctgttcttaatatatttaacggtaaggttggagctggttttacaaaaaaggaacttgaggatatttataaggatggagagacacgatatgagaataaaatccctcctggatataaagataataataaaaccggttcgtataaagtagaggatagggagtttattaggaagttcggagatttaatattatggaaggaaataatagggatggctatagaaaaaaaggcatcttatattgtattgataacaggcgatgttaaagaagattggtggatagaaaaaagaggtaaaagacttggtccccgaaaagaacttttaaatgaaatctattcaaaagccccagatcttaagacattttacatgtatgatacatcgagctttttaaagcatgcaaaatctgaactatctctaaatattagtgatgcatctattattcagactaaagatttaattgaaaacttaaaggcaaatacatttgaaaatgaaaatataattgaatcaatctatggtttaattagtgattgtgctatgggtgtaaatattaaaaatattttcgttggtgaatatataaaatctctccctccattatttatagagcctagtgttttattggcatgtgtttttgaaatattagttaatgcaaggaagcacgggtcaagcgatagcataagtatcaaagctgaaaaattaaaagaatgtatagaaatatcctttaagaatgaaattcctattgctacctcagataatgaaggatttaatattcttgaactttctaatattggagtgtatgaaggaaagactggtatatatatgataaaaaaatccttgaaaaaatatggaattgacacaggcattatacaaggtaaaagaaattatacaatatcattgtatattcccatgtcattgtttttatggtcgttgtaa

SEQ ID NO: 288232 - DNA, 1152 bp, Morganella morganii
gtgaaaagtgattatgttactaaaagctatgaaaacgatcattttattcttaacctcaacaatctacaattaggcgatataattttagagcatggatacaaacctcattctatagcaatatgtaaggcaacaaaaagccactattcacatgccatgatttatgctgggcatactattatcgaagctacatcccatggtagagtatatagccgaatacctaatagaatttttgttcataatcaaaatgatattaaggtattaagattacgcgaaaagacacctgatacaatattagaaaaaatagttactgaagcaaagttattaactggaacaaaatatagtttaaaagaagccatcttggttttaaatagtacagaaaaacaaaaccttaatcttaccagaaaacaattctgctcaagattagttgctcaatgctatagctctgctggaatagatatagttaaaaacaattcatactgctcaccgcaggatattaatttatcaaataaattacactctattccaaatgtagttagactggcctccattgatgaaattaattttctacatagtaatagctctcacactcaccacgttgatgttgctgctaaatttgtagaactttctataaaagccttggcgttcagaggtattactactgtatttattgaaaatgtaaatgtaaaaatagaatcaattaatgaaatctacttcgctgttatggaaaacaaatataattcctcattggataacgaaatagcgctcataatggaaaatacaggttatatggatgggccatttgatgacgaaaaaagcaacccgtataggtatagtgaattgatgttccatgaaaaatatgacaaattctctgaagatgaaaatgaattttatctatctcaagaattaaataaagaaatttcttgtttaaaacatagaatagataactacaacgctagtttatataaccgccaaagtaaattgaaaacttttgaaaatgttttcataataaataaaaacatgttagaaaccatgtacaaaagagtatgtgttatttatgattactgcttaaacaacattcatactccttttatggtaaaatatatgtgtagctctaaaaaaataatggacattatagaaaacacattgaaataa

SEQ ID NO: 288233 - DNA, 1098 bp, Morganella morganii
atgcaaaacaattccaattccaattccaattccaattccaattccaattccaattccaattttttcgatgctactgatctttttaaaattcctgagcagctgaatatccctgatggtttatgtagtgctggtgacttctctaaaaaatttcatgtgagactggaggatatcatttccacatggctggacaataaaattaacttgtatgttaatcttcgttcagaatactgtcgaatcaatcgttatgctaataaagaagaacaccgctacgatacttttgacatcagtgttggtagagacttctatcaacatgaaaaaagcccacaggctgccacaaggagtttcataccttgcgctcaatctgaaataaaagaggatacaaatttcaataggagtagtttttataaatatgtttacaatggatatgctagtggcttttggcgactgcagcctaccaacaccactcacttggtaaaagataattacaatcttaaaaatgctaatgaattgtgggatgaaattccagaagaggttaaagtttttggtcgggatgataaggattatttaatttttgataaaaatatctttgtctctcatgaatgcttgtatattgataactttgggtgccaagaattatcccggttttttacaattaaagaaaatgaaattcatgaagtggaaggttactatatacaaagctttattgttttaatgttgcttaaaataagtttttcagaaaaagatggtaaaattaatcgtttaaacgcagctgatatattgaatgtggtgagggatgactgtcatatatccttaaaggatgttagcgataaaagtatatctagatgggttaacgactctttaatagaagagggacagttatctttagctgttgaggatggtcgcctttctacagtaaaggataatgttatatatttgcttattaaatacggtcatgcaaatagtacatcaaaagaattggctaatttattgagcaaggagggggacggctatcaattacagcagagaattacatcgtcgcaattagtgaactatattgatgctcttgttctcaagtatgcatcacttcattttaaataa

SEQ ID NO: 288234 - DNA, 1515 bp, Morganella morganii
atgtctaagataaatagatctaaacaagatcaagagctctgtcttgaatttcagatactacctacttttgtgcaacggttaataagctacatacattacaaaacaggagctcgcgctgaacttattttaatcgtattacttggggtaatggcattttcctgccaggataaatttgatgttcagattaaaaacgggagaacatttacatcactttatctccttttattagcacgttcaggtagcaggaaatcaacagtattcaaagcactgatggaaacaatccatcaaatggaaaaggaactgaagaatatctttctggaaaaggaaaaattttatgaactgaaaaaaatatcttgggatacggaattaaaagaacttaaaaagcaatttagcaaagctgttcgccagaaggttgatgtagctgaaacacgcgaagcactggaggaatgtcagaaaagtggaccggtagcacccgtaagaaagtatctgactaaaaatgattcgacaagcgagggacttaaaaagacattagctctgggatctccgtcattaatgctcggttctgatgaagccggaggggtgtttgacagtagcctttttcgcgatatatcagtactcaactctctttggggagaagggagaatctcagacagtagagcatctcgtgacagctacgatgttgatgatgtccggctgaccatattgcttttactgcaacctacattatttaacgactttataaacaagcaaggaaaaaagttaagaaattcagggttcttagcccgtttattattaatcgatcttgagcaaatacctgaattgtgcgatatccctgatgcctgttcatggtctgatgagccagggcttgatggttttttatctattctcgttaagcatttacaagacgggatagagcgtagagaaaaaaatgaagaacgtatctgtattactttatctgaagaggcgagagcgttatgggatacacacaacaaacgaatcagggaactcatgcaaccaggagaggagttgcatcactatgatgatgttggttccagaattatggagcaagttacgagaattgcagcagtaatacaaatgtttattacacccgaatcatcaataattactaaggatacttttctatcagcagttaaaataagcgaatggtgtactactcatttaattttaaaagtagacgctaacagaaaacctagcgagaaagaaaaattgttattttggcttgaggaacatgttatcactaataagtccttcgacttcaggaggcatagcattcgtagagatggcccaaattctcttaggaacatagagcacctgatacccgttttaaaggaacttgaaaaagatggtaaggtacagttatttaaagaggatggaattgactatgttaaatttactggttcagaagcgaaatctagtgatttggctaaagcattaaacataccgttaatttcatccggatctattggctttaataagttgccaaataataaataa

SEQ ID NO: 288235 - DNA, 681 bp, Morganella morganii
atggaatcacaatattcacttaccaatgaagaaatccatgacttggtagaaatagcctccagaaagtatagatcacccattgacctaaatattctcaacccactgcttaacatggtctacggcacactgatgaagaataaccgaatactaggtattcgtactgactcgagattcgctcagtcccatgtaccaggagagcctgatctaccaatatgcttccagcgggatgatgagcaggcaatcactcgcttctacgagtcactgaaaagccagttacgagcagatcataaccggtccagaagaccgggagatccgacattaccatcttatggatggtgcagggaacgcgatacaagcgtacacccacattatcaccttgtgttgttgttcaatgcagacgtctatgggtacctggggaattaccaggaccccgatgctgacaatatggctacccgaatacagaaagcctggtgcagtgctttagggcttgattacccagattacgcagcattaactgaatttccaccaaatactgtttacaggtttagcagatttgatgcactggatcgtaacccagtctactggaatttcctggttcgactggcgtatttggccaaaaccagaactaaggatgtccacagcggttaccgcaactttggcacaagccaatactcaggctaa

SEQ ID NO: 288236 - DNA, 258 bp, Morganella morganii
atgaggatggcagcgctcccggcggtgagggcgtccgaggagtactacttcgccttcgccaccggtgcccctcaaaagcaaatccagtcgttgcgatccctgagcttcatcgagtgtaacgaaaacatcatgttgctggggcaatcaggcgtggggaaaacgcatctggcgatagccatgggttacgaagccgtgtgggcggatatcaaggttcatttcacaacagcagcagacctacaactacagctgtcgacttga

SEQ ID NO: 288237 - DNA, 993 bp, Morganella morganii
atggcaaagcgaacaaatagcgtcgataccacgtttttttctcttgagctgttgcgtcgtattccgcgcagccagcgtattaccgcccaagagttgcatcagcaacttacagatgcgggaattgagcgcaatgtgcgaaccattcagcgccagcttgaacgccttagccagcacttcgatctagagtgtgatgatcgctgccgcccctatggctggcgatggcgggcaggttcgcgaggcctgagcatggcgcagctatcgccagcagaatcgctgctgatgcaaatggcgcaggcgcatttaaagcatctgctacctgcgcatctgatggctttattctcgccgttttttagtcaagcaggacacactcttaaccacagcgaacaggcgctgcgagagcgggaatggtcgcagaaggtgcgggtggtcgctgccagccagtcgctcctaccaccagtgcttcaggaaggcgtgtttgacgcggtcagtgaagcgctttatcacaaccgttggctgaatattgattacagcaatgctcacggtactcgccgtcaggcggaggtgatgcccctcgggctagcgcaacagggctcgcggctgtatctggtttgccgctttaaaggctacgataacgaacgcagcctagccctgaaccgcattacctcggcggtctgcagtacctttcaatttgcacgccccgcagattttaacctcaaacgttacgacgatgatgggcgcttcggatttggcgaggggagaagtatccgcatccatttcaccctcaaaactgcgcgggcgcaattgttgctggagtcgccactatcagcggatcaacaggtcagcgagcttgaagacgggcggctgcattttagcgccacggtcatcgacagcccgatgcttgatggctttcttgccacctttggcaacaccattagcaacattaaacgcgaaacaaacaatgtcagtacagaacaggagaacaatgatgagtaa

SEQ ID NO: 288238 - DNA, 1212 bp, Morganella morganii
atgagtaatggtgatcgtcaactgctgccagtattaagcaacgcatcggatagcgaattggccccgctggtggaatacatcacgaaggcgttcagcagcggcattgagagtaaagcacgttataaaacccattgcccggcacacagtcagtatgccgatctgattgcccacgagctgtgcgagtttggtggaaataccgtcgtcaatctatttcgcggcggtggccctgagtggaaaaccgtggtgatcgatgtggcggacaagcttgacgcgacgtacgaaaaggactggggcattgaccgtatcgaactggctgtgctagcggctattactcgcaaggcttggtcggatatggaccaagctcaacgcaaaaacctgcttgaaaaaatggatcttactcagggtagtacgatgcttttcccagaagcaaaattaatgacgcagttgcagtctagccgcttctcaagcttgctcttggcatcgttaattgccaacgtctttgccagccaactgctcggacggacggtggtgatgtccgcagcctcgtttgtggctgcgcgaggggcagcttctttcctggggccgattggctgggtgattactgggctttggaccgccctagatctggcgggaccagcgtttcgcgttacgattcctgcagtggttcaggtagcactacttcgccaacggattcacgctacggcggaagccgataaagtttggtgggagtatcatcgctggcaggatgagaaagatgctgacagctgggtggcgaacatgtttcgtatggtaggactttctactgcagccagtgtaaggcgtgagcgcaatatggcgtttgagcagggagtagtggccgggcaacagcagacgacggaagagtatgcagataaggtcctcaaacaaatggatgaagttcagcgttttgaaaaacgttgtgaggcaatgctggctgttgcctttgcttgtgctaaagaggaaggtatcgcgccgtctgacgtgcgtagcgatatcgaaacctgctgcttggggatgatgagcgggcatctttcctcgatattacaagccacaattaatcgtcttattgccaatccgcctgatatccacactgcgcttgaacaggcgttcgagttaggtattcaggaaactgaggctgctgagctaatggcggtgcttcgtgaggcatttagccagcgtgcaggtgtgttttaa

SEQ ID NO: 288239 - DNA, 1587 bp, Morganella morganii
atggacagaaaaacacttttattgcgtctgaaccagcagcgtcaacgacagacaagagagctcataccatcaccaacaaaagaggtcgttacagtatccgatgtcagtgtttggcaggcacatcagcaagttcggcagtatcaacagaagtggcgcacggaacaaacaacattgatgctggctgagtgccgacagcgtcttctgcatagcattattggtccgtttgggctggggagtattgtctctgcatgggacaaggtgggggggaatgtcgataccattcataatgttcgctccggggtgtatgccacggaagaggagcaagtacgttatgaaagccgcggtaagtacaacagtgatccataccataagcacgacaactacaagaagaccaacgccgaaaacagtaaaaaacaggatgcaggcgaagcagtggatgcctataccggacaggcactgagcaggaataccgatgcggagcaggatcaccttatttctgccgcctcaatccataacgaccctgcggtttggctggcggaagcaaatggagctgatctggcgaaccacaaaaccaatctgcatcagacgcaccactcgatcaatgaatcgaagttgcaaaagagtgcagaggagtacatcgcctggttgaacaaaaaccgcgccgatcgcgattccaaaattgcccggttggaagagaaagccaaaaatgagcctctgagcaaaaaagatcagaacgcactggagaagtacaaacagcagaacgccgtcgatcaggaaaaattgcgcgagctggatgaagtggcgcgcaagcagtatgaaagcagtcttcgttggggctactacggtagtgcgaaattcggtgcatatttactgaaaaccagtgctgtcgaagcggggaaaatgggcctacagcaggcgattggcttggtgttgacggattttgttgacggcctgttgttggaagttcacgacagctggcataacgggttttgtgatggggtggaccaggagtatgtttgggatgcgttaaaaatccgtgctgggcgggtggcaaagagctgtctcgataactggcgcaacgtgctaacggcgttccgttacggggccataagcgggatcattagtaacttgatgacaacgctgataaatactttcttcaccaccgcacgcagcctagtgcgaatgatccgtgaaggggttttttcgctgttccgcgcagccaaaaccgtactgatgcgaccagagggtacaagccgtgctgaagcactagatgcagggctgaagattgccgtcagcggcgcattcgtcattggtggcgtactgcttgaagagtacctcagcaaaactctcggtgcgctgcttaccgttctgcccggtgggctaatcactactctagtggctgtgttgacggggtgcgtcaccggccttggtaccgtattaacggtctatatgctcgatcgattagatctgtttggtgcgcagcaccagcaggaagacaatgcagtactaacgatgttacaggacggcagggcgcaggccgatgcgcgtctgcaggctctgttgggatcggacccgaaacctgtctaa

SEQ ID NO: 288240 - DNA, 1029 bp, Morganella morganii
atggacttacatggtcatttgctttatgtggatatcacccagatctgcggcatcggctgtgcgttctgcatgtatgcggataagcacgtaacgggtaagagtatggtgctgtcaacgcaggcacgtgacaacctgtcggcgctcattaatgatccatccgtaaagcgtatttccgtgagtggcgaaggtgaaccgctcaataacattcataccttttatgagttactggcgttgtcccgagggggcaacagctttgagtttatcaccagcggtttttttcgccatgagaagatggaaaagatctttgatgagatcaatcgtcttgtctccgccaatggtgatacctgtaatattcgcctgagttcagatagccaccatattgaaaaagtaaaatggcgtgcacatggatttagcctggattatgttcagcgcaaaaaaccgtcatcgctcagtttttcatttcgctcaattgatatcgatcgggccttcactcgcgaatatctggtgagtgaactggcctcatggggaattaacgccagcataaagccagtcagcgtactggaagacaaattattaataggtgcggacacgtttaacatcgactacaaaaatctggttcatccggcaagagatacgccggagggttatctggacttacagggatatattgccgcgattgagtccaaagtggataaaccttttacctttggcagcctgaaccgtgcaccccagcccaatggcatggacgtgacaattaaacccaacggcgatgtgtttatgtacggtattgagaccgagcgtgttgcaaatatccattctgatgcgatcgactggcatcatctggcgagccatgtgcgggataatcccttgtcgcgcgcgttatatacccagccgttaaccgaactgctggcgcggctggaagacactccgcagcttcgcgcgatcatcgcgaccgccaataatccttactggctggtcaaagagatggggaagcattccgggttgcttgaacaatggaaggcagcatga

SEQ ID NO: 288241 - DNA, 846 bp, Morganella morganii
atgattgattcgcactgccactcgttctactcgaaacatgctgtaggtactatcgacgaacttgtttgtgcctcgattgctgcgggggtgacggtactcaccatcactgatcatgctccgttccctgtggatgcgcagaaccgtttgctggaatcggaactggagagctatttcaccgatattgataaggcgcagcaggcctataaaggcgagatcacgctgctacgcggactggaactcgattatatgccgggtactgagcgttataaccggcaattacttgcccgctatccaatggattttgtcatcggttcaattcactacgtcactgttgccgatgagccgatggtgaaggtctgggaactaccccggttagcggcagactcctttctggacaagtactttgctcagcttgaagcgttgctggaaagccggttgtttgatgcggttgggcacgctgacacgctactgcgtgcaatcccagaggatgtgtttttgcgtcgctttgaaccgttgattgcgccgctcgtacgcagcggtattgcatatgaactgaatgcttcgggcctgcgaaaatccagccttgatcctacgacgggtaaagaaattgcaggaagatggtcctatccttcccgcgctttgctggagaaattactgaggaacaatgttccattgaccatcggatccgatgcgcatgatcctcgtgatgccggaacggggatcgccgagttgatggaggcacttaggccattagggcttcaatccatcagctattatcagcagcgtcaacgtattgatgttctgttggatgaccttcaatttcacactgtgccagtgtctcgctaa

SEQ ID NO: 288242 - DNA, 1131 bp, Morganella morganii
atgaatggactaaaaactccgcattcacttgcgtggaacacgttgcacaacgaaccgctcgcaacccagttggcaatgtttcgccaggccagtgcacagatcaatgcgcaggatgttaaatccggttttcgcgcgttcgcgaccgatttgctggcgcgcggtttgatcgacatgtccgattacgtcgctatttttggtggtaaggcgctgcattatctgacgccgaatgcgactggatcattttgcgatatgcgcaccggtgctgacgctacaacattggcgggcatttatagccgtgcgaaatatggcggagtgagcgagatacgctatctggcacggtgcgttatcgactatcttgccgcagaactggatgacacctcttcttcatggtcagggttgttttgccaggccaaagaggagggagagagtgttgttatgatgactacgggctggcgtaatgtgccttccacggccaatgtgctctacgatatcgtggttgaggaaattaatctcacgttggcgcataaaggattgcccaccattatcaacgttaaactgcccaggattgcgccgccgtgtgaaaattacgctagccttagtcaggccgagcgcgatcgggtcaatcttgtgcaggatcatgtgattccagcggagaatttttaccgctggagcggcgtgcatgtcatttttggagatgacgtgctggtgactggggcaacggcggacaaagtgttgtatgaatcgctgtgtaacggcgcccggtcatttcgtgccatttacccagtggcgctagatccccgggtggcattaactgatgcgtcggtggaggatcggctgaacagcgtgagcgtaaagcagcatttggatgaaaacgtcgcgcaactgctctctgctccgggctatcagcccattctgcgtgcgttgcgtctgttatttggcgaagacaaccgggatagtttaccggctttcctgccaaatgtgccggtgctgacctggcttaatctgtataagtcagcgttaaataatgagtttttggctcaacctgcatgcgcgccatcactagtgatgctcagaacatatctgatgcaaaatgggctgttgtgtgcgaaaggtaaggtgctggtgaaatga

SEQ ID NO: 288243 - DNA, 792 bp, Morganella morganii
atgatgtccgacactacccattacgttagttactgggaaaacgcaccgggtcagaccatgccggcttatgttgccctggcactggtttctatgcgcagagctctgggcgatcgttttcttctgcttacgtcgcgatcggtaagcgagcacatcgatgctgacatcatgaataaagcttgggcttttgaaccgctgagctttacgctggcgaacggcattgaagctattgtggcgaagagcgatttcattcgcatggcgtttgtacatcgctggggcggggcatggttggatgcggatacgttgctgtttagagatccgagtgttgagttatttccgacagggctgagccataaattgcactggcatagcgagtgtattttcgcgtccctgccgggaaaccccatacttgcgcaagccttagctatagggcttgagagcgagaatcacgcttggggtaatcctgggagaatcaaaaataacattgcccaggctgccgatgctgtcatcccgattggcggggaggtcatcgatcccggatatcgtccgctttacaactttgctggttgcgaggtgatgcgtcgcaccgatattgccgtcggggcatttttgattaacgacgtggccattctcaaactttacaacacctatttccggcgtaccgaagcccggagagaaaccgtggctgaatttctggcgggtggctcgctgctggcaaaactgtttttgcatattgaggcgaatacggattactgggttgatgaaagtgacaaattgatagcttccgttgcctga

SEQ ID NO: 288244 - DNA, 1311 bp, Morganella morganii
atgcataccaacaccttcggtgtggatgacgtcatcgttacgaatccgcatccagggcttggtgaactacgcagattggtgaaccaactaagtaatgtcgatgccgttgttcatctggttggacgactacaacctgccgaaatcgtttttatgcggttactccgcccggcgagtatctattcccttgatgattcactgcgctgtgtgaatcgtaaaatgggttttgctgcaaacacgctcaatatcgtggagcagtacaaatatattctgcaggatctgggcgcgaaagtgatcgacacccagtacattgttccgttgcctgccgagctcccgcctgcggcactttccccccaaatactttttaatccttatgccagccgaagagacaaggggctatccccttcccgtgcaaccgcagctctacaagctatcaccgacgagtttcccggccattccgtgggaattctttgcagcccttcaacgctgcacagtgcacagcatctggaaaacgcagttgcacgcgataatgtggcagtcttgcacgacgggctaacacccgaaaaggttgcaggctatattcgccgcgcgcaggcagttgttagtgtggatacagccattgtgcatatggctgttggcctgaaagcgaagctggtggcgatctacccgttgattgcaggtcaacacaacccatggttgccgcctcgctcaccttttacacaagtgatctacagcgagcaacagccagacacactccgtcgtacgggcaaaaaaaatatggatactttttcgctaacgtcattaatgaacgcattgcagactctcttaacactgccagcagaagcgaaaaacagcatgtcgcttaacgccagaatcatccctgggctaggggtagcgacgggcacgctggcgcgacaactgcccttaatctgtgaaaaatttcctgaagttgcaggctgttatgccgggacgatcaaccttgaattcagcgttcctgtcgcagtcgtgcggcccgatcaccgtaccgcaccgctggcttggactcccagtggacgcaccaccgagatattcgatctactgcgcattgaacttgaattcagccatttaactgaacgcatccccgcatggctgtatattgcccacagctcgccacaccgccggacgccgaccattcacgaagtaatcgcgccgcgcattaacctcaatggcgccacgcactgtcgactccacttacccgctgaagctatcgtactgggcgaacgcggtactcaggcaacggaagctatcaatttgtcactttcatcaacccagtaa

SEQ ID NO: 288245 - DNA, 2190 bp, Morganella morganii
atgacagagctctatgaacaggcgaaaaatagtctgcagggtgaggacttctcatctttcaattacctgtttgcgattaacaagctgttgtccaatcctgtttcgtatgacttgggacgggatttgatcgtacgtgctctcgattcgcgcgagcgattttccgagcacaccacaattttgaaaaatatggtgagaaaatcaggtttgttcccgtaccttaaaaaagagttcactggcctgacaccggacgacctgagggtacttgatctataccggacgccattctcggatggttacgttttccactcaatgcagttccatatattcgatctgctcaagtccggtcaaaacgtggtactgagcgcgcctacaagcatgggcaaaagtgcaatcgtcgattcgttgctcggcatgggaacgttgaagcggctcgttctggttgttccgaccgtggctcttgccgacgaaacccgtcgccgactgcaagagcgattcggtgaccgatatcagattatccaccacagttcccaagtgtgcaattccgatcaggccgtctacgtgttaacgcaggagcgagtgaacgagcgtgacgacatcatcgacattgacctcttcgtcattgacgagttttacaagttggcgttccggcaactcaaaagcgggaaagttgatcatcaagacgagcgagttatcgagcttaacattgcgttgagcaaactgctcaaggtctccaggcagttttatctgactggaccattcgttaacagcattcgcggtctcgaaagacttgggtatccgcatacttttgtttccaccgacttcaacacggtggcactagatgttcagacgttcggcatcaaagcgagtgacgacgaagccaagctcaaagcgctggcgaaaatcgcgcacgcgtgcgtcggtgcaacaatcatctattgtaagtcaccaactgttgccggtcgagtggctcgcgagctgatcaggctcgggcatggcactctgactgagagtcctcatattgactgggtcagccaagagttcgatgccgactgggattacacggtggcactcagaaacggtatcggcttgcattttggcgcgctgccgagagcgctgcagcaatacaccgctgaccaattcaatgcaggaaaactgcgcttcttactttgtacctcaacgatcattgaaggcgtcaacactatcgccaaaaacgtcgtgatctacgataaccgcgatggacctcgcagcattgacaaattcacccatgggaacatcaaagggcgcgccgggcgcatgggcgttcacttcgtcggcaaaatcttttgcctagaggaaatcccggaagacagcctcaatcaagaggtggaaattccgcttggtattcaagatattgataccccaattaacctcttggccagcgttcaaccagaccacttgtccgagttttcacaggatcgctttgatgaagtcttcataaacgagcgtgtttctatcgaacttgtgaaaaagcactcatacttccgtgtcgagcaactcgaagtgctgcaaagcatgttcgagatgatggacgacaccgaatttgcctcgctggtgtttcactggactcctgcaacaaacttcctcaagacctttgcaaagataattgccagactggttccctctacgttcagtcgcaatggagtccctgttaatcctactgatgtcatggtcgccaaacttgcctgttattcaaacgctgcaagctattcggaatatctgaaaaaccagattgatcgcgcacggcagtgggtgtctgaagaggaaaaacgctctctttccatcgccattaacaatgatttgaagctcatcaccaatactttcggttacaccctacctaaggtgctcagcttaatggaggatgtagtcaaataccatgcattgaagcgaggtatccgcagcaaagtcgattacacgcatgtcaaaatgacgttcgagaattttcatcttccgccaggtgtaagtgccttggaggagattggcattcccattcagacgttacaccggctggtagatttgctggaattttccgaccaagctgatgtggatgggttgtgccagtatcttcgggatactcaggacgtttggagtcgaacgattgggtttgtggatcagacgttcatcaggcgcgcgctcggtattgaacaacattga

SEQ ID NO: 288246 - DNA, 1617 bp, Morganella morganii
atggagtcgaacgattcaggcggagtagccgccaagcacggtttcttatttcaggactgcgtagccgcttaccatgtcacccgaatgcttcgtgacaagactatccgcagtgtgcgctgcgaggtcacagacgatatcgacattgtatctgatggatacatcgacttcgttcaggtaaaaagcaccggcaaaacacgttggaacatttcggacatcgttcagaattcaaaaggtgctgataaaaagacgatcccctgcagttcaattttgcacaaatcaatgcagtgtgagtctgacccggcccttggacggaggtactccatcgtaacagaggaaaaggtcaacaaaacccttgagtacttgacgatcagcccaaacgctcgactagataagccaggcagacaggaactcatcgacgatctcaataaacgtacaaacaattatttaacagactcaggtataagcgtttcagattggatcgatgcggctatatgggaagtgtttccatcccttcgagaaatagagcttttggggatcaagaatatacggctggcctcccaagatttgcatggggttattctcagctctgaaattatcgctgaagacatttggtgccgcatccttgataccgtgacgcgcaagggggagcattctcgacgcattcacagtgttgatgacaagtcctacttacgaccagacctacttaagtggttcaagcagcgtgtcgaagatgaccaatctcggtcaggccgcaaaatctacgtcaaacgggacttaccccacatccttacgccatttagagcgcctatggcttcggtctgcgctaagcgtaaaggcctggttctacatcagcagtactcacttaagaaataccgctacaagcacatcgcggaaaacgtctgccaatggttggatgaggtttttctccgaccaaaagaaatgtctgatattcataaactgacattcattgaaaagcgagaacggctaaaggattctgtcttcaaatcgctccatgacgtcagcgaatttttgggtcgagtactgttgcacgcaacgatccggcagcaccacgaaagccagcctattccttgcatgctatacgtggaaaaagcaggggccgaaaaaattcttgaaaacgtgcatatcgttcgccgcgatccagaaggtgatcagctttggattggcttcagcgagttggttactgatattgacattgccgtcagattgccggagatacgggatcggttgtacgaggacatttcggattgcatcgataccgcgcgcaaaaagatcctcgacattaaagacgataactacctgcttcgccacgacattgacgaaattcttgatggcagccaacctttcgatgctcacctcgatcgtttcacgtttgttctgttcgtgggctacgactctaacctactaaccgagcctgaaacgccggggttcgaggatgacctggagaaggaaacgacgatgctgttcgaaaaattcgcggctgacctcatcgaggattcgccgttcgcgaatctttgcatccacgtgttcatttatccagctccgagtcttgagcggttaacccaattggttgatgagaaggtgagagaggttgtatga

SEQ ID NO: 288247 - DNA, 1926 bp, Morganella morganii
atgccgacgagtaatgatttagccttgctgaccatcgaacagttatttagcgctaatagccattatgttatccctatttatcagcgtaactacgcctggggcgcgccggagattgaacagcttattcgggacattgcagatgctgctgaagcccttaaaaatgcagagcaacaggaagacccgaaatactatctgggcagcttggtggtatatgtcagagatggtgctgatagcgcacatcaaggcgtaatagtctatgaaacgattgatggacagcaaaggtacacaacgctgtcgattttgctcgcatacttaaaaaaagttgcttgttgcagcgaacaagatttatccccgcttcaccttaatctcgactttgacagccgtcctaaatcagcccgaacgctaaataacctgtttcaacaggctcagagcaatgatcctgaagaaccctcaatccgagcggcgtttactattattgaacgctactttgagaaagagaatatcgacaccaacaacttttgccgatatctactccagcgcgtcactattttgcgggttccggtgccaacagagactgatctcaaccactactttgagatcatgaataaccgtggtgaacagctagaaaaacacgaagtgttgaaagcgaatttgatgtcagtttacaacggtgatactgccgcaagaaacggcttttctgccatatgggatgcctgcgctgatatgaaccgatatgtgcaattgggctttagcccagagactcgcaaagcattatttggtgaacagtggctaggattccctgccgattttgatgcgatcaaatgtgctatagaaactaatcctgatacacacgaaaagccgacgctacgggaaattatcgaaaggcgacgctttcatcacactgatgacaacgatgaaaaagcaaaagagcagcgttttgattcgattatcgatttctccaacttcctactgcatgtgctaaaagtgacagtggataatgacgtgtctttggacgataaaaagctacttcaggcatttgaaatcataaaaaatgaccgaaaaaaaatcacccagtttgcttttaacttactaaagtttaggggcttgtttgaccgctatatcattaagcgagatcaagctgagaagtggagtctgctgacgcttgaatactatgccagagacaggaattcgagctttagctataacaactctttcgatcaagatgaactgtctggtgtaaataaacaactagcgatgatcttgtcgatgttccatgtctcccaccctgcctatgtttacaagcgatggctcaatcgctcgctggccattttgaataccctgacttcggaccaacttaatgttgacggagctgcttacctcagagaacttgaacaactcagccacgagttcctgtcagagatttgtggtgaaacggaacaattcaatgtcgaagctctgcatcgtggtaccagtgtgcagaactttgtgttcaatttactcgattatcgtttgtggcgtgatcttaatgctggccaatcatttgatggtaaagggcttaataatcccgagattaagaagcattttgacggtttccagttttcaccgagccgaacatcggttgagcactactttcctcaaacagatccctctggcgcaaacaaaatgggggatgatgtccatcgtttcggtaacctctgcctgatctcaccaagcagtaactcgagacttagtaattattcaccagcagacaagaaaaaattctacatcgaaacagaacgagcagagagtctaaaacaagccatcatgatgagctataaggagtgggggccggatgggcaaggcatcaacaacatagaaagccatgaacacgcaatgttgacattgctcaaagagcatcgtgatatgaccttaccaaccaggaaataa

SEQ ID NO: 288248 - DNA, 1341 bp, Morganella morganii
atgggaactgtatcctatcaggtaaaaaaaacgaggatgctgctagaacagcgcctcgctattccgtcataccagcgcccctacaaatggcaacaaaaacacgtcaatcaactaattgatgatgtgttaacccaccaaaataaacagagctaccgccttgggactgtggtgttgcaccgggataagttaaaacctgcttatgaaggtgaactcgatatcgttgatggtcagcagcgccttctgaccttaaccttgctttgctcagtgctcgatcagagtgatgagttttcaacgcccctgttggaacaatcttttgcttcaagggttagcatcaataaccttgagcacaatgccaaagtcattgagaaccgcctcgtaggactaaatgataacgagcgcaaatcactacttcacttcgtgtgtaacaagtgtgaactgatcgaagtgacgctcgatgatttgagcgaagcctttcagtttttcgactcgcaaaacgccaggggtaaggccctcgcgccccatgacttactaaaggcataccatttgcgcgaaatgatggatgctacagagcaagcggaacgactacaccacgttagcctgtgggagcaaggagtcagtccggatgatgaatccgctaaccttcacctcattatgggcgagtatttgttccgcctgcgccgatggctggatggcgattatggcgtgcagttcagccgccacaatcttgaggtgttcaaaggcgtcaacctctccacttctgattaccactatctgcagtctctgctcgccctggattttgcggttgagcactacaataatgaccctatcaggaagtgggacaagcagaataaaccttttccgttccaggttaatcagttaataattaacggaaagcgcttttttgagtatatccagcactacaaatccctgcatcacaccctatttgaaggtgacaacgcgctgcttggcaatttcttaaaaaaacataccagttacgctggcagttcacgcaaaggggatatgtatattaaaaatctctttatgtgtgcagtgatggcctattacgataagtttggcgacaaagaattaattaaagccgcaacaatctgtttttgttggagttactacttgcgcttgcaatatcaaaaaatcggtatggacagtgttgatggttatgcgcgtgagccccgaggactattgagattgctcgataaagcgatccacccacaacaagtcctacgctttcagccaaagcgttgtataaacattcgttttcaaaatgccaaacccgtagaatattcaatcgctcagatgctgggagatgtagatgccgacgagtaa

SEQ ID NO: 288249 - DNA, 1980 bp, Morganella morganii
atggaaaagctaaaaatgcattcaccaaatctcacgcaggacaacatcgtccacattcgcgatctgtttcctggctgcgtcaccgaagccaagggcaaggacggcagcgtgaagctggcggtggatttcgaccagttgcggcaagagcttgccgaatcgattgtagaagggccgcaggaacgctaccacctgaactggccaggaaagcgcgaagccttgcttgcggccaacgcgccgattgccaagacgctgcgtccttgccgcgaagaaagcgtggatttcgatgataccaagaacatcttcattgagggtgacaaccttgatgcattgaagctgctgcaggagaactaccttggcaaggtcaagatgatttacatcgacccgccgtacaacacggggaatgattttatctacgaagatgatttttccgagtctgcggaggactttctgcgtcgctcaaatcaaaaggatgcagagggaaacaagctagtcgccaatcctgcatctaacggccgatttcattcagattggttgtcgatgatctactcccgactgcgccttgcgagaactcttctcagggaagatggcgtcatttttgccagcattgatgactgcgaatcacaaaacatcaggaaagtactggacgaaatatttggggaaagtaatttcgttgcccagttagtatgggagaaaaagaaaaagggggcctttctttctggctcatcaacgaatgttaaggagtacgtggttgcatacgcgaaaaacttggcctctttcaaaggccttgtcggggagatagcaagaggcgaagaaacctatccggtgattaagaccacgaactctcgtggcgtaagagttataaaaaaaggtatccctagcaagtatcgggaaaaaaatcatcgcgtcgcagcaggaagcaggatcagttctggaaacatggaaatgatccttctgtccgatcttgtgattagcgatggtgtgctcgtggaggatgtaaaggttgaaagcaattggatctactcgcaagagttgctcaataagtacgctgaggataaaagtctctacgtcactcaggacctttactttcgcagagtcgtaactgagccccgcgagaagatgcttaaggatcttcttccaatgaaaggcgatcagtcgactggattcgagtttgtttattcagacgatttgttctccgatggatggggaacgaacgaggacggctttgatgagttgcatgcgatatttggcgcccaaagtcttatgagctttccaaagccatcaaaacttttggcaaaactgactttatctgcttgcaggtctgatcctgattgcatagtgctcgatttttttgctggttctgcaaccaccgcgcacggcgttatgacccttaactcgcaggatggaggtaatcgcaagttcattctggtgcagctcccagaaacatgcgacgaatcgactgaggcattcaaggcaggctacaagacaattgctgatatcagtaaggagcgtatccgtagggtcggtacgaagcttctagagggcaaatgccaccaggactggaaaaaagacatcggcttccgcactctcaaaatcgacacttccaacatggccgacgtctattacgcacccgacgcgttgcacgaggccaacctcgatctgttcgttgacaacatcaagcccgaccgcactcctgaagacctgttgttccaggtgatgctggattggggcgtcgatctggctttgccaatcgccaagcagtccatccaaggtaaggacgtgttctttgtcgatggcaatgtgcttgccgcctgcttcgacgccagcggcagcattgacgaagcctttgtgaaggaactggccaagcgtcagccactgcgtgtagtgttccgcgacgcgggctacaagaacagcgcggtcaagatcaacgttgagcagattttcaagctcttgtcgcccgtcaccgaagtgaaatgtatctga

SEQ ID NO: 288250 - DNA, 906 bp, Morganella morganii
atgcctagctccccttctaagcggcttgaggacttgagtgtggcccagcgagagcggctggcctacatcgattttcggctctacttcttcggtgagatcggtcgcccagatctgattgagcgcttcggcgtggctccagcaggggcgacacgcgatttggctttgtaccgggaaatcgtgccgcataacatcaccttcgatggtagcaacaagatctatcgcatcgggcaggcgttttccccgttgttcaaacacgtatcgcagcgtgttctgtctgcgctagctttcggctttggcgatggcgtgaacggctcaatgcaggcgctgctaccatgtgaatcccccgcagccctgtgcatccccaagatggatgtgttagcagcgatttgccgagccatccacgccaagcgacctgtcgccatccgctaccactcgatgagcggcggcgagtccgagcgggtaattgtgccctttgccttggttgataccggcctgcgctggcacgtccgggcctttgatcgcaagagtagagagtttcgggatttcgtcgtcacccgcatcgaagtaccaacattgctcgacgaggagccacaggacaacgaacggcaggataacgacatccagtggacgcgcatcgtcgagctagatttagtgccgcacccgagcgttgagcggcccgatattatcaagatggactacgggatgacagatggttcgatcagaatgcgcgttcgcgctgcggtggtgggctatatgttgcagcgctggcgggtagactgctcacccgatcattgccttcgtggaccggagtaccggttatggctcaaagatcatctcgcaatttacggcgtaaaaaatgccttactggcaccaggctatagcgccactaagaaggctgactattaa

SEQ ID NO: 288251 - DNA, 684 bp, Morganella morganii; identical to SEQ ID NO: 146217

SEQ ID NO: 288252 - DNA, 3156 bp, Morganella morganii
atgatgaagcgaaacctgaacaccagctaccggctggtatggaacgaggttctgggagcatttgttgttgtctcagagctggcaaaagccaaaggaaagcgcagtactgccgttctggcgctggcggttgccggactggtggcaagtcctgccgcactggctgacgatgcgccgggaaacacccgtacggtagcggccggtgaggtagtcaatggtgcggtgatcggcaatcacgactcacagatcgttttcggtaagacaaacaacacagtcatcaacacaggcctggagttcggtgctgataatgatgacaacagcggtggtcagtgggtacagacggggggcgtggcaaaccagaccaccattaataatagcgggctgcagggtgtactggctggcggcagcgccacagacaccacagtcaacagcggtggtggtcagagcgtgcatggtcaagcttcagataccacgcttgacggtggtacacagtgggtacacagcggcggtattacctccggcacgatcattaataaagacggggctcagctggtaaaagctggagcgcaggctaccggtagtgtggtgaataccggagcacagggtggtcccgatgcagagaacaacgacgggcagtgggttgccggtaccgcaactgataccaccattaataacgatggtcggcagactattgcgacaggaggccttgccaccggcacagtgattaaagcgggcggcgaccagagtgtgcacggttcggcaaatacgacccgcctggatggcggttatcagtacgtgcatgccggtgcatctgcaagtgacacggtaatcaatgcgggcggctggcaggtggtgaaaagcggtgcgacagccgacaacaccacagttaatgcggacggtaaactgcaggtgggtgccggaggcaacgccacgaacgttacccagaatgccgggggcgcgctggtgacgaacaccagtgccaccgtctccgggaccaacagtctgggtaacttcagtgttgatgccgcgaatgccagtgccactaatgtgctactggaaaatggcgggcgtcttgatgtactgggcaacggcagcgccgataccactacggtcaatcagggcggtattctggctgtagcgaccggtggtaaggcgcagaacatcgtgatgcatgacggcggtgtgctaattgccgataccggcgcaacggtcagtggaacgaacacctccggcgcattcggcattgacggtgcaaccggtaaggccagtaacctgcgtcttgataacggcagtcagttcactgtactgggtaatggcagtgcggataacaccaccgtcggggctggcagtacgctgaacgtggcacagggtggaacgctcaccggcaccacctcatttggcgacggtgcatcgctgacggggagcgccaccaacagcggacaactgcatttcagcacgggtaacggacagggtgcggccatcagcggttcggtaagcggtgaggggcagctactcaaggacggtgacggcaccctgacggtcagcaacggcacgctgtcccagtcacaggtaaacctgaatcagggtacgctggcgctgaacaatgccatcatcaacagcgacatcattgcgcagtccggtacgcaggtccgcctgaccggcaactcggtgctgaacggggcgattgacccgactgacgtcaccctcgacagcggtgccagctggaatattcagcgtggtgcagcggtgaaatcggtgctcgacaacctggacaatgccggaaccatcagttttgcacccgcacaggcaaacagtccgtttgtccctgaaaccctgacggtgacgaatctcacgggccgtagcggcaccatgaatctgtccattcgtcttgatgacccgaccttcccgaccgatatgctggtcattgacggcgggcaggcaaccggtaaaacctggctgaacttcaccaataccggtgatgcagggctgggcctggcgacaactggcaacggtatcaaagtggtggatgcgattaacggggccaccaccgaagccggagcctttgcgctgggccgcaaactgcaggccggggcgtacaactacaccctgagccacggtagtgccgatgaaaactggtatctctccagcgaagccggctaccgtgccgaagtggcactgtactcatctttgtttgcccagagcatggattatgaccgtgcgctggccgggacatacagccagcgcagcagtgcggtgaatgaccagggattctgggggcgtattcagggcgggcataccgggcatgacggtaacggcggcattgcccagggcgacaccccggaaagcagtggcagctatggctttattcagctcggcggagacctgttcaaacacgacaccggtacgctttcgctgaccagtggactctatggcgcggcaggccagtcgtcggtggatgtgaaaaacgatgaccgctctgcggcaggctccgtgcgtgacacggtgtacagcctcggcgggtatctgacagccgttcaggatgccagcgggctgtgggccgatgtggtggcacagggctcccgtcacagcctgaaggcaagctcagcggataaccgttttgaaactgacggcaccggctggctggcctctgtggaaaccggtctgccgtttaacatcagtcagggactggtgctggagccacagctgcagtacgtctggcagggcctgtctctggataacgggcatgacaacggcggttacgtgaactttggtgacggtagtgcgcagcatgtccgcgccgggcttcgtttcggcagttcgtctgaaatggacttcggtcagggtacctccacggttgcgggtttgactgacagcatgaagcacagcacaagcgaaatgccgatgaactggtgggtgcgtccgtcggttatccgcactttcagttcagacggcgatatgagcatgggcactgcgactgcaggcagcaatgtcagcttcaccccgtctcaggatggtacctcgcttgacctgcaggcgggtattgaagcgcgtgtccgccagaacgtgacgctgggtgtacagggcggttatacccgcagcgtcagcggcaacagtgctgctggctacaacggtcaggcaacgctgaaagtcgctttctga

SEQ ID NO: 288253 - DNA, 465 bp, Morganella morganii
atgaccacagaaactgatacagcccactcgccgatgagtgattcacacatgtctaccctcattacggccagcctggtacccgatgaacagcgcctgggtttctggccgctgcacttcgggcgtatcccgcagtggatttttatcgagacccgtatctttggctggatggaccgcttctgtgaagactacagcggcggtatctggcatttccacatactcagcaacggtggcgcgtttatggcccccgaagctgacattgatgagaaatggaggctgctcaacaacatgaatggcaatggcgcagaaatgagtgcggaagccgcaggcattgccgtgtgtctgattgagtacagccatcacgcctgtcgtacggagtgcgatgccatgacagagcattatttccgactgcgtgattacgccctacagcaccctgaatcccatgccatttttgccatcattgattaa

SEQ ID NO: 288254 - DNA, 480 bp, Morganella morganii; identical to SEQ ID NO: 146220

SEQ ID NO: 288255 - DNA, 360 bp, Morganella morganii; identical to SEQ ID NO: 146221

SEQ ID NO: 288256 - DNA, 378 bp, Morganella morganii; identical to SEQ ID NO: 146222

SEQ ID NO: 288257 - DNA, 492 bp, Morganella morganii; identical to SEQ ID NO: 146223

SEQ ID NO: 288258 - DNA, 204 bp, Morganella morganii; identical to SEQ ID NO: 146224

SEQ ID NO: 288259 - DNA, 846 bp, Morganella morganii
atgtcagaacttactctcaccggacccgaagtgttaaccggccacaccgacataatttgctccaccagcattgagcgcatcatcaccggacgtaatgccgcactggcgcagattgaagcgctcattcagcaactcgacgatatctcaatactgacccgcagtatcgggggaaaaaccgctctggactgggctatgaagcaggacttccgctgtggctgctggttgatagaaaaaagagaaacggcgatgaaagccattacacgcaatcttgatcgcggtatatggcgggatttaatgaaaaagtcgggcatgctttccatcatggacgcacaggcccgtgatcagtggtacaacagcctggaaaaggaggatattccggtggtcagcgaagcgaatatcctgagcacgtttgagcaactgcatctcaacaaaatagatgtcttcgaacgtggggtcatcaacgtcttcaaagggctatcgtgggattacaaaaccaatagtccctgcagctttggtaaaaagatcatcgtcaacaatctggtggcgcatagccgctggggctttagcttaaactggggctggcggcgggatcaattagcggacctggaacgaatgctgtttctgattgatggtaaaccgatacccgacaaccgtggcgatgttactactcgattgatggagcatattcgggacaacccttcgaaggatatttacgaagatgatttcttcagtatccgttactttcagaagggaacagtacacatcacttttaaacggatcgacctgacagaaaagatgaatgatatcgtggcgaagcactatccggggatgctggcagcgagatga

SEQ ID NO: 288260 - DNA, 879 bp, Morganella morganii
atggcaaaagcaacaaaaaaagatttatcatggtttagcttagaaaattataatttcgtattagatttaacattagatggttttgttgacgagttagaattacgtggcttattgttttcacttgtagaagattacaatcctaatgactatgatgaatatgaaattaagattgagcgaatatttaatggtgacccaaatattgtaattcccaacgaagaagaaaaggaaaatactgaatttattgagattgttgataaaaatactacctcactaaaaagtatttacggagagctaccaagtatctcgtcagatttgggagtaagcccaatcacattcactgaacttacgatgtattcttatgccgctgttaagcaaggtttttttaaagaagagggaaatgatacatatataaaaactaatgctatgttagccagtgtggatggaaatcttgattgctttagtagttcagtattagtcggaattgatctgggcggtgccactgacgatgaaattataactagtataagcaagttgctaccattgtggcgcacgcagctttctctgccggagaaggaacatgtcgcccaaaaaaggataggtgtaaaaacattacagaaattaatctctaatagagttatccctattcttgacctgttattgtgggagagaattaacaataaatctgtctcaaatcctatgctttcactactcgtctttaatgatgaccctaaagatacgcaggcgattaaagaatcaattaaaccgtttgcattagaggcaatgagtgataaatatactcgcctgcttagattgcatattaaccgtgatgctgaaataggaacatgcaaaatatcagaactaatgcgtagagatttgtag

SEQ ID NO: 288261 - DNA, 207 bp, Morganella morganii
atgcagcaacataaatatcagttggtgtattacaaatctcactgttttttatatcgaggtttcaatatttataaacttccgcgtaatacagtcagaaaaattacgcagtacagagtcatgcaaggtgataattctttcgggttatttgatgcactggctgaagtgacagggtttattgatgggttatatgagtggagaaaactatga

SEQ ID NO: 288262 - DNA, 552 bp, Morganella morganii
atgagttactcacaggctgagaaattacaaatactaatgctgtgcgatatataccgagcattagacatagaagatggctttaaccctgatgtagtagaacaagcggtgtcaacagataactactgggctttatcttgggagtacccatcgcttagtaatcaagacgataccccagagagtgttaaattatttgttgatactgtagatatgtttgatttgcttgactatacatacaaaaacttacctgatgaacacaagcaggaagttgctgagaaagtcgagttcttttcgcctgaaagctctttcgttttccctggattcgacgggaataatgaaattgaatacctgacaattggctctttattaaaaacaatggatagattctcgggaaaagatctaacgaaaaactcgcatcgcccatgtgttgatatataccgcagaatgcttgaagtgttcttgcctgcaagacgtaatttcaagcacggtgagggcataccaaaagacgatttaattaatactcttttggccaaaactcacccatcaaaccgataa

SEQ ID NO: 288263 - DNA, 534 bp, Morganella morganii
atgaattatccgacagtatttaacggaattgatttccgtgagttaatttttcttagtggcgcagatgccgagaccgacacatttaaagtggcactggcattcaaacgtggccacaaagatatcctgagaaaaaccagagctgtaataaagtcgtgttccccacaattcgcagagcgcaattttacgctttgccatgaaaacaacgacttgcagaacggaaagcctcagccattttataaaatgacccgcgacggctggatgatgattgttatgggttttactggtgcggaagctatcaggcttaaagaggctttcattgctgcttttaactggatggcggatgtcatcaaaaataatatccgcagtatggagcaggagcgcaatgaagtaatgctcgaattcatgaaagagaaagatgtggccagtatgtcctggcggcttctcaatcgctggggtagagtcaaaaagccgcagttactcagtcgcattgctgaaattgaagagaaagggcagttactgctgccaagtgtttaa

SEQ ID NO: 288264 - DNA, 396 bp, Morganella morganii
gtggagctgaaagccaaacaggaacgtgaagctgcggaatttaaagcacgacaggaagtcgaagcggcagctaagagagaacgcgaggccagagaggcgcaggaacgcgcagagcgtgaaaagcaggaggctatcgcaaaggctgagcgtgaaaagctggccgcagttgaagcggagcggcgcaaggcagaggaagccgaacgtgcacgactggcagagattgagcgccagaagcaggaagaattaaagcgccaggctgatactgcgcacagagctaaagtaaataaccaggcgatgcaggatttaatcgccacaggcatcccagaagattgtgcaaaggcatgcatcattgccatcgccaaaggatcggtatcatcagtaaaaatcaattactga

SEQ ID NO: 288265 - DNA, 393 bp, Morganella morganii
atgaacaaatatagtgacaaatcagactatgagattaataaattgatagctagattaaatgacggaatacatattgatgatgaaataaccgatattgattgttatatacaatcacaatcgtcaccatcatctgtattgagttgcaatggtcatataagttacttaatttatgatttctgcaacaacccgtcggacgcaatgccgattattattgagaatggcatttcattattcgcaccgggattgtctgacatgtggacggctgagtatgttgattatgaaaccgaccgcgaatatggtgtttataattacgaagctataaataaaaacccataccgcgccgccatggaagtattcctgatgatgaaagaggcggagaatgaaaaaagttga

SEQ ID NO: 288266 - DNA, 144 bp, Morganella morganii; identical to SEQ ID NO: 283854

SEQ ID NO: 288267 - DNA, 291 bp, Morganella morganii
atgaaaggtatgcgcagcattgctccattcggcttgagaatgccggatgcgttaaaagaaaaaattcaggagagagccaaagccaatgggcggtctatgaactctgaaatcattcagattttagaggacgcagtgggtggtaatggtaatgaaaactctaaatgggtggctggtattctggcctacatgaaagtaaataaaggcaaggacggtaacactatcctgacgatggatcttgataaaattaaagatatgagtgacgaacagcagaaaaaagacgagaacaaatag

SEQ ID NO: 288268 - DNA, 495 bp, Morganella morganii
ttggccatcgggttattaacaccgggtatgtcgttggataatatactggccgaattgttcaattatcgcggtttaccgctgctctcttcgggggttttattagttatctgttgttctatccgctttatggcgatttcagtcggggcgattgatgccgggttaacccgtattccgccgggcatggaacaggcctcaagattacttggtgaaagtgagtcgggaacctttttccgcgtacatttaccgttattgcgtccggcattagtgacaggtgctttgctggtttttgctgatgtgatgaaagagttaccggctactttattacttcgtccggttaactttgaaacattagcaacatctttgtatgcagaagcggcgagaggtacctatgaggagggggctgttgcagcattactgattgtattggccggaatgctcccggtaatactattagcacgtagtcaattatcttcatccgggccaaaacaacgataa

SEQ ID NO: 288269 - DNA, 123 bp, Morganella morganii
atgattaaaaaatataaccagaatgaagttaagggacgtaactttatatccgacccttgttttgatgaatgggataatgaagtctgggataaaggtgagccggggaaatatgcaaggaaatag

SEQ ID NO: 288270 - DNA, 507 bp, Morganella morganii
atgaaaacatataacccgtattaccagcaaagaacagagggtgtgattaataatgctctcagtgaattaacccgcattatggcactgcgtgttgatcttcgtttaccacccgattatccggacagcccggatgactctaaagtaataacccgtttctttgattctctgaaagctaaactgcgttatgacacagcccgtaaagcgtcccgctgggggcgtaatctcaataatccgctttattatgtctgggtacgtgaatacggtgaaattaataaccgcaggcattaccacctggtcttattcgtgaataaagacatttatcattcaccgggagtttataacggggaaaataatctggcctcttttattcagcaggcctggtgcagtgccaccggtttaaggtacccggcgtattcccgtctggttcatttccctgagcacggcgtcgtttacctcgacagaaacagccctggtaatccccccatttttaacggaggtaataagtag

SEQ ID NO: 288271 - DNA, 3123 bp, Morganella morganii
atgacgcagcagaccaaaaccatcgccgaatcaaataactttattgtgctggataaatacactgccagacaggacggcggagaccgttatcagagtgaggaagaattagagcgcgaactgattcaggacctgcgtaatcaggggtatgagtatctgccggacttaacctcaccgtctgccatgctggccaatgtcagaactcagcttcaggtactgaataacgtggtttttactgataacgagtggcggcggtttacggaggagtatcttgataaccccggcgataccatcattgataaaacccgcaaaattcacaccgattatatttgtgattttacctttgatgacgggcgtctggacaatatttaccttgctgacaagaaaaaaccggtccgtaacaaagtgcaggttatccgccagtttgagcagaccggaacccatgccaaccgctatgacgtgacaatactggtcaacggcctgccgctggtgcagattgagctgaaaaaacgcggtgtggctatccgggaagcgtttaaccagatacaccgttacagcaaagaaagctttaatactgataattcattatttaaataccttcaggtctttgtgatttccaacggcacagatacccgctattttgccaataccaccaaacgcgataaaaacagttttgatttcaccatgaactgggcccggtcagacaataccctgattaaagacctcagtgatttcaccgccacgttctttcagaaaaataccctgctgaatatcctgtttcattacagtgtgtttgatatcagcaataacctgctgattatgcgcccttaccagatagccgccactgaacggattttatggaaaatcaacagcgcatacaaagcaaagcactggcgcagcaaagaaggcggcgggtatatctggcacaccaccggctccggcaaaaccctgaccagttttaaagcggcccggctggccactgaactggattttatcgataaagtgttcttcgtggttgaccgtaaagaccttgattaccagaccatgaaggaatatcagcgtttttcccctgacagtgtcaacggctctgacagcacggccgggctgaagcgcaatctggaaaagcacgataacaaaattattgtcaccaccatccagaaactgaacaacctgatgaaaagtgaagcggatttaccggtttaccgtcagcaggtggtctttatttttgatgagtgccaccgcagccagtttggcgaagcacagaagaacctgaaaaagaaatttaactgtttttatcagttcgggtttaccggtacccctatttttgccggtaaaaacgcattgggtgcggaggataccgccggtgtcttcggcacagagctgcattcttacatcatcaccgatgctatccgtgatgagaaggtgctgaaatttaaagtggattacaacgatgtccgcccgatgtttaaggcactggaaacagaaacggacgaacagaaactcagtgccgctgaaaataaacacgccctgctgcacccgcagcggattgcggaagtcacacactacattctgaaaaacttccggcagaaaacacaccgggcttaccccggggcaaaagggtttaatgcgatgtttgccgtcagcagtgtggatgcggcaaaagcctattatgaaacctttaaagccattcagcagcaggctgcggcgcagaacacaaactataaaccgctgaccgttgccacgattttttcctttgccgccaatgaagcgcaggatgcaatcggtgatattaacgatgagagctttgatgtcacggctatgaacagcagtgccagagagtttctggaatccgccatcggggattacaacgcccggtttaaactgaactacagtacggacggaaataattttcagaactactaccgtgaccttgccgaacgggtgaaaaatcaggaggttgacctgctgattgtcgtcgggatgttcctgaccggctttgatgccccggcactgaataccctttttgtggacaagaacctgcgttatcacggactgatgcaggcattttcccgcaccaaccggatttatgatgccaccaaaaccttcggtaatattgtcaccttccgtgatttggagcaggcgacgattgatgccatcaccctcttcgggaaaagcaatacccgtaacgttgtgatggaaaaaagctatgctgagtatatgaacgggtttacggacgcactgaccggtgagacaaagcggggctttaccgaaatcgttgccgagctggaaagccgtttcccggacccggccgctatcgaatcagaaaaagaaaagaaagccttcgtcaggctgttcggggaatacctgcgggcagaaaatatcctgcagaactacgatgaatttgttgcgctgaaagccctgcagacactgaatctcagtgacccggccgccacggaaacctttaaagcggaacactatctggatgatgagacatttgcggaactgcagatgatacggttaccggctgagcgtaaggtgcaggattaccgttcagcatacaacgatatccgtgactggcagcggcgtgagcggtctgcggaggaaaaagagagcaccacggttgactgggatgacgtggtgtttgaggtggatttactcaaatcacaggaaatcaatctcgattatattctggggctgatttacgactaccacaaaaaaaataccgataaaaccaccatgaaagaggaagtgaaacggttaatccgcgccagtctgggaaaccgggccaaagagggactggtggtcggttttattgaaaatactgatttcagtgacctgccggataaagaaagtatcattgaggccttctacgcctttgcccagcaggcacaggcgcgtgaggctgaagccttaatcagggaggaaaatctcaatgacgacgcggccaggcgctatctgcgggcatccctgaagcgggagtatgcaaccgaaaacggcacggcgctcaatgaaaccctgccgaagctgagtccgttaaacccgcagtacaaaacaaagaaacaaacggtatttcagaagatggtcgcttttattgagaaatttaaaggtgtcggcgggaagatatag

SEQ ID NO: 288272 - DNA, 1206 bp, Morganella morganii
atgagtgagctgagttatctggaaaaactgttggacgggactgaggtggagtgggtttatgcctccgaaatatttaatataaaaaatggttacactccatcaaagtcaaaaaaagaattttgggaggatggggatgttccgtggtttagacttgaggatattcgagttaatggtagaaagcttattgattcaattcagcatgtaaataaattgggtgttaaaggagctatatttcctgaaaattcaatatttatgtctaccacagcaactattggtgaatatgctttagttagaacaccacacttaacaaatcaacaaattaccaatttttcactatcagaaaaatttaaagataaattggatattaactatctattccataggttttacgattttggtgagtggtgcaaagaaaatgcaaataaaagtggtggtttatcgattataggtataaaaaaactatctttatataagtttcccatcccttgccctggcaccccagaaaagtcccttgcgattcagtctgaaatcgtccggattctggatacattcaccacccttaccgctgagcttaccgctgagcttaccgcacgtaagaaacaatacagttactatcgtgaccagctgctgagttttgatgatggtgaggtggagtggaaaacactgggtgagcttgcagaaaatctggactcaaaacgtaaacctataaccagtgggttgagagaaactggcaaaatcccatactacggcgcgtctggtattgtcgattatgtcagggattacatatttgacggtgattacttattagtctctgaggatggcgcaaatctaatagcccgtaatacgcctatagcatttagtattagtggtaaaacatgggtaaataatcatgcacatgtgcttaaatttgaaacttacgcggagagaaagtacgttgaatactatctgaatagtatcgacttaacttcttacatttctggtgcagctcaacctaagttgaataaaaagaatctggaaagtatcaaaattccaaatcctgccccaaaagaaaaagaacgcattgtggctatattagataaattcgatacattgaccaactctatcactgaaggcttgccccgtgaaatcgagttgcgccaaaagcagtacgaatattaccgtgatttactgttcagctttccgaaaccggaatcggtgaacaactga

SEQ ID NO: 288273 - DNA, 540 bp, Morganella morganii
atggcgattagtacggatgaaaaaattttaggtctggcactgctggctgaacggcagcaaaaagagctggctgacgctatcgcggtgatgagtgaatccgtggctgaatttaaatcggtgtcagcgaatgtgtctcagcaggtcagacaaggggtgacccgtgaaattcagcagatggatctcggacggttgctgagtgagcagacggcggcaacatttaaatcggtagaagagactgcgttactgattcagaagcaggccagtgtgattaaccgggagacgttttcagcgagagaaaagctactggatgagtacggaaaattaagaaaccgcttttggtggttcattggtgccggtgttatttttgcagccggtctgactgtatttaattccaggtatttcaatgaggagctggaagtacttaaagcgaaccaaaacgttatatacagtgaacaacagcagttaaaaaagctaattgaaaaatcagcagataagccaaagagtccggataacacccgtaaaaaacaggatgtttactaa

SEQ ID NO: 288274 - DNA, 441 bp, Morganella morganii
atgacgatggcaacagcgaaagataaacgcagaaaagaagccaaggcgttactggagggcttctggggtaatgtttttaatttcagtaacccaaaaccgttaaagacagggattgaggaggatttactggacgcatcggaagcattgggtctgccgtttgatggtgatgttataaaacgggcactcagtgcctatgtttataatctccgttattttcacgccctggcaaagggcggagcccgttatgatttacaggggcagaaatcaggtgaagtgacggaggaggaacggctggaggcgaaagcatcgattaagcggtgctatgaacgttcagaggaaaagaaacgaaaccgggtcattgaggccgaaaatcaggcgaaagccaaagcgcgaaaaaacgcagccaggaacgcttataacggtaataaactttcagggtaa

SEQ ID NO: 288275 - DNA, 345 bp, Morganella morganii
atgatacgcattgtcgccttagttctcctgctgactggttgtgctcatgatagagataaaaactatgatgtgcagcataacgtttcagcctccactacgaatgaatacgtcaagcagatccgcgattacatgcgcggcgcgctggtaggttttgaaaatggtaagcaatgcaacatagtacttcaatatggtagctctggactgttggaatcaacaatggcccaggaaggcgatcctgatttttgttctcatattctcaagtatatgatcgatcctcttcatcccataccaaatgcgccgctcgagctgcgtaataaaccaatttatttgaatttcaaattatga

SEQ ID NO: 288276 - DNA, 258 bp, Morganella morganii
atgggattgaaattgagagtctattggttcgataacaagacagaagactttgttggtgaagagtattctaaagattttggtgatgacgactttttaatcggagaaaccgttaatccacaaaatgagaatatcatcaataatggtgagtttgacttggaaaaagaatgggttgataccattcaaaagcatataactcataaaattgaacaaaataaatatgattattttattgcctttgcttaccgagataagtggtaa

SEQ ID NO: 288277 - DNA, 189 bp, Morganella morganii
atgaacaaacaggaaaaagctgtcctgaacatggccggattcttacggtcacaaagtctgctcttactcgaaaaactcaatgaactggattcggatagtctagatgcggaaaccaatctgtgcgaagagctccacgaacagacagaggcactgcacaaacgactggaagcaaagctgggcggggagtag

SEQ ID NO: 288278 - DNA, 507 bp, Morganella morganii
atgggcatcaagcaaccaacagatgaagaactcaaagcgtttcttctgaaaaaatatacagaagaaataatgaataaaatgcttgaacatgatacagatcaagctaataaaagtaccaaaaaagcaattaacaaatacaaagacagattgatgcaggtcaccccggagttattttttgaatttttggtaaccaaaggtgtttcattaaaatgtaactcctgtggcgctgaagagctttctgttcccgaaggttcctttgtagatagtgaaaaagtcccagataatttcagtgagctggatgaagcacaaaagcgagaagtaatgaatcaagccactactcgctatgtttcttatacaatcctcgacaagaacaaagatagtttgcatgggttgttacggtcttactacagagtacattgtctgaattgtggaaatctcagcctttatcgctcatcgtcagttttgcaatggtttgaaaaatccaaaggtgagcaaccagatgaataa

SEQ ID NO: 288279 - DNA, 309 bp, Morganella morganii
atgaataacacatttaaagaaaaagatatccgtctcgcggccattggtggaaaaatacttgatgattcctataatacaaatcaacatggtggtggaaacggcggaggcggcaatatgcttgaaaaaagaatagaaaaactagaatcggatatcagttcaataaaaactgatctcgcggtgatccgttcaaattatgctacagcaaccgacctccataaagaaatcagcgctcagacaaaatggatcggtactatccttattgccgccataggtcttagcttaggcgcagtaaagttattctttttttaa

SEQ ID NO: 288280 - DNA, 1419 bp, Morganella morganii
atgagctatgatgcggttctcaatactcaacgtggcttgattgtcgctcccgctggttgcggaaaaactcaactaattatagacactcttaacattgctcaaaccaaaccttatctcgtcctaactcacaccacggctggagtggcggcattaaagcaaagacttaaacgattaggcgtcccaccgaaaaattatgtcgttacgacactcgatggatgggcgctgcgattagcaaaattctttccgactttatgtccaattacaacgactatagagcagcctaagtttttttatccagagcttagaaaggcagtaggagaactattacgttcaggtaatataaacgatatcatacattcgtcatattcaaagttacttgttgatgaataccaggactgcgatctaaatcaacactcaatcataaaattgctgtctgacatattacccaccgttatttttggcgacccaatgcaatgtattttcaactttagaggcattgtaatgccagtttggacgcaggacgttgaggcatatttcccgactattttgactctaaatactccttggcggtggaataatgctggtgccccaagtttaggactatggatactggaatgtcgtaaagcccttgctaatagagaaaagatcgatttaagttcttgcccaaaattcgtgaactttcaaaacataacaggcgttgcaacatcagatactcaaatccagcaaaatgcgcattacaatttaatgcaaaaatacccaaacgagtcagccttaattcttggagattcagctcgccccgcctccagacacgcttatgcccagcatgtgaacggcttggatgttgttgaacctgttgatttaaatgatgtaactcgtgcagcaaatgactttgataaaatgcaggggctcgttttagttcaatccatcttggcaactgctgcctcaatgatgacaaatgttgatacggccagcacgctaaaacgtatttctacaattcaagcaggaaggaatagaaccccaccaactttagttgagcacaccttatgtttactaatacaaaataaatcttctaggggaatattagacgcgttcctacagctagaagcgaaaccgggttctcgaatttatcgtcaggcagcatttaatgcattgaaagatgctattgagatgtcatcaagctctcttgaaatgagcatctttgatgcagcgacaaaagttagagagttaagacgacatgctggtgataagcgtatttccaaaagagctataggctcaacgctgttattaaaaggtttggaatgtgatcatgtaataattcttgatgctgatgccatgaatgcacaacatttatacgttgccctttctagaggagctaaatcaataacggttttcgctcgaaaaaaattggttggtaattaa

SEQ ID NO: 288281 - DNA, 1734 bp, Morganella morganii
atggcgttaattagatacattgaagttcggaactttcgttctattcgtaatgctaattggtgccctaagccaggtttgaactgtattattgggcctggtgattctggcaaatctacccttcttgatgcaattgatttggtattaggagcaagacgttcatatccattctctgatgcagatttccatttaatggatacaagccatccaatagaaatcaccgttactattggagatctggatgacggtcttaaaaaccttgaatcttacggtcatttcttacggggttttaatcctcttagtcatcaaatccatgatgaaaagcaaaatgatgacgaaacagttctatctctgagattattagtaaaagaagacttagaacctgagtggttactgtattctgaacgagctacaacagaaggaattgaaagacgtttaccttggaaacatagagagattctttcacccacaaggttaggaatgacatcacagtatcatcttgcttggggaggacgttcagtcctaaacaagctttctgaatctaactttgatgtttcgtcaaccttggctcaaattagtagacaaaccagaagtaattttgcagcacagccattgcctcaacttactgatactcttgaacaaatacgcacaattgcaaatactcttggagtgccaattggtgatttaaaagcacttttggatgtgaatggtgtatcactaacgaatggcgctatcagtcttcataatgaagataatacaccgttgaggctaatggggacagggtcgtctcgcttactaattagcggattgcataaggccgctagtaactcgaaaataattattgtcgatgaagccgagtatggtcttgaaccttaccgaataagccgacttttacacgaattaggctcaaaagaaagtgaacctactagacaagtatttattacaacacattctccgtatgtgcttagagaactacaggctcaacagcttcatgtacttaggaaatatgaacaaaaaaagagttctgagttaccatcccacttaatctttagcttaaacggtggcgatcaagaacaagcaacgttgcgggcttgtgcggaagcttttttcagcaaagcagtaattgttggtgagggtgctacagaggttgggttactacgtggattggatctattttttcagagtatacctactctgggttttttaagtagggggatatttcctgctgacggaggtggtggtgataatatgtttaagcgagcagaaacgtttaaaagtttgggttatcctactgctctgttaaaagattcagatattacttgcgctgcgcatcagcaacaaacacaaacgtgcaaagaaaaaggggtatctatctttgaatggggcaatcagttatcaacagaaggggctatttttaactggtgtagtatacagactatacctattcttgttgatcttgctgcaacactaaatggtcaacaagaagtatctcagcacatactaaattgttcccaaaatcaacactctctgcaagactgcacaacaactcccgttgatagtatgcgtaattcgttggctttagctgcatcaaagtataaatggtttaaaaatatcgctaatgcagagctcttggccaaggatataattgggccatgttacgatcgtttctctcaaccattccaagccatcattaataatttatatacatgggctgttgagagtggagataaaagatga

SEQ ID NO: 288282 - DNA, 384 bp, Morganella morganii
atgcaaacagaagttatagaacaaaaatttttcaaagatatggacggtaaagtaagatgccttgatatcatgccgatgaataaaaattcgtgggaagctgaaatatctgaaggttgggtgtctatcagtaagaaagaggcagataaaattacgaatccgccgccgacaaacgctcagcttatcgaacaggcagaagcccaaaagcaatacctgattgccgaagtccacaccgaaacagaaatgctccgggcaaaactggcacttaagcgcatcaagccagacgaagaagcgctgttaatcgcttggctggattatctggatctgctggatgcagtggacacgtcactcgtaccggatatcgactggccgcagaaaccacagtaa

SEQ ID NO: 288283 - DNA, 876 bp, Morganella morganii
atgaagctatatataataggtaacggattcgatttatatcacaacctaaaaacaagctatggtgattttcatgattatatgaaaataaaagatcatgatgtatatagatttattaatgattatgctcctgctggagatgaatggaatgagcttgagtcatccttaggaagtattgatttttataatataatttatgattgcgaaaattttttagttccttattcagacgaaaattttagatctcatgatcatcatagttttcaatacgaagttggtaatatcgcagaaaacctttcatcaaaattattgcagcactttagttcttggattaagagcattaaagttccggttgatcctgtatttagaaaattcaagttttttgaactcgattcaatttttcttacttttaattacacgaacactcttgagtatctttatttaattgaaaaagaaaaaataaagcatatacacggttctatttccgatggtagtaaaattactttaggtcatagctgggaacgatcggttacgataaatccgtcacctggcgcggaacaagacatacgaatttgtgacgcatatgattctttggatgatatgtttgatataaattttaaaaattgtaaaaaaataattaaagaggaaatggaatattttgaatctttatcctctgtttcagaggttataataattggtcactctctttcagatgttgatgctgaatattttaaagagattttaaaattcgcccctaaaaatacgatatggagatatgctttacgcgaccctcaaaatgatcatgagaaaactcagatgttaattcatcttggtatcaatgagaaatttattaggaatataccaatgcattctctttga

SEQ ID NO: 288284 - DNA, 1020 bp, Morganella morganii
atggctatgaattttaaaaatgcagcacttgtatctgtgatgagtgaagctgcaggatttaaaacaggattaacattagataaaaatgacatagtggagttattccctgaaaattccaagtttaaaaatattttatctttacctgatgagcgccatatcagaatgcactctgaagaggtagatgaggtatttgcttatatattatttaaacttggtagtgtagattctccgaacactatgccaagtacagttattctgtatcacaagtataaagatgatcctgagttaacaaaaatcaatgaagctattatgaatttatggattcagcacattggcagtgaaatggtaaaagcaatacaaaatggcacaaattcattggacccaacgctatttatgagtgagtgcaataataaatttggtcgtattggtcatgatataggtatggagtatattaaaggcaatgtagaagatatgcatcgacgccttagtggaataagaagaattgactggaaagacaacgtagctcttaaggagctttttaaatctgaatctcttgaaacccaatatggaaattttattgatcaaagatatataaattatttgcaacgcaatactgataaactcaatgaaatgcactggcgaaaatttgaaggtttgactgctgaatattttagcagagaaggatatcaggttgaactaggtcctggtcgtaatgatggaggtgttgatgttaggatatggaaagataacaagcaggaaaacgaaccaccattaattttggttcagtgtaagcgatacaaagataaggtagaacgtgctgtagtaaaagccctatgggcagatgttcagtgggaaaaagcgaactctggactgatagtaacaacatctggtatatcccctggtggactatctgattgtgaagcgcgaggttataatataaaagaagctgaccgaaatactattattcagtggttaagtaaaatgaaagaaccaggaacaggaatatttatggggttgtaa

SEQ ID NO: 288285 - DNA, 348 bp, Morganella morganii
atgaacaaatatcgtgacaaatcagactttgagattaataaggctgtggctattgctcttggaaaggttataggcataaggccagactccaatattatatatttaattggcggtgatgagcttatagaattcgacccctgcaacaacccggcggacgcaatgccgattgttattgagaatgggatatccctaatttttgacactgggcgtaaggcatgggtagcaggaattgcttattgggtagatggttgcgagtggcaaataagttatgaggtggaaagaatgaatcaataccgcgcagctatggaattattcctgatgatgaaggatgcggagaatgaaaaatag

SEQ ID NO: 288286 - DNA, 453 bp, Morganella morganii
atggatagtaaaatattagagttggctaaaaaattaaaatcagatgccgtatcctcgcgaggttatcaggttccaaaatgcacagtatggtcagatcagttgattagtttgtgctctagtgttgaaaaaatgcaccaggatagaaaggatagcgccggattaataaacgccttcataaaagatgatgttgattggagtttattgcttgattctaaaaataaagacatatcaatcttaacagaggttattataaatttagctgataaatgcatatcactagataatagatttaacaacatcataaaaaataatacagctggacatatattaataacaaaaacttttagcgaggcaatgttttttgagaatgaattatcagcaaaatcatttttaaatgatatttgttttacagataaaaaagcagttataaaaaaagtttatttcatagattag

SEQ ID NO: 288287 - DNA, 168 bp, Morganella morganii
gtgaaatttaaagtaggcgataaagtgaaaatgaaaccgaatgattttcttgggtatatcgtagtgagatacaacggggaatatttagtaagaaaactgaatggcagtgagggatggtaccaagaaaacgagctggagctggagactgacaatgaacaaatatcgtga

SEQ ID NO: 288288 - DNA, 1131 bp, Morganella morganii
atgacattcagtcaatcgttcagttcgctgaataccaatgtgtacctgaattttaaccaccagacctactgggatcgcccggcaagtgataactggaatatttccacctctcattattttgatatcgggcaggtgaaaaatatcagtctgaatttatcggcttaccgcaaccgccacgaaaacggacgcgatgacgggatgtatgccgggctgtctgtgccgtggagggagagtggtagttttggttacagcggacaattcagtaaagggcagaacagtcactcggcggattatagtgaccggattaatgagcggacaaattaccgtctcagcacaggagtgaccggcgatcaccgggtcaccggtaacggttatatgaattatcgcggcgataaagcggaagtaaccgcaattgccggattttccggtgaacgctacagtgcggccgggctgtctgtacgcggcgggtttaccgccaccgcagaaggtgcggcactgcaccgcagtggtgtgatgggcggaacacggatgctggtggataccggcggagtagctgatgttcctgtccggggcggaggtgctgaaaccacaaccaactactttggtaaagcggtcgtcagtgacgtcagtaactattaccgcagcagcgttaatgtggatctgaaccggctgggggaaaacgccgaagccacccgctctgtagtacagggcacgctgacggaaggtgctgtcggtttccgccgcttcggtattgtctcaggacagaaagcgatggcggtactcagcctggctgacggagatgttccgccgttcggggccgtggttcagaaccacgatcatatacagaccgggatggtcagtgaagatggcatggtctggctctccggtatcaatccggaagagacaatgcaggtgtcatggggcggggatgttcagtgtgaaatccgtttcccggcgacgatcccggacggaaatctgctgttgccgtgtgtctctgtggcgaatccggtacatgaaaagtcagaaaagtcagaaaagtcagaaaagtcagaaaagtcagtaaaaacagaaaaaatatcccgttggctgacagatgctgacgcggagaacaccagagagagtaagcaatga

SEQ ID NO: 288289 - DNA, 588 bp, Morganella morganii
atgaatttagttaacaaactatccggcactcaaagaataatcccggaagaaagcaacctgaaggacatgtcaaaaataccttttctgaaaaaactactggatcggttaagcgcaccgcaaaatacgaatgtcaaacttacaggaaactacgtcaatattgatgtcgacaccacaactctgagcaggcagatattatcctttgtttataaatcagaactctcaattcccggcgccggaaataaccacgaaaaatcagaaaacagacaaaaagaaattaatgatggtgtgaaaaaatggcttacccaggaaaaaagtatcataccggtaaatattatcaaacgggaagttgacctgatgtatgcagagaaaaagcttgtgacaacaccagaagaactggacaaaataattgatattgttaaagaaaaacatctcggaaacaaagagctggaaaaacccgggattaactgctccactccgtccgttcttaagcttaataatatcctgactaacgaaattaatgagccggggataaaaaaacagttaagtcacgactttactaaaaaaatgcctgaaatgtcagataattaa

SEQ ID NO: 288290 - DNA, 915 bp, Morganella morganii
atgagcacaaccaccgaaattcagaaccagactgaagaattaaccctgtccggcgatcaggcggcggcatccgcagatggctcagttgtcgataatgccaacgacaatgcaggtcaggaagaaggcttcgacattgtactgaaagacgatgagaacaaatcggaagctaaaccgaatgagaacgccaaatttgcagcgcgccgcgtggctcgtaagcgccagcgtgaaattgaacagcagatgcaggcaattgaaagcggtgaacttcctgagcatttacgcgttaccccggagcttccggagatgcctacacctgacgattatctgtcagacacggcattagaaaaatatgggtttgatacctataaggccaacgcggcatatcaggctgatctgcaaaaatggcaaatcagcgcaatggatgcccgcagcaacgcagtagcagagcaggggcgacgtactcaggcgtacacccagcaaaataagcaaattgctgatgccatgaaagcacactatgacgctgctgatgagttgaacctccctgactatcaggacaaagaagatattgcattgcaggttatgccgaaaggcgtcgacaccgctattgcaacatatttccctgaaaagtcggcggcaatcatctactacctcggctcaaatccagaaaaagcgcgtgaactgtttagtaaagacccgactcaggcaacgattgaattagcacgtcttgccgataaattaactctcacgccacgcggtaaacaacgctccgaagcgccaccggctgatgaaccaataagcggagatgtttcagcggctaatgtcgccggacttcagaagcagatggacaaagcagccagtgacggaaacgtaacgctttaccgccaaatcaaggcgaaattacaaggaataaaataa

SEQ ID NO: 288291 - DNA, 771 bp, Morganella morganii
atgttctttcccggtttattcagaaaatccgatacgggtatgagttcgtcagagctcagcgaaatgatcggtctgacctatgacacctattccggccgtcgcgtcagtccgcaactggcgatgcagcttaccgcagtattcagctgcgttcgcgtgctggcggagtcagtcggcatgctgccgtgttctctgtatgaacagctggagacaggcaaccgccgggctgtccgtgaacggcttaaccggcttttatctgtaaaccccaataattacatgacaccgcaggagttctgggaattactgatcgcctgcctgtgtctgcgcggcaatttttatgcttacaaagtcaaagcgctgggtgaggtggtggagctgctgccgctggaaccgtcttcagttactccaaaactgaacaataagtgggaacctgaatatcaggttacttttccggacggaaggcacgacacgctgacacaggatgatatctggcatgtgcggattttcaccctggacggattaaccggactcagtccgatagcgtatgcaaaacaggcggtcgggctggggctggcaacggaggagcacggctcacgtctgttcgggaacggcgcggtaaccagcggtgtcctgcaaactgaccagtacctgaaagacgatgcctgggagcggctgaaaaccgactttgaaaaccggcatcagggactggctaatgcacataaacccatgatccttgagatgggcctgaaatggcagcaaatcagcatgacatag

SEQ ID NO: 288292 - DNA, 513 bp, Morganella morganii
gtggaaaacctcatcaaagctttagatatgtccataaaaacaaaaaattggtactctgttttatttatatcactagcacttccagatatatgcggaaaaatagatgagcccaataagggctcaaaagcaaggacgataaactggttcaataaatatcttaagcccatttatagtatgggtgaaggtgaagatatacacattttcctgagtggagccgatttttacgccctgcgttgttcatgcttacatgaaggcagtagtgacataacatcacaaaaagcaagagagacgctggatagattttcttttatcgaaccagcaggcgacatgataattcacaggattcaagtaaataactcacttcaccttcaagtagaccaatttggggaagatgtccttgtcgcagtaaagaactggctaaatgatatttctaatgacaaagaaaaaataagcaaaatggagaacatgcttcacatgagggtcttagacccttcgaaggacttctttatataa

SEQ ID NO: 288293 - DNA, 162 bp, Morganella morganii
atggcagaaaaagataaacacgctggtttcgcagcggataagcactgcgtaaatcacgctggcgagcactggtggtataaaaagattgaaggcggatttactgagtgctgtgaatacgacaatgagtgtgaaaagcacaaagctatccgcgacaaagaataa

SEQ ID NO: 288294 - DNA, 864 bp, Morganella morganii
atgaataaactcgagaatcattttcttttcctccctaaaggggctaaggatgtgtttttatcccatttgaataaactcatcaactattcccccaccatcggtctgatgggtaaaacaggggctggaaaatccagcttaatcaacgccctattccaatctgccctatcgcccgtcagtaatgtctctggctgcacacggcaagcccagctcttcaatatgaccataaacaaccacacactcacctttattgatttacccggtgtgggggaaagccttgagcgagacaaagagtaccaccagctatatcgtaacttattaccagaactggatttaatcatctgggtactcaaagccgatgatagggcatggtcttctgatgaacagtgttatcgctttcttactgagcaatgtggctaccaatctgaacgatttctgtttgtattgaatcaggctgacaaaatagagccctgccgccagtgggatgaacacaacaaccagccatcccttgaacaagtggctaacttagaattgaagcagcaagccgtgataacagtattcaagccgcaccaccctgtgatgacagtctctgcggcagaaggttttcaactcactgaattagctgagcaattaatacaggcgttaccggcgcaagccagtagcggggtagctaggcaactgaacagcacttaccggacgcaatctgtggaaaattcggcacgtaacgattttgggcaatgtgtcagtgatatcatcgatacaataatcgatatcattccattacccccattgataaaacatacgatcagcacggtcaaaaacagcatcgtctccgtcgctaaatccctgtggagcctgcttttttaa

SEQ ID NO: 288295 - DNA, 207 bp, Morganella morganii
atgacgttattaaccccactaacatcgtatcccacacattgccctcactgttcttctgagcaagacatcattgcatggggtacgggctggatgtgccgcgattgcaattttgaatggataacgccgattaaaaatcaaaacactatctccagtgagattaaggagagactgcaatttcacggtaaagaaacattcagctattcatga

SEQ ID NO: 288296 - DNA, 567 bp, Morganella morganii
atgaaaaaatatttagctcttattacatccgcatcattatgtcttatcgcttcgcaagcttttgccgccagcaagccgcctaaagatacaatttgggaatataaaggtgatggaggtaaaactttatggcaagtctgtggcagccaaaacagtacctgtaaaatagtgggttcaaccaaacattatgttgccgtactgaaccgaaaatctgcctctgggtgtgcatttggtgatttttatatcgtagcgagaactgaaggtttttggcaacaacgagataccggcacgtgtagtccaaatgcttatattaaaaagggctacatcaacaatggtcaatactctacggtggacattggtgtcggaggaacgattgtggctcagtaccccatcggttattggagccagaagaaagaattttcaggtaaaaatcgccctcgttggaaagagaaaaatagaatgcaaggcgggttacaaactaacatgaaagcttatgaggatattcaaaaatatggacgtattcaaaaagagacattagaagaaatggagcgagagaaacaaaatcgataa

SEQ ID NO: 288297 - DNA, 210 bp, Morganella morganii
atgtttaagacgctaacgcgactaaaactggctaaagccataataaaagaccactcccttcggaagtggtttaaacttgacgatgaaagaatggagactaatgaacatgtatccacatttatcgattttgtttctctcgctccatttcttctaatgtctctttttgaatacgtccatatttttgaatatcctcataagctttcatgttag

SEQ ID NO: 288298 - DNA, 168 bp, Morganella morganii; identical to SEQ ID NO: 288287

SEQ ID NO: 288299 - DNA, 198 bp, Morganella morganii
atggaaccaacggattttgaaaagtggtgcgctggggatatgggatatccggtcgcgtacgttgttagtttacgtaaagataatttaggggagtacaggcacagcggcgttactgacagataccgcgcctacatggccggagttcgcagcagactgccgtaccagacgccgccaaaaggagatgaagatgaagggtaa

SEQ ID NO: 288300 - DNA, 210 bp, Morganella morganii
atgaaatggattaagacgagtgagcaactacctgaggctaaagagcataattatcaggttatcgcattgtgcaggaaaaaatatgtcggcgggaattacgacggtgagccgaagaaaacaatcgttcaggattgggttatccgccagtggcctaataactttctgtactggtcaagtatcccggcactgccacaatctccggaggagtga

SEQ ID NO: 288301 - DNA, 696 bp, Morganella morganii
atgaagaaagcaaataatatgcaaacactcgcatctcattgggatatgaacttatcactgaaagggtgctctccagaccatccagaccaatgggcaaagctggatgtagccagtgtcccacacagtgcaattatgcaggctatagaggtgatagcgaaaagcaacaaagagtccttatttacagtagatcatagcaatgatatgctgattaaagaccaactcattaccacaattcatcagaaagaagctggtaccatgaccatatcaagagaagagttagatgcaaagctagctcagaataaagctgaagtgcaagctatagcctctggtatgcgtgaggaaatggccgcttggcgtgaaacacagaacgcacaaatggcacaaatgaacgccacgcttgcttccatgtctgcaaaaatagatgcgaaatttgaagttctagacgcgaaaattgatggtgtcgacaaatctgtaggtggcagaattgacggcctaaatatagcagtatcaggaattcaatctggcatcagtattcgactggctgtattcagtgcgtttatagctgtattacttgctgtagctagttggtggatatcttcaaaccaaccatctccgcagccaccacaacatcagccaactgttgtccatgtccctgccccggcggaaccgccccagcctacaaataattctaaatag

SEQ ID NO: 288302 - DNA, 294 bp, Morganella morganii
atgagtaaagataatgaatacaagctactgaataaagacacaaattttaacaattactttgttgatattgcgggcattactaatagggatgataaagatgaattattcgatatcatgtttgtccgaaaggatatgagaccagcgatactcaatgaaggcatatatctaaaaatgcaaactaataccgaattagttgctgcatgctcattgacaatgcgcaaagatacgttgaaatcactgcacttaatcatctctcaaatggtggaatccttggaagatgaagaaagcaaataa

SEQ ID NO: 288303 - DNA, 282 bp, Morganella morganii
atggcaacaattactgttattccaaagaaagacaacgcgaagaaccgccggttagcaaagcaaatggcgttctgggacagaaagcgtgaggagtatgcagcgaagcctaaaagccgctcagtggaggagatttttgattcagtcatcaagcctgaatgccatttcgaaacactggctcaggtggtgattgaaatgaagaagctgccggaagcaccacgcaagcaactgagagtgaaccgcaagccgattatgccgaacggtggtattacggcaagggcataa

SEQ ID NO: 288304 - DNA, 300 bp, Morganella morganii
atggcaacaattactgttattccaaagaaagacaacgcgaagaaccgccggttagcaaagcaaatggcgttctgggacagaaagcgtgaggagtatgcagcgaagcctaaaagccgctcagtggaggagatttttgattcagtatttgcgccagcgaaagaagaacgtccggtgctgacactgaaaccaacacagtattacccatctggtgataactgctgcctgcctaaagtggcaattttcagcggagttaaggtcaagcagccgaaaggtgatttcgggattacagtgcgagcgtga

SEQ ID NO: 288305 - DNA, 555 bp, Morganella morganii
  misc_feature (26)..(35): n is a, c, g, or t
atgagtaaaacagttgacttcggtgnnnnnnnnnncgccgctcctcgtgatgcagttgttatttacgaggactatggcttcgatggtgacgaatctcgtcgtgagaccgtagagcgacgtcttattttggcaagagagttatggaccaaaattcgtgacgatgcacgcagggacttcaatagtcgcttaaaagttaaaaagcagagcgctggctcttggtctacagggcgagttaagttggatagatttttaggacgcgaattgtgtgtacttggttgggctgcggaacacgcaacgccagacgagtgctcagtaatttgtcaaaaatggcttgctatgcgtccagaagaacgttggtggctttatagtaagactgccgctgaagccggaaagcacgaccaaactcaaaagggttggcgtaaggctctttactgcgctctttcagacggtagcaatatcaagttagacgttaaaaaaaagcctaaaaccaaaaaaaacaagcatgatgacgaaccacaaggtctcttcgacttcatggaaaaaggagatatttaa

SEQ ID NO: 288306 - DNA, 204 bp, Morganella morganii
atgggtgttgaatatctttatttcgttcttgtgccggtcgctgaggaatttagaaaacaggcgctatcaaagaacagttcgtttgttgcgattaatagcggacgcaaatgcagaattaagttttcagataaaacattagataaaaactggcaggcattctgtgctcagcatgaacttaaaaacgacagtcgattggagtattga

SEQ ID NO: 288307 - DNA, 363 bp, Morganella morganii
atgatgctgctgcgccatatcaggcttgacgcccctcagcccgctgctgatcagcatacatttatgttaacaattgacagccggtattcattatcgctggccgtcattgatgagactgactggtatctgtcagcaaatgccggggaattaccacacattaaccaaaataatgaattactgcagaaagtcctgaagctgaatacgttaacacagctttccgggcaaccggtgatttccctgaatgagaaaaatgagtgggtgatctggagtcgtctgtcactgaatggtacagaagatagccatattattgaattatttgaatatattttaaagtcagcggattacctgctggatcttcactaa

SEQ ID NO: 288308 - DNA, 132 bp, Morganella morganii
atggtgtgtacagatacccgcgagattttttgctttctccgcctcactgttgcctgcatacacaaagcgttcggttacctcagctttctgcccggcggtctgttccgtgatactcagcagacgcccggctga

SEQ ID NO: 288309 - DNA, 357 bp, Morganella morganii
atgaacaaatatcgtgacaaatcagactttgagattaataaggctgtggctattgcaaacggctataaggttatgtcgtgcgaagaatcagtattagcctatattgatagcggatataagccattcgacccctgcaatgaccctgctgacgcaatgccgattattattgagaatggaatatcacttataaattccgacggcgttcactttgcggcggctccagggtgtgggattgaaggctaccttggtggtgatacagttggatatggttcacgtaaatacagtgaaaacgaaaatatctaccgtgccgctatggaagtattcctgatgatgaaggatgcggagaatgagaaatag

SEQ ID NO: 288310 - DNA, 1155 bp, Morganella morganii
atgagtgatgtaattgcagtaacaccgcccgccgcaccggcgggacgggaacagatggccacccgcgcgctcttttttgtcgccggttttgcctccgcggcctgggcagcactggtgccgtttgccaaactgaacaccggcgtgaatgacggggttctcgggttattactgctctgtctcggcggcggtgcgctggtcgccatgccgctgaccggcgtgctgaccacccgtttcggctgccgcagggtgatgaccgtttccgttatcctgcttagtgcagccctgccgctgctggcggtcattaatcacaccggcttactggctctgacgctgattattttcggtatgggtatcgggatcaccgactgtgccatgaatattcaggccattattgttgaaaaagcggcaccaaaaccgatgatgtccggctttcacggattctacagtgtcggcggcattgccggtgcaggagccatgagcggctttatgctgacgggaatgggcgcattacaggcggccggtgccgtgacggcgatttgtcttctgctgctggctttcagttataaaggcatgctggattacgcctggccgtcagaaggccctgcatttgctgtgccgcgcggtgcggtattgctgatagggattatctgcttcgccacctttctggccgaaggcagtgtgctggactggagtgcggttttcctgacagagtatcgtcatgtgccggaaagcatgggcggactgggttttgcctgcttcgcggtgctgatgtccctcgggcggctgaccggcgacaaaattgtcgcggtgctcggacggccgcaggtggtgctgtggggcgccctgctggctgccggtggtcttctgctgagtgtgctgagtgacaactggcttctggcgctcaccggttacgggctgatcggcctgggatgtgccaacgtggtaccggtaatgttttccgctatcggccgccagaccagtatgccgcaggccgttgccgtcccggcggtaaccactctgggttatctcggtattctggcaggaccggcgtctgtcgggctgattgcttaccgcttcaccctgcccgctgcactgctggccgtggtcgcgctgctgttgctggtcgcgctgctgtcgcgcaaagtccggatgtaa

SEQ ID NO: 288311 - DNA, 435 bp, Morganella morganii
atgtgcgaactcgatattttacacgactctctttaccaattctgccccgaattacacttaaaacgactcaacagcttaacgttggcttgccacgccttacttgactgtaaaactctcactcttaccgaacttggccgtaacctgccaaccaaagcgagaacaaaacataacatcaaacgaatcgaccgattgttaggtaatcgtcacctccacaaagagcgactcgctgtataccgttggcatgctagctttatctgttcgggcaatacgatgcccattgtacttgttgactggtctgatatccgtgagcaaaaacggcttatggtattgcgagcttcagtcgcactacacggtcgttctgttactctttatgagaaagcgttcccgctttcagagcaatgttcaaagaaagctcattgttgtggtcaaatttaa

SEQ ID NO: 288312 - DNA, 312 bp, Morganella morganii
atgaccaaatcaaagaccaaagcagaacagcaatggctgtcggatgtggccgaactcggctgtatctgctgccgtaacatggggtacggggcatcccgtgcggaattgcatcatgtacgcaacgggcagggtatggggcaacgagcggatcattattccgtactcccattgtgtccgcagcaccaccgggcatgctacgaaacgggattccattcagcgccggaaacatggcagcagatccacggcagtgaacgtgaattgctggagcaggtaaaacaggaagtcagggagctgcgttcatgtcgggtgtaa

SEQ ID NO: 288313 - DNA, 531 bp, Morganella morganii
atgtcgggtgtaatgagtatttcagatggtttgcaactggatgaagagcgcgaggcctggttacagaattggttggccaggttcggggcgtgggtgtacagcggtcggttggtgaaacgacagagcagcatgatagccgaatttatggctacagttgaacgccgcagctacccagacagaccgacctgcagtgatgaagatggaatgctgatacagggggtagttgatcacctttaccatatagaccaggtggcatttaaaatgctgctggcccggtatgtgttttgtgcgtcagaccgtgaaatctctcgccaatatcagacagcgtgtgcgccgcgtattatgccacgcaggaacggtatgctacgtacccgtaagccatcactgtcaacgtgtcgccgggaagcggagaaagtcctcagcgcggctgaatatatgctgtatcagccactcaaagatgcattcaaaaatcgggaaaaagaaaagattatgaagcgaaataacaaaaacgtgttgacttctttgaattaa

SEQ ID NO: 288314 - DNA, 261 bp, Morganella morganii
atgggacgttttttctttcacgtcatgtcagcactggcagaaatggaacgcgagttgatagtggagcggacgctggcaggattagccgcagcgagagcgcagggcagagtcggcggacgaccggcggcactgacacagaatgaccgggaacaaataggtcgcttgctggataaagggtattcccggcagcagctggcaattatttatggcgtgggggtatcgactatttaccggtattttccggcctcaaaaaattcatga

SEQ ID NO: 288315 - DNA, 711 bp, Morganella morganii
atgagtgctacccggattcaagcagtttatcgtgatacgggggtagaggcttatcgtgataatccttttatcgaggccttaccaccattacaagagtcagtgaatagtgctgcatcactgaaatcctctttacagcttacttcctctgacttgcaaaagtcccgtgttatcagagctcataccatttgtcgtattccagatgactattttcagccattaggtacgcatttgctactaagtgagcgtatttcggtcatgattcgaggtggctacgtaggcagaaatcctaaaacaggagatttacaaaagcatttacaaaatggttatgagcgtgttcaaacgggagagttggagacatttcgctttgaggaggcacgatctacggcacaaagcttattgttaattggttgttctggtagtgggaagacgacctctcttcatcgtattctagccacgtatcctcaggtgatttaccatcgtgaactcaatgtagagcaggtggtgtatttgaaaatagactgctcgcataatggttcgctaaaagaaatctgcttgaattttttcagagcgttggatcgagccttgggctcgaactatgagcgtcgttatggcttaaaacgtcatggtatagaaaccatgttggctttgatgtcgcaaatagccaatgcatgttgtggtcaagtttttttggacacgccgatcagatggtag

SEQ ID NO: 288316 - DNA, 435 bp, Morganella morganii
atgtgcgaactcgatattttacacgactctctttaccaattctgccccgaattacacttaaaacgactcaacagcttaacgttggcttgccacgcattacttgactgtaaaactctcactcttaccgaacttggccgtaacctgccaaccaaagcgagaacaaaacataacatcaaacgaatcgaccgattgttaggtaatcgtcacctccacaaagagcgactcgctgtataccgttggcatgctagctttatctgttcgggcaatacgatgcccattgtacttgttgactggtctgatattcgtgagcaaaaacgacttatggtattgcgagcttcagtcgcactacacggtcgttctgttactctttatgagaaagcgttcccgctttcagagcaatgttcaaagaaagctcattgttgtggtcaaatttaa

SEQ ID NO: 288317 - DNA, 867 bp, Morganella morganii
atgaaaaagatacttaagtgggttggcattatttttattatcatcatcgtgattggcgttattgctggtaaggatgacaagaaagaggcggcaactgatagcaacccgcagccatccgaggtagcgggtgacgaaccttctgtcgcagttaataaaaacaatgagagcaaggcatcatcaataagtttaaccgaagatgagatttcagctgtaaaagctctaattagagatgatgtgacgaataattttgatggtgggaaaagtgcatatgattacgggtacatgctagtaaccgcaaaagaattattcagagtgtactctgctaacgaagctcgtggcgacaagacatacaaagggaagaaaataattatatcgggcgttgttgatagcatatcgtcatcaataggcgatataccggtggttagcttgaaaacgggtgaaatgtttcaaacagtgagcgtgaactttgcaagaaaatatcgtgacaccgccatcgaactgaataaaaaccaaaaagtatcatttgcttgtgttggcgggactgtagtgcttgggatgccgtctgttcgtgattgcgtgcctttaaatgtagcaatagatgaaatcgttgatgataaaatgaaggatgtcgaaaatgcgttgagaaatcacagaacaacggacgataagaatgctttgagtatggttgttttagccaaagcggcgagcaaggctacggataactttaaatcatgcaaacctgatgatattaactgcatatctggcaaggcaaaatcaatacctaaagcaaaaggtgggtttgatgctttgatgaaggagtcggcggaggaaatgggtattacgctaccacctaaaggtgaaaaataa

SEQ ID NO: 288318 - DNA, 435 bp, Morganella morganii
atggcggtatacagacatgaccgcagtattctcatgcttaacggctacgagattactgcgtgggatgagtcgtctgactcattctctcttgcgccggtcggcgatgacggcacgtacacaatcggggctggcggacgcggcgtgttcgtgttcaccggcaacgagtcggcaattctgacgattaagctgttggaacactctccggacaatgagtttttatcgcaactccggaaccgcattctgaacagccagtcagcgccgagtccgattgaaatgtacatgaaagacacctggaacggggatgaaatcatcggtgaacgcggttttccgacaacgccgccaacgatttcacgcggtaccggccacaatgcgaccacctggactatccagttcgaacgcgcagtaaccaaattagcaaaaggagcatttaactga

SEQ ID NO: 288319 - DNA, 939 bp, Morganella morganii
atggataatttagatattcaggaagtcattgagcaaacggccatcgacttcgataaaagctttgaaaagcaggaataccctgatgttcagcttggtaaattcatgaccatcaccaataaaggtaatgttcagacgactgatgttgcgtacgggcaggagacagggactcaggatctggataacggtgtcattgacgaaagcacgacatcgcttgaaacagaagatgtgaacattgaagcaaaaaaaatgtattacatcgactgggcgaaagctgttgtgtacaccaaactcggtgttgagcgtgcaaaaaaactcggtatccagctggacaccacaaagctggagaatctgcgcggggtatgcctgagaactatccagaaaacggcacttatcgggcatgcccgccgccgggatgtcaccggtatgctgaataatggcgcggtcaacatcgaagatatgtccaaacaaaaggccatcggggagatgaccggtgcagaagcgcgcgcatggtttattaacctgattaagctggggtacaaggccagtgacgaaatcatcatgccggataccatcgctatcgataacatggatctgctgaccttgtcaggactgtacgattcgtccatcaccaacggtgcgaccaatatcaatgcgttgcaggctatcaagcaatctctgaacgaatttgccggtcagaatattgagattgtcggcgttccgatggggtttgctcagggagttgccaaacagggtgtcaaccgtgctgttgtttataccaacaacgaatccacgatttacactgactgggcgcgggctccggcaacgggcgatgttttccagcgttccagcatgagctttgaggttccggttgaagcgcagttcaccggggcgatcattcgtaaactggatcgcttcctgtacgtggattacaaagcttag

SEQ ID NO: 288320 - DNA, 477 bp, Morganella morganii
atggaaaccggtaaaaatatctatctcggcaagcgctggtttgcgggtcaggtggcccgtgcgggtgagtcaggcattgttgcgccatcatacattaacgtcggcgacactccgattaaaggcgggtacttcgttgcgatgggtgacgttgctcaggggggcagaaatgtcagttctgctgcggataaaatcctcggtgtcgcaatggttatcggcattaaccatgaattcaaaccgggtcgtaatttgtcaccgatgacgttaccgcacggatctgaaatcgtggttcaaatggctgaaacaagtgagctcgctattggcagcgctgtcactgtggtggccacaggcgaagacgccggtaccgtaagtcacaacggtgaaattaaaaccaatttttatgtgactgatgtcaacggcagtctggcaaaaatcatgcgtaacgaagtaacaccggcatccgctggcacaggggagtaa

SEQ ID NO: 288321 - DNA, 1161 bp, Morganella morganii
atggcatggaaaaaaacaccgcaggggtatgctgtgaccactgcgacgataacccgtgccgggccggttgaatattacggccacgaaatcgggttaaccggcagcgatgccaacaaaaaaatatctattctccgcacacttgaagaactttccggaacggaaacgcttaaatcctttgaagggctcccgctaaccctgacgcacccggacagcggtgccgtcaccgccggtgatcacaaagagaaagcgataggccacatccagaatgtcagggttgaaggcgacaaagtcatctgtgacgtctacatcacggatgcggcagctattgcaacgctggaaaaaaccgacgtccgtgaagtgtctgtcggctatgaaccggctgagatcgaagagcgtgacgggaagttatatcacatcaatattcgcggcaatcatgtcgccgtggtaacagaagggcgctacggcgctgaggttcgtttaaacgacagaaaaggtaaaacaatgtttaaaacattaacagacgcccttgcatttctgcggggcaaaaaactgaaagacagtgagggcgctgcgctcaccgctgatgagattgtcgggatgattgcggcgctggaaaaagcactggctgatctggatggcaacgcatcagaggaagcgctggcgaaatcgcaggaattaatcgcacagctggcagatctgaaaacgcaactggaaagcatgaaggctgtgcaaacagatgcggacccgggtaatccggacagtgctgcgggcgatgacctggccgcgctgaaggagcaaaacgcgcagttacaggcaaaggtgtctgagctcgaaactgaaaattcctcactgaaggaagaaatcgaaaagctgaaaggggaaaaatccaccgaggcgacgatgacagatgccaaagcccggttcccgaaagtgaacctgaaagatgcgaagtctgagcgtgatattcatgcggctgttctcgttcagcggaaagtatttactgatgctgcagtcaaaggcatgagtgatgaagcgttacgctccgcctatatcgccgtgcaggtggcaacaaaaccgagaagcgagatcgggcagcatttgctgagtgattccgctcctggtgagccacataattacaccaaacagttcgggggcaaataa

SEQ ID NO: 288322 - DNA, 1017 bp, Morganella morganii
atgaaaccggattggggggtgttacagcaacagttcctcgccgagcattcagtaacgggaatatccccgaaagaatggtgtgagatacagggactgaattacgcaacagcgcgtaggtacatcaaaaagccaactgcgcagagtgcgcaaaaaactgcgcaaaagaaagtgcgcactgcgcagaaaaaagaatgcgcaaatgaaccggtgcgcaatagtgatataccggatgcgcaaggcaataaatctgacaatgcgcagaatgatgaaacagagttcgatctgcgcaaatacgggcttaacgatatgcaggcacgttttgtcactgagtaccttatcgacctgaacagaacagcggcatataaacgggctggctataaaggcgaagggaatacagcttatgtgaatgcaagccgactgctaagaaatgctaaggtttccaaagctattacagaggccctcgcagcgcgggaacgccggactgaaatcacccaggacgcagtattaaaaatgtggtgggacattgccaccgcagatgtatctgagctgacggaataccgccggttatgctgccgctactgctggggcttcggctttaactatcagtggcgggactcgatagagtttgaggacgctgtcagtgaagcggccgcaaagaagcagaaggaaccaaatgacaggggcggctacggttacgacagcacactggatccgaatcctgattgcccccgctgcaatggtgccggtattggccgttctcatttccacgacacacgggatttaaggggcgcaagccgccggttatttgccgggataaaagagggtaagttcggtaccgaggttatcacccgtaatcaggatgaggcgctaaaaatggttgcgcagcatttggggatgctgaaaaaccggacggaggtcaccggcgcagatggcggcccgatacaatcaacgggatttgacctcagtgggttgacgacagaacagcttttgcagttacgtgaaaaagcggggaaatag

SEQ ID NO: 288323 - DNA, 783 bp, Morganella morganii
atgattaaaatcatacccatgaagtatgacgaatccctgatcccgtttaatggtgattgctgggtgaatgcaacagtggcagcaaaatattttgataaaagagctcttgattggctgcgactggattcaaccaaagaatacgcaaaagaaattggtcaggagcttgatattgaagctataaatttaaaaggtgagatttctcaccttttagtgcgtgtggagaggggacgcaatggcggcacctggattcacccggaactggtcattgagtttgcccgctggttatcaccaaagttcgcccgtgcctgtgaccggcatataaaaaatatgctgatggcgcagaatatgacactgacggaagatcaggttatcggcctgctgacatacaaagacgccactgagtgggaaaagcgttttcaggagccctattatcgcgcactgtcaaaaatggccggtgttccttactttggtcatgtcggcgggtgcccgtcactcttcgggatgatcacggcgaagtgggtatacggcgttgcattgcctgattatgtatacgaatcggtaaaagaaagtcggtctgcgcgtgagaaaattcaccagtacctcaaggcagatgccttacggaaagttgaagagcaaatggtggcggtgaccaatatcgccaacagctcagcagactataaggattttgatgcccggtgtatggccgcatttgatgttaaagggcagatgcagctgctttatccggtgacgggaaataattcacagattacccggttacagtag

SEQ ID NO: 288324 - DNA, 4584 bp, Morganella morganii
atgactgaggaaggtgggatttcggctgaaaaaattcgcattattaatacaagcagtgatggcaatgtacaactaaataatattgagtctgttaataatggtataagtgtagcagcaaaaaaatcggtattattatccagagatataacatcaaaacaaaaaataagagtaatagccgataacattattataggagataaagcaaagattacttccggtcatgacactactcttatatcaaattatattttaaatgccggagaggttatatcaaaaggtaatgtacgtattttttctgatgttgttaataatcagggtcacgaagcaattatacaggcagaggaaaatttatggatacaaaaaaatccggaaggtgattttagcaggagtgttgttaataaatcagctttactaaagtctgaacgtggtaatttaattataaaagcgaagacattaactaatgtcagtaactctgagcctgttgagttttttaagcttccggctaaatctaccgaagtgcgcagcgtcggaaatcagttgcgttatttgccggtgtggcggcgagatggattactgattgtatatccggaattaaaagattttaaatatgaaaaatggtttgatgaaatagattttttaactaatgacagtgttaatgttgaaaaatatgcagtgagatataaaagtgattatgaacctgcctatatggattccggtaaaaatttatatgtaaatgcaaatcgttttgataataatgattcgtttttatctgccagagaaaatattattttaaccggtaaagatatcaatattaaaaaccatgaacagggtattttaaaactatgggaaagatatcagccggaagatattaacagtgaatggctgcatttttctgttgagccggatactattcctcccgggggaatggttaatgagattaaaattccctttcagaaaaaggatgaattttatacatggattagccatggtatgcctgatagtccatctgtcagttcagaaaatctgattatagattatagagatactattaacatagagagcagactccctgagaaactctatccggtaaatgagattgtcagggatagttttagttatcatttagctgcagaaaacatattgtttaattcttcatcaatagatttgaagtcaaaaataggtgcaattaataacttaaatgttcaggctaaagagaatatatattcacgtgaaagtacattggcagcgggtaagtcattatcattaacagcagatagtattgaacttgaaaataccaatataaagtccggtgaactgtctcttattgcaaagaaaggtgacataatatactcaacaggaatccggcctgtatttacatctgacatttctgctctgcctctgttacatgcacctggtggtatttatgcagatgcaggaagtgatattacattcagaaatatagcgcttacgttaaatagtcatgtggatttatcttcccgtaaaaatatacggattgattttgacccgaaagcgatatcaggagtatcgacaaaaaggacagattatgaaataaaatcactgtcagataaatttcaggaatggacactttcagattatatcaccctgaatgccggaagtaacattgctattaacggtacagatatcagcagcaaaaatgatataggtttttattccggcggaaatgtagatgttacctttgataaaaaatgggaaggccgtagtgatatctatgcaagatatttaagacctaaaatacgtattcattcagaaagaaattttattattaattctgccggagatataaatctattaaatgcaggcctgcatgctgataaatctttattgttgttttctggtggggaatttaatctgacaggaattccctattcagcaataaggtattcttatgatgattacattgataatcgctatgtaagttcttatcttacagcaaagaaaaatatcacattagtggcggaagatgatgttaatctgcatgcagcaatactctcctctgatgatgatgtatatattcatagcagtggaaatattcagttgggatctgaaaaaatacactatcgtcagaaaagacgtgattacctggaagatacatatcgccatgtcagcacactggtaaaaagcaagaacaaattaacactattatctgaaggtagtattttatttcagggtgctgaacttatctcagatggagtaatggatatctcggcaaagggcggatacttatatgcacaggcaatggaagaaacgagtcattatgaagataagaaaaagaaatgtaatcgttggacattctgtataacaaaaaaagaagtaacaaaggtaaagcatgaagtaaaaaataaaacgacagaatttacatcgaaagaagatattaatttaatcgccctggatgatatcacacttgaagctgcaaaaatttcagcagctaaaaatgccaggctgaaaagtatctcagggaaaattaattttaaagctgttaacgactcactttatgagcaaaccgtcagccattccagggggttctacattacccgccgtgatcaggggcactcgctgagccgctggcggttaccgcagatttattacggcggaaatttatctgttgatgcagcaaaagtcataacggcagacagtaaaacattcagcattcctgaatttaaagaatccgcaatgatgctgagcagccataccggaaccggttggctgaaagaactgataacccgcgatgatgttcagtggaaccgggttgctgatgcctatcagcgctgggactataaagagcagcaccttaatccggtggcatcagctgttctggctgttgccgtcaccgctgcgacatcgggctccgggctggctgcatgggcagggagtaccgcatcttccgcagccacaggaacggctgccgctgttatttccggagccgcgcattccggaatgatagcactgacaacacaggcagcggttgcactggcagagaataaaggcaatttatctgaaacatttaagtctctgggacgcagtgaaagtgttaaatctgttattggtcagatggttgtcggaggggcgttcaatggtctggataaatcgatgggctggcagaacggaaatccggcacaatcgcggattccgttactgagtgacggagattggcacaaggttgcacaacgtgtttccgcccagtctgtaatcagctcagcggtgggttcggcagtatcagaaacaagtttcagggagaactttattagtgcgcttctcagtaacacgggaagtcagtttaatgctgaaggcgcaaaattaattggtgaccacggtgaaatattaacggaaccgggcaaagcaattacgcatgctgcggttgccgctgtcagagccgagctgaccaaccggagtgtcaggggagcggttaccggggcgctggcagcgtcggcagccggtattatattaggcgattctttagatcagacagcgcaggaacatgaacaacaggcacagctggcccggatgacaggtgctgttgccggattgattgcaacaggccatatcaacgggctgaccactgcggcggatgctgctgagatcgttgaacgttataaccgtcagtttcatttgcaggaattaaaggcgatagaggaactggctgatggtgataattttaaaaaagagcgcctgcttgcagcaggttgccgtctgatcaactgtactgtacaggaatctgcaaattcaccggataaattacgttttgatgcgttaatggcaaaatatccggagacatatcttgaagataatttactgacaaattactgggtgacaaaagcggatgatggcattcgttattatccctggtcagttgcacctgaaaaagtacagctttttacttacagtgaaactgaacgacatgatgatattgatgattttgtccgtaatcaatatgcggaatatataacagattttaccggtctgaaaaaagcaactgccgaaattattatcgacagtatattgatgtcatcagtgaatggcaggagaggtaatcctgccagaatgcataaacatatcagaaaggtcagttatgcagatttaaatcaaatctataccaccgataaaaagggcaataaaatcccgatgaagtggtatcagtcaggttcctctatcaaccagcagggtatgccgtttgagcattatattggtacacaattaccggcaggctcaaaacttccggatggattcaaaacctttgattattatgacagtaaagataaaatagcgattagcgtaaaaactattaacactcaaacagatagtagactaaataaacctgatgccataaaatataccattaatggccatgttaataaaatagctcagtttaaaaatcattcaagggatgacgttccattgagaacagataatataaaaaagagagttttgcacattggcctcccagaaaaaacgacgccagagcaatggaagtcaataaatagtgctgtaaagaacgcaaacgataagaatatagatattaaaataaccataataaaaggtgattag

SEQ ID NO: 288325 - DNA, 348 bp, Morganella morganii; identical to SEQ ID NO: 279422

SEQ ID NO: 288326 - DNA, 480 bp, Morganella morganii
atggaatgggatgacaccgatcttgaaacaaaaggattagaatatgaatttaaatatttatatgaaatgcctcatgatcacaatctaacatttacactatttggtgattttgtcgaaaataaaagcaaaagaaaactgtttattgcaggtcactatttgccaaatttacctaatgaaaagcatggtatcagtatttattaccaacatgatgaattaactgcatttagtagtgcaacttactataaaaaacaaaaagaaagcggtgggttaatgtatggtggagatatggcctttccttcctatacgttagttgatgcgggggttggcaaaaaataccaccttgataaggtagatgtttcggttgattttattattaataatctcaccgatactgaagcaagacctgcatcttctcaattgaaatatttagtcccattaccgggtcgaaattatgggataaatgtcaaaattgatttttaa

SEQ ID NO: 288327 - DNA, 327 bp, Morganella morganii
atgcaggctggtcgtctgaggcatattgtcacctttcagagggctgaaatcacaatactcccgtctggccagagagaaaagctatggtttgatattggtccgcctgtgaatgcggaagtcaaacctgtcagcggccgggaactgctgaccgccggagcggaaatgtcagaaatcactgttcgtgtgtggatgcggtaccggccggatattcatcccgcatgccggatgatatatcgtgggcagatctacgatattcaggctgtgatcccggatgtgaaatttacccggctggaactgctgtgtaaacagggggtgaacgatggctga

SEQ ID NO: 288328 - DNA, 336 bp, Morganella morganii; identical to SEQ ID NO: 279734

SEQ ID NO: 288329 - DNA, 156 bp, Morganella morganii; identical to SEQ ID NO: 279701

SEQ ID NO: 288330 - DNA, 237 bp, Morganella morganii; identical to SEQ ID NO: 279700

SEQ ID NO: 288331 - DNA, 174 bp, Morganella morganii; identical to SEQ ID NO: 10355

SEQ ID NO: 288332 - DNA, 192 bp, Morganella morganii; identical to SEQ ID NO: 278145

SEQ ID NO: 288333 - DNA, 273 bp, Morganella morganii
atgaaaaacaaaattcaattagaagttctttggatgggtaaaaacaatgtagttgtattgttcgtcaaagggcccgcgccattaaccgtattgcaggatatagaagctcagttgctaaaggacgcagacgaatacgaaatgttcactgagcatggctcatatcaaatcagcgcaaccagagacaacggtgaatttgatagctgcgggcggtgtgagattgcgccgtattgggattttgatatttattcatttgagccgatgccggaggagtga

SEQ ID NO: 288334 - DNA, 306 bp, Morganella morganii
atgatagagaataaaacaggaaaagttagttatttcagcctgaggagttcattgctgaaattcaccgggaactatgcagatagtgactacatggaatgtataaccagagaaatcctagataaatacgatatctacgaaaagaaaccctatcgcgagacgacgttgattcagcgcataaatcacatatgggtaatccctgttttcatgatttgcattatcccgcagtggttaattaccggaagtactggtgttcgtccgtcaagccgcatcggaaaagtcgtatcatttttaattggcaagccatag

SEQ ID NO: 288335 - DNA, 177 bp, Morganella morganii
atgaaatttgaagaattaccagtaaatgcgcaaacggctgcgtttgaagcattcagagaaatagcaggcagagaattattattaacatcaggcgaacccaatgaagaacaaaaagccagacttaataatctggctgaaagcatagctttgggatttattaagctttacgaaagttag

SEQ ID NO: 288336 - DNA, 180 bp, Morganella morganii
atgcctgacatagttaatcctaaatcccacccaactgccgcagcgtaccagttaacgctggaaatgattaaagcgggctcttttgcgtcggaatcacagggaggggaaaggaaggctactgatgtaattaagttttttgatgcgttaaaagataggtttgaaaaactaaatcaaaactaa

SEQ ID NO: 288337 - DNA, 648 bp, Morganella morganii
atggaaaatatcatctggcagatagctattaccatcacaagtgttattgctgcgcttgtaaccgctgtttctaccttttttttatggcgagtcactaggatgctggcagtagagacaaaaaaaatggccgaatcagcatcacaaccgcatatagttataaccttagaaccaactgatgtttcaattaatcatttcaatatggttattagcaatacaggaaatgcaactgcatacaatataatctctgatattactccaagcataaatgataagccaattccattccaaaatgtttctgttttaaagccaggtgattcaataaaaagtttctttacttctttctttgagatcaaaaataaagagtttaaaataacaactacatggcttaaaaagcctgaatctaaggatagaatatcaaatagctatatttttgatattggaagctatacaaatcttagtgtattaggtgatatgaatccgctgctaacagtatcaaaagaaataaaaaaaataagtgaaaatataaataaaatagtaaaaagcaataagcttcaagtaaatacatatgataaaaatgaccgtatagaaagtgataacaaccatcgaaaaatgatcgaggaatataaaaaaataaaaggtgatatataa

SEQ ID NO: 288338 - DNA, 897 bp, Morganella morganii
atggattcgccgttttataagctcaaaagcaaaaaaaagcttgcagggcttctttgtactagtgttaatgatttatcaattttgaaaaatgatgaaggtaattactccattttcgatcaattgtctaaaaaaggcaaatcacgaaaaatacaaaagcccttagataaattagatgtagtacatacgagaattgcaagtttattgtcacgtattgctttaccagaatatctgcattcggggaagaagaagtgctctaatgtgacgaatgctaaagctcatcttaatcatgaaaagatgatgacaactgatattaaggcctttttcccttcaacaacaaggataatgatattttcatttttcttttcagttatgaaaacgtcatctgatgttgctgatattttgtcgcatatatgtacctgtcatgaccggttgccaacaggaagtcggatcagtatgcctttggcctactttacaaactctagaatgtttgatgagatgtatgaactttgccaaaagttaaaggttaaaatgactgtgtatgttgatgatctctcgttctcgggtgctaacgtaaatcgattattctgcgctgtaattcgtaaggttatcagcaaacatgggcatattatgcatccaactaaaacgagattatatgctaaggataaacctaaattggttacgggtattattgtattaggtgatgttttaaaagttagaaatgagcaacatcgattaatggctagagatattgagtactggaaaataatcaaagatgcggaaaatgcgaaagaaacatctattgcgaaaacactctttggtcgtttgcattcaatgggtgttattgaacaacgctataaatcaaaagtactcactttaagagtgaatactgcaagttaa

SEQ ID NO: 288339 - DNA, 309 bp, Morganella morganii
atgttacataaagcccttcgtttgataaggcaataccataaagaatcattagttgatttatcagtatctttaggtattccaaaagatagaatagtagatttagaaagcggagtttggtctccgtcgattgaaattttacagcgttatgcatcccatttcgacataccagtatcctctttagtatttttttcagaatccttaggcactcaagggcgtctgtctaaacggttacgtttgaatttagctggtaaagttctggatattgtagagtgggtaagtaataaaaatgaaaaaatggaaaaagcttaa

SEQ ID NO: 288340 - DNA, 156 bp, Morganella morganii
atgaaaaatgataaattaaccaacgaacagcaggcgcagagcaagtcaaaccggaagaagtggattgcttttgcttgggaggcgattaagtggggtatccgactacttgatctaatcactcgattagttgatcgctttgaagggggagatgagtaa

SEQ ID NO: 288341 - DNA, 1077 bp, Morganella morganii
atggatgcggtaacaaacttaagaaaaaaatatattttaaatcttgaagtattaaaaccgggagatatcatacttgagcatggttacaaaccacacagtttagtaattatgaaagttacaaggagccattattctcacgccatgttatatgaaggttcaacaataattgaggcaacatctagcggtggggtttttagtaaagtaccgaatagatttgcagttgtaaaccaaaatgatttaaaggtgcttcgacttgagaaagagatttccccacaagatatagagaatatcacaataacagcaaggactttaacagggtcaagttacgataaatctgaggcagttaaggtaggaaggaaaaagaaacccgctcaaaaaaaatccaacggccaattttgctctagattggtagcacaatgctataacaaagctggaataaaacttgttgaaagtattaattattgctcacccgcagatttagaaaaatcacctttgctgtcagaagttgaaaatgccgtcaaagaggcatccgaggccgagttagctcacgcgctagcaccaagcattcatacgcagcatctcaaaagttcggtcaaatgggttaaagccgctaaaaaaatcctcaaaaagtcaggagttgaggctgaaaccattaatgatatttacagtgcgactcttaacctaagaaactctaaagttgataaattaatattaaaggagattaaagcatcagggcattatgatttttacctagaggataaaaacgccaatccatatagatacgatataactaagttcgccgaaaaaatcggaaatgatattaatacaattaattctgaaatacataaagagacatcaattgtaaaggttcaatctataaatctaagaaattttaaagagtattttgaattttaccctagtcgtctcatggcagcggaaattgacttatatacaggaatattaaatatcaccaatgaaagattaaagattattactgaacattgtaataataataatttaacaccagaactccttacaacagccctggatatgattagctatattgataacctttag

SEQ ID NO: 288342 - DNA, 1962 bp, Morganella morganii
atgcgtttgtttattgccgaaaagcccagcctcgcccgtgcgattgcggatgtattacctaaaccgcaccagcggggggacggctttatccgctgcggtcagaatgactgtgtgacctggtgtgtcggccacctgctggagcaggcagagccggatgcgtatgatccgcgttatgcccgctggaacctggctgatctgccgattatcccgcaaaaatggatcctcagaccccgcgacgcggtggcgaaacagctgcgcaccatcggtacgctgctcagttccgcaactgaagttatccacgccggagaccccgatcgcgaagggcagctgctggtggatgaggtactggatttcctggagctcgcgccggaaaagcgtcagcaggtgcagcgttgtctggtcaatgaccttaacccgcaggcggtaacacgggcggtggataaaatgcgtcttaaccgtgattttatcccgctgtgtgtttcggcgctggcccgggcacgggcagactggctttacggcatcaatatgacacgcgcctacactattctcggccgtaatgccgggtataacggtgtgctttcagtcggccgtgtgcagaccccggtgctcgggctggtggtgcggcgtgatgaggaaattgaaaacttcgtgccccgcgatttctttgaagtgcgggcacatattgttaccccggcggacgaacgttttacggcgatgtgggtgccgagtgaggcctgccaggattatcaggatgatgaaggacgcctgactcaccggccgctggcggagcatgtggtcagccgcatcaccggtaaaccggcttttgtgactgattttcaggataaaacggaaaatgaaatcgcgccgctgccgttttcactgtctgcgttacagattgaggccgccaaacgctacgggctgagcgcccaggcagtgctggatatctgtcagcgtctgtatgaaacccacaaactgattacttatccccgttcggacagccgtcatctgccggaagagcattttgccgggcgtcacagtgtgctcaatgcgatttctgtgcataccccgcatctgctgccgcaggataacctcgatgattcgcagcgtaaccgctgctgggatgataaaaaggtcgatgcgcaccacgccatcattccgaccgccaaatcggtctccgtgtcgctcagtgagaatgaagccaatatctacgagctgattgcgcgtcagtatctgatgcagtttatgccggatgcacaataccgcaaatgtgtgattgaactggatatcgccaacggcaaatttgtggcaaaggcgcgtttcctttctcaggcgggctggcggaccatgctgggtgccaaagagcgtgacgaggaaaacgaaggcacgccgctgccggtgctgaccaaaggggatgaactcctgtgtgagcgcggtgaagtggtggagcgtcagacgcagccgccgagaccgtttaccgatgccacgctgctgtcagccatgaccgggattgcccggtttgtgaaagataaggcgctgaaaaaagtactgcgcgaaactgacggactgggtactgaagcgacccgcgccgggattatcgaactgctgttccgccgcgagtttttgtataaaaaagggcggaatattcattcatctccggctggtcgcgcactgatccatgttctgcccgaaatggccaccttaccggatatgacggcacactgggaatccacgctgacacaaatcagtgaaaaacagtatcgttatcaggattttatggtgccgttgtctgaaacactgaccggactgataaaccaggcccggcagaaccggaatgtccgcgctttccgtgatttaccaccgccgccgcaggcgaaaaaagccggcgcgaaaggcaaaggtaaaaccgctgcgaagggcaaagggaaggccggcggaaaaaaagcgtcgccacaggaagaatga

SEQ ID NO: 288343 - DNA, 204 bp, Morganella morganii
atgacaccagtcagatttatgaatgccaatattgagatggccggaaatctgtatttcccggcagattttgatgcgtcaggccgttatccggcgattatcatggttcaccccggcggcggggtaaaagagcagaccgccggcttgtatgcagaaaaactggcagagcacggttttgttactctggcctttgatgcatcatactag

SEQ ID NO: 288344 - DNA, 831 bp, Morganella morganii
atgatttctaaagataattggcaagaccactactggaattatttagctcatctagaagtgagggcgattgatcgtagttttgaagacttaaaaccttgggattccctagccgaagattgtatgaatctagcgattaaagctccgtttcttaaaggcaaaaattcaaataataaaccaattaagctttcggctgcatttctgaaacgttccatgagtgattttagaggtgcatggttattaataaactggggctatccataccaagcggcatgtgtagctgcttcgctttatgaaaatgctcttgttgttaattgtctggtcgaacgccaagatctagctgatgaagttctgaataataggaatgcggatgttccttggggagctcaaaagctctgcaaaatggctgcacataaagacttatacgggaacataccaaatgaatttccaaataatgaagaatttaatttggcatggaaactttgttatcacaactataagttgttatgcaaaatgaaacacccaacattgcaacaagccatagatgaagcaagctcaaccttaaatattaacaatgaatttgttgtaattccattgcctgatactcgtagcgaaagccttgctttgaaacatatgttgatgattatttgtatatctaaattattttctgcgactaagtgttttgcaaaggctattgaatgtgctgatgatgatccagaccatacacagttttatgcggaagcactagaagtatactcaaatctaaaaagtagaatcggcgaaagtaagattaaggatatttcaatcaaagcttatggattctcgctcatataa

SEQ ID NO: 288345 - DNA, 960 bp, Morganella morganii
atgagtattattaaaaatgctattgactcaattcaaattggggttgaagactttcaaagtgatgacgatagacgcagtatttctgctgtaagaaatattgctgcaggaattttattgctttataaagagaaactctgtcagctctccccagataacaatagagaacttttaattaagcaaaatattagacctgtaaaaaatgaaaaagacgaaatagtttttgaaggaaaaggccacaagacggttgatgttcagtccataaaagaaagattcagtagtttgaacgtcacggtggattggggtcgcttcgatgaaattaacaaactaagaaatgatttagagcattattatacatctgaatctccggatgctgtgcgtgaaattgtagctaaatcatttttattgattcgagattttctatcagaccacttagaccaaaatcctcaggaaagtctcggtaacgactgctgggcagctttgcttgaagtgagtgatgtttactcagcagaagataaagcctgtcaagcgactattaatgcgattgactggaaatatcattctgttgaaatggcgctcaagaatcttcgctgtaaccaatgttattctccactgatacaagcactgtaccttgatgattattatccaacgatcaatttgcattgtaagtcatgtggacatgacttttgttttgatgaggtgattgaacaatgtattgatgattctttggctggagaggcaatgaaaagtgcaatggatggtggtaactctccttatgatgtatgccatgagtgtggcaaaagcactttcatttatgaagagggtgtgtgtgtagcatgcgattatgaaatggaatacactcattgcgaaatgtgcgaagagccattaggtttagaagatcaatataatgcaggtaaatgtagttattgtcagtgtaaatgggaaaaactaatggcggaatga

SEQ ID NO: 288346 - DNA, 999 bp, Morganella morganii
atgaccggcgaagcggttggtattctggccgaatatatctacaaaaaacagccgggcgaactgaccgaacaggaaaaagagaatatcagcgcctgggctaccctggcatccggcctcgccggtggtctggtgggcggtgacacgcagagtgctgcgaattcggcgcaggccgggaaaatgacggttgagaataactcggtggcaagtaaaggtgctacagtgacgggtaaggaagcgataaaactctgtgcgcaaaccccaggatgccgtaatggtgttactcacacgttgggcctatcagtcactttcctcttaacaaaagaacagattgaagaagcaatgaaagcgggaattagcagaaatcctgaagaaattgctaatttatcaaaagatcagagggattggttgaatgaagaaatccgaataggaaaacatgatctcatgtatggcacaaaaccatgggatgatggaatgttggctgaaaataaggggtcttcagataataaaagcagtacccctaatataggtaaagggttaacgaacgaacagagaaatgagttaggcggtagtaattctggtactccgagtggttgggagcctgaagatgaggaaaagtttaagcaacaacagattcaaacatcaaatagaaaaaatgaaattaaagagctatttgaatatgatagcaagcgctcaggaatacaaattggaaacaggactttaattgaaatgcctaataaaggtaatgcgaaggtctttagtggagcttcagaagctgaagttaagcaatattttattgaattaacaggcaataaagggttaccagaggcgagggcagtaccagggaaagggaatatttacactgttaaaacaccgaatggaaactttaatttacgtgatttttctaactctgcaagtgaaactggcaaggcttggacaattgatgtaccgagaggtatagctaaagatgttgcaccagtagaaataaaatttttgaagtga

SEQ ID NO: 288347 - DNA, 381 bp, Morganella morganii
atgttattttcattaagctggacactaaatggaattggaggaaaccgtggcaatcctttatggaatgatgttgaaattaaagtattggctttaagaaatacatatggaacgataacattagacattcatgataatgatacaggtcctcaaatgttacaagtaagagctgaagcaggtaattatttaataatgctaggcgaaatagtgaatgatgattatgaagtgcgaacttattacaataaaaaaggtactaccgaaatggtctgcatattgggtgattattggcctggaaatcagataataaccgatttttcattcgtaatccaggttgttagcgaattttttcatactggtaatgtacaaaaaatattgctgagttag

SEQ ID NO: 288348 - DNA, 249 bp, Morganella morganii
atgcggctggccttgattcccggtggtatgaatcagatagaaaaaggaattaatcaagttgctgatggtgagtggactgagggaagtatcaatattggtctcggtggattgattgtatccggcaactatctggggcataaagttacggctggtaagccgaatggtggaattatttctcctgaatctaaagtaattcaagaaagtagctgggttttagacaaaaaacgcacacatctattcctaaagtag

SEQ ID NO: 288349 - DNA, 444 bp, Morganella morganii
atgaatatcgaaatgattgtcagtgtggtatctatggtttctttctttttgtcatttttcttttacgaaagaaaaaagaaggtgccacttacctcaagtaaagcaatgaacgatttttttagtggggttttctttttaagagaaaataacattaatttgattgttgggcggtgttcaatattcctaggaataccaatctcttactttattgtatgtgtgaggaataaatatggaattgaataccttccatcaataatttcattgtggattgttgcgatttatttttttatatactcatcagcgttaggtaatagagaggttattaatcgagattttttttatgagttatttatttctaatggggaaaaagaatttagaatttatttatggtgcgttaggttgatttttatttcatcaatcatgtttgcttttatctttagataa

SEQ ID NO: 288350 - DNA, 237 bp, Morganella morganii
atgaaaagtgatttcagtgttgatttttttagtgattctcgatatgaagaactaacagcagaaatatcgtataaaggacagatactctgccaaattaatgtggataaaggtcctaatctagttgaagtggaattttttcccgatagtaggctattgcaagaatctgtagaaatgaagtttccattagatgtatttatatcggtgttaaatgaaactaaattagaattgctgtcataa

SEQ ID NO: 288351 - DNA, 705 bp, Morganella morganii
atggtaatacataatagtatcgataatttaaattatgctaaccttaaccctatcctctacagcattattattaaacatatgagtgggaaaattaaaaaccaagttttacagcaaatatcattaaataatagtatttcaaaaaacatattaagcccttatatgcgcataatttaccacatattaaaactatctcacaaccacgcactaaagacgtgtaaaatcaataaattaaataacatttcacatgaaatgaagaaatccacaaatataataagatcaatgataccaaacaatatattagctttaatagccataaactcggcatacttttataaaaacaaatatgacgaacctggggtttttagttcatctgaaattagcagtgacaatgaaaatattgaaagtaaagtatttaatgattataaaaaatattataacttgcttatcatttcgaatttctttgaacacttatatttagaaaaaaaagaaacatatataacatattattcaaactgcttccagtttgacttcgacaaagctaaatcattcgcagccaccaataaaaatgcccaccctatgattattgtcactgaatacaaacctaatgatgtagtagatttatatcataacataacagatttaatttattcaaacacaacaaaagaattattgtatttgttttatataaaaaacaacagcgaataa

SEQ ID NO: 288352 - DNA, 1752 bp, Morganella morganii
atgaccgttgagaagctgattaccgaccatatcgatatctggtcttctgccctgcaaacccgctccgcagccggccgtggcagcaatggaaaaatcgatctctatggtattaagaaactgcgtgagctgattctggaactggcggtgcgcggaaaactggtgccacaggatccgaatgatgaaccggcgtcggagctgttaaaacgtattgcggctgagaaagcggagctggtaaaacaggggaaaattaaaaagcaaaaactacttcctgagattagcgaagatgagaagccgtttgaactgccggcggggtgggagtgggtgaggttgaaccatgtaggtcatgattgggggcaaaaaactcctgaaaatgattttacatatatagatgtagggtctatcaataaagaattagggactatttcaaaacctggggtgataaatcctaaagatgcgccctctcgagcaagaaaaattgttcgcagaaatactgtgttatattccacagtccgcccctatttattgaatatcgcggtagtagatgaagattatgatccagaacctattgctagtacagctttcgctataatccatccttggaaaggaatatcttcaacatttatttatcactatcttcgttcacctatatttgttagctatgtggaaagctgccagacaggaattgcttaccctgcgatcaatgataaacagtttcttactggcgttattgctattcctccagcagaggaacagttacgtatagtatctaaagttaatgaactcatgtccctctgcgatcaattggaacagcaatctctgctcagcctggatgcccatcagcaactggtggaaaccctgctggcaacgctcactgacagtcaaaatgccaaagaactcgccgaaaactgggtgcgaatcagccagcatttcgacatgctgtttaccaccgaagccagtattgacgcgcttaaacaaaccatcctgcaattagcggtaatggggaaacttgtgccgcaagatcctgacgacgaacctgcttctgaactgcttaaacgtattgagcaagagaaagcggagctggtaaaagaagggaaaattaaaaaacaaaaaccactgccgccagtgagtgatgaggaaaagccatttgaattgccggaagggtgggtgtggtgtcgtttagcagaactcgttgctataaaaggcgggaaaagggtttcaaatggttataaattactaacagaaccaactcctcatgtctatattcgtgtggcggatatgaaagatgggactattgatttatctgatttaaaatatattgatgaagaaatgcaccaaaaaatcaagaactatataataactaaagatgatatttatatgacaattgttggtgcgacaattggtaaatgcggtactgttccggcgttgctggatggtatgaatcttactgagaatgccgctagactaataccatcaaaattaatttcaaaagactatttatatctgtgtttaagaagcgatctttgccaagaacaatttatagataaaacaatgcaggtaggtgtgcaaaaaatggctttaaatagattggctaatacacttattgcactgccttcaactaacgagagtttgagaataagggacagagttaaggaaatgaataaactatgttcaaaattggtatgtggaataattgaatcccaacaaaccaagcttcatctggtggatgcactcactgacgcagcattaaactaa

SEQ ID NO: 288353 - DNA, 291 bp, Morganella morganii
atgccgcagccacctcattttaacctgtttaaaacatataacccggttgcggcattacccctatcactcaacatacggaacactccgcagggggtggatatgcgcatgcctgacaaatattccagccctacagcatacgcctggggacttataacctctgcttttggcgttttatctctggaccagtgggctattgtcgccgggatcatctgtacagtcgggacgttcctggtgaactggtattacaaacggaaagaattccagctgaaagccggagaacatcatgaataa

SEQ ID NO: 288354 - DNA, 750 bp, Morganella morganii
atgaaattattttcaaagaaaatttatattggttctattcttggtttttttgtgtctgcaattggcctcaccgctatatttttccctagtttatttaatatggagaaaaaaagtatcgatagtttttcatccatcattaccgacgaaaagcaggcctatgacttttatagttttttagataaaaaattagaaactaacgatatatttgaacttaatgttgaaatatgtattcctgctgaacgactcgatcctttaaggcaagaaactcctaatgagttggttaaataccctcatgttgattcagttatcaaatttgtaccaaacgaaatgagagaatatatgttcgccttttcaaaggcagaatctgaaatggaatacatatacccaatctttgctaacttcatacctgatgaatcaaaagagtatgcgagccaagctattggctctatcgtaatgaatcaattaaaaaatgaagacaaaaaaatagacacaagtggttacaatgcttggactggatatagtatccccggtgattacatatttgattattatgagtacgaggttgatagtaattgttttgacactttaaaatccaagttgggaagagatgattttggtgaaatagatattattcaattaaaaggttattacacaaaagagaaggccttgaataagtatttatatcaatataagaattttttcattctaaaaaaactcagtaactccgatgtcaatctaaaaaactcctag

SEQ ID NO: 288355 - DNA, 603 bp, Morganella morganii
atgccagacgtaatcaaaatcataattgccgggcggaatgttggtggttttggtggtacggaaactgtatttcggtcattctgcagattactggctgaatctgagaaaaattatcagatatcttatattttttttaatgaggaagataatactgttaatgatgaatggctctgtgagagtgaatttatccgactcaactcatcagtcaaaaacagaaagataaaaaggatttctctggcatgtcagttctcgcctttaattaaaaagataaaaccagattacattatagcgtttgattccattggctgttacatttcaagattagctcttcgcttttccttcatgaaaactcctttgttttcatggaatcatttttctgtcgcgggttcatacaaagcgaaatatctgattatggcagacaaacacctgtcaataagtagcggaatatcacatcagttgtcaaagatgggcgtttcttcatctgatatctataccatatataatccggtaccaatacagaacatcacgataactactggtaatcaaaaaaaatttcctgtaccttggccgggtaatgagcggaggacaaaaaaatatgaatga

SEQ ID NO: 288356 - DNA, 300 bp, Morganella morganii
atgaaaaatggaattcaattagaagttctttggatgggtaaaaacgatgtcgttgtactgttcgttaaagggcccgcgccattaactgtattgcaggatatagaaactcagctgctaaaggacgcagacgaatacgaaatgttcaatgagcatggcacatatcaaatcagtgtaaccagagaccacggtgaatttgatagctgcggtcggtgtgagattgcgccgtattgggattttgatattcagtcatttgacccgatgccggaggagtatgaatcagaaccgcacagcaggaagtga

SEQ ID NO: 288357 - DNA, 552 bp, Morganella morganii
  misc_feature (483)..(492): n is a, c, g, or t
atgattaataccaaaaacaattatattctaaacaacatcctagaaaagattgagctacctgatagtgcttatgaaaaggcagaaaaacgctatcaagacttgggagactggctacatcgcccagaatctatctgtgttaatttagatcctcatgtattttctcaaggctcttttcgtctaggtactgcgattaaaccagattctgaagaacagtatgacctagatatgggatgtaatcttcgacgtggtttagataagatttctaacactcaactgcaattaaaacatttggtcggatatgagttaaaattatatcgaaaagctagaggaatcaaggaagagcttaccgagaaaaaacgttgttggcgcttagaatacgctgatggattgagctttcacttggatattgttccttgcatacccgaaagtgatgctcgaagaagtatcttaaaaaaacgtatggtagaaaattctcaattcgannnnnnnnnnaggtttctcagctcgcagtatcaattactgacaatacagattccagctacaccgttgtaa

SEQ ID NO: 288358 - DNA, 3822 bp, Morganella morganii
gtgagcgtgaaactcatcggggataaggatcatcttgatgaggataaatcctcactgacagcggcaccgctgagcatcgtggcaaacaacaccgcgacctcgtcactgacgctgaccctgaaagatgtgaatgataacccggtgatcggtcagactgtgctgttcagcactgacctggcagacaccaccttcagtgcggtgaaagataaccaggacggcacttataccgcgaccctgaaagggaccaaagccggtgacgcattactgaaagtcaccgtcaatggtgcggtgctggacgtggcgccggtcactgtcacactgacggctgacagcggtaatctggacaagaataaatcctcactgacagcggcaccgctgagcatcgtggcaaacaataccacgacctcggaggtgaaactgaccctgaaggatgccaacggtaacctggtttccggtcagaccgtgctgttcagtaccacactggctaacaccacattcggtacagtaagtgataatcaggacggtacctataccgcgaccctgaaaggcaaaacggccggtgatgcagtaattaaagttactgtgggcggtaatgcactggaagtggcgccggttacggtgaaactgacagcggacagttcaaatctggataacgataaatctgttctggaagcggctccgctgagtattgtggcggatgacgcaacggaatccacactgaagctgacactgaaagatgtcaacggtaacctggtgtccggacagacagtactgttcagtaccacgctcggcggcaccaccatcagtgcggtgaaagataatcaggacggtacctataccgcgctcctgaagggtaaaactgctggggctgcggagatcaaagtgaccgtgggcggcaatgcgctggaagtggcaccagtcacggtcaccctgacaccggacagcagtaatctggatgaggataaatcctcactgaccgcagtaccgctgactattgtggcaaacaataccgcaacctccgcgctgaccctgacgctgaaagacgtcaacggcaacctggttccgggacaaactgtgctgttcagtacgggtctggctgataccaccttcagtacagtgaaggataatcaggacggtacctatactgcgaccctgaaagggaccaaagccggaaatgcattactgaaagtcaccgtcaatggtgcgatgctggaagtggcaccggtgacagtgaaactgatcggcgaccaggacaacctggacaaaggtaagtcggcactgacggcagatccgctgactatcgtggcaaacaataccacgacgtctctggtgaaactgaccctgaaggatgtcaacgataaccctgtgaccgggcagaccgtgctgttcagtaccggcctggccaacaccacgttcggtacagtgaccgataaccaggacggtacctatacggcaaccctgcagggtaaaacagccggggccgctgttatcaaagtgactgtcggcggtactgagctggaggtggcaccggtaacggttaccctgacagcagacagcagtaatctggataaggaaaaatcatcgctgactgcagtaccgctgactatcgtggcggatgatgcaacagagtccgcgctgacactgaccctgaaagatgccaacggtaacctggtttccggacagaccgtgctgttcagtaccggcctggctgataccaccttcagtgcggtgaaagataatcaggacggtacctataccgcgaccctgaaagggaccaaagccggtgatgcgttactgaaagtgaccgtcaatggtgcggagctggaagtggcgccggtaacggtgaaactgacggcggacagcagtaatctggataagaataaatctgtcctgacagcagatccgctgactattgtggcaaacaacaccacaacgtccgcgctgaaactgaccctgaaagatgccaacggtaacctggtttccggacagactgtgctgttcagtactgacctggcagacaccaccttcgatactgtggtggctaatccggacggtacctatacgacgaccctgaaagggaccaaagccggtgatgcgttactgaaagtcaccgtcaacggtactgtactggaggtggcaccggtcacggtcaaactgacagcggacagttcgaatctggataagaataaatcttcactgacagcagcaccgctgactatcgtggcaaacaataccgcgacctctgaggtgacgctgaccctgaaggatgcctatgacaacccggttgcgggacagaccgtgctgttcagcaccacgctggccaacaccacgttcggtacggtgacggataaccatgacggcacctataccgcaaccctgaaagggaccaaagccggtgatgcggagattaaagtcactgtgggcggtaatgtactggaagtcgcatctgttacggtgaaactgacagcagacagcagtaatctggataaggataaatccgtgctgacagcaacaccgctgactatcgtggcaaataacacggcgacttcagcgctgaagctgacgctgaaagatgccaacgataacccggttgccggacagacggtgctgttcactaccacactcggtggtaccaccttcagtggtgtgacggataaccaggacggtacctataccgcgaccctgaaagggaaaaccgccggtgatgctccgctgacagtaaccattaacggaactgagctgccggttgcgggtgtgacagtcacgctgacaggtgatgccgcaacagcgactatcacaaatgtgaaactcaacggtgcgctggcacggaagattgccaacggcacggatttttttgaatttattgccgaagtccgtgatgcgaacggtaacccggtgagtggtgtgacgactaactggacaagtactgccggtggcgcagctgtattatctgtgaattcacagcagacagatgcagcgggtaacgcgactgtcaaactgaccagtaccaaaacaccagtctatgacattgtggtcagtgccgcactggcaggtcaggctgcggttaatgcggataagaaagtctcctttgaaaagctgttctcaacgtcagtgctggttattgacgcgattgcagccggagataaaccggttaacggggcgcacgttaagatcttctcggaagacggatcagaattgctgtatgaaacgacaacgggtgcaaccggtaaatttaaggttgatctggttggcgggaagtacgcagttaagatcacggcgaataattacgacgactacgatgactttatggacgtgaagagcggcgcggatacaaactttaagtttgcattgtctccggcgctgggaagtgagttcggccgtattattctgcagtggagtgagaacccggcagacctcgattcttacctgcttgttccgcctgaatcaggcagcggaagccggattaaagtctactactcggcgccaaaaccgtcaggtgcggatgcctctcttgataaggaccagagaactgctccggggattgagaccatcacaatgacgaagtcacataagggaacctatacctattatgtacagaacttctccggccctgcggctaaactgtcaacagcgaaggtacaaatcttcctgaataagaatttgacactgaaaccgggaacatccaggacaatgagtttcagtcctccgaacacagtcgtcaatcccagagcacaatggatcgtatttgatatcattgttgacagcaataacgaggtacagattgtaccgagaggaacagtagatcaggaccaaccaagttaa

SEQ ID NO: 288359 - DNA, 6213 bp, Morganella morganii
atgcctgtgacttcgtattactcaaaaacaaaaagggtaacagcttatctgttgctctttttgcagttattttttccggtgtcgacggcaacattatctgttgcacaggcggcagagcaaaacgatgcattaatcatgtcagaaacatttgacggacttaatgcactgatggatacatctcaggctccgcctccgaaaccgcaggacggaaaaaccacctccggcagtaagctgagcggtgagggatttaccgttgagatgccgtccggcagtgaatacggtgtgatgccggccggttcggataacggttttatctccggtcagaacggcatgccgttcccgatgagtgtcagcacgctgcctgacccggcaaatccggcaccgcgtgataataccgtgcggaccgatgatatcttcagtgccctgccgaccctcggtctgccggatatttctccggaagatgaagcagcaaagaatgaagcccgctgggcgggtaacgcttcacaggccgggcagatcctctccagtgaggatgcggtggatgcatccctcggttatgtgcgcggtatcggtgaaaacctgcttaaccagcaggtgaatgactggctgaaccaggtgggccacgcccgcattcagttcggcagtaataaaaccggtgatgcggacgtactggtcccgttagttgataacccgaacagcctgttcttctcacagatcgggcttcgcgctaatgaagaacgtactaccaccaacctcggtctgggctatcgtcagtatgaagacggctggatgtggggggttaacagcttttatgactacgatatcaccggcagtaactcgcgggtcggtgtcggcggtgagttatgggccaattacctgaagtttgcggctaacggctacttcagggtaacagactggcaccagtcaaaactgcacgaaatgcgcgattacgatgaacgcccggctaacgggtttgatatccgtgcggagggctatctgcctgattatccgcagttaggcgcatttgcaaaatatgaacagtacttcggtgacggcgtcagcctggccagtaccacctcttccggtgaactgaaaagtaacccgtcggtctccaccatcgggctcagttacaccccgttcccgctgatcacgttcaaaggtcagacatcccgtggtgattccaacgacagccagattggaatggaactttcctaccgtttcggcgtgccgctgtcacagcagctggataccgacaatgttgatctgatgcgtaacctggcgggtaaccgttacgacttcgtcgacagaaactacaacattgtgatgcagtaccgtaagcaggaactgctgcggattgccctgccgccgacactcaacggtgaagcggcacagacactgccggtgacggtcagtgtgctgaaagccaaatacggtctgaaatctctgcgctggtcagcgcctgaactgctggcaaacggcggtgaaatcaaacagaccgggctgaccacggcagatattacgctgccggaatatatttttatggatcgtaacggcgggccgcagggctaccgtgtgacagctgtcggtgaagataacgagggcaacccgtctaacaccgcagaaatgtgggtgaatgttattccgtcagtggaaaccatcaccaaactgaccgtcacgccgaaccaatccttaatcgccaacaacagcgaccagtttaccgctgtggcactgttacagaatgacaagggcgaagtgctgccgaataaagcagtgactttcagcgtttccggcctgaaaaatccggaaggcgtgaccatttatgatgcggacggcaacagcggccagacactgaccgtgatttccgggccggatggcacggcgaccgtgaaaatcatcagtaaatccgccggtaaaggattgctgaaagccaagatgcgtaacggtaacagccgtaccgaagcgatcacctatattgcggatctcagtaccgcaaaaatcaaaacgcttgaattaaccaataacaaagcagtggctgacggccaggcgaaaaacatcgctgtggcaacggtgactgaccagttcgataacctggtggaaaacttcccgttaacgtccagagcggataacggtgcgacagtcgcggatccgaaccagcagactgacagcaacggccaggtcactatccggttcagcagtgaaacggccggggattccaaactggtggttgagggaacgggcacgtcgaagagtgtgacagcacagtttatcgcggatatcagtaccgcgaagattcagagtgcggtcgtgactcaggatggggcgaaagcagacggtaaagcgaaaaatgaggttctggtgactgtcactgacagccgcaataacccgttagccggtgcaccggtcaccatcaaagtgccgggaaccgcccgttatcagacccagccggtcagtggtctgacagacagccgtggtcagttgcgtgtcagtatcagcaataccaaagccggttctgataactataccttcagtattaacggcgatgatgcggtacgtgcactgaaatttgtggcggatgaaaccacggcaaccattacggatgccagcctggttatcgtcaccaataatcagaaagcagatggtgcggcagcaaacagtgtaagagcgaccattgttgatgcttacaataacccggttccggggatcgcggtgcagtttgtcaccgatcacggcgcacttccgtctcagatgcagatcaatacggatgctgacggtaatgcactgtttgaactgacaaatacccgtgcgggtaacactaaagtcactgcacaggtcaataccaaatccgcatcaaaaaccgtgatgtttacagcggacagctcgacagcggaaattctggcatcgaacctgacgataaccgcagataacagcgcggcggatggtgcatccgtcaacagcgtgaaagcgattgttaccgatgcgcagggtaacgttgtgccgtatgtggccgttcttttcactgcggataatggcgcgtctccggcttcacaatcactgctgactaatgagcagggtgaggtaaccttcagcctgaccagtacccgtgcggtacaggttgctgttaaagcgaagattaacaccagtgagccttctgttactgtcacctttaaggcagacagtgcgaaccctgatgctcagaaatcctcgctgacagctgatccgatgacgatcgtggcagatgggcagacaacatcaacgctgcatttcatcttaaaagatcgtcaggggaacctgatcccgggccagactgtggtcttcggaaccgcgctggcgggaaccacggtgagcggtacgaccgaaaatccggatggtacttacacggcgacactgaaaggtgttaaagccggggatgcgaaagtcagcatcacgctgaacggaaaagcgttcgcggttgcaccggtcaccgtaaaactgacagcggataacggtaacctgagtggtgataaatctcagctgactgctgttcctgacacgattgtggctgatggcaagacgtcttcaacgctgaccctgagcctgaaagacgtgaacgataatgccgtgagcggacaggaagtcgtattcagcaccacgctggcagataccgtattcagtgcggtaagagataatgcagacggtacttatactgccactctgaaggggactaaatccggaaccgcaaaaatcaaagtcacagtgaataatgctgtgctggccgtcactgaggtgagtataaaactgaccgcagacagcggtaacctggataagggtaaatcctcactggcagcggtaccggacaccatcgtggcggacggtaacacgacatccgcaatcaccctgacgctgcgggatgtgaataacaacccggtggcggggcaggttgcgctgttcagcacaacgctgaaagacaccaccttcggtacagtaacggataatcaggacggtacctataccgcgaccctgaaaggaaccaaatccggtaatgcacaaatcagtgtcacgctgaacggtaaggcttttgccgtcgcaccggtgacagtcaaactgacggcggacagcagcaatctggatcaggataaatcttcactgactgctgcgccgctgagtattgtggcaaacgacactgcgacctcatcactgacgctgaccctgaaagacgggaacgataacccggttccgggacagactgtgctgttcagtaccacgctcggcggaaccaccttcagtggcgtgacggataatcaggacggtacgtatacagcaaccctgaaagggaaaacagccggtgatgcggtactgaaagtgaccgtgaacggcgctgtgctgacagtggctccggtgacagtgaaactgacagcggacagcggtaacctggataaagatcaatctgtcctggaagcatctccgctgaccatcgtggcaaacgacaccacgacttcagcgctgaaactgacactgaaagatgccaacggcaacctggtgtccggacagacagtactgttcagcaccacgcttggcggcactaccttcagtggcgtaacggataatcaggatggtacctataccgcgaccctgaaagggaaaaccgccggtgatgcggcactgaaagtgaccgtgaacggtacggaactgcctgtttcgcaggtgacagtgaccctgacgccggacagcaccaatctggataaaaacaaatcctcgctgactgcagtaccgctgagtattgtagcggatgatgcctcagtatcggatctgaaactgatcctgaaagatgccaacggtaacctggtcccgggacagcaggtgctgtttagtaccacgctcggcggaaccaccttcagtggcgtgacggataatcatgacggtacctataccgcaacgctgaaagggaccaaagccggtgatgcattactgacagtgaccgtcaatggtgcggtgctggaagtggcaccggtaacggtgaaactgacagcggacagcggtaacctggataaggatcaatctgtcctggaagcatctccgctgagcattgtggcaaatgacaccacaacttcagcactgaagctgacactgaaagatgccaacggtaacctggtgtccggacagacggtgctgtttagtactacgctggccaacaccacgttcggtacagtgactgataatcaggatggtacttatactgcaacgctgaaaggaaaaaccgccggtgatgcagtgattaaagtcactgtcggcggtaatccgctggatgtggcgccggttactgtcactctgacaccggacagcaccaatctggataaaaacaaatcctcgctgacggcagtaccactgagtattgtggcggatgatacctcggtatcggatctgaaactgatcctgaaagatgccaacggtaacctggttccgggacagcaggtgttgttcagcaccacactcggcggaaccaccttcagtggcgtgacggataatcatgacggtacctataccgcaacgctgaaagggaccaaagccggtgacgcattactgacagtgaccgtcaatggtgcggtgctggaagtggctccggtgactgttaccctgacagcggataacggtaacctggataaaaatcaatctgtcctggaagcggcgccgctgagtattgtggcgaatggtacggcggaatccacgttgaagctgacgctgaaagacgtcaacggtaacctggtttccggacaaattgttcagttcaccaccacactggcagataccaccttcagtggcgtaacggataaccaggacggcacctataccgcaacccttaaaggcaccaaatccggtgatgctccgctgacggttattgttaacggcaccggactggcagttgcaccggtaacggttactctgacaccggacagcgctaatccggataaagataagtcagtactgactgcggctccgctgaccatcgtggcggacgatactgcgacgtcttcactgaaactgaccctgaaagatacttacggtaacctgatcccgggacagacggtgctgttcagcactgatctggcagacaccacgttcagtacggtgaaagataaccaggacggtacctataccgcgacactgaaagggaccaaatccggtacggcggcactgaaagtgaccgtgaacggtacggaactggaagtggcccagtga

SEQ ID NO: 288360 - DNA, 1068 bp, Morganella morganii
atggctaatagatatgtagatgttggcgatgatttacaatttggcggatttggagaagtcaggttattacatgataactttcttggaaggaatatactatgtaaatcaatgtccaatccagataataatgaccaactttacaatgaaatcatcgctttatcaaaggtgagatcacgtcatgtagttgaaatatatgatgttttattcgatagtaataggaatgtaagtggcattattatagagtaccttgatggcagagatttctcgaaattctatttagaatatgaaaatagcccagaagaatttctcaaaatcttgttccaaatagccagtggcctatatgatcttcaccaagctggtattactcatagggacatgaaattagaaaatataaaagcctccagagcaggtgttgttaagatttttgacttcgggatatcagcactaactgatgattacatcacaaaaaataatcgtggaacaactatttatgcagctccagaattataccgtgaaaatgcaaggattagtagggaaatggatatctatgcatttggaataattgcctggcatcttatcacaacccataataactttgatagagcattgctagatacacccccacattctaaacatcaatatcaatccatagctcatgtttgtaaaaataaattaccagaagaaataataaatttaattgatgcaacactatttccaaatccagctaatcgaccaacaatagaggaaatagtacctttattagcaaaatacttagtaatatacaagcataaagggattttcacggaaaatacaaggaatgtatatgaattatcatcttccaaaagaggtgttaaattaaaagtagctccatttggagaggtagatatatactatgacggactcgaatttaaaataacatacattaatggcgatgtcttcatcaataacatgagaccagacgtaaacaccgtcttacctcgttcttgtctattgacatttggcgcacctcatatgcgtaatagacggtttatgactttttcatcttcacatcctgaggtggtgttatga

SEQ ID NO: 288361 - DNA, 1110 bp, Morganella morganii
atgaccagagtttcatttgaaaatgatacattactaattggcagatatcaaataattcattatttggccgcaggtggtatgcaagaagtatatttatgtcatgatactattctgaatagagaagtagttttaaaaactcccaaagcaggtactaaggatagaagattcaaacgaggcgctgaaatgggtgccagaataaatcattctaatgttgcatctactttagattattatgaagatgagagtttaacatttttaatagaggaattcatttctgggcaagatctttccaaaagaatgtctaccgactttcatttcttagacccacatacgtgcgcccatgtaattaaaaatcttgcaaaagcattgcatgaagctcataaagtaggaatctgtcatagagatttaaaacctagcaatataatggtgtcaaatgattttaatctatctatggtcaagttaacagactttggtattgctaaattagctgaaagcgaaatagaatccgaaatggaactttttgagaaagatgaaaatactttgacaacatctcaaacactattaggggcagtaccttatatggctcctgaatgttgggatgactggaaaggtgctggtcaggaaatggatatttggtcattagggtgtattgcttatcatttaatgtcaggtcaactaccctttggctctggtcgaagagcaattagagaagttgctagattccaagataataatacaaagcttttaaagccaaaaaatattgggcttcatgcatcttccgcgagtttagaaaaagagttatgggaacttataacaaactgcattgttgctgatcctaaaaaacggcctactgctgagaatattttagatgtatttgactctatttgttattcgaatgaacctcgtcagctaggtacaatttacgattttggtgtaccttatcaagagaccggccatataattgaaaatcatagacaaactgggatgttattttttcattcttcagaattttacggtaactcattacctcagcaggggcaaaatgttacatattcagtatatcccggattaccacacgatagatgctctacaattctattattgaaataa

SEQ ID NO: 288362 - DNA, 501 bp, Morganella morganii
atggaaaagatgttggccgtattattattactaattagtatgaccagtacgttttttgttcatgctaatgaaaataaatatttgttaactgaagtcgaacaggctgaagatcctgcatttgttcttgtaaaattgaaggaaggggtacatccccctcttgatatgaataaaccggataatataaacagtgaccacggtgttgctgtaaaatattacggattattactattacgttaccctgttccggcgacgataattaaatatgctgattcaaatttattgatgctacaggagataagggtaagaaataatgatatggacaaatttataaattctgacttggtttcaatattgccttactataaatctgcatttgatgtgaataataaagtcaatatgttatccgcatctgagtcaaaaatgttagttgataaaataaattgcatcgaaaattttatcaatggaaataacaaaaaaatattcaactgcgatccaaattaa

SEQ ID NO: 288363 - DNA, 1032 bp, Morganella morganii
atggctgatgagaataaagtagacaaactaattactcttgagagggttcttgggtcagaaatatcattccaaccattgcaaaaaagaaattacaatcatcctcaacaactatcaattgcatctccggagctgcactctgaattagttaggtttttcggctcaccagagagagcattttttaccacaaacatggatgtgaacagactggtgaaatacggggatggttcgttctcttctatggtcaaaggagttaagggaattgctgggcatcaagggtttgatgctattgattcgattgaattagctaatgacctttttatgcatataggaactgcattcaacaatgcagttgctaaaatatatgcaagctatgtagagaaaattaatcttgaagtaaacaatgtttatcaacagtttatacttaaagacttcagcaagataaaatcaatctcttttttcttaaaagaagtttactcggatatctacggcgctggatttaataaggagcaagctcaggcgaccttgacaaatgttcaacggtcaagaattgagctaagagcgttagtatatagatacatggaaaatatccgttcaaacatcgctccttggcagcagtttataccgatagacgatttagcaagcaattatttgagttgtaggtactgcatctcactttatacgattgcattggtttctgaaactatactatccaataggttagatgataatggatttaagtctcttaaaacaaaggtttcaaataccttggatgagtttaacgaattgactaatgaggtgaatcgtaatcttgaggctcgtttctatagcaaccaacaacaaattaataatcaaatgctttgggcttataatcacttagctgctcatcagaaaagcaatgagaataataatctcaacaattttgcaagtaatcatctctcgcaattttgtaaagataccgaaataagcaaaattgatgagatctttgagtcaagggataagctgttatcgaatattgttatcactgaagaataa

SEQ ID NO: 288364 - DNA, 843 bp, Morganella morganii
atgaacgggattagttggaaaggctcaaataagcaagttgaaaaacaattggtgacacaatttgaaaatctagggatagattattcaaatcccggtttttgtgatgatcctaatttcttgaggcaggaaaaaaaagacccacgctttctcgaaaaatatgctttgtatgtagagtctaaacattatgaggatgagtacttagaaagggcgaagaaatctataataatttgtgctgaatccttacatcaggctattaagaaagatggaagacttggagcttgtgttgacgtgtctagtatgctgagtcggatgctggaagaattgggtatttggagttatgtaaccaattcagcggttaagattgatttccctcagtcatcaaaaattaagcccatctggttttggtcaccctccgatggaagtgggatggcagcagcacattccattgttgttgcaccaccttttgcaatcgtagatttgaccatcaaaatgcaaccgtaccaaccaggagtcaataggtatcttccagaaatagcattggttacagattatactaacgatcaatgggaacctgaagacgttattgagcatgacaccctaaatatgtacggtttaaacggtgatgctgctcgtaaagctattcagagccaactaaggccaatgtatgaagtgatgaatacattcccgtgccggatagcaacatttggagaaacccatattaagtatacgaccattgctatcggaggttcattagaacctctgagcgggatcttaggctataaacctaatggccaaactgcactagagatttttcaaaatgatattattcctcgatttagttga

SEQ ID NO: 288365 - DNA, 2043 bp, Morganella morganii
gtggaagttgaactaccaaagattacagatgatgatattgcttgggtggtgcaagtattaggtttacccgaggatgccttttccccagaaaaagatggcggcgcaagagagcgaatacttaaatcccttggtgaaacattggatgtatcggcttgtcccggaagtggaaaaacaactctacttgttgcaaagctagcaatacttgcacgtaactggccttatcgacgtcaaggcatgtgtattctatcgcatacgaatgtagcgaaagaagaaattgaaaagcgtctggggggcacagaggtcggccgagcgattctttcatacccacattacattggaactatacatagttttgttaatgaatttatggctctcccttggttgagatcaaaagggtttcccataaaagttattgattcagaattcgcatatagttggcgctggaataaattaaaaccttggactagggaaaacgctgaaaaagcttttgtgtctaaaagtgtgataacggctactaatagccaactctctattggtcaagtgccttggggaaaaggcgtactgggtgtagataaaaaaccatatgaggacatgtcagattcttgtcgagaatctatccaaaaattcggtattcatacgcatgacgaaatgtttatgtgggcaaacgatcttatcgactgttctcctaccataaaacagcatatccgcggccgctttcctcttgtatttttcgatgaagttcaagataacagcgaagctcaatcatccatacttcaccggatattcatagaaggagatggcgcaagctgcagaatacgattcggtgatagtgatcaggaaatatttgattctgctgttgaggttaacggggcaaaaactgataaatttccatcagataacgttaaatatgatctcccaaacagccatcgctttggtcaatctatagcacgtctagcgtctcccttatcggtaggaaaaatgagtttgacaggccaagggcctatcaacggtgcatcaaaagacgcagcacacgctatatttctaatagacgaagatagtaccgaagctgtattaaaagcctatggacaatatttactctcagtatttgatgaagaacaggaattgttggatcgattaacttttaccgcagttggagctgtacaccggaataaaaagggagcggaaaaatacatacctcacaatctatctcattactacactaaatacgacccagatatcgttagtaacgacccaaaacctaaaacctttttgcaatatgtcaacgctggtcatagattaggagagaagtttgctaccgaaggcactggaggtgaatcactcactacagttgaacgtattactataggaataattaactttgctaaagaaatatcaagccaattcgatcccagaccaagaaaaagaaatcatcgattcattttggagtcgctaaaggatgaccgtacgaattacgataaatacctcaagcttgttgtctatcttgctgttgaccgaaattttccttcggaagcagattggattaccacatggaaagatattgtaatcgacgtcgtaacttcattatccggtgtagttccgcagagtgaccacccttttctagactatcaactatctgaagatttttcttcaaatcatattaatactcggaacaatacatatactgtagagaatgacggacggaaagtaaatattaagttaggttctattcattccgtaaaaggcgaaacgcataccgcaactttggtgttggatacattcaataagtcgcatcatttaaaaatgatttttccatggataaaatgcaaacccaaaaataaaatttccgactctgatgcgaagcgattaaagcttcattacgttgctatgacacggccctcacatctactttgcctagcaatgaaaaggagctatatcgaaaataagagtggagaaataaaccaaaatgaagtcgacgcgttgaagaaacaaggatggagtaaagtggctatcgtcgataacactggtaagtgtaattggttgtga

SEQ ID NO: 288366 - DNA, 2040 bp, Morganella morganii
gtgtacttagccgagctaactattaccaattttagatcatttggccctgacggcattacagttaagtttcgtgaagggttaacagcgcttgtcggtgaaaatgactctggcaagacggctgtaattgatgctctgagatttcttctcggaacaaccgatcaggaatggcttcgatttaatgatgatgacttccacaaggcaagtgcaagcagccctgaatcaagtgaaattaaaatatctggtacatttaaaaaattaacacccagcgataaatcaggcttcgcagaatacttaacctacggagttaatcagggggatgaacctatccttcaccttacacttacagcaaagtgtatgggaaccagggcaggaaggccatatatcgccacagatgttcggtctggtaagaatggagaaggtccaaatctggataacaactgccgttcattgctcgcagctacatatctaaggccgcttcgtgatgctgagcgagaactttcttccgggcgtaattccaggctttctatggtgttaaattcacttgatggcgcaaatatgggcaagctatttaatgcggcaagtgctgatctatcttcgcttagtttcggtgacattaaagatctcgggttactaggactaggtgatttattcaacaaactgattgaaagccatcctcatattgagaatgggaagtcaaaagttaataatcatttaaaagaatttcaacttcatggggattcactaaaaagctcgatatcggttagtcagaatggctctgattctcagaggcttagacaactcttagagaagctaactctcaatgtggatagtacccctgggcgaatggggctggggtcaaataatatcctttttattgcatgcgaattaatccttttagccgatgatcaagaacatttcccattattattaatagaagagcccgaggcacatgtgcatgcacagcgccaacttaggctaatacagtatcttcagaaaatagttaactcaaaagaagataaagaaaacaaaccacaaataataatcactacgcatagtcccaatctagcatctgaggttgatctcaataatttagttattattcgggctggcaaggctttttctaccgctgagggtgaaactgagcttgattcaagtgattataaatttctctcacgttttctagatgtaactaaagcgaatctatttttcgctcgtggtgtcatgattgtagagggcgatgcggaaaatattttgatgcctaccttggccaaatgcattgggaaagattttacggaacatggaatttctatgatcaatgtcggaggagttgggctgcgacgatacgctaaaatcttcatgagaaaaaatcccgatcaagatggaatacagcctgcgcctgttgcttgtatcaccgacctggacgttatgccagactgtggcccctatattattaagatcatcaaagacgataatgactggccaatattaggggatggagaggagagaaagtggcgtgctaagcgggattttgaattgacggaattaaatgaacataaggtaaagattaaatccaaggcccatgggcagaatgttaagtcatttgtggcagatgaatggacgctagagtatgacctagcatttgctaacaacaacgctttggctgaagaggtctatattgccgctcaattagcgatatgggatgagggtggtaattactctgaaagtacagctaaggaaaaatttaagaaagctcaagacaaatacgcagtcctaaagaaagacgctgacaaacttgcagcagagaagaattgggacacgaatgaagttttagcaagcaaagtctatgcaatgtatgtaacaggttctaaagcttcgaagtccatcgcggcacagtatttgtgtgaaattatcttggataaaataacccgtgaaaaaacttgtgatttaagaaccaaactcccaagctacattgttaacgcaatagactacgtaacatcgaatcttaatactgcttcaggaggtgaaatccgtggaagttga

SEQ ID NO: 288367 - DNA, 351 bp, Morganella morganii
atgagcaacccgtttacagtatcaagaaaaccatcacaactgaaaacttcgcgtctggcagatgcaagccatcattatgatgacccgttaccgctgaaggacttggtttttttgcaaagcatcaatgagcaggaatgcagaattaaatcatctcagatcaacagtcggatatcgaatacggttccgatgtttgtggtgctgttggtgatgatgttttatacattattcacttttgttgaaagccataatgctaaaaaattcgacttcgaaacaagtgttaaacgtgtagagtctcgactaggtaattcaacaaatttaaaccagtttgataagttggttcgattattttaa

SEQ ID NO: 288368 - DNA, 561 bp, Morganella morganii
atgtgcgaaccaactatgctggcagctgctgcaatcggcaccggcgcaatgcaggcatacagccagtatcagtccggcaaattcaacgctgacgttgcaaaccagaatgccaaactaaatgaagcggcggcagatgattctattaaccggggtaatgctgaggccgcaaagcagcgttcccgcgcgcggcagctggcaggagctcaggcggctaccatgtccgccaatggtgttgatctcggtgcaggtggtgcgctggatatcttcggcgatactgcggccatgggtgaactcgatgcgctcaccgtgatgaataacgcttcccgcgaggcatacggctataagttgcaggcggctaatgaccggctcaatgcgaaaatgtcacgccgggaaggaaacataggagccattggtaccattttgaccacgccgttaaaggcatggggtgcgtataaaattgctggtggtgagtgggatccattttctgacgccgccaagaaaacagcaggctcaggggcgggtccgaacatgttcagtaatatgcgctcaggcatcttttaa

SEQ ID NO: 288369 - DNA, 291 bp, Morganella morganii
atgggcgggataatcacgccgctatattggatattaaacattgttcagatcgcggccgtaattgccggttttcatgattggcttgagtggaacattgttgtttccgtcattcttgccgtggttgttggatggatgccgctggttggtacattcctcggagttatgggggcggtgtacgggtggggctgggaatactggcaggcgatacttttgtttgcctggccgataatctttatccttttcttcggtgcagccggttccatttcgagaagtttttctgatcgacggtga

SEQ ID NO: 288370 - DNA, 744 bp, Morganella morganii
atggtaaacaaagatataatcactcatttacagttaacggggtttgtcatgagtgaagatttggtcatagaaatagcggcaaagctaattgacgctattaataatatatctaaagaagaaaatatattaaatacttgggctccgccaatcgctgttatcatcgccagcataataacttcctatgcaatgctgaagcaagcaaacaaaacttatcaaggtatggttgagcaggcaaacaaaacttatcaaggcatggttgagcaaacaaacaaaacctatcaaggcatggttgagcaaacaaataaaaccatagagcattctgattttttatttttatcagaaaaaaaagaagagttatacatatatctcgatgttatcaaaaatgaaataatgaatgaatacaaaacactacggcattacgaccctgaaaacgaacccagtgatgcaagtaatataagggagtcaataagaaaaaaattactccagaatatgactgaacaaaaaacaaaaaataaaattaatatggtcatatctctatatttacaagatgttgatatttataaattaaaatttaacacactttatgatgagttctctcacgaatgtaaggagtgctacagtactgttgtagattttaattttccataccagaaattaaatttatcgaaattaaccacaacaaaaaatgaacttatcactgctattcaacaaatgcaaaacaaggttattgatataaaaaggtag

SEQ ID NO: 288371 - DNA, 864 bp, Morganella morganii
atgtttttttcaaggaagttagaagcctttatggctgttgttgaatacggctcgctcagcaaggcagcaaaagtgatgaacaggacaaccccgccggtggccaagtctatcaaggattttgagatctcgctgggtaagcgtttatttaaacgtgaaaaatttggtatgagcctgacacgggaagggatggagttgtacaatgatcttaaagatctctatatgcaggaaaaagaaattaccaaaaagcatatcagcggaacgatatgtaataaggtgaatatattttatgactgggggaaaagtaaatatattgcggcactgtaccggacggcattcaaagcgggtatacaaattaatatatttcgtttccactatgattgtattgatgaaataaatgattttgagggcaatacgctgatactgtcgtcagagcaggttatcagcgaacgttttacgttgctgcgccatttaccgcagggacaaatcgggatctgctgccgtcgttcactgtttcaggactgtgataacaatttacagacattattatcctcctgtgtctggttatgtgagccgttattatatgaaagcccgttactcaaaacattattgctgcagctcggtgaacagagcaaacatgaacatgtgcatctgatcgacaatgtgaacagttatctgcatctgctgattgacggagattatctctgctttattgatgagcacccgaaaacgctgccgtacagcgatgaactgatttttctgccgttatcgcagagtgaggcggaaaatcattgttatctgtacaaatcgaaatcacacgcgagtgtgctgaacaaaataatggattgtattgagaatatgaaataa

SEQ ID NO: 288372 - DNA, 471 bp, Morganella morganii; identical to SEQ ID NO: 279238

SEQ ID NO: 288373 - DNA, 954 bp, Morganella morganii
atgcaggatgaacttgcacaggcgcttttgaaggcaggtaaaaacataaaggaatatttcagttcgtccgcaacggatgaggaaagatatgaaactcttattaatgcttataaggcgctgactcctgaagaaaaagcaaagcttgactatgaatttgaacggaatgccctgacagtcgattcagcccccgtttctatagaagaattagccaaacaaaatggatttggtcaggcgtttgtccggggagcaagagaaacaaaggaccaaaatggtaatacggtctatattatggataacggtggtgcggggagccagatccgacgaggtgatattgtccaatttgttgatgaatttatttttgtttactccaaagagggtatttttcaggctgcccttaatgcagatggtacaaaaaatactacggcatcaggcaattctcaaggtcgggaattaaatgtaagtggtattattgctgatagccattcatcaggtaataatgattcttcaaaacctaaccttggtaaaggattaacaaccgaacaaaaaagtgagttaggtggcagcagttctggtgcacctggtggttgggagccagatgatgaagaaaatggtcgtaatcaacaaaaccaaactcaaaattttgataataaattcaggaaagaagatttaacatcttcggctaataaacctattaataatcaagggttatctgcagcagcccgtgcatgggaaaagcacgcaggtaggcctggaggagtatttgaaccattgaaaggaaatactgctcagaaaaatgaagcggcaagtaactttgtcaatgaagtattgaataataaaggaacagttagaacagatctctcgcgtggtggtgtcgaatatcgattacctaatggcaaaggtatccgttataactcagatggttcattctcaggtttcctagacccaaaaaggtag

SEQ ID NO: 288374 - DNA, 237 bp, Morganella morganii; identical to SEQ ID NO: 288350

SEQ ID NO: 288375 - DNA, 444 bp, Morganella morganii; identical to SEQ ID NO: 288349

SEQ ID NO: 288376 - DNA, 249 bp, Morganella morganii; identical to SEQ ID NO: 288348

SEQ ID NO: 288377 - DNA, 381 bp, Morganella morganii; identical to SEQ ID NO: 288347

SEQ ID NO: 288378 - DNA, 225 bp, Morganella morganii
atgaaatccgttgacgccggacggacagtcaaagatgtctgccgtgacaccggtatatccgaagccagctactacaactggaaagccaaatacggcgggatggaagcttctgatataaaaaaaatcaaggatcttgaggacgagaaccgccgtctcaaacagatgtttgccgaccttagcctggagaaccgggcactgaaagacgttatcgaaaaaaagctttaa

SEQ ID NO: 288379 - DNA, 549 bp, Morganella morganii
ttgccggtgcgtaatccctctccactggccacgccggaagcgctgaaccagagctggtctgtcgactttatgcatgatgccttggtctgtggccgtcgttttcgcacgttcaatgtcgttgatgactttaaccgtgaggtgttgtcgattgaaatcgatctgaatctgccagctctgcgcgtggtccgtgtgctcgacaggatcgcggcaaatcgcggttacccggtcatgctacgcatggataatggtccagaatttatctcactggcactggctgaatgggcagagaaacatgcagtaaaactggagtttatccagccgggtaagccgacacagaacgcttttattgagcgctttaaccgaacataccgtacagaaatactcgatttttatctgttcaggacactgaatgaagtacgggagatcacggagaaatggttatcagaatataactgtgaacgcccgcatgagtcactgaataatatgacgccggaggaataccggcaacaccattatttggccgggatctcaaaaaatgcatggaactaa

SEQ ID NO: 288380 - DNA, 363 bp, Morganella morganii; identical to SEQ ID NO: 285591

SEQ ID NO: 288381 - DNA, 261 bp, Morganella morganii
atgactgaacaggaagctgaactgaatgctatccgggaaattaccggatttttgctgattgatgataaaaaacggtatttaacccgcctcgggctggtgatgacgttcttctttaaaaacggttataccccggagaaaaaagctgccattctgcgctgttaccgccggttctgtgagctgtatgcaggaaaatataaggaatggataatttatggcgaattggagaaagatgattcgggatggcggttttctctgggttaa

SEQ ID NO: 288382 - DNA, 744 bp, Morganella morganii
atgacacctataatctcacttgaaaaatacctcataaatagattggatttaaatgaattagaaaacatgaatgagatgttaatcagagatttaattaatcacaagaaattatcagaaacacatagaaaactttattctttaagtaaatcaatattagagccagaagtgttaactgagtcatttaagtatatttcatcaaaaaatcaaattattttaaaacatatgctaactataggtgaaagagttcatatttctcctgacgttaatagcttttcagaatggtatcgttcatcttcctcagacgagctaagtcaaggaaaatatatccgtttcatctgggatttacttgacaaagagcagcaacaagaaattcttgaacaacttcatgatgttttattggaagttcaagtcagtcgtcctaatagagtcaaactccttcatgattttggtgatgtgattagttttatcgaaccagagcagggaacatcgcgtcgaggtattgccgctttgtttgatcttgctgaaaaagacagttcactacgtttgtggcttgatcgacaaacttatgcattcagcaattggcccagtacagaacttcgttcaaccacaaaatatataattgaacaccacgaactatttccagaaatttgtaattcatctaagtatatagaaaatagaatacgagaatcaaaaacagagcagacctctgaagctacaggagaaatttctgactctaatgattaa

SEQ ID NO: 288383 - DNA, 1437 bp, Morganella morganii
atgtgttttgacccggccagggataaaaagcactggtatacccggctgatgtttgtgcagcatctggcgaacatgctgccggtgttcgggcgggacagcggcaccggccatcccggattcacctttttcaatcgtggcggtgcgccgctgacgtttgatccgctgaacagcgctgaccgttccaaaaatgcgcatctggtgctgttcggcccgaccggctccggcaaatccgccaccctcaacagcctgttcgcccaactgatggccgttcaccggccacgtctgtttatcgcggaggccgggaactcgttcgggctgtttgcggattactgcgcggcactggaactgaccgtgaataaaatcagtatcaagccgggctgcgggatctcactggctccgtttgctgatgcgcacaagctggccggtataccgcaaaacagcggggaactgagcgacgatatcggaaccgatgacgccgacacggaggagcgcgatatcctcggtgagctggagattgtcgcccggctgatgatcaccggcggcgaggcaaaagaggaagtacgcctggcacgggcagatcgcggcatgatgcgcgaagcgattctgaccgccgcgcagcaggcaaaaaatgcacgcaggcagatgatcaccgcagaccttcaggcggcattttatgcctttgcggacgaccccgcccgcccggaagcccgccgcgccagggcgcagaatatgggggagtccctgagtgtgtttatgcagggatttctcggcgaactgttcaaccgtgagggcaggcactggccggaggccgatatcaccctgattgacctcggcacactggcccgggagggctacgaagccccgctggccgtggcctatacctcgctggtcaataccatcaataatatcgcggagcgtgaccagtttctggaaagggaaatcgtctttgccaccgatgaagcgcatatgatcaccaccaatccgctactcgccccctacgtggtcaaggtcgtgaaaatgtggcggaaactcggtgcctggctgtggctggcgacgcagaacctggaggatttcccggacaccgccaaaaagatgctcaatatgattgaatggtggctgtgtctggtgatgccgccggaggaagtggaggagattgcccgcttccgtaaactgactgacgaacagaaagccatgctgctctccgccaccaaaaccccgcgctgctacacagagggcgtggttctcgccagccgcatcgaagcgctgttccgcgccgtcccgccgagcctgtacctcgctctcgggatgacagaaaaagaggaaaaagcagccagaagagagctgatgatcaaacacgggatcagtgaattggaagccgcaaagcggatagcgcgggagctggataaggggcgggggattgaagtgagtacaggataa

SEQ ID NO: 288384 - DNA, 267 bp, Morganella morganii
atggccggtaaacaggttatctgtctcggtgatacgactgaccacggcggcgtagtcatctctgcgttggataattacaacatcaacggccgcccggtggcgacggagggggattcagtctcctgtccgaaatgcaatggtgtttttcagattgtttccggttcttcccttatgacctttcagggcaacaaaattgccctggagggaatgaaaaccacctgtggtgccacactgattgcgtcacagtcattaatggtatcagagtaa

SEQ ID NO: 288385 - DNA, 282 bp, Morganella morganii
atgtttgtccgcccggcaggcttaccggtgaaagcaggtgacgcttataaaatgctgaagttcagcagagtcagcggcggaataaatgtgactaacccgtcaccgtattacctgaccgttgttaatatgacgattggcaatcagaaaattgaaagttttatggtcgcaccattcactgaaaaaatagttaatacagcacaaccagctgccggcggaatatcatatcagacaattaatgactatggtgccaatacaccggtaattaacgttaattcatattaa

SEQ ID NO: 288386 - DNA, 525 bp, Morganella morganii
atgtttatctgccggacaatccacaattccttcccgggccagacgcgatacatggccggtggaatgcaccagttcatgcagcagcgtgctgtaatagtccgcagggctccggaactgtgcagcctgcggcataatgatgtgatcagcaaccggatgataacaggcacgtccgccgttgttgtgtctcaccggaacgccgccattagcgactatcttatccgctccggcgatacgttccgcttccggcagcaccggttgttccggacacaacttatcaggcagattttcacactgatcgatattaaacagatgaaagctgtccatcatccggtaattcctcatgacaaggtcaccgttttcatccgtggtcatccggccgtgctcatccgcctccgctttctgaaacggtttgaacagtaccaccgtcgtggatttctcccctctgcgcacatttccccccgcttcccgcgcctgacggaaagtcagccagcggttgcgctcataccctttattcactgcatctga

SEQ ID NO: 288387 - DNA, 606 bp, Morganella morganii
gtgaccgtgctcggtgaccgcgcaatcagaacctgctcagaagccgcggactgccgcagcggcggggcggataatcagcccggggcatcggtacccggaaccggtttttcaccggtactggaagacacgacgcaggacaatctggttattcttacccgtctggtcaacggacaactgaagccggatgcgaagaacctcgccacgctgaaaagcggtgatctggcggtcacccggggtgtgattcaggcactgaaagatgatccggataatgccgcgctgatccggcgtctggccggtgaactggcgatgtcagaaacgatttcggtggcactcgggatgcgccggatgctgatggcgggtcaggcagagccgcatgtggcagatcagaaaatcgcgctggaagaatccgatcgccgcctggcctttctcgaccgcgaagtgcaggcactgaaaaacgaaatggagatccgcagaaccatcagcagcaacaccctgctgacggtactttcccgccaggctgaacgggatgtgacgcacggactgcgtcagccggtacatcagaatgacggcgcactgcaccggctgaatcataaggcggtgccatga

SEQ ID NO: 288388 - DNA, 465 bp, Morganella morganii
gtgcttcaggatgtggaaaacggcaccattatcctgctggatatcagtgcggtgaaaaaaaaggatacgccggagccggtgcgtctggtgtatgaggacaacggactgaagccggaagagaaaaaatcgcccgccggggcttctcagcctctgccaccgctgccggtggcgctgatccgctatgccgctcagacgttgtatgcgccgctgcgtacagttgaggcgctgcccggtgtaaatccgttgtcactgccatcacctgagagtgccgcctctctgatgccgtcagttccggtggatatccgcccgctgtccgcttggggcgctgggaattacagcgtgaccgcgctggaactgcgcaaccgtagccggaaaaccattactctcgatccgcgctgcttacagggccggttccatagtgccgcattccagcattaccggctgggagcggcgggaacgccgtaa

SEQ ID NO: 288389 - DNA, 162 bp, Morganella morganii
atggctattgagcaaaataatttcagggacttgtacgcccgtgatttggtcatgacgacgcaacctcaacatatgcttggtgtgctctcgacggctgatatcacgcacccgagtttggcaggcaaagaacggatagaagccttctttttgcaggctatctaa

SEQ ID NO: 288390 - DNA, 300 bp, Morganella morganii
atgagtaaaatcatcatgctgcaactgatcagagtggccgccactatgaccggtgcctgttcactgatatatctgacggcaggttatgagtccgcactgaatcacgaaatcacggcgttcagcctgccgttgttgttctggcgggtgatgctgtacagcgcggcagggggtttctggtgttaccgcctccggccgcgtctccggttggcctgcccggggcgcaggatacgccgcactgaatgcctgatgatctgcctggtgatatcgggcgagctcagcggcctgctgcggaggctgtga

SEQ ID NO: 288391 - DNA, 336 bp, Morganella morganii
gtggtgttcactgacagtcatcatcctccgcagcatgcggataatcatcaggtcgtttatctcgatgcgccggatcaattgcagacgcagttcttcggaacgttaccggtggacccggcggaggctgaacgggtggtgaaagcccgtatgcagtcatcgtcatggttgacgatgcagcagcaactgacgcaggcgtatcagggggtactgaaagcatacagtctgaagctggcgaagtatccggcagtggtgtctggtgatcatcatgtggtgtacggtacggccgacgtggctgtggcggagcaattgctggctgagttccgggaggcgcggtga

SEQ ID NO: 288392 - DNA, 189 bp, Morganella morganii
gtgctcggcgggctgattctggcagcttcgtcgatgctggctgtcggcaatgccatcatcaccacttttgcggaggtgcgggataaccgcgcgacctgggcgaagttcgggatgctctgcgtggtcggggtgatcctgattgttgtggtggtctggctggcgtccaaagctgccactgtgctgctgtga

SEQ ID NO: 288393 - DNA, 321 bp, Morganella morganii
atgcgcacggtctggcagcagaaaaccggtaaaacgccggatcacgccacccgtcagcatttacagcggcggggcatcactgatatcacggtatctgagcggacgatggccggaagctacccccgcgatgccgtgaatgatatccggcagcgctttccgcgtctgccgaacccagacatggtgatttatgtcttccctcacctgaccggcggcgagcccgtgccggtgccgggttacagctccgtttttccgttttacagtcgtgtgcagtatgcactgccgggtgaattgccggaggtgcgcagatgcccggcctgttaa

SEQ ID NO: 288394 - DNA, 180 bp, Morganella morganii
atgcatgactgcgatttaaccgacacactgtttatgcacactaatctggaaggggcggatctttccggctctcactctttttatatcgatatccgtgaaaataaaactgccaaagccacattttccgcatacgaagccctgaatctgctgcgggtgcttgatatccgcctggctgattaa

SEQ ID NO: 288395 - DNA, 237 bp, Morganella morganii
atgcaggatatcggctgtgattgcaccaaaagcaccaaagttaaatgcagcaccgataccgccggattgataatctttggcaacaaatgctccgccgaaaacggtgacaaaatcggtcaggccataaaatatttctgcctgattgattttctttccgttacctttgttattgctgtcataggttccgccggaaatgctgtaacgcatatttcctttcttttccagtgtggaaattga

SEQ ID NO: 288396 - DNA, 300 bp, Morganella morganii
atggctcaaaaaaattcattacctaagaaaagcctaatctatcttgatcctccctactatgttaagggcgccgaactatatcgcaacttttatcagcatgatgaccatgttaaaattgctaaaaccttgcgaaatatcacgcttccctggattgtttcttacgataacgttaatgaaataagagaaatctatcgaggccttaacatggctgattattcattaagttatacggctcaggataagaagaaagggcttgaagttattatttataatgacggggtaaatatccctgagatttga

SEQ ID NO: 288397 - DNA, 348 bp, Morganella morganii; identical to SEQ ID NO: 279422

SEQ ID NO: 288398 - DNA, 132 bp, Morganella morganii
atgaccatagatactgtcgttatgattgctcatgtgcttcatgtttctgtaaacgagctactgagtgattaccttgcctcagaatacagtgacatcatgcttttaatgaaccatcgtaatacagatagatag

SEQ ID NO: 288399 - DNA, 420 bp, Morganella morganii
atgcacgccattcacatagaacttacggactttgtcgtcatcatcgtcactatggaattcaccacagccttcagacctgtcgcggttaacctgatagtcagcggtatcttcccgcgcttcaccggcggtattatcatcattttccgcatcaagttgctcgttaaaatccgaatcctgatcggaaatgtcaccgggtctgaccaccagcactttttccggcacgccgtcaaagcgctcatccgcaaacagttcggttgcttttttaaagtcgagaatggtgaaccacaacttaccgtacttttcgttgatacgcgtaccgcgcccgatgatttgcttaaatttggttatggactgaatattttgatccagcacgaccagcttgcaggtctgcgcatcgacgcccgtactcatcaattctga

SEQ ID NO: 288400 - DNA, 408 bp, Morganella morganii; identical to SEQ ID NO: 279270

SEQ ID NO: 288401 - DNA, 414 bp, Morganella morganii
atgatttccggtccggatcagagaacagcacgccagcatctcttccgccgcacctttacagataagcaaggcggtaccatccggttttcttacggatacagacagacgtctgcggacaaaatcaaacggcagttcgtcaattttctgataattgtgcagagactctgtttcggctttaccgcgcccgaaacggatgatcgcctgatccatcaggttacgtgtgccgctctggtgaaaactgttcagccacgccagtcccagtatggcttcatcggtattaccttccgtatcaagatgatgctcgaggataatattgtcctgtgtcagcgtccctgttttatccgtgcacaggatatccatcgcaccaaaattttgtattgcattcagccgtttaacgataacttttcgccgtga

SEQ ID NO: 288402 - DNA, 675 bp, Morganella morganii
gtgggtattccggttatcgccatttcattgcagaaagacaacggcagtcacgccaaaaataatgtgaatcctgagcttgataatgaagagcaagcctataatgacgggctgaaagaagggattaccctgattggtgatattgttaataagccggacaatgcaaaagagctgattaaacaaacctttgacagcaggaatatagtgactcaacgtctgaaagatatccatgaaagtcagcgtgtccgggcctatatggcaaacccggatttaaccacttacggatcaggaaaatataccggtttaatgatgcagcacgccggcgcaatgaatgttgccgctgcgaccattaaagggtataaacaggtttctctcgagcaggttatcaactggaacccggaagttatttttattcaggatcgctacccgggcgttgttgacgaaattaataacgacccccgctggcaggttattgatgcagtgaaaaacaaacgtgtttatttaatgccggaatatgccaaagcctggggatatccgatgccggaagcgatggcaatcggtgagctttggatggctgctaaattgtatccgcagaaatttgccgatattgatgtggatgctgatgttaataactggtatcagaaattctatcgcactcaatatcagggcagtcattaa

SEQ ID NO: 288403 - DNA, 474 bp, Morganella morganii
atggttggcttttcattagcgggtcttggtcttttacactcagtattccaagcctttgtggcaggaagaatagccactaaatggggcgaaaaaacggcagtactgctcggatttattgcagatagtagtgcatttgcctttttagcgtttatatctgaaggttggttagttttccctgttttaattttattggctggtggtgggatcgctttacctgcattacagggagtgatgtctatccaaacaaagagtcatcagcaaggtgctttacagggattattggtgagccttaccaatgcaaccggtgttattggcccattactgtttgctgttatttataatcattcactaccaatttgggatggctggatttggattattggtttagcgttttactgtattattatcctgctatcgatgaccttcatgttaacccctcaagctcaggggagtaaacaggagacaagtgcttag

SEQ ID NO: 288404 - DNA, 405 bp, Morganella morganii
gtgacattaaaagcggggaaaaagcagggagttgcattaattaaagcatattatggcgtgaagaatattccgctgcctcttatccggattgactgcgacagcagttcgttgggtgctaccgatattcagaccgtaccggaaaaaccggtagatattccggcagacgggatatcagctgttgaaataacagtacttttcagagaccaatacgataacccgggtatggataaaaatattcgctgggaaacaaccggaggccgttttatccataaggagaacattacgtatattgatgggggctgtcacgcgacactggtcagtgataatcctgcagatattgcggtgaatgtgttctatgaaaataatcctgaatactcgatgagagttaatatctcttttatttaa

SEQ ID NO: 288405 - DNA, 498 bp, Morganella morganii
ttgctggcctacggcagtgatgataaagcggataaggagcgtgactggggcaaattgcaacacctgttgctgaagaaaccgaccgaactgaccgctgatgaagtgatgaaactgatttataccctgcgaaaaccataccgcaacggtgctaagtttatgatgaataacaatacgttattcaaagtgcgcacactgaaggattcccagggaaattacctgtggcagccgggcctgcaactgggtcagccgtctgcattactgggatatggtattgcggaaaatgagcagtttgctgatatggctgccggtgctgttccgctggcgttcggtaacttcagacgctgctacaccatcctggatcgtatcggcatccgtatgctgcgcgatccgtacaccaacaagccgtttgtgcatttctataccacgaagcgtgtcggcagcatgatggtggacagtaatgctgtgaaattactgaaagctgcaggtgcaggaggctga

SEQ ID NO: 288406 - DNA, 153 bp, Morganella morganii
atgaataatgaagtgattgcaaagcaaaaatccgaaattgagaaaaatattaaaagtttgagtcaggcagcaaggtacccgcacattctggagtcatttgatgagccagaagatgcagagaaagcagcactggacttgctctaccttaagtaa

SEQ ID NO: 288407 - DNA, 123 bp, Morganella morganii; identical to SEQ ID NO: 277442

SEQ ID NO: 288408 - DNA, 201 bp, Morganella morganii; identical to SEQ ID NO: 277852

SEQ ID NO: 288409 - DNA, 294 bp, Morganella morganii; identical to SEQ ID NO: 278174

SEQ ID NO: 288410 - DNA, 177 bp, Morganella morganii; identical to SEQ ID NO: 14595

SEQ ID NO: 288411 - DNA, 294 bp, Morganella morganii; identical to SEQ ID NO: 278174

SEQ ID NO: 288412 - DNA, 144 bp, Morganella morganii
atgtgtatcggggaatcaatttcgaatgacgggtatatcgatgaaaaagaagctattgagattatcaggaaacataaccggtgcattgccgcagaaactgaatacaggcattcgcttatcgaaatttaccggaagaaagggtga

SEQ ID NO: 288413 - DNA, 237 bp, Morganella morganii
atgctgatgtttatcttaataataaatggaaagggctctgccttagtgtttcttacgccatttgtcacattaacatttttggtgtttacacctgaaacctgggtacatggagcagatgctcatactgagtttccttatctttccggtgcgggaaggttagttctgaaagatactatgatgatagcagcaggatttgttgcaatggtacattctgcaaggtgtatcactaaaaagtag

SEQ ID NO: 288414 - DNA, 129 bp, Morganella morganii
atgtttgattccaagctgagctgcgacatcacatacatgcttagcgccatcgacatttacatcatagtaaagactgataggatgtacgttatctttgtgctttgcagccagattaataataacgtctga

SEQ ID NO: 288415 - DNA, 1362 bp, Morganella morganii
atggcgaaatataaggcgtatccggaatataaggattccggggttgagtggttgggggagattcctggccattggaaaaccatgtctatatctagattgttttcccggattaagaggactggatatatagagaaggaattactttccgtttatcgggactatggtgtcatacccaaatcaagcagagatgataacaataataagccctcagaagatttgtcgccttatcagttggttcaaccaaatgacttggtaatgaataaaatgaaagcctggcaggggtcaatcgcaatttcagagtatgaaggaatcgttagtccagcgtactttgtttaccaacccaataaatttctttttgagttggcacatccaaaatatgtgcattatctgctccgtaattctatctatatcactcaatatttgagtcgctctaaaggcatacgagtcaatcaatgggatttagatcctgatgagtttagaaatattgagcttctgcttccaggaaagattgagcaggaaaaaatatacagtttcctcgatcatgaaactgcaagaatagacaatttaattgataaacaacagcaactgattgaactgctaaaagaaaaacgtcaggcagtaattaaccatgctgtgacgaaaggattaaatcctgatgtaccgatgaaagattcgggaaatgatttattaggaaaaatgccagtacactggaagttaacaccaatgaggtttttatcagataatatcacagtcggtattgttgtaacaccagcaaaatattatattgataatggtataagatgttttcgttcattaaatattagtgaaaataaaattaaagatgctgaatgggtgtatattagtgaggctagtaataactttttaagtaaatcgaaagtatacactgatgatatattggttgttagaagtggacaacctggcactgcggctgttgttgatcatgaatttgatagttgtaattgcatagatctaatcataatcagaagttctgagcgatttaattcaaattatatatgtatgcaaattaattccgtatttattaaaaaacaggtaggaatggcctcagatggagctatacagcagcactttaatgtggaagttgctaaagcattggttgtagtcgagccgcctaagcacgaacaaagtgaaatatttaaatttttatctgaaaaaaataaatattttgagcgattgattgaaaggtcggagttacaaataactcttctccgggaacgccgtaccgccctaatctccgctgccgtcaccggtaaaatcgatgtccgcgattgggttgcccctgatactcaggaaatagaaaaaactgaggaggctgccgcatga

SEQ ID NO: 288416 - DNA, 504 bp, Morganella morganii
atgctcaaaataatatcttttgttttatccccgctgctgttattcacagcgtttacagcaccggcggtgcagaccggtgatcattcagcgatccgcttcggcgggacattaagagcaatgacgatttgccgtgtcaataatgaccggatgattaccgctgattttaaaaacgtcggtatcaataagctggacacggaagtctacagcctgccgctcagttacacactggactgtcccggtgttaatccggccaataccttacggatgatctttatgacatcccgcccgtccgtgtctgatccgtcggcgattgaaagtgatgtcagtggtttgctggtgaaaatcctgaaagacgggcagccgcttgaattaaataaatttttcacaattgctgatattacacagcagccaaagctggaagctcagctggtgaaagtaccgggcgcggatttaacgcaatccccgttccgggctaccggcacgctggtggcggagtatctgtag

SEQ ID NO: 288417 - DNA, 540 bp, Morganella morganii
atgagtatgaaaaaagtggttctcgcactggcagtttcttccgcaatggcaatgactgcgcaggcagcaaatcagggcggcggcaaaatcaacttcaaaggtgaagtgattgatgcagcctgttctatcgatgcaagcagtgtaaagcagactgttgagctgggcagcgtggcaaaagttcagttggcaaaaggcggtaaatcaacaccggctgactttactattcagttacacaactgcgacatcagcagcggtaacactgctaccgtcacttttaacgggatgacaggtgaggcggcgggtggactgagcgaagccttcaatgtgagtggcccgtctgccggtttattaggtgtggtggtgacacaggaagacggcaccatcattaccccggggaaagcgtcaagtgcatttgctctggctaacggtgataacgagctgagattcaaagcctatatgcagggttcaactgctgcctccactgcagtaccggcgggtgctttcaccgcaacagctgacttcctgatggcctatcagtaa

SEQ ID NO: 288418 - DNA, 1047 bp, Morganella morganii
atgcaaaacctttacactctgataatactttcctatgagggattcaaaaaagaaataaccattcctgccggaagatactgcatcaataacacagttaatcatgacaacggcctgattaaactgaacatcactgataccgttctgctgcctgaacagacagaagcagagttatatgaggataactatttcatttcttttaaaacctgtagtgatgaattaataacacaaaaaataagttataactctccctttatctttcagggtaaatgccttttcgccatcaaaaaacaatcagaagaatggcgtaaaaacataatgttaaataaaatcacgatgaagaacgctgccccgcgatatcttcttcccgttatgctcctgttatttttcatagtagcaaccggatttatgttttttcagtacaacagcaacggaaacagaaaccctaataatatagacatcaaaaatactctaaatagatatatcactgataataattacattattaatggaagtgatattcttattttgtctcctgatgagaacgtctttaacatcatcaggaataaaatacctgaccacagaattcataaaataaataaaaataaattaaaaataaataataatgatattatttttactgccaatttttggcataaaaaagaaattatacatatacatcacaatgataatgaaacacaactaacagacttggctatcccggagatattcaggaaagatattaccatacggtatttttcattcaatgacacaataagattaataaatgacagattcagccatatattaatccgatattctgtaaaaagaacaaatagcaatattattatttatgctgaaaaaaggagagacaaagagattgaccgtattattaaagatatcaatgacacaatattttcctcaccggggaatacactggtacagtacagggaattaagctaccgagagctcccgccgggagtatatggctcagtaaattatctttacctgtctgataaccatataaaactcatctctgataataaataa

SEQ ID NO: 288419 - DNA, 2817 bp, Morganella morganii
atgaataatatatatagtaaaactccggaagtatccgttttggacaaccgtggtctgaccgtgcgcgacatcgcgtactatcgccatccgggttcccctgacgttactcgtgagcgcatcacccgtcatcagtacgacgcccgcggctttctgacgcagagtgctgaccagcgcatgcacgacgccggactggcgaacttcacatatcttacggatctggccggcaacgttctgcgctcgcagggtgtggataacggcatgactgtggcgctgaacgatgccgcaggccgcccctttatcgcggtcagcaatatcagcaccaccgccgatggcaccgggaacagagaccgggccgtgacgcatacctggcaatatgaggacgcagcgcttcccggccgtccgctaagtataattgaacagatagccggtgataccgtccgtatcacggagcgctttgtttatggcggaaatactgatgcggagaaagttctgaacctcgccggtgcctgcgtctgccattacgacacggccggcttaacacagaccgacagtatttccctgaccggcgtcccgctcttcgtcacccgtcggttactgaatgacgcggacaatccggatactgtggccgactggcagggtgccgataccccggcccggaacgaactgctggccggcgaggcgtacaccaccctgagcacagcagatgccaccggcgcggtgctgacaaccacggatgcaaaaggcaaccggcagcgggtggcctataacgtggcgggccagttgtcgggcagttggttgacccttaagggcggaaaagagcaggccatcgtcgcctccctgacatactcggccgcggggcagaagctgcgcgaggagcacggcaacggcgtggtaaccacgtacacgtatgaagcagagacgcagcggttgatcgggattaaaacggaacggccggcaggacatgcctccgggacgaaggtactgcaggacctgcgctatgagtacgacccggtgggtaacgtgctgggcatcagtaacgacgctgaggagacgcgcttctggcgcaaccagaaagtggcaccggagaaccggtatacgtatgacagtctctaccaactggtcagcgccaccggacgtgaaatggcaaacgccggccggcaaagtcatgcccttcctgatgctgccctcttcgacagtgccacatacacgaactacacccgcatctacagctacgacagcggcggcaacctgacgcagatacgccattccccggcaacgggcagcggttatacaacccgcatcaccgtcagcgattgcagtaaccgcggggtactgagcacgctgacggaaaacccctcagacgttgatgcactgtttacccccggcggacaacagatgcagttactgccggggcagatactgagctggacatcacgcggcgagttactgaaggtggcaccagtggtgcgtgagggtgacgccgatgacagggagagctaccgctacgacgcgggtagtcagcgaattctgaaggtcagcatacagaagaccggcaacagtacgcagacacagcatgcgctgtacctgccggggctggaatgtcggagcacaatccgcggtaacacggaaatagagagcctgcaggtggttaccatgggcgaaggtggccgtgcgcaggtacgggtgctgcaccgggagagcggcaggccggatggcatcagcaaagaccagataagatacagctatgacaacctgatcggcagcagcactctggagatcgacggctacgggaatctcatcagccgggaggaatattatccgtatggcggcacagcgatatggacggtacacaacgtggtggcggacagttgtaaaacaatcagatactcagggaaagaacgggatgcaacggggctgtattactacggttaccggtattatcagccatgggcgggcagatggttgtctgccgaccccgcagaggccgccgatggcctgaacctgtttcggatggtacggaataatcctgtatcaaattttgatagttcggggttgataactgttgacgatcttgttaacgatggcttacccccggaagggatccggtatgcttttcaggacgcaaatgaatgggctcagttagtcgctcttcttaagaatcaataccccagcttacctgatgatgaatttgatgaactatcgcaaaatgcacaagcactatttagtagtgcacaagctgatgcagaaatttcaccttcaaaaggaaatgatatattcgatacagacaatgatattacagatgacttgagagctttgtttgatatcaacaatacagacaagctggcggtcagtaaatatcctcacagagtgataaaaagagaattaaaacgcataggtgataatatcatattcagaggggatacgcgctcacctgatattattttaaaggagggctttacctcaagaggtaataatgaagatttagttaaatatgtgcatagtaatgcagatagtgtatttgtaagtttcacaacagatgaaaaagtcgcaagaagatatgctgcacaaaaagaaactgagggttatgtgtatatcgtaaaacaccggaaggaacatattgatgtgaatgaggtcttaagtcatccgggagtctggcaggataaatcgggtgcgtccttaggaaggcggttctatgaatatgccaaggaaatagctgttccacatggtgttgaaggaagaaaaatagtaggttggtatcgtgttggcaggaataaacgctatgatggtgatagaatgtctcgttcagctattcattga

SEQ ID NO: 288420 - DNA, 150 bp, Morganella morganii
atgaagaaagcacgttttaccaggtcgcaaactgtcagtattttaaagttggctgattccggcatgaagatcgacgtgatttgtcatcagaacgggcgcagtaacgccacatattacatccatgaactacctccgttttgtaagtactga

SEQ ID NO: 288421 - DNA, 2721 bp, Morganella morganii
gtgaataagatatacataccattggacagcggcgagtctgcggttcttaaggatccagataccttactaccccgcaaaatttacgaacagcttgcccagttcattggaaaggctgttaaggctattggtgacgtaccgaaaaattcggaatcgttcaacgaaacgcgcagtcataaggcgatatcaattgatggtgaaaggggaactggtaaaacatcagtacttgttaatttaagagattacctagcgagtaatcataaagagtttgcgggagatattcatattcttgatcctatcgacccgactttgcttgaagatggtgaatcgctgttcttgcatattattgtggcagccgttcttcaggataaggatatcaaagctgcacagtgtagagacattaataaatccagagcatttactcagaagcttgaagagttagctcatggtctggaatctgttgatttgcagcaaagtcaacatggaatggataaaattcgatccctatatggcagcaagcatctggcaaattgtgtagaagcatttttaaaatccgcgctagatttgataggaaaaaaattattaatattaccgattgatgatgtggatacctcgcttaatagggcatttgaaaacttggaaatattacgtcgttatcttacatctccgtatgtattgcctattgtgagcggcgatcgtcgcttatatgatgaagtttgctggcgagatttccatgggcggttgaataaagactcatcttatgaacgtaaaaagtcttatgatatcgccaaggaattagctattgagtatcagcgtaaaattttaccactgccgcgtagactaagtatgcccgctgtgagtgattactggcagcaagacggtattgcagtcactctggacaaagatggtatccccctgcgcaactttatggtgtggttgaagatctttatcaccggtccggttaacggtcttgagggcagcgatttatcattaccgatcccgtcgatacgcgctctgacacaattcattaatcattgtggtgatttaatacacgattttcctgagccatttaaaaagaaggttagcccgctagccatacgtcggatatggcaaatgcctgatgttccacttgatgttattgaaaattttgctaaaaaataccatgagttgagtaaagaagctaagcgtgagtatggagaggcttacaggctattttatgatgaactgaagatatcgaatacccttgatagtaaaacatatcttgcagaggataaaaaatccgcgtgggtcgataagctttgtgagtattttcgctttgaacctgaggctggagctgtgtttttaacgcttcaggcaaaacagtactggttctcctggaataaaggggagagtcgtaatcaatctgtgcttgcgactccgctttttcaacctttacagcatgagcagcgagagtacgagatctttgaaaacaatgacgatctctcagactgggaatctcagttgaaaaccaagttgcctgaggcttggttgacagctattaaaggacaaaaaacgcttttgccttatcctgtagctgaagtgggtgtaactactagtttgacctggaagtactgggaagatgttcatgactattaccatgataaagatttagaaaataaggccattttccttatttccgcgttgacccaacggaatttctataccaactcaaaacagtccatagtgttaaatattggtcgagtatttgaggtgattatcacaagcctggtttccgatatagaattaactgatttgcaacggataagacagcgttctccattttattctgcaagcgcgcttgctccgacaaaaacattgtatttagatgaatttaactccaaaaagaacatacgcatgaatagtcggtttgaatcagaacgagaactaacagatgagccgttggaggaaatccctgatgagaatgaattgatgtttaaaagtctctgtgatgagattaatcaatggaggaaggataacaacattgaaaatattgaagtttcaccgtggttagtttataaagtatttaacaaggtttatagtcaggggatttctggtctaaatggtttaggttatagggactctgcgatacatattgcaggttgggttttttactcaacatggtctgcatttggtagctttgaaaaaggtgagctatttggattgtcggatgttgtgtcgacaaccaatattaattctactaaaaacttctatagtaatgataatttccgcgtaaatgtgggaccattcacgccggaacaaaatcaacagtccaacagcgatcgcgaagcatatcagcaccgtaaaatttatggtgaaaaaaccagaactatcagctatgtattggctactcatccgcttaaaaaatggattgatgatgtattaagcgtagagcctaaacaaaaacaatacacagattctaaggctgagaaaaaaacactgactcagacagataaaattatagatatcaagccgtctaaggaatttattacaagaaaactttcaataaatccacaagctcgtttggttaaaactcgctttaaaacacagcttgagatgatttaccctggttacgataaagctaaaggcttcattgatgaagtcattagcaactttcccaaaaccgaccctgcagttaaaacgcttctggccgtatttgaagagctctaccctaggggtgagaaataa

SEQ ID NO: 288422 - DNA, 2703 bp, Morganella morganii
atgttaactaggtcgctgagtgaacatgcagcagggtgttttttcaccgacgagcgcctctcgcagcgtttttgggagatcctgttatcatcaccgataaattttaaacagtggttgtcattgcaggaagagtgctaccaactgctcgttgagagtattgataaccgttaccctcgcacttaccgattgaccgatgtgcgtcaattaatggggaatatctgtgacaatggcttgttgactagcccagaattgccctggcttgatgtcatttcagaacagttactgctgcgtaatggtgatttgctatactaccgtgaaaataaggtgcagaactatgtgcggatcgcagcagaactggacccgactctgcttgtgggctggcgcttgggggactggctacagcaaagtccacctccgcgattgtcagacatcacccgtgtggtgatggctcagaacccgttttttgcgcctcctgccagttcgggtaagccttttgctgaggggcatgtccaccttggtggagtgatggctggagataccatcttgggtagttatctttttgaagagattgaattaccaaagagcaataaagcatcattgtggtcctatgaagaacacaatgatttaacgtcgctattagtgcgggcaaagacgctgctttctctgttactttccgatcagtttgaaacggtttcaaagaaatatatggccttaagtgacccgatgaagaaaatccaaaatcttccggactggctaatgctcgctaaaaagaatcacggagctgaaaacgtcagtcctagttggttattaagtcagtttgcacatgcctcagaccgaaaacacccttcacgctggttatggctgcagctttatctttgccactcttaccagttgaaagacacccatccgcttgatcgcacggcaatactctgtttttggcttacagttaatgctttacgacgtcgcattattatggacgggcaggggcttacgcgttttactgaacgctattttagcggcgcattacgtttgggaaagaaaagtgacagtagcaatatgcgttacctgtttgctggcaaagacgatgtggctgaagtgaaggcaactccgaatgcttttagccatgaaatggtgacaggattttcctcaatattactcaatacccttggtatcccccccatttctccgccgtatgttttcggtgaacatgagattaagccagatgaacgcacgatgcgctacattgaagcgctcgagcgctggcagttttgtgggcacttttcgcgttctaaaagtacaaaacggggtaaacggccaacggctgacttgcaaaataactggacacaagcagagcaattactgcagaagctctacagccacaatggctggaatcacccagtttttttaggaggaaaacgaaacccgcactttcattttcagccgtcgaactggtttcggggtctggatgttgccggggatgaaaatgccctgaaaatcgcaggttttgcaccgatgctacgatggctgcgcagcgggctatatccaatgcctgacgggctttgtgccagtacgggctttcattttagcatccatgctggggaggattacgcgcatccggcatcggggttgcgtcatgtcgatgaaacagtgcgtttctgtgagatgcgagaaggggaccggttgggccatgccctcgcgttgggaattgagcctgctctttgggcgaagcggcatggagagatgatacttccgctggatgagcatttagataatcttgtctggcagtggcactatgccacggttttgtcgggttcgttgccacttgctcaggctgtattgccgctgcttgaacggcgcattgcacgttttatcgcgcgttgtgactggtgcaaggagaagctacctcaaatagataatagcgtggcggataaacgagattgccgtgatgaaccacctctaaaaaatatcacgcctgatacgctttaccgtgcttggcttttccggcgtaattgctcttatcgtctccaacaactccatggtggaacgccgttgacatcgcaggagaaatgcgcgctaccagattggctaacgttaagtgataaagacagtgtggcggcacagctttatcagcaaagacattctagactgcttgacgatcttcccccacagctggtggttgtgcgagttgctgatgaatggagcacgcaagagctgattggtttgggtaaccccggtaaactgcgtcagcaggcaagcggcgataaaaatatcctccaagatattgatacaccagaagaactggagtttatgcatgcattgcaggactatttactcgatcactacgatcgcaaagggctaattatagaaacaaatccgacgtccaacgtctatattgcgcggttcaaaaagcacgcagaacatcctatttttcgctggaacccaccggatgaagaacttttaaaaccaggagcggagtttaatcgccatggtttgcgcagaggacctgtaagggttctgattaatactgacgatcctgggattatgccaacgacattacggacggaatttttactgctgcgagaggctgcgattgaacgcggtataagtcgaacgatggctgaatattggctggaaaggctgcgtctgtacgggttggagcagtttcagcgtaatcatttaaatgtatttgaagttgttgactag

SEQ ID NO: 288423 - DNA, 738 bp, Morganella morganii
ttgagtagtacattgccgaccttaaaatatacggatgccaatgggttacaggctaagctaaaagaagagttgaaaaatttacgggaaaaagagtgcaagtcgtattggcctcgctttttaatccgcagaatttcgctttatgctattccgtttctcatgttctttacttttttcttttgtttaagtttgacgaagaaagtaggtgtagagaaagcgaatacgatgataaatgatcttagtttaccctcatggaataatctgttctggggggtagctatcattcttgtggtattgttggggcagtggttaatgtttgatcataaatttggctcgcagactactaataacgtaatgaaacgcgccatagtaagatataaaaattgtgcacactttatcttgtttatgggttttatgatgttatttttgtctatctatggggctgaatataaattatattatggttttttcacatttttgactctaacattctgccctttgcttattgaccgtactttaggggtaactcggcaaaatgagcgtttcaaactctatatcagaaggttagaacgtcttgatgagttgaatatttttcgtgagaaaataaatataaaatttgaagaactccattttatcgagtatatgaagcttattgatgaagcagatcacagtaagaaccaagatacgtttagcgatacatcttattttatgacattgattgaaaataagctaaaagtgtaa

SEQ ID NO: 288424 - DNA, 195 bp, Morganella morganii
atgctggttcatttatcgtggataacgatttttttctccggccgtccggcaattgaatcactacaagcccacaaatctccccgtaaagttatcgacccgcacttgaccccaaacaaaaatatgacagcgcattgcttctataattatccgcttatttactctcatatagatgtggtcgcatggttaacaaactga

SEQ ID NO: 288425 - DNA, 195 bp, Morganella morganii
atgccgcgacagcagcaatccctgccggaaagtgcacaactggcgcatctcccggcggacaccctctgcacaagtctgagcggcggtgagcaaacacggctggcactctgccgcgcctttttacagccgcgcgccttcctgttacccgatgaacccggaaaccccatctggatgccgccggacgctgctggctga

SEQ ID NO: 288426 - DNA, 366 bp, Morganella morganii
atgatgcagtacaaagaagtgacagattacgaaattaataaaactgtagcgaagcatctaaaattaaacacaatcgcatatgaccgcacggaaatagttttattcgatgatattgatgcaacaccattcgacccctgcaacaacccagcagacgcaatgccgattattattgagcataagatatgcatggcctatgacgtatttgcagaagagcgcgatggtgggagttgggtagcgcaacctgcatatggtttttctgatgaacgggtgagaagcgacaattactatcgcgcggctatgatttgtttcctgatgatgaaggatacggagaatgaaaaagtgggcggaagcgtagaaattaaatga

SEQ ID NO: 288427 - DNA, 417 bp, Morganella morganii
atgccaaggtggggaaaagcattagcttcaatattattattttttacggtaattttgggcagtttccttgtttatgactatactttttctttgttacaaatgcgagatattatcgtgttttccgggatgatagcaatattatctttgggagctccatttaccttatatgcgtttatgggaatgacaattgaacttgtattaggtgagaattcaacgacctttaaaatcatgatgagatataataaatcaataatgaaatatttatattatttatttttcatcggtcttattggtggtttccctgtttcctttttggtaaacatctaccttctcgacaatggctataagacatgtgaaaaaatctcatggatgtcaccaaccacttatgtaaaagagttatcgctttgtggcagatag

SEQ ID NO: 288428 - DNA, 186 bp, Morganella morganii
atggccgcttctcagggcagtgacaccatcgaagttgcctaccttaatggcatcgacaccccgtatatcgaccagcaggaagggttcacctcagacggtgtgaccacaaaaatccgtattgatgccggtgtggcaccgctggattatcgtggtttggtaaaaatgagcaatgaaaagataacgtaa

SEQ ID NO: 288429 - DNA, 480 bp, Morganella morganii
atgtttcagtttaaagaccttattcagacaggcatggaatcagcaaaccatgttgaacaaaatcgcaaaagtattaatgaagttttttctatgctaaacaaagaattaagtaacgaaactgataacctgtttactattgcacgttatacaaacggatttaatatctttgaagtaactcaacgaattgctggtggccttgtaccaaaattatcattggaaacaaagccacaaacagggactttgaatatagttttaaatactggtgaaaatgcatcagttgctttttgggaacaacattcagatggttatccctttaccattgaatttttaggcgaacgcacagattgctggaatcaggaagctttagttgttgagctgggtaaattagtcgcatccggtcagttatggttgaaagtaaaagagctacaatctcaggcggcaaagaagcaagaacatggtaataatgcacaggatgagtaa

SEQ ID NO: 288430 - DNA, 465 bp, Morganella morganii
atggctatagtttattttgatggtttgagtgataaggaacttactgttattgaaggtaaatatggtcttaagcttcctgtggattatagattgtttttatctaattataatggatgtagagtaacatctcctaattactgtgatttgccttttaaagatgttgatgatgggtttatctcttttgattcactctttagtgtgggttctgaaaatgaaaacttttgcctggaatatataaatgatgagtatttatctgagctggagtccatagaatattcatttttaattggttcagacccaggggataacttctattttttggtgactgaaggtgcaagtagtggtgtgtattattgggatcgtgctgagattcattctgatagtgtagatggaagaattaatgtttataagatatgtgaaaaatttgaagtttttttcgaaatgattttgtcatcatataaataa

SEQ ID NO: 288431 - DNA, 138 bp, Morganella morganii
atgatcagcctgcggaataaagcaggcagagtcttatacgggaaagtgagcaaaacagagcggatgtggcggaacgtgcggaggaatgcggttcagaatacaccggcaggtattaccggtgtggtgtggcgcgggtga

SEQ ID NO: 288432 - DNA, 930 bp, Morganella morganii
atgaaaaacctgcttttacccctcggggctgtattaatctggtctgtgaatgccgtggtgaataaactggccgccggtgccatcgcccccggagcgatttccttttaccgctgggcactggcgctcgccgtgatgacgccgttcctgattatgccaatctggcagcagcgcgcggtgatcaaacaacacgcatggaaactgtttatccttggttttctcggcatgggactgtatcagagcctggcgtactacgcggcgtataccgtcagcgccacctttatggggattatcacctcgctgatcccgctgctgaccgtggtgttaagtattccggtactgcggatcgcgccgaccatcggtattgtgctcggcacaattctctccctgagcggcctgacctggcttatcagcaagggacatccggcagatttactgcatcaggggctgggacaaggtgaaatgctgatgtttatcgccggtctggcttatgctttctacggcgtgctgaccaaacgctgggcgatcccgctgtccagcattcactcgctgtatatgcagattgtgtttggcgtgctgcttctgatcccggttttcctcagcgccggggatgtgacactgaaccgcgataatatcgggctggtattgtatgcagggattgcagcttctattttcgcaccgctgctgtggatcctgggcgtcacccggctgggcgcaaacgccgcttctatctttatgaatctggcgccggtactgactgccattatcgccgcagtcttcctgaaagaggaactgcacagctaccatattatcggcggtggcgtggtactgatcggggtcattatggcgcagcgtctgcgcacaccgctgacacagattgtccgccgtaaaagcaggaagccgcagccacagcggtgtgaaaccggggaatag

SEQ ID NO: 288433 - DNA, 189 bp, Morganella morganii
atgaaagaattaaatcaggaacaattattatctgtttcaggtgccgggattatcgctgccggaacagtttttgccggtgttgcatttgatatcagcgctgcaataatttcaaatatcacccggaacagcgaagaaattgtttttgctgaacataaggatatttcccgtctccgttatgaggttatataa

SEQ ID NO: 288434 - DNA, 1281 bp, Morganella morganii
atgagtgagctgagttatctggaaaagctgttggatggggctgaggttgagtggctgccattaggcgatatcgctaatatttatggcggactaacaggtaagagcaaagctgattttgaagaaggaaacgctaaatacatttcatataaaaatatttttagcaatataaatattgatgagccaccgacagattttgttaatattaatgatggtgagaggcaacacacagttaaatatggtgatgtactttttactggctcatctgaaactgctgaggaagctggtatctcgtccgcaattacatctcaatttgatgagcaagtttatttaaatagtttttctttcggcatacggtttaataaaaaaattaaaattaaacctgagttttcaaaatatcttttcagaaccaatctaatgcgtgaacagatatccaaaaccgcaagcggtgtaacgcgttttaacatttcaaaatctcggttcaaaaaaattttgattcctgttattagtcctgaaaatcaggaaaaatctcttgcgattcaatctaaaatcgtccggatactggataaatttaccgcccttacagctgagcttacagctgagcttactgcacgtaagaaacaataccattactatcgtgaccagctgctgagttttgatgatggtgaggtggaatatcttcctatgggagataaaagagttggtgaatttatacgcggaggaactttccagaaaaaagatttcactgattttggtgttggctgtatacactatggtcaaatttatacctattatggaacctatacaaatacaacaaaaacatttatttctgaaagtctggcgagaaaatgccgtaaagctgagtcaggaaatttaattatagcgaccaccagtgaaaatgatgatgatgtttgtaaggctgtcgcctggttaggatatgatgatattgcagttagtagtgatgcgtgcatttacaaacataaactaaatccgaagtatgtttcttatttctttcagaccgaatgttttcaacatcaaaaaaaacaatatattacgggtgcgaaagtccggcgtgtgaatgcatcaaatttggctcaaattttgatacccgtgccatcaccagaagaacaagctcgtattgttgctattctcgataaattcgatacattgaccagctcaatcactgaaggcttgccccgtgaaatcgagttgcgccaaaagcagtacgaatattaccgtgacttactgttcagctttccggaaccggaatcggtgaacaactga

SEQ ID NO: 288435 - DNA, 987 bp, Morganella morganii
ttgtcgttctttgggggagaagtgaacattgtagatgctcttgttctcaagaagttaatgagcgttggtgatgaaactgttctgtacatcttaaagttttcagcgtatagcggagtggcaacactcgaagaactggcacaccactcctccaatctaaaaatatcaaacggtaaatctcgagcaactctcgaaagcttcttagatactgggaacttccaagctctcaggggcgaagtacaagctgagattgattcgttcaagaataaaggtgttgagattgttctcttcggtacgaaaacctatccaatttcgttatacggtctcccgaaacctccaccctttctctactgcaaaggcaatctgaatctcttagataataggctgtcattagccgttgtaggcacccgtgaaaacacccccaagggggaaaccctaacgattaaaactattcaaaagtttgcgacttatggcttcacgatagtcagtggacttgcactgggtatcgatacaattgctcatcgcgcggcattagacgccaaaacaccaacgatttctgttcttgtcgatgtggagtctatttctcccgcaagtaatcgggaactcgctaaggaaatattggacgagggcggacttctagttgcagagaatgcaccaggaacgaaagcaatacctgcgttctttgctaagcgagacaggatacaagcaggtttatctaccgccgtctttgctattgaaacttcgatagatggtgggacgatgcacgcagtcaaatctgctatctctatgatgcgtcctgtcttcgttcctgacgcacataaagctaagtatccagatcttactatcaaggcaatttcaggaactcaacagctagttaacgaaaggagggcgacaccctacacgagcgaatcttatgaagatattcgtcttcaattagaagatatcgcgagttcatttgggtcgttgaaagcaaaaggtggcctgctgtga

SEQ ID NO: 288436 - DNA, 375 bp, Morganella morganii
atgattttgataaaatcaaaatggatcattctggtattctcattatttatattatcaatgaatataaataaatcattggcaaatgaaagtgataataatggtgtgaaagttgcatctgatttaatcatgaagttaacatttgcagatagcatcgataaaaagaatgaaattttaaatgaaataaaaaaaataaaagaagagaataaaacagatatgaatgtggctaacatttatatcagtgggctggtcggtgaaaaaaaatatgatctcgcattatcagaaataagtgaaattagtaatgatgataaagaaggtcgttttttttttgttaaagtgcatgctaatggacaggctggaaaaaaaagaagtggctga

SEQ ID NO: 288437 - DNA, 546 bp, Morganella morganii
atgaataccaggtgcaagatattaattatcactgtgctttctctgagcacatctgccgcaattgcaggtccggtggaggatgctgtaagtgaaagtaaactctatacagatactcagctgtcaaaaaaattacttgaaaacagaatagaaactgttggtctcctgcagactctcagccagaatacaacggatgacattgcagcagcaaaatcggaagccgaaaaatataccgatcagaaactccgctctgtcagttctgacatcagtaatgcaaaaacagccgcaatacttgaaggtttcagatacaccaatgcaaaagcagaggaaataaacgacacgattgctgatgcaaaaacgaatgcggtcagcgacagtaaagactataccaacactaaaattactgaagtaaatacggcaattaccgatgcgaaaaccgatactgtgaaaaccagtaaagattacacggataccaaagtcagcggcatcaataccaccattgataatgcaaaaaacagaagcggtagccaccagcaatacctatattga

SEQ ID NO: 288438 - DNA, 756 bp, Morganella morganii
atgtacaaagcatacagcttaagagtagacgatgatatttttgacgagtatttatcagtaggtgaaaccataaaaagagcaaataattctgaggctcaaagtggacttgatgcattttttgatagtgatggaagtctggttgcgaccaaaataatggaaaactggtttccaaaaatgcaagcaaatgtctttatttcccactcacataaagatgaggcgcttgcaataaaattagcaggatggcttaagggtaagctaaatatttcctcattcattgactcttgtgtttgggggtattccccaaacctcctgaaaaagctggataaaaaattctgtcttaaagatagtggatactatgactatgacagaagaaatatcacaaatggccatgtgaacatgatgttggctacttcacttacaaagatgattgatcaatgtgagtgcatcatcttcttgaatactcctaactcaatttcatgcaaagggtgtattgagagtgatggaactgaatcaccttggatctatgcggaaatagaagcaaccagattgcttagagaaaatattccaaaaagaagaaatacggtggttacagcttctatggaagggataaatatcgctctggatgaagctatatcagtaaagtatgatttagatttaaaacatcttcttcttctgaataagagccagatttttaagttgcataactgtggcaagacaggaacggatgctttagactttctgtatgacagaatttga

SEQ ID NO: 288439 - DNA, 597 bp, Morganella morganii
atggataaaaatgagccatcaatatgtcctccgcaccaagccttctatatccaatctatgttgttcaatacaacatcggctctacaggccgtggatcgagcatctaaatacatccaagctatcagtaaaaggaagcaaggtccacaagatcggaaagatgatcttctggactgtctacaaaatttcatcaaccatagtgctgcgatagctcggtacttttttccatcaatgattggtggaaaaggtgagaaggttttacataagaatcgtgctgagtttctgaggcaggtttttgatgtgacagaaaacagccctttacatgataagaaacttagaaatgcaatagaacactttgatgaacggttggatatgtatcttgacggtggaattgtaggaaatatcttcccaagtctaatcttgaacaagccggaagaaacagatgtgcctcatcacatcttcagagcctactatctaaatgatggaatttatcaagtattgggggaaagacataatgttcaacctattcttgatgaaatcatgagagttcatcaactgttggagatgtttgatgaaaatggagggatgtttgggaaataa

SEQ ID NO: 288440 - DNA, 873 bp, Morganella morganii
atgtttttatcaagacagctcattcaatttttttctgttgctgaaaattccagcctggcagaagctgcagagaaacttaatctgacgccatcggcgcttagccacggcattcatgatcttgaatgtaaaaccggtattttattaattaaacggtcaggacagaagtcatcattaactattgccggaagagaactctatcagcaactactgccttattacatacggataaaaaatatttcagataatttatccggaaagaaaaaaaataataaatcacttaatattaaaacggactgtctttgttactcgccactgaaagacaaaataatgtcattctgtaaggagaaccctgatcttgccataaccattgaatcacaggaatttattgatattaaacatgaaattacgaataaaaacaccgatattgtcatatcctcagactgtagtgcagataataaagatattaattaccttgatctgccgccggaagaaacaggtattattgctcatgacagcctgttaaaaaaatatgattccatctctgatttaattatgaatgaaaggctcattaagataaaaaccaaaacgcatacatatgcattgcacagatttttatcaatattaaaaacagaattaatcgaccatcactcaattactgtcccggctgattacaatatttctgatttcatttcatccgctgcgggatttagtctgttaccagaaaataagcctatcattgataaccttaaaagtaagggatgcagatttattaaacttcctcacgagtataatatatcaattaaccgccgtgtttatttcatagaaatatacaatcaaacaatctctgatttcatattaaaaatacaaaactga

SEQ ID NO: 288441 - DNA, 165 bp, Morganella morganii
atgcatggtgtaacacaatggtattgtgaagaacagcagaaacctattgagttattatataataaacaattaattttaagttccccggcggcaacgctgtgcgggttctggtcccgctctggtgttatatgcaagttaatttatttatcagtggattatcgttaa

SEQ ID NO: 288442 - DNA, 324 bp, Morganella morganii
atggtggtgacaatgaacaaatatcgtgacaaatcagactttgagattaataaggctgtggctattgcacgtggctataaagttatgtcgtgcgaggaatcagtcatggcatacattgatagcgggtataagccatttgacccctgcaacaacccagcggacgcaatgccgattgttattgagaataaaatcgacctaactcatctcgtcggtgacatggtgtgcgcaaagcacaaagaatattggtgtattcgtaaaaatccataccgcgccggttgcgaggtttatttgctgatgaaggatgcggagaatgaaaaagtatga

SEQ ID NO: 288443 - DNA, 4257 bp, Morganella morganii
atgctgattaccagtaatgtatttaaccggattgactggtcagttaacggtgttgaacactgtacaggctgctatattcaaaatatagatcttggctttattaaaacgaactttatgaatgaaccggatttctctccctgcatacggttcaatcagtatgacaacagtgatgaagggttcggaaccggatggaacctgaatttatcctgtattaaatcaataaataacagaaaactgctgcgcctcggaaatggttctgtctattggattaaagaacagagtcagcctgtcccggcatcagggcgtacgttagaactggaaaacaaatattgcaaaacattttactgtacggaatatccggataaccttatttctgttttttacaaaaatggtatcagagaagatatccgggacggacatttatcctctgttctttatcctaacgggtatcgtttttattttcagtatgatgatggttatcttatctctgtttatgatgggatcagaggcacacttttatctgtcagttatgacagacggaatagcgataatacgattgtctctgttactaactcacggcgaacagattattactatctgaataaaaacaaatcagggttttatgagttaaattctgtgttaacaacatctgaatcaggaagtgaaacattatcgctttatacttttcagtatcaggtttatgaaagtaattatcttttgattacatcgctgacatcacttttggaacataaccgaaaagaaaacattcgttatgaagaattaaaacggccttccggactatcgtcggtaattaaaagtgtatctgaaaacgatatttatagcggaacatcggaagatgagaaacagtatgtaactgtaaaatatgaaacaataaatgatttcaacttccttggtgccggggctggtggtgtaacacaatggcagagtgaaaaagacaacctttttttactgacaggttataaaatatcacgcaaagtaatatcaggaaatcaaacaatcagctatatttataataatgactaccttattaccgaaaaaacgatatcaccttcagggcctaacaagaaaaaaaacaaaatcattacagcgtatagttacctcagagaagatccggctcataagggggaaatatggccttctttttttctcccggtaaatatcagagaatacgctgagaataacaagttaagtggtattccggcagttcaatcctatcgtcatgataaatacggtaatattctggagtatcaggatcgccgggggataagaacgatctttacctactatgacgggaaaaatggacgtcaggatgaatgtccgccggatccattcgggtttgataactatgtcaaagagaaaagcgttattcctgtcggtaatgacataccctataaaaatagtatgatatatcactatagtacattaagaaattgcactcttgtaaaagttaaacataaagaaacagccgttgaatataatgaaagcaaccgcagggtggttaacgaaatcaaggatttttattatttttccggagattctggcgccgtaagtgtactgatgtctggtgtattaaaagaagaaaaaacatcctttgtaaatgatgatgttaagaataaaatagtcatgtctgacatttatcaatattctgtggatgtgaataaaaaaacaattttttactcaaagagtgttgtatctggtgaagtgagttttaatactgttacaggaataaccaccaattatcataccggcgatacagaagaagaaaaaaaggaaagcgggaagagtatccgatatgtatttgacaggtttggaagagaaaaagaaattatcagtttttactcagatataaataataatatcaggtgtgtatacacttatgatgataaaaaaggaacggttaatcgggttagcagtgacaaaagtgatgaggttaactctttaatctataaccgaagagggaaggttgtttctgaaaaaataaaagtgtctaactatgaggttttcttaagaaaatcatatcaatatgatgaacgcaaccgaattacaaaagaaactacatatgattattcttttgatgctaataaaaaacatcccgctctgatttgtaacgaaaataaagtctataaatggaattacaatgatgatgttactatgctgggtggcagtggtttgataaagaataatattgtttatgattacataaaaagagtgagaacagttaaagaaaataaagtaaaaaggatcatagctaaaacaaatgtatcaggtgatatttatgagaaaataacagatgtgaaaaaaaggatggagcgatatacttttaatggatttgggttatgttcagggaaaacaattatagaatatggtagcataaaatctcagacaacatttttatataatgaacaaggtgatttatcagaagaaaaaataacagcggatggtcgtgaccggattcagcagtataattatgacaaacgctttggtaatgataaattatcagcgcactatcttaataaaagacgtattgaatccaatgaatatgatctgttaggtcgggtgatattaaaagagagaaatctggttgttcaacagttaaggtataattccgttggttcttcctctcatcctgaatttataaaagcaggttcgggaaatgaatggagatacacaaggacatcgggtgataaacttaatgaaatcgtgttgtcagcaccatcgcttccgcatagtgactggaaacagagttttacctatgatgataagacgggaaagctcttaaaagaagaggctgtttttgaactgaacaacaccggacgttatacattaagtgaatcatatacggattcaggctataacataaagaaaaaaacaataaattatctgttttataaaaatgaatgcaagcatatcgaatgtgaatataaatatagttctgaaggtaaagttatttcattcgggaatgatgaatgccgtgaaatttataaatataacaaaagtagtggtaagatagagagtgtatggtatgtcattaatgggaaggtaaggtgtttctgtaagcctgagtatgataagaataaccggatgaccaagattactgcatatacttatgtggctgatgacaaacaaagaaatacgctgttatatacaaggttacgttataattattattatagcgccagagggaatatacataaggcggaaatgttatcggataatagtctgattggatcttccggagaaagaaaaagtggtaatctggagcaattaagtacgctgattttaaattatgatgtcaatgatcgtattgaaatgacaaaaattgatttattttcacctccggataaaagtcgtcaccctgagaaaaggagtgagcgtcattataaagaatcatatcattttaatagtctggatgaactgattgattgtaaatacagtggtgatttatcactgactaacaacacaggcaggatactatccggtcagagccataaatataatgaagatggattaatcattctcagtacccggcgtttcagttcgggtgtcagcgatattgtcagctatgattatgacaataaatcagccacactaaatactctgactcattgcccttttaaagccgggtggccggaaacagaaaaatatgcgtggaataaggatggtatgcttatttcccgtacccgttctgatggttataaagaagaatatgaatatggcggagagcaaaatgttgccagaatgacaataacagatccggataacaggaaaaccataaaaacatttctttatgattgccacggacatccggttattcagattattcagtctccgccgctatatgccggcggatcggttgttttccggcaaattcatgatacttataataatgaccatcttatgatccggaaaatttttgatcgggaggttgttgatacttccgttcttcctgaagaaacacattattatcactggtttcagaatcaggttattgcggtatcggtgcaggataacgccggcaatataaaaacgcatttcaattttaaccgcccggatggcacggcaatatgccggtgctcaccaatggcgcagctccggtatgtaaaaccgggtgtctttgattatcgtctgaaaatggcgtggattgcacaggatcagcaggggttattttatcagccggaaatgattgagttacagcaggcatgttttgaaatgaatctgactccgccgaaagcataa

SEQ ID NO: 288444 - DNA, 2832 bp, Morganella morganii
atgactgaaaaatataatcagaccggagttaaaggccataattttatatcagacccttattttgaagaatggggtaacggtgactgggaaaaaggggaaccgaataaatatacaaagaaaaaagacggagacagaacctatctctatatcagcggcaaaggccgtatttcacaatcggttatgttaccgaaaaaaagctccggaaaagcggatgaaccgcctttttactcattgacttttgattactcagttaaaaataaggccaaagtctcattaattctgacatatctgagcgggggaagtgaacgggataaaaaagaaatctcgctggaggatacaaaagcgtggtctcagtatgaattattgctggatgtatccccggaagatactgacatcaggcttgaattttatgccgggaaatcctccggtaataaagggattaacctgaccgccgttgatatgcagttaaatatcggcggattgagtccggaatcgattgtgtttgataatcaaaatatttcagcggataagccattactgaaacttaattacggacgtaaacacgttattaatatcaaaccggctgctgacagtgcatggtgtgaccttgattgtgtgctgaagtggggcagtgatattccggcatctaactacccggtcagtttttcgccggagctgaatacagcacaacctttaaataaagaagggagcatctgggaaatggcctgttccgtccaaaaggtcagtggtattccggagacattcagcgtaatgctggcatcagaatacagctcagcgccttttattttcggcgcggaaatcggcgattacctctataaatttacggaaccgaaaatcagcggaattgcggttattgctcagagtatcccgactgtcctcagtatccgggttgtctgtgattatgatgacgcgtatccggatatgccgggcgtacctgatattgatgtccgctggtcaatagacggtggtgaggttatcactacgaccaaaacagattctgaggggatggtaaccctgacctttttaccggagaaaggcgggaattataaacttgttgcattaataaccgataaaaccgggcgtgaaatccgccatcagtttgacattattgtttatgaccgttcaccgtggctgaatgatacccgggttgctgttaacaataccgatgtcgatctgtcgggagaagccggatatctgatgatcgaagaagtcatgaatcttcacctggcgtgtgataaaaaccgcaatgctttcggcctggtcacgcttgaaaataaaccgggaaatactggtgtcaccatcacaccggcggcaggtcgtgaaattccgccggatggtctgtcatgggatctcaatattgccggcgatgacagcagagaactggcattcttattaaccagtgatcagttcgatatatcacaggaaatccgggttattgtattacagcatgacactgggaaagacattcagtcactgaacgttaacggcaaagcgccggcagatctgatgcaattacgtatcggtccgtcagaaaggatgacactgaattgcaccgtcaataaattactgtcccgcttacaggcggaactgaacagtaaagacagtaaaacactggcagcagaaccggctttcgggcaattacagactctgaaaaataatgcagcgcaatgggaattacatagtatcaattcgcagggcggcttttttgatctcgcactgaatatcccgccaatgacgaatccgctgacgctttccggccgtgtattaccgcaggacatcgcgtcagggattgaaacgatgaccctgaataatgcaccggtaaccgcgcccggggatttcgttcttgcccctgacaaaaactatacgctgacagtaaaaccgcatccgttactgaaggatattccggtttcattagtctctgagacaagtaacggcgttacggtgatcagtaatccgccgtttggcaaagaaatcaatctggcagaaaacggctcttcatggcagatctctgctggccctgcctctgcacgcggaaaattcgcactgcatattcagagtcagtggggcggcgcaccagttcatctgagtggttccgtattgtctgcggatttacaggacgaaggttctgtccgggtgactgatggtgatatgggcagaaaatacgatattgattttaatattggttttgctttcctggcttttgagtcctatacactggatctgaaacttttgccggataatttaatcagcggacaagccgtttcctgggaagtgccggaaggagaccatcaccgggatgctgtttcgtttgatccggaaacaccggtagcattagatttatccggtactgagtgggaattcagttataccgaagaagagactactcaatttgatttagtattaaacagccgggggggattgaattataaaattccgtgccatattttcagcgatgaaaaatatctggaaaaaaatcagtgtgtttttatgctgaataattcagttattgttcccgggataaagtataacgaatttgaatataaaaaagacatatcacttaaactgacattatcacaggaggcatcagcatttctgaatggtatggtattggcattaattgtccataagatggatggtgatagtgatagcctgattataacctcagatgaaaaaatcactgttgataaaaataaaccagtccttgaatggaacgttaaaactaatgtggaggttggacaccgttttacactggaagttgttctggataatttaaaaaatatccggtccgttatgaaatttacctctgtgtaa

SEQ ID NO: 288445 - DNA, 4503 bp, Morganella morganii
atggcacgtaatgtgaaacagattttaaatcatctcgccgagaaaaaacgggatgcatatgttgattacttcactaactatatagtgggtgagaatgaaagtacagcaatgctgggaatgaccgatgcggatgacctgtatgattattttttaacagatataaaaacaagtgctgactttgtgaccagttatgtctcagatgcattagccagtattcagcaatatatcaataacattcttaatcagaaagaacccggctattccggcgaatttagtgaggatgttcagcagtggtggtccggttatctcgggcatatttcactgtggaaagcctatcagaaaatggaggattatccggaagatcataatttacctgattatgcgactgataagacacaattgttcagtgattttgccgctgacctgggcagtaacagcctgaatgatgccggaatacaaacggctttcctcaaatacctgcgcagttatgaagcagaagacggcatacgatatcagcctcggtctcgtgggctcggagatgtgtataagagacaggactattattttattggcaaaaacagttcatcgcctgccgggttttactggcgtgaagccaatataagagcggataaatcctccggttatatttctccgcgggcatggcatgaatggcagccgcttgttatcactgaagatgcaaaagatattttacaaatgcggattgtcaaagtaagcgggtgtctttttattgtctacctgtccggtaaggaagaagctattgcggataaagaaaaacccgcacaaggaaaccggagtgaaaatgaaaagcaatataaggtcacactgaaattaagccgtatgggactggacgggaaatgggatattcctgatcagttatatgaaaaaatctataagagtaagtctgaaggaaaaccggatgcgtttaaattaatatccgttgcgtttactcaggatgaacagcgggatgattatctggttattgcatggctggatgatcagaaaaagactattttttccgatgtattgaatgtgctcaggcaacaatcagcgactgacagctcagatattctcggaaaggactggcagagtaaattagcatcccggttttttgacgataaaaaaaatagctgtcagcaccgtatctttggtgttgaaaaggatataagtaatattagtcatactggtactaatcagaatttatcactggaagcattctattgcctcaaaggtgatcgtcatcagttgcgcgtacgtgggatttgtcatcgcgctgccaaagtacctgatcttatatcgcttaatttgcaggctatcgtcagtgaatggcggaatggtcgtattattgtcagcggtgacaggaataatattacggtcagagcagaggcaactgagggagctgactatttagcattgtccctgcctgatagtaaaaatgcggttatttttaatcagagtgattttactgagcataacggctggctgtcagcagagaaaaaaatatcactttctcaaaatcaatgcgaccagatagctgtaaaaaattacaaagaaatacgcagcggtgctggtttttcctaccagataacgtccgggggatctgtacattcactggcgcacgttaaaaacggcgtcagtacggtgatgcaacccgttacagtctctgcggaactgtctgtttttaatgacagcctttcggatctgaaaaaagaagactggaaaggtgagctggtttatcagaagggcagtcatacaccgtggcgtactttcagctggagcgggaacgccgataaagtccgctttacattcgggttgacagacgaaagtaataaaggtgagtttatagtttcaattaaagcgttatcgaaaaatattcctttcattgaaacgttttcagagcatcagcagtttttggcatttaatcagtcagaggccaaactaaaatatgttcgtcttaattctgttcaggttcgtgatcttatctatcgcgctcagattgcagtcagacatatttttgactgggatgcacaaattatgaaagagccgggacatgatgacaaagaaaaagagacactcgatttatacggggctaacagccgctatttatgggaactgtttttttatttaccgtatctgatagcaagtcgcttttcacaaaatcgtctttatcatcaggctcgtcagtggctgcactatatattctcaccatatgacggacaccgtttatccgtaaaagatggcagcgaattattaccgccgccttactggaattgtcgtgtgttaacacaacaggatctgaaataccaaaataatgataatgcattaccggatccttttgcgatctctgaggatgccccttctcattatcgtaaatcggtctatttaatgtatatcgatacgctgatctccgaagcggatttacattaccgtcagctcagccgtgacagtattacccgtgcatggggactttatcaccaggctcagggaatgctggggtgtataccaaaggactgcagtttaccaaaatggcagccatgtacggtcagtgaattgctggataataaaacagattctgtacaggaaaataggtttcctgaattattttcggcgatatatccggaaaatatgcccaaacagctcagcggctttttctggtacggcagcgtaggcaatacgcgattccgtctgccggtacagagcagcttactggacagacaatccgttctggatcagcgtttatttaatctgcgtcattatctggatattgaaggcaacaggatgcagttgccgttatatgctgctgcgcttgatccgtttgatctgctgcgttcacggctgggcggaacctctgaactgacctatttacagtccgggtcattaagtattccgtcatattgtttccgcgtcatgctggaaaaggcaaaagaacaggcagcggcactgattacgttaggggataaacgtctcagctattacgagcaaaaagaacgctatcacaccgaaggcatgcaattaaaggatgcgacggagcttgcgcaagccagtgccggtattcagtcactgttacgggatcagcaagatgccacactgaacgccctgaaagccgccagaaccatggcggagaaaaaacaaacctattacgaccaattggttaaagatggtacgagtgcaaaagagcgcgatgccagaaatttgttactgacttcctccgtttttcagggggttatttcgggtgctgctgttgccgcaggtattgcagcggcggttccgcgcatatttggtgtggcacaggataccggtgatcatggtgtaagagcattgatcggtgtaggggggactgcggccttcagtgcagatattatgcgcggttccgcggactacattcagctggatgaacaataccggcgtcgtcaggaggaatgggagttttcagcagaacaggcaaaaaatgaagtcgcagtactggatgcacaaataaaagcccaggaagtggcggtcagcgcagccgaaaaaagcgtcaaatatacagaatcgattcagaaccaggcaaaagcactgtatggctatttcagccagacccgtcaggttaatgaaagtctgtatgaaaaaatggccaatattattggcttattgcatgaccagttatgctcactggtcagaacattttgtgcattaacagaagcatcctggcgttatgaaacagatgattataaacggcagacgtttattcctgctgacctgtggagtggtgataatttaggtgttctggtcggtgttaaattacagaaagcactgctggaaatggaaatgacgtatacacagcaaaatacacgccgcctgaatatcacaaaaatgatttcactgaaatcgctggtcagtaacaatctggttaaaactgatgaagcatcgctgacaacatgggacgaggttaaagcggcgttaaaaggcgggaaaaagctgtcgtttgatttcacccatccgttttttgatacggattttccggggcattatgcacgaaaaattcactctctgtccgtaacgtttccgacattattaccgccatatcagaatatgcgggtactgctggaacaaacatcgaataccttattggtttcaccggatattgatgcggtgaaatcactctatacgccaaccgaacaaataaacagtgaatccattatccgtaatctgcggataaaccagaaaattatactgtcccgcggcagcgatgactgcggcgagtttccggatgatggctttaccggcgggcaatatcacagcttcgaacataccggtgcggtttcacactggcggttatccgttccgcggccgcaaaactgcccggaactccttgataaccttaatgacgttattattaagcttaactatacggccaaaagcggtgatgaaacgtttgaaatcgctgtaaataaattactggaaaataatcaatcagtaaaaaaaggatacaacgaaaatgactga

SEQ ID NO: 288446 - DNA, 4209 bp, Morganella morganii
atgctggtatattaccctgaaaactatgtcgatccggttatccgtaccggaaaaacggtaatgatggataagttacagcaacggataagtcaggagggtattaaaaaagaggcgatcgatgatgccttccggacctacctgacggagtttgaccaggttgctgatctgaatgttattagtgcttatcatgatgaaattgacataaataaaggaaaaacttatcttatcggacactcagagttatcagcaggaagctattatattcgcagaataaaccatgaaaagataaatataaaggaaaaaatagaagttccatcttttgcctggtctgattggtgtaaaattgaatgcggtattaatccatataataatataataaggccggttatatttaatagtaggttgtatattttttggttggaatactcacgggttgaaattaaagacgagcctgttcatgataaaataagtctgatgttttcttatcttcgttatgataatacgtggtcggaagttgattttattgatttatctgtaagaagaaaggaattaattgctcttggtctgcatgatgataaaaataaaaaaataggtctttattgttccgagaatatttctggtaatggcttgttatttgccttctatgatattaaatcattctctcagattactgatacagttatgttttattttaaaaataaaaattcagtaaatgatgtctctgcggaaaaaaaggacaaaatattagatgctatcaagggttattttgatagtaatgatgttaaaaaagtaataaatattcattcagcggataatgttagtgttgtgaggaaatcatccgatgatgttattaataatataaagggcggttctgacattgtatctgtttcaatgacaacgacagggttgagtttatcttctgatggtgaaaaatacacaggcgaatttaaactgaaatttttaatgaaaaaaccaccattgtcgtttggtgatgatcgtgattcagaatatgctgcttatcttgatgtctgcaatactgcgcaatggtatgaccacaatattgagcattcaatagcatatcttaacactaaaataaaagttgataatgaacatataattgactctgttgtttttatttttgacagaacaacaaatagttatatttcatttctttatgattcatcgcgcagagaaagaattattactgatggttattttttctccgaaattaaaataatattttattcccggggtaatgtaactgaagggccaaacatacaagagattcaatctggtgtggttataaagcctgatgctgagcgtatacttagttttatgtctttatcgggccattatatttatcttaaattaaaatttcaacgctatgaatacaaaactaaagatgctgttatggttaagcatctcttcaataatgagccggcattaatttatctcacagctcagttatcagtaggtgatgataaaaaaaccacacttaggttggaggagtggtgtaaagaaaaaaaatccattgataatgatggtatacaatactcttcaagagatggtgtattttcatttgacataaagaagagtgagttaactaattataaaaataatgatatctgtatttatttggttgcgtcagattactatggcgcaatgattacgtataaaataatgaataagatttttgtttttgatggtaataaaaatgtgattaatattaagggtaataagaggggggctcagtatctggagttttgtaaagataatgattcaggatgtaaaaaaacacgtatcagattgaatacattatttgtcagggatcttgtttcactggcaaataaaggtattgattatgtactctcatggcgggggcagaatctgacggaaccggatattgatgatgatgatgagtttaaatcggtcctgatagactttaacggtgccaatgcactctatttttgggagctgttctattatgcaccaatgatgattgcggatattttacttcagcatcaaagttataatgaagctgaacgctggttacagtatatctttaatcccgccggctatattgagaatgatatatatacagatcggtactggaatgtcagaccgctgagggaggataagcgatggaatgagttactgccggatgacactgatcctgatgcaatagcactggcagacccgatgcattataaaatggccacatttatgaagacgctggagctgcttattgccagaggggatgcggcctatcgtgaactggaacgggattctctgaatgaagcgaaatcctggtatatacaggcactatcattgctcggaaaagaaccggttacattactgaataaaggctggtcttcacctgatctggctgctgcggcaaaggcaacgatgcaacgtttattaatgcaggtaaataatcctgaccacccatcagctatttctgtagatagtgcaaatacgctgactaacgagtttaaaccacaattaaatgaaaaactcatcgtctgcagagagacgataaatcagcgactttttaacttacgcaacggactgtctattaatggtcagcgcctttatttaccgatattttctgcaccgacagatccgaggaatatgctggaatcacaggtcaataatataagtagtgagaaaacacttataaataaaaaaacgttgatgtatcgttttccggtagttatcgaaaatgcaaaaagcctggtgtctcagttgattgagtttggtgataagctactgagttttaatgaaagcagggataatgaacagttttctgaattacttattcatcagggggataacttattttcacaaagcatcagaatccaggatatggaaattaaaagtttgctggcagaacagaaatcgttattagcccggcagcgtgaaattattaaccggcatactcattatagtcagttatattctgatggtgtatcaggtgctgaaaaagcagcaatggctctggatgggtattcagcgacaatgctgacgtctgccgcaatgattgaaggggttggtaagtatttggatctcccgccaaatatattcggtgtagcgaccggtggtatgcaatggagtgcacctgctgaggctacagccaaacttatggagggggccggatcatatgtacagatatttgcagatattattgaaaaaagtgaggcatatcgcaggcgttcacaggagtggcaactggaagcagaatcagccggagaagaagaaaaacaaattgccgctgaactggaagcaatggatatccagataaccgcagcgaagatgcagagacactatattgtgacagagcagcagcaaaaccagcagcaattacagtttttgcagagcaaatttacccgtgcggaattgtatggctggttacgcgggcggctgatggctatttattctcctttttacgatttggtggtttcccgttgctttatggcagaggatgcctatcgctatgagatgaatgtcaatgccgcagaccgttcatttatcaacacctcggcatggaagggggcatattccggcctgatggccggtgaaagcctgatgctgaatctggcacagctcgaagaagcctatctggaaaaagataaacgggttctggaagtcacccgtaccgtttcattagctaaattatacagttcaatgacggataaccccttcggttttgacaaagtcgcggagcttgtcagtaatggagaagcaaatgaccaatacggtaacgcagataactatgtcgtgctgatcagtacctcagaacagagcaacagtatggagctggatgcggtgattaaactggatgaactgggtatttatacggattaccctgagaatttaggtaagcaccggctgattatgcaaatcagcgtgacattacctgcgcttattgagccctatcagaatgtccgtgcgctgcttgaatatgaaggtgaaggtgataaccagttgccggtggggtgtaaatcaattgccgtttcccatggtatgaatgacagcggtctttttcacctgcaattcggggacagtacttatctgccgtttgagggattatcagtaaacagtaacggtaaatttaaactgcggttttttgatgtcagcggcggagaccagaaacggttattacagaccctgacggatatcgtgcttcatattcgttacaccatttactga

SEQ ID NO: 288447 - DNA, 171 bp, Morganella morganii
gtgtccgccggtaacgccgaagcctacatgcccagtggtaacccagacatgtacaccgccggatacatcgtggacaacaacaacaccgtcaccggaaacaccgccgaaaccaacaacaccatggatatcaactccgggaacgacaccaccggtaacaccaatatttactag

SEQ ID NO: 288448 - DNA, 411 bp, Morganella morganii
atgaatgataatcttcctgaggcaccacagggcgaatttattctgttccgaagtgaagatggtcagactcatgtcgaatgccgctttgaatccgatacgctgcagttatctcaggctgagattgcaaacctctatcagataacacctcaggcaataacccggcatattaaagccatctacggagaaggtgagcttgtacaaaattcaacttgtaagtctttcttacaagttcgccagtgggcaacgcaaacgccggaacagtatctgctcaaagagtttgtgatggataacgggcggcgggtgtatttacgggtaaaagagatcttcacactggcggcagactacaaatcttcaaataaagaaaccacgcgtttctttcagaccattcaaaacaaactgcattttgcctga

SEQ ID NO: 288449 - DNA, 147 bp, Morganella morganii
atgggaatttttattctggttgttttggccctgatctcattagtggtaatggaacgcaaggggatgatagatgacggtgagttcgctgtggcaatcgttcttatattatcggcagtagcgggttatcttggtgtttctcaatattga

SEQ ID NO: 288450 - DNA, 567 bp, Morganella morganii
atgacgttagttgagaaattttctattattgggagtatatcttcatctgttgcaattgttgttagtcttttggtgttttggcggcagagatatattgagattaagcgtatagaaggagaccgagctaaggaattttctgcgctaaaaaaagtaataacctcaaaagttatttatttagaataccaaatcgattggactgaatcggcatttcagttaataaaagataacccgagtcgtcaattcatattaaataaatttgatgattctttttatataaatatgctaccggaaaatgctaacggcaacacgatggcaaaaatctataaattagccaatgaattagatggctatttctttagcatagcaaggcatagtgatgatttaattggcggtttaattgttttatcagaagtgataagactggcaaatgaccttatttttgcagttattgaacatattgacaaatctgatagagataaagttttaactcaaattgagtatgccataaagggattcgatgacatacgcaatgaaattaaagatattaatgatatcataaacaaatag

SEQ ID NO: 288451 - DNA, 360 bp, Morganella morganii
atgactaaattaagcgaacatttcaatagtgctgagtttgcctgcaaagacggatgcggaaccaacgaggtaaagccggagcttatcgccattcttgaggatgtgcgagctcatttcggtaagcctgtcgtcatcttcagtgggcgccgttgtgaaaatcataaccggaaagttggtggtgcgcctaaatcgcagcatcttctcggtactgctgctgatatcagtgtgaaagatacccatccgaaagtggttgccgattatctggaagggaaacacccagggtcatacggcatcgggcgttacaaaacattcactcatatcgatgttcgtaattataaagcccggtggggtagcaactaa

SEQ ID NO: 288452 - DNA, 345 bp, Morganella morganii
atgagcatggataggctgaaggaagctaatgacgcttacaatgaaaagaagcgtattggtgaggtcgttgcaagagccaataaaagagcccggtcttttgctgcggcgaaagaattatttctgatggctttcagtgatgactgtgtccgccgcaatgatagtcatatagatgtaattctccatgacaccaacatcaatatattccttgatcttctccgtgtgccaggacttttcattaaatgcagcgaaagcatctacagacacagaacatgcaaaaagctatttctacacaatgagcttaatttttttggcggagtcaatttcgccagaataatcctcaattaa

SEQ ID NO: 288453 - DNA, 195 bp, Morganella morganii
atggaaccaacggattttgaaaagtggtgtgctggcgacattggtagtgaacccgagcacttagtaatgatgcgcaaatcattacagaatgtagacgatgggtacaccgtcagctgggtcgagtaccgttaccgcgcctacatggccggagtacgcagcagactgccgtaccagacacaaccaccggaggagtga

SEQ ID NO: 288454 - DNA, 216 bp, Morganella morganii
atgaatattacatttgagtgcgctggattttcaggggctggtaagcgtagtaccggcagagttgagattgatgtcgatggtgcggttctctgcgggttcgttgacgcatcggaaattatcgaagaatactccacggaggtgcttctcgatgtgatggacgatgccgatattatcaaatatctcaccgggcagggctacacagtaaccgatgaataa

SEQ ID NO: 288455 - DNA, 159 bp, Morganella morganii
atgaatgcatacgacgagaaaaacctgccgcataacaaaatggcagagcagcgcaggaagcgcgaacaggaagaaagggaagactactggtttcgtgaaagtgtcggattgccaacaggatgggtgccggcagaatttctgaacggagaattcacatga

SEQ ID NO: 288456 - DNA, 318 bp, Morganella morganii
atgaacaaatatcacgacaaatcagactttgagattaataaggctgtggctgaatgtaaatatggcattggctgtacagggaaaactcaagggggcgatgtcatagtattcactgacagttttactgctgtttttgacccatgcaacaaccctgctgacgcaatgccgattattaacgagtatggtattagtcttatgtaccaagagagggaattccaggttgcaactaatgatggaaattattactgctgcatgagtaatccattgaaagccgcaatggttattttcctgatgatgaaggatgcggagaatgaataa

SEQ ID NO: 288457 - DNA, 255 bp, Morganella morganii
atgggattaaaggtatatgtaaagtggtttgataaaagaacagaagattttattaatgatgaatattcgaaagatcttggtgatgacgataccatcattcatcaaacggttaatccaaatgaaaatattatcaatgcaggtagttttgatgttatttctgcgtgggttccctaccttcagaagcatctgactaataaaattgacctaaatgaatacgattatcaggtgtcattcgattatcgcgacaagtggtaa

SEQ ID NO: 288458 - DNA, 1905 bp, Morganella morganii
atgggtaaaaatagcagcggtggttatgacggcagtaacctgggtgggcataccaccgaccatggtaacggctggtcaaccacctcggataaccggggtgacattggtcaccatacagatagcggcggcagtaaaggggatcacggctggagccgtggtgacgggggaagcagcagtggttcttcctcctcccgtaataacgatcagaaaacactgaactacactgataccccgggaacaccggtaacggtgtatgccggcggggatacgctgagtctggggctgggagcaacgctgtttgctctcagtcagttacaaaaagaagcgctgatggcacttctcaccaatgtaacggttatcagcggacgtgtattcggtcttttgggtctgttttatcccagccagatagcgcctgaccctaaggttcacattcacgttaaagattttgatattgataatccgcacgtcttagccacgttaccggcggagcagatgactcgtgttccggttgaggatattcctgatcatacgagcattccggccagcataatagcgcaggcagtgattgatgatctgacgaaaacccggccggtggtctttaccccggtaaaatccacaccggttccggtcgtcagagcacagaaaaccgacaaaccgaatgtgtataccgctcaggtgattccgggtatgaagccgttgcgtatcactgttgataattccaaacaggtaaaacccgccccggataaaccggtttcactgtcggcatcgcaacagtatctgcctgctccggaagaaaaagacaatatctctcaccatgcggtgattgatttcggcggtgatcatgctccgctttatgtttcgatcacgaagcaggtgaaaccggaggaagaaaagaaacaggcggaagatgcacgaaaagagtgggtggcggataatccggccggtgtaagtaagatgctgacagatcttaatacgctgattgatgcaaaaaataagcagttggcggaaaagcagcagacgctgaagaacaagcaggcggagtttcagccgttcctggataaataccagcacaaagggcgttttattaaaaacgcggttaagtttgatgaaaaagtccgtgagtttaaagctgtgaccggtcagcttactgccgatatcagcagtattcagaaagaactggcggacgctgccggaaataaagagctcaatgaaaaaacgctggctgagctgaaagagcaggagcggaatcaggttaaaacaccggaagatgcagagagggaactgtctgcggcggatacgatgctgaccaatgcctgctcactggtgacggaaaaggaaaaacagttagctgataaacgtcaggttctgcaaaataaacgggccgggtttcagccgttcctggataaataccagcataaaggacgttttattaaaagggcggttaagtttgatgaaacggtcagggagtttacaaccgtcgccaatcagctttccaccgaaataggtcagttggaaaaagccttgtgggatgcgatggaaagtcgtaaaaaggcggaaggcaagaaaaaagccgctgaggataaggttaaggctgagcaggataaaaaacgacagggcgttaaggataaaggccatagttaccatcccgcacccaaaactgaagaaattaaagggttgggagaattgaagccaggtaaagataaaacgccaaaacaaggtggtgcgggtacacgtaaacgatggttaggagataaaggccgtaaaatttatgagtgggactatcagcatggcgaaatcgagggttaccgggccagtgatgggcagcatcttggtgtatttgatccgaaaaccggtaatcaactgaaaccggcagatccgaaacgtaatatcaaaaaatatttataa

SEQ ID NO: 288459 - DNA, 255 bp, Morganella morganii
atgcagtgtccgtccggtttgatgactgacattatctttcagggaaatgcggtctgtttcagtaaaaacaggttaccggcctgtcccgcgctgtgccacgcgacagaggtaacgacgaagcatcagacttttcgctgttatcgcgacggggatcagtcagttgaggacggaaccgaaatggtttcggaggttactgttccggtgcgttgtgaaataaccgtttctgaagagacgatgccggacaccacaccataa

SEQ ID NO: 288460 - DNA, 873 bp, Morganella morganii
atgcgcaaaggtatcattttggctggtggctcaggtaccagattgtatccggtaacaatggctgtaagtaaacaattattacctatttatgataagccaatgatttattaccctttatctaccctaatgcttgcagggatacgagatatactcattataagtacaccacaagatacgcctcgttttgagcagcttcttggtgatggaagtcaatggggaataaatttaagctacaaaatacaaccttcacctgatggtctggctcaagcctttatactaggtgaggaatttattggtacagattcgtgcacgcttgttttaggtgataacatattctatggccatgatttacctaagcaattagaacaagcagcaaaacataatagtggcgctactgtttttgcttatcatgtacaagatccagaaagatatggtgtcattgaatttgacaaaaactataatgtgatttctttagaagaaaaacccgtattaccaaaaagtaattttgcagttaccggattgtacttctacgataataatgtcgtagagattgctaaaagtttaaaaccatcttctcgtggtgaattagagataacagatatcaataaaatttacctggagaaaaaaagtttatttgtctcaatcatgagccgaggttatgcttggttagatacagggacacatcaaagtctgattgacgcaggaaattttatacaaacattagaagagcgccaaggccttaaagtatcttgcccggaagaaatagcattcagaaagggtttcattgacaaaaataaattaatcgagttggcgcaaccattatttaagaatgaatatggtaaatatttaataaatttagctgagaaagactga

SEQ ID NO: 288461 - DNA, 378 bp, Morganella morganii
atgatggctaacattcaattcatcacagacagcagaggtcagcgaatttctgcaattgtgccgattgaactgttcgaaaaactggcccgtgatagtgatatcgctgagttatacgagcctgttcaaaatgaaaccggcacatctgataatgttcggtatccaaacgacgttatcaatattctttcagaaaaaggttgcaccatgcaggctgcatggcgtatttacagaggattaacacaaaaacaagtcgccgatgcattaggaattaaacaatccacagtatcggagtttgaaaggtcagaacgtccccgcaaagataatcttgaacgcctggccacactgtacaattgcagccctgagcaactaacacttgaatag

SEQ ID NO: 288462 - DNA, 267 bp, Morganella morganii
atgatgacagacattcattggactggtaaggccaccaaggacttactctcgcttccttcaaaagatcaaaaagctgttcgcgagaaagtcaacgcgatgcagttatatccaaaccttaaagggcttgatatcaaaaagctcactgatagtaacggccagtatcgactgagggtgaaaagttaccgggtgttgtttacctttaatgacaacatgcctgtagtgattgagattcagcgcatcatgcgcagaacgtccacaacgtattga

SEQ ID NO: 288463 - DNA, 315 bp, Morganella morganii
atgaatgatattaatgaattattttcttttggctggatggaattgatgtttttttacctgacatctttctgtttaatcttcttcgtttaccaactaaataaattaatttcaaagaaaaataaatacttactaaatttaactggagcctatttatcaattggattaggtataatattttttttgattttcggcataggtaaagactttatagcaggtggattatttattcgatatgggaatgaaatgacaataagaatcagtagttttccgttggcattcttatgccttttcacttacccaaaagcaaaaaaataa

SEQ ID NO: 288464 - DNA, 135 bp, Morganella morganii
atgataaatgaaggtaaccttcacttacaaaagaaacaaaaatgtaatgatgattttatttacttatttatcaataaattacaaaataaccgaaaaataaaaacatctttttttgatcacagtaaaaattgttaa

SEQ ID NO: 288465 - DNA, 906 bp, Morganella morganii
atgaataaagtcatatctgtatgcccgtattgtggtgccggttgtaaactgaatctttgtgttgaaaacggaaaaataatcaaagcagaaggtgctgatggtgttaccaaccaggggcagctgtgtctgaaagggttatatggctgggattttcttaatgataataagttactgacagccagaataaatcagccgatgatccgcagagaaaaaggtgcgccgtttgaagttgtcagctggcgggaggcgatcaattataccgcccaccggctgaaacagatcaaagaaaagtacggtgcaaaatccattatgtgtacaggctcctcacgcggaaccggcaatgaaaccaactttgtaatgcagaaatttgcccgggcagtattgggtaacaacaatgtggattgctgtgcccgggtgtgtcatggtccgtcagtggccggattgcaggtgacattgggtaacggagcaatgagcaattccatcgcggatattgaacactccggttgtctgctggtattcgggtataactgtgcggattctcatcctattgtcgcccgccgggtgataaaagcaaaagagaacggcgcggaaattattgtctgcgacccgagaaaaatagaaacagctaaaattgccacacaattccttcctctgcggaacggtactaatatggcgctggttaatgcgttcgcctataccttaatcgatgaaaatctgtatgacaaaaattatgtcagcaggtttacagaggggtttgaagagtacaaaaaagccgttcaggattacagccttgaagtggttcaggatattaccggcattccggcctcacaaatccgtcaggcgatgagaacctacgcgcgtgcaaaaaccgcaaccattatgtgggggatgggggatcccgtatga

SEQ ID NO: 288466 - DNA, 138 bp, Morganella morganii
atgtgtcagacaacaataatcgacatttttgacgaaacgggggggggagatatcgccggaaaagatattgtgctaatcaacagcatgacgctgaatatgacgacctcagcttccggccggaatggtcagtccgcctga

SEQ ID NO: 288467 - DNA, 546 bp, Morganella morganii
atgaaattgagaatagaacgcgagacgctgctttcggttttgattggtgcggcaaccaaggaccctcgctattacttgaaaggcgtttgctttttgcctgatggcaaggtggcagcaacaaatggtcacatgcttgtgtggggtgagcacgaaaataaactgaaaaccaatgttattatttctgtcggtaaacttcctaccaaatcatttagttatgctgtatttgacacgaaagacggaattgtgcgtttattttctgccagtgactctatcgctggcgttgccctatgtagtgtgattgatgccaaataccctgacatcaatagagtgataaacaatgtaaccaatgccgatgaaaaattacctcctgttattggcataaatgctggttacttggccaagctggaaaaaatagcaaatatagtaaacccacggtggccagcatatgaaatcagagtaaaaagagctgatgaggctgttttatttaatgtcattggctcaaatgaaaaacctgtttctgctttaattatgcctatgaggctttaa

SEQ ID NO: 288468 - DNA, 405 bp, Morganella morganii
  misc_feature (380)..(389): n is a, c, g, or t
atgacaaaacagtcagttaccagactgaagccaggtaaaatactcgacacactgggggcaatgaaaaatagcctgacgcgggtatcacagcgtattgctgaatatatcctgtttcatcctgttgaagtcactcagctttccatcgcacaactttcccgggcgactaaagctggcgaagcaactgtagtacgtttttgccgcactctgggctataagggctttcaggactttaaaatggatttagccattgaaatggcgacatcggatagtgaagaatcaccaatccttgatgctgaagttaaccatcaggatgatatccatactataggtttaaaattacaagcaaccatcaataatgtgttatcagaaacattaaattnnnnnnnnnncattaaatttacttga

SEQ ID NO: 288469 - DNA, 489 bp, Morganella morganii
gtgaatgacatacagaaactacaccgggtaatcgattcactcgaagagcaatcgacgcaagtggcacagtttaatggcctgttgagcgccgtcagcgatgcaagaactgagatagaggctgcgaaatcaacgctcgtaaatctagcttatgaacacgctgaattgtttacgaagaactcgaataaatttgaagattttgacggccgccttatgtcactaaatgatcttctaggccagatcaaagatgaacagttgaaactaaggcgtgaggttgcagccttgaagtttgtaacacctgagcagtttgaacaaggctgcacagcaattgatagccgcattgctaaacaattagcggaattgaaaagcaagttagaggcggcggcggagtctcagcaaagatcgataagcgggctacgaaccatagttgttttaggtatcttggtgttggctggaggtgtcggattcttggctatgaatatttttctttaa

SEQ ID NO: 288470 - DNA, 267 bp, Morganella morganii
atgacatcgtcatttgatcggttgatcagtgataatagggatgaagcactagagctggtccgaaaaactatgcagttaaaaccaatattttctgaaaatgcgcgaagtcgctttgctcgtttggtccatgagaaatttgaagattgggattttcttggggaagtaaatgaagagctaggagatccgttctcctatcacactttgttagctccactggcaattagacttgaaaaacttaccagcctatacaaggggattaattggtga

SEQ ID NO: 288471 - DNA, 1059 bp, Morganella morganii
  misc_feature (1033)..(1042): n is a, c, g, or t
atggacttcactcgcgaggaactatcattccacgtcattgacgataaaggccgtaaaggtgatgcagtcgtcgagcttgtttctgaaatggagggtaaatggaattcagatggggaagacggcaataaggcggggatcatattcacttctaccgtcaacggagctaaggggtgttatagcttagcgggccgaatatcaacactcttgaagatggatgttagatatttttcggggtcggttccgaaaatgggtggattgcagggagaggctttcgatagatataagcgccaagttcaagacgattttaaagaaaataaataccgcctacttactgccactaaggcattcggaatgggcgtgaataagggaaatattgcctatacggttcacttcggaatacctgggtcgatggaggccttgtatcaggaagctggcagggcagggcgagataaaaaactattcaaggaagtacccgcagattgctatgtgcttctcacaaaagagcccaattcagctattctcgacaagatttgggacgctagcacgaacgtcaaagatttgaaggagtacgtgaagtcattgagtcgcgatagcgacctgaacacaaatctattcctgatgacaaacggcttggacacaatcaatgatgagttcaagttaatggcaaatgtatacgaattttttaagtacaatcaggaacacaacacggtgaccattactgccaggcagtttggtacggaaaagtttaaattggaaaaggctatctaccgcctttctcaattaggtattgtctctgactgggtaatcgaagacttttttaatggaacgctctatgtcgagttccagtgcctatcggaagaaggcctggaaaagaaaattgagcataccgtcagaaagtatgatcctgagtttaagctcgctgatgtgttcagtagtgataaccagtactacaaaattctctgcgacaagctgagaaaagggtctatcgataaatcgcaatttatctttcttgttcttttactttggtcctatnnnnnnnnnncagaagaacgtttatga

SEQ ID NO: 288472 - DNA, 237 bp, Morganella morganii
atgtcacctgttgaaattagaaataaatttaaagaggaaattagtggtttttttgaaaagcaagagcatgtttgttggagtgatcttgtaaaacaggataagaatattcagtatatacctaggaaattattagacttaattttaacagagttggaagaagagttatgttttaaacgctttgaccaacaaaaggacgatgagctatttattttattaaagggggcgtgtaatgcgtaa

SEQ ID NO: 288473 - DNA, 669 bp, Morganella morganii
atgtccggacatccggcaatcagaatgcccgtcatgatgctgggggtggacagcggtggtgaaagcggtgtcactgataacgcttatgctttctggcggcagtgccgccgtgacggcatcagccgcaaagtatttctgttcaagggtggcagccgtaccggcgcaaaactgatcaccaaatcctatccggataacaccggacgctctgaccggcaggcgaaagccgccggggatgtgccgttatatctgctgcagactgacaacctgaaagaccgggtggctgctgcactgagccgtgatatgccgggcccgaactatgtgcattttccggactggctggatgactctttctatgacgaactgacctatgaggagcggctgaccagcggtaaatgggaaaagcccgggcggggcgcaaacgaagcctttgacctgatggtgtatgctcatgcactggtgatcataaaggggtacgagaaaatcaaatgggataaaccgccgccctgggcacggttaccagatattcctgttactccgcctgaaaaaactgactcttccgacaatatcacccttatttcaacaaccgaacccgcgaaaccgaagaaaccgaaaaaacggaaatcatcggcgtgggcccgtgtttcatcatccggaggtggctgggtatga

SEQ ID NO: 288474 - DNA, 276 bp, Morganella morganii
atggatatatcacgacagcagtttgaggagtgcattaaattgcataccgccccagaagaactggagagaaaattaaaaaaggcgaataacggattaaattacgctgaccgggatgtcgatttaatgtggattgtatggcaggcatcgcgtgatgcaatggaacttgttgggtacacctcactccgtgagttgcaagaaatgaatttcggcatggttggaatagttcatcgaaataaaaatatactgagctctatacccgtttatattaaagaataa

SEQ ID NO: 288475 - DNA, 765 bp, Morganella morganii
atgaaaataaacagcaggaaactggcactggtttcactgatcctgtcatattcacaattctccgccggggcggaaaataccgcaaaacaggatccggacagtgacacactaatcgtcaccgcttcagggcgtgaagaacagcagcgaaaatccaccgttaccacccaggttatcgacagcgaccagattgaacgctcacgggcggaaagcctgaccgaattactggcacagaacagcgtcggctttttcagtgaatggagtcccgggcagacatccattaatatccgcggtgctgcaacggatggtcagggaaaagattttgccggacaggtgctggtattagttaacggccgccgggcaggaaccgcgaacttatccaaattatcaccgaaagatgtcagccggattgaagttatccggggcccttcttcggttatttacggctcccaggcgatgggcggcgtgattaatattttcctgaaaaacggattaaccgacgaaggcgggaaaatctcagcagaaaccggatcctggggactggcacagacttacggcggctatggttttcagaatgatgacggcgatatttacggctatatcgggtttgaagccggacgccgcgatgattaccattcagggaaaggcggccacaaacaggaaaataccaactgggaacgctttggtttaagcggtaagggcgctggatattgcacactggctgaaagcccgcccggaagtaatccgcgtactgcatccggcctttga

SEQ ID NO: 288476 - DNA, 927 bp, Morganella morganii
atgagtttactaatttttatcattatttctttatgtattggttgttgggtatggaaacaacgaaatcgttttatattaaattcagatagtttacataaacagtggctatttagattagccattgccttccctttagtttccagtttgtactttatagtatgcctaggttatccatacccatggaggtttgatgcttatggatacagtacatttctggagataaataaattctcattgggaatattagctttatctccaatcctgggtgcttttgttgtatatgcacatagatcaattcaaactactaagcaaattgaagtaactgagaaaaaaaacaaagttgatatatatttcagcactagaaaatatatcaatgaacaattaaatttatttaaaactattgacaatgaagaaattcgccaacctaacgctctatataacaaagcatttaacctaacaaacaatcatgaagatacacctaacaaagaattctttgattatattgataatagcataaagactttagctaatttattcttatccgtaagagataacataattgatgtccgtttatatatagaagaggatgaattcagagttgacatttctacaagcaggatgtcatatcaaatgagtagcttaaaaaaatatctagatataggaagtaattctgaatttgatttaatatcaaagtgtactcattatcttgaaaaaaatgaaattgaaataaaaaatgacaaaagtaatttttatgaattcaactattcattgcttatagcaggtgaaatttattctcttttaagttcaataaaggaaataattttaatattgtcttcagaaaaagatattgatacggtactacctagctttagctacgctttagattcttgtactctaaaaagcatgacggtatcacttgctgaataa

SEQ ID NO: 288477 - DNA, 837 bp, Morganella morganii
  misc_feature (4)..(13): n is a, c, g, or t
  misc_feature (820)..(829): n is a, c, g, or t
atgnnnnnnnnnntatgtatgtttttgaaaaagctggcaattcgtaatttcagaaggctacacgatgttgtaatcgatcttgcttcagacatttcaatttttgtaggggcgaataacagtggtaagacttctgtcggtcatgcacttcaactattcaccggtaaaagccgattcaatattcatgacttcaatgctgaatgttggactgacattgtcacatttggagaaggggcggatgctgcgtcgctaccttcactggaacttgatatttggtttgaagtaacaccgaatgatgttcatcgtgtagtcgatcttctccccagcctatcgtggtcaggttctctggttggaatgcgcgttgctttttcccccatcaatcctgaagaaatccgttcacgcttcctcgcagtacgtcagcttgctatcgatgccacacctaaagatgaaaatggaactcccaaatacgatccttcacctcgtaatctttgggaatatcttcgcgatagactcaatgacgaatatgaactccgctattttgttcttgatcccgcacgtttcaatgcggaaatgatatccgaggaaggctatgagcctactccgctcacagggcgtgatcgaagtggtcgcgaaatactgaacagccttatccaaatcaactttttgaatgctcagcgtcatctttcagatggttccggaggttcccgttcggaggatctttctcgtgttctcagccgtttttacggacgaaatcttgaacaaaaaggtgaagattatgaagcattaattgctttagctgcgtctgaatcagctttcaatcagnnnnnnnnnncatcttga

SEQ ID NO: 288478 - DNA, 1056 bp, Morganella morganii
atgacaagtaactctgatttttttgatgcttctgatctgtttaatatatctgaacaatttgatatccctgatattttttgtcgtgctggcgagttctcgaaaaaatttaatgtgagcctggaagatattatatctatatggctggatgataaaataagtctttatgttaatcttcgttcagaatactgccgaataattcgttatgcgaataaaaaagaacatcgttatgatacatttgatatcagagcaggaggagacttttatcaacatgagaacagccctcagtttgcagtaagaacatttataccttgcgaccagtctgaaataaatgagtatccagtttttagcggtagttcattttttaaatacgcctatgatgggtatgccagtggcttttggaaaatcaaacctaccaaaatgacccacttggtaagagataattataaccttaggaatgcaaatgatgtttgggggagtattcctggtgaggttatagtgtatggacgtgatgacaatgatcatctaatttttaataaggatgatttaatttctcactctgacttacagattgatagcgccagctataaaaaacttcttaaattaactgcacctcaaagcaatgagtttgttgcaatggagaaaagttacattcaaaatgttattgtcattcttctaattaataaatattgtaaatccaataatgacaagcttttgtttttaactgcatcggatatattgaacttttacagggaaaagcattgcaaagaaattaaaaaaataagccgctcaagcatttctcgatggtttaatgagtttacaaatgatgatggtactttatctgttcaaatgaaaaatggacggtggtcttctgaaaaagacgaaattatatatctgattgctaaggaacactgttgggatgaaaatcctgatatgattctggaattgctaatcagctcattgttaaatgaagttgagaaattaaattttcctggggaaatcactgggtcacaattaaaacactatctaaaagatatcaagttactttctgctcaataa

SEQ ID NO: 288479 - DNA, 273 bp, Morganella morganii; identical to SEQ ID NO: 282469

SEQ ID NO: 288480 - DNA, 261 bp, Morganella morganii
atgaaaatggggatcagcaaagacgatatcgcgcctgcgctgggtcgtgcggatgaagtctttatcttccagccggcgaatattccgtggctggtcagtgaaattaccgagcgttgtgtacaaccggcatactggagcggtgacctggatgcgctgaccaatatggtggccgaacatgcacagccgggggatcatatcctggtgatgagcaacggcagcttcggtggtatccacgataaactgctggaaaaactgaagtaa

SEQ ID NO: 288481 - DNA, 651 bp, Morganella morganii
ttgatcacccgtattgaacagcatctgtgtgaccgtctgcgtcagggcatgggggaaatggctctggaggttgccagctacagcggtgagatggatgacgacttaggccgcattgtgcgggcctttccggccgtgtgggtcacgttcggcggtctgaccagaagcgaatacattgccactaaccggcagaaggtgaaatgtaccggcacctttgtggtcatcgtgggtgactacaacacccgtgatgatgagtccgcccggttcggcggtgttaaccgcaatgaaatcgggacgtaccggcttattcatgcggtgcgcaggctggtcaccgggcaggatttggggctgaaaatcgatccgtttatgccgctgcgcgtacgtaccctctacaacactcaggtacagagcaaagcactgtcggtatttgcctgtgagtttgaaacaaagtggattgaatctgttctgggtaatggcctgtggccggaagtgaccggggacacggattcacctgattatatttttaacgagtaccggggaaaagtgaaagagcctgatcctgatttactcagcgtcggtctgcgttataacccgccgggtatcggcacgattgatgacccggttgacctggtactgacaaggaaaaaaccatga

SEQ ID NO: 288482 - DNA, 1785 bp, Morganella morganii
atgagttctgcaatcacaccacagttagtacaacgcgtatttgaattgtaccttgaggatggtcttgtagttaacagaagatatcaacgaaaattggtctggacagtagaagaaaaaatgaaattcatcgattctctgcttaaaggttatccaattccgatgatacttacatcaaaacaagaaaacaacgagttaaagttagaaatccttgatggccttcagaggttgaattctattacgtcctttattgaaggcgatttctctattaatgggtgctatttcgatctggatgcaatttcactgactaaaacattaaaagaatccggtaaacttaaacaaaaaatgcctatgctggatgcaaagcagtgctcaacattactcaattaccaaatcccatttctaacaacacacattaatactccggaattcattgacgaaacattccgtagaatcaatacaggtgggcgccgcctatcaatgcaagatgtcaggcaagcaggttctcttggtttaatccctgatactattaataaaatatcgaattatgttagaaaggattcctcaagaactgatatagttactcttaaaaatatgaaaaatataagtattggtgacgatatattaaactatggaatcaatattaacgatattttctgggtaaaaaatgaaattattcgcaaagaagatattcgcgaatctcgagacgaagagttaatagcacatcttctaagctacgttgcacatccagaaaaagctgacactagatctgattatttaaataagatctacgacacagctacaactgaatgcaatgacctttccaatgcaattagtaaatataaagatgattatttaataaaaacattcaatcatatttttgatgaattaggtaaaatatttaaagaagaaagaagtaatttttccaggacgatttataaagataagaaaataaaatcatctcgtagtttccaagttttattcttatctttatatgaattaataattaaagaaagcatgaccattataaactataaagaccttcacacctcactcactaatatttatgataaccactaccacgctattatgaataataatagaaagtggcataatgatgaacgtactagcttgattgaggcaaccaagggaattattcggtcacatttcaaaaaaagttcctcgcgtcaattcgagccgggtaattggatacgtaacattgaaaatattatcaatgaatctcgtacagaacaacaatcgtatgactttaaaatgggattctgcactcttaaggaagaccacgcattcaatcgtaatatgattgataaagttctaaaaacattaactgcaatgacaaatagtattgagggggaatgtactgttattgttggtgttgctgagagtgaagctgatgcaaaagagcatgaaaaaaaattcaaacgcagctatattaaatatggtagcaaatacattgtcggtgtagatagtgaagcagattatctttattctggaatggaccaatatctaaaaataattaaagactacataaataaaagtaaagatattacagatgcatttaaaaagcaagttctcaacaaactatctaactttacgtacaaagagaaggagattattattttccgagcagagcgttcctctgccccagaaacctatgctgggaaatattatgagcgtcacctatctcataatgatgaagtcaaacctggtgcatcaatgatagatttatttatgcgatttcaaaaaaatcaaacaataaatattatctaa

SEQ ID NO: 288483 - DNA, 342 bp, Morganella morganii
atgttgagtttatcggagcgactaaaggaagaaagaaagcgcttaggccttacacaagttagttttgcagagattgcaggtgtccagcccactacccaagtaaactatgagaaaggaacacgcacgccagatgcggaatatttagaaaaggttggtaaggctggtgtagatgttctgtatatcattactgggcaacgcaccccattgccaaatattactattgaggagcaaagacttctcgaaaactaccgcgccatggatgaggcggctcgcttaaatatgcaggcggttagctctgcgttcgcgcaatcagaattagttgaaaaaaagaaggttaaataa

SEQ ID NO: 288484 - DNA, 189 bp, Morganella morganii
atgctattacttgtcattagtgctgatactcctttaaaaagaataaaaactgcctataaattattaaaaaaagcggtcaccgtattattttttggtaactccgttgccgttgtttgttatgatgatgaaagcgaaaaacgcgatctcaaaaccattgctaccatcatcacatcaccattaaaacgataa

SEQ ID NO: 288485 - DNA, 234 bp, Morganella morganii
atgtccggacaatcaaattatttacctgcaggtctgcctcacaatcgcgccctgtggcccgttgagtatcaggaaaaagagcagcttgatttggctgccagtcgcctgattaagcagctcagaatgcagaaaatacacagaacagctgtactggtggctgtcgaaaaaacaccgtcggatcagcagacgtttttccgggagcgcctgaactactggcaggggaggatgaagtga

SEQ ID NO: 288486 - DNA, 666 bp, Morganella morganii
atggaatcaagaccaactctgcattcgaactacgttgtcatgctggaagaactacgcaacaagccatcccatatgctgaaagaggtcggtgaccagtggcggacacccgatgcgctgtattgggggattaacgcgaagtttggcctgtttacccttgacctgttcactgatggtcagaacagtaagtgcccgaattattacaccgccgaagataatgcgctgacacaggactggtcagaaaagctgaaagagctgggcggggcagcatacggcaaccctccgtattcccgtgcaacctatcatgataaacaggccgttacagggatggttcatatcatggagtacgctcaggctatgcgtgagaaaggtgggcggtatatttttctgataaaagccgcgaccagcgaaacgtggtggccagagtatgcagatcacgttgcatttatccgtggccgtatcgggttcgatttaccggattggtttgtaccggcaaatgaaaaacaaaaaccgtcaggtgctttctttgctggtgcgatcgtcgtgctggataaaaactgggaaggtgaaaaagtcagctggccgcatcgtgatgatctgattgccatcggcgaactgtttatgcggcaggcacgctggctggtggcgaaaacaggagaggctgcgtga

SEQ ID NO: 288487 - DNA, 216 bp, Morganella morganii
atgacagaaaaagcacatgagcttaaaccgtgtccattttgtggatgtactgatatcacaatacactgtcccagcagccacggcctgacattgtatggtgtcgcttgtgatggatgcggggtacggatgaagcgttttaatgaaaccgaatcaataaatgcgtggaatcggagagaagtgtactcagaatgtgaaaggaatcaggataatggctaa

SEQ ID NO: 288488 - DNA, 684 bp, Morganella morganii
atggaagctttgaaaatctatacgaatgaatatgcggaagataaactgctcaaacttgggctcaataatgagaatattacttttgcaataagttcagctatttctgatagctttagaagctcaccgcttcatccaagaattgatgcaatgtcaagggcttggcgtgaagctgtagccgcatttagggaaagtgttcttctgaatgacaatggatggacttgcattcgttctgatagcttagaacttacagttaattccgaattgggaataagtgttattatcactagtggtgataaagatacaggcttgatagatggaaatccaagaacgaagaatgctaagggaaatgcagtaagaagagcagtagaaaaaaataactataatttggaattattcccttcaaatgatgtgtttgacgataacttagatgaattagaagcaatatcgactctggatccaacaaaaacttatgttcttttgtattattttgacttttcttcaaaagaggtacgctgcgaactttctttacctaaagaaatgactaagtttagctcttacaataaaattgatacttggtctgagcgtattatcattactccagtatcttttgataatgcaaatccatctatctttaatgaagaagagtttactgatgattttgatattcagatatcgaaaaaataa

SEQ ID NO: 288489 - DNA, 1098 bp, Morganella morganii
atgaataaaaaattaaatccagagaggctaaaactagctcgtttaagaaggaaaatgacatatagctcattatctgatattactggtatatcaacaaagtcattggcggaatatgaaaaattcgataatttattttcaccaacagaacagaatgtcgaattgatagctagcgctttaaattaccccaatgattttttttatggtaatgatgttgatttcgttgaatcttcgacagtttcatttcgttctttaaaaaaaatgaaagcagccgaacagcatgccgcagaggcagcgggatcgttaggtgtaatattaaatacatactttgagagtgtatttaatctacctgaatgtaatttacctgatttaagagactatgaaccagaagcagcagctgagtctgttagagaattatgggggattggggttaaaagcatatctaacatggttcatctattagaggtcatgggggttcgtgtattttcattagctgaaaacacattaaatgttgatgcgttttcattctggaaaagtgatattccatttgtttttttaaatacacaaaaaactggagaaagaagtagatttgatgctgcccatgagctggggcatttagttcttcataagcatggttcaccgcaggggaagcaagcggaagatgaagctgatcgatttgcatcggcattattgatgccgcgacaaacagttattgcagctaaaatgaattttcctactttagagcaaataataaagttaaagaaacattggaaggtatcagcaaaagcactagttgtcagaatgaaaaaccttaaattattaacagagtggcaatatagaacactgatggtagagattaatagtaataatttgcacaaaagtgaaattaatggaatagaaagagagaggtcaatgcttgtcgataaaatgttaacagcattaagcctagataagattggtttaactgccttatcagaaaaagtttctctgcctgttgaagaattaagcaatcttctgtttaaagtggctgtaattaatggtggtaatgatagtaataaaaagaataaaagctcagcaaatctaactttggtgaaaaactaa

SEQ ID NO: 288490 - DNA, 732 bp, Morganella morganii
atgaagtctatgatattatattctttggtatccggattaattattacttctgtgttatttatgattacttttatcttagaagtaactgattttaatagttcaaagatcgataattggtctgcgcttttcacgattataagtgtactgctagcttctttgctatcttttatatctctgatggtattgattgtaacccttaagaatacacaaaaaatgactaaagctacttttgatgccttagttaaccagaaagatgataactacataagccagatagaaagtttgtgtcagcgatttaatcaaactttagatagggaaaatgttgtttttgtaaataacatagattgttattttaacactagaattaatgatttatttattaatacatcagagtggattatagcgaataaaataacatctcatgattttttgttaaaaaaatgtaaatctataagtgaaaattacattggtagaatcaatattgaaactgatttactacttagtatattaagagctgtgttttctattactgatgttaataagcaggatatagctaaagcaattataaaagatagtattgaagctgaaagaagattttggttttgttgcatggttgatgaaaaatctaaccatgaattttttacttaccttgctaattttaatgattttatgcttatgcatgataatttatgtcatgaggtttttatgcaggaagctatgtcagttgagtag

SEQ ID NO: 288491 - DNA, 1269 bp, Morganella morganii
atgttaactgacagcaagattcgctcagcaaaatctattgcaaaatcatataaactcaccgactcgcaaggcctgtacctgatggtatctgcctgcggtactaagctatggtatttccgctatcgcctcaacggtaaagaaagtcgtctggccctcggcccttaccctcagactacgctggcggaagcccgtgaaaagcgcgatgcagtgcggaagctactggcgtccggtatcaacccttctcagcttcgcaaggcacataacaataccgttgatgaatcccgcacatttcagtatgccgcgacaacatggcactccagcagacttaagctctggtctgaaacccacgctgataaaattctcacctgcctgaaacgctacgtttttcccactattggcgcgatggatatcacccaaattgaaacccaccatctggcacagttggttaaggtaattgacgataaaggcgtgcatgacgttgccgggagggttcgccagcatctgaagaaaatcatgcgccatgccgtacagcagggagtgatcaaatacaatcctgcttacgatttagatggtatcgtaacccccgtagtgttccaacatcaccccgccttactcctgaaacacctgccagaattgctggaaaagattagtaattacaaaggcaggaaactaacccgcctagcactggagcttaatcttcatgtcttcctgcgctccagtgagctacgcctcgctcgctgggatgagtttaacctgaaagcacatatctggacggtgcctgcaaagcgtgagaccgtaaaaggcgtgagattctcggagcgtggtgcaaaaatgaaggatgaacatctggtgccattatcacgacaggttgcttccctgcttgagcaaattaaggaaatcacaggggagtcaatgtttgtctttgcaggcgcgcattcaatggataagccaatgagtgaaaacactatcaataaagcactgcgcgtaattggctacaacaccaaaaccgatgtctgcggccatggtttccgcacaatggcctgtagtgccctgaatgaatcagggctgtggtcaaaagatgccattgaacggcaaatgagccataaggaacgcaatggcgtaagagctgcttacgtgtataaagcggaacatttagaagcccacatagaaatgatgcaatggtggtctgattatttagacgccagccgtatagaatatattgcgccatatatttatgcccgacaatataaatccataggtgccgcttga

SEQ ID NO: 288492 - DNA, 321 bp, Morganella morganii; identical to SEQ ID NO: 67344

SEQ ID NO: 288493 - DNA, 1461 bp, Morganella morganii
atgatgggacaagcccgtctaagaatagccgatcatttacgaaaaatcccgattggctggttttcttctcaacgcagtggcgatcttgcatcacggcttactgctgatttagagatcattgaaaatatctggtcacatttcttaggaatgtttatcagtaccttagcgatgcctgtttttctctcactattcttagtatgggtagattggcaactcactttaattatattattttctattccaatcgctctgttcgcattatccataagccataaaataatgttaaaagctgcacaacaggcagctgatgctaatgccaatgtacaatccgaattactcgattatatccaaggaattatggttattcgtagttttgggcgacttggtcctgcatggaaaaaactaaaagcagccttagaaacacaaaataaaacccaaatagttctagattccaagcctgccccttggattgcactttatggttttattcttgaatcaggttttattttattaatgataataggaacaagccgtttaattagtggctcactttctccttctcaattcgtttttttccttgtattagcactccccatttatcgacaattctttgatttaggattatccagtatgttgttaaattatgcacaaaaatcattacaacgcatagaagaagtaatgaaagtggttccactttctgagcctaaatatactcaattaccaataagaacagatatctattttaacaatgtaagctttatttatccttataatagtcaattaacattagataatatatcttgctgttttcctgaaaaaagctttactgctattgttggccctagtggctcagggaaaagcactttactacagcttatttctcgtctatgggatgttaaccaaggtgaaatattgctagatgatattaatattaaccaaataaattccgataaactctgttcatatgtatcttctgtttatcaagatgtcgttttattttcaggaacaattaaagataatattttaatgggaaaaacagatgctcacgatgatgaaataataactgcagctaaattagctaatgcacatgagtttattatacaaaaaccacaaaattatgatactcctattggttacggtggtatgttactctcaggtggagaacgtcaacgtctttctcttgctagaactttattaaaaaatgcaccaattttactgatcgacgaagcaacatcgagtatcgattgttcatcagaagtattaattcaacaagctttatcattgttatcaaaagataagacaatcattatgattgcccatcgattaaatagcattaaaaatgccgataacattatcgtaatggaaaatggaaaaatagcagaacaaggaaaacatgctgagttacttgcaaaaaatggcttatatgcacatttatggttacaacagaaagcgttatgctaa

SEQ ID NO: 288494 - DNA, 711 bp, Morganella morganii
atggctcatgaaagtaaaggtgttgaatttttgacatttcttccagttatatcatctatggattttgtgaagagaattctaatttctgatttttttaataaaaagattaaaaaaatccataaagaaatcataacatatataaactccgaaatatcaaaggtaaatactgaatgtaatccaataaatgaagatggcttaattaattggctagaggatgaggatttagaatccatattacattctcttaatttaattaatataccggataatattaaatcattaattgaaatacatcaacactgcttgaacaacgatcacatatcctcatatgcggaaataaaaaaaatagagggtgtaaagaaacaaaatgtttttaaagatatactttccagtttaacaaaacctaaggaagaatatttcattttaccattaataaatgaactttatgagcagttttcggtagttaagattagaatgataaaaccaatacatcgttcaagggtctttactaatgaaatggattatcttgcttcttgtgataaagataatgttgcggtaataagggtaggacgattatcagattatttaagatatagtatttctcaaaagttctctcatttgtttaacaaaattggaatgcctactgagttcgagagcgatagagatacttctatagaaatgttaatggatattttgaaggaggaaaaatga

SEQ ID NO: 288495 - DNA, 807 bp, Morganella morganii
atggcagagaaaacaatcctcaaatgggcgggctcaaaagtcggcattatggaacagttgcgcccgcatctgccaaaaacaaagcgcctcgttgaaccattcgccggttcctgtgctgtgatgatgaatactgactatgaggagtatttgattgccgatgtgaatgatgatctgattactctgtatcaggctgcggcatcggacaatcttgatgtgattctattcacagcacgccgcctttttaaaatggaatcttttcagtccggatattatctggagagagaattttttaataactctaagcatgcattaaagccggaatttattgctgcatattttatttatttaaaccgccactgttataacggattgtgcaggtacaatcagtccggcggttttaatgttccgtgcggaaattataaaaaaacttatttcccggaagatgaaatacgtgcattttccgaaaaagcgaataaagcggatattaaatgccagggctgggcggaaacgctgttgcagacctgtgccggggatggggtatatgctgatcctccttatatgggtacgggcttcactcagtatcataccgctggttttaatgatgacgatcaggttgcgcttgccgaaacactggcagttctgcatgaccaccgtggtattccggtcaccgcgtcaaattccattgccgcaaaagagctttacgcggatttaggcttcactatccacgaaatagaagcgccgcgaaaaatatcggcgaacggaaaccgcaaaccggtcaccgaaatcattgccacactcggggcgtaa

SEQ ID NO: 288496 - DNA, 456 bp, Morganella morganii
atgcaagaggaaattacagcatcaaaagatagagaaggagtattagctcaagaaagggacgaggctattgatgaaaaaaataaaataaataaagaaaatgctattttaagaaaaaaatatcttgatgcagttaatgaagttaaagttattcaaaataaaataccaaaaaaagaaagagataaaaatgttcttaatagtgttcaggcattttataataataactttgatggtgtgagtggcagtaaatacacgattatcaataatataattgaattgttaggtctggattttcattcacatctatctaatattaataataagcagaaggagattattgaatcgtctttagggattggtgatataaatgaagtaatcattaatgatttaaatatctttgattttcttcgtgattttaatgtggagaagctatcctttttagaaagtaaccttatatga

SEQ ID NO: 288497 - DNA, 456 bp, Morganella morganii
atgactaagcgtatttccggccagtcctttgatctcaatctggacggcgcattaattcatgtcatcaaatcgacattaagcattacagataacaccgccgccgcacagactcagggtgtcccggatggctggatttcgggtgatgtttctgctgaaggtgaagttgagctacccatcaagtcattatcagtcctgaaagcaaaagcgcgtgcagcagggtcatggcgaaatattccggcgaccgatctgatgtggtatgccaaagccgggtcagaggaaatgaaagtggaggctttcggctgcaagctgatcctctctgacattctcgaccatgacccgaaaggcggcagtctggtcagcctgaaagtgaagtttgttgtgaccagtccggattttgtccgacttgacggcatcccgtatctggaatctgaactgacagataatttaatcggttaa

SEQ ID NO: 288498 - DNA, 543 bp, Morganella morganii
gtgtctgatattaattattattttgacgaaacaaatccgctgcacccgttttacggtgatgcctatgcgaacaaaaattccttcgccccggccaatgccttgcgtattaagccggaatttattgctggtttccatccttgcgagcatatggggaagtgggtgcaaattccggattatcgcggaattacagtatatgaaacggacaccgccagggaattagaggttaaagaactgggtgaattacccgaaggtgtgactactattgcgccggatgtggattttccgaagtggaacggtaaaaagtgggtgacagataaaaatgcaaaaaaagcaagtgcagtcacggatgctgatgaagaaaaatattaccggattgcggaagccacgcaaaaaacacaaatgtggcagacacagttaacgctcgacatcatcaccgatgaagacaaagccagtcttacagaatggatgctgtacgtgcaaaaagtccaggcggtagacacctcagccgccccggatatcatctggccggagaaaccggaatga

SEQ ID NO: 288499 - DNA, 210 bp, Morganella morganii
atggaaccaacggattttgaaaagtggtgtgctggtgaacttggcaatgctcccagatacatcatgaaacagagaaaaatacttgaatctggtgagtattcctacatgccaatggtgattatagaaatcagataccgcgcctacatggccggagttcgcagcagactgccgtaccagacacagccaaaaggagatgaagatgaagggtaa

SEQ ID NO: 288500 - DNA, 195 bp, Morganella morganii
atgaagggtaagggaaccgatttcaaaacactgatgatgattttccatcgtgagcgggtttctcggcttgtcagaggtataaaaaacggcatgaggttcagtgagtatcgtggccaaaaatacagatgtgagctggtaataaacaaacttctggtgctggaatcccaggctaaattacggagaagtcaccaatga

SEQ ID NO: 288501 - DNA, 315 bp, Morganella morganii
atgaaaatgaaagaaaacccagacgtttgggatcaggtactgatgtatctgtctcagtacaaagaccagggcatatttgccgctctcgctgggtcggtggctatccttcgtggtcgctataacggcggaggatggaagaagaccatttttgacgggctgatgtgtgcaatcttcgcgtggttcgtgaaggacttgctggcgctactcggccttaatcctgatttggcgtatctgaccagtgtattcattggttatatcggtgtggatgcgctgagcaaaataatcaaaggtaaggcgggggtgagtagtgactaa

SEQ ID NO: 288502 - DNA, 570 bp, Morganella morganii
atggtaaatattggtgaaatgaaagaattattaacattagaatatcttaatagtatcccttcatataaaggcgacctaggagaaattctagcaatagctcattttgaaaagataaatcaaggatttattcatgttaattcaagcatatggtcatatccaccaaaaatgaaggaagtaaatgcaaaacgtccggatttttatttaattcccatgaatgaatcagttaccgttattgatgttaaatatcatcagctcaatgaaaatatggacttcattattgaaaaagatgaaatgataaaatatctggaacttcatcaatacttaatgaatctgcatggtaaatcagctaccgaatcagactacatcgatataagatttcttgttataccttcagtaactcaaggaaatgcttttgcaaatgtatcgctaactgaaatagcgaataataggattaatactaaaaaaacattcccaggaaacgaatctttcacaatcacgagatttatagtttcggttaaagatcggctaataaagctaggaacggaaaacgaaccttatacaatggattag

SEQ ID NO: 288503 - DNA, 558 bp, Morganella morganii
atgatttatcctgaaacgtgtggcaaaggcgatgagcatttaagattacggacattagagagtacttggattcggggtaagctcaaaatgtgggggcgctgggccgcattcagtacgcaaccagaagcagcgggaatttttaaccggttactttccggcgcggtaatttctcagaaagcattaagcgaagcaattaagaaaatgcaaatcatcggcttatccaaagagcaattacagctttttttagaagagtttgccgataaaaaatcattaagtagtatgtggttctgtacagatgttgaaggtggccagatggataaggttatttgcgctgtgtttgagcagaatccggcgttgcttgaaattgtgaagcagcattatgtgtataaaaaatccagataccgtattgcggaagaattaagtgaagcacatccagataaatcgctatctacgtaccggcggagggtggcagcatggttatctgtcgcggagtatatgctatacttgccgatgtgtgatgagtttgatcacaaagggcactatacgaataaagcttga

SEQ ID NO: 288504 - DNA, 1017 bp, Morganella morganii
gtggcgaacgatgaagttgctggaattgaaatcaaaaatatagttgttcatattttgcacaaagagcagcatggtgacgcaactagcacactcagcccctcaataggcgctgtaacaccagcttctcaaaggctgatagatgctatttgtgagcgttattcagggagaactggcaagggatacggtcatttcgaaggagataccgataactatcccatggaaaacatagttggtgattatttacgtgaacctgattcattttatggtatttctgtccgtatgatgaatcaccttgttgatcgctctcaacaagaaaacatggcaacaggtggttatgttcttttttctcatatagttattggaagccatagccacatactcattgcaatggtaaatgcgacaactggatcagcaattactgacaattttactattgaagatagtgtatatttagatatagcaaaactgcgtgtcgctggacgtattgacttaacggcatggcaggatggagccgagcgttatataagttttcttaaggggcagagctcagtttcaaattacttcaagcgatttttaggatgtaatgatgtcttgatagcaagacaagagtctgaaaagttaaaaactgctcttcaggcatttgcagttgaacaggaacttgaaggtgaagaaaaagaaaactttcttggtagagcttttgagcatttaagggatttaagcaaagctggggagcccctacacttagatactttcattaatgtggtatggccacaagatcccgatgttttgtctgccaaactaacatcagaagagtttgaattatcagatggcttcattcctgatggtcgagtaattagaagcttgattagttttaaaggaaaatcaaaatattgggaattgaagtttgaccgagcgggcataaatgatggttcggtggaatacaatgaggaaacaaatgaaattatcctcagaaatatttcagatgagcttcggcagatctttttagatgaggtttaa

SEQ ID NO: 288505 - DNA, 1215 bp, Morganella morganii
gtgagtggttcagtttcatttgagcaacttatagagctatatagaagaattgagtttgtagataactcaatgtcaggttcttttttgctcaaaaaacagaccgattgcaattttattgaacaacttcttgatgatgagcaaaaatatggaatcatgcttgattcaggaaatttggttacaggtgaaaccataaatttaactgttggcctcccaagaacgtcatttggacgtgttttctttgatatcgaggggatgctacaagctccaaagcagcaatgcactgagctggataattattttatttttgattgtaaattttcgaaaaatgacccagcggtaccgcaagatattaaaaattataggatggtaattagttttttatctctcttggaagaaggttcggcgtatttcgataagagtacatatcagtatatttttctaggtactgaagttttcaaactttctcctcgttattcctataaaactataagagaacttgatactgcctctctggaaaatttaatgtcctgctttaaagaagatcctcatagggagcaaaaattagatattttagttaatagcattcaagttattacagaagatatcgatgctctagataagtttgaatatgtgttgaataatcttagaaaacttaatgaacagtttttgaaaggctataaaatttttgcatcgggattttcatacgataagataatggatcagttgcgcgctgctaaagttgaagaaatggggaaaatacataaggcattatctgacattcaaaatcatatacttggtattcctgttgcttcaatcatagttgccacccaatttaaagatgcaccaacgtggcaagggcagggaataacaaatagttttgttttattagggtgttttatatttatttgtttggtgtttttggttttgtgtaatcaaaaacaaacacttaatgctataagtgatgagcttgctcataagaaaaaacagataaataaagaattttcctttattaaggatgatattgagggtgtttttgaaacaataaatgatcgcttgaaaatacaacgctgggcgtttagagtaataggattaattttaattgttggtttaatatctacagtgtttgcttatgttttagtaactaagcctgtacttaattacattacggctcattgtagttggtttgcatcgtttgtagagttacttaatcagtaa

SEQ ID NO: 288506 - DNA, 384 bp, Morganella morganii
atgccaatcaccaccacaatccatcaattaatccgcctatctcaaaattataacgaaaatgctcaaaatacaggaaacgttactttcaccgaagcgttcgaagaacttcccgaattatccgaaaaaatacgtcatgttgagaatgttttaaattcattacctgaccacaatattattgtggcattaaacctgatgtacgtaggcactgaaatcaatgaagatgaaacttttcgggcatgttacgaccgagtgaagtcgggtctagaacaaacccgccaaaaagcaacttcaaaattaatagaaaagatacccaatctagcaaattatttacctatagcactacgtgcggcagaagatgatgagataaatattaatacgctataa

SEQ ID NO: 288507 - DNA, 324 bp, Morganella morganii
atggaactacacagatttgatggtaaccacaatcaaaacactgaagataactatatcaagtggcttaatgagcaccccgatggttttgttttaaacttcagaaaagataccgaaggaaaaggcagtaaaagtacagagagatttgcacgtttacatagtgcatcatgtaaacgtctttattccggccaggcagcaaaatcatcgactccatttaccggaaaaatgtatgcaaagctggtctcagactcatttgaagaattggatgatgaaggttgtgagatattaggattggatagtataaaaaaatgtccttgcttagcctaa

SEQ ID NO: 288508 - DNA, 972 bp, Morganella morganii
atgtctgacagtacaagcattaaacgtgtattaaatcataataattggcctgctatagatttgtttgattgtgaacgagaattgttagcgcagatggcaaagcataatatccaacaaatattttcaaccgctaaattagaggctgatgataatgatgaggattttaatgcagtagttggttatatcctagatggccttgattcattacctagacgtccagatgctgcatttgattgcctatatagagcaattgacagaaatctggggctgttttcaaaaccaggttcttcatatatgcataatttagttgatgaattttttagtaaacaccataatgaatggattactattacaaatatacttatagagcatgtgccacaacaaactgctgattatgcagcaaaccgtatactcgattgccatatcgatagcaatcctccacatacagacaaaatgaaactgagagctagacgtagtctgggaagcgttcgctataaagaattttgtgagaaatatcttgtggaaaatcctcaaatacccggtggattttttgatcttgagtatcgccaaagaaggaatgcagggcgattaatgcgttatttattccgacaaacaactcccttaataacaaaaacaggtgtcgtcagttgtatacctactgtgctagatctttctaatccagataatttgcttttaccgaaagtaaaactcagctcacttctggaaatactaattgctacgtatcgacatgagcgttttcatgggcagacattcactccattcagaagtagtaaggcatctttgaaaacatacgctcatgcatattatatacttatggtaacttatatcattattttaggtatattgcatcatctgggaaaaggtggccttactattacatcaataatagatacagcccaaaaaaacatggataatctgagatcattttttggggatgctttagagctgtaa

SEQ ID NO: 288509 - DNA, 906 bp, Morganella morganii
ttgagtgaatccactataattcttgctaaagaatcaatttctgatggacatgaagtaaataaaataaatcaaataagaacgctcaccaatgaggaaattgaatggtatgatacacaaaaagatatacttatggagtttgtaaatgacttttctttagtagaatatgtaaatttgaactatgaatcatttctggaacttctgaatgaaacggttataaaaatagccaaagagccttctttcatagggtcctatccattcaaaaattttccattccttttgaatacacgaatactgaactacatgatgtcagtgaaaactttactagatcacatggaaaccaaaattaacagacggtacggggaggcatcaactgaatttgtcgaatttaaggcgctgacggcaaacgaatttgatagtaaattctcttatcgattcatgtataaactcagaaattttgttcagcattgtggaatgccaccactttcgtacacaatatctaaatcactcgatgaaaccagcagcgctataaatataaagttgatcgtatattttatgagagatgagttaattcgggacttttcaaaatgggggactcaagtaaaaaatgaactagcacagatggataaatcgttcccaataattccgatttttaatgagcatgttaattctattcttaaggtatatattttattcaatgaaaagcatcatatggaaaaaatttcaaaagcaaaggaatatataactaacttcatcggagaaagaatcgattacattgatgatgaatacatcatcacaaaattaaaaaaaactgaagcaggtttgaatataaacaaaataaccattcccacatcagcacttaagaaaatatccgatttctatgaaataaaagaaaatttgtttttgtaa

SEQ ID NO: 288510 - DNA, 297 bp, Morganella morganii; identical to SEQ ID NO: 279968

SEQ ID NO: 288511 - DNA, 2046 bp, Morganella morganii
atgagtaagcatgatgataatcatatcgagattagctgccctatagactttaaacggcgaaaacggctggggcagtacttcacgggtaccggccttggtcgtttgcttgcagcccttgctcaagccgaaaaggctgacagcatcatagatcctatggtgggatctggagacctacttgcctcttgtatagagattgatgctaaacctgctgtaatagcaggtatcgagatagatacgaaagtacataaggcttgttcaaagcgattgccacatgcgcattgtttacttggtaatgctttcgatcccagtgttatcgcacagttgcccgtaaaatcatgggatttagtaatcgcaaatcccccttatgttcgctatcaatcccttcgagataaagatcacaattcaagcgcatttccttccgcaatgcaaattcgaaaaatgttgcttcgatcattagagttgatagatacactcgataaagaagataagcgactttttgccgaactcatccacggttattctggtctatccgatttggcagtgcctgcatggattctctgcgctgctttggttaagaaaggaggacgtttagctctaattgtacctgagtcgtggcttagccgagactatgcaacaatagtgaattaccttttgtttagatggttcgacatcgaatttgttgtagaggacgaacatgcgtcatggtttgaagaagctcagatcaagacaacattgatcatcgccaagagaattcaacgtcgctcttccaaactctcaattcctgctgaatatcactattgtcacatagcacttgcagccgcagcagctaacaacagaagtcctataggtggtattaacttaccggtaaaagaggctgaaaagctcttcgcaaaacaggctcaaatctggctccgagatgcgtctaaacatgaaacgggccttgttagcactcgtccaatttatctaaatcactcttgcaaaaatatgatcgcgtcagcttcccgccaaaagtggtttgccactatgagtaaagctgatgatgttttcagcaacgaagactatatacctcatgagatccacgaatggattaaaaggaacacacttaccccttcgttcgatagttttgaatctataggcatcgctgttggccaaggacttaggacaggtgctaataattttttttacgctagcggagaattaaaagacggacacgtcgagctatcttttttaggcccgttatcaggattgaaagctagaagctcgatcaacatcgttaagcccacattacgccgccaatcagagctgcctaatggttttgtaatttctccttctgatgccaaaagttggacgttagacttaagaaactatgtgctgcccgaagatattggcaataatgatatatctttcacatcatatgagcttatgccaaatgaacttgttaaggtcgttagagctgcacaagaagcaaactttggcacaagtgagaggccgctaaaaatttgggagctgacggcggtcgcacctaatatccgacctgcaacacctcagactcccgctcgtcattggtatatgttgccaaattttacacctcgccatcaaccagatgtattcttagcacgtgtaaatacgctaacccctaaggcttatctaaatcaagatagagcatgccttatcgatgctaatttttcgacaatgtggttattagatgattcaaaatggtcagcaactacaatcctcgcttttatgaattctacatgggttcgagcagtaatcgagtgtctggggtcggttatgggcggcggggcgttgaaagttgaggccactcacctacgcaaaattcctgttccaaagttaaatgatgagcaaagaaaaattctttccgatcttggaaaaaagcttgtaaaaggcacacaggaaaaactagttattttagagatagatagaataatagctgaagctttgggctgtaatgacatgaatattgatgaacttaaacagattacgcatttaggtcaaactcggcgggctaaacacaaaggaaggtag

SEQ ID NO: 288512 - DNA, 1056 bp, Morganella morganii; identical to SEQ ID NO: 284494

SEQ ID NO: 288513 - DNA, 339 bp, Morganella morganii; identical to SEQ ID NO: 280437

SEQ ID NO: 288514 - DNA, 168 bp, Morganella morganii; identical to SEQ ID NO: 280436

SEQ ID NO: 288515 - DNA, 270 bp, Morganella morganii
atgctgatcgttacgcttttcaccaaaatcagccagctgaccataggtgccggtgatcactccgtagctgtggccgtacaactgtttgtcccacgcccagcggtctgccagaaaggttttcaccacatcgagagacgccgtatcggtatacgggttcacgataaaatcaaaggatcggtctttcagattcgccagaccattaagcagatccggagcgccgttaccgccggacatcgccgtgatggtcatttcaaaaccggacggtgttga

SEQ ID NO: 288516 - DNA, 354 bp, Morganella morganii
ttgcgcgatcagttctgcccggatgatattcggcgtgacgattgcagaccccggtgcgaagcgggtcccgtcatctgccagtttcatacgtccgaatttactggtcacctgggtgcgcagatagcgggagacaaacatcagcagatacagcgtttccacctgcaggtaactgtcgtcattatcgccgtaggcgtttttctggtaggtcgtgatgatattctcaacccgcacggtaccgtcgtcatccacggtaaatgtggagataccgctgtgcagcaggttattgcgctcagtcagttcaagaatcttcgtgtcgtccggcggcagcacaccactgataaccagcgtctgtaa

SEQ ID NO: 288517 - DNA, 189 bp, Morganella morganii
atggcgcatgaaattaaattagagaccgtgaccaataaagcagctcaattaaacgccttattgttcacgattagcggtgaattcacaggcaacccaataaccgacaatctcatcgaactggctcatgagttatctgacagcgtcgcctgctggttgattgaagaaaacgcacatagaaaggagtcgtga

SEQ ID NO: 288518 - DNA, 765 bp, Morganella morganii
  misc_feature (700)..(734): n is a, c, g, or t
atgacaaaacagtcagttaccagactgaagccaggtaaaatactcgacacactgggggcaatgaaaaatagcctgacgcgagtatcacagcgtattgctgaatatatcctgtttcatcctgttgaagtcactcagctttccatcgcacaactttctcgggcgactaaagctggcgaagcaactgtagtacgtttttgccgcactctgggctataagggctttcaggactttaaaatggatttagccattgaaatggcgacatcggatagtgaagaatcaccaatccttgatgctgaagttaaccatcaggatgatatccatactataggtttaaaattacaagcaaccatcaataatgtgttatcagaaacattaaatttacttgatatgacgcaagttaaaggcgctgtaaatgcgttgctatcatcgaattatgtttttatctgcggcgtgggttcctcggggatcacagcagaggatctaaaaaataaactgatgcgtattggatatcgggtggatgctgttaccaataaccattttatgtatatgcaggcttccttattgaaaccgggtgatatcgcgatcggtatcagccattccggaaattcaccggaaacagttcatgcactgaaacttgcaaaagaagcaggggctaccacaattgtgctaacgcataatttaggttcacacattatggaannnnnnnnnnnnnnnnnnnnnnnnnnnnnnnnnnnttatggaatatgccaattattatctgattaa

SEQ ID NO: 288519 - DNA, 228 bp, Morganella morganii
atgcctattatacattgtatgtcaaatgatgatgcaccgaaacctgacacctatacagcggttactcagatgttcacctttcggttctttgctatcaagcgcatcgaccagaacgcaaaaccagaatgcaaagaggtacaagcgccggatttacggtccgcaaaattacagcttgtccgtgattatattttatcactggcaacacagattccagttaaggcggtgtga

SEQ ID NO: 288520 - DNA, 240 bp, Morganella morganii
atgggcttcccggatgtgataggcgatcggggcaccgtcgctgtcaatttccaccccgccgcgtatattcggcatgtcaaaattctgctgcgggttactcaggcggtctggatcaacaatctgaaccgtcgtggcataacgggctttaccgtggcccagtctgtcaggacggtattgcagaactgccagcgcatcaccgtccagcaatttgtgacggaaccccagccgcagcatctgtga

SEQ ID NO: 288521 - DNA, 369 bp, Morganella morganii
atgggcgatacatccaaccgtctggcgggaacggctcacgtctccgtcaacggcatgtcaattatggtggcggcggactttaaatacagtccgtccacggtcacccgcgaaaccctgaccggtatggactttgtccacggttacaaagaaaagccggttgccggttttatcgcgatgcgtgtccgtgattccggcggtaccactgtggcggattttaacggcatgaccaatgtgaacgtggtggccgaactggcgaacggcaaaaccatcatcggtcaggggctctgggttgttcagactcaggaagttaacagtgaagacgccgtgtttgacgtgcgttttgaaggtcgttcggtaacggagaactaa

SEQ ID NO: 288522 - DNA, 429 bp, Morganella morganii
gtgaacgcggctaaagatgcggtgcgcggtcgtctgcacctggagccgccggcagcaagcgaaccggcaccggcatatatgcacttcccggttgacagggatttgcagtatttcggtcagctgctggcagagcggtcagtgatcaaagtgtctggtggtcagcggtaccgggtctgggaacagataccgggacgggccaatgaggcacttgattgccgcgtgtatagctatgccgccctgtgcggcctgatgtatatggggctgaaacttaatgcgctggctgatgctgtttccggtaatccggagcggcttattgaaccgccggcagagcctcagaccaaaattaatcttcgcttcccgggagcaattatcccggaggaaaccaacgaaaagcctcagcggaagcggatatcccagcttttgccataa

SEQ ID NO: 288523 - DNA, 234 bp, Morganella morganii
atggctgcacatctggcattcaatacccgaatgtcttcatctgaagcgatcagcaccctgaaagcaatgggtgcggtacagcccgcaacacagcgcccatcgctcgacagtcgcatgcgggcagagcagcaggtacgcatcagtccggatgctcaggcaccggcagcgggtaccgccgccgcgctggttcatcagatgaccagtctttataacagcaacaagggagcgaaataa

SEQ ID NO: 288524 - DNA, 423 bp, Morganella morganii
atgatgaattatttcaaaaacaaacaaactggcgaagtttttgctttcgataacgaacagatggccgttattgacagaataaatgcgcctgatttcgacaacgaaaaagagcaaatcccggagattttcttcgaaattgacgagaaaattaaaggaatgcacaagatgtctgctgaagaagttgaagtgcatatcaatccaccagtgactaaagaacaattaatagcagaagccgaagccaaaaagcagacattgatcgctgaggccagccagaaaacccaactctggcagactcagcttattctgggaatcatcacagaagaagataaagccagcctcaaagaatggatgctgtatgtgcaggatgtgcaggcagtagacgtatccactgcaccggatatcacttggccggttaagccttaa

SEQ ID NO: 288525 - DNA, 237 bp, Morganella morganii
atgcgaagtaaagcaataagacgccatcacgagaaacgcctcaaatctaagcgcagcaaatattacaatgccggacatgccactaagcgcaacatcggtatgtgttaccgcactcccgcattgtgtggttgctggatgtgcgctaatcacagaaaagtattcggcatgagcatcaaagaagttcgtgaccggcagcgctgcattgacacagagcaactgcgagagaacttttcgtag

SEQ ID NO: 288526 - DNA, 414 bp, Morganella morganii
atgaccaacaaagaatacatgaagcttcagctcatcatcagtgcgttgcgtgggaaaccatactttacgcctgatgatgtgagcgcggtgatgggctacaaaaggccggaagcaaacgcaaagatacgggcattgtgtgaaattggtgccgcagcacttatgtccggagctggaagccaggagcgtcgttacatcatcactaaggttgcggatgtctgccttgattcatatgcaggagtatcagacggggactttgacccagacgatacgcaatttgaaagatatccgaagcttaattttaccggcgggaaagtggtgaagaaagccaatgtgaaagggcttggtaatgcatttttcagacggttcgggaagctgataatggaggctcgccgtggaatgccaactgtgcagtaa

SEQ ID NO: 288527 - DNA, 357 bp, Morganella morganii
atggatgaaacagaacatgagttaagcaacgtagtcgcatttccttccggcactgaccccaacctgaaaagtaaaatatcatttgttcatgaagacaatgagccgagaggttgctgcctgcactccggatatctggtcaatgaacacgaacgcagagttaaatgtagggaatgcggtaaggttctcgacgccttcgatttaatgctgaagatggcaaaaagagaaacccggctggttagcgatatcgaagcattacggcaggaagaaaaataccggcgtgaaaatatcgaaaagcttatccagattgagcgcaacgcaaaagccagaatccggagagccaaaaaatcaggaggctaa

SEQ ID NO: 288528 - DNA, 201 bp, Morganella morganii
atgaaaatcacagacgaagatattcagacagcaattttaagctcaagcgaggactttctatttcaggtgtgcgattcgcttgtgttttcccattacgggttagatgaaatgccagcggaagaacaagaccgactttatgctgcgctgtattcatggcttaagaaagcggccggtgaatttaagcagattcaggaggggtga

SEQ ID NO: 288529 - DNA, 240 bp, Morganella morganii
atggatataaccgaaaagcagcgccgagaaataatgaaacaaggtatccagtatgcgcggaatcatttaatcagtgcgtaccttgccaatttcattaattgtgacgagaagcaattcgcctatatcatggctcaattatctcacgttgccaatgaatctatcgatatcgaattaatgatgggcgatatgctttcgtgcaatcagcaggctgaatactggattaaatctattctgagttaa

SEQ ID NO: 288530 - DNA, 342 bp, Morganella morganii
atgaacaaatatagtgacaaatcggattttgaaattaataaggctgtggctgttgctattggaaaggttataggcataaaaccagactccaatattatatatttaattggtggtgatgagcttatagaattcgacccttgcaacaacccggcggacgcaatgccgattattaaagacaacctcatatcgctggaacatgacggaatagcctggacggttagttgcgtgcggcatcctgaaataagcgtttgggatggatgcaaaaactacaatgataatttttatcgcaaggctatggaattatttttgctgatgaaggatgcggagaatgaaaaaagttga

SEQ ID NO: 288531 - DNA, 555 bp, Morganella morganii
atgccagcacctaacagcattgacttagatttaatcgttaaaatatttgactacgacaaagaaaccggcgttcttacttggaaatatcgcgatgaatcaatgtttaaaagagcggggtcagctaattcttttaataaaaacaaagctggaactccagcaggaaaaaaaagaagaaatgaaaatggtaaggaatatctcgttgtaaaattcaatggggcaaattatttagttcacagaatatgttgggctatttataaaaaagaacagccaaaattcattgaccacataaatggggatagcactgacaatagggcttgtaatttacgcagtgtatcaattaccgataacaacagaaacatgaggttatcaagaataaataaatcaggattccctggtgtgtctaaatataaagcaaacaagtggcaggcatctatatacatcaacaacacacaaataaaccttggtcattatgattccaaagccgaagctgtcgcagctagaaagtcagcagaaaaagtgtgtggatatcatgaaaatcatggttccagtaggtga

SEQ ID NO: 288532 - DNA, 198 bp, Morganella morganii
atggtgtatttatcgagtattgcggtgtgttgttcgtctgatgtgtactgcattaattccgtgaggcattcccttgctattcgtctgcgtccgttctctgcttcctgtggtgtcattggtcacctcagatttgtgatggtcacctactggaaccatgattttcatgatatccacacactttttctgctgactttctag

SEQ ID NO: 288533 - DNA, 189 bp, Morganella morganii
atgaatgataaagataaaaaagttgatatgagttcttatcatttgatgaagaacatttttgctgtcattggcctaattattagtattgggcttgtcatgggatcacttagtactaatgggattgatattggtgtaattaagtttgggtataataaattattgggtctttattttagaattgatatctaa

SEQ ID NO: 288534 - DNA, 411 bp, Morganella morganii
atgaaatttaaacttcttgttttatgtgcttctctcgctcttaccggctgtcagtcttataaagattatgttaaagctcgtcatgctgaacgtgcagaatatggtgaacttcaagttctgcccggcggtcagatcgcctactttaacaaacagcaagtgccaaatcataaatttgaaaaaccagttggatatgatgcttttaatgaaatgatttctggttcggctgaaaaagaagaacgagatatgcgtgaattaaaagaacaagctcaaaaacaaaagctcacttgttcacaacgtgctgtgatcacttatcgtattatgcaagaacaagcatacgccacaggtgattatacccaagttatgaatacaagtgtccaatcacttaagaaaatttgcgagaaacaaaaatga

SEQ ID NO: 288535 - DNA, 642 bp, Morganella morganii
atgacagtttatgcttacaccagagtatctaaggcagataatgaatatggaactaccgacaatcagatttcaataatagagtctcagctaaaaatagatcatatttattctgacattaatatttcagggtctacaccatttaataaaagaccagaagctcaaaagatggtttctctattaaaatctggcgatgtaatagtgatagcaaagttagacagaggcttcagagatacggctgattgtttgaatactatcaaatggttaaaacaaaagaatgtaacattaaagatactagacattgcattagatgtatctacacctattggtgaaatgatactcactataatggcttcggttgcaacttttgaaagaaaacgaatagcagaacgcatcaaagatggttttaactatggcaaatcagcaggtaaaaaatacggttataacaatgaaaaaataaaagctggtatattaaaaaggtcaatagaaagaaaaaaagccacgcagattcgatatgatataataaaagaacatcttaaagaaaaaatatcaaataaatcatctgaacgtatcatgcctgactatttatcttctattgacattagaatatccagaagcacattacgaaagatattaggacgttaa

SEQ ID NO: 288536 - DNA, 1680 bp, Morganella morganii
atgctttgttactcatatgttagatttagtaccccagagcaagctagaggcgatagtcatcgacgccagatggaatttgccaaaaattattgcagactgaacaacttaacattagtagaagatctcagctttaaagattttggcgttagtgcctatagaggtgataatctaaaaactggtgcactaggtaaatttctggaactagttaattcaggacatatccctactggtagcacactcattatagaaagttttgaccgtttatctcgtcagacagccataaaagcacaagcaatcttttcagatattattagcgcaggcatcacaattgtaacagctatggataatcgctcatacaatttgcagtcagtaactgataatccttttgatctcatgtatagcctaatgataatgattagagcaaatgaggaaagtgaaacaaaaagtaaaagggttaaagaagcaataaaatctaatattaaaaataagaaaatagttgctagcaagttaccttattggataaaacacaataaagagaaaaacttacttgaactaattccagaacgagcagaaatcattcagcatattatagaaaaatacctagcaggtttgggaattaataaactaactcgatacctaaatgataatattaaaccattcgctggtaaaaattggtatccaatgtatttgcaaaaattacttagatcaacatcattatatggtgaacgacaatataatattgatggtacactccatgttatggataattattatccagcaataacgactaaaaatacattcgctataatacaagagaatttaaatgctcgagcatatactagaggcggaaaaatcccatcagccatcacaggaattggtatagcacactgcggttattgccatgctgtattagtatctcaatcaacaaaaagaaaaggtaaaattgtagatggattaagaagagcaagatgcaattcaagctctaaagggactaagtgtattacaactacatttagaatatctattgttgagaatgcaatagctgaatactgtagtcagcatattgatttatcgtttctagaaccagtatctgataactcaagaacacaattagccaaatataaattagaactaagtgagttaaataaaaaaataaaaaattatgttggttttatatccaatggaaatattagcgccgcaatagcaaatgaattaagcgcatcagaaaacgaaaagaaaacaattgaaaataaaataaaagaattagacttaaatttattatcaaacaatagagaagaaataataaaaaaatggaaagaaataaaattaagcttaaactcctataatgaagaaaacattttaaaactcagggagttaatcagagcctcgataaagtatatatacgtgttccagcatggggtttggccggaaaaagaattaaaagttacaccatcaggaaaagaatactatgttcataatgatgtttttcacatacaaataacatttaaaaacggaattagaaaaatgattgaattaggcgataacatagatgatacagaagtaaatacaaataatagaacaataactaaaaatggcattttatatacatcagatgaatacaccaaaatgttagaagataaaatcagaatgaatatttcaaaaaataaaaatgacaattaa

SEQ ID NO: 288537 - DNA, 933 bp, Morganella morganii
atgcgcgtgttactagctccaatggaaggcgttcttgactctttagttagagaaattttaagtgaagtaaatgactatgacttatgtattactgaatttttacgtgttgtagatcagttacttccagttaaatccttttatcggatttgccctgaactatataataaaagttgtacactatcaggaacgttagtgcgtattcagttacttggacagtttcctgaatggttggctgaaaatgcggctagagctatagaactaggttcatatggcgtcgatttgaattgcggctgtccgtcaaaagtggtgaatggcagtggtggtggagctacattactcaaagaccctgagttaatatataaagcgactaaagcaatacgtgaggctgttcctagcgagctccctgtaacagtaaaaatacgtttaggatgggattctaatgaacaaaagtttgaaatagcagatgctgttgaacaggctggtgcaacggaacttacgattcatgggcgaacaaaagaggatggttacaaagctgaacgtattaattggcaagctatctgcgaaattcgtaaaaggttaacaattcctgttattgcaaatggcgaaatttgggattactcaagttctcaaaagtgtttagaaattacaggttgtgatgccgtaatgttaggaagaggagcattaaatattccaaacctcagccgggtagtgaaatataatgagcctaaaatggattggttgggtgtgactaagttattgaaaaaatacatacaactagaaaaacaaggagatacaggtctgtatcatgttgctcgtatcaaacaatggctaggttatttgcgtaaagagtatagtgaggcattggagctattcacagaaattagacaattaaaaacgtcaaaagaaatagcacaaatcatccaatctatatga

SEQ ID NO: 288538 - DNA, 1560 bp, Morganella morganii
gtggaaaataaaacatatatgagattaaatgcatttcttgcaaaggaaggcatcgagtatgaacatttaagtcactttataagcgagacaggctgtagtgaatatgctctaaaagaagaaagtggtattactggacgcttatttgttaaagcaccagaagagaaatcaccaacatggaaagattttttagaacttgggattagtgatgacctcgattacctgatcaataaatctagttcggcagcgttattagtagaaatatctgatagagtatttgcttatacgttcggttatgggcgattcttgctcgatcaagatttgtttatatctgattttggtataaagacggctttaaataccttagagcacgatagtttaaaaggtattgatttgtttagtatagaacgagctccaatacagaaaaaaacacaagctacagaaaattcatctatggatatgtttggggttgatatatctagggacattttgcggtctgtaacggggttgcctaaagatgatgttggatttaagttaataacgggtggggattcaatatattctttcaatatagaactaaattttaatgagttaaatgatatttcaaataaattacttaattattatgtcaatgactcatataagttacagttttcatgggtagataatattaaaaggataaaagatgatgagcttaaatccatattagatgagaaattaatatctttaatgtctagccaacagatagataatatttcagttacgataccggaggttatttcatgggataatgtctcaggtttcagtttcaccaaaagtaaaaataataaaaaaccaatgttagacatcgaggtttttgtttttgatcagaatggtgatagcacaagttattcattgtataaaagtttatgctgtgaaataagtgaaaataatcaagttaatgtattgttttctggggaatggtatgccgttgatggtgatttcatggaagatttaaatcgttcgcttgatagaataaatatatctagtttagattttccaaaagttaatgaatacattgaaggttcagaattaaaaatagaaacagagggtaattacaatacacgtgcatcagaaaattatccctactatttattggataaaaaaactatcaaaagtcgaacttcaacaacagcaatagaattatgtgatttattaacaaatgatagaaaatttattcatgtaaagcataaaaaaggtggctcagctggattaagtcatttatttgctcaaggatatgtatctgctgaagctatgttatcagatagagagtttaggaaaaaatcacgagaagtattacgaaggatatcaaataatctttctgatctagttccactagataattttaactcaaggaattatgaggttgtttatttgattttaggtgatgaaaataacgttgtgaaaggtaaattaccatttttcagtaaaattaacttatgtaaggcatatgataatttaacccaaagaggttttactgttacaatttgcggtgtaggtaaagaaagattaagtgaaaattaa

SEQ ID NO: 288539 - DNA, 213 bp, Morganella morganii
atgattcagaactttaagcttcagcgtgagaatctgaaagaactgataggaaaaactcagttcaaggagcagttctttggcgatttgaaaagtaatgccagagaacttgaagccagcctgaatgccagtagggaaagtcagcaacgattccaagcatggcgtactatggcagaaactatcgaagatgaacttaattccgagttaccggattaa

SEQ ID NO: 288540 - DNA, 228 bp, Morganella morganii
atgatgactgtcgctgaaaagataaaaacatatcgtctgagaaaggcatggtcacaggaacaactggctgaagtcgcctctctttctgtagggaccgtacagcgaactgaaaaaggccagaagccgagtctggaaacactcagtgcgattgcttcagcctttggtgtaaatcatgaagtacccgtcctaactgcgttgtgcctgtcagtgcaccactcgggtgattga

SEQ ID NO: 288541 - DNA, 408 bp, Morganella morganii
atgagatatcccatttatctacatcaggcagatgacggatcgttttccggtttcgtgccagacgtgatcggatgctactttgctggcgataccatcgatgacgcgatcagtgatgcacagaacgcgctagatacgtactttgaatatatgagtgaaaagggtaatacacctgaccgggctaagaccgttgctgatcatttaaacaatgaagattgcaccggtggaagctgggcatatgttgatatcgatttaaccaaatatgatggaaaagctacaaagctaaacatcacaatgccgcaatttttgctggcacgaatagatgactacgttaactcacatcgtgagtaccatagccgcagcggctttttagcagagttggcacggcgtgaactggcgaaacactcgtaa

SEQ ID NO: 288542 - DNA, 183 bp, Morganella morganii
atgtcaagcgatgaactaatcaaaaaaatcaaagcggtcggctgggaatttgtgcgagctaacggctcgcatcatgttttcgagaaatcaggggaacctagaccgatagtaattccgcacccgcgcaaagatatagcggtcggaacgctcaaaagcatactaaaacaagcaggtctgaaataa

SEQ ID NO: 288543 - DNA, 354 bp, Morganella morganii
atgtgggatataataacgactgagtgctttgacaaatggtttctgaatcaggaagatgcgctcagagaatcagtctatgaagctatgggggtgctggaaaggttcggcccgaaacttggcagaccctatgttgatacactcaaaggatctgatttccccaatatgaaggaattgcgcatacaacatgccggtaatcccatcagagcattctttgctttcgacccggcacgcagagctattatcttatgcgccggagacaaaacgagcataaatgaaaaacgcttttataagaatatgattaaacaagctgattccgaatatcgtaaacatcttgttgcaacacaggagaaataa

SEQ ID NO: 288544 - DNA, 300 bp, Morganella morganii
atgtctacatacaaagatctgttagctaaagaaagtcctgaaatgctagcccgtgtagcggaaagagttgaagaagccagcctcagaatagcactcagcatgctacgtgatgaactgaatatttcacaaacagagctggcggccatgatgggaataaaacagccgtctgttgcccgtatggaacagcctgataacgatcccagattatctacccttaaacgctatgtgcaggcactgggcggagaattaagtctggatgtgacactaccgactggaaaacgcatcgcatttaatatctga

SEQ ID NO: 288545 - DNA, 225 bp, Morganella morganii
atgaaggcgaatacccactgcttacggatgagcggcgggtattcattcacaacaacacagggagtgtgtgagatgaaaaaacaaaaaacagggtatctgctgttatgtctgatttcggtcgtattactggcagcgtgtcaggccagctatgtgcgggagatatccggcggcagcgtgaacaacagccagtctgtcttatccggcaatcagacaactgtaaaataa

SEQ ID NO: 288546 - DNA, 255 bp, Morganella morganii
atgggattgaaattaagattagagtggtttgataaaaaaacagaagactttattggtgaagagtattcggtagatctaggagatgacgacacagttattgaacagacagtgaagccgacagaaaatatcatcaataatggtggttttgatgtgatttctgcgtgggttccttaccttcagaaacatctgacacataaaattgagttggacaaatatacttatttcatttcatttgattaccgggataagtggtaa

SEQ ID NO: 288547 - DNA, 423 bp, Morganella morganii
atggataaaaaggtgttattagccgttttcttcagtgtcagcccgctggcgctggctgttgaaacggagtacgaccaggcagttaacgcgtatatcaattataactgtgattataatgcgaaagccttaatcaaagacggctcagcgagcccatataaaacactggtgtccgcatgtaaacagggggctgacgatatccggaaatttattacggactggccggattttggtacgaatgaaggcattatggcatttcaggatacggtggcaccgtatgccagggaggaaacggcggaaagtgcttataaacatcagatttatcagtatggtgccggttcgtgggggattggttatattcagagttcagcagccaaagccaatacggtcaaacaatggaaacaaggccagtttaaggtaaaataa

SEQ ID NO: 288548 - DNA, 2127 bp, Morganella morganii
atgaatactattctaataggttgtaaatcgccaagtgacagctttaataacacagtaaaaattcttaataacgaaggttacaatatagaatatgcagataccgaagaaaaaataatttcaagtattgaaaataatgcacgtattggtgcagtgttatttgactactacttatattctgctgaaataaccgaaaaaatttttcaattaaatgaaagtctgccactttttttactaaaaacaaaagatgttatagccgatattgatttcggctctgtttgtgaccatgctctatttatggactacagcttatattctgaccatgatatagcaaacagaatacttaaagcaatcgaagagtacatcgatgcaataatgccaccgttaactaaggcattatttaactatgttaaggaggataaatatacattttgtactccgggacacatggggggaacggcttatcaaaaatcgcctgtaggtagcctgttctatgattttttcggtgaaaacactatgaaatcagatatttcaatatctgttggcgaactgggttcattattggatcattcaggtccacatgcggaggcagaaaaatatattgcagaaacctttaatgccgatcgtagttatattgtaactaatggcacatcaactgcgaataaaattgtcgggcaattctctgtaccagcaggttgtactgctcttattgaccgaaattgtcataaatcactaactcatatgcttatgatgagtgacattgtacctatttatctgaaaccgacccgtaacgcatatggcattctggggggtattcctgaatctgaatttactcgtgagtcaatcgaaagtaaaatttcagaaacaccagaagcgcaatggccggttcatgcggtaatcactaattctacatatgatggtttattctataatacagataaaattaaaaagacattagatgttaaatctattcactttgattctgcctgggttccttatactaactttagccctatctatgaaggaaaaacaggtatgggtggcgcgaaggtagaaggcaaggttatttatgaaactcagtctacacataaattattggcagcattttctcaagcttcaatgattcatgttaagggtgatataaacgtagatacatttagtgaagcctatatgatgcaaacatcaacttctccacattatggaattgttgcatctacagaaatggctgccgcaatgatgcgtggaaacacagggaaacgattaattaatgactctttagaacgagcactaaaattccgtaaagaaattcaacaacgttataataacagtgatagctggtattttaaagtatggcaaccagaaaatattgagaaagctgagtgttgggaattagagcaaaatgctcaatggcatggttttaaaggtattgatgaaaaacacatgtatctggacccaatcaaagtaaccttgttaactcctggtttgaataaagaaggtgaattagagaaaacaggtattcctgcatcactggtatctaaatttttagatgaccgtggtattattgttgaaaaaacaggaccatataatatattagttttgtttagtattggtattgatgatactaaaacaatgagtttgatgcgaggtctgaacgaatttaaagagatgtatgacaataatgagatggttaaggatgtactgccaagtgtttatgctggctcaccaagtttctatgagggaatgcgtattcaggaattagcccagggtattcaccaattgacttgtaaacataatttaccggagttgatgtttagtgcttttgacattctgccatctttagtgatgaaacctcagcaagcattccaggcggaattgcgtggtgaaatagaggagtgctatatagaagatatggttggtaaaattaatgccaacatgatacttccatacccaccaggagttccattagtacttcccggagaaatgattacagaagacagccgtccaatcttagactttttgttaatgttatgtgagattggcgctcattaccctggatttgaaactgatatccatggtgcatatcgtcaggataatggacgttacactgtaaaaattattaagcagcaataa

SEQ ID NO: 288549 - DNA, 1320 bp, Morganella morganii
atgagtacaccgaaaaaaatagggttaatcacatgcatggctgtggttgccggcaacatgatgggaagcggtatagctcttcttcctgccagtcttgcaaagataggatcaatagcaatttggggatggattgtagcaatgattggggcaatggctttagcatatgtatatgcccgtcttgcaacaaaaaacccgcaggaaggcgggccaattgcatatgctggtgaggttgctccaatcctcggacaccaaacttcagttatgtattaccatgcaaactggataggaaaccttgcgatagcaatcacagctgttgcctattcatcatctttcttcccaattcttaatgaaccaattccggcagctattgcaagtattgcaatggtgtggttgtttacatttgtaaaccttctgggtggggcctgggttagtcgtttaacatcaataggtttaattcttgtactaattcctgttatcggtactgcgatcttcgggtggtcttggtttgatatggcaacatacaaagcaaactggattgcagatccttctggcgatagtcacaaagccataattaactcagtattactctgcttatgggcatttgttggcgttgaatctgccgctgtaagtagcgggttagtggataatccatcacgaacagttccactggcaactttaggcggaactttattagcaggaaccgtttatatccttgcatctcaggtaattgcgggtatgttccctaacgttgaggttgccagctcaggtgctcctttcgctttaagtgcttcaaaaattgttggtgattgggctataccatttgtgtcagcctttactgccattgcgtgcttaacatctcttggttcatggatgatgctggtaggacaggcaggccgcagagctgccacagatggtaattttcctaaaatttttggtgaaacagataagaatggtgtaccaaaaaaaggtcttattattgcctcagtcatgatgactatccttatggttatcctgaccattttaagtgcaagtggttctaatgcagctgatttatttactcaattaacaagtatcgctgtaatgttaacgatgttcccatatttttactcagccattaatttaattcgttttgaaggaatgacaaccaaaagcttattcagcttagtggcatcaattcttgctattttattctgcttcatcgcattagcaggagcagagcaatatcaaatcacagcaacaattattgtttccctcgctatatttgccttctatgcaagaaaattaggcaacaaacagggcaaagagcaaattgctgagtaa

SEQ ID NO: 288550 - DNA, 1497 bp, Morganella morganii
atgaatgagatatcaattgactcaacaaatgaattaaatgtgcgtcgtgaaaaattagctgctattcgtaaaaatcagccaatagcttttccaaatgattttaaaagaaaagatgtatcagttgatcttcatcataaatatgatgatacagaacaatcgtcacttgaaaaacaaaatattcatgtcgttgttgctggcagaattatgaccaagcgtattatgggaaaggcatcattcattaatattcgggataataaaggtcgtattcagatttatgtgtcacaagatattatttctgaaaatacttataatgaagtgaaaaaactagatataggcgatatagttggagtaaaggggactttatttaaaacaaaaaccggtgaattatcagttaattgtcaggaagttacactattaacaaaagctttacgtccattacctgataaatatcatggattaactgatcaagaaatgcgttatcgtcagcgttatgttgatctaattgttaatgaggagtcttacgctacgtttcagttacgttcacgtatcttagctgaaattagacgctatatggttgaacatgacttcatggaagtagaaacaccaatgatgcagctaattccaggtggagcatcagctcgtccttttataacgcatcataacgctttggatgttgatatgtatttacgtatttctccagagttatttttgaaaaggttggttgttggcggctttgagcgtgtttttgaaattaatcgtaatttccgtaatgaaggtatttcaccacgccataatccagagtttaccatgatggaactttatatggcatatgctgactacaatgatttaattgaattaactgaagatttattcagaactgtagcagttaacgtccttggttcgccaattgtcatttatggtgaagaaacatttgattttggaaaaccattcaataaactaactatgcgtgaagctattatcaaatacggcaatgatataacaatggaagatattattgattatgataaagcatccagagtagctcaaaaattgggaattactattgaatccagctggggtcttgggcgtttgcagtcagaaatattcgaagaagtggtagagcatcatttagttcaaccgacctttattactgaatatcctgctgagatatcacctttggcacgacgtagtgatgaaaacccgatgtacaccgatcgttttgagttttttattggtaaacgtgaaattggtaatggtttctctgagcttaatgatgcagaagatcaagcagagcgttttaatgaacaagtaaaagcaaaagatgctggtgatgatgaagctatgttttatgatgaagattatgttacagcattagaatatggtatgcctccaacagcagggcttggaattggaatcgatcgcatggttatgttatttaccaatagtcatacaattcgtgatgttattctattcccaacattaaaaccaattgaataa

SEQ ID NO: 288551 - DNA, 477 bp, Morganella morganii
atggttattcgtagttttgggcgacttggtcctgcatggaaaaaactaaaagcagccttagaaacacaaaataagacccaaatagttctcgattccaagcctgccccttggattgcactttatggttttattcttgaatcaggttttattttattgatgataataggaacaagccgtttaattagtggctcactttctccttctcaattcgtttttttccttgtattagcactcccaatttatcgacaattctttgatttaggattatccagtatgttgttaaattatgcacaaaaatcattacaacgcatagacgaagtaatgaaagtggttccactttctgagcccaaatatactcaattaccaataagaacagatatctattttaacaatgtaagctttgtttatccttataatagtcaattaacattagataatatatcttgctgttttcctgaaaataaaacgacatcttga

SEQ ID NO: 288552 - DNA, 357 bp, Morganella morganii
atggggcagtcagggcagcacctgcattcactgtttgcggggatagatgaagatcgacagaagacgttcacgattgaagtgaacgcccgctcaactattggtgctttggaaattttagaaaaagctattgatgatttgagaaaatgtcacctgcactttcaccctgaacattcggagtataaaaatttccagagcgtcaaagccacattccgctattcctgtgaccgcgcggaaatgagcagtattactcgtgatttcttaaccgtatcgtcgttagtgtcatacacggattatttgaaagatattcaatattggtgtcacatagcgggccagctaagagaacattccattttttaa

SEQ ID NO: 288553 - DNA, 243 bp, Morganella morganii
atgaataatgcgatgtttaaactggataaggcagaattcggactaaaaatgctgagacaaaaaaatccggaattatcaaaccaactcttgatgcaaaaacctcttcaacgcaaggactatgagtctgcgattaaaaaatggaatgttctcttagctggcccgctatgtgacaccaatattgaatatctttcaaataatccgtgtatgacactaacgacgatacggttaagaaatcacgagtaa

SEQ ID NO: 288554 - DNA, 234 bp, Morganella morganii
atgaattatgaagatctcagatcttgtattttctcatttattgaaggactcccagcaacaattaggtcaaccgaactgatcactttgttactattaataaaacctgatttcactattaccggcaacgaagatgaaaaggactttttgaatgatgcggcgaatctgctcgaacgcacgggttatgcagggataggcatgattatttttttaaaacactcatcagccgcaacatga

SEQ ID NO: 288555 - DNA, 354 bp, Morganella morganii
atgcgtatgccagacaaaattgattggtgggagcagatatttcgctggctgcaaaatgcactcccgtttattggcggtttttccttttcggcggcaatggcttatatccgggaacggaggatgggaacgcgttggggacagtcattcggtgaagccattatgtgcggcctgctgagtgtcggaacgataaggctcattgactggtggttttcccgtagcggagatgcggagtcatgggcggtgttagcggaattcagcggcgtaatgattggcttcctgggcacgaaaaaagtgtatgccttactcgagtggggtatgcgtgttgttaaaaatcgttttggagcaaaacaatga

SEQ ID NO: 288556 - DNA, 450 bp, Morganella morganii
atgatcagtctgggaaaagtgcggacgggtatcggtatcatactggttatcagcctgctgcttaccctgcatctgtacggtggcctgaaagataactacaggcggttgtcctctcagtttgctgaacaggtcgccatcaacaaagactatcaggagcgcgtgcagaagcttcatgaactcgatacgcggcacacgcaggagttaaccaatgccaaaactgaaattgataacctgcgtgatgctgttaagtctggcaacaagcgggtgtacgtccgcgctgaatgtcccaagagcggaaccgataccacctccggcatggatgatagcagacccgccaccctggcgagagacgctgaaccggattatttcgatctcctcggacagcttgaaacgttggaaaagcaataccttggtttgagggaatattactttacggaatgtaaaaagtaa

SEQ ID NO: 288557 - DNA, 1458 bp, Morganella morganii
atgtcccgtaaaaaccgccgtaacggcgcaaaacagcccgttaagactggtgacgggtataacaacctcaaggcaaagattggcacggcaacgcccaatattcagtccggcggcgtgtatatccccgggtacataacccaggaccgaaccacactggaatttgcctaccggtcatcatttcttgtgggtgctgcggtagatgccattgccgatgatatgacccggaaaggtgtcagtatcagctcaaaactcccgcccggctataaaggcagactggaggatttctgggatgaggcggcaatctgggacggactgaatgatgttatcaagtggtcgcggctctatggcggggcggtactggttatcatgattgacggtcaggatttttccactccgctgaatattgaaaccatcaaagaaggtcagtttaaaggcgttatcgcgctcgaccgctggcaactggacccgggttacagtgacccggtaacagagtacggacctgattacggaaagccgaagtattacaaggttattaccagtcagcacgggcttaagaaatggaacatccaccactcccggctgatccggatggacggtgacagcctgccgtatcagcagtcactgacggagaacggctggggaatgtcggttgtggagcgtatttttgagcgtatccaggcattcgatacagccaccgtcggcacctcgcagctgatccacaaggcgcatctgcgcacctacagtattgaaaaactgagagagatactggcaaaaggcggagatgttgaaaaagcactgatgaagcacctggatatgatccgcgagtttcagaccatcgaagggatgaccatcatggattccaaggatgagttttccactcacagctattcgttcgccggtattgctgatgtcattctccgctttgctgaacaggtatccggtgcgaccggtattccgctggtgcgcctgttcggtcagtcgccgtccggattcagtaccggtgacggggatctggaaaactattacagccgggttaactcgtcacaggcgcgtaaactgcgccgccatatccggcgtctgatggatatctcctggcgctcgttgttcggtaagccgctgcctgatgatttcacctttgtgtttaacaagctgtgggaaatgtcagacacggaccggtcaacgatggcaaacaatacggcctctgcgctgtccacgctggtggaacggggaataatgccggttcatgccgccatgaatgacctgcgcaacctgtcagatgtgacagggatcggcgggtcgataacggacaaggatattgaggatgcgaagagcgagtgggagacggatgaatttgagaccggccctgcgccgtcgatcggaaattcagtaccagaaaagcctgtcggcgatagcctcccgggtaaacgaaatcgtcactggctcttacgatggttctga

SEQ ID NO: 288558 - DNA, 591 bp, Morganella morganii
atgctgacggattactccggtgcgctggatgactggtcggcgctggtggccaacaaaatgtttctgcaggtggagcgtgaagagtggaaccagtggaaatcagtctcggagaaaatatcagaagggttgcgtgacgttatcgggaatacgccggtcggtcaggtaacgcaggatattgtgtaccggcagatccagctgatgaaatctctgccactggaagcggcggagcggatcagggcgattcagagccgggctatgcaggcggttgccggtggtgagcgtcccgatgcgctgtatcagatgatcatggaatccgggaatgtggcggcaggccgggcgcggatgatagcgcggactgaaataggacgggctaccggtgcgctgacccaggcacgggcattatccatcggttcggaagggtactggtggcgcactgaaggatccggaacccggccatcacacaaaaagatgcgggataaattcgtgtactggcacaatccgccgacactggacggattaaccggtcatgccggatgcctccctaattgccggtgctggcaggatgtacacgttccggcagccagaacataa

SEQ ID NO: 288559 - DNA, 1911 bp, Morganella morganii
atgatacgcatcaatttcattgatacggatgaatggattacggttcatccaaacggaaaaaataataaaggctcacccgtactactgggaaagaatggtgagattaaaggcggaatgggcgggagttttaacggaaaaaagataaatgaaatatcaggaagatcaccggcacccaaaaacaatgaaatgcctgaattagaaaaatataaatcgtcactggccccactggatcatggtgttctgtccatgcctaaccggacaaaaaacatcaaccgggatcttgataaatataaaaatgaacaaaaacaaaagataaagcgagagcttgaagatcgtaagtttttatatcaggaagaacaagacaaaaagaaacaagcattgagttccggtatgagtgaagaagaccgtaacgtgtttcgtaaagagttaacagacaagctggcaaaacggttaagagaatcggagggattaagttcaggggtagcgagagagcaggccaggactgaaattaaccatctgtttaacagcaagccagagaagatattagccgcatggaatcatagtcggcaacttgatgccaagaacaccaaagacagcatgccgtatatacagccggcaatcaactcaggtcataccatgtccacgaaatattactttaccacccggctgggggaaacccgctatcagcttccggatggctcactgctgtgtaaaaacgtccctattgcgcggacgggcatgcaggaatactggccggaagagattgatctggaggccgggccgtcaggaacggtcattgtgtatcgtactgcggaagaggttttctctgaggaaacgatagccagctttgaaggggctgcggtcacgctggggcacccggaggacagtgacggaaacattgtcttcgtcaatccgtcgaactatgcacaactggcccacgggcacatacagaacgtcaggcgtggcaccggagagcagtcagacctgcttatcgccgatgtgctggtgaagcggcaggaggcgattgatgccattaaccggggactgacggaggtcagttgcggttatgacgcgctctacgaacaaatctcccccggtaaggggaagcaataccaaatcacgggaaaccatctggcggtcggtatcgaaaagggccgggccggtgaccgttgttctatcggggattcagccccaatcaccaaaagaaaggagaagcctgctatgtcatggctcgacaagttgcgtaatgcaatcagaaccaaagatgaagccgctgtacagcagctcattgatgaagcacctgagatgccgtctgacgggctgagttcagttcccgggcataccatcaacattaacgtcccggcgcaggcgacagcactgcctgcggagaaccggacgactaccggtgacgaaaaagagccggaaacaccgaccggcgacgatggtgccccggagtgggtgaaagccattcttgcccgtctggataagctggaaggtaagaccgcggattctgagccgggtgacggcactcagatcggagatgaagatacggaagaagataaaaaggtgaccggggatgccgcataccggcagcgcattatttctgatgcggaaattatctgtcccggctttaaaccaaccggtgacaaaggtctgaagcgtcaggtgctggctcacgctatgcgtaccggcgacagcctgtcagcgtttggtgtccgtgatttctgtaccgcaccgaagtcaacggtggatgcggtatttaacgcagcagtggcgctgaacaccgcccggaatcatatcgctccgcagaatcgcggcatatcaaccacagacagctcacgcagcaccaaaggcatgtcaccggcagaactgaacaagatgtacgccgatcactggaataaacataaataa

SEQ ID NO: 288560 - DNA, 504 bp, Morganella morganii
atggcaggaacagcatatttaacccggatgccgatgggcatcaccgggggcattacccgtccccgcgaatccaccgttgaggcggtgacgctcgacaataaaaaaccgttcaccggttacggcctgccgggtaagtatctggcggataagtttgtgccgctggaggacggggacaccattgagcaggtaaaaggcatcctggtacgcccgtatccgatcacctctctcaatgatctggcacatctcggggtggcagctaatcaggtggctgacaacctgaagcgcggctatatctgcgtcacagttaccggcggtaatgcggtaaacgcgaaaaaaggtgccctggtctatgtccgcgtagctggtggcacagaaaaaagtcctgtcggcacgttcgtgctgacggcggatgcaaccgctgaaaacacgcctcagttaccgggtgccgaagtgactggcccgggtgaagctgacggtcgtattgaaatcgcttacaacatctga

SEQ ID NO: 288561 - DNA, 948 bp, Morganella morganii
atgtttaccattgataaagcaaccattgattccgccggcacattcctgatcggtgaactggagcgcatggatcagacactgaacatgccgctgacgtccatcaaatggacacgggatatgccgctgcgcagtgatatctctattgctgatgaagtgtcatcgttcaccaacaccgatttcgccagtgtcggcggtccgaacccgaacggtaaaaactggatggggaaaaagggcaccgccattgccggtattgagctgaatattgacccgacccgaaacaacctgacaccgtgggcacaggaagtcggctggacggtactggaactggcatccgcgcaaaaagtcggccgtccgattgatacccagaaatatgaagggatgcgcctcaagtggaatatggatactgacgagcaggtttatatcggcgataaagagctgggtgtcccggggctgcttaatcttcctgacgttattccggttgcagcggcggctgcctggactgcaacaacggatccggatgtgattgtgcaggatattaacatggtgctgagcgacggctgggttcgttccggttacgcggtctgtcctggtaaaatcggtctggcaccggaactgttcggcctgctggcaagtaagaaaatctcttctgccggtaatatctctgttctggaatacgtgaaaattaacaccattgcattccaggaaaacggtgaaccgctggaaattgtttccatgaaattcgcgtcaaaacgcggggcgggtggtgcgcatcgaatcgttgcctatacccaggatgaaaaatacgtccgcttcccgatggtaccgctgctgaatactccgctggaatatcgcggcatgcagcagctgaccgtgtattacggcaagctgggtcaggtggaaacaccgtattccaacaccatttcttatctggatatccctgctgcctga

SEQ ID NO: 288562 - DNA, 366 bp, Morganella morganii
atgaaatacattgtttcacagggcgcgacactcagcctgcctgacggcacccggtttgaactgacgaccggcattcatgacagtacggattttccggttctggtaacggaacactgggcgttcccgtcctatgcccgtccgctggatgaggccgatatccagaaagaaaaagacagccgggatatgtcggcaaaagtcatcacactggaggccgaactgactgagctgaaagccgtgctgacagagaaagacggtgtgatcgacggcctgaataccgaactgacagagctgaaagccgcgctggcaaaacaggataaaaaacagggggctggtgatggcaaaaaacagtcttcttccgacagctga

SEQ ID NO: 288563 - DNA, 411 bp, Morganella morganii
atggcaaaaaacagtcttcttccgacagctgagaaattccgcgctgactttcctgagttttctgatacctcccgttaccccgattcgaccatctgtttttatctcggtcttgccgatacggcattagaccaggataagcacggcgatcagtttatctatctgtctgagttgttcacggcccactatgttgagctgcgcggcaaagcacttgccgtggcgtctgtcagtggtgcggtgaacagttccggcggcggggtgctgtcgtcaaagtcggttgataaagtctccgcatcttatgacacctccgggattgtgaatcccgatgccggattctggaacgacaccgggtacggccgggaattttactggtggtggtcgatgtttggtgcaggcgggagacaattgttatga

SEQ ID NO: 288564 - DNA, 507 bp, Morganella morganii
atgagcggcgtaaaggtcacgcgggataacctgcctgcactcagtaaggctctgaagcggctttcagggctggatgtgctggtggggattccggcggacaaagcgcagcgtgatgacggagggcatctgaataacgcggagcttggctatatccattccaccgggggaatggtcagcatcggcggggaagtggtgacactgccccccagaccctttcttgatatggggatcgaagatacgcagagcgtcaccaccgatcacctgaaagcggcggctgactttgccctgtccggtcagtttgaggcggcagagcgtgaaatggaacgggccggtatggttgcgtccaacggtgcgaaaaaggttatcggggacggtgaccggctggaaccgctgtcggataaggctgaggctgtccggcgcagtaatggcaaggacattaaaccgttgtacgacaccggaggcctgctgcgatcaatcacctatgtggtgagaaacaagggggaataa

SEQ ID NO: 288565 - DNA, 387 bp, Morganella morganii
atgccttttctcgatgtcagtgacattttgtcagatccggattttgtagatgcttccctgtattaccaccggaacaaacaagttaccgatgatgacgggttcagtataaatatatcagaagagattcgattctacggagttgtcacagtcgaccgatcactggaagcacggcgcatggaagcggggcaggctatcagcggagctattctcattgtgactaactgccgccttactcagggggatgaacagcacgatgcagatgtggtgatttatcaggggcggcaataccgcgtcacgtttgttgatccgtacacggcttacggtgccggatttattcaggcgcactgtgagctggtggattttaacggaggacaacccgttgagtaa

SEQ ID NO: 288566 - DNA, 546 bp, Morganella morganii
ttgagtaatgacagtaatcatccgggatatctgactcccgccggtccgcctgctgattatgacgaagaactggaacggcagatcagccggtggatacggttcgtgtccggacttccgccgaaaatggtattgccccgttttactcaaacacaacccaaaattccggaggctggcactgactggtgcgggttcgggatcacggattttcaggatgaacacagcccggcacaggttcagtccggtgatcagcatcatgagcagtggacgcatgaacggattgaaatcctgtgctgtttttatggccttaacggtcagcggtttgccgcccggtttcgtgacggaatgatggtcagccagaacaatgacgaactgtcacgcgccgggctgacattcactgaacacagccggatccgtccggccccggaatttatcaataatcagtgggtgagacgctacgacatcaccgtaacactgcgccgtaaggtcgtgcgtgagtacggcatcaaaacgtttaccaacgcctctgtcacttttttcggagaataa

SEQ ID NO: 288567 - DNA, 306 bp, Morganella morganii
atggctgacattacggaaatacccttatctccacagaatcagcggtttagcattcgtcttggtggcagaaattaccgaatccgtctggtataccgtcagttttgcgggtgggttgcggatatgatggatcaggccggggccgatatttttacaggggtcccgctggtgagcggaacggatatcctggagccttaccggtatatggggtttaacggttcactgatctttgtctgtgatgaaacagccggggaattatctctcagcgaatttggccggaaaaacaggctctattttcgtgcgggctga

SEQ ID NO: 288568 - DNA, 1014 bp, Morganella morganii
atggctaaaaatgattttcttcctttcggtatatccgaaggtgcaaacgtgctctcaaatcaggaatatgaaagcctggtcgccagacataacgggttcacgagtggcgtggccaaatccaaagaactgaacaaagtctggcggcagtcgtcagtattcaccgcgatcctggctcagtttattgttgatactgatggtgaagatctcccggatgacggcaatctgcctgccgtaaaagtccgcctggtttcagcactgaaagaggcgttcagaggtgaaatgccggcggtaccaaaaaccgttcagacaaccggtgaatcaacggaagacgtgatgagccagaaagccgtcacagatgcgattaataatatcaaaatcccggaagtcagtgacgcaacgaccggcagaaagggggttgtgcagcttgatgacgagatcagtgattcagacacgaaagtgccgccgtcgaaactgatcaaagccgcgctggcagataaaccatcgacagcgtcaatgacgctggagctgaacaagaaagtcaacaagtcggatgtatccgaccagctcgggaatgataaaagcaaagtcccgtcgctggatctactgactaccgaactcggtaaaaaagccgcagcaggcagcagctattcaaaagcagaatctgataacaaatatcagccgaaagggaattatgcattaaaatctgatttagatgcatatcagaaaaaaacattattagtcagtgggatcaaacaaatctataacggtaccgccttaaacaaaggcagttcctttactgtcaatgaggatttgcgcggcagaatgctgtatttacaaaactcaatggacaggggatttactcctatcgtgatcccccaagacaacatgactatttcatctgtagtgacatcagattcctggtatgagatcagactgactaataacggcaggacatttaatgttgcaagtaggaatggtggtgtgatggcaaccatggtttttgtttctgtatga

SEQ ID NO: 288569 - DNA, 519 bp, Morganella morganii
atgtacagcagtgacgatataaaaaaattagtgcttgcggattttgcaagatactgcaacaaactaactttttattcattttatcggacattcaaaaaaaatgagtcatttaattttttattctggtttaggttgagcaaccacaaaaacagaataatacgaaaactatcacggttcttttataagcggaaatgcaggcaatttaatatattccttccggttgagacatctatcggtggcggtttgtatatcggacatataactgttggcgggatctgcattaatccaacagccattatcggtagcaatgttaatataagccatcacctaactataggatctaacaaaggaaaggctgcgattattggtaataacgtatatattgcacctcacgtgtgtatcgttgaagctgtatctatcggacataatgttaaaataggggcaggtgcagttgtattgtctgatattgctgacaattccaccgccgttggtgtgcctgccagaacagtaataaaatag

SEQ ID NO: 288570 - DNA, 411 bp, Morganella morganii
atgttataccctgttgctattgataaaagcgattcatccttcggtgtgcgcgtccctgatattcccggttgtttttccggcggggatgactatcaggatgcaattgagagcgtgcgcgaagcaattgaagcgcatatagagctattggttgaagatggtgagactgtgccggaagcaacaacggttgaaaactggattaatgataccgaatatgcgggtgcagtttgggcgttggttgatatcgatattacccggttgatggggaaagcagaaaaaatcaatgtaacgctgccttcattacttatccgcaggattgatcagtttgttgctaatcatcccgaatatggtagccgttctggttttcttgcccgggtagccgctgataaagtgatcgcccgagaaaaaagataa

SEQ ID NO: 288571 - DNA, 285 bp, Morganella morganii
atgctccgtattgaagttattttcagcagcaaccaaaaagagataataccacccggtacatttgaggcactggaaaaagaaattgatcgaaagtttcgggctcagtatcaggatatgaacgttcgtattgcgtggggaaccaatgcaacgatgtcagtaacgggcgggaaaaatgataaggacaataaaaaaataaaagagatactgcaggagattttcgaagacggcagctgggtaccggaaatggcagacgcttctgatgatgtagaatattttgataagtag

SEQ ID NO: 288572 - DNA, 456 bp, Morganella morganii
atgcgcagattgacacaggtatgtaacgcagtgctgttgatgaccggacttttagcggtgccggtatcgtcttatgcggaccgggatcatgataaaagacacggtcaccggtatgagcataatcacggtcattataagcacagagataatcaggatgatcagggagaccactattatcgcaagtacagaaagggtctgagttacgcacaggcacgcaggctggcgtcagacagcggattacccggatatcacgcgctgccgccgggaatagcgaaaaaccttgccagaggaaaaccactccctccgggcattgcaaaacgcgcagtacctgcccatatgcgtgaccgactgccgcattatccgggctatgagtggaaaatagccggtgacgatttagtgcttattgcactgagtaccgcggtggtgacctacattattaatgatgtttttgagtag

SEQ ID NO: 288573 - DNA, 1137 bp, Morganella morganii
atgccacagattattaataccaacgccatgagcctggtggctcagaataacctgaacaaatcacaggctgctctgggtactgctatcgaacgtctttcttccggtctgcgtatcaacagcgcaaaagatgatgctgcgggtcaggcgatcagtaaccgtttcaccgctaacattaatggtctgactcaggcatcccgtaacgcaaacgacggtatctccctggcgcagacgactgaaggcgcactgaacgaaatcaacgataacctgcagaacatccgtcgtttaagcgttcaggcagccaacggtactaactccgaatctgaccgtcagtctatccaggacgaaatcgaccagcgtctggctgaaatcaaccgtgtttctcagcagactgaattcaacggcatcaaagtgctgagcaaagatcagacgctgagcatccaggttggtgcgaacgatggccagactatcgatatcaacttaggcaagatcgacaccgcaacactgggcctggaaggcttcagcatcatgaatatggtggcgacatctgaggttactgaaggaatgcagattgttggtggtgctgctggtgctgacaagcatatattgtctgcacaagatattgataatcttgaagataagctgttcggtgcgaataaaggtgatgcaggcaataagatgtatgcttacactggcgcggatggtaatactgcatttattggtgttgataaagatggtacctggaaaacgagtgtagccactgttaaagcagaggtaccagctgttccggggccggccgctccttcagaagttagctttggggctgcaactgctgtagatgcaaaaacagacccggtagttaaaagtctgacaaccctgcagaccatggacgatgcattagcacaggttgatgccatgcgttcaggtctgggtgcttcccagaaccgctttaactctgttatcagcaacctggataacaccgttatcaacctgtctgaatcccgtgcccgtatcctggatgcagacttcgcggtagaagtatctaacatgagccgtgcgaacatcctgcagtcagcgggtaccactgttctggcacaggcaaaccaggttccgcagaacgttctgactctgctgcgttaa

SEQ ID NO: 288574 - DNA, 1047 bp, Morganella morganii
atgtttattctgccttgtgaacacttaccgcacgccgcgacctggatggcgtttggtgcagacccgtccatctggtctgtctctttagcagaaaaagtctgtcgtaatcaggcagcccttgcgctggcaattgcccgctttgagccggtaaatctgctggttacccgcaaaaataaaaaagcagcacaacaactgatgggtgacactgtcacttatattgagtgcccgctcgatgatatctggctgcgcgacagtggcgcaaactttgtgtatgacaccgcaacaaaacgcccttctgctgtcagttttaattttaacggctggggcaaaaaacagcctgtaaaacgggatgccggggtcgctgcggtgatggcagaatacaccggattgccacttcatgtcagtccgctgacactggagggcggagccattgaggttaacggaagcggtaccggtatttttacccgcagtgccattctcaatgataaccgcaatccgggtgtcagccgtcagcaggcagaacagcggttggcgcacgatctcggactgaaaactattatctggctgaatggtatccgtaatcatgatattactgatgcacatattgatttttatgcccggtttgtcagtgaaaaatcactggttatcgtgatggaaaacaatccgcagtcatttgagtatgaagtcacccgcgatcacgccgcttctttgtatgccgtgaagcaacatactaatctgattgatgagattcatatcctcagtaatccgctcactacacgggttgaccggatgaaatcgcctgattttgctgccggttacatcaattattacccctgcaacggcggtattattgtgccggagttcggtgacagcgccgcagatgaacacgcggcacagttgctggcatcgttgtatcccgggcgaaccgtggttcaggtaaacattgatgcgattgcgtccggcggcggcggtatccattgtgtgaccatgcagcagccggattttacttcctttaatacagacggacggacatatgacacaaattaa

SEQ ID NO: 288575 - DNA, 492 bp, Morganella morganii
atgtcagaaatacaatccggcaccggactccatttcctctgcggcaaaatcgcctcagggaaatcgacactggcgcaacagttagtccgcgaaacacaggcagtcctgttgtctgaggacacctggctggcaacactttacccggggaaaattttacagctgacggattacattgaaaaaagccgtcttctgaagtccgtcctggagccgcatctggtgacattattacagaaaggaatgactctggtgctggattttccggcgaatacccccgtgcagcgccggtggctgaaagggctggcagagcaggccgggtgccgctattgctgttatgttctggatgtcagtgatgaagagtgcaaacggcggctgaccgcacggaatctgagcggggaaaacccatttaccacctcagcggagcactttaacctgatcacggcgcacttcagttatccgtcagaagaggaagaactggtcatcagcggccggtga

SEQ ID NO: 288576 - DNA, 144 bp, Morganella morganii
atgagcaaatttgcccttatggggctgattgctgtgtgtatcacagttctgtgcttttcgttgttaatgcgtgatcgtttatgttcactaaattttagcaatgggggtacagtaggtgtaaatttattttattcctggtcctga

SEQ ID NO: 288577 - DNA, 954 bp, Morganella morganii
atgggggagttagtttcgcgtgacaccgtaataagtgttcccgatgtcaataacatcacgaaaaataccagtaatccagccacgagctacttgttaagattgcgatctaaacaaagccaaaaaacaatgcgttcatgcctgagctcggtggtgaaaatgtttcgtgctgtggacccgtttacttttgattggtctgtcatggatcgggattcagtccagttggtgcttcagaagttaatactggagaaaaagacccctaatagcatcaacctgatcctgagtgcgattaaaggggtggctgaagaagccagagcatcacgagtcatagacagtgatacctatcaggatattagaagcatacggcgtattcggggcaatcgggttggtcgggggcgctcactgaatcgtagcgaaataattgctatttatcagtaccttgatagcctaaacaccgcagcctctatacgtgatgcggcgatagtttcgataatgctgggctgtggtttacggcgtgcagaagtgactttattagatattgaagatattaattttgataattatgccgtgaaaatcatggggaaggggaataaagaaagaaccaattttatgccaaatgacactctacggcgtacccgcttatggatagaaaccgtcagaggtgatcatgctggtgcagttttcacccgtatacgtaaaaatgaagatgtgacatgcgatagaataaccactgatggtttacgctatattattgaaaaattggtaaaaaattcaaattcagcgtcatttacaccccacgactgccgccgaacctatggaacgaaactattagagctcggcgaggacctgttaactgtcagggaagctatggggcacagtagtgttgctactacacagcgatatgataaacgaggtgtaacgcgcttagaagctgctgcacgtaatcttcaatactga

SEQ ID NO: 288578 - DNA, 210 bp, Morganella morganii
atgcggattccggggataacccagcaggtggcggcgatgtccacctttgccaatgcttttcttctgaatgccctgataaccgaaacagtaaatctgctggcacagcaaggtattgaaccgccaatctggaaaagcggcaatgccaccggcggcgatgactggaatcagcagtttattgatcgcttccggcaccgcatccgtttattgtga

SEQ ID NO: 288579 - DNA, 897 bp, Morganella morganii
atgagcaaaaagaatcttttattggccacgcgacttgcggatattttgctacgttttaaccgtggtgagactttaacgctcagcgctttggcggaagaatatggcgtacatcagcgcaccatccgtcgtgatatagaggaacggctcacagttgcggggatagaaaaagatgcaaaactaaactcctactctctgaggccggagtatcttggcaagtttgatgcttcaagcattgatacttttgctaaagtggccggagtgaaagggctgtttcccgtgatggacagaaaaatgttacagtccatattttactcggaaacagctcagaatatcttggtaagaggccatcactatattaagaatgaacatcaaactgagaactttgtgcgtctgcagcaggcgattgatgagcgccgcagggtatcgtttagcttctataaaagcgctgagctgcaaagctatactgtagaaccttatcagttgattaaccataacggcatctggtatctcgccgctcaacatcaaaaaaaaatgaagaaatttacgctcggtaaaatctcagcgctcaactgtagctttgatctctttgagcactcaactgatttacttaaagagttagaaaatgaagagagcgtgtggagcgatgagcagaaatttgaagtggtaattaaggtgaccaacgttgtggctgaatattttcagcgccgcgatctgatagtcggacaagttatcgaaaaagaattaattgacggcggattaattatctccagtaaagtttcacataagaatgagattttacccgtagtgcaatattggcttcctcatttacgaattatttctcctgaaaatttgcagcaggaattggaagctaagatgaaaaaatatctgggtatataa

SEQ ID NO: 288580 - DNA, 975 bp, Morganella morganii
atggtaggcgcaaaaagtggtaaaaataaatttaccaaacaaatattaaaggtggctgagcattacaatgtgattgtcgcagcaacgatgagtgcgggaaaaacctccttaattaacgcgctgctgggtgatgaagttctttattcagccaatgaagctgccaccgcaacattgacgcgtattactcataaccgaaatttacgccagcgcattgaaggtgcgagctacacccggccgggcgaatgctatgaacgtagtaagaatgtgcaagcttcaaccctgcggcagtggaacgaccatcaggcagtgaagtatatcgagctgaattgcagcattgagaacctgcgtaaaacagtaacgcctctggttatttacgatactccggggccgaacaatagccaagataccagccatagagctctgctggatacggcgctgatgttaccgggtaaaaaactgttggtctacgtgctcaatgcaacccaactggcgacacaagatgacttacagctacttcagaagattaaaaatagtccggccctgatttcagggaaccaaattatttttatcctcaataaggtggatcagctcgatgaagagcggggtgaaacgatcgatgttttccttgaaaaaacccggaactatttggaggaaatgggattttcacggccgatgattatcccggcgatgatgcaaacgtccttaatagctaaaaaagttctcaatcgcaaaagtattacccgaaatcaaaaacatcgcttacaggctgagctgcaacgatttaggcagaataaatttatcctcaatgatgcatctcacgtacctcacgctattaagcacctggttcgtactgaattaaaaagaagtcagactgaaaatgcccggtccgatattttcgataaaacggagctgaaacagtttatcgcttatagcggtatacgtaccctggaaatttttctttcacaacacaactaa

SEQ ID NO: 288581 - DNA, 2259 bp, Morganella morganii
atgaacagtatttatctggaacataacccctttaccgttgaatcaacattcctggttaacggcgtagaacccgcttcgggatgtaaactttccagctataaagaagcgcgtttacagctctgggtggaatcactctttgccgagttacaggcgttgttaaacggcgaaacaaagctcgatgttgagttcaaaggcgttgaatctgattttatggacgtgcaggaagccgccgctgtagccagggaaaatggtatggaaatcaatttgcgttggcagcaggtgcgggcgacggaggaccgcctggatgagattaatgcgctgatggaagaggcgaaactcaacccacagttcaatgactacatcattaacaacgaacaggtacgcaacgatttccgggaagcttttaacaacgattttaacgtatacgtggttgcgaccatgtcttcaggcaaatcaacgttaatcaatgccatgcttggacaggagctgctacctgcagcgaacgaagcaaccacggcgactattgcgcaaataatagatgataaaactacgggaaataattttgctgcccgccgtttttccggctgtggcgaggaagaatcgctggctgagattaatgctgatacgctcaaaaagtggaaccagctgccggatactcaggaaatcgagctgcgtggcaatattgttgcgatgcaaccacgcgaccatgttcgtctggtgctaaccgacacaccggggccaaacaatagtcaggatgcggaccacgcgctgaaaacgatgagttttatcaaagactccagacgtaatccgttgatcctctatgtattaaatggtactcagctaagcaccgacgatgataaaagattactgagcctggtttcggaaacaatgaaaaaaggtggtaagcaaagcaaggatcgctttatttttgtggtgaataaaatggacgccttcgacccggaaaaaggcgagtatgtaggtgccgcacttgagagggttaaagaatatcttgagaataatggcattattaatccgcaaatttacccggtctcagcacagttaacttacttgctgcgtaaacatcctgacgatctgacccgcaaagaacgcggcgatttaaacagtatgacagagctgtttctcgaagaacccacaatgaatttcccggaatatatgccgcttacctcacgcgtacgccgcagtcttgaagaacgaggcctgaccaatgtacttaagcacagcgggctgccagccgtggaagtcatgattgatgagtatatcgataagtataacgtccccacacgtctgaatcgtgcctatgccgccctgcgtcgtgcaatcgagttgggtatgaaagaaactcatcttgcagaacaacttaaaaaagatgagaaagagctggcgatgattaatgatgaaattattcttcttcaggaaagacataaaaaagggttggacaccgaagcgtataaggaacaggttcgccgtgaagggaaggggcttccggtatttattgccgagaaattcactcatgaagataagaagttccgacgcctgttaaaggaattgtctaatgaaattagtgcccagggagaggtggatataaaccgtgcaaaaatcgaattagaaaacgctgaacgaaagctgacctttgcaagtaacgatctgattagtaattttgaaatcgccttcacagatgggcagcagtatattaaagaggaactgcaaaaagagtatcagaaatttatcgccgagatatttgatgaagcccgcacgctggctttgcctatgctgcaaggccttaaagaaagtatgcaggatatgtcactcaacctgagcctcaacgatagtgatattaagactaaagaggagcgctctaacggtcgcgaggtcagcgattcccgctggtataaccctttctcatgggggagtacacgtaccgtgtacgattatcacaccgtccaatacgtcgatatgaatgaaacctggaaagaaaaacgcactattattgaaagtgagtttaatgacttcagggccagtgcactgaaaaaatttgaggccgataaagataagctggtgaaaaattatctggcctttattgaacgtgagtttaatgagaagtttgaaactttaattggaatgatgcaagagcagctaaataataaagaggttcgggagcaggctatctcagaggcgagagagcagcagtgttggattgttgattttaaagcaaaacttgataacacactggctatttaa

SEQ ID NO: 288582 - DNA, 852 bp, Morganella morganii
atggacgataaaactaaaaaaaagcaaaccctgcgccagaatttattggaacaattaacccgtaatgatctggaaggcgatgaaatacgcaagcttgtcgcctcctgctccaatattgctgatttttttgatgactaccgggtcaacgagattttcgctgccatagagccggatgaacttgactggaacgccgggtatttcgaccgccaacgcaagctggcgcagaacaacttcgccgaaatgcgtatcaatcatcttattgatgttcgtgagcatcttatccgcaatggtattgccgggtttgcaaaagcatctgtaaccgggcacaccgagggaacgaaaacaatgaatatgcaaggctatttacccggtactaatctggcaaaaatggttgaacaaggcgttcccggtatggtgcgttcggccttaatcaatgagcttgaaaacaaccggctggaagataatgaaatcattaaggccgtcgtctgggctcaagatcggattaccaatttatttgtagattacgaagaaaactctctggccggaaaaatgaataatgaccctgcccaatgggatgctgattactacgacttgcagacatcttatctgaatagcaattttgccaaagcacgttttgagcacttaattgaggtgcgtaatgtgctgcgcatgcgtggggtgaaaggctttgagcgcataaccatcaagccaaaacctcaaccccaccaggccagggcggcttcccgcccgcactctggttcatcttcctctccgtctggctttttgcgcatagcggtgatggctggcggggcccttgcggttctggctgcgctagtgatttctttactctaa

SEQ ID NO: 288583 - DNA, 3252 bp, Morganella morganii
atgtcgcaaaaaatcatgacaccgtcacgtcttaaagacctcgagcagcgcacagatgtgaccttgcaatcggcaagagtgcttatcaaccgcagttatctggcggagatgaaaaactatcccttgcaggccgtatctactcaggcagggctgcccgtcaaccgtgccggggatatccgtatattccgcattgagcgcatcgtgcaggaaaacaaacagtcggtgcttgaaagcaccaccgctgcttatactgcactgggcgcagccggttatgctgtttttctgttccttaagtccgatggacgcgaaaccaatttgtacataggtacacgtggtacaccgggaaagatgctgggccataattctggtgagctgctcaaagaaacctttaaaggacatttttccggtagtagcctggtgccgctggcagcagatgaaaccgacgaacttcttgagggggcgctggcgcagcaggatgagccttctgcaaccatcaccgccgttaccggcgtgccgtctttgtccacggataatcatgaacactttatgcagggactggaacattttatcgacgctgcggaaagcagggtgtatcaggctctgattctcgcggaaccggtttcaccgcaaaatctggacgtgattcgcacaggttacgaacaggtcgcgacccagctttccagtctggcaaaaaggcagtactcgttcggcgtacaggacagtgaaagcgtaggcttgagcatcagcgaaggattaagtcagtcactgggcgaaagcctgggcatgaccgaaactaaaggcacctcggacactaccggtaaatcgaccagtaaaagttggggagaatcgcaaaccgtcagcacgtccgatgctttcacacgcacctatgatgaatatcaccaggctcgaactaagggcgatagcatggggatagctcgcggtatcggcagtctgctgaaaaatgcagtgttaccaagaaatatttctggcagcataaatagcggaggatcggaaagtctttcggaaagccataccgacaacctgtcgcaagccagtagtataacgacaagtaaaaccgatactaccagccgcaccgacagccactcgctgaataaaacgcagggaagcaaccagcaaatctcactggaagtaagcgacaagactatcgaaaagatgttggaaaaagttgaccaccacctggagcgcgttaacgaagcccgtacctacggcggttggcaaacagcagcctactttatcggtgacagcgcagcctcatctgaatccttagcgagcattttcctcgggctgatgcgcggtagtcgctccagtacggaagattttgctttgacaacctggcagtctcaaaataaaagggtggtacttgactggctggctacgctgacgcatccgcgtcttactccagccttctctgaaggaataaatattgattacctgacacccgccacgctggtatcgggtaaagaaatggctattcagcttagtctgccgcgccgttcaacctccactgtggcagttcttcagaccagggctttcggtcgtaaagttcagcgtctcgacagcaatggagatagaacacatgccgatcgcgaaatcagccttggttctatacgccacttgtggaatgatctgccacaaaccatcaatctggacgttgaccaactggcgagtcatatttttgtcacaggctcaacaggggcaggtaaaagcaataccatttatgagcttctttcccaactaggccgccataatgtggcgtttatggttattgaaccggcaaaaggtgagtacaaacatatgtttggtcaccgtaacgacgtccgggtactgggcagtaatgcgaaatacagtgagctgttgcgtatcaatcccttccgcttcccggatgagacacacgtccttgaacacatagatcggctggtggagatctttaccatgtgctggccgatgtatgccgcaatgcccgccatccttaaagaggctattctgcaaagctacagtgaatgcggttgggacatagtcagctctgttaaccgtttcaccccggccttgttcccgacgttcaacgatctgctggtgcagctgaaagccgtgatcgatgattccgcctactcccaggagcttaaaagtaattataccggctcgctggtgacacgcgtgaaatcattgaccaatgggctgaacgggctgattttctgcggcgaagaaattgataacacagagctgttcgacagtaatgtggttgtcgatctcagtcgtattggttctcaggaaacaaaatccctgattatgggaatcctggtcatccgcctgagtgaacatcgtgctgctttttcaggcatgaatcagccgctaaaacacgtcaccgtgctggaagaggctcacaatatcctcaagcgcagcacctccggcagcggtggggaagggaatgatattacgggaaaatcggtggacatgctctccaacgcaattgccgaaatgcgtacgtggggagaaggatttatcattgctgaccagtcaccttatgccgttgatatttcagcaattcgtaatacaaatacaaaaattataatgcgtctgccggatgaagctgaccggcgtatcgcggggaaatctgctggattaaacgacgatcagctggatgagcttgcgcgcctgccaaaaggagtagcactggtttaccagaacgactggcttgagcctgtactgtgccgggttaataagtttgcagggaaagaagtgacctaccgctacgaatctgcagtgagtacggacaaccccctgatttttaaccagcaactaattgcctggctgatggcttcgcgcctgcgacagccgctggcaatctcgctggagacgctggaggccgggctggaaggcagcccgcttgcaaccgggcaaaaaattgtgctgaaaacactattcgaagagtttcgcgcaaccggagaaatcagccttcaaaacgaacagaatttcgctctcctggcaaagctggttgttagcctgctggattgcacttccggcattgagagatgcgttcgtactacgtcggactttgatgagttgaagcagtcattacgccaactgattgttaagcaaaccggtgaattgtctgcggagcttgaactggcggtacagcagtgcttcatgcgtgagttagcgggccgaaatgatgaatatctgaaagtatacgccgcatggcgaaaacatgtcaccccggagactgtagcatga

SEQ ID NO: 288584 - DNA, 600 bp, Morganella morganii
atgattgggatgaccgttttaaaagagctggcggcggaatcactgggggaactgttggcaagcgtgaaggatatacgcattgaagacattaatatcgaagagctcgataagcctgttaatctggaactgccgcgtaatgagttgactccgctttctgaagaaaccaaagaggttttaagcgaggaaggttacactgatgaagtgatcgaaagtatcaacagcgaagaggaagcagcgatttatcaggatgcgggtctggaatgtcagactgttaacggtaatgacgcgttaataaatactgaaatcgacccggatcaaaccgatgcgttaggtgatactaacctcgggcgtatggagaagggtaagtcgccattggatgcaaatggtaaaccgattgagctgcatcacgttggtcagagggcagattctccgcttgcagagttgacacacgctcagcacatggagggtggaaataatactatcttgcacgacacgacaaaagagtctgaaatcgatcgaagtgcgtttgccaaagagcgtgaggcgcactggaaagcacgagctgaagaaattaaacagcgccgggaggaagcagtatga

SEQ ID NO: 288585 - DNA, 411 bp, Morganella morganii
atgaagaagttagcacagcagattgtggcacaaggtgccgatactcgtcctgtgaatgaggatgaaatcataactgctgaacaggctttagggattcaattttccccggagtataaagcctatttgtctgagtttggtttgatttcctcgggggcggccgaggtttatggcctcggtgttcctgcgacgtcgcatctgaacattcttagcgcgatagaaccgctacgtgaaggcagggactatccgccacaagcagtgcctctttatgatattggtgatgggtattattacctttatgataataaacggcgcaaaatcctcacctggtcgatgataaacggagtagtagataccagcgatgaagaccttgaagcctttttactgcgcatcgtcttccacattaagtcataa

SEQ ID NO: 288586 - DNA, 564 bp, Morganella morganii
atgaacaaaatgaagttagcattattagttgctggttctttagttgccggcgcaagcacctcagcgttcgcagaagggcagggaacaattgaattcaacggcagactgtttgatgaaacatgtacaatcaagcctggtgatgagaaaaaaatcgttactctggatgcggtttccgttcaaacgctgacaaaagcaactgatgaaggcggatataaaccgtttgatatcactgtaaattgcagtacaccaatttcaagtacgactacccctaatctgactcaggttgcaatgaactttgagccaaccggcgatacgacagattgggatgcaacaaccggtaacctgatgaacgtggctccgagtggcgcgaaaaacgtacaggttaaaattattaccggcgataacgcacgtactcacatcaaaattggtgatcgcggtcagtgggtaacacctgattcgaatggcgacgctgtcttcaaatatttcggtggttattacgcaaccggaaaaactgaagctggtccggttaatgctaaggttatgtatactctggtttatcagtaa

SEQ ID NO: 288587 - DNA, 762 bp, Morganella morganii
ttgattaaattaattaagacgttattaatttcttctttattttccggcgcagcatatagtgcggttacgatagagggtacccgtattatatttgacggcggaaagaacgagcaagtcatcaggattaataacaaagacaatacgttaccggcacttatacaagtatgggcagatgatggtattgaggttaataatattaataacccaaagttaccatttgttattacgccgccaataactcgtattgaaccgggaaaaggtcaaagtatcagagttatttataacgggatgactcttcctcaggataaagagtctgtttattattttaacgttttagaaataccggctgaaacttcagaaagtaagaatgcaacacagcgcttagatttagcatttaaaacaagaattaaattattttatcggcctgagtctctgcgtaaaagtacagttaccgattatctggataaattaaaatggagtgaggttaatgttccgggtaagggtactggtttgaaagtggagaatacatccccattttatatttctctgattggcattaaaataaaaattaatggccgggagattactatgaaagcggacatggttgctccaatgtcttcatcagtttatacacaggatgaggatagtcagaaattaaatggaaatatatctgagtttacttactatatattaaatgattatggcagcagagtagaaacaaaagtgtctaaatctggggcggaatttgtcgtagtcaagtaa

SEQ ID NO: 288588 - DNA, 2589 bp, Morganella morganii
atgagacgattccaatggagattaattctctgttcttttctgtttccggcggtatcatttggtaatactgctttattaacggatgaaaatggaaccggggaggaaaaaattgaatacaacgccagttttattcaggggctgaatgtagatgtctctgattatagctatggtaatcctgtaccggaagggaactataccgttaaccttgttattaatgaaaataacagagggaaatataatgttttttttaagaatataaaaaatgacaaacaagcagaagcgtgttttaccccggatcagatagaaactctgggtattattccggacagcagtcttggtgctcagtctgagatcagtaaaagtgcttctgatgataatgtatgtcatccgctcaatttttatgtcagctacgcaaaatcatattacaatactgctgacttagttttaaaccttactgttcctcaagccagtttaacgcagcagtattcagattatattgatccttcccgttgggaggagggggtcactgcattatttgtggattataatcttaacagttatgtatcgaatagtaaaaatggtaatgataaaaatacctattacaatacaaatattaactggactgccggatttaactataacggatggcgtttcaggaatcgcagcaattcagtatggtcaaaaaatgatagcttcagtaataaaaatattcagctttatgctgaaacagatattacgccatggaaaagcagattaacgttaggtgaaaccttcaccagtggtcgtatttttgattcctatggtatgagaggtgcggttcttaaatcaaatacaagaatgcaacctgactctctcaataattttataccaataattaccggtattgctgatagtaatgccagggttttactgcgtcaaaatgattatactatttatgaaacaacggtaacgccgggtccatttgaaattaaagactatggcgcactggggactaacggtactttgcagctggtcatcattgaagcggatggccgtgaaaaagttcaggacgttgttttttctgcaccaccaatgatgctgcaccctgatactatacagtattcaatctcagcaggggagttacgtgatagttcatcttccgattctcctgtggttatggaaggtgagttccttcaggggatcaataactttttaacctggtataccggtttccagttatcagaaaactataaagctgttgctatcggtaatgcactgaacacaccaatcggtggtatttcggtcgatatgacccatgcccgcagtgatttgaaagatacatctcagtcaggtgaatctttccgtatcagttacagccggttatttgaaaacacaaatactaacgtcattgtatccagctaccgttattcaaatgatggttatctcaacttccgtgatgcttcaatgataagaagtcgcggtgaaaactatgatgataaaaaacgggatagtgacgggaatctgattaacaattaccttggtgtcagagccaaaaatcagtattccattaacctgaatcagcgtctgtggagcaacagctcagtctctgtgatgggtaactactatgattactggacagcgcggtcaccatcatcacagtggtctgtttcctatcagcaaagcctgcaatatttttcctacagtatggcctatcagcgtgctaaaacaggcagggacagttatgacaatacttatatggtaaatgtcaatattccgttctacagaggagttaactatcagccgttattcagcaacctatcattaatggcaacccggaacgctgatggtaataccgcattccagacgtccgtttccggcagtcagggagagcagagtgagctgagctataatcttggcgcagtagctaactcacattcggaggccagagatagtctgaatgcttcagccaactaccggacatctctcgggagctatggtgtcactgcatccatggataacaaatcgaaccgccaggcatctgtttcagcgaatgggagtattgttgctcattcgggcggcgtgacaatgggaccttctgtcaataatgcaccatttgccattattgaagccgaaggtgcggaaggaacaacagcgctgaacggaagtggcagcaaggttgacggaagagggtatgctattgttcctaacctgaatccgtacagagaaaaccgggtaggtcttgatgcaagcaacgccagtccggatgttgatcttattgacgaccagacaatcgttgttccgcgtgatggtgctgctatcgctgtgaaaattaaaaccaatattggtaagccggttatcctgattgttaaaggcagagatggtaacttcctgccaataggaaccaatatttataatagcagcggagaatatcagaccattgtcggccaggccgggatggcctatctgcggggctgggatggcagcagcggtgcattgtctgttaaatcaggtacggtgggtgagtgtgtgattaatccggaaccgggtattgcacagaaaatatctgctgcaggggataccgtggttcaggtggaggttaaatgtatttaa

SEQ ID NO: 288589 - DNA, 144 bp, Morganella morganii
atgcttaaagaacctgccccgcagcaatatcagtttgaaatggttactcccgacgaacgggttcctgacgatcacctcatccgcaaagtggatgccgccattgattttgaatttcctcaacataaaaataatcgacaagcgtaa

SEQ ID NO: 288590 - DNA, 2667 bp, Morganella morganii
atgaatattaaaaaatgcactgtggagacagaaaaaaaagcattaaatcattcagaattgaaatcacgtaaaaacataacttacttcaataatatgacctttcccagtgacactcagggggaacttgaaggaactgtctattatgtacagaatagtattatcccggcgggaaaacatatttatggtgatattcagccggatattatatctaacagaaaaacaatgatgatgtttaagccacatactgattcgttaagttcatcacccatttttttcactatttatcataataatgaagttttatttcatgaaaaaatgctaccgcctgatcacttaacaaagatatgtacaagagtatatacgcaaatagatgcggatttttcattaccttcacattttgatttcatattagatgatagtgaagaactacaaaattctaaagacgccatttattttaacaacttaattaaagaatatgattccatcaacgtagttacttatgatggtgggcattctccctcttttgagcttttttataataccagctatacaggtaaaaaagttttttttgaatgcacatcaacatatggaattactatttcatttaatgcatcaaaaagaaatcttgagaagggagaatctatatttcttgtcaataataaagggacatggtacgaggtaaacgatgacaatagtaccgggaaattttcatctgaaattcaatatatgggaaacacatggtctgtgattataccttatcatgtgatgtacccggggataaaatttaaattttcgagagagggaaaatctggttttatttataacccggttattaaagcaccgaatgaattgattttaaacacaatagcaattggtatgctaactcctcatcgtgaaatttttaaatttcaggaaaaccctgagtatcatcgccaatattttcagcaaattcctgtatcccgattaaccgtcaatacatatgaccccattgatttagacgaagtaatgttacctgatggccggctgcttacggaacatgcccccggaaatggcggttggcatgatggaattatgagggaacaaattgccaagtctcttattgcatccggaattaataatgctaattatggtattaatgtaacaggcagagatcttagccctgcaggaaaggtatctcaatttactgcacatacgactattggaatgtatgaaaacggtttaatagtccatggcggatccggcggaagtggcatggtgacgttagatgatacgatacgaaatgaatttagccatgaagtcggacataactttggcttagggcactatcctggtggatttgatggttcagtaaatcaaataccaactcaccgaaactcaacatggggatgggattgcgataaaaatttctttctgcctaatttcagacaaaaaattacccatcaacctacttatttagaatatgaaggcgttggggagtacgctcttccttttgaagggcattcactgggtaaagatgctatggctggtggtgcacctatgtatgaaaaatataatgcttttactttacatacgccatattcattatattacattcaaaaaaacctggaaagcaaagcagtatttaatcctgattcaaaaaccggatttagtatttgggacagcaaaaaaaataaaatggtggattataaccatatcattgaaaattttcatttcaaatatattaaaattaagaacgaaataaatatatatgctgataacataagtaaacaccttgatgagtatgattatatttacatttctctttataatggacggtgggccaaaaatatatatttcccaatgtctgactctgaaaacaatggtaaaataattaaaataaacacatcagcatcatatcgtgtttatttacatatgaatggaagcagttttacagcaatgaaaaatgtagatttgtattttttatcccatgatggctcttggttggaaatgaaatatcctgatttagaacaatataaagatgttgatgtttctaatgacaaatcaattaccagtacggaaataaatgattatttcaacatgtctccttatttatttatacattgtcaagactaccgctggacacccgacattcattttccgcctgctaattcgaacaacaaaggtaatgtaataaaaattcatgtggaatccggatatgatgtcagaattcacatgaatgaaataagtttcttagctgaaaaacacattgatttacactatatttctgatggttatacttggtttttcgatagtatgctatatattgagcgcattccttttgagcaaggtattaaagtcattacaatacttgggtactatgatcctaaaaatcaattgccgagttatatctacccagccctaaatgctgcttttggtatggtatataaatcagatgaaattaaagataacagttgctatctggaagtcgaatatgaaaatggaacaaaaagcattcatatattagctcatttcagattgacagataatgaaatgaaccagtttcatattaatgttagccgggaacgattaccgagaatagctcgcattattattcggggcgtagttgcagcggaaaaatcaataaatcttggcagtgacaatctaacctatactattaatggttattaa

SEQ ID NO: 288591 - DNA, 1110 bp, Morganella morganii
atgactgtatccgtaatatccgccgcaacaaaaacaatacacgttaatactgtgccggcagctgatgctatcggtagcatgcatgattttgcatcaaaaattgactgcgtgaaaaatacatctgaagtgttgtcatcatttaaatcatggcgcagtactctgttggaaaacatgactatgctgtttgaaaagatcacatcacttatctggggaaagagtgattcgctcagcagcatgaaacaacagaccgggtcagctccggaacagaaaatggggcatgtcgatttaagccgcttaacaccggaaccaaagagtgagtctgaaatatttcaggtgaacgggcagaaaaatatttattctgactatgattttaatctttattataaagagaataatcaatatcatccggtcatttttaccggtaccgaacggcgcattattcatatcggcacctctgccgaaaaccgtattacctgcctttttaatccggatgatggaacattaatgcctgcaggaaagggtatcagtaatacatcactgtcgttcattcattcagtaaatctttataaacaaacgttgccggacggtaaaaacagtatttatttacgcttcaatacagcaacaaatcaattgatcagaacagacattacagatatcacagagctgaataatcaggttacaaaaatagcgttcaggcattttaacctctttgtgcctgaaaatgcgtcagcagaggtttatctggccgcgcatggtgaacaggcgttattcgaaaaaaataccattcctgacggtatatcgcttggtttctatactgataaaggaaaggcactgaatgggcatatgaatgatatcctcctgctggcaaaagggcagtttcctgtcacagagcgtcatcatcatggtgaacgtatcgagggatacgtcatcactcagggtaatgaagagaataccgattacgccgggctggcaaaagaaagcggcaatacactgattagcatgaacaagggggagtcggactcaatgagtcatgtgatgaaatcagtttcagatattttttatggtaaacaaatcaatctgaatctctatatgtgccgtacccgtatataa

SEQ ID NO: 288592 - DNA, 180 bp, Morganella morganii
atgtatggtaaaagagataacagacattgcaagagaatattattgaccctttgtgtgatgcggcgtatgcggagtgacaatgaaattctcagcagcggatttcatttatttttccgcctgatccgcatttttctccggcatgtgcggcagacgattttctttattgtcagggcttggtag

SEQ ID NO: 288593 - DNA, 1248 bp, Morganella morganii
atgagtttaaaaaagatggtgattatgggctcaatagctagctcgataataattacaaacaatgcaatatctgcggaaagtgtcggttattcaaacattataaacaaatacaagcaagatgccggggaggataaatgcctaaggacattttctaataataatttagtttccattggtgactgtactgcgcaaggaggggcatcagattacacctctatgaggcaatggcaagttgtagaacaatctgatgggttctttttattaaagaacaaatacaaaaaagatgccaataaaggccagtgtttaagaacatttagcggacgagacgagctggaggttggtgattgtgatgcacagggaggcgcatcagattacacctcaatgaggctctggaaaatagttgagaatggtaactatgctctattggaaaataaatataaacaagatgccggaaaaccaaactgtataagaacatttaataataacaattccattttaattggcaactgtaatgctcagggaggcgcatctgattatacctcaatgagacagtgggtatcagatgcatttccttttgataagccctgggggccaacagggatagtaagtgtgcagtacactataccagaagcaccaaaatcaggattcgatcgtatattattcccaatgaatatagagaaatctcctgaggaacgaggtttttactatgcgatgcaatatcggtttattaatggcaatttaggctatattggtttgcaaccgagaggtaaagattccggtttggctatattctctgtatttggtagtggtgtaaagccgatagccccacactgtacgggatctgcggatggtggagaaggttccagttgttcaaaaacgataaatttagtttttggtcataaatataatttaactgtaaagagggatgatgaaaataataaagtatggagaggatatgtggaggatactgtgactggagaaattaatgaaatcggggcatggcagccaagggatggctcagaaggaataaaaaatttcgagggcggctttgttgaatattatcctcaaattaactcatgttcaaaaataccatatacaaaagctttctttggatctccggttgcaaattcagatatatcaggaacgctaagaaaaccctatatttatggaaaatgtaaagaatttgttgagtttagtacagaggaaaacactggaggctgggacattagtctaaaaggaataaaataa

SEQ ID NO: 288594 - DNA, 417 bp, Morganella morganii
atgccagggtgggtaaaggcgatagtatcaggattgttttttatattatttttagctcttagtgtgctgatgtatgattatatgatttctttatttaatatggaaaatgttattgtgttttcggcacagattgtaatagtgacaatagcgacaccacttttattatacgtttttttagcgactacaattgaattttctcttggtagaaattcaattatttttatgttgttaatgaaatataataaattaataatgagatatttattatatttgggtatagccgggttatttatcagtttccctgtttcttttgctgtaaatatctatcttctcgataagggatatgaaacatgcggaaaaatttcgtggatgtcacccaccacctatgtaaaagatttatcactttgtgacaggtaa

SEQ ID NO: 288595 - DNA, 1281 bp, Morganella morganii
atggcgattgatggtgacaaaaccacaacaggagccacctgtatcggttcgtcaagcatgataaaatacaaaggaatgccaagcctgttggtcgacgatcccaccaccacctgcccgcagtgcaaacagaccggcacgatagcaaccggagacagccggatgatgaataacggcaaggcacaggccgttgacggttcaatcgttcagtgcggctgtccttacggctccaataccattattgcggcatcatacaaaaatgccggcacatttaaattttcgccattttcgccacaggaaacttcatcaggttacagtcagtataatgacccgcaatatgaccgttcttttcgggaatatgcggatccggtttctgacgaacaagacaaccgaatcagacttgacgcccaacgcttaattgattgcgccgctgaaatttgtgaaaaacacctgtgttacccggaagtcaaagccgagttcaaacgggaaattcaatccgctgccgatgatattgttcagcaggtcgaatcaggacaaatgagctatgaacaaggttcagcggaactgaaaaaagaagaaaaaagcttacttgaacaatccattgactgggttattaacgggttatctattctcggtggtttaggtatgacagtagcagggttcgcgctatgcactaccgggggaggttgtctgattggtgctccgcttatggctcacggcattaatggcatgtatgagggagctattggtttctatgaaggacacagcaacgtacaggggcctctcagggaagggtataaggccacagcgaaacttcttggttttaatgaatcggtaggaaacctcgcctatgatcttgttgatatggggatatccatacgtgggaaattacaattggttccgaaattaacaacacggtatggtgaaaaaagaaaaataaaaccgtttgtgctgtaccattacggacggaaagatctggattatgcgattcgacaagcgaataaatatttattatcgatagagataattggtgatgggattaattttttaaaaataaaagatgatataaaaaatgcgtttattctagataaagaaacaggaacaattatgttagctgtagcagagtctgaaaaaataacaaatatagaatatgtcaaagaacattgcagtatggttattactatcataggatctgataatgcgccatcatcatactatatgtgtaaagataaaaatgggaatcgctatgatgtaagcgaagatggaagcttaattagcgagtaa

SEQ ID NO: 288596 - DNA, 192 bp, Morganella morganii
atgcagaaaagcacaaagaaacagactaaccgctactttaacggtacaccgacaacacgcctgatagtcacctgtgagcagtctgtcattgacgcggtagacaaccatattaagcgcggcaggtgtacgcggggcaatcgtgcggagttcgtcagacaggctatcatcgagaagttagagcgtgaactttga

SEQ ID NO: 288597 - DNA, 213 bp, Morganella morganii
gtgagaaaggattctaaagcggaggcactggaggaagcaggattgtattacagagcagcgcggcggtggctggaggtgttcgaccgttgtgaggatgaacagggacgcaattacgcaatagaacagcgtgaaagatgtcttactctggcaggtaatccggcagaagtcagggcgcggcgtaagcgggaatacaaagcccgtcaccgcctgtag

SEQ ID NO: 288598 - DNA, 375 bp, Morganella morganii
atgagcaatgtgatcccgttcagacagaaaaataacacgctggagaatctgacccgcgattttgctgccgcagtataccgttgtcaccatcatgactacgaggacagctaccggctgacggagacgctgggcggtaataccacctgccgcgatatcccgccgtcagaatatatcgtgctgctgaccgactggtatttcatcgaaccactggcagaacaggcggacgactacgaggcggcggcagcggacatactgacccgtgctgtagattccggacgtttaactcccgcgggtgaggcgttgtatcagtcaatcctcagcatatcccgtgatatgtccgcaccggaaggaggcgcagacgatgaaatccattga

SEQ ID NO: 288599 - DNA, 198 bp, Morganella morganii
atgagcgcagatatcacaattcaccaggcggcagagaaagcgcatcaggtagaactgattaatctgcttatcgaatcacacccgcaccagttacaggacagcgaaatcagcgcgttatcgtctctgatggcgaagttatccggggatgtttgcgtattcctgcaggaagaaatcgcagcacaggaggcgaccaaatga

SEQ ID NO: 288600 - DNA, 918 bp, Morganella morganii
atgaaagtcaaagatcaaagtatgaacgtttggaaggcaaatggaattcctcagttggagttttgctcaattgaaaggtctgcggaactactaaattgcttggttgatgatatttaccactggattaacatggggatgatacatcccgctgtcttttttgataatcatgtggcagtaaagataacagcatatgtcaaaggtgaagaaattactggtgaggaaattttatacaaggcgaaaaaaaccgtaaaaagaccgtcgataatcaattttcattggccagcaaaagctattttatatgacacagatggggtaaatcaaaacattgaatacttcgaaaatgaaaactgcaagtatgaaaatgggcgcaatattttaactataaacggaacaatatatggtctatggctacccagtttttttgatctctggagcggtgaaacatttcagattatagactatcaaaattctatttttctgcccgatgattcagaagatgaatctgtcgtattagtcgctagtttaaaggataatatagaggttaattcaaataacctactgataataaataaagatatagatagaatttacaaggcgggacaggctggagcgattttaagtgaagcagcacgtttggaggttccggagcagaaaaatgaacacaaagcaaccgctcgaagcaaagaacgcgatttggatatggagagaggaatatataagtttttaattaattgtgattatgatgagatgtcaaacaattataaatttaagaatgggaaaataaataaaacccagttaattcagtgcatgagagataaagctcaccatctatttaactccggaaatatgccattgaatgacaatgatagaataatgccagtcattgataacgttttgaaaaaccttgggttttcatga

SEQ ID NO: 288601 - DNA, 1266 bp, Morganella morganii
atgcctaaattcaccgatagagagatccgcgcatggatgaaagcgggtgaaacgttcgagggaagagccgacggaaatgggctgtatctcagactaagggcagcaggcagcagcccggaatggcggttcaggtacaaaatagcaaaggtggcgcgagttatggcactggggaagtaccccgatttgtcactggcaggtgcgagagccatcacccgggagttatccgctcgggttgctcttgggtatgatgtcgcggcagacagaaagcggtcacggcttgaggcagcggcgcaagatgaggctgacaaaaaagccgtgcgagtgtctggcttaattgatgagtattttgagcggcagatagtccctaactggaagaatcataaaatcatcaggcagcgatttgataaagacgtactgcccgctattggtgcgattaagctgtgcgaactcacaccccgcgatattgacgggatgattaaacagatattagacagaggggctaacacagttgctaagagtgtgctcagtttagttacgtctatgtttaattatgcggtaaggcgtggcgttatagataacaacccggctgcggcgtttaatgtctcagatgctggcggaaagagcgaggcacgtaaccgctggctgtcccgtgatgagattgtggtgactttcagggcgtttaaagactcgaacttacgccgcagtaatgaactggcttttaagttactgatggcgttatgcgttcgtaaaatggagcttgccgccgcccgctgggatgaatttaatcttgctggggctgtctggaactttccggcagagcgcagcaaaaacggtgatcctgtagatattccgctgtgttctgatgtgattggctggctgaaagagttaaaagccttgtcatgtgatagccagtacttgtttccgtccagagcaatacagggcggaaagcgtgggcatatcgaagcctcaacactggattcagcactgacgaaggttcgccgatatctgccgcctgatatgccaaacttcactatccacgacttccggcggacagcccgctcacaccttgccgcgctgggtgtagatccctttgttgctgaacgctgcttgaatcaccggataaagggcgttgagggtatttataaccggcatgattactttgatgaacgacgggcagcattaacgcagtggtgcgccctgttggtatcgctggagaaaggcgaagattataacgtgatcccgatggggacacgaaaagcaaaataa

SEQ ID NO: 288602 - DNA, 429 bp, Morganella morganii
atgctaaccatcagattaaaagcaatagctccgtcattgatttttttgataacaggtattgcagcattttatttttcgattataaatttaatcggatattttgaatttcaggatgaaataacgtattcgtgggttacctgtttttcttttttagcatcctttgtgattattattttttcattttatccaattcatgtggctttttatggttctcctatgccaatatgtaaagcaaagaaaacttataaaatagcgcttgttttttttgtcgcgtcattagtttccccggttatattttcatatgtttatacaggtaaattagaaagccttggttatatggcttgtcggggcactcccttaggctggacacctatgatggcaactaaatatgtcactgataaaaaacgctgtttagcgcctaaaaaataa

SEQ ID NO: 288603 - DNA, 630 bp, Morganella morganii
atggttaattatggtgtgaatggtaaggatgttgttaccacgtcaatgattcttgtaaaactcggcgatcttggtattcgggcaacggtttatatcaatcatataggaacggagctaattaaacttacaggtcatcccggaataagaaaaatacgtaatgccccggtattcagattagataatacaaaggttgttgaccttggtattggtaaatatggacttgctaagtcaattattgaaggtgcgcgtttgacgttttatgttgccgcagcttatcgtacacttgattatatattgaatgatgaaacatcattagcaaaatttattggttcactttcaactgatatagttaaattgggaattgcgtctgctattagttggggagctgggttttttgctattgcttatgtaccttttgttgccgcacctcttgtggtcgttgttgtattcggtttactttctgcatgggtgctaaatgaattggatgacaagtttggagtaacagatcaggtagttgcgtatcttgaagcggcacagcaggagtttgttgagaaagcacgggaagtcgaaaaaggaattctcgatcttgggtctatgtatgctgacaaaatgttagagacaggcagataa

SEQ ID NO: 288604 - DNA, 600 bp, Morganella morganii
atgtcaggataccggccgaatatattcggcaaagccatggcgattgatggtgacaaaaccacaacaggcgccacctgtatcgcgtcgtcaagcatgataaaatacaaaggcacccctgcggtgattgtcggcgacctcaccaccccctgcccgcagtgcaaacagaccggcacgatagcaaccggagacagccggatgatgaataaccgcaaaccacaggccgttgacggttcaatcgtgcagtgcggttgtccttatggttctaataccattatcgcaaaagcttcccccgcgaacgctacatcactcacagatgtgagggcattttcagaatcaaaatcacatacaggatatgccggaacccgaaaacttccggcctacctcaccggagaaaaaaccgaattaggatttattcctgattatccggcgctacgtaacagcatggtttttccggatcaacggttgagggggatgttgtatcaaaataatttcgatgtgatgttgctcaccgttagtgaagcttttgaagtgcttcagtcatggggatggaaagacacaaaaacagcctgggtagaaatgacacaatccggtatcggttag

SEQ ID NO: 288605 - DNA, 801 bp, Morganella morganii
atgaaaattagttcgccaggttcaatgtcaggtcatagaattaacaataaggaatatgactacataaataagatgaacaataatttattgaagatagaaaaacagctttattgtacaaatgaaccagacaataaaacaaagcttaaattaaataatttaatatttggctttatcaatgagatagaaaataaactgaaatcggatcatgggttaacagataaattccaaaaaaagctgcagatattgaatataaagtttggtatggctgcaataaaaagtggagatacagactgggagagctttagtttagcaaaagaggttcatgataatagtcaattacctgattatttttcattgacccttgacgagttacagacgcaaaagataacagcagaggaaagaatatatgcatggaactgttgtcaatataattttgcacataacctcatttataccgaaatgccagctcctgaaaataaaatgcaagagatgttttcactttattttgatcagtacaaaatacagggtatttcggaaaatattgcgatagcctcagcaaatgctaaaattgcagaaaagttgtgccaaaatagctttggcacagaagaggaaggactaaattcctcattatttattgccagtagaaaacttaataaattttatgatgattatataaagtgtgtaaaccccgaaacggatatgaacctgatattagagggggaaatcttatctgaatatatgtcagtcttcatcccgtctgaaattaaaaaaattattaaaaataagttaactaatttgtag

SEQ ID NO: 288606 - DNA, 186 bp, Morganella morganii
atgagccttctaaatatcattaaatttacgtatatgacgcttcatctgcttccaaaaatgcccggtatcattggtgtgattcccgggatctattttgtcgaaaaactaagtgctgtgattgatcctgtaatgcttaaaattgcacaccataaccggcaaattaccggcacttcactgaagcagtag

SEQ ID NO: 288607 - DNA, 267 bp, Morganella morganii
atgagccagtacgaattagattattcattcagtgacgtatatcaaagtaccctgaataacatttcaagaaatgaatgggaggtaagaaacgcctgcctgagcttatccgcagggctggataatatcgaaatttataaatacatagacactgattttattgcaacatggagattaatgtctccggcagatttatcctcagaggattttttagataccataacgatatattcaacctatgacgtgtgtaataagaacagaaatgactga

SEQ ID NO: 288608 - DNA, 384 bp, Morganella morganii
atgtgtgtatttgagagttttaggttattaagagatgatatggttgaaaatggctgggttatagaagcattccctttcaattacagaaaccgtgattacattgtgttggctaaactgtacggagatggagaaacaaaaccaaaatacgctttgatgaaagtagagatattgaaaagtgaagaaattagtgagcgactagttttagctgtaaacgtaaatggattcatgactgaggcaaagcagttaagagctttttttgatatagaatatggccaaaatcttggagatttattgaatcagtttaatgagtattttgctggatttattccaattcatgtaactttagatagaagcccacatattgaggaagcaatggtgatgtaa

SEQ ID NO: 288609 - DNA, 591 bp, Morganella morganii
atgaatacaatgatcgtcagagaaaccggcatttattttatcaaagaacagatttatccgaaaggcgggctgccgaccctcgcaaataccatcgggccctccgcgaaacagatataccggatggtacttcagcttaaaatagagcaggatgttttttacgataataaaaaagtaaatcataatgatctcagtacatggcagcaactcagggtactgtttgataatgatattatctcacaacgtgataaaaaaaacgggaaagttattgtcgggttagagtatgccggatttgatacttacgtgacgcctttcgcgggatttgaagatactctgccaaaagcgctgacaaatgactatctgtacaataaggacctgcttcctgctccgttcatttatggtaaagatcctattccgtctgtcagattgtataacaacccccatgttcagttttttatggatcagggcggacggggcatcccgacagcactgggaaaatttgataaaaacaaccgcaatctcggtatcataaaaaatgaaactgagtttactcaaatagtaaatatgattaaggctggttatgaaaaaaaatga

SEQ ID NO: 288610 - DNA, 438 bp, Morganella morganii
atgaaaaaaaatgatctgctgatgatcctttcattcagtttaattaatttaatggcaggctattctttatcatccgttgccatgaatatctatttcccggcggataccaccgtcatttatactgatatttcggctatctttactacaaaagccattattgccgctggctttttctgtatcagtctgatttcatttttaattatttttatccgcaggagagagatcaccgctctgtctgctatattaatgactgttattaatatcattacctttatactggtcacattctgctacggtaacatttacttcagtaatgtatttccggccggaataacgaatatccctttttcagcctttagttattatccgttactgctgttaacagcgctgatttccgcgattatcctgttcatcatacagaaacgggcaacacgctga

SEQ ID NO: 288611 - DNA, 483 bp, Morganella morganii
gtgacttttgccagatcggcatttttatcgctcagctgcgcgatatttttttcggcctgtgcctgctcttcggtcagccgggtgatttgcccggtcagcgccactttatcggcggtcagcgctgccagatctttttgcagccgtgtattcagctgctggttatcagtggttttctgcagtaattcaagcgcaataagctgtttttccgcagcactttctttcagctgtttttccagctccgctacctgtgcggcagttttctccatttctgctgtcttcgcattcagcagttcggtatttttggctgaagtactgcttttgtctgcggtcagtgcggtgatctgtttttccagtgccgctttttctgccgccagaccctcgagggattttttcagcgcttcactctgtttcgcacttttactgccctgctccgccagttgcgcagtcagcgccagtttttcggtatcactttgtttcagctga

SEQ ID NO: 288612 - DNA, 141 bp, Morganella morganii
atgccgctgttttcagccggatgcctttattttttttacctcagtcacaaatcccccgataaattgctgtttttctctctgctggcgtatttattgcttgtttttctgcatgcttactttttcctgaagccggagaaataa

SEQ ID NO: 288613 - DNA, 1209 bp, Morganella morganii
atgaaaaaaacagtattagcattattcatttttccattttttgcttacgcagaagatatgcctgtttatgaaacaggcatatcaccagagtcaggctctccaccagagatatactctccgccacatccggaactaccaaaaccaacattagctattcttgagggtgatttctacggaacacgtctctcattttcagagaagaaaaataaaggtgaccggagtgtcggtgtttcagaagctcagacaatttttaatcatctgaatcagcgcgttagtggcattattgatcaggcagatcgaaatatcggcgaatttaaggaggagatgcaatacgaacagtcttcctttatggaagaagctaaaaagctggaatacagtgttgagagactgacaagtcaggtcaatgcccatcagcagaatgtggacagcacaatcaatgcaacactggataaagccatgcctgcatacattgatcgggtgcttccggaaaaaatcggacaatatatgccgggaatacagaaagacgttattgaccagcagattgcggacgtggcagcagaacatacagcatcgttgaaaacagaagttaatgaactcaatacccgggttaaatcggtgaatacccgtacgtatctgctggatgatgcgataactgagaatgaaaatgcgatcattgcaaaccggactaagcttaagtctcagtctgatgaaattcagcaaaacaaaaaattgctcgaatccgctaaagtggtgacctccgctatcaccgatgccacgttagcgctggaagcggatgtggcgaagatggatacccgtatcagcaacgcatcgaaaaaagccggtacggccttaaatgtggctaatcaaaacacaaagagtattgatgggcagaaagtaaaagttgagaaaaacacgctggatatcctgaaaaaccgccaggatcttcgtgcgttagaaaatgatctgcgtgagaccaacgagcgtcttgataacggcctggcggccagcgcggcactgaatggtttattccagccgtacggtgtcggcaaactgaatatcactgcggcggtgggcggataccaatccactcaggcagtcgcagtgggaaccggttaccggttcaacgagaacatcgccgtgaagaccggtatggcatacaccggttcgaacgatgtgatgtacaacatggcggttaaccttgaatggtaa

SEQ ID NO: 288614 - DNA, 609 bp, Morganella morganii
atgaattcagctacaaatcagccagtaaaaataccctttagagaattaattaaggatacatcagaaaagttcggaaacggcgggctcagtcgttttatctcgggtgtgcagaattcatcggagccgcaattctgctgcacaaaagcgcaggctgaactactgggaaccaggaattttacggttctgaaggatgcgttcggacatcttgttgcgggattggatatgaccccgtttaaaaatatctcagatgaaatcaagggataccgggagaaccagtcaattctctcacgtttcttcaaaggccgtgttctggataaaattcagaaacagtgtgccaaaattattgaaatcaataaggattgcagccgttcccctgtatcgctccgtaacgcaacacggccggattccgcggtttatacgaccaaagagattatggggaaacataaggatctgggactttttgtgattgagaaaagcatgcgcgccgtaaagtatggtgagccggaaaatattgccgacctgaaactatcaatacaggttaatattaagaccagcggctcggttgagctgccggtacctgagcagattaatgataaaaaaccggactaa

SEQ ID NO: 288615 - DNA, 1272 bp, Morganella morganii
atgaagatcagaaatatttctctgacaaattttcgtggtatacagaaggcggatatcacattcacagacaggctgacagtgattgttggtgtaaacggagctggtaaaacaacacttcttgatgcgctagccattacactttcacaggtcacaagccgtatttatgagtctgcacaaaaagcacgcagtttttccccggatgatattttcatatctgctgactacacacgtgccgttgtcggtatggaactcgaacagcagacaatagagtttgctctggccttaaataaacgggcagctaaacatccgaaagaacgatccagtgattttgatttactcaattccgttatacagcccttggcggctaaaaataaaaattaccgggaaaacgaagcgaccgcaataagcttaccactggctatctattatgatgtccatcgtgctgtgatggatataccgctccgcgtcagagaaaaattgaagaatacacccgctgagggcaatgaagatgcattaacgaatggtggtgcagatttcaaacgcttctttaactggtaccgcaatgaagaagatcgcgaaaatcagaatatccgccgtgaccatagttacacggatcctaaacttgatgcagtacgcagcgcaatagaaacctttaccggtttttgcgatcttcatatcgaccgaaaaaccccgctacgtatggtagtgagaaaaaaagatctggaattcagtgtaaaccaattatccaacggtgaaaaatgcctgctggcactggtgggtgatctggcgcgccgcctggcactggtaaatccgctgtcatcaaatccgctacttggtgacgctattgttctgattgatgagattgatctccaccttcatccgaaatggcaacgcaacatactaaaaaacttcgctgaaacctttccgaattgccaatttattgtttccacacattctccgcagatcatcggggaaattccgcctgaaaatgtacttctggttcgtgacggcaacattttaggaaatccgtcttcggcacgaggtttaagcagtaatgaagtactggaattaatcatggaaggtgatgcaagaaatcctgagattaaacagcaaattgagaatattgaagccagtctggatgatgattatattgaaaaagcccgtcaccaattagctcagttgaaaaaacaaataggaaccacaccggatgtcatgcggttagatagcagtatcgaaacactcgattttttactcaacggtgacaacgaatga

SEQ ID NO: 288616 - DNA, 783 bp, Morganella morganii
atgaggtcattgaataacaaaaccgaaccacgtgagttgttagactggaagtcggataacagattaacaccagaaaatctggagtatggcaaggccagctttccggcagaagctgtccgtcgggcactgttagcacagcaatattatttatgtgcctatacattaatccggctaaaaaaaccggaagagtgcgatacgaataaccaaacgcgtgaaagttgtcatattgaacatattctgccgcaaacccgcggaaaattaatcaaagaacaacgtaacggggatgaggtaagagaggtcatcaagttcactgctggtgaagacatcgactttcataatatggtcgcatgttatcccccgagtataagcaagatacattgtggatatggtgcgcactacaaaggtgattatgacccttatgaccacccggattttctctcaccactgatgcctaatattgagtcacattttacgttttctgataaaggacatattgaaagctcaacgaaaaagggacaggaaacaatacgcgcgttacagctcgatcatacggaactttgttgctggcggaaagaagtgataaacggtgctatttacccgaaaggtacccatcgagatcccatttctgctgcggatgcgcgccgtcttgctgataatgtattacaaccttcagcggatggccggttgcgtgagttttgtgtcgctattcatcaggtggcgctaaaacatgcggataaacttgagcgccgtgccagcagaatagcagcacaacgcaggaaatga

SEQ ID NO: 288617 - DNA, 699 bp, Morganella morganii
ttgacagaggcggtagaacattatccgcgttacgggcttaaaaagctgtttcagatcctgcgcaggcagggcaacgggtggaatcataagcgtgttcaccggatctattatctgctgaagctgaactttcgccgtaaaggcaaacaacgtctgcctgtgcgtaatccggcaccactggcaacaccggagacactgaatcagacctggtcggttaattttatgcatgatgcgttgatctgtggcaggggtttctggacgttcaatatcgtggatgattttaatcgtgaagccctggcgatagaaatttatctgaatatcccggctcaacgtgttgtccgagtattggacagaatagttgcaacacgcggatacccggtgaaaatgcggatggataatggtccggagcttatatcactgacactcgcacaccgggcggaagagcatggagtgatactgaaatttattaaaccgggtaaaccgactcagaatgcctttatcgaacgttttaaccggacataccggaccgaaatactggatttttatctgttccggacactgaatgaagtacgggagatcacggaacactggctgagggaatataaccgggagcgtccacatgaatccctgaataatctgacaccggaagaataccggttattagctgaaaataacgaaatctcaaaaagtgtgtggaactga

SEQ ID NO: 288618 - DNA, 141 bp, Morganella morganii
atgaagagaataagcaactggttccggcataataagttactcacactactggttgcgctgatagctgccggtgctttagttttagagcttatctttgaatgtacgctgatacctgttctgatttggctgtctgaagcctag

SEQ ID NO: 288619 - DNA, 285 bp, Morganella morganii
atggcagcaacaacaatgatgcaattgctcgacaggtatagatggcaggcacttattttggctgacagacaagcaccgattgacgggaaagacgaaatgttatttcaccgtctccacctcaagcatgaaaaaaagctatacccacgcggcaaaacgttaaccaacctgatgaagattcagcgggaatttatcaaatatcgccgcagtgaggaatatctgcaaaagctttgtgatgactacgccgccaagcatggtggagcaaccaaaagccaagaggaatcctga

SEQ ID NO: 288620 - DNA, 165 bp, Morganella morganii
atggaatggattaagtgtgaaacatgcagtggcactggatatatcaatgagttgctgggtggatattattttaataatcctaaagcaaaatgccctgactgcgacggtgacggcgaattcgaagtcaagtcagatgatgatctgccacaaccaccggaggggtga

SEQ ID NO: 288621 - DNA, 309 bp, Morganella morganii
atgacagagaaaacacaggagcttaagcctcacaaattaccagacgaaatccggcgcacgatagcagagcatccggtgtttatcggtatcgttcagcgttgcctggaagaggatgaactggtcgccaattttcagcgcatttacggtgtgtctctgccgaggtttagcgaaaacgcaataatcaatatggtcgatgaggcaacgggctatcgagaatcgcagacccgcgagtttctgtttcacttcattcagttcgtacaccgctgcgtctggttgccactgtatagcgagggaaaattaggaggctaa

SEQ ID NO: 288622 - DNA, 444 bp, Morganella morganii
atggaagcagaatttctcttccacgaaacaaccaaagatgcagcctggcaacacctcaaagaagcactcgcaacaaacaaaccccaccgagtaatcatcaagccctggaaatctacccgctcactatctcagaacgccacgtttcatatgtggtgcggtgagataagcaagtatctgtgtgacaacggctctaaattcacgcctgagacagtcaaggaaatgcttaaacacacattcctaggctacgaggtcactgaaatgatagacgccaccacgcagcatacagagcgtgtaaggactatgagaaaaacatcaaagttagacaccggggaaatgttccacttcatggggcaagttgagcgctgggctacaggcatcggttgttttgtgacgatacccgagaattcggaatacatgaaactcaaaagggagcaggacgcatga

SEQ ID NO: 288623 - DNA, 153 bp, Morganella morganii
atgaagtgcgcaatgtgtgacaaagaactcgctgacgatgaagtgcatatgtgcagcgactgtgctgatgagtgtccgcatctggaagtagtcgagaagataaaaggagatggtgatggcaaagtcaaaacagccaaagccgaagaaatgtaa

SEQ ID NO: 288624 - DNA, 162 bp, Morganella morganii
atgaatgaagataaagatgcattggcggcaaaaatagagtcattcatgaaagatagtgagcctcttgaatatagatatgacccggcaggcagtaagtacgcgcattatttttcgttaaagcttgctgaatatttgctacaagcggacaatacgggagattga

SEQ ID NO: 288625 - DNA, 549 bp, Morganella morganii
atggcactcacagataaacaagaaatgttttgtcgcgagtacctcatcgatttaaatgccacacaggcggctattcgtgcggggtacagcgagaaaactgcaaaccgcactgcatctgaaaacctgtcaaaacctgacattcagataaggatatctgaactgatgaaagaaaggagtgatcggcttcagattgacgctgactatgttctcaatcgacttgtcgaaatagaccaaatggatgtgctggatattctccacgacgatggaggcattaagcctatccatgagtggcctaaagtttggcgcacatcattaagtggcatggacttagctgaaatgttcgagtctaaagatggtgagcgtgatttagtcggcatcatgaagaaaatcaaatggcctgacaaagtgaagaaccttgaattgctcggtaagcacatatctgtccaggcgtttaaagaacaagtagaccaccgttcaccagacggctcaatgacgccaacaagaattgttctggttgccggaggtaacaatgacggtagcgaagattga

SEQ ID NO: 288626 - DNA, 1224 bp, Morganella morganii
atgacggtagcgaagattgaaataccacctaagttaatccctgcattcgagggggaataccgataccgctgctcacacggaggccgtggatcggcaaaaaccagaacgttcgcgctgatgactgccatccgtggctacatggctgcaatgaacggacagacaggtgtaatactgtgcgcccgcgagtacatgaactcgcttgaagaatccagtatggaggaagtgaagcaggccatacgtgcagttccgtggctcaatgatttttatgagttgggtgaaaaatttatccgtactaaatgccggtcggtaagttatgtgttcgccgggttacgtcacaatctcgatagcatcaaatcaaaagcaagaatactgatcgcgtgggtcgatgaagcggagtcagtatcagaaacagcctggacaaaattaacaccaacggttcgcgaagctggttccgaaatatgggtgacatggaaccctgagcgtgacggtagcgcgacagataaacgcttcaggaagaacccgccggacagcgcaatagtcgttgaaatgaactacgacgacaacccgtggtttccgtcagtgcttgaagatgagcgcctgagcgaccagtcgcggcttgacccgaacacttacgcatggatttgggaaggcgaatatctcgaaaattcagacaaacaggtgctggcgaacaaatacgttgttcaatcgtttcctgatgacctgtggaagaaagcagacaggctactgttcggtgccgacttcggttttgcgaaagacccgaacacactgttacgtcagttcattctggatgattgcttgtacatcgagtacgaggcatacggcatcggcgtagagcttgatcacatgcccgcgttttacgacaagataccggaggtgaggaagtggcctatcaaagccgattcagctcgaccggagacaatcagctatctccgccgtcaggggttcaatatctccgctgctaaaaagtggcagggcagcgtagaggacggaatcacatacctgcgcggatttaagcagatcatcattcacccccgctgcaaagagacagcaaaagaagcccgcctttattcgtacaaaacagaccggattaccggcgaggttctgccggtgattgctgacgctcataaccactgttgggatgcgtcaagatacgggctggacgggtatatcaaagggcggacaacagtctgggacatcatgtaa

SEQ ID NO: 288627 - DNA, 1698 bp, Morganella morganii
atggaaatagaggagcttctggtcgccatcggtattgatacctcacaggcggcaaagattcaggaggtcgtcgttgccctcggggctgctgcggttacgatggcaaacgaggccaacaaaataaacggcaacctggacaccatcggtgaaagtgcggcgcagggggcggaggaggctggtaaaaaggccgaagaagccgggcgcagcatgagcaaactgaagatgattgccgtcggggtcggcgcggttatcggctttgtctccggtaaggtgctgggctttctcgacagtgctatcgccggggcgaagaatctgtcaaaagagaaagggctgctgttcgatatctcaaagcaggagctacagcaggctgatgagtatcaggaggccatgaagaaaacagggctgtcgattgagtcgataaagacaaaaatagccctgaacctggtaccgcagctgactgccatcacgcagaaattcaacgactggctcggtgccaacaaagagctgatagccgcagggctgacaaaagttatccagtggggcggtaaattcttccaggtgattatcaacaccggtcgcgctatcggtaaggtgattgacaatactatcggctggaaaggtgcgctggcgttgctggccgtggcattcctgtatcttaacagggcgatgctgatgaacccgataacatgggtagttgccggtatcgtcggactgatgctgttgctggatgacctcatggtgtatctggatggcggtgaatcgctgttcggtgacttctggggcgcatgtatcggctggattaaggacgtcattgcatggtggaatgtgttctacgccagcaacaaagaaatccttgatgcggtattcgctgcatggtcgaaaggctgggaggcgattaaaacgatattcggtggggtctttgactatatcaaaaacctgatgaagctgattgtcggcatctttaccggtgacacggatttaatcggtgaagcctggcagggaatgtcagatgcgattgagaagatgtgggaggggctgaagctgtatttcagtgctgttttcgacttcctcggcgcattgtggacgggttacagcaaagcggcatccaaagcgtgggatgcggttatgcgcgtagtccggcgtgtgtttgactggataaaaaacggcgtgaaagctgttgttaatgcggttaaaaccaccttcctagcagttgttgactttatcgccgcgccattccgtaacggctggaacctggttaaaaagctgttcgatatctggggtaatgattcctcatcgttcacagacaaaatcaaagaaacctttgaggctgtcgtgaagtttgtctctgaaccgtttgaaaaggcctttaaggccatcggaaaggcattcgatgaagtgatgaactggatccgaaacggtctggatgaaatcaataactctgagatagcaaaaaaaatcaggggtaacgctgagacgttttctgctaccggcgggatcaggagaatggattttggcatgccgccgcctcagtcaaagcaaggtaacacaacatacgtcacggtggagggggcgaaagtagatcagcatatcgtgaccagtgattccactaaagccggtaacgttgcggcgtcaggcattaataaggctagtgattacaggagggcaatgaataatcttgatggtgtagttagccattag

SEQ ID NO: 288628 - DNA, 678 bp, Morganella morganii
atgaaaaagttacttgctgtttttattgcgtcagtaacgttagttgggtgcaaggttgatattggcgcggaagctaattatgtggatatccagtcattggagcacaaattaatcacaggaaatgcctatttcgaagtctcatcatgcaaaaactttgaagattcaaggctggaatcagatagcttgatcaggcttaaaaaggccgttcctgaagtattcagtaatgcagagtacgttgagtgctttgagaaaagaatggattcctacgcccactacaaaatacctgtaggtgttggtaatttcgatgacgggaaagacatcaaagaggtgaatgctgagttatacattttttcaaatgaaaaaattcgaacaggtgtaatgatgagtgaggcattgataaataaaataaaagccaaagaaaaggaatcaatgtctaatctcagttttaatatcaatttaaaaataaacggagatggcacaccggttaaaggctatgttttgtctagttacgtgcagtccgaaaaaaacaccgcctctccggaagtagctagaaagctaagctggaaaggaaataaaccattagtttttacgctatctaatacgtcagtagatagcgtaatggcttatggagcagtaccagttattgtctcaccagactattttgttactgagtggtga

SEQ ID NO: 288629 - DNA, 426 bp, Morganella morganii
atgagtgatagcgagaatcaaggtttagttgaagattttgaatttaattctgtagacccaatattgttaattataaatcgatgggcaaatatgcagtctagcatcgagattggggttattttgcacataaatggggtcatggtttcaggaagtacgatatccgcaaagcaatggatgaagctacaagctgaatcatttcgtactgttgaaaatgaggagatgaagcctgttattgatgttatggctggttatttctctgacctggctgatggtgtttactcaggcaacgacaacggcgacagtaagtatatacacctgaaaaatgcattcactttgacgccgaatggaaaaagaatgagttcagcggttacgatgagaataaaaatcgcagatatcagcggcttttcttttgggtcgatatcttaa

SEQ ID NO: 288630 - DNA, 258 bp, Morganella morganii
atgtccagagtaagagatatcattccgtatagcctaagaatgccagatagccttaaaagccaacttgctgagagagcaaagcaaaatggtcgctccctcaactccgagatggttatgatcttacaggatgctgttaataccgcctctcctctgccgaaaagcagcgctgaacacgccgcagctatccaggcagaggaagtgaaaaagatggtgttcgacacgctggttaaaatttacggggataaggatgacaagtga

SEQ ID NO: 288631 - DNA, 162 bp, Morganella morganii
atgaacagtcagaaaaaatcagggaagtttcagttgcgtttaacggaagcactgaaagaagaagttgtaaagttagccaaggaagatggaatgtctcagaacgccattcttaatcaggcaatagcttggtatgtaaaggcgagagagaaaaactttgcttaa

SEQ ID NO: 288632 - DNA, 840 bp, Morganella morganii
gtgaagcaattcgggcgattaattaatctccgtatcggtaacgaaaaagaatccatcgaaataaccaatctccgcatcgccttcagtgttgaaaaaacattaaccagtgaaccaaacccggcagtcattcgtgtctggaacctgaacgggtctaaccgcaatcttatcaccagtaagatttataaccgcctgtcgctgtctgtggcgtaccgggaggatgagctgcggatgatttacaagggtgatattacggatgtggtgacgctgcgtgacgatacggaatacatcactgaaatgacctgcggcgacgggcacgcagcctacacaaccgccaatgtgaataaaacgctgaaaggtggggcatctgacaaagacattatgtcagaggcatcaaaagcaatgggggttgataacggcgttgtctccctgccgaaaaacaaggtactgccacgcgggaaggttatcaccggtaatgcgcgggacgtgatgcataaggttgggcggaataatggcgcggactggtcaattcaggacggacagatgactgttctgccgaaagataaagtggtgtcagataacgaggggtttgtcgtttctgaggaaaccggcatggtcggaagccctgaaaaaaccgatgacggcttgcaggtaaccatgctgtgtaacgcggctctgcacattggcggtctgattcgaatctattccatcattcctgaatacaacggcgattacaaaatcacagagctggaacatgccggcgattttatgggtgatgactggtacacgaaaataacctgtgtcggcgggaaatttcagaaggtggaaaatgagaaatcctag

SEQ ID NO: 288633 - DNA, 1101 bp, Morganella morganii
atgtcagtaatgaataaaccggattacaaaatctttgcgcaggacgcaaagtcaggggaatacgttgcctttcctgatattttacgcggctggggcatcaccctggatcagtacaacggttttccgccgatggaattatttaactctgcagcaaagcgtatcgatgaatggctcatgtacctgacccagcgcggattaccggagtgggatgcagcagttgattacccgaaagacgccatgacccagcatgccggtgtttattacgtgtcgctgaaagtcactaaaggtgagcaaccgaataactcacaggcatcgtggaagaaattaacggaatttcttggggttgataaaaagctcgacaaagactcagtacttcagactaccggcacatcaacaacgaatgtgatgagtcagaaagcagtgactgacctcgcaaataccaaagccgacctgaactctgattctgagcagtcattcaatggcgtcgtgtcaacaaaaaaagaaatagcggtgcgtaccgggaatagaaggacgctggttcaggctggaggattgattacattttccattgataatgtaacgtggtatgtagcgacatttcagaataaaaccggcacggttgcatatacgtcagacctgtcagttttggctgataaagatgcaaaagaagaccaggtctttaattcaaagatatccgctaaagagtttaatgccgctgatggtaacaacagaaatatcctgaaagcatccggaatgataacccattcctcagacctttcaacgtggtatgactttatacttccgaaaagaaccggaacagctgctctcactctcgatgcaatcgggagcggtgctcacatatggtatgacatgacagcgcagagaaaactggatgttgtctacaacaataccgccggaaagccaattgaggtaagtatttactgtaaaagtgtgcatgtatacatcaactcaatcagagtggcggctgcacccgttggtaacagatgtaatattagtttaattgtccctgcaggtgggtctatatcagtaacatcacaggaaaattctggagaacttgtttggtggagtgaattgcgatga

SEQ ID NO: 288634 - DNA, 348 bp, Morganella morganii
atgagatattacaaagatagtgaaaataaaatctatgctctggaagataatatcgatgccaatgactggcttgattttaagtttactgagataacagaaagtgaagccgataaaattctgaatccgccaccaacacaagaacaatacattgagattgcagaaagagaaaagcaggtactgatcgcggaggccagcgaaaaaacagaactctggcggactcagttggtgctcggaatcataactgatgaagataaagccagtctaaaagagtggatgctgtacgtgcagaaggtgcaggcaattgacgtatccactgccccagatatcttctggccggttaagccttaa

SEQ ID NO: 288635 - DNA, 4563 bp, Morganella morganii
atgccatttatcaactcaactacagtctcctcatcaggcagcagaacggcgggagcctctgatatttcaaatccggaagatcgggatgcctggttcgacgctatcgatcacgttgaaatggacgaaacctggtttgacgcctgcgacagtgatcatgctgacccggtatttgccggagaaaccgcagattcccgggttccgtttactacagactgtcgccgcggtgttcaacagctcatccgtaccctgggaaaatatgaggagagcagactgttttctgtctgtctttcaaaaatgctccccggcaccccgggcagcctggttatggctgccggcagcctgtattccgctattacagaacaccgaaatatcgattccgcagtgctgcatgctctcggactggcatcatggtgccttcctgataacattaatattatttcccaactggcaacctttatccgggataccgttaccggctggactgatgaaacgttcttgcagacgtttctgggcagcgaggaaaatcacacttccacctgcctgtttaccgccctggccgttacggccattgttgccggacgccggatgaaagacgaggggactccgcagcgtggtctgctgaaggtcccggtctttgtggctaatattttcatccgcgccaatcattacaggcatgcgctggaaaacatgacacgcagtgctcccccgtccggcagggaaacgcgggaaaaaaccgaatcattccggcgagctccggcttttgaagtagataccagtgtggagatgaccggggaggtctgcgatgcggctgtttcctgcttcccctccgaaccacggattacctcattttcgtcaaattcaaccgctacctctgaggcttacacccgggctatggtacagaacagacccgcgtctgtgcccggggaaaatgaccgtctctctgttcccgaacagatacattccctggcagtggaaaaattcaggcaaaaaagtgagctctcagatctgcagtactgtgccacccgcaaaacggaaacccgccggcaggcaaacgaaaaggttatcaccaacacgtatttcaatacgaaatgtgacgcaactgtttatccggaatcgctcaggaaatttgcagagaacacggacataccggaaacgcaggtatcatcagtagcaacaagcctgagtggcgaagtccccgatagtccgcttttggcaacatccggcaactctgccttcgtgtccggcagagacttatttccttcagcttccggaaatacagtccatacaataaccggtggaaatattttcagcaccatgctaagtccgcttgtaaatgccctatatgaaacaggaaaattaatatcccggcatgacccctttagattccctgaagcaaatgctttaccgataaaagaaaagcaaaatgacaatatgcgtaaagataccagaaaggccaggcatggtcagcggaaactgcgccgtaatcctgtgagaaaggaaaatcacagagttataacgctgctccggagtaagtctttgctattcaagggaaaaatcacaaaggaaaaactgctttattctgtatcaacttaccttttttacggaaataatggcattgcagggctcgaaaataaagtgaagattttggccgggagaatactttctgcaagcggactgtatggcggaaaacgcaatgaaccactttccactgagcaagctaaatttacagtccgccgttgggtattcgacaatattcttggaatggcccctgataaatatgttgaaagcaagatgaagagggatgcttatccgaattattttaccatcggtagcgttcaataccttttacctgtggataaattgcctgcaggcagccggattcactctgacagcatgactctttttgagaatacgatgctgttaacaatgtggaaatcattcctgacggaggaaatgccttttctcaatattaatgaggaatcagtaaaaacgatgcaactcagcagttatgactttgccaacctttattccggctcacgttttctgaaaacagtttcagataaagcttttaccgccggggaagccatggcgacgggcgggataatgtgggatttagctgtccacgagggagtcacggaagataaactggcttaccacctggcccctgccttgtttttcgctgcctctgtttcatccggaaacaccagacagaaccaagtgaacgatcttgatgctattaacagttatctccggtacaggaaggaaaccaatgacgtaaagaaagatatagaacagaaacacgataactatctttcagcaacaaaaaaatggctcagcaaggaggctctggccgatgatattatatcacagtgccccggtcttcttcccggcctcgtcgacctggccgatgctattcgtactccaacgaagaggagagaaaaagcagagaaatttgcaaaggaaaattacctgaatggttttttaaaaccctgcgacaatgtacccgtgagtctggatgatgaatataaaaaacggacttctgacgttgctgacagttttcgggaaattgataagtatcttattctttcagcgatcggaggtctgcccgaagaggagcggatttttatttcttcacccggtgccataatgcacccggcgaacgtgagtatgaggactaatcgcgtgccactgttcgcatatggatacgctcatgataccgatataaacgtttccctcgactgcacagatcttgtttccgttcgcctgggggaacaggaaagaatatacgccttaaaggcaatacagggtggccgggaaggttacaggccgattcgcgtagatcgtgacatccgtaaatacatcgacagcggtattcttaaccataattttcatggtaaatatgaggttgatggctcagtagtgaagtctgccggcgatcgtttcaggtattcaatttttgttgagggtaataaaacgtcagataacagtaataatatagattatcttgttaattttctgagtaaaaaacatcgtgacaccttatacgacacactctataagttaggtaatgaccaatctggcctccagaaaacatggagtgtgatcaagcatatcattcctttttatgactgtgttgacggtattataaataacgacccggtacaggctgttcctgcatgccttatggatgccgtagcattcattcctgttttcgggcaggcaaccagcctgagcgcaaagtttggtatggggctggcgcagggacttcgcagtggcgctgttatagtgggcaagggaggaattaaatcagcgggtaaaagtctgctccgggaaatcagcctgccaacaaccgctgagctggcttcgctcgggaaaggcacactcagggcaattgatccgggttttgagctgatagcaggtataagcaggaagtttggtaacaaaatggtgaccctgatgtccggtaataaaaaaacggcagagctggctcaggagattgcctcatcgcgtgtattggaccgactcccccgggtaccggcagatgcaaaggttatggggatattaccggaaacacggctgcaagtgccagtgaaagtcataggaaagcatcgaggcagagatatttacgtgcgtgtaaatccggaaacaggcgttgcaggaggtactaaatatctttgttccaaaaatggaaatcttaaacttttttcatccgtacccggaaaacatagtttgcttaaaaaaacgtctaacagagtaaagagaggagcagataatcctaatctgtgctccggaccaggaacgagcctgggaaccagcagtttccataaggaaatcaggaagcaagaaagcaagaaaaaattggaaagaacaccgaaccaacaaatgagtgataataagcggagggctggcattagcgcgttatccggggagtttgataatttaaagcttgagcagagcaacgttttgaataatgttgccccgtcgaacgacgtactcaaagtacagcaaaggaatgaaaatactgcaatagaaaaccatgctataaacaacgtagttacttttattgaagtggaaatgtcagagatgaaaactgtcgaggatcctatttctgcattgaccacgagtgggctgacggattgttctgcactggctgtattatcggattggaacggggaaatctatgagactcgcactttgatgcacttagccggaagtagcttgaagttcgggttgaaaaacggcattgatgcagacgaattaatttcagatcttaaagatgagttagtcaatggtggaaaagtaatctgggttggaggagtaaacagccagactaacctggcgctggaaatggctataagccaagacaataagaacaatgagcagcctatacttgatcttttcaatacaaatggcgtttctgtggaaattgcgggatctaagggtgttactgttcatccggatggaagagtcgagcttatggatggacccggcagaggttttttgacggcgcaagaacagcaagtcttacttagcaggattgctggcgccaatgatataagatag

SEQ ID NO: 288636 - DNA, 696 bp, Morganella morganii
atggaaaaattaaatgaaaatctcatcagcgaaataaaaaaactgaaaataagcacatcgacaataattgatgtaatggatggtatgaaaacaggaggtgtattaccacataaaataagatcacaaaatacggcagattattatctggttgctcaggcttataccgttcagtggtgcaaaaatcgtaaaggcagtcatattctgacatcgccgccctcaacctgggagcaggtcggggcgtttctggtgccggaactggagagggctgaaggactggtttacgttgccggcagcggtgaatgtatctgtgatgccgcactggccggcggaatgagttgcacatactttgaacagatgggttttgccggggtgataaccggtggtgcggtacgcgatgcaccggatttacaggtactgacaatgcctgttctggccacaaatctgacaccggcggatacccagggagcctggtgtgtctctgaaacgggaacatcatgccggatagagcaggtcaccattcagacaggcgatcttattattgcagatagtaatggtgtggtggttataccgtatcaggatattgatacggttacagataatgccataaaaatgagccggattgaaaacaggatgatggaacaaatacgacagggtgtcagacttccggatttaatagaaaaaacaggacaaatataa

SEQ ID NO: 288637 - DNA, 543 bp, Morganella morganii
gtgctgactatccatacgcttgggccgaaaggaacaaattgtgaaaaagcggctgactactggctcacgaaaaataatgtaaaaggtaatgttaaattatatccgacactggaatccgcaacggaatcagtgaaggaagataaagatggtttattgttgggatgtattgtttatcctgatttaaataatattgtttttcagaatttatcatcacttgaattaaaaaactgctttgtaatggatacgcacaatatggtatttgccagccgttatacagactattgtgatattttccatgtgggctcacatccggcacctcagcatttactcagtgaactgccgatagcagataaaagcatgaaaaaaacgttgttcacatccaacagtgaagcgggggttcagtgcgctcagggaactgtggatggctgtattacgaccctcagcactgcggaaaaataccatcttcatatcctgcatgactttggtcctgttccgatgggattttcagttcatgcgccgatctttcattctgtttcacactga

SEQ ID NO: 288638 - DNA, 402 bp, Morganella morganii
atggggttaatctcaggaaaagatctgattgcttacgatatggatttgggcagagctgagggagaggaaagcaaaatacaggcgcggtttattcacggcaccgcgtttaccatgacattctggtcattcaggccgggggcagtgatcccggaacataagcatgagcacgaaacattgacgacggtgctgtccggtgcgctgcggctgacggttgacggccatacgatgattctgcgggccggtgattccggactggttccgtcatgggccgttcatgatgctgaagtacttgaggaatctgaaatcatcgatgtttacacgccggtgtgtgaggattatgtggcacgtcagcagggaaaaaacgaaacctatcttcagacctcacagaaacaggaaaaatag

SEQ ID NO: 288639 - DNA, 1245 bp, Morganella morganii
atggaacagcaaaatatgctgaacggggtaactggccgcccctggacaccggcgggatggacggcattcccggcagaacagcagccggactattcagttgccggccggctgaatgatacggtcgcagaattacagcatgtccccgggctggtcagtattgcagaaatacatgcattacggcaggcgctgcggcaggtgggggaagggcgggcgtttatcctgcaatgcggggattgcgcagagtcattttcacagtgccgggacgatgtgctcagaaactggacggagacaatgcagactatggcggataatatcggccatggccttgggttaccggtagtgaaaatagggcggatcgccggacagtatgccaagccgcgcagcagcccggaagaaacccgtaacggtatcacactgccgagttaccgcggagatattatcaatggccatgcattttcgtcagatgcacggaccccgtcaccggaacgtatgctgaatgcgtattaccacgccgcagtaacgctgaatgcactgcgcggcagcggaacgtttccggccgctgaaacggcgcaggatgcgctgttccagccgtattatatcagccatgaagcgttacttctgccctatgaaacggcactgacccgcaggcatccggcggataaccgctggtataactgcggagcgcatactgtctggctcggggatcgtactaatgacccgtcacaggcacatgcggaatatctcaggggaattgaaaatcctgtcggtatcaaatgcgggccatcgatgacaccggaaaagctgggtgcattactgacccggctgaaccccggaaatcagccgggcagaattatgctgatagtgcgtatgggggcagataatatctgtgaaaaactgccgccgctgatagcaaaagcggcagcggataacgatgcggtgatctggctgagtgatccgatgcacggaaacacccgcagcacggcagataatctgaaaacacgtgatttttcggttgtttaccgtgaggctggtctgtttgtacagttgctgcgtgcggccggaatgcatcccggcggcctgcatcttgaaatgaccggtcagccggtgacggagtgtaccggcgggccgcaaaagattacggatcaggacgtcggcgcctgttacgaatcgctgtgtgatcccaggctgaatgcggctcaggcaacagagctggtacggctgttatccggttcagcaggctggtaa

SEQ ID NO: 288640 - DNA, 834 bp, Morganella morganii
atgaaaaagaatggactattactttcacttttagttttatcgccgttatcattttctctggcacaaaaaacagatatcatcattgtaaatgatgcagcaaaacttagttatggcgaaaataaaaacatcattactgtttcagaaaaaaattcaaacctgtctcatattaaatatgataaatttaatgttggcagtgaaggtgttattttcaataaccaggccggtgctgatacgattatcaacgaagttatttcccgatccgtatctgaactgaatggtgaaatccgtatcaaaggcaaacaggctaaatacacactgatcaaccctaacggaattgtttgtgccgccgcatgcagcttcagaaatatgacttcagtgaatctggttgccggaaaaatgatgcttgccggtggccgggttatcgggcgttctccgggggaggataccaaactgatcataaaaaataccacaaaaaaaattgcgaaccgtctggtacttaacggccaacatattgaaataaataatggtcacgtgaaaacagattatcttcaaattactaatgtgtttaaccatatgaatggtagtccgttaagaaacagtataaccattgacaaacaatcaatgataaaagcaaaagaaatcaaactgaacattatggataccgatatagctaattacggtattatccggggtaatgtaagcggaattcttcttgtttcagatatcgttaatgagggaaaaatatcaggagacaacatctcctttactctgcgtgatgctgttaatgtatccggaaaaggtaaaatcaaatttaaaaacgatcactctttttaa

SEQ ID NO: 288641 - DNA, 252 bp, Morganella morganii
atgatatccggcgagtataaaataaactatgagcctgttgacggaggttcaggtgagtctaatgatattattttctttaatgtcgatgcaaagagaaaccatgaactctttgattatattaaacagtcaggtttctccggggagtttgaccaataccggaagagagaacgatgggttaaggataatacaaaaattgatatcatcatcaatgaatcagaacaaaccacatcgttcctggtggaaaaaaactag

SEQ ID NO: 288642 - DNA, 432 bp, Morganella morganii
atgaaaaaagaagaattgatagatctttttaacgagcatgcggatttaatcaacatgggaacgtccgttgatgctccaggtcaagagtggattgatgctgcggaaaaagcgttatctgtaaattttcccgaagattataaatggttcttaaataattatggtggtggggatatttgtggggaagagatatatagtatttattgcttgccatttgatgaagcaataggtggagatatagtatatcagaatgtaatcgccaataataatttagcatccgaacgaatctccttgtcaaatacggattttggtgaggaatttttttgggatactaatgatatgaaaaaggtctatgtattaattggtgataatagtcagctatatgctgctgattttttagaatatcttaaaaaacgtttactttcctatgtttaa

SEQ ID NO: 288643 - DNA, 558 bp, Morganella morganii
gtggttcccggaagtggcttaacagacgaatcactctttgaaaagtcaggcgcagcggggcttgcagggctccgggcagtacaaccgcaccgggatgcgccctatgacccgatagggctgctgggcgggctgaatctgtatcagtatgcaccgaatccggtcgggtgggttgatccgtggggttggtgtgcagttaagctctccaataacatgactaaagatggaaccgtaagaccagcaaatacagccgctcatcatattgtcggtgatacatctaaaggagctaagccagccagagacatcctgaaaaaatatggtattgatgttgatgacgcaagaaatggtgttttcctgccgaataaaaataacattgatgaagcattatcaggaataaaacataacggtagacatccggataaatatatcgatgcagtgaataaacgaattattaaagccgatgagataggtggtaagcagggtgttttagatgaactgtcaaaaattaatgatattctttcttccgcaagtcgggatgcaagttggtatacaatactatga

SEQ ID NO: 288644 - DNA, 564 bp, Morganella morganii
atgataaataaagtatatgatttacagtcagatgtgaccggtttttgttcatttatacaggattatcctgatggagaagaaagtattattgggagatcaatgagacaaaggtggaatgcatttgataataattacaaagaaatatcattggaattaagatctaatgatttgggtaaaaaaaattatcaatttgacttcagtagtgctttgtttccatttatggtttttagtgaggttgcgttagcatctttatctgatatcctgagttcaagaggtcaaatattgccggttaaaactgagagcaaacggaaaaaatttgttggctattatccaacaaatccgctttcagaatgttttgacagaaaaaaatctgtttatcgggaatatcctaatggattaatgattgagaagcctgttctgattagagataacattactgatgaatatctgtttactattgatgaagatattagccggatttttgtgacggataaatttaaacaaagagtagaagatgcaggtttaactgctttcgatttttcagtagaaatagaattatcgtaa

SEQ ID NO: 288645 - DNA, 585 bp, Morganella morganii
atggggaataccttattcagtctttaccggactgtcagagatgatccggacaacggttctgaaacggaggattttacccgtacactggcagtacagtcattctgggttgaatcgcagggacaagccggcagcggcaaagtggggctggcatttcgtcagggagaggatgataaagagcctgtgctgcttgcttacatgcgtgatgacggcagtaatgagccaccaccggaagtggcggaacacatgaacgccggtgagcgtgattatgcggaattgccgggcgcttttttgctgacgatggtcgcgcaactaaattacacgctgtgcatcgttgcggaggatgacgaaacaatactgctggacagtgatgccctgaaaacgctgctgacgtatcttcagatactttacaacgaagatagtgaagacactgatgaagagaccgtaactccggttgcggattctgcgggtatcagaacagaaagcggtaacagtattgtcgaaacacccggcagtgccggaaaggtggtcggttttctcatcctggcggcagtgattgtggctgttgtttattttatgcagacctga

SEQ ID NO: 288646 - DNA, 1929 bp, Morganella morganii
atgaaaaaaaaggttatcgcaatccccgcgcttttggttattgctgcgggaatgatatacggatctttcggggatgaagagaccttaccggaaccatcacagaaaacactggattatataacaaaagaatttagcggcctgactcccgaagaagcagcagaaaaagtacagatgcaaaaatataactttgacttctatctcgggataagaggaaaagaggatctctatcgtcagaggaagacagttttacctgaagatgaagaatataaaaatgcattttctgttcttacaccggaaaaatataaaaacaaatttaatgaagccgttaatcaaattgcctttattcagcatattaaatatggccattctgttcttcatttcatcattccggtgatgccggcagacaatcagctcgcgataagcgttaaaaaaattacttacatggatggcagtgaagaaataaaggacagagagacagacgatacgttcagattaaatacacagaaaacggttaaaaatatcgatattactatcacatacaggtatatcagcgatctcagtcgttatcatctcacaccggataagcccgatattttacaaagtgactatagattaacgctggcagaaaaggataaaaattatctgaaatacaccctggaaggtgaactgaatattatcggtgaagacgttactgacaaaaagggcaaaatattatcatcgtcagactgtgccagaggcagtatcggttacgttgataaactggagcgttatattaatggatcagctaaagctgctgataaatacgggaaaaataaagaggagctcataaaaagaattgccggttattatgaacgctttgaacaggaaaccgacgaaccggcaacgtaccttgtcgaatgtacctaccacggtacgccggaatccgttaccgtttatactgcaaataagcaggagcgtgaagaaaaaagaataacgctgttcccgctttataccagtttgtatccagtgattgaagatgagaagacacagacgttttatatcttcgatcaaaacggtaatgagattattaatcatggaaagaaagcgatagacagtgcaggattaggttatttttatacccgccatacagaaaataaaaaaaatgaggatgatggcgaagagtatgaatcattatattatcatatctataaactggatacagtgaataagaaactgaattatataacaaaagcaagcagagtatacagtttatcagatgatgctgttgttatctctgagaataacggcattcagatatttaatacgcattatccggaaccggtaatcatccccggtaacaatctgtatgcggatatttttaacaaaaatgacggacactttgagtttttctattatgacgatagccgggggatgcatatcctgaatgataaaggtgaacatattctgcctgtatccgattaccggctggaggatggcggggataataccgttaaagtcagaaatagtatcctgacagataatacaaaaataaaggataatgagatctattttattcacactgacggaacagtgcgtctgacgttaacaggttatgacaacgccggtaaaattactgacggtatgatacaggtaaaaaaggacaatttatacgggtttgctgacgtaaaaggaaatgaaatggtcgctccggattatcaggaagcccgtgattttgataacggttatgcgctggtgagaaaaaatgatcactggggtgtgattaataaacagggcggtgtggttattccgtttaaatacagccgtcataatgccatgtcatccatgaacggactgatatcttaccgtattgatgataagcattacaccatgcaggaattactggacgcaaacggcgtgaaaacagacaaaataacagcagcagaacattaa

SEQ ID NO: 288647 - DNA, 1719 bp, Morganella morganii
atggatgtatcaggaataaaatcagcgaaactaatcactcccgatgttttaaccggggaaattaatgaaatagaaaaaagtaaggttattaaccaatctgaggtggcctctttttctgaaaaaatcgttgaggagttgggggaaagatatagccgggaaaacagtaaaacagcaaagccacagcttaacggacaacaggccggtaaacactatgatggtaaaacatcagcaaaaaggatgtcaattaatgaattgtttgcccggttatctgatgatcttttgggggagcaggttaaaaattcaggtataaataataatattaacagtagtattttaaaaaacatctggtctccgcagaaggaatctgaattagataaggacattacaaaatattttaatgcattatctgccagggttaataacatatcagactattactttagtattatcaatgataagaataaagattatgatgatatccggttgttttttaccggaggtaaaaatgtaaatatcagtgataaagaagaatttctggttcatttccgtaatatacttggtgttgatgatatcctgaaagttatgtcagacagtgccggtgactgcaaggaaaaaacaagtttaattaagaaattgctggatgacattctcagtctgccaaaagcaaaaggccagcagtggataataaatcctgatgaattagtcttactaaaatcagaattaaattcattacacagtatggctgaaacgctggcttcagtaagagaatgcctgtctgcagcacaatcgctggttaatatgaataataaaaatacgattgagtataataattcccttgcggttctgatgggtaagctggctgatttacgtgatcaaatggcgcaaaagaaactggaaaatgaccgggagttagcccgggtacaacaattggcattacagaccaaaacagataaagatgccgctgatattgcagaaaaaataaaaaaagcagaacagttgcaggctttatttaaatggctggggccattgctgattgcgattatggcagtattaacagcattaaccggcggactactggcaaaagcactggcagcagttatcgttgtgatgactattatctctgaagttgtaaaagcagccggcggcccggatattatggcaaaagtcatggagccgatgatgaaactggtagaagcggttcagaagtttattaaagatgttgctatgtttattggtaaactagaagggaaatcaccggaagaactgaaaaagctggaaaaaaccatggagattgtcgcaatggtgctggctgttgtggttgtggccgcattatttatggcgctggcatcagcggctggttcaattgcgggaaaagtgataggtactttcgcttcagaagcgatgaaggcggcaatacagagtgctttagctcagatacaaaccatgctgattaatgtcatgatggtgtcaaccattatcaatggtgccagctctgttacgaatgcagtattacaggctgacgcggcacggctgcgggcagatatggatcttgatacagagttactgaacagaattaccgagatgatgaatcttatcatggagactttctctgagtcacacaaagaactcatcgcgttaaatgaaaaaatcagtaagcacggcaatgaatcttttcaacggatgaaatcaataatacagcaagggcaattagctgtttaa

SEQ ID NO: 288648 - DNA, 1302 bp, Morganella morganii
gtgaatattaataatgattatactatagcatccggtatgttcggtcctgaaaataaaactgatcaggatgaacgaaaaatatccggttcgggttctgatgatttatcgagagtcagagttgataaaagaatattggaattattttatgatatgttgtgcgaagtaaattcagcattatcagatcctatgataacagacgaacaagcattaaaagaattggataaatataataatataataaatacaccgggtgtcatggaatttatgtcaacttcgggaaacgaactatcagataaaataagggatgtgaaggatgctgttgaatattatttcataaagaaagaaatggttacctttggctattttgtggataagatggatgttgcatctaagtatgggcataatataagtgtgaagtgttatcgcaccggatttagccagtatacggaattttataaaacgctgacaaaattattaagttcgtatggcgagtatgccagaggggtagtagatgacggtaaaaaaacaaagttcagacaaaatgaattctactatgatctgcatgtggcattaatgaagttttatcctgttaccggtgacttaaaaaatgatgcaggagaagattgttcaatatataaaggacgatttgaaatagatacaaagaacggggtaaataattgttcagtttatgtggatggtgaactcattgattcgaacgttagttatagtgatgctataaaaaaaatggaatatttcttttccgtaatgaaaacaccagtatcaggcactcaggtaattaaaaaagtaaatacagaaacaaacagtgacggaaaactggtaaaaataaccggaatggctgacgttatggtaatgcctgaggcattattcagatggcttgatttttctgtaaaaaaagaaaactatgacgaaataaattctttttttgaacagtcaatggataaattaaagaaatttgatcatgttaatgatgactactcatcggtatcttctttatatgaaaatgcattaaagaaaaccagtgattttttcaatgaaaaattaagttccagttattttaaaacagcaaagtccggaaagaatgaagaatgggaattagatcagggtaaaatcagttcatataacaccattatagatggaataaaaaaagaatttcagatgacacttgatgagttctctcagcgatataacacgatcaacagtaactacgataatatgctcagagtcattaccaccatgatcagcgaactgactcaggaattaaaaggttttttacgaatttaa

SEQ ID NO: 288649 - DNA, 873 bp, Morganella morganii
gtgaatatcgaatgttattacagtgatcctgagaccggttcttgtacggatgagatggtgaataaacaggtgatcgatttattgtcagtgatgataaaaagaaaagagaaaaggcagtgtgataatgatattccggtaacctgttcatccattcaatattatgatgataaatattacgatagtaatttattgtatcttcttccggagataaaaaacagtaattatcattctcatgaaagacatgatgttataattatcttgccctcgtcagagttaaagataaaaaattcagtatatcagaatgctatgcctgactatttattatgtagaaatccggcagataaacgccctgatacgcatcctgagaatgtgacttctgcaaaagaactaaaaagtatggcagcagaaaggataatggtggaaaacaccccggaatcagcaggtatcccggaaacagaatacacaccgggaactgagtacaccgcgggcacagaacacatcccggagacagaaaacgtgccaacagcagatatgacgccgatattgccggaatttccggttttccggctctccgaagccatgccggagaaaaagagtctcacattgcggtattatgagcaggaaaagggatcgcaggaaaaagcggctcagattatcggttataccggaaaaaatcaggctgttccggaaagcaacagacctgattattattgttcttatcatttcagacagaaatatcagccgcctgaaccggtgcttatttaccgggaaaaaccggggcggtttaaactggaaaccggttcagaactgcttaaccggcgactgaaaacgatgaatgcgataaatggaattgatggtgttgatatagtataa

SEQ ID NO: 288650 - DNA, 1062 bp, Morganella morganii
atgataaaattatacgacataataacaatgggagattcatccggaaaagaaatcacattaccttccggtaaatatcatattaacaataccgatagtattggatccggtgacgcactgatccccttgtccctcccggtaccggattcatcattacagcgtatcgaggccgaattgcatgaagagtattatagtgtttcctgtactactcacagcaatgaaactatcacgacagacatcggctataacgcattattttcttatcagggaataccttttttcgctgtaaaagaacagcaggatacctggcataaaagcattctgtctgtgacaaaaaaggccggaacacgccgcagcaggttctccggacccgcctgtttttatgttgtactgatgttatcgctcctgctgacagcaggattgatactcctgaaaaaccaaagcagaacagagacaaaaaaccatacgataagttatgaaaatattatacgcagctatataaataacaatgaatatattataaaagacaataatatccttgttttttcatcccccggaaacgatatttccgggctgaaaaaagaactaccgggctatactatttttgaggttaataaaacaagcataaagatagataaagatgatattatcaccatgcctgattttaataaaagaaaagaaatcatttatatatatcaaatgaataagatagttatccctgaaaccttcaatcttcctgatgagttcagagaagacattactatcaggacattatcattcagtgatattgttaaattaataaatgaccggttcggtcagcactcaatccggtactctgtaaaaaaatcaggaaatatcatttggatttacgcagataaaaggagagacaaggaaacagagactattataaaggatatcaataccacgatattctcagcccccggaaatacactggtacagtacagggaaagtatgccccgcaacatttatcccggcctatatggcacagtaaattatattcacctgtctgataaccacacaaaattcacctctgataatgaataa

SEQ ID NO: 288651 - DNA, 1209 bp, Morganella morganii
gtggtgttcaccgcgggcaacggcggtctgccggcgacgcagacggtgacaaccggagcggacggatcagcgttgtttgacgtgacgaatatcagggccggggtgaccggtgtcaccgccgcggtgaacggcatgtcggtgagtaaagacgtgatctttaaagtcggtgatgcaaaacctgctaattcttctctttcaattaacgaatcacggattattgcaaataatggtcaaaatgaaggtatggcaatagttaccttattagttaaggatgggcaaaataatccagtggacggattgaaagatgatcttcaatttgtcgtgttaaaaggaagcacagttattactgagggtgttttcattaaaaatatatcagcgactgccacgcatggccaatatacagctgacgtatctgggattgatgcgggtgattatgttattaaggtaaaaattggtagtgaatactttggggaattaaacgctggcataacattatactcatataatttttatataattaattcagccgtaaataaaacaattatacctgatcagactgttcagtatgttttaaaggctaaagcaacggataatgttggtgcagaaataacggttagtaatatcacatggcattcatcagataatacgatagcaaaatttgaaacaggagatactatcactggtataaaggctggtagtgtgactgtgacggcttctggtgtaacattgaatggaattaataatgcagatgtgacaactaaattgacggtttcacctcctaaggaaagtattgtatatggtactgcatcgggtaccgcaaatacggatttaattaaggcacctgattattctttatatgcaaaaacaggttctattgttgatgggataggtagtacccaggggggagggggagataatacccaaaatattcaacatttgaatagcatgaagtcgattgtaaccagtgtgtgtactcgtcagggtaacagatttggcggtttattaggacaagtagtctttaattcaaaacaaaatacagtacaaacagcgggtagaaatgcttgtggtggggggagcaataaatatacttggaatgtacctgataaggcgactattgttggtgtaaaaacatggttaggtaaaggagataccagtgagggatttccgggagtagttgctattcagtggctttattatgaagaagagtga

SEQ ID NO: 288652 - DNA, 1932 bp, Morganella morganii
atgagccttcctcgaagaaccagaactcatattttagaagacctctcagttagaaagtttcaatccctattgccagaacaatggatatatagaactccttcccatgactatggtattgatggtgaagttgaggtcattgattctgacggttatacaacaggaaaaaaattcttagttcaactaaaagcaacagatgaagagaatgagactaatgctctaaaaattagaatgaaaatctcttcattgaattactttgatcaactaaaagttccgattctaattgttcgttatttatctaaatcagataccatttacactcgctggtttcactctttaaacccaaatgatgacacaaaagcagaaaaaagcttttgtatgttttttcaagaaaaagacaaatgggatgaagttagtgcagataagatccttaacgacgttgaagcgtatcattcgataaagcaacgcctattacaaacaccatttttaatttcagtacgaattgacagcaaagcttccctgtcaaagtacaccgcaaaatttgccactaagttaataggaagctcaaagcaatcacgatgtccattttcattctctttagtttcaagtcttgatgaaaaaacaactagctttatagagatatttgatgaagagttttatatcaaccttgctggcgtaggtagctttagagcacattttcagccaccaagtgacgtggctgaattagatagtcttctctctgatatatacgttgcattagctttcattttacaaaaattaagtcacatcaaagaagcagaagggctatatgatatctacctgaatagctctagtttcaaagagaaggagcctatttttttttcatatatatctacaaaaattcagctaaataatattcttgacgcagtcaagtttatagttgagatagcggaaaaaataatcaataaaggcgatgacctcaacttggttcaagttggcttatcagtagtcatcagtcaaacaccaaaagaacatatgaatgctataattagcgtatataacaaattaatagaaaatacgggtaacccactggttcttgctacgtattactacaatataggcaattgtctaaaaggcaatgattaccatcgtgaagctattaagcactatctcaaggcagcaaaaaccaatccagattataagcttcgtccttattggaaaaaagaacttgctggtcttttttttgtgaccgggaaatacagaacatctagtaagctatatgctcaatcaatgcagaacgaaaacataccagaaaataatgttctttacgctgacagcttgatgatggcaggatactataaaaaggcacttgaaatattagaaaaaaatacatcacagttaaatatcagaaactctgaatggtgtttaaaaagcatatgcttacaatatattatcagtaagtacgaagttgaagagcaaacaaaattgggagaggcgggacgagaattcattgaaaaatccagtgaaaaagaaatattatcattcctcaaaaccaaaaatgctctgtgccctgatggccagttctttatcggaacaaaattaatcgaaagagaagaatttgaagaagcttgctattgctttctggtatctgctttttcagatgaatgctataaaccgtcttggttgtacgctatggggtgcgcatttaacgcccgtctaatggacttatttttatttatcctggaaacagccagtagaaaatgggggatagaaataattagtgaattcgttgatcaattcccctctggtggttactctaaacttaatgagcttgctctaggcctaattcaatattgtgaagaatatatcagcacctttgaagataagccgtttgaagtaaggctaggggacagtgaatcttctagctctataatacttaataagttaatcaattga

SEQ ID NO: 288653 - DNA, 567 bp, Morganella morganii
atgtcttgttttaaaagtaaattgttaatttcttctctgtttttactgtcagttaattcattcgctgcagatgatgatggaattctgggtgaacagcctgctgaagatcctattgagattaatggcaatattgtatttaaaggtgaaattacagattcaagttgtgatatcgctcaaaagaatatagaggttgacctcggtacccattctgcaaagttgctgaaaaacagagatgacagaacaccggcagaacagtttgatattgttgtgacagactgttcattatccatggcatcgttaaaaatccaaatgagtggtacagcgcataaagataatgctgcattattcgcactggatgccggtgagaagaatgccggtaacgtcggcattatagtcactgacaaacaggatcagccgataataccgggtgcggcttatcaggatattgtactgaaaaatgattcccgtgattacacactgacctacagcgcagcctatcaggctaccggactggcaacaccgggcacaggtaatgcgaccattaattacaccgtttcttaccagtaa

SEQ ID NO: 288654 - DNA, 2439 bp, Morganella morganii
atgacagataccaaaatcgattggggtttttcagttcgcaattttgaggatcatgaaacacaacaatttttaaggggcatccttatccaagactcatgtgtacctttcctgggagctggttttactcgaggagagaaagcaagacataaggtcgttcctggtggtggtgaatggatggagataatgcggcaacaaatcaaaaagtctcctgttacagaaaagccatccgatgatgaattaaataaatttagctttcaggaactttcagatatttattttagggaaaaaatagtttcattagaaactataaaatcagatattaataactgttttaccgatgtaaaaatagataatgaatccaaattaaattttttatcagttgactggccatatatttacactctgaatattgatgatggtatcgagcgggctatagatggtgtgaaagtattaccttatcgagaattttctagatatgaacagcgtcgatatgtttataaactacatggtgatgcagaagatgtgatgactgctgcaaatcacgatgagttaagagttatatttggcaaggctgactacattaatagcttaaataataataagtatttaattagcggattaaccaatgatttttttgagaagaatattatctttataggttgtagccttaatgatgaattagatattgcatatgcattagctaatcctgaacttgcaagtaaagatatcaatactgctcgtatttttattacttcagatcccttaactagttatgcggataaaaagaagttaaaatcatacggtataacagatgtaataataactgattattctaatttctacgattttgtagcatctgttgcacatagagaggagcatcagttaccggccatagaatctttccagtatgttaataataacgaatcttttactgggaaaaattttgcttcatatttattacaaagcggatggaaacaagaaaaaaatccgggggttgtttcggttcctcgagtgatcgaacaaacggttcttgatagaatcaatgacccgcttattgttatttggggaagaagattttctggtaaatctactattttgtttaggattgtggaaaaagcaagaacacgcaaacgttatcttgtacactcaaagaattcaatgagtataagggcctttaatgacatatttaaaatcaaggattcattgatagcaattgactcaggagcaattcattttaatcaacttaaaagtatatctcaaaaaacagatattctgagagaaaataatacaactattatcctaactgtttctagagctgatttaaatgcttttggtagtaactttgaggacgaggcaatacagatacaatctcgactatttggaaatgagattcaggagatcaacaaattgcttgatactcaaggtttacagcggtggcatgggagggctagtattttagataacatcttcctacttgctaaatcaccaatcgtaagacaaatacttaatacccaatcaaaattggaagaccgtattattagcatttgtagcgaaaaaaatggagatgaaaatgtaactggatctagtaaattagagttttcgctccttttttatctagttagcagagagaaaatattttctttggtacatcgccatcttatccgtagttacgggttaggatacttgcttaatacacatctaggccattttgctaaaaaatgggccccatttattgagtatgaaaagactgatgttattagcgccagagcagaaaaatctggctatgttactgtttgtaattcatatgcttggatacagcttgctgtaagtattttctctgagaaattaggtgtcaaaagaacagcctcttttatagctgaattataccaatgtgtatcttcaatagatcaaggagcacacaagattatcatgtttgataatcttaatgccatttatagtccgacaatgcagactaatcgagattggtgtaaaaaaatgattacatcagtttatgaagaactcgttacatattgcgctcaagatcctgattattggttacaaagagcaaaaggcatttactatctctctgacagagaagatgaaattcgtattgcaattgaatattgtaaaaaaagtatagttgaaagatcgatcaagactagtatcaactcaaagcttaccaaagctaatttattgggtaaactttgcatgattacagattacattaatgaagaagatatttctgatgcaattcaagcttatgctgatgcaattaatgatcgtgattccaatagctcatacattgatggactcttaaaaaagaacagagatggttttggatatatgaaaaaagtctgtgaagaagcaagcaagaagatagctctacttcctaaaaaggctgatattggcctgatacagcattatataaataacgcctag

SEQ ID NO: 288655 - DNA, 1059 bp, Morganella morganii
atgctcccgtcagtctccataaatacagatacttcagcacatatttctcatcataattatcaggcggccccattaacacccgagcgtgtgacacgaaattcttgcctgacacagaaggatcaatgtagttctcgtgtcatgggtcatctctcttgggttgaatatgaacatgttgcatcacttcatgacagaattgactttataaataaagtcacatcttatattgcagacacaattccgttgcaagatacaccaataacattgatatcattaggctcaggtggcttactgacagaatcatttatagatgaacaacttaaaaactcaggttataaagacattaactggagagtcatagacccagactaccaaaataatggatatgcacagtgccggaaagaatttaaacaacgagtcaataataatatcagggcatttacaacggagcaggcatatttaaacaagtcactcggacattacgggttagctgaaaatgataaaaatcacggagccactgtcatcttatctattttccctccgacagcattagctgaagtaagctacgaccccgattgtatggttctcaaaggaaggtctgttgaggatgccagcaaagcaaatgggatttatttgtttgttgtaccaccaaattataaagaaatgttagataaagttccacacgtcttatctgaagagggccagcttattgttcttgactgtgcgctaaaatgttcaattaataaacaaggaaattatgagattaacgttagtccatctgaaaatggtcgttttataaataatggaactaaaccctacctggattatctcagtaaaatgtccaatctgacacagaagaaaattgagttaagtcatgttgacaacgcttttgataagtatattgaaaaactaaataatagtgatcgaattggtatgaagttttttgtttccgattatgatataagtatagtaaaattacacgattactttattgagagcaataacaaaacattatttgcgtcttttgataagaatgaaacttcattcaagatgaatgaatag

SEQ ID NO: 288656 - DNA, 156 bp, Morganella morganii
atggaatcagaagaaatcagggaccggcgtccgatgcaacggcgcggtgtaacccccaacaggatctctgtcgccggttcagtctgtgcgttattcgccgaaggcggcctgcgcagccctgccggagctgatttacgtaaggaacataaaggatga

SEQ ID NO: 288657 - DNA, 462 bp, Morganella morganii
atgtctttagttataggtaacggttgctttccgtgtattattgatacttataaagtcttagatgtatttaataatactgctccccctaccctgagtatctgggagaaaattaaggagtttttctgccgtactcatcagacagaggctatgtcataccttcataaactctgccatcctgatcctcccctgaccaaaattgaaacaaaggcactcttcgaaaaattacgtgagttggcttatcccggctttgaggattatttttcaattgaagaagttgatgaagttgatgaagctgatgaagctgatgaagctgatgaagctgatgaagataataaaattcttaatttacgcatcacgagtactgaaggttacaacttgctgacaatacgtattaaaaataactattttattgagtggaacgacaatattcattgtctttatccactccgtcagtcagcctga

SEQ ID NO: 288658 - DNA, 252 bp, Morganella morganii
atgtacagtataaaaatgtatccgtggttatttttagtatttgcacgtagtggtttacatcaggcctggcgtatgtgtcatggcgtaatttattcagaaaatacaatatattggcggggtggtaatcaggatttcctgcaggaaataaaaaagcctctgaacaaacgaaaccggttcagaggcgtcaggtgttactttcagcttggtaacatgtctaagatagttaagttatatgaattagtcaaaaaatga

SEQ ID NO: 288659 - DNA, 738 bp, Morganella morganii
atggtgtctaccgattttaaatggaagcattttgcgccaactattatcctgtggtgccttcgatggtatggctcaacgccgctgagttatgctcacgtcagcgatatgttagctgaaagaggaatttccgttcaccgttcaaccatttatcgttggtttatccaatatgcccctttgctacgtaaaaaactcaaaaagtatcagtttattcgtaccgtttcctcctggcagcttgatgaaacctatgtgaaagtgaacggaaaatggttttacctttaccgggcaattgataaacacggcgatacgctggatatctatttttccccgaaacgtaacagccatgccgcctatgagtttctcaaacgggtattaaaaccttactctgctgagcggcagccagaaatactcaatactgacaaacacgccgcttacggttatgcgattgcccgtttaattaaagaagggaaactccgtgctgacgcaaaacaacggcaaataaaacatctcaataatcgtattgaatctgatcacgcaccgattaaaaaattgattgtcgccacgggcggcttcaaatcggcgaagcgggcctggtcaaccctccagggatttgaaaccttgcgaaaactgaataaaggccagtttgatgattggctccgtcatgacgaacccaggtttcgggtgcgggagcgatctgcctttatcaatcacttattcaatgtggagactgtttttgcgtga

SEQ ID NO: 288660 - DNA, 660 bp, Morganella morganii
atgacaaaacgtgtggtcatgacagccgctctggtgagcggagcattagcactctctggttgcacgactaacccgtataccggtgagcgtgaagtcagtaaatccacagttggtgccgcatcggggtctcttgtcggagcaggtatcggagtgctgtcttcctcgaaaaaggacaggaagaaaggggctttgattggtgctgtttctggcgctgccgtcggaggaggaataggctactatatggatgtgcaagaggccaaactacgcgagaaaatgaaagggaccggagtcagtgtggtacgaacaggcgatacaatcatgctcaatatgcccaataatatcacttttgacagcagcagcgcaaagcttaagccagcgggtgtcaatacactgaccggagtagcaatggtgcttaatgagtatcccaagactgctgtaaacgtagttggttataccgatagttccggcagtgaagagttgaataaggttttatctcagcagcgtgctgactcagtagccagctcactcatcgcgcagggagtagtcggtggccgtttgcgaacccgtggtatgggagctgtaaatccaatagccagtaacagcactactgaaggtaaagctcaaaaccgccgtgtggaaattatattaaatccgctttaa

SEQ ID NO: 288661 - DNA, 672 bp, Morganella morganii
atgtctattgaacatgctattgatctatccttcggatctcaagatttttttaggtcatttctccatgatactataaaaaaggcagcttactggatggttttcgaccatgatggaaacattctggtaagcaattgtgattttgatcttaaggtacacatctacagtcaaaaaaacacccctgtctacagtgactctccttttttatctacagtttttatagaagaccaaaactatgctgttttttcacctcattacctttataaatcacctgtactttataaaggtaattattgcgtattatattcatattacaaaatactgacatctgatttatatcactttttatttaattcatgtgattttaataagaaggattactttggtaatgaactggattttaattttcaggtcaaacggttaaaagatagtaatcctctgtcagtgctgacaaaaaaggagtgggcaattggctggcttttgattaatggtttttcaacacaggaaattgctgagattttgaatcttaaacttaattctgttcgaaaatatattgaaaaaatattgggtattcaaaagttagcaatcttcaaacgtgaattatttatccatttagctcactatcttggatggaatctttatataccttcgatgttcattaaaagcactgtataa

SEQ ID NO: 288662 - DNA, 213 bp, Morganella morganii
atgataataacagggttggctgccgggtttatttttattcttactggtctgtggcgatattatcattgtgaacacagaaccggaaagataatcagcatctgtctcattgcagccggtattctggttattgccggtgtgtttattactgacgcaataaacgataaaagaaagccttatcaggagagttctgttatcgggcggtatttacggtaa

SEQ ID NO: 288663 - DNA, 1845 bp, Morganella morganii
atgactgatatccgtgtgttaccgctgctgtgtgcaatggcctttccggtcaccgtcttcggtgattacgatgccgggtcccgttttgcgcatgagcagaaagggcagggcaccggcgcgatacagactatgaaaccggaggaaatgatccccgggtataccgccaatccgccggaaagcggctattacggcggtgtgcaggccggtgcggcctccggtctggagagcgccggggcggatgcgctgcataacacggaggccgggaatacggtgatggatgttattaaaaaccgtccgccggacagaccggatttggatgccccgtttatcagtaacggactgactgtccgggacaatgcggaggccatcaccggcggcacagacgtgccgtgcaaagacgtgaccctggataaaaccgacatcaccacccgttactgtgagcggtcaccggccgcagcgctggcctgtacgcggacagccaacattacgtggaaagccgctgacgggtgggaaacacagcggattaccatcccgccggacagatttacctattcgtacggcggaaacggcattgataccgcgtttgtgtcgccggtaacaggaaccgtacagagcgcggtactggacgtgtgggtcggcggtaaccgttatctctggaatacccggctgaccctgctgaacagtccggtgctgatgaccaacaccgcccggtttaccctgaataatgcgccgggctatgccctgaaagaaggggtgacggtaaaaagtctgcgcggctgtccggcggataataccaactgtaacggggcactcatcgaaggcatgtaccgtcagtttacacaggaaaaatccgccaccctgacgctggtcatggtggtcacggttaaggtgaagacggttgagccgtacatcgaatgggtggaacactgcccgttcgacaaatcgcaggaagtgaaactctcaacacagtgtacggaggcaggcggcaccagaaccgttgagtacggcggtaaacaatacccggtgtacagtgactgctggcagtataccgacaactatatttcccaggatgcggataacggctcctgtgatgcgctgatgaaagatccggcctgcaccctggcaaaaaccacctgtactgaacaatccggtgccgcctgtctgcgggaacaggcggttttttcctgtgagaaaaaagtcagtgccgccgggcagttgtgcggtatggatctggtctgcaccagcggagaatgtgaccagattaacagcggcggggtgaatgattttcagcacgcggtctccgcactggcggcggtggccgctgccggtgaggatgtggcggcactgaatgatgtgaatgtccgtgcctttaccggacaggggcagttctgccgcaaagcggctgccggattcagtaactgctgtaaaaacagcggctggggtaatgatacgggactggccggatgcgacagtgaggaaaaagccatcggcaaggcaaaagaccgcaaactggcggtgtatgtcggtacttactgctcaaaaaaagtgctcggtgtctgtctgcaaaaaaaagagggttactgcgtgtttgacagtaagcttgccaaaattgtccaggagcaggggcggagctggcagctggggatcggcttcggcagcggcaacaatccggactgccggggaataaccgttgaggaactgcaggcgatagatttcggccgtcttaattttgcggacttctacgaggatatggaaaacggcacggatatcccgtcagaccaggcgctgattgaccgtgtgaaagagcagatcagtaaccatctgcagcgggggacactgccatga

SEQ ID NO: 288664 - DNA, 360 bp, Morganella morganii
atggaatttcaaaccgggagaacacgggctctgaccgataccgaaaaacggacagccggtgcctttgacaactttattatttatctgacggcagccgttgtcgtctggttcttactgaatgcgttgttttattttgtctggtcgcccggtgatattccggttccggtaaatgagctgtggctgaaagacatgctgaatgtgctgatgtatgtcataccgctgtcatttgccggaatcgccgccggtaatgtggccgtgattttgcttaacgatattctcaccccgctggcagaaatcaccgtatacggtctgtccgttctgttccgtaaaatcacccgccgggagaaaaatcatgaataa

SEQ ID NO: 288665 - DNA, 414 bp, Morganella morganii
atgacacttttgaaaaagatcaccatactcaaaattgcggttcttgccgtaatctgtatcatcatggcaaacgaaagtcatgacatgaaagagagatttccttatttatttggtttggtttctttgtttatttcatctttatatgtctttgcgtgttttaaaattgtagatgataaaaatatttctgttgaatattgtgtgttagccaatatggtggcaatttttgttttgttccctctgatatattctatattttttggtttttttccagtaatgacttgtttgtcattctctataagttttgcagatgtcgtattttttcagttaaccatttataaatttgcgtatgataaagccagtggtagtccgttagtgaaatggataatggctaatatgactaataaaaagaactaa

SEQ ID NO: 288666 - DNA, 252 bp, Morganella morganii
atgaatattagtgacattgccgagaaaacaggattgtctcatcagcagttatcccgttatgaacgtggtgttaataaaatatgtgcagatacgctgtataaaataagcctggtttttgaatgcagcgttaatgatttattctctgatttaccttttcgtgaaagaatattagaaaataatcatttttataatgatacatcagctatgattgatgattatttccatggtgtaaaatcgggaaatccactctga

SEQ ID NO: 288667 - DNA, 1779 bp, Morganella morganii
atgatgactaaattcaatacattaattaaccggatacagactctccgtccggataatatctggctgaataatgaagccgatatccttatcgatcgtttactgcgatacaaactgagcctcagtcattcagaaacggtaccggtcactcaggatcatatccttcgcagtaccacaccggtacctttctctgatgagctgattgcgcatgtggcaaatgatcatcagtgcattaatattatgctggataatataacgctggattatcaggcagatatattgcctaatctcagaaatacctctctggctgtgaggtttacagattcacagccacagtgttacggtccttatacactgacattcctgctgatgagccctgcagagaaggcctgccagctgatcacccgttatcccgccgcgatacaggaagagactctccggtataaaataacagagctggaagagcgtaaattacaaaaagctcaggagattctcgatcctgctgagtttttatcccttatcagtttccgggaaaaatgccagcccgcctctctgccgctttctgccgccctgatactccggataagtgaactcgttccgtttctcagcaaacatgatctgaccgacttactgtcatttttctggggcggcgatctgtcggccacgactgagtggctccggtatctgcaggctaaaaatacggtgaaaaatgcccgtcaggttattgcgccgtcaagaaccgttatttcatccggtctgatgtcagatccgttaaccacaggagaatatccggcctgttttgatgatattccgctgtgcccgctggctgacggcgttccgttatctgtcgtgccattatcacgccagagcctgtttgagataagccgggaaatcacactgactgttgcccactcttcacgccgggataccgtgattattccggatgatcctttcttcacgttcagtgatttttatcagcagcgtgatgatactgatctcctgctgcaacaggaaaatgacgcatcacagctttgctcacacctggcttttctgttccgtaatacaccgttcagtgaacatgacattcatgcacttatccggacattacaaacccgttctgatcgccatggtgaattactggatggcctgatgattgatgaaacgttactgggcgcattaacctatacgtcatcacaggatgaatcatccgtgtttccgggtaccatttatttcccggatgaagaaccggcagccggtaaaaataagtccggcgggtttacgaccaaggcctggcagctatgggttaaccatatccggaaaaaaggcttcagcaaaacactgagaaaacgcagcgggctgacagacaacgagctcagcatgctctgccagattttgattcaggccggttatcaggcaaatttacaggatcacctggcacagacactggaaggattggaaaataatgccgttgccggcgtttgctgtgcggcccgggtacttaatgagtttgtcgcctggcttggctacagttttgtccatccggatgaacgacctcagagtaaaatgaatccgggagcgccgctttttacgccttcatccgccgccggtgaccctgctttcttttcttcagacaataccgtttccggtaatacgatctggttaggggactggcttatcgccctgtcacaccgagcagcagaactgccggaaggatacggattaacaacggcacagcgcagagaaatgaacaaaatattacccaaaaacctcaaagaaaattaa

SEQ ID NO: 288668 - DNA, 2913 bp, Morganella morganii
atgttaaccgaccttattcattataaacccgatgtaacgctgatccgcgacagtggcatccagtttctcgattttggcctgtatttgccggaaaactcagataaaaaaggctattttgtccgtcagaccgccaacggcccgctcctgcatcttcatcacgatgaaaatgacggaacatttactatcccgtcatcacagggcgaaacggcagagcgtgtcagaccggaaagtgccattctgctagctgattcactctcggtatccgaaggtcagtggctgccagttccctggctcagaggcaagaccgggaatacatccgcatccggtcctgataactggtcacgcattcagataaaccggcttaacgagccggacgccgccggaaataacatccggataagcattgcgtttgatacccgcacacttcatgaaaatgatgccgacccgcttctcgccccggttcagtctgacatcgataacggtatccgtttttcattcgtacgggaaaatgatgatatcgccgcattccttgataatacgtggattgacggctggctgcgtgaagtctttctgagctatgttcagcagcatgaagatcgtactgaacaggaagtcgcatccgcactgaaattatttgaatatcaggctcattatctgaacattcttcatatgatggcagatcaccttgctttgcctgatgttcttttaagcagcggaacactgtataccccggccattccggttgatctgattctggatgtcggcagtacccatacctgcggcatgctggcagaagatcaccaacaggaaaatgatggtttccgtcagtgtgaagagctgcgtttgcgctcactcagtcagccgtatcttatcagtgatacgcttttttccagcagacttgagtttaacgaagcgcagtttggtaaatcgcatttttctctcgaaagcggtcgtgaaaatgcatttcagtggccatcgattgtccgtctgggggatgaggcaaaacagttaatgcatcagcgcgccggcagtgagggatacagcggtatctcgagtccgcgccgctatttatgggattcagcgccggtcagtcagccatggcgtttcagcggtcgccggaaagaagcgccggctattgccgcgccgtccatgctgctgatgaatgatgaagggatccccctgcataccctgacgccagaggtacgtttaccggtatttaccccgcgttacagccgggcctctctgatgacattaatgctcagtgagctgatctcacaggcattagtgcaaatgaataatgtggcggcacgtcagaaaaaagggcaccgcaatgccccgagacagttacgtcatatcattctgacactgccgtccgcaatgccgtatgaagaacaaaagcatttctataagtatatgagtgatgccatctcgctggtctggaaaagcctgtcatggcatccgcaggatgccggattcaccctgcaggaagacaaagcgaagagtttatatcctgttccctcattctcatttaactgggatgaagcgtcctgcagccagttagtctggatatataacgaaagccgccgctatggcgggaaaattgataaattattcggactgctcggccgcccggatcgccggtatgacaacggggaaatcaaaggcaaatcattacgtatcgctgcaattgatatcggcggcggaacaacggatctggcgataacccgttatgacctcgacacccaattaagcagtaacataaaaatcacaccgcagctgctgttccgcgagggatttaaatgtgccggggatgatcttctgcttgatattatccgccgtgaaattctgcctgcatttgaaaaagccatcgcacaggccggggtcagtaacagcaggagcgtcatgcaacagctatttcaggctcagggacgatttgatgatcagggcacattacgccagcaggtctcattacagctgatcataccgctcggccatgcattactgaatgcgtgggaacacggtcgtaccgttaataccacattcggtgaattgctggcgacattaccgtcaccacacgtactggcatatattgaagagaccgtaaggttatccggggggacattaaatgttctgaatattcctctgtacagcgatcctgaatcactcaatcatgccgcattaaccggtcagctttctcttaccggcgtgctgaaatcgttatgtgaaatcattgaatattaccgctgtgatgtccttttaatttcaggacaacccggcagcctccccggaatacaaacgtatttccgccgccgccagccggtaccatcggtacgcatcatcatgatgcagaattatccgttgcacagtgattttccgttctgcccgaaaaaaggcggtgaaaacggtaaaattaccgccctgctcggcgccacgatttttcatcttgcaacagatctccgtcttcccggattcaatatcacgcccgggaatatcacgtcagattcgactctccgctatatgggggtgctcgatgaaaataatttactcagtaatgaaaacatctgttatcagcaaaacgatgacggcagttttccgcaagtcatcgatattccgatccgcggaaatatccggctggggttccggcaggcagataaccctgaatggcctgcgacaccgttatatcagctgaccatctcagatccgaatctggcgagagagcttgccgggggcgaaattctgcatgtccgtttgttacgggaagccggtcatgacgtatttacactgaaagacgcaacacttcagagcggaaaatcaatcacaccggaatgtttacgtttatcgctgcatacactgacagacagtaatacagccaaccgggaatactggatcgacagcggaaacttatttcaataa

SEQ ID NO: 288669 - DNA, 1428 bp, Morganella morganii
gtggtaaaaccttttctccgcagcggtcgacgcagcgattatttgccgttaggtgaaaacggccaaacagtctttgattccgcgttgcaaatacgtgaggccctgcgattacagggctttcatgatgcagccaattgtctggcaataccgcaatgccacagtgacagtgaccgtattgactggtatgccccccgtcacggaacactgacatcatggacgcatatcagccatccgcagcgtttacacctcatcagctatttacaggaacgccacgccgaactggacgctttccggctgcgttgcggcagtgcggagaatatttccctcagactttttgcgtcattactcaaacatgttctgcaatttccgggtgtacagcatatctggttgctggatgataaaccggtcattgaattctggggattttcttcacttcctctgcattcggatgcccgtatgctcgatattattctgcgggaagaggaagagcgccagcagcaactgatacagtcggcagtgcaggcgaagcagagtgaactgagtgatgagcaggcgaagcagagtgaactgagtgatgagcaggccgcagacgaacatcccggtgaaccggattctgaagaatcgcctccgctcgttgtcagtttgtcgcagacctgtaacgtaccggatgaagaacccgtaaaaacggcagaaccagaaacccgtaaaaaacgcaggttcccggttaaatatgccgtgctgaccgtcctgcttatcgcgggagctactgtattatcgctgcctctgttttatacaccgtcagagaataaaaacagcggaactgaactccgcccggcagagcctgaacagcagacagaacaaccggaaaaagcgcctcagcctctcctttctgaggtgatagaaagtacattatcaaccgtgatgaaaaccatttcgtctgcaaaaccggtcgttgtgaccgctccggcagcgccggaaccggaagcattaccgcctgaaccggctgcacctgagatcctcccggcagaaccggtacaggataaagataccctgatccttttccccaactcagtcagagccggctcggttaaatttctgaacggtaactggcaggctgttttctttggtgaaaccgcgaaaccggagacttacccttctgtgcgtctgcagataatgaatggtaaaggtcatatacaccttaatgacggaaataagtcatgccaggcccctgtttctgccggcctgctgccttccgggacactgtccgtaaaaagccgcacactgcgggcacggtgcaatgatggttcccagcaaactattccggatatcagttgcaagcagggcaccgattccgtcgcaatttgtcaggcgaaatggtccgataacgagtcatctcagcttacattcaaaaaaattatggataaataa

SEQ ID NO: 288670 - DNA, 444 bp, Morganella morganii
atggaaaaactacggcacactttacttaaactgcaagaactactgaaccagatggacagtttactgatagaggaaatcaaacagcttagttccttcagaataaatccggtcgcacttcagcctatttctgataataaaagccggattctttctgctatcaatttttatgataaccagagaaaacaattagagaaacaaggtcagttcagtgcgccttacagtaactcaccaaagttatctaatctctggtcatccatcgtatctcaaacaaaaaatgcgaatgagttaaatcaaaagagctatgccttattagaactccatatgcaaaaaatgcaggagtttaaaaaaatggtgaaagatcttgagaaaaaaaatgcgatgtatgcatccagcggaaaagctgaacaggaaaacacaggacaaatgtataatatatccatctga

SEQ ID NO: 288671 - DNA, 306 bp, Morganella morganii
atgaaaattgccgttgaacgcctggaacaagttaaccatcttgctgcgactcagcaggatccgtcagctcgtaacaaagccgctgtatcagaacagagtgcatctgataaaaataaagacgcctcgttacaggttactctgagtaaaagaatcagtaatattaatactgacaccactcatgacgttaatctggaaaatgtaaataaagttaaaatgcagatcagcgaaggtaaatacctgatcgatactgatgaaatagcacaacaactggttagtgatatttttaatctttctaaaacttattga

SEQ ID NO: 288672 - DNA, 699 bp, Morganella morganii
gtggactttagactcatccgttattttctcttactgacgattccgttcagcctgcctgcattcccggcatcggagcagtctgcggtactggaaaaaaatattcagacactgattggcggggaactgcagaaaaacaccgtaccggatgatgacctcagaattaaaattctttcttccggaaaacaactggagagcctctgcgataaccctgttctttcactcagcgggcaaaacagtaaaatcaccggaaaccggaccgtactggcccggtgcgggaaaaaaagtcattacatccggatcaatgtgtcggtcaccggaacatactgggttgccggacaggcattgttacctggtgaagccatcaccgcggcacagctggaactccgcacaggaagcctggacgggttgcctgcggatatcatcactgatccgcagcagataacagataagataccaacccgtttaatcaaatccggacaaccggttactgccggttcactgagaaaaacgtggtctgtactgacgggagatgaaatcagtgtcgttgcttccggtaatggatttcaggtaacaactgtcggaaaatcaatggataatggtgctttaggtgacactgtacgtttccgtacccgtttaggccagattctcaccgggaaagtcaccggaaagaaaaaagtcacaataaatatgcaaaactga

SEQ ID NO: 288673 - DNA, 417 bp, Morganella morganii
atgctagataaatttgataatgaattacgtttccagcatgaggcgttacagctgctttcacagcgtcaggatattattgctgcgaatatagctaacgcagatacgcccggatatcttgcacgagatattgatttttctcaacaactgaaggatgcgaatgatcgtctcagtgtggggaaaatgggaaatgttaaattagcaatgacatccggaaaacatattccgggtgcatcttccgtactggaaaacagccagttactttaccgggtgcctgatcagccaagtgcagacggtaataccgtggatatggatcgtgaacgtgtcaatttcgctgataacacagtgaaatatcagacaagtttaaccatcctcggctcacaattaaaaggcatgatgactgttatcagccagggttaa

SEQ ID NO: 288674 - DNA, 405 bp, Morganella morganii
atgtcattgtttagtatttttgatatttccggctccgcgatgtcggcacaatcaaagcgcctgaatgtcagtgccagcaatatggcgaatgccgatagtgttgccggaccggatggtcagccgtaccgggcaaagcaggttgtttttcaggtgaatccgtccatcggaacagagattggcggtgttcaggtctccgatgttattgaaagcgatgcaccattccgcctgatttatgacccgtcaaatccgtttgcagatgacagtggttatgtccgtatgcctaatgttgatgttgtgggtgaaatggtaaataccctttcagcttcaagcagttatcaggcaaacgttgaagttatgaatacggcaaaaacactcatgctgaaaacattgatgttaggccagtaa

SEQ ID NO: 288675 - DNA, 675 bp, Morganella morganii
atgtctgtatcacccgtaacacaaaattcgaccactgatgactcttacagcgcagtaaatcaggtcagcgccgctgatgatttattaagcaattttatgacgctcctggtggcacaaatgcaaaaccaggatccgactaacccgatggataacaaccagctgacctctcagctggcacagttccagaccgccgccggtatcgaaaaactgaatagcacagtcgccatgaatacgggtgtggtgttcagtatgcatcagaataatgcggttaactggataggccgtactgttctcgttgagggcgatacggtggtaaccatcacggaagacggaaatccggaactggcattttctatcaacagtgatgttgaaaaagtcaaagttaccttcaccgatgatcagggcaatgcgtatgttggtgaaattcaggatgtgaagaaaggtatcaatacctacaccatggacgatgtgaccaacttccagccggcagaaccggaaggcggaccgttcactgtcacgtattcggcgacaacggccagcggtgatgcaccggatatcgtcggattaaaatcggctgaagtggaaagcgttgacataaaaagcggtgtggctgttttacatctcaatggcttaaacggcaccgttatgctcggtgagatttatcaggttcagtaa

SEQ ID NO: 288676 - DNA, 1212 bp, Morganella morganii
atgagtttttcacaaggtctcagtggattaaatgccgcgtcccaggctctggatgttgttggtaacaacatcgccaactcacagacggttggttttaaatcaggttctatcgcgtttgcggatgttttcgcaggctcacagatcggtatgggtgttcaggttgccggtgtaaaccagaatttcagtgatggtgtgctgggaatgggaaacagccagctggatatgggtattcagggcgatggctttttccgtctgattgatggcggcggtaaagtattttacagccgtaacggccagttcaaacagaatgaagatggctacattattaataaccagggtatgtacctgaccggttatcaggcaaccggtacgccaccgactattgagcagggcgccgctattgaacctattcagatcccgaacggcaatatgccgccgcgtgcgtctgacgccggtaaaatgaacggaaacctctcctccggaacagaagctatcgaccaggcaacgactccgtttgatcctgaaaatggcagcagttacaactctgtcagccaggtcgatgcgtatgacagtctggggaataaacatacgattaacgtttattacgttaagaccggtgataacgagtggaaagcctattctatggataccacatcaccgacaactgcccctgcctggcaggaaacaacccttgaattcgatacatcaggccagttaaaggatccggtcaaactgggtgtcaaaggtgatccgtacaatggtgcggaggcgctggattttgagctggatctgaccggtatgacccagcaggcatcggacacatcaatgaaaagcccgagcacgacaggttatgcaccgggtgagatgaacggctttatcatcggtgataacggtgaagtgattgcctcatacagcaacggacagcgtcagaccgtgggacagattctgctgagcaactttactaacccgggcggactgacgccggaaggtaataactgctggagcgaaacaccggcatccggtcagccgacaaccggcatttcaggcaccggaaatctgggtaagctctacgggcaacgccttgaggcatccaatgtcgatctcagccaggaaatggtcaatatgattgttttccagcgtaactaccagtctaactcccagactatccggacgcagtctgagctgttacagacactggtcaacataagctga

SEQ ID NO: 288677 - DNA, 744 bp, Morganella morganii
atggataacgtcatttatacagcactgggcggcgcgaatgccgcccttaatcgtcaggctgttaccagtaataaccttgctaacgcatcaacaaccggtttccgggaacagatttctgcctatcgtgcagttcctgttatcggcccgactgttgaaacgcggactctggttgttgaatcaacccccggatccagttcggcaatggggcctgtcaatatgaccgggcgggcactggatgttgcactgcctcaggatatctggctggcggttgaactgccggacggcggggaaggatatacccgcaacgggaatattgaaattgacagtgaagggcaattactggtgcgcggacgtcccctaatgggggacggcggtcctctgactgttccgccgcaatcaacactgactatcggttctgacggtaccatcactgcacagggtgcaggggatgaaccgtccgcactggctcaggtcggacgaatcaagctggtcaatgcccctgtgcagacactggtcagaggcgatgacggcctgttccgctcaggaattgcggatgcacctccgttaccggctgaccaggaagcacagctgatgccggaaatgctcgagggaagtaacgtcagcccggttaaatcgatggtcgatatgattgccacggccagaagtttcgatatgcacatgaaagtgatcaccagtgctgacagtaatgccaaaagtgctaaccagctgttaagtgccggctag

SEQ ID NO: 288678 - DNA, 783 bp, Morganella morganii
atgattcgttctttatggatagcaaaaacaggtttggaagcgcagcaaacgaacatggatgttatctccaataacctggcaaacgtcagtaccaacggatttaaacgtcagcgcgcggtatttgaagatttactgtatcagacactgcgtcagccgggggctcagtcttcggagcagacaacgatcccgtccggcctgcagattggtaccggtgttcgtccggttgccacggagcgtctgcatacccagggcagcctggtgcagaccaataatccgctggatctggcgattgaaggaaaaggattctttcaggtgctgttaccggacggaacaacggcgtatacccgtgatggttctttccagccggatcagaatggtcagttagtgacgtcgaatggttatcctgttcagccggccatcatgatcccgcaggatgtgaaacaactgacggtcggtaatgacggtaccgtcagtatcacggttaacggacaaaccggctcacagcaaatcggacagttaacgctggctacgtttattaatgataccggcctggaaagcatgggcggtaacctctatctcgaaactcagtcttccggcgcaccgaatgagtccacaccgggcttaaacggggcaggtatgctgaaacaacgttatgtggaaacctccaatgtcaatgttgctgaagaactggtgagcatgattcagacgcaacgcgcttatgaaataaacagtaaagctgtttccacttcggatcagatgctgcaacgtctggcacagctttga

SEQ ID NO: 288679 - DNA, 747 bp, Morganella morganii
atgacaactactttgtttttcgcccggctggacaggcagataaaaaacgtgatgaataagtcactttcccgccgcatcctcccgctgacattaccactgttgctgactgcctgtgtgcagtttccgcacacacctctggtgaccggaacgacgacagccacaccgcagcaggcttcacctgtcgcagccaacggttctattttccagacagggcagatgatgaattatggttatcagccgatgtttgaagatcgccgcccgcgtaacatcggggatacgctgactatcctgttgcaggaaaatgtcagtgccagcaaaagttcttctgccggtgcttcccgtgacggttcaacggggctgtcttttgatgcgacgcctcatatgctgcagggtatttttggtggcgaccgtgcgaacacggccataagcggagacagtaagtttgccggaaaaggtggtgcagccgcgaagaataccttcagcggtacgattacagtaacggtccggcaggtgctggataacggtaacctgagtgtggtgggtgaaaaacagatagccatcaatcaggggactgagtttattcgtttttccggtgtggttaacccccgtactatcagcggcagtaacactgtggtgtcaacgcaggtctctgatgcacgtattgaatacgtaggtaatggctacatcaacgaggcgcagcaaatgggatggctgcagcgtttattcctcaatatttctccattctga

SEQ ID NO: 288680 - DNA, 1092 bp, Morganella morganii
atgggaatgttgtgcgtattaagtacgctgactttttcacactccgtttatgccgagcgaatccgtgatttaacgacgatcgaaggtgtccggagcaactcgctgatgggatacggactggtcgtcgggctcgatggtaccggtgaccagacgatgcagacgccttttacgacgcagagtctgaataacatgttatcccagctggggatcacggttccgccggggaccaatatgcagcttaaaaatgtggctgcggtgatggtaacggccgatttaccgccgtttgcccgtccaggggaaaagatagatgtggtggtttcctcgatggggaacgccaagagcttacgcggcggaacgctgttaatgaccccgttaaaaggagcggataatcaggtgtacgcccttgctcagggaaacctgctgatgtccggtgcgtcggcacagggcggcggttcccgtgtccaggttaatcagcttaacggtgcccgtatcagtgatggtgcgaccgtcgaacgtgaagtgccgatggattttgccaatcagcgggtacttaagttacagctgaatcaggaaaactttaccgttgcgcaggcaatcagtgatgtgattaaccgccggtacagcgcggcggcgacaccggaaaatgcccggagtattttactgcatgcaccgatggacagcgctgcccgggttcgtttcctagcggaaattcagaacctgccggtgagagtggatgccggggatgcactggttatcgtgaattcacgaaccggctctgttgtcatgaacagacacgtcacgctggaatcctgtgcggtggcgcagggcgatctctctgttgaggtctcgagaacgaatcaggttagtcagccggataccccgtttggcggcggacagactgtcgtaacacaggaaacacaggtttcactgacggataaaggcggcgcccttcaccggatcaataccagtgctgatttgaataatgtgatccggacgcttaacagcctgggagccacaccgaatgatctgatgtctatcctgcaatcaatgaaaagtgcagggtgtctgcgggcacgactggagataaactga

SEQ ID NO: 288681 - DNA, 945 bp, Morganella morganii
atgaatgagttactgaaccgtgacgctgtatttgatttacgttctctggatacattaaaagcctcggtcaaaagtgactcttcagagggtgtcagggccgttgctaatcagatggaagggctgtttgtccagatgatgctgaaaagtatgcgggatgcctcgttcaaaggcggacttctggatagccctcagtccaatatgtttacatcgatgtacgatcagcaaatctcccaggaaattgccgcgaccggcaaactggggcttgctgatctgattgtgtcgcaacttaccggtgaaaaggtcagcagtgaacagctgaccggcggtaatcacgttgagctgcccggccgcctgtcacggacagtcggaaatgcactgatcgccggtgcggaaaaggttcttcctcaggctaaagcagcaatggcgcggttatcggaagggagccctgcaggcagctttatttccagaatgctggcaccggcgattgaagcggaaagaaaaagcggcatccatcaccagctgattattgctcaggctgcactggaatccggatggggcggaaaagagattgtgaccaaagacggaaaaccgagtcataatttatttggtatcaaagcgaccccgaactggaaaggtgaaaggacagaaatcaccacaacagaatatatcggtggtgtaaaacagaaagtaaaagccgagttccgggtatatccgtcttatgctgcggcattatctgattatacgtctttattgagtaaaaacccgcgttataaacatgtggtcagtgccccatcacctgaaatagcggcaaaagcgttgcagtcgggcggatatgcaacggatccgcattactccggcaagctgattaatattattcagcaggttaaaaacagcacgggtcaggctatcagtgcctataaaaatgatgcttttgaattattttaa

SEQ ID NO: 288682 - DNA, 1635 bp, Morganella morganii
atgaatctcatgttcctggcccgcagcgggctgagctctgcacaagcggggttaagtatagttggtaataaccttaataatgctttgacaccgggatatagccgtcagacgctgcttctgggcgaggccggcggtaaagcgacgagctatggctttttcgggtacggtgttcagattgatggtgtacagcgtgcctatgacggattcattaataatcaggtgcggaactcaaactctgaattttccgcactcggatcccgttatcaaaatgtcagccagatagatgatatgttcggagataccagtaataatatctctaacgcattcggcggtatttttgaagcgatgcaaaagatgagcagtaacccttccggcattgctgaacgtcaggaaacgtatgctcagtttaattccatcagttataaattccgcaatgacagtaagacactggatgggctggaaaaaagtacaaatactcagattagccaatcagtagatgatattaacagttgtgcccagcaactcgcgaacatcaatagcgaaattgataaaatatatgctcagacaggtacattaccggcggatttattagatcagcgggatctattactggataaactgagtggccaggttgatataagagttaatgaaaatcgtgagacaggacgggttgacgttacgctggccaatggtctgacattagttaatggtgataaagcctacgcactggaagccagaccatcaccatcgaatccgaatattacagaagttgcctatattgatgcatcaggaaatgcattgttactggacgagcagaaattcaccggcggtaagcttggcggattatttgagttccgtaataacgatttggtgactgcccgtaatgaactgaaccagctggcattgcagatggcaaatgagttcaatacggtgaatgctcagggttatgacgcagacggtaatccgggcggagatatttttaatattcctgatcctgttgcgctggctaaccggaataatcagagtgatacaacgttagatattacttacaccgatatcagtgaagttaatgcgattgaatacagcctgacctttgacggcacggactggcaggttaagaccagtgacggtcgcaccattacgcctgatacggggccgaatggtgaactgttatttgacggtgtgtcggtaacaccgaatggtactccggttgaaggcgacagctttatcatgaacccggtttccggtgtggcaggcggcataacggttgcactggccgatggctatggtatcgcagcatcaagttcaccggatacgagtgaaaccagcaataacgaaaacctgctgttgttactggaagtaaaagataaaaaaatgatcggtaattccacgtttacagaagcgtatgccggtatggtgagttctgtaggcagtacggtcagcgggttaaaaggtgatctgacaacaacgggtaaagccttggatcaatgggcattccagaagcaagctgtttcgggtgttgatatgaacgaagagtttatcaacttagcgatgttcacccagtattaccaggcaaatgcccaggttctgcaaacggcagtgactatttttgatacgattttgagcattcgctaa

SEQ ID NO: 288683 - DNA, 921 bp, Morganella morganii
atgcgttttagtaccagttatatgtatcagcgtaatgttgacagtatgtctaatgcgacggtgaactttaataacgtttatacgcgcctgtctgcaggacaaactttgctgaaaccgtctgatgacccggcagcggcatctcaggcgattatctataaaaatgcattatctgatataaatcagtatgatactgcaagaatgtttgcacaggatgcattaagttatgaagataatgcgctgaactctatcacaaatcttctgaccaaaaacctgacagaaaaaattgttcaggcaggtaacgatacctattcagatgcagatcgcgaggcattagccgtcgagctggaaggtatccgcgataacttgctcgatttgggtaacagcaagaacagtaatggccactatatttttggcggatataattctgattctccgccatttttaccggatggtacttatgtcggcggtgataaagcgattacccagaaggtcggtgacagcgcagaaatgcagattggtcataccggcagcgatgtctttatgagcggaaccagtgatgatctgtttgttgcgctggataacgcgataacagcattaagacaacctgttgaaacggatgcggatcgtgaggcattacgtgatgtgcttgataacacgaaccgttcaatcaataaatgcattgataacctgggtaaggtgcaggctcaggttggtactaatttacaacaactggaacagctgggattcgcttctgatgtaaataaaatttcagttgaaagcagttatgagcaaacgatcggtgcggattctgaggcatttatatctctgacaactcaggcggcaatggctgatttcgcacttcaggcatcaatgttagtttttcagtccatgaagaatacgtcattatttaatatgatgtga

SEQ ID NO: 288684 - DNA, 486 bp, Morganella morganii
atgttcaagaataaaaaaaatgtaaaacctcaggaaaaaaacgatctgcaaaaaaaatccagtgccatcaatgatagtacagataatatcaatcttcagtccggtgacgcatctctggtgcaggaagaaaagcaaaaagcacaggaagaacgacaagttactgttataagtaaaaaaacaagtttaaccggtgatattgaatttaacggtgatctgcaaatatgcggaaaagtaaaaggacagatcaaatcaacctcaggcactgtcagtattatgcgttccgggttagttgagggtgatgtctttgctgaaaccgtattaattgatggatctcttgtcggttcctgtaatgccaaacaattagatattctcgaacatggtgaattaaaaggaatttgccgtgtatctaacctggctatccgcaaaggtggttcgtttatcgggcaatctgaagaatacgatgaaaagaatgcaataaaatcgtaa

SEQ ID NO: 288685 - DNA, 204 bp, Morganella morganii
atgagttacaaagccgatctaaaagaaatgatgacagaaatgcaggaaattatacataactatgtcgggaacaatgccaaaacaaaaatatctgtaaatgaaaacaggttatctataagcattggtattgaaggtgtttctgatatagacatatcaatatcaaaaaataaaccatcggaaacgcatgacaccaaaaaacaataa

SEQ ID NO: 288686 - DNA, 1650 bp, Morganella morganii
atgttaagtagaataagaattctgacaagcatactgcttgtcttgggtattttttgtatgttgcaattagtctccggtggatttttcttacagactgtaaagaatgacaatgaaaaattcaccatgattaataacttaaaagcacgttcagatgcccttggtgatgtctggattgatttattaaaatccagaatggaactgagccgggcatcatcacggctgttgcgtaataatgataaaataacaccggaatcactggagtttatcagttctgctgaaaaatcaatggcagatgctgaaaaacagtgggcgctgtttaaatcattgccgacaacactggaaaatgacaattcaaaatatcttgaagaagaatataataaataccttggtgctcagcgtagtttggttaattttttacgcgctgaaaaaatagatgagtatattgctcagccgacgcaggatttccaggatgcgtttgaaagtcaatataatgattatatgcaattaaacagtgttctttataataaagtcgttgaagagaatacaatagaatataatcgttctatatggatacttctggtcattattgtcagtgtatttattattatcagcttagtatggttaggtatccgccggatactgatttcaccattaaaccgtattgttgaaagtattcagtatattgccaaaggcgatctggtcagaacgattgatgttaccgggaagaatgaaatcgggcagttaggtgatgcattacgtcatatgcaggttgaacttgcaaatacggtcagtgatgtccgtgatggtgctaatgcgatttacaacggtgcaagtgaaatctctgccggtaataacgacctgtcggcccgtactgaacagcaggcggcatcccttgaggaaaccgcagccagtatggaagaattaacggcaacggtacgtcagaatgcggaaaatgcccgtcaggccagtaacctggctcagacggcctctgataccgctcagcgtggtggcaaggttgtggacgatgtggtcgatacgatgcgtgatatcggcggcagctcacaaaaaattgctgatatcatcagcgtgatcgatggtatcgcgttccagaccaacattctggcactgaatgcggctgtggaagccgcccgtgccggcgagcagggccgcggatttgctgtcgtggccggtgaagtgcgtaatctggcccagcgcagcgcgcaggcggcccgtgagatcaagagcctgattgaggattccgtcagtaaagttgatgccggatccgttttggttgaacgtgccggtgaaaccatgggtgaaatcgtcagtgctgtcaccagagtgaccgatattatgggcgagattgcttcagcgtctgatgagcagagccgtggtattgatcaggttggcgtggcggttgttgagatggacagagtgactcagcagaatgcggcgttggtagaacaatccgcagcggctgccggatcacttgaagagcaggcgagccggttaactcaggcggtagcggtgtttaacattcaggcatccgctctgaatctccggaatcacagcagtaaaaatataccggtgccgtcacctgtagtgaagaaaaaaacagacagctcagacgatgactgggaaacattttaa

SEQ ID NO: 288687 - DNA, 1662 bp, Morganella morganii
atgttaaaaagaataaaaacatcacgatttttattatgttttgttttgatattaatgatatcacagttaataaccggcacttttttttacacatctatcgtcaatataggaaatgatttttctgctgttatttcgataaaacaacgaattgatctggttaatgattcagcagcgaatttacaacaagcaaggcttgatgcatcccgcgcagccgccaggtttgataagaaccggattgcgcagggcgaagcgattttaaacaccgccatggccgcactgaaaaaatccaaagaagagtgggatactgctgacgctattccaagcagggtcaatcctgaattgctgagtgagttatcaaaaaactataatgcatatcatctgagcattgaaaaaatgctgaatatattaaaaaacaacgccatggaagaatttcacaattatgatataacacctcaacgtgaagcttttgataaaatttactcaaaatatcttagcgacgttgattttattgtatcagaaatgaatgattccgttaatgaattcatcaaaaaaatatcatttattataatatctttaatatttatctttttattaataatattagccattttatttggtttcaaaaaacttttaacatcaccacttgaccgagcgataaattatatacatgacatttcaaacggaaacctgacaaaccatattgataagtccggattcaatgaaatatatatgctgacagatgcattagataatatgcaaaactcactgactgatattgtcgataatgtccgttccggaaccgatgcgatttataccggtatcagcgaaatcgccacaggaaacaatgatctgtcctcccgtactgaacagcaggcttcagcactggaagaaaccgcagccagtatggaagaactgacatccacggtaaaacaaaacgcagagaatgcccttcaagccagccacttatcacagaatgcgtcagacacggcccgcaaaggcagtctggtggttaacagcgttgtgcagaccatgcgggatatttcaggcagttcgcagaaaatttcagatattatcagtgtgatcgacggcattgccttccagaccaacattctggcactgaatgcggctgtggaagccgcccgtgccggcgagcagggccgcggatttgctgtcgtggccggtgaagtgcgtaatctggcccagcgcagcgcgcaggcggcccgtgagatcaaaaatctgattgaagattctgtcagtaaagttgatgccggatccgttttggttgaaagtgccggtgaaaccatgactgaggttgtcagcgcagttacccgggtgaccgatattatgggcgaaattgcctcggcatcggaagaacaaagccgaggtattgaccaggtcggccgggcagtatcagaaatggatactgttactcagcagaatgcggcactggtacaggagtcagcttccgctgccgccgcactggaagaccaggccggcagactgactgatgcagtcgcgatcttcaatatccggaatgccctgcaaagcccggtacaaaaaacaagggctgcctcttttgttacgaatacgcaggtaacaccgcatcatgccatgccggagggtgtcaaagaaaaatacgaggaagagtgggaagcgttctga

SEQ ID NO: 288688 - DNA, 786 bp, Morganella morganii
ttgctctcgctttccgttctcagtttataccccctgattaaccaatacttttggccatttttacgtattcttgccgttttcagttcatcgccgatttttaatgaaaaagaaatcaataaaaaaaccaaaatcgcactggcgatgatactgacgttactggttgcacccggccttcctcagacacaggtcaatatattttcaatcgatgcgttatgggtcggtatccagcaaatactgattggcgtggccatggggctgacaatacagtttattttcattgctatccgccatgccggggaaattatcggcttgcagatgggtctttcgtttgcgacgttttatgacccttcaggcggacaaaacatgcctgttatctcacgtatcctgaatttactggcaacactgctttttcttgccttcaacggtcatctgatgctgattgacgcactggttatgagtttcgaagcgatacctatccagcacaacctccttagatccgaagggtttatgatttttgtgcagacatcgggattaattttcaccagcggtatgatcctggctttacctattgtcagcgtattgctttgtctgaacctgattatggggatactcaaccggctgacaccacagttatcaatatttgtcgttggttttccgctgtcattaagcattggtatgctgtcactgagtttactgatgtactcgttctctcctttctttcagagattgattaacgccatttttgaaaacctgtcatcggtactgataggattcagtgtggtataa

SEQ ID NO: 288689 - DNA, 270 bp, Morganella morganii
atgacaccagaaagtattatgggtatgggctatgaggcaatcaaagtcggcctgattattgcgcttcctctgcttctgacagccctgggtacaggtctggttgtcagtattctgcaggcatcaacccaaatcaacgaaatgacgttgtcattcatccctaaaattttaatgatcgttgttgtcggtattatgcttggccctaaaatgctggtgattttcctggattatatgcataccctttataccaatattccgggttcagtggggtaa

SEQ ID NO: 288690 - DNA, 747 bp, Morganella morganii
atgatgcgtaaacattacattattcctgtactgacagcggtattttcactgttactccctcagatctcctgggctgcaaacagtgatctcctgctgatgcgggacggccactcggaaggctggtcattaccggttcagacactggttctgttaacgtcactgacatttttaccggcttgtttactgctgatgaccgggtttacccggattatcatcgtgctgggattattacgcagtgcgctgggaacaccatcaacacccccaaaccaggtcttattaggtctcgcattatttttgaccttttttgttatggcgcctgtgttcagtgatgtttatgaaaatgcctgggtaccgctgtcagaagataaaatcacgatggaagaagcgctgccgagagcggaacagcctttcagggcgtttatgctggaacatacccgtgaaagtgatttagcgctgtttacccgtatcgccaaacatgataactacgcgacaccgcaggatgtcccgctgcgggttctgatgccggcattcgttatcagtgaactgaaaaccgggtttcagataggttttaccgttttcattccttttctgatcattgacctggtggttgccagcgtactgatggcattaggtatgatgatggttccgcctgcgacaatttcactccccttcaagctgatgcttttcgtgcttgttgacggctggcagctggtcatgggatcgctggcacaaagcttttacagttaa

SEQ ID NO: 288691 - DNA, 411 bp, Morganella morganii
atgacaacacaagcacaatcaacaacgcagacaacaacaccggaaggccctgtatttacaccggggggccttatcagtgaggtgggaggaggattagtcctggtacttctcctcttcgttgttggtgcgtgggtagctaaacggttacgttttttttccggaaaaaccggcaacggatcaaacctggttaccgtcagacataaccagcttatcggacaacatggccggttagtcgtcgttgaattcaatgaacaattgttattattaggtgtctgtcagcaaaatatgcaatgtctggccacaatggaaaaacctgctgaagaactatcagatcctgtcccggcacccttcaaaaaaatactaaaaggactgaccgccgggaaaagcggagctgataaaaatgatgcgtaa

SEQ ID NO: 288692 - DNA, 411 bp, Morganella morganii
atgagtgataacgaaacttcaccaaccggaaatcaggataatttagatgacctgtggggaagtgctatgagtgagcagtccgcagctgagacatcagagcagaataaaacatccaatgcggcgactgaccatatcacaaacagcttccctgaagatctcaatctgattctggatattccggtaaacatgaccgttgaactcggaagaacaaagatgacgattaaagaacttctgaggttaaaccaggggtcaatcgtttcactggatggtctggccggtgaacctcttgatattttaattaatggctacctgattgcccagggtgaagtcgtcgttatctcggataaatttgcgatacgtattaccgatattattacgccttccgaacggatccatcgtctgagccgataa

SEQ ID NO: 288693 - DNA, 999 bp, Morganella morganii
atgtctgatagttttttatcccaggctgaaattgatctgctgttaaatggtgaaaaccaggcagaaaacagcagttctgaagataagctgaatcttgatgcgaatatcaagccttacgacccgaatacacaacgccgtgttattcgtgaacgtctgcattcacttgagatcatcaatgaacgttttgcacggcagtttcgcagcggcttatttaatttattacgccgtagccctgacgtcactgtaggcgggataaaaattcagccttatcatgagtttgcccgtaaccttccggtaccgacaaacctgaacttagtgcatctgaatcctttgcgagggactgcattattcgtttgttcgcctaatctggtctttattacagttgataacctgtttggcggggatggtcgttttccgacaaaagttgacggccgtgaattcaccccgacagaacaacgcataattaaccgcatgctgaacatggcattacaggcctatgatgaagcctggagttctatttttccgctgaaaacagaatatgtccgttctgaaatacaagtgaaatttacaaatatcacatcatcaccaaatgatattgtggtcaccacaccgttttatgttgaggtgggatcacacagtggtgagtttgatatttgtattcctttcagcatgattgaacctatcagagaattactgatgaatccgccgctggaaaattcccggcaggaaaatacaaactggcgtaacacactcgcgcagcaggtaaaaaatactgagctcgaactggtgtcaacgttagtgaatattccgacacgtctttctgatgtattaaaaataaagaaaggcgacattatttcatttgataaacccgatttaattgaagctgctgttgacggagttcccgtactgtcagcgaaatatggctgcagagaaaatcagtatgctttacaagtcgagaatctcattccctcggctttattatcatttacaaaggaatag

SEQ ID NO: 288694 - DNA, 507 bp, Morganella morganii
atggccaggaagaaacaaaaaaaaagtgaaggaaaatctaagtttccatttcttttactattaatgatgagtctgactatctctgcaatcgcatttgcagggtatatgtggtttgaacatcagaaagtaaaagatacattaatgaatactgcatcggaaactgtagccaaaccagctgttgtatcacctgagccgatttattttcctctggaagcctttacgatcagcctgaaaccatcagtgccgggaagccctaagattttatatatcggcctgacgctgagactggcaaacgaaacgtcaaaacaaaatattgagaaatttttaccggaaatccgcagtcgtttactgatgttattttctcatcaggaatcgggtgatttattaaacgacgaaggtaagcagcgtttgatgtctgaaattaaagatgtaataaataagtctttgaacggtcaggacagcatacagataacagatgtcttatttaatgcatttatactacggtaa

SEQ ID NO: 288695 - DNA, 1122 bp, Morganella morganii
atgaacataaatatgatacctacctattccggcacgcctgatagtctcaaccatcaggattacaccgggcagggtgattttgccgctgatatggccggttatatggccttgttagcctcggtaacagacaatgcgtctgaaaataatgagaaaccaccggaggaaaacccggtcaatgagatagcactcattaccgcgccggttaacacgctcgaacaaccgatgccggcattaccgttaccggccggcgctgatcagcctgccttaaccgctgacggcaaaccggtagccggcgtaccggcagaaggcggtgataccgctgctgaatccccgctgataaaaatgatgccggaaaccgacatcgcagccgctgacgtacctgatgaactggcaaccaccgccgcgcaggtccgtgatgccgtcagtaccgtcagacaggatccggataaccggatgacgctggtgtctgataaagcgcggaatgcaccgccggcctcagcgccgcagccggctgaagtcttatccggtaaacctgctgaacctgtggtaccggtatacggtaatatgcagacggatgaatctgttgtcagtcatgaaaatacccttcctgaaagaacaacattactgccggcagggattgcggaaacccggcctgcaaccataacaccggccgcatccgccccggttcctgtatcggtattgcctcagacaaccggaacagcagaatggcaaaaatcactgggacagcagattgcacttttcgcccgtaatggtatccagcatgcggaactgcggttacatccggaagaactcggcgcggtgcaaatcagtatgcggatgaataatgagcgtatgagtattcatttcatcgctgagcacgcgcacgcccgtgatgccctggaaaacgccctgccgaatttacgccagtcgttaaatgaatccggaattcagctcggacaaagccatatcggcgcagattccggaaccacaccgggggataagcgggcaggaacaccggaacggctcagaaaagaagatccggatattcaggaagagcatgaagagccggcaccggcaacacaattaacttattatcgtaatggtatcaatacgttcgcctga

SEQ ID NO: 288696 - DNA, 444 bp, Morganella morganii
atgaaccgtcatgaccctatggacgtattacgcgacctggccgataaaaagctgaccgataccacgaaccatctcggaaagatgcggcaggaatatgctcatgctaacaaccagctgacatcgctcgaaaattatgagcaggaatatcagcagcaaatgcagtcagggatgacggataaagggatgacagtcattgaattattgtcacaccaatcatttattgcctcgcttggtaaggtcatcaatcaccagaaacaccaggtggaattgtgtcagcactcagtcgataacgctgttggtttatggcacaaggataaacaacggcttaatgctttcgacacactgaaacaacgcgctgaagttgcccgcgtaatgcaggaaaaccggcgtgaccaaaaattgatggatgaattcgctcaacgtgttacccgcaggaatacttaa

SEQ ID NO: 288697 - DNA, 1368 bp, Morganella morganii
atgacctccggattaaaaaaatggcttaacgcactggataccaaggaaaaggaaatcacagagttaccgccataccggcaatacggaaaattggtccgggcaaccggactggtcatggaagcggccgggctgaaactgcctatcggggcattgtgttttgttgcccgcgataacggcggcgagcagcaatacatcgagagtgaagtcgtcggcttcaatggcaagacgctctatctgatgccgctggagcatgtcgagggcctgttgccgggcgcgctgatttacactgaaaaaaaatataccgccggtaaaaaactgccgctgggtaaagaactgctcggccgggtgcttgacccgagagccaggcctcttgatggcctgccggttccggtatgtgaaaagtacggtgaactgtttaccgctcctttcaacccgctcctgcgcgatccgataaagaatgtgctggatgtcggtgtccgggcaatcaatggtctcctgaccgtcggacgcggacaacgaatggggctgtttgccggatccggtgtcgggaaaagtgtactcctggggatgatggcccgttacacaaaagcggacgtgattgtcgtgggattaatcggcgaacggggacgcgaagtaaaagactttatcgaaaatattctcggtaaagacggcgtaaaccgttccgtggtcattgctgctccggcagatgtctcgcctatcctgcgtatgcagggggccgtttatgcgacacgtatcgccgaagatttccgtgacagcggtctgaatgtcctgctcatcatggattcactgacccgctacgccatggcacagcgtgaaatagcactggcgatcggggaaccgccggccacgaaagggtatccaccttccgtgtttgccaaactccctgcattagtggagcggaccggtaacggcatcaaaggcgggggttccattaccgctttttataccgtactgacagaaggtgatgaccagcaggatccgatcgcggattccgcccgtgcaattcttgacgggcatgtcgtactttcacggcggctggcagaatcaggccattatccggcgattgatattgaagcatccataagccgggcaatgacggaaatcatcgcgcctgcacattacaaaaaggttcagagattcaaacaattactctctgcatatcagcgtaaccgcgatcttatcagcgttggcgcctatgcggccggtactgacccgttactggatcaggcaatagcgctctacccccgtcttgaacgctatctgcaacaaggtatttatgagcaaagtgaatacgaagcctgttacacacagctttccgcactttttcctgagctgcctgatgaataa

SEQ ID NO: 288698 - DNA, 645 bp, Morganella morganii
atgcctgtgatccctgccgacacgcaaagcaataataccgtgtctgacgaagcatccagggccgagcatgcccgtctgcgtcaggctgcggaaaaaaaagggtttgagcagggaagctcacaaggttatgaggccggacggaaagaaggctttgataccggattagaagaaggcagacaaaaaggcctggaacagggcaaagaagagatggcgcagcggcagaaggaaatgactgaccgcctgggtgagctgatgcataacctgcaaagctctctcgacaatctcgactatgttatcccttccagactgatgcagctggcactgagcgccacacgctcagtgctgggcacacaggctatcggtgatatcagcacaacgctgttacaggaacgtataaaagacattctccgtgatgagtctctgctgaaaaatgaagcctgtttatgggtcagtcaacaggacagtgatctgattaaagaacagttttcaaaaacgctggctgcccgcggctggtcactgaatacggatagccacatgttacccggcgggtgccgtatcaccaccgacgaaatggagatcgacgaaagcctcgaaatgcgctggaagatgctgtgcgagctggcacgcgaggataattataaatga

SEQ ID NO: 288699 - DNA, 987 bp, Morganella morganii
atgaatgcttatgaaaaaagcgccattgtcatgattacgttaggtgatgaacgtgctgcagctgtatttaagcatctgaatacgcatgaagtcaccgaaataagcagcgcgatggccaaaatgagcagctacacctacgaacagctttcgcaggtgatgagtgaattccatcgtgatgccggcgagtatgccacgctcaatattaataccaatgaatatctgcgtaatgttctggtacgggcgctcggtgaagagcgcgccgccagcctgcttgaggatctgctcgatacccagtccagtaatgacggtattgaaacactgaacgacatggagccgcagtctgtctgtgatctgattcgtgacgagcatccgcagattattgccacgattctggttcacctcaaacgcagccaggctgcggatgtgctggcccggttcgacgagaaaatccgtaatgacatcatgctgcgtattgccaccttcggtggtgttcagcctgccgcattacaggaactgactgaggtcctgaataatctgctgcacggccagaatctcaaacgaagcaagatgggcggcgtaagaccggctgcggaaattctgaacctgatgaaaagtcagcaggaagatgccgccattgctgccgtcagagagtttgaccaggaactggctcagaaaatcattgatgaaatgtttctgttcgaaaacctggtggaaatggaagaccggagtattcagcggatcctgcaggatatcgagcaggagtcgctcattattgcacttaaaggttctgatcagcaattacgtgacaagttcttccgtaacatgtcgcgccgtcagtctgaaattatgatcgacgacctcaatacccgtggtccggtacgtatgtctcaggtagaaactgaacagaaaaatatccttaacctggtaagacgcctcgcagaaagcggtgagattgttattggtggtggtgaagatgtctacgtctga

SEQ ID NO: 288700 - DNA, 1731 bp, Morganella morganii
atgaatgccacaaccgcgagtagcaaaaaaaatatcgctgaagagttcaaagtcgcacttgaacgctttcgggctaacccgaaaattatctttgcaattgcagctgcagcagcactctctgttgttgttgccttactgctttgggccagaagtcctgattatcgcttgctgtacagtaacatcagcgatcaggatgccggagcaattgtcgctcagctggcgcagatgcaggttccttatcgctttgaagagcatggcggcgccatactcattccggccgatcaggtatacgaagtacgtttaaaactggcgcaacagggtttaccaaaaggcggaaccgtcggttttgaactgatggatcaggaaaaatttggtatcagccagttcagtgagcaggttaactatcaacgtgctctggaaggcgagctttcccggacgattgatactatcggctcgatcagtaatgcccgtgttcacctggcgttaccgaaagcatcactctttgtcagagaacaaaagcaaccttcggcctctgtcacactgacaatcgccagagggggtacactggatccgaatcaggtcaatgctattacacacctggtttccagtgctgttccgggcctgacaccggccaatgtcaccatcgttgatcagaacggtcagctgctgacgcaaaatggcggacaagggacgcaaacctctcagctgaaatataccggcgagattgaagcggactatcagcgccggatcattgcgattctgtcaccgattgtcggggccggtaatgtccgggctcaggtgaccgcgcaggttgattttactgagcaggaacaaacgtcagagcaatatcagccgaataccgccgctgacaaaatggctatccgcagccgtcagagcagctcttccgagcagggcggacgcaatgccgccggcggtgttccgggggcattgagtaatcagccgcctgtcgcaccggtcgctccgattgaggatccggctgccaataccgccgctaacggtaatgcagggaataatgccggcaacaacgcaggcaatgccgcccaggggcagcagggagccgcgaatgcaagaaccgccggtacaccatccgtcccttacagccagcgtaacgaggaaacgactaactacgaagtcgataaaaccttaacccatacccgcaaaagtacgggcacgctgatgcgcttatctgccgccatcgtcatcaataaccaggtgaatgatgagggagagagtattgcgttatcaaaagagcagatggataaaattgaagcgcttgccaaagaagccatcggtttctccgtcccgcgcggcgataccctgaatatcgtgaatactcctttcagcacgctggacgatattgcaactccgccgctgtgggaacaacccgctgttatcgatgccggtctgaccgcactgcgttatctgctggtgctcattgtggcctggattctgtggcgtaaagcggttcagccattctggatgaagcaccatgaaatggcacttcagcgcctggagatggagaaagaaaaacgtcaggctgaaattgacgccaagctcaaacgtgcagaagacaatttacgctcgaaagctgaacagaaaatgcagagcgaagagaacatgcataagctccgtgaactcgcagagcatgattcacaaattatcgcactggttatccgtcagtggataaataaggagcaaaaatcatcatga

SEQ ID NO: 288701 - DNA, 327 bp, Morganella morganii
atgtcaattcaggcaatgaataacattctggaacaaattaatatccaggcaaatgaaattaaaggggcgtcgcaggccggtcgtattaacgaacagccaaaaaccacgaatttcaatgatattttgtttcagagtataagtaatattagtgatttgcaagtcagtgcgaaaagtcaggcgcaacaatatatgattggagcgccgggggtcggattggatgatgttatggtatctttgcaaaaatcatcagttgcgttaaaccttggtgtgcaggtccggaataagctggtcaatgcgtaccaggaaattatgaatatgtctgtttaa

SEQ ID NO: 288702 - DNA, 864 bp, Morganella morganii
atgttaaataaaaataatgttgggggaagttcagactcgggtgaatatattcaacttagtctgaacgagtcagaactgacaaaaatcaatgagcttatttatcgtcgtgccggcattgttttatccgggcaaaagcgcgatatggtatttaaccgtctctcacgcagactgcggaaactcgacgtccgttcattcaaagaatatataaatatcctggaaaacagcacgaacgatggtgagtggcagcattttatcaatgcgctgacaaccaacctgacatcgtttttccgggaagcgtatcactttcctattcttgcagagcatgcccgttcccgcccgaataattattccgtgtggtgtaccgccgcatcgaccggtgaagagccgttatcaatcgcaataacgcttgaagaggcgcttggcccgtctctgacgccgccgcgggtgtgggcaacagatatcgatactgatgtattattaaaagccaaacaaggtttatatcagctgagagatattgaatcgctgacgcctgagcagaaaaaacgctggtttctgcggggtaaaaatgatcagagccaactggttaaagtaaaaaaagagctggcctcctgtattcattatgaaccacttaatcttataaacagtacctggaatgtaccggcaccttttgattctatcttctgccgtaatgttctgatttatttcgatcagaaaactcaggaaactattattaaccgatttgctaaaatgcttaaacccggcggattattatttatcggtcattctgaacatttcagtaaatccaccacaccctttcgtttaaaaggacagtcagtctatgtacttgacggagagggaaagtaa

SEQ ID NO: 288703 - DNA, 1047 bp, Morganella morganii
atgaaaaagattaaagtaatgtgcgtggatgattctacgttaattagaaatattatgaccagtattgttaacagccagcctgatatggaaatggtggctgtggctttagatcctattatcgcccgggatttaattaaaattcataatccggatgttctgacgctggatgttgaaatgccgcgtatggatggtcttaatttccttgagcgtctgatgcgtttacggccaatgcccgtcattatggtttcatcattaacgcataaaggttctgaaattacgttaagtgcattagaactcggtgccgtggattttattacaaagccgcagatggatctgcaaaatagtatgcgcaattacagcgagatgattgttgaaaagatccggatggcggcaaatgcccgggtttatcgccgcgataaccgggcgattaagcctgcggcgattaagacaccgttggtcgggagtgaaaaaattatctcgattggtgcctcgaccggaggaacggaagcattacgtcacgtactgacaccgatgccgttaacctgcccgggaatcgttattgctcagcatatgccgccgggattcacgcactcttttgctgaacgactgaataaattatgcgcgatttccgtcaaagaaggcgaggacggcgaccgtgttttacccgggcatgcgtatattgcgcccggcggtaagcatatggaattagtccgcagcggcgcgaattatcatttaagccttaacgaactgccgccgattaaccgccatcggccatcggttgactcactgttatgctctgttgccaaagtggccggtaaaaatgccgttggtgcgcttcttaccgggatgggcagcgacggtgctcagggattgctggctatgcgccaggccggtgcatggacgattgcacagagtgaaaaaacgtgtgtggtctacggtatgccgcgtgaagccgtcaaactggatgcggcatgtgaagtgactgacctcgatcagatagcccgcagcatcctcaataatatcgttggtcaggcgaaccgtatttaa

SEQ ID NO: 288704 - DNA, 390 bp, Morganella morganii
atggcagataaaaatcttcgtttcttagtcgttgacgacttttctacaatgcggcgcattgtccgcaatttactcaaggatctcgggttcaataatgtggaagaagccgaagatggtcaggatgctctggacaaattacgtgaatcaacattcaattttgtcatcagtgactggaatatgccgaatgttgacggcctgcagctgctgactgaaatccgtaaagacccggcgttagccgcgcttccggtgctgatggtgactgcggaagccaaaaaggaaaacatcattgcagccgctcaggcaggtgcaaacgggtacgttgttaaaccatttacagcagcaatactggaagaaaagctgaataaaatttttgaaaaactcgggtggtaa

SEQ ID NO: 288705 - DNA, 642 bp, Morganella morganii
atggatacgcaggtgagtcagcattcgactgaaaatttccggagtattttctcacgcataggtcagttgacccgtttgttgcgcgatagtctgacgaatctgggacttgatcgcgcgattatggatgcggcagaagcaattccggatgcccgtgatcgtctgaattatattgtgagtaaaacatcacaggcggcagaacgtgcgctgaactgtgtggaaatcgcccgtcctttgcaggatgagctgagcagccgatccaccgaattaaccacccggtgggatgagtggtttgataaaccggtggaaatgccggttgccaaagagttagtcacggatacgcgggcatttctgaccgccgtaccggtgcttgccggacagacgaatgagcagctgatggaaatcatgatggctcaggatttccaggatctgaccggtcaggttattcagcggatgatgaaactgattgaggcgctggaaaaagagctggtccaggttctggttgaaaacatgcctgaatctgaaacggcacctgcggataaaaaggatgatctcaaaaacggccctcagattgaccagagtaaaacgggtgttgtcgcgacacaggatcaggtggacgatttactcgagagccttggcttctga

SEQ ID NO: 288706 - DNA, 1140 bp, Morganella morganii
atggcagaagaaagtgatgtagaaaaaacagaagaccccaccccccataaacgggagaaggcacgcaaagaaggacaaattccccgttcgaaagaattaacatccgtaatgatgttattggtgggatgggcacttatgttttcatccggaagctacctggtaagaggtctctcacaattgctgtctgaaggactgaggtttgatatcagcgcagcaattgaaactaaccgtatgttttatcagatggataacctgtttggtatggcaatgaaagcggtgctgccttttatgctcgggctgtatattaccggtattgcttccccgctgctgcttggcggactgaacttaagtgccaaatctatcaaggttgatttaaagcgtatctctcccgttgcgggatttaagcgtctgctgtcaaagcaggtgctttctgaattattaaaaggtgtcctgaaagtcgcattagtcgggtgtgccggtgcattatttttctatcttaataaatcatattttattcaattagttaaccaatcggttgtcggggcattaagtgatgccatgatgctgatactttacgccctgctgaccgtgattttgtttttaattcctgtcgccggttacgacgttttttaccagattatgagcaatctgaagaaactccggatgagccgccaggaaatcagggatgaatttaaacagcaggaaggtgatccgcaggttaaaggacgtatccgccagttacagcgcgcggcggcccgcggcaggatgatggcggatgttcctgatgcagacgttatcgtcaataacccgacgcattattccgtcgcgttgtcgtacaaagaaaacggaatgtctgccccggtggttctggcaaaaggcgccggtgaagttgcactgcggatccgtgaactgggaaaagagcacgggatcccatcgcttgaggcacctccgctggcgagggcgctttatcgccattgtgagccgggagaacagatcccggtaacattgtacagcgccgtcgcagaagtccttgcctgggtttacggtatcagacgctggcgtaacagcggaggtattaaaccgaaatcacccgataatttacccgttccgcgggatatggattttcaaaccagagagtaa

SEQ ID NO: 288707 - DNA, 2106 bp, Morganella morganii
atggctaatctcgccggtaaattacgtttaccgaattttaaacagacacaatggcagattcttgcaggccctgtactgatcatcatgatccttgcaatgatggttctgccgttgccgccgtttattctggatgcattatttacgttcaatatcgtcctttctctgatgattttgatggtggcaatgtttaaccagaataccctggagttttcggcattcccgactattctgctgttctccaccttgctgcggctggctctgaatattgcatcaacccgtgttgttctgatggacgggaacaatggcccggcggcagcagggcatgttattgaagcatttggtcattttctggtcggcggtaactttgccatcggtatcgtggtttttgccattctgattattattaactttatggttattaccaaaggtgcggggcgtattgcggaagtgggggcccgttttgccctggatggtatgccgggtaaacagatggcgatcgatgcggatttaaatgccggtctgatcggcgaagctgaggcccgcaaacgccgtaaagatgtcactcaggaagccgatttttacggttcgatggacggtgccagtaaatttgtgcgaggtgatgcgattgccggcctgctgatcatggcgattaaccttatcggcggattattgatagggatgacccagcataatatgtcattcgcccaggcgggtgaaacatataccttgctgactatcggtgacggccttgttgcccagatccctgccttaatcatttccaccgctgccggtgttatcgttacccgtgtatccaccgaacaggatgtcggtgagcagatggtcggacagctgttaagcagcccacgggtcatggtgctttccgctgcggttatcggtctgctgggattaattccggggatgccgaatttcatcttcctggtatttacgagcgcgttgttatttctggcgtggtggttacgcggccgggatgagaaaaaggaatcatctgccggcgaaaatacagatgaagccgtgaaaaagctgcagcaggaagaaacacaggcttccgaagtgtcctggaatgatgtgcagatggaagatgtgctcagactggaagtgggctaccgccttatcccgatggttgacagtaatcaggacggccagttactgacacgtatccgcgggatccgtaaaaaattcgctcaggacatgggattcttacttccttccgtgcatatcagggataatcttgatctggcaccgaccgtttaccggatcctgctcaaaggtgttgaaatcggtcgtggtgaggttcagcctgaacgctggatggcgattaacccgggctgcgctgacggggaactgtcagggatcatgtgcgaagacccggcattcggtttaccggcatactggattgaggaagtattgcgtgaagaggcgcagacactcaattataccgttgttgacccgagctccgttattgccacacacctgaaccatcttattgtcttacataccgatgaactgttcagccgtcaggaaacgcagatgcttctggaccgcctgaccaaagaatcaccaaagctggttgaggatgtcattccgggactggtttcgatcacacttttccacaaagtactgcaaaacctgttatctgaacgtgtctctatccgcgatatgcgcacgattattgatacccttgctgacaattgcggcacgataacagatccggatgacctgacctctcaggttcgtatcagccttggccgtgcgatcacccagcaatggttcccgggaagtgaggaatgccaggttatcggcctggatagcacgattgaacgtctgcttattcagtcaatacagaacggcacatcgattgaaccgggtatcgccgcaaacttactgtcgcagactgaacgggcaattactcagcaaaccgcgctgggcgtgacaccggtattattaaccacgccgctgcttcgcgttatgctgtcgcgcttcctgcgccgggcttatcctcagttggtggtgctctccaatatggaaatcactaataaccggacagtacgcattacggccgttatcggcggggataatgcctcatga

SEQ ID NO: 288708 - DNA, 417 bp, Morganella morganii
atgaccggtaaaaagatccttttgctgattgtggcgttgttttgtccggatcttcaggcaaacacaaccggatcatggcaaaaagaatccgcaggcggcctccttagtgtgggccgccagtcaatgagaggcaatgtactggaggcgccggcgtctgttccgctgcaggcctcggccacccggatttactggcaggttgcgttgttgtccccgccgccggcagggctgaagattcagctttgttactcaggagggtgtgaaaaactgtatggtttaagcgggcagttcacaccgaaatcccggtggcctgcggatgagtcatactattttgtgtatagtgtgaatgctattggccagctccgtcctcctctgagagtactccggaactcgctgaccatgaactataaagtgaactga

SEQ ID NO: 288709 - DNA, 348 bp, Morganella morganii
atgaataaaaccacttccgcctgttttcaggatgtctacaaagaaaacctgtctctgcttgaaatggcacgggaagaacgctgggatgaattcgctgaacaggcagaacgttatgtgattatgattcacgatgtcttcggcatggaaattgatgaacttgattccgaaggaaagcgctctctgctgaaaattatgcaggatattcaggataatgagaaagaaatgaccgataaattaaaacaacgcctttcttttctcagagagaatatgtcaagacttcatcacggcaacaaatgcagccagctctacagtaatcagtttatctcagtaaaacaaaattatcgttaa

SEQ ID NO: 288710 - DNA, 396 bp, Morganella morganii
atgtatacacctcacagctctaattcttatgcgcaggtcgacttacaaagcaagctgattggcgcaacaccgcaccagttaatcacaatgctgtttgacggcgctcataacgctattttgcgggccaaaatctattttgctaatggcaatatcgcaaagcgtggtgaaatgatctcgaaagccatcaatatccttgataatggtttgcgggcatccctggatcacaaaatcggtaccactatttctgctgatttagagagcctttacgaatacatgtcacgaaccctgcttaacgcaaatttaaaaaatgacccggctttacttacccatgtggatgagatattgatgaatctggcagatacatggaaagaaatttcgccaaatacaagaggttaa

SEQ ID NO: 288711 - DNA, 1470 bp, Morganella morganii
atggcttcaataacatcgttaggaattggttcaggtctggatacagcaacaatgcttgaacagctcaaactcagtgagcaaaagcgtctgctgccttataccaatatgcagaaaagctatgagtcgaaaatttctgcctgggggcagatttcaagctcactggatgccctgaataaaagcatcaagccgctgcagggcgatgcattcaactctgtcaatgtcagcaccaacaaggcatttaccgcaacagcaaaatccggagcaatcgcagatacgcatgacgtgacagtgacacagctggcaacgtcacataaagccaaaactgcggcagtagacgatccgaatgctatgcaaggatcgaaggataagggtacacggacagtcatcattacccaggacgatggctcagaaatgcgcgtggagctgaaggatgacgaaacatcactgaaccagattgccaaagccattaacaaggaaaatggtgatgttcaggcaagcgtacaacatactgatgagggtcatcagttagtactgacgtcgaaaacgaccggtactgacggtaacatgagtgtccgggttgagggtgatgatgatctggatgatttcctgcgtctgggtggcgatggcagcaagccggacggaatgaaaaccgttgcagccgcacaggatgcaaaactgacagttgacggcagtaattatacccgttcaagcaataccatcgacgatatcctgaccggtgtaacgttcgaactgaaagaagtctccgaaaaagatccttctgatccctctggtcagaccctgaaggcggaaacgttgtctctgacaccggatatgtctcagtataaaaccagcattcagaatttcgttaatgactacaatgcgctgattaatcagaccaccgcatccagcaaatatgtaccgagtgactcctccggattaacgaatgacgatatccagagacctaacgcagaaaacggcgccttaatgggtgattccatgctccgcggcctggtcaatgaaacccgtaccgctgttaacggtgtctacggtgaaaatgatgcagagtaccgggcattagcggatatcggtatcactatcgaccctaaaaccggtctaatgacgctgaacgaagacaaacttgatgctgcgattgcggacaaccctgatgatgttgccaatatttttatggataaaaacggcaatgagggattagccagcaccttaggcgggataatcaccaaatataatggtgattctgagaataaaattgacggatcaatcaaaaccgcgactgacagcctgaataaacaagtcgatcaggtcaaagaacagattgacagaacacagaaactgattgatgcgcaggttgaacgttatcgtatccagttccagaatctggacaaaacgatggccagcctcaacagcaccagtaatcaggtcggcgctctcatttcaacattaaataactaa

SEQ ID NO: 288712 - DNA, 756 bp, Morganella morganii
atgcttaaacagcatttagaccccatagaaaaacgaggtgtccttgaaacacttcgccgcatcatatcccgtctgaatgaaattttccgctatgcagcaacagaagaactcatagaatttaatcctgctgacaatcttgcccatagatttagtaagccgaagaaacagaacatgccagccctacccccaagtgaactgccccgcttcctaatggtgttaaacaatgcatcagttcgtttggagacaagattgctgattgaatggcaattgctgacctgggttcgtccaggggaagccgtgcgtgcgagatggaccgatatagatactgacaactcaatgtggaacatcccggctgattttatgaaaatgaagaagccacataaagtcccattaagtaaagaagctttgcgagtattggattcaatgaaagccatcagtgggcacagagagtggattttcccaagtatcaaagccccgcttaaccgcatgcatgagcaaacagctaatgctgcaatcatccgaatgggattcggtggtgaactggtagcccacggaatgcgttctatagcaagaacggccgcagaggagtctggaaagttcagaacagatgtcctcgaagctgctcttgtacactcaaaaaaggatgaaataattgccgcttataatcgtgcagagtatctggcagaacgagtggttctcatgcagtggtggagtgattatgtgcaagctcaaaggctaaaagctatcgcagcctaa

SEQ ID NO: 288713 - DNA, 252 bp, Morganella morganii
atgaccagatccgcacctgtttttatgccagtagataaaggtgattccgataacacagccggtatcgggcttttaattaaggaagttcgcacggatgagcgtcgcataattgcagaccgttatgcattccgcatgcgcaatgtcggcatgctggccgttcgggacaagttggattgctaccagattgctgaactgcttgaaggtgaagcgagtcgggcagagaacgaaagccgagagagtgactatgcctga

SEQ ID NO: 288714 - DNA, 279 bp, Morganella morganii
atggataaagaaacgaatagttttagcgcagatttaccaagtcgttctttttgggcgctggaagaaatgaccgaagttaatattgatttttgtcgggtatcaatatctgtaggtgaatattttacggtaagggagattcgcaacgtcaacgggaaaaatcaagttggttgtgaatttcattgtgaagttacgggaataaacgccagtacattaagtgaaaatgtaagtagcacaaagagtgtttcttttaacatcaaaactataacattgaggttgtaa

SEQ ID NO: 288715 - DNA, 825 bp, Morganella morganii
atgtcgcaattaatgacgaactggctgtgtatcgctacggaaggtgacactgtcgatggccggatgattgaagcccgctggctggaagaagccgccgaaatgtacagcacagatatgtataccgcatgtatctggcctgaacatgagcgctggttcggctcaatgggtgaggttcttgaactgaaagccgaacgtgatgatgaagggattctgcggctttatgcccgactccggcctaatcaccatctgttgcaggccaaccgtgacgggcagttactcttcacatcggccgagtttacaccaacaggaaatttccggaataccgggaaaacatatcttgaggggctgggggttacatgctcaccggccagtgtgggaacaacccgcctgcaattcagatcacggaaaggtgattaccggttcggggcgttgaagccacttgtttttgatgaagtgaagaaatttaaggataaaaaaatggcacaaggcaaaggtaaaggctggcgcgcgtttttcaatattgaagaaccaagcactgatacaggtagcagtgatgacaccggtggtagtgatgcgcttcagacgctggcggaagccctttcggcactggagatccgcgtaaccgcgattgaatcctctatggcagaagcacaggaagatctcgaagtcgtaaaagacgctgttgatacacctgagtttgcacagctgcgcgacaatctgacggatattctgggtaaattcggcaagctggataagctcgccacgggtttaccgtcaaaatctccgcgtggtgataaaaataagcgctttacacacttagtataa

SEQ ID NO: 288716 - DNA, 1017 bp, Morganella morganii
atgttaacacagcgcgcggaagagcttttagataaatacactactgaactgggtaaggcctgcggtgtttctaacgtaggacgccagtttaaactcaccgggccgaaagaaacgcaactgcgtcaggcattacttgaatctgttgagtttctgagctggattacagttcacgatgttcctcagttgattggtcaggtagtgtcgccgggcaatggcggtttatacacagggcgtaaaaaagaaggtcgttttacgcgcaaaatcggcgttacaggcaatgatttcagcctgatcgaaacagactctggggcacatttaccgtggagtactttgtctgtatgggctaacgccggtggtgaagatgagtttttccagcttgttcagacattcattcagcaacagtttgcactggatatgctgcgtatcggatttaacggaacgcacattgctgaaggagatacggacccggaaaaatatgcatccggcgaagatgtcaacatcggatggcatcaaatcgcgaaagagtgggatgacggcgcacaggttatcaccaagcctgtaacactggatgatgacgggacattcaaatcactggatgcaatggcctctgacatcatcaatacctgtattccgtctgaattccgtcaggatccgcgtctggttgttctggttggtgctgatttagtggcagcagaacaataccgcttgtatcaggccgctgaccgcccgactgaaaaaatcgccgctcagatgctgagcagcacaatcgccggtcgtcgtgcaatcattccgccatttatgccgggtaaacgtatggtggttactccgctgtcgaacctgcatatttacacgcagggcggcacacgctaccgcaaggctgaatttgtggaagaccgcaagcagtttgaaaacagctacttgcgtaacgaagggtatgcactggaatatccggaactttacggtgcttacgatgaatcagcggtaactctcggcactgtaactgagcctggagaataa

SEQ ID NO: 288717 - DNA, 294 bp, Morganella morganii
atggaagaacataacaaaacaattattaccctggcagttatcggggcatttatcggattgggaaaaatgctggacggtaacgaacccatcaccatcaggctatttttcagccgtatgattttgggatctgccgtgtcggtgatggccggtgcgctgctggtctggtggcctgatatcagtcctctggccgtcaccggcatcgggtcggcattgggtatcgcgggttatcagtgtgttgaaatgtggctgaaaaagcgcggaagtaatttattaacagggaagctgaaaaaatga

SEQ ID NO: 288718 - DNA, 270 bp, Morganella morganii
atgagtaaagcagccgccttaatcaccttaactatcgccggtagtgagatccgctttgagccgaatatgacggcttataacggcttcattaatgaaatggccatggataataaaatcgctccggcgcacacctatctgaaccgtattgtcgtcaaagaagacaaagaagccctgggcgaactgctgaaactgccgggcgcggcgttgcagattgcaacaacagtgaatgaccagtacgcgccgaaactggatatcagcgtaaaaaactaa

SEQ ID NO: 288719 - DNA, 2082 bp, Morganella morganii
atgaactcactggattttacattaagcctgattgataacgtcaccaagcctttaaaacaggcaggcgcggcgttaaaaggctttgctgatgaaagccagaaagcctttaaacagacggcgatcggtgccgccggtctggccggtgcgatattctcaatgaaaggcctgcttgatcccgcgttacagatgaatgaagccctgcaaaccgcaagtttgcagggggttgatgattctgtaatgaaaaaagtcacccaatcagcaatggatttctcggcacaatacgggaaatcctctgttgaattcaccaaatccgcgctgaccatccgcaaagcgatcagcggcgtggcagacaacgaactcccgcacctgaccaccgtcaccaataccacggcggcagcactgaaaaccacctctgacgaagccactgcctacatgggacagatgttttcgcagttttccacctatgccgatcaggtcggtaaaaatcagtttgccgaagaactggcaggaaaagcggtgtatatgtcgcagacgttcggtacctcaatggcggagatcaccggcctgatggaaggtgcccgtgctgccggtaccaatttcggggttggtattgatgaacagcttgccgtcctgggcgaattacagcggacactcggcacagaagccagcggagcctatgagggctttatgaccggcgcggcggatggtgcgaaaaaactcggtctgagctttgttgatgcctccggaaaaatgaactcaatgccggaaatgctggaaaaactgcatcagaagtacggcgataatatcgatggcaaccttaaagcacagaaagagattgatgacgctttcggtgattctgccgtggtggtgaaacagctttacggtgatgtggatgtactgcgcaaaaatatcacttcactcggtgccaatgatggcctgaaacgcacacgggaaatggcagacaaactggcggatccatgggaacggctgatgtctatctgggaaacaatccgtattgccgtgggaatgaccttattgccggttatcaccccgctgatcaacaaaatagcggaaggcggacagaccttagtccgctggctgacgctgttcccgaatatcgccaaatggataggatatatcgtcggcggaataacagggctggctgctgccggtgctgcgcttaatgtggtgatcggtatatcgcggctgatatgggcggcactgaaagcggtctggattgcctgcactgcagtaatgaaaatcggtaccgctgctgtctggctgtataacgcagccattaaagcatgggcggtaacgctgcgggtattacgcggcattatgctggccgtccgtatttcggcaatggcggcgggaatatcatttaactttatgtgcctcccggtcctgctggtgattgctgcaatcgcgttattagtcgccggtgtttatttcctcattaaatactgggatgaaatcaaagccgccattatggaaactgacgctttcaaaaaggtagcggcagtcgtcagatgggtcggtgatgtattttctaaggtctgggacagtattgcgaaaggctgggatgacctgtgtaaatggtttacggatttctctctggcggaaacgttcggcaatctggccaagagcgtgaaagatattttcggcaacgtctggacatggcttaaaaataaatttgccgaaatttataacttttatgtcgataagctgaattacattccgggtatcaatattgagctgatggatatcagcgacggaacggcaaaaaataccggtggtgcgccggacatggatgcagcaacagcggttgaggctttccggcagcagcaggtatttatgtcggcttacctgaatcagcaaccggcaccgccggtaaacagtcaggatttactgaccggcgggcaggtaaaagggattgataaaaatggggtcggtaaaggtgttgcgggtaatacaaccattaatgaagacaacagccgcagtgtcggaaacctcacgattaacgtgaaaaacatgcctgacccgcagcaaataacagaatacgagttattacagcatggatag

SEQ ID NO: 288720 - DNA, 1578 bp, Morganella morganii
atgtcatcagttatcacaaccgattttgagcgctggaaagcgcaggaagccgcgctcggcaaacccgttgcgctgaatgaatttgtttttgccaatgtgccggggctggatccgtcgaaagatatcagccgtgatgaaaaactgccgccgtccgggcaaatcgtacaccgtcaggccgtcaacaaagccggactggccagtgaaaacgcggttgcctacagcgtcacgctcggtaccgatgtgggtgattttgtttttaactggattggtctgattaacaaagaatccggcacgctggccatgatcacccatgcgccggagcagcgcaaaatcaaaaccgttgacggcgttcagggtaatgttctcacccgctctttcctgctggaatttaacggcgccgccaaagaaaccgcgattatcacttctgcagaaacgtggcagattgatttcaccgcccgtctggccggtatggatgaaatacagcggctggccaaccgtgatatttacggcgcggctgcattttttggtgatggttttctggtcaccaaagccgccgaacaataccgcgtcacaccgggaacggcgtacatcgaagggctgcgcggtacgctggaagaaatcaccaccttcaataatctgcgtgataccaaaatttacgccgattttacctttcagggcaatttagtcagcaaatggcagacgttcgtcaaagtcaccacggctaaaacactgacgcattatcaggatgcagcaggctttcagcattatgttgctgttatcgcagaaatcgataaaaacgggaatatcacggataagcgggtaaaaggcaccgcgactgatcgtgagctggcagagctgaaaaaagatattccggaaaaatatcagcagaaaggagattatcagcctgccgggagttacgtcactacggccaatttcagtctggaactgaataagaagattgataaggccagtatttccgatgtgatgggcaatgacggggataaagtgccatcactgaggttgttgtctgagcaaatcgggaaacgtcagccgaccggaaactatgccaacggagaaatattttattaccaaggcaatgagagaggtattgccggaagtaacggggaaagcttcgttacggggaacgcagcaggccataccggtgtttataaagagggctgggtatggatgtttaatgcctccggcgtaatgatttatggtgatgttcctgttgcaagaatttctgatttaaatacaaagctgtttggcgtcggacagtcagtacagaatgtgacatcacagcgtagtgttggcaccacatacaaaaataacaccgggaaagcaatttgcgtctcggccggtggcacggcaaaagcaaccactgagcctgtgttcctgtctctggctgttgatggttatctcatggcaacaagtaagacagtaacaggcggtggggctaatggtatgtcgcatgtctttgtttgcggtactgttccgccgggttcctcatatatcgttaaagacggcacggcgggtaatgacaaagtcgatttaaatttctggacggaggtgcgctga

SEQ ID NO: 288721 - DNA, 384 bp, Morganella morganii
atggaaactaacatcattgatcagcgtttttttaaaaactctgaaaatttggttttttgtctggatatcatgccgatgaatcaggattcatggcaatcggaaattcaggacggctggcaggaaatcagcaaaaaagaagccgacaaaatcagaaatccaccactgacgaaagagcaactgattgaacgggtagaggctgaaaagcaactcctgatcactgaagccaaccaaaaaacccagctatggcagacacagttaatgcttggcatcatcactgatgaagacaaagccagcctcgtaaaatggatgctgtacgtgcaaaaactccaggcggcagacaccacagccgccccggatatcatctggccggagaaaccggaatga

SEQ ID NO: 288722 - DNA, 510 bp, Morganella morganii
atggaacataaatgggtctgtattcagtgcggggaaaaagagattccgcaatacgcggaatattgtgatgagtgcgcagaaaaacagatgtcacggatcggcggctggctgtggctgccgttaattacgctttttctgtcactggccggcggagcatacacactgagcaggtggtatgatttatatcagtggcatgcagggtttattccggaccgggtattactggtcatgtctgttaatattgtgctgaccatactgaccatgctgctgatactgacaacgctgtattattttttcagacgttcccgttacctgccaacgctgtatattgcctttatcctttttgccatcgcctcggaagccattcaggagatggtacgggttaatctgccggatgttaatgtggacttcacgctttattatccgctgataagattggtgatttacgctattatctggatctcgtatttcctggtgtcagaacgggtaaaaagaacctttattcattaa

SEQ ID NO: 288723 - DNA, 360 bp, Morganella morganii
atggatgtcatcagtattatcatttcagcggggaaatcctccgttgacgtcgcgctttataccttattaccgattatggtcgtgatgctgatcataatgaaatacctttctgtcagaggcgtgctggatgtgatagtccgctggctggcacctttactcaaaccattcggcttaaccgggatgagtgcatttgcgctgatccagataaactttgtcagttttgccgcaccgctggcaacactcgcgattatggataagcggggggtatctgatcgccatatggcggcaaccctggcaatgtgttttgctatggggcaggggaatgtgttttatccgctgatgccgttcgggctgcactga

SEQ ID NO: 288724 - DNA, 915 bp, Morganella morganii
atgaataacccgtttacagtgtcaaaacatccttcacaactgaaaacctcacgtctggcggatgcagattatccttatgatgatccgttaccgctgaaggatctggtttttttgcaaagtcttaatgagcaggaatgccggattaaatcgtcacaagttaacagccggatatcgaatacatttccgatgtttttggtattgttggggatgatgttttatacaggttttgttttttttgaaggtcatatttctaaaaaagaatatatagaacaaagggctcatggattagaaaaaaaatataagggagactatgagagatttgactttataaaaaaatatgaacctttttttggtagggaaaatatcagttggtgggattacgctaaggcatataattcaggtctattttttattggtagtgaatacgacaaatattatattatcggatggttaattttcttcccaggaggattatatatcttaggctccttgaatttctttgttccgatgacctggctggttgcggatcgaaaacgggggatcctgtattcttacgtggacggaattgtgacagcggtgcggtatgaggatgcccaatttggttatgcgggcaggatgctggcgtttaaattattctatattcatccggaaaccggaaagttaggtacccatatttacagacctaacgtttcgttctataccggttttttaatgagcacggataccgaaaattaccgttttattacgtttttaaataagtatatgaaagagggacgggatgccgtttcatccgtggattatcaggcacgtgatccgctgttttgttttgccaaaaatccgcttcccgacaattttgagcaacaggttacgcagattctggcaaagttggataacaggaagcaacgtcatgcgtag

SEQ ID NO: 288725 - DNA, 3237 bp, Morganella morganii
atgaccggaaatgtaaattctgatccttcaaccccggaagagaaacacctccgtaaaatggtggaggcggttaatcaggccgcgccgcgcaatttaccggcagatgcggtgatttgcccgtgtgagaatgaacaccgtccggtctatccggtgcgttatgcctattcgaatttatcgggtgataaaaatgccgcggcagcgatgccgccggaggtttcaacgctgatgacggcatcctcaatggtggaaacaaagggattttctgtcagattactgagacccggctgggtttatgtttttgaggaaggacaattcccgacccggacagactcccgggggcaactgctgatttttaaacatatcgtccggtattatgatgacggatatgtttatactgatgatgatataacgccggaagcacaacaagcgagagaggccggtgatgctgaagaagggtttattccttatctgcgttgtgcatcagacaatacactgcaggaacaatcctgtcagtatccttatctgccggtaaaaaaagatgtcatcaatgcttcgttcatattcagcgacattcctctgtctgattatgttttaaataaaatagaaacggatgaatcttaccgccgtgcatttatgcagaaaatcaatgtggttgatttcagccataatccgcatgcgcttgagctcagtgaggagcatgttgaacatcttgttgaggagtacaaagcagaggagcagcagttttcggtatttaccgaacacacaagggcgattggcaatccgctgcctaaagagtatttctcacatatcgccgccctcagcagtgcaacagcaacaacagaccggctgttaaatcagatagagcaatttcttgatcacgaagaaaagagctgccttgttgcgctgtatgacccggtggggtatcagaaagatatcttatccctgtattcctttgtcaccacatcctatgccatgtttcagcatcactgggagtatcccaacaaaatcggtcagtacctttcggtattagaagcgcagttcagcagtgacgaaatggcaaaaaccgggacaggacagaaattagcggaaaagtttaacaagcatattgatgtgcccggctggaaaacctactggccacaaattgataaaggttatcaggaatttgaagccttacaaaataatgtcattcagatttactatgattttctgacaaatccggcagtctcttcccggcagggaggaataaaacactatcttgaccatgcatttttaattcaggaacaatatgagtctggggatttcccgcattccggatttctggatgagcttaacgcctggagtcagttacatgaactgcttttgacaccgctgaacagcaccgcttacgggcgtgcaaagcttgatatcctgttctccactgatacggaagaaggcagtatctgggtatcgtttatgaccagctttctcagcgtactgaatgaagatgaaataaaaaaagaagcattgacagtatttaaacagcgtgtgcagcctgtattgcagtccgccgttatgatttgctgggatgtgctcggctatgcttatgccgaaattcatccgatgctcggcgaggcccggaaccaggtccgccgtatcagcaaagcaggcatcgattttcttgcctgtaaagtgctgcctgcatttttagcctattacggtgtcacactgagttttgataaactgcatacgctgggggcggatgcattcagagtgtggatgaactcactgaacgccaaatctgagtcattaaaaccggttgcgaacaaaatgaaaaagatgtttgactgggataagcgactgcaggcctcgggctcagcaccggtgataacgacggcaaattttggggtgatagcgggttttcataaaacggtattgcctgaaggtaaaaagtcactgatggagcacattcaattcggtgagaaagtctttgcgcttatcagcggtattattgagctcagtgttgtggccagaacaaaagagtttgagctcaattccccgttgcatgttgccgcagctaatcttttccgggtacagatggttgccaatatattaagcacggcggatgcaataattaatatccgtaaagctgcgccgggatactccgcgactattacctatccgccccttcagcggttgctgacaaaaataacacttcctgaaataaaaacggagctgggtaaagccggaatgaaacttttcggatataccgttacatttatggggtttgcactacctgttgcggaagcgacagctgaatttatggacggcaacaagattaccggttcggctaaaattacagaagctgttggttcattggttttttctttgggtatggcagggttaggattaacacaaataaccagtgtcaccacactgtttcttttcgcttttgcctgggagctggtagtcattggtgcagtcctgataggaattggatcggctgtttatcactggtttaaaactgatgactttgaaaatttactgaagaaatgtttttggggaaatggtgataaatattttgccgggggatataagaaaattgataatgaggatgtatccagaaatgctgataagggtgtgcaattaaggaaatttatagcatttttcaatgattatgaaaaatattatcagatagagattcaggagtttaaaaatttatttttcacctcacaacttaaggttgaagccgttccgaatgcaaatgttccccgtaatgaaatgaattacggtgtggtgcattatatgattcagtaccattttaagttatcgaattttcagtacggcctctctgatattgagtatcagctggctgagaaaaaatcccagcctgcttatccgtcagacagatctgcaaaacccggtgataaagttgtcacacgtcgcggtattcagtatctggcatcgcagaataaaacattcaatattgcatttgaatccgcactgcaaaatgcactggaaaccacattgagaaacagagagtcagccaaaaaagcgaaatccggtaatagtgaccttgagctgaaatttgaagtttatacctctgtttttatggggagtccggtaagggaaaagataccttctgtttactggtattatttggttgaccggcttaacggggatatcgccccgttacgttaccgggataataacccggaagataaaatctatggttgtattgacgaagagggcaccgcatga

SEQ ID NO: 288726 - DNA, 162 bp, Morganella morganii
atgccgtcattttattatcaggaaaacgggataaaatggccaaaaaacgatggttacaaaccgcagcccaggatcagtgtgtctattattaggtttttagatgataatttaagcgaattactgttctcagggttaatcaatgaaaaaactgtcagaatttaa

SEQ ID NO: 288727 - DNA, 849 bp, Morganella morganii
atgcattataagaattacaccggaattattaacgggctttcaagagacgcaaacgatcggaatgaattggcaaaaattcggaaaataatggatgagaccgaggatgacgataatattgccgcgctgattacagttgaggaagcggagtatgttttaaaaaatacgaatacatcgaatcctttttcgtcggcaaaggatgccgtatttggtgttggtgattttgtttccaattttgcgggtaacgtttatgaatcagcccgtctttcccgtattattcatgaattcggtggtcttggtgttaaagccacggaatacgtcgggaaaaatggtaatgtatatatccgtctgtccggtcgtcctggcgtgagggcttttcttaacgggaccaagtatctggctgataacgcaaaaatattgtttatgggcattggaacccaagggcagaatgatgtttcaatcaaagcaacccggttttcaattgtgtattctctggcttatcgtgcggttgagctgatatttaaggatgaatacacactgacgaacttttttgtgaatgtgacgatggatatggcgaagctagctattagcatgaaagtaggtggactagtggttggttattttgtaacagcagggtatctcgccagtggcagtgtgatagctatatcactgggaatatttgtcgttggtattgctgtatctcttattttatatgagattgatgattatttcggaatcagtgaatctattatcagagagctgaaaaaacagcgtaaactaaggtctgatggtgaaggtcgataccatgctgataatttcttcacgaacttcggcaggtacagccgtggatga

SEQ ID NO: 288728 - DNA, 687 bp, Morganella morganii
atgccgttcaccgcggcggtgacaccggtcaccccggccctgatattcgtcacgtcaaacagcgctgacccgtccgctccggttgtcaccgtctgcgtcgccggcagcccgccgttgcccgcggtgaacaccaccgccgcatccggcaccacgttaccgttcgcatccgtcaccaccgctttcagccggtttttcgccgcgccgtccgcaaccgcgttatccgtcaccacggtcaggttcgcgtcggtaatcgtcgccgtgcctttatctgccttaaacgtcaccaccgcactcatatcactgttgttcactttggcagtcacattgacctgcgttgccgcggtattggtcaggctgaatacgattttaccgttctcatccgtcatcagtgactgtgatgcaggctgtgcactgttatctgtggtgaaaagaaccgccacaaacggcacaatgttaccggaagcatccgttacggtaacttccaccgcgttcttcgcttcgccgtttgccggcataccatccgccgtaaccgtcatatccgcaattcttgcggtggcgctgtcagcggtaaatgtcacattaacggatgccgttttaccgttcacctgtaccgtgaccttcgttttaccggatttggtattcgtcagatcaaaaatggtttcaccattgctgtccgttgtcagctga

SEQ ID NO: 288729 - DNA, 1347 bp, Morganella morganii
atgaattgggatttaggtcagttagaatgtgatttttgcaaggatatttttaattgcagcataggattatcaaacaaaaacaccccacaagtgttcggcttttgctgccctcactgtagtggtgttctctcaattgagattgatccaatacgatctacaaatcgaatattgaaaaatgtcactgcagtcgggcgaaaaaataaagatatatttaatgtaaaatcaattaggttacatttggatttcccagccttactaactaatggctggtctcctttcactcctttcaatattgcatgtcttggattaaaagaaggttataacattgaacatttcaaggttgtaaccagtgaacttaacttctacagtgaacatattttagtacttcagagccttttcaatttctataaaaacagcaagattaaggagttgtatcatacttcaaggacattattgcgtgaagatttcgatattgtaatcggtgtggattcagactacattgatagtatttctgttattgattatataacttcaagagatgttgatattatattttacaaaacactattcgggatatcaattgccttaaataaaggtatgaaacctgatcatgatataaaagaactatcatcctatttatcaggtttaaaaaaagagaaattatgtgagtttcattcttacttatctaataataggcatttaaaagactccataaaaacaacaaacaagatctactccaacatatattccaatgaagaattttttaggccatccattttcctttcggattatagtagtactaatgataagaaagaaaaatcgccactacgtttagttagcgaaaaggttgaggttattcttaatatatacaaagacttgaccgaagttatatcaaaacaatatattcttattgtcggattaagaaacattgaagaaagtgataattatgacactttcaaaatgaattatgtgaggacaaggaaaggaaaggtatccataaataacattgccgaattctcagagcttgatcttggaatgaaagcacgcttcatgaagggaagctactttgagaaggacctgaagatcatctctaataagattagaaattctatcgcacataataactgggagtataatgaattaagtcaagaagttttattcagatttaacaaagggattaatgatgcacctaaagaaaaagacttcgaatgcaaaacaattcttgaaataaatagtgaaataatcaatttatttaggttgatgcataaattaaatattatttactacctatttggttgtttttatggacgcaatgattgggataaaggagaattagacaacatatga

SEQ ID NO: 288730 - DNA, 270 bp, Morganella morganii
atgccgcataacgatctgtttcatcactacctgtttctgttccatgtgcagcacggattaaagaaactgaaaacccggttgcaggaagcgtccgtggcatcatctgttattgatgcacctcgcaaaattaccacggaatgtgaaacggcactggctgtacagttctccgctgaagatgattatctgaagtataccggtgaaaatatccgcgaaatctggcggatagacggttcggattatcagcgggtgtgggcagacaaaatggcataa

SEQ ID NO: 288731 - DNA, 204 bp, Morganella morganii
atggaggacgaaaagagcttagcccgtttacgggcagtaagtaacaacgaaatgcaaatgtcagattgcaatgcgcctgttagggcgcggctggtaacagagccttataggcgcatattaaaaacccccggctatgccgggggatatttattgttatccggattaattgtgtacgaaaaacaaacgctggaagtaacaaattaa

SEQ ID NO: 288732 - DNA, 162 bp, Morganella morganii
atgtcagatctaatggatttatgcaatgcagacagcaatgaaaattatccaaaatggggagtgattgatgccgcatggtggcaaacatttggaggggacgattacctcaataaatataaagacagctaccttatttatcataaatcgagtataaaaaaatag

SEQ ID NO: 288733 - DNA, 645 bp, Morganella morganii
atgcaacctggtgcaatagcacagcaatcagttcgtgaaatacccgtaaatcagattacagcggaaaaccggaatgttttcctgactgctgcggataagtttgtttctgttgtgaacagttgcaagacattctccacagggtgcagcacacagaaagaacataatattatgaaagcgtgcggcgcattactggcgcaaacgctggtgaaacaggaatactatacagagggattcaccggtgagtgcgtaaaaaaactgggtatgacactgcctgataagatcttcgccagaagtgagacaggtgtacccggcagcgcgtctattggcagattatctgtgctgaaagcatcggcgtgttccgcacaggaactgtatgacatgctgagcaaacaactgcataaaccggataccacatcagagatgagagaaaaaatacaggtggctttggaaatggcagaaaaaggctcaggcggtaacgctgtccggggtacagagtacgccgggatagttgagcgctatgcgggtaatatactaagagatgttatttccgatatattattgacggatgatattaataacattgagcacggtccggtattaaagatagctgatgttatcaaactgaaatcgatgaaaaactgctga

SEQ ID NO: 288734 - DNA, 435 bp, Morganella morganii
atggaacaacgcgcggcatgccgcgcagtgcccttatttcttcgcagaaggaacgctgaagcgtttgttgaagcgatcaacacggccgccgcttgcaacgtcacgctgtttaccggtgtagaacgggtggcattcgccgcacacgtccaggttcaggttgtgacctgcggtagagttaattttcattacgttgccgcaagagcaggttgcagtgatttctgcgtagtctgggtgaataccttttttcatgggaaaacctcggttaaggccgtgtcgctatccgggcctttttgccggacaccacacgtcgtgttgatgataagttatcgctggtattttaattaccaaaggcggcggatcatacagaaaatccctgaaccatgcaatgaaatccgctgtcttttcgtggtattctggatcccgcattgcggataa

SEQ ID NO: 288735 - DNA, 855 bp, Morganella morganii
gtgaaaaaacacacagtaacctgctcagttttgcctttggcgctgttttccgctgttttcgctctgccgtcttatgccgcagagcctgactgtcagccaatgtctgaacagacccggcttaatcatatgagaatgacaggaatgccttacctgaacgggccggtgaaatcagtcaccatgacgaccgtcaaaccaccgcaggacagcccgcagatattttcagccagccatatgacgctgaccccctgcggacagatcagccgttattctttcacacggaaaagtgaggaatacggcatgattttcgatctgagcgtcaccggctcggaaaacgataatgccatcaatatggaataccgtttttccgccgattacgccggaaagaaaaaaacgcgcccgaccatcacccgtatttcaatgatcaaagatgagcagcaggttatcaccgcttaccggactgaaaattttattgaaggtaacagtaccatactgactgaaaatggcaccgtggaataccgtgacaacaatatacattcggttctgataaacagtgaaattctcgccaaatcctacaatctgaattttgattatgataaagcagaccggctgacccgtatttacaccacaccaattcctctcagtgactttaatttcacctacaatgagaaaggtggcctggataaagggacagaaagaacggaatccgccggaatcgtcaccggtaatgatattcagtgtacggaatgggatacgtaccagaactgtaccgccggtgtctggctccggcatattaacggtgaacctgccggtgaagtccctttccgtaccgcttatgagtattacggtaataaataa

SEQ ID NO: 288736 - DNA, 471 bp, Morganella morganii
gtgcttattaaaaataaatcacttatcatgtatttatcattcagtatttctgctgttttttattatcttgagatggttcatgcattttttttcaggatatactcacatgcagcaaataacatagcaattattaagagtaatacattagtatcctttattttcttttttttcattttcgtgatcggtgcagtaatcatttaccggcaacaaacggaagtaagcaaaagattccgagtgatagtttatttactatgtccttatataaccagtgtggttgtatggtatttttttgatcattacggagctgaaacgcatcatcagactgtcagggtgaaatcacaaaagatgggtgatttttttatcttttcttttattgtacacggcatattttttgtcccgctggtggcgtatacctgtgactttctgttgagctttctgttttgcagaaataaaaaaacaccaccggggtaa

SEQ ID NO: 288737 - DNA, 210 bp, Morganella morganii
atgcgcctcattcagcagggtagcgaggacttccggtacggactgctgacggaaaatgcggctgtcctgattgagcgtcatgatccacatttccgggcggataacaaactgataccaggttttgttgccgtcagtattaccctgttcagcggaagccagcaatccctgcacggtacggaccttaacaccgttgcgggtgaccgtcagtga

SEQ ID NO: 288738 - DNA, 519 bp, Morganella morganii
atgccaactccgtgctatatctccatcgaaggtaaaacccagggcaacatcactgccggtgcatttacggctgagtctgtcggtaacatctatgtacagggtcacgaagatgaaatgctggttcagcagtttgaccatgtggtgactgttccgactgacccgcaatccggtcagccatccggccagcgtgcgcaccgtccctttaaatttaccgtggcgctgaacaaagcggttccgctgctgtacaacgccctggctgccggtgaaatgctaccgaaagtgcagctgaaatggtaccgcacctccgttgaaggtaagcaggagcatttcttcaccaccgcgctggaagatgccactatcgtcaatatcgactgtaaaatgccgcactgtcaggatccgtccaaatcggattacacacagctgattgaagtctcactgtcctaccgtaaaatcagctgggatcacaccgttgcaggcacctccggtgctgacgactggcgtacaccaatcgaagcgtaa

SEQ ID NO: 288739 - DNA, 588 bp, Morganella morganii
atgtcagatgatgattattattatgccatgtatactttccaggtggggactaaaacttttgatggcgttgaaatgcttatcttgaacatgataaaaaactttaaagaggtcactagtcattcgtgtggatctttcagtacgactaaagataggattggaagaaacgcaattagcgatacagcgattgtcatgtcttactcgttacttgagggtttttttgacgaagagtatgttttttatataagtaaaaataaaaaaaaccaaaaacccggggagctaagtgctttaattaacactgtgatttatgatcgaggtgttaaaatcaaagactggaaacgtagaagaaaggtcatcgatttgtttaaaaaggtacgtaatgctgttgtgcataacaatggaaggatagatgcctgtgtttatagggagaaattattaaaaattttgggttttgatttatttgaacatgctaatggttacctaactctgacttttgatgcatcgctatggctaataaatgaatttagaagtatcgctcaagaatatgcggaagcggtatttatgagagatagcgaaataaagagtgactag

SEQ ID NO: 288740 - DNA, 1239 bp, Morganella morganii
atgagtgagctgagttatctgaaaaagctgctgaatggtgttgaggttgagtggagaccggtgggagatattgcgggatattcatcaaccagagttgatgccgataaacttgatgccacctcattcattggcgttgataatctcattgctaataaaggtggacgtattaacgcaacttatttgcctaatacaacacgtttaacagcatatgagcaaggagatatccttttaggaaatattcgcccatacctgaagaaagtgtggatggcttcaaactctggaggatgtagtggcgatgttcttgctatccgtattttagaaggctacaaacggcttattagtccaaaatatctttactatatattatcgtccgattcatttttttcctacaatatgcagcatgctaaaggggcaaaaatgccgagaggtagtaaagatgcaattctaaactatcaaatccccattccctaccctgacaactcggaaaaatcccttgcgattcaatctgaaatcgtccggattctggatacattcaacacccttaccgctgagcttaccgctgagcttaccgcacgtaagaaacaatacaactactatcgtgaccagctgctgagttttgatgatggtgcggtggagtggaagacaatgggtgagataggtgtatttacacgaggaaagcgatttgttaaagcagatatgctttcagaaggtgtaccatgtatccattatggtgaaatgtatactcattataatgtatgggcaagcgtgactaaatcatttttaagtaatgatctggctaaaaagctgagggtttctgagtatggcgatgtcattattgttgctgcaggagaaacgatagaagacctcggtaaaggaacagcatggctcggtcagtcagatgttgtttttcatgatgcatgtttttcttacagaagcccgctgaattcaaaatatatagcatatttcacccgcaccaccgcatttcatgaacaaataaaaaaacatatatcttcagggaaaatatcagctattaatgcaaatggattatctaaagtaaaaataccaattccttcagatgaagagcaagcccgtattgttgctattcttgataaatttgacaaattaaccaattccattaccgaaggcttaccccgtgaaatcgagttacgccaaaagcagtacgaatattaccgggatttactgttcagctttccgaaaccggaatccgtgaataactga

SEQ ID NO: 288741 - DNA, 1545 bp, Morganella morganii
atgatttatacagacggcactatagccattaaagccggttcaccgattgtgaccggcaccggtacgcagtggaaaaagaacattcacggtgtggcccccggccagcttatcagcatcgagaacggtacagcacctgtcagtatgatgatccgtgcggtaaacagtgataccgaactggtgttgtcattcaatgccccggtaacgctcagcggcgcgaaatactccatcgccaccacggtaccggataccatttcagatgctgcccgcaccatgtcagccaatcagggctatatcgtttactttctccaggccatgcagcagtggatgacagacaccggccaggtggaaattgagctgccgaacggccagaaggtgacgctggaggatttaaaagggctggcctcacaaacgtgggtaaatcagtttgcggggcaggatggcgattctggtgttttgtattcaaaagacaaaaaaaagatacttagagtcgggaatgatgggtatttgacctacctcgttgatggcgttgcaaaatttctggtaacgaaagaaggagttattaatacagaggccaatattgctgctcttagtgatgtttcggtctggaataaagagaaaaatgccagattggctatagctaccgtgggtaatcgcacctacttatctaaatttcattccggaaaatggcagggagagacagccattcctgatggtaatggtactatggcaacaaggcagtggattcaatcacttactggtattggcgggcaatcggtatggtataaaaacgctgatttactgtatgtcgctaatggttgttctgtctttaagcaaggggggggtgtggatgataactacttctctgaatggggaactggtatccatatgaactactcagatacccacggaatgcggatgtttgttgctggcagaaacggcagggtcattgtcaacgtgcgatattcatccggtgaaatgatttggaacacgttgtgggggcaaaccaatacgacagtggatggtagtggatttttgaaggtatcatccccaattatccaaatccacccagacggtagtttcgacaccaacgacgaatccgaaggcgctgaagtccgccgcaccggcaccggccaatatcacatcaccggtatcttgggttataactcagatggtgcctggggcgtaaacggtggtatctcggtaccgaaagacaataacggccttgagctggtttacgtcgcggaccgcgttctggaagacggcagtatcatcatcgaaacctgtcatcggcagcacgcgcatttaccggaacgtttccagaactggcgactgaaagaggtcaccccggaaggtgagcgcattttctatcaggacggcgagccctgtgacctgccggaatacacccgcctggatgtgcgcgtggaaatgccgcagggctcagtgtggaatgtgaaacagcgcgaattggctgaacagatggaacgtgagcaggcagggcgtgaagcacaggaggttgcggagcaggccgaagattcagaggaataa

SEQ ID NO: 288742 - DNA, 513 bp, Morganella morganii
atgacaacactgccggaaaaagtactgaccggaaccgcacatagttaccaggcagcatccgatacctggaatatgcgcctgccgcagttgcgcaaatattactggcagccttttttacagcggctcgctgcattaccggatgcggtttatgccatacacggtgtcagtaaatcggcaggggatacgttctcagtgtattatgccaccctggccgaaacacattgcctgaaaaataccacaccgcaggatcttatttatacgcccggccatgcccattacttaaaaattatttttgccggtgatttttcaggtattgattttcaggatattacttacgatatctataataatattctgccggaactgaatattatccgccatcccgggcatcctgatacggaagaatacgtattccgggacaacatcacagaattaaacccggaaaacccgaaactggctgtccgggcaattaattattacattccggtaatgactgatactgcaggctggtga

SEQ ID NO: 288743 - DNA, 441 bp, Morganella morganii
atggctggttgttttggtccaagtcctttatccgcgggtatcagtagtcaaacaataactgagaaccatttttctgatacttccctgccaccgattccatgggaaaagattaaagattttttctttgaaaatcagcatgatactgcacgccctttcttctcggagttttccaaccctgaccagaaaatatccagagatgcccttgaaggcctgttttttcagctcatagaactggcggcactaggatataaaaaccactttaccgtggaagaaaacagttcatcagaaaagtgttattatcgtattaccgataaaaagggaaactatattttgtcaatttatcatggacctataataattagtaatgctaaatcctcatgggagcaggtaatatgcttacgcgtatccctgatggtaaaaacacagtacataatcgcataa

SEQ ID NO: 288744 - DNA, 207 bp, Morganella morganii
atgcctattattattgagaatggaatatctctaataaaattcgagcataattacattgcggcagcacctggattttttgtagaagggcaattgggcggcgagatttatggtctaaagtcaaaattattcagtgacaacagaggcccataccgcgccgctatggaagtattcctgatgatgaaggatgcggagaatgaaaaagtatga

SEQ ID NO: 288745 - DNA, 930 bp, Morganella morganii
atgaatgtaatctatagtgagaattataattttgacatcggactgttgagttactttcatccgttttacggaatgaaattcaaatctatttttaatgatttgaaaaataacagtaaaatccggtttcacatgcctgattccgctatagatgagcagatcatagacgattatctttccgggataatgaaatacagagtcaaaaataagaagggcatcctgagagcacttgagtttccccggctccccttcctcagctatgcatatctggataagcatgtattaacccctatgcgttttggtatcgccggcacactgctgggagcacaaaaagccatacaggaaaatactattttctggaatcttgccggtggctatcatcacgcatctcaccagaatatggagggattctgtatctataatgacatcacgatttgctatcaggaattatgccggagaaatatcctgtccgcagatgacagaatattaattattgataccgatgcacatcacggcaatggtaatgctgtcgattttatggataaccgccaggtaacgatccttgatatttataatcaggatatttatccgcaatcacaatatacccgcgaacgtgttgatatccctgtgccgcttccccggaaaacccccggcattcattacctgaaccaataccgtgatgccttaaataagataaacggtagctataaaatagcatttgtcattaccggcacagatccgcttgaagcagataaactcggcggcctttcactgacaatcagtgatattgcacaaagagataaaacaacctggcagttcctgtcagagaaacaaatccccgctgtttttcttggcggaggtggttactcaaaactcagcgcaacctgtgtcacccgcgccattaacggtattatcaccaacgccgcggactga

SEQ ID NO: 288746 - DNA, 468 bp, Morganella morganii
atgttaaaagtttatatctggctaccggaaggaaaatatatcggacatgcatctctttcatttcagggaaactacgtcagtttctggccaaaagacagtgcaggaaaaaaagatctgaaaattaaatctaatagtcaccccggtgcttttatgggcgcgttaaaggaagacattgaaaatgaaggcaacagacaacccctggttgtcactattaatgaaatcaatgaagaaaaacttgcatttcatatcgcagaactaatgagtaacacaccgagatatcagctggcccgcaataactgctctcatattgttgctgaatgcctggctgttgcctgtgataaaaaacccggctttacaccatcagccagtaattattccaaatatttaggttcaactctgggtagagggatctggacacctcatgatatcttacggtatgcacaggaactctcggtaaatatagtatga

SEQ ID NO: 288747 - DNA, 804 bp, Morganella morganii
atgaataaactgacatggactcagtggctgacagactctcatccagcggacgtgtatcttatcgtgaatgtgcaggcgaccccctccccgatcaataccctgtacgccggggactgcattgacgaggcgttccgcctctacgacagcaccccgctggctcacattgccgatgtcggcttctggcttgtccggctgaaaccggccgcctgccgtgaactcggaaaacttatggataacggtgtgttcagtgatccgtcatggggctgggcataccgcagtcagatgtcattgcaggagaatctggatcactggcggcggcgtcagattgtgacactggacggtgaatccgttgtcctgcgcctcggtgacagccggatagcctcggtactgcttccggcaatgaaccgcgacgactggcggttgctgatgaccccggtacaggaagtcttaaccgatacgccggaacttcgcgttttcacctctcccgtgacggatgccccgttaccggatccggaaatacagcagctgtcgtttgagatgaaaccccatctgatgcgggcatggcagacttcggcacaggcgatgctgtgctgcactgaaaacattgtctgtgacctgtgggaagatcatccggaaaccgccctgcagctggatacgccggaagggatgctgaaacagcgcatcaccggctggctgacagaggaaaccgaaaagctgacagaccccggcagcctcacggaagcagattttcggcggtatgcggcacatcagggatggacggcagtgtcagaggagacagaatga

SEQ ID NO: 288748 - DNA, 1737 bp, Morganella morganii
atgagtacccggaacgactgtatcaaatgtgaaaattaccgccactggctggagattcagctgacagatgaggcggggcatcccctggataatctgccgctcaccctgaaagaacggggcacggacaaagtgatcaccggtatgaccgatgttcagggggttttcagggcggagggcttatccgcccgtcccctgaccctgaaaatcggggcgcagccgctggcggacaaactgacggaagaggtttacgcaggcacattgctgcgctccgggggcacgctgtcagactggtgccgggagcaggggtatattctcagcgaaaagaccccggcaggggcattcagcccggaattaccggctcaggtgtatgacatgaccccggcacaaatcagccgtctgcgggattatgccgcccggaatgacgggtatgtgctgtcaggacggcatgatcaccggcgggtgattgtcattccgcgtatcacggaaaaagtgtttgccaaatcggttctgcggggcgcgggaaacacggatgccggcaccgggattgaaatgctggataacttcggcaggcacagtcatgcacggaaagccccgcagaatgaaccggctcaggccggattcccgctggtgttcctcctggaaatgataatcggtgcgatagccgggggtgccgtttacagccagacgaggcagactctctgctggggcggcgacgacgattcttcctgcatgccggtcaggaaagaaaagccccggcgtcctttcatgctgacgctgctgaacaacgcactgccgataggcgtgctgatggcgaattactatcacggcgattcactgacctatgaagacctggccgaaaaagcccgcgcccggggcacggcgacaacccgggtgcggatccggtatcaggaaaatacggaaaccggtcgtccggatgtgatgtctttcgcgacagaaggcgataacgatcaggtccgggtgcgtatgggggaaaaagccccggaatttgaagcaaacgaaatccggaacggcagtcaggcataccgttcagacggtctgtcgaccccgcaatcactggcgacgatttataaatttacgctggatgatggtcatattctttatcttggtgtagatacagataataagtttgttgaactgacttcctcaacccatccggatgagttcgggggcaggggctggcataccggcggtgatattgagccggtggatgtgccgacgaataccggtaatcataacccctatattccggaacgaccggacagctccggcgggtttcaggcacatgatgataacggcccggtcattctgaccacaccggccccggaggatgtggattttaatgactacatcctgatcacaccggtagctgatataccggcgatttatgtgtatttgagtgaagcacaaagtgataagatcatacttgatacaaaacagctacaaaagaaatttaagcatgctgtcgattttgggattgatggaaatgcgaataaacaaggtttagctgaatttgagaacgcaataaaaggtcatattgatttacctgaaacgatgaatataaaaggaaaatacagatgggatcaagatgtttatcactattttaacccaaaaacaaaccttgatgttatgactgatatggacggaaattttatatcaggctggaaattatcagaaaaacaaatttctgatttattggagaaaggaaatgtattctga

SEQ ID NO: 288749 - DNA, 288 bp, Morganella morganii
atgtattctgacgataaattattaaaattaataaataacttcattcatagctctattaccgcacctgatttcgaaaaaaattatataaatgaatggagaaattatagagactttggtgagcaatctgggatcgatgaaagtactcaagaatactttgatcgggtttttacagcattagatatttattgctcaaatcctgacctgagagatgaaaatgactttgatgatgaacaattactcaacgaaataataaaaataaataaagagtggtgtttgctaaaaggctaa

SEQ ID NO: 288750 - DNA, 597 bp, Morganella morganii
gtgccgacgaataccggtaatcataacccctatattccggaacgaccggacagctccggcgggtttcaggcacatgatgataacggcccggtcattctgaccacaccggccccggaggatgtggattttaatgactacatcctgatcacaccggtagctgacataccggcgatctacgtgtatttaagtgaggaactacccggattaaataggccttcaagaaatacttcatccgattacccacctaatcaagcagtacttgataagatgaatgaccctaattatcaaagcttactaaacaatgataattatgattgctctgaaattgcagatagattactggaagccgcgggtggagaggggcatattatcgaagttcaaccagtagatagatttggtgaaattaccatttttgaaaatggtgttattaaagatgatatgacgtatcatcaggtatatactgatggtaaatatatttatgaccctagattatcaaaacaagcaatacctaaaggtgattgggagaagcatataaaaagtattaatagtgataatccttttatcatttcaaacaaaccaaaagggttaaatagatga

SEQ ID NO: 288751 - DNA, 510 bp, Morganella morganii
atgataaataaacaaaatgtaggaaatgagataatcgaagttataaaaaaatatgttatcattgagtggcgaaatgtcgacgtccgctttataaaaaggagcgctaatcctctcgatattctttgtactgatacctatgtatatgatggagttaatattctcccatcgactaactttcgtatcaatagcaatattgaacctgtacccatcaatttcatcaaaatattagaggattcagtaaattcttttactggtaatttacgatgggttttatttagttttaaaaagagaaataatcaatataattggacaattgcaccaattatattcacagatgaaaatataaaaaaacaggcggatttagagtgtttacctgtaaaactgtgctttgaaaaatattatccagaatatggacagcttgcgtttgaagacattccgctattagccgctcatatagataaatgcttgaataaacattttgacccgattgactacagtcaaattaattaa

SEQ ID NO: 288752 - DNA, 372 bp, Morganella morganii
atgaagaataatagttttttagaaaataaagtcatgcagatttctattgccttaaatagtaatgataatacaatatcatcactaattggtaatattagcgatctcttttcatctccttacaaaagagatgtgatcgctgacaatgatattgtcaaacatttgtgggatgttttattcgctgtatttcttaaagcacatgataatgaagtaaaatttgatgcaatcagtgcaatgggtgatatatatacatatcagtccaatataggtcatgaattagaattaacgcatatgaaagaatggagagagcatcatgatagtaacaacgcttcgacagaattaattgactgcgtagatgatatattatcaatgtaa

SEQ ID NO: 288753 - DNA, 180 bp, Morganella morganii
atggctcgcatgctttctgttttctttacccgccgccagcgctttgcacatctgaataaaaaaaccaccgttcatgctgacggtggcttttctttatccaatcaaaacatttcgctaaatcatttcgttcagagcaaggcggcaagcgaagaggcacggggagcatacaccagtatgtga

SEQ ID NO: 288754 - DNA, 642 bp, Morganella morganii
atgaaactctgcacattcattgaacgcatggacagttatgacttacaacaagacaaaacacgcattattgatgatttaaaacagctggcaaccaaccgtacattactgagtgagcatctttaccgctccctccggaaagatggattcagcactcataacagcctttatagtccttacgggttcatattgcatcacggtgacttatttacggtacggctgggattttggtctccggttatctcgccggatgaaagagggacttttatctatgatgtgaatcacactcatgactttgaaatctatgcagtgggttacagcggagacggctatacaacaatcatgcgatcaatacttgatcacataccgctgaaagcaggtgtaaagccttctttaggtgaggagcggaccttaaagctggcactggggaatgttttacacatgatgccgctgcatgagatacacaggcaacttccgcctgaaacgttgtctgcttcattaagtttgatgattcatcctcaacagacaacaagcaccgaagaggcctggtgctttgacgaaaattatataccgacttaccccggctttgccacgcaggaatcgacgctcttcgactattcgatgtgtttactcaatcaggggtag

SEQ ID NO: 288755 - DNA, 780 bp, Morganella morganii
gtgacaatcattaccgaatgtctttcagaaaaaatcagtcctgaagaaataatttctttaattaaaaatttggatatgacggcagaggttaaaagtattatcaatacagtgtatgaccggataaaacgtaccgatacaactttacatcaggccgcgattcttgatgttgtcaacctgcacacgaatacactgactctgcactatacggatttcggtaatatcagtatcaaaatactgcatactgcgaaatctgcagagttatactcagtacccgggcacagtattttgtttgccataaacaatcagtcttttaccgttcagttataccgcattacagaagaacagctaacgataaaagaacgtgtgaccatcagtgagaacaatccccttgttattgatggccgacacactttattcgactatattccgtcggatagtggtaatccggcgtttatcggcagtatcaatttgccggatctcactgccgacatttgtgtttttaaccgtgattcgttacgcaaaatcgcctggttcccccatgatgatagtgccgcccgctatctcgtcagccttgaattacttgaatcaattcaggatcccggggcctgtaaggtggctgaagaactgatttatcattatcaccccgcagtcgcctggcgggcgtttcaggtaatttatcagaaagatccgctggctgcgccgaattatgtaccgctgctgcgccagctgaaaaatagccatatggatcatttgctggatcaatacagtgaggtcatatga

SEQ ID NO: 288756 - DNA, 651 bp, Morganella morganii
atgatatcagatgtatattacagcttgatcgaacacatttacaacatattattcagcgatacaaaaacggggggggggctggatttccgcgctatggaagctgacataaaaaataaaataaaaagtgaaacagtaagacaagaactatctttatatcagaataaatcatcaaataaaaaaatcgatccggaagatgaaaaacgattaataaccgaaaacttcattcgtcgtgaattttattctaaaataaaagtaacaccttattctccggagaaagaacgtgaaaaactctttgagatgttggacaaaagcttatccaatgatagcttttcaaatcagcgcgccacgttaaatccggttgtaaaatttacgccgccatcagaaccaatgtcttcttctgttaaaaatatatcagatcaggatactgatgatttaattaatacactggaaaaaattaagggcaagggtgatatatctgatcagcgcgccacgttaaatccgggtataaaattcacgctgccatcagaaccaatgtcttcttccattaaaaatataccggatcaggatactgatgatttaattaaaatactgcaaaaaaatcagggtatgagtgatgcctttggtcagcgtgctgtattacagaataaataa

SEQ ID NO: 288757 - DNA, 1890 bp, Morganella morganii
atggcgggaaatacctttgattttgaattgaatgctgacgatcaggccagcaaagaaattgccaatattgaagctgagttaaataagcttcgccctgttttaaaggatgtgcgcgagagtcttaaaatgggtggtgatgaatcaatttccggattgcgggatgtcggcgaacgaattcgcgatatgtccgatttttcgaaaaaaggcgctcaaagcatcggagatatgatcccgccactgaaaaacttcggagaattatccggaaaatatctcaatatggcgaaaaaaatcggcggcatcggagccatcggttacgctgggtatcaaatgatcagccaggttccggaacaagccaagaaagcgactgaagtctcaaccagcgccaaaaatatgggaatgagcgttgaggaaggaactcgtcttacgggtacccttattcaaaaagggtctacagaagatgatgcccgccaatcatttgaaagtctgtacggttctctgaatgatgcggtcagagggaacaataatgaattactggcgaccatccgaagtattggtgccagtattattcagcgtgaagatggaagcgttgacctgacaaaaacactgctcagcctggaaaaagcaatccagaatatacctgaaagtcgtaacgctgaattacaaagcaagctcggattatcaccggagatactttcccttatccgcgaaggaaatttgcaagggcggctggataaatcagaccgcatgggacatacccgtgacgatgctgttgttgagcaactcagcaaaatggatgaggttcttaaaaacatttcagcggcatacgagggagcaaaaactaaaaccggtgatgcggtcgcaggtgcgttactttcagatgggtcagtaatcgacggcctgaatggtgtagagcaattactgacatacggccctgataacgtagcacttatgcaaacaatgggcttcctgcatggtaatgattcagacattctgcgaaccacatataacacgccggcgctttacggtaagttgggcatgtgggaccagtcgatggtggatttcggtattatgaccgacgatattcgtaaaaactatgaggaatgggctaaggagcgggagtcagcaaaaaaagcacaggaaaaagaggaggaaaaacagcgacaggctaatgcgccagaggattggcatcaggacacaaaatataatcccaacagccggggtctgcgtaataagaatccgggaaacttacgtgatgctgataataaaacaggattacagggtaatggtaatgacactatggcgatgttcgcctccgatcgtgacggtctggccgccatgtcacgtcagcttatgcttgatgcagaacgtgggctgaacacgattgacggctatatccggaaatatgctccgtccagcgaaaacaatactgcggagtatattaagagggtatccaaacaaaccgggtacgacccatatgaaaatctggatatgcataatcctgatgttctggcaaagctgatgaatgcaatgatcagtgtagaaaacggcgctcagcccttcagttaccaggaggtatggaacgggattgatgattctattaatgacgatcggtggattggtcggcgcaacagggaaaatgttcgtgaacaaagggaacaatgggccttacgatacaatcaggatgaatcacaagcagcccctattattaacacagataagaatcctgctgaggtgttgatgagctttgctgaacagctggcgcgagtgttggatgaaaataaagctggtggcacgctggaaattgtactggttaacccagatgctggcacaagaagcacggttaatgtaaagccgaaaggcaggattacaactgccatgagtatgccatga

SEQ ID NO: 288758 - DNA, 393 bp, Morganella morganii
atggaagagttctcacagaacccgtttcagccgggagtacgtcaggcggtatttaatccggatcagctgatctccggtccgcttcaggttgttaccgataccggcattattgcaaaggccggcattctgaaacgcggcactattctcggtaaagtcaaagattccggcgaatacgcaccgagtaagaaaggggcggaggatggcagtgaaattccgtgcgccattctggtcgatgatgtcgataccacgactgatgccgcgagcggcggcctgtacctgatgggggagtttaaccagaaccgtattatctttgacggcgcatggactccggcagagctgaaagacgccctgcgccagttttctatcttcctgcgcgacagcgtacaagcctga

SEQ ID NO: 288759 - DNA, 369 bp, Morganella morganii
atgctcgatagaataaccacatctctggatcagtcagccaacctcttaacgtgtgcaattgtatttacaacagcgtgtattgctacatataaagcatggcatgaaagaaagaaaaataaaataaaaactagcgtaatagaacatgttagcttattcacatgctcttttatgtgcggggggattgcaattacctgtattgctaatattgcagcaaaagcgggaacgttaggtgttggattagcgatgattattgtttatgtggtagtggttaatgccgtttatattgtttttggaaaattagagattaaagataataaagtaaaatcagcaggcaacccaaagaaaaataaaggcaggaaaaaacgatga

SEQ ID NO: 288760 - DNA, 381 bp, Morganella morganii
gtgagcagatgggtgacgatagcgtgctcagtgatgatgatagcgctatttgttatgacgcggtggcagtctggaaaaattgatgagctgaaagcagagcgcgattcactatctgaaaaactgtcagcccagcaggtgattaataccaccacattaaccgcaatcgccatcaatcaccgcatctcactcgacaacatcaaagccaaagaaacagagggcacagagaatgtcaaagttaaaaccgttatcagaacggagtttaaagacagtgagtgtgctgttactcctgtttcccctggcgttgttgggaagctgcagcaatacgaaagagacattcgtacccgcgccggtggtgccgataccgccacaactgaccgctga

SEQ ID NO: 288761 - DNA, 375 bp, Morganella morganii
gtgtccgagagaggcattcagaataccgttaaatgtattaccgaactgaagctgactgtttttatccagcagtaccgtaccaccgctgatattactgtcagcggccagcgtgatatcactgtcagtcaggttaatattgctgaatccccgcagtgtggtttcatttttcagcgtgtcggcggagtgattaaagttaagcgtgttatttccgctgcccgaatcaatatcacccagataggaacttccctgagtcagattattcagtgtgaaaatatcatcaccgctgccggttgtgacggagtggatatctgctccgttgtcaatgtttacctggttattgccgttacccaggttgatcgcgccggtactttttga

SEQ ID NO: 288762 - DNA, 162 bp, Morganella morganii
atggttggtgccgaaggtcagagcaacgggggatgttatattaccgaaggtcagttcgctgctggtattctgagcaacagcattgcccatattgcccagaacggcgatcatactgtcagtaaccgaaccgatatcatccagaataatattaatttttgttga

SEQ ID NO: 288763 - DNA, 459 bp, Morganella morganii
atgggggacgaaaagagcttagcgcatacgcgatggaactgtaagtatcatgtcgtttttgcaccaaaatatcggcgacaggccttttacggcgagaaacgcagggcagtaggcagcatactcagaaagctgtgtgagtggaaaaatgtgaatattctggaagcggagtgctgtccggatcacatacatatgcttttggagatcccgccaaagttgagtgtttcaggttttctgggttacctgaagggtaagagtagcctgatgctgtacgaacagtttggcgatttaaagtttaagtatagaaacagggcgttttggtgccggggtttttatgtggacacagtgggtaagaatacctcgcgaatacgggaatacataaaacaccaattggaagaagataagatgggagagcaactgtcgatcccgtatcccggtagcccgtttacgggcagtaagtaa

SEQ ID NO: 288764 - DNA, 516 bp, Morganella morganii
atgtattcatctgcttcaaactctatttctgtagacgctatcccggtttcacggcaggagcatcattgccaggaaattttcgaaaaaattaatcttctgaagagaaaattaaatgtaatagaacctggcaaaatagatcatgaaatcacatgcctcaaaacattcattgagaagaatgaaacaaaaatgagtgatatcccggaaatcaatgacaaattgtcgactacactagatatggtaaattcgataaaggataatatcgaaatgggaaagggtgaaaataataaggcgaatttaatccagcttaataacttgacacgtgaaatggaggacatgttaaagccggatgaacgtaaaaatatgggtgagcgtgtcacagccgaagtgagcagaagtgctgaaaaggttgctaaagaagcacagagagtcgccgaaagagtcactaatgaagcaggaagaagtgcagataaagtgaaaaatgaacttcacagagtgaaaaaaaaattgaagtggtaa

SEQ ID NO: 288765 - DNA, 189 bp, Morganella morganii
atgttttcaattatactgaaatttacattcattcttgtaatggtatctataaccgcaacatgtattaaatataccccatatgtgtattttgaaattgatgctattttattttcttggcttatttttattcttgaaaatataacaaccattaagattgataataaaaacatactaattcctttatcataa

SEQ ID NO: 288766 - DNA, 675 bp, Morganella morganii
atgggaactgaagattgggctttggttgttgcaattatcgctgttatcgttggcattggctcactaggtttgacttggctatcgacgagggcggcaaaaaaagcaattgatacatcgatagagatttatgaaaaacaaaagatagatagtgaacaggaagtcgagaaggcaaaaaaattaaagttaaaggctataaaaaatatagtcaggagtaaattggaaagtaattatgtgtcctatggaggggtgattaaagtatttgatgaaattaaaagtggtaacgatattcaaatattgtttcaggaatttgaatttaacgattttactatttcttgttatgatgggaaggcaaaaagttttaataagaatattcctccggtatgtgattcaatagagattctttatgaggtcagtttgcttgatgatgatttttctaagatgttaattgacctgaatgatgcgcatacaatgttaattggtgttttggatatttttataaaatctgcgaataacactacgtatagcgaagattttaaattaaataacctaagatcagtggtgtcatatttttattatattattgatgggtatggtaaactactcgaaattctatatccaatatgtggcggcgataaatcactatctgatatttatggtgattataaaatgaattga

SEQ ID NO: 288767 - DNA, 195 bp, Morganella morganii
atgaaaatcacagacgaagatattcaggcagtaatcttaagcttaagcggggactttttatttcaggtcggcgagtcacttgagtttcatcactatgacggtttaatgccgcaagaggagcaagacaggttatataaagccttgcagatatggattaaaaaatcagctggtgaatttaagcagattccggggtga

SEQ ID NO: 288768 - DNA, 570 bp, Morganella morganii
atgtctgattttttaacggtagttaaagataatgcgctggcaataaccacattggtcggtgtatttactattataggtacaggattaggtttttggtttaattttaaactttcaaggaaaaaattagaatctgagaaaaaagcacttcgccagcaaatgataactaataatattgcaccgatgagacaagcttggattaatgatttaagattaacatcatctcagtttatatctgaagctattttcattagcgcctaccatacatataaaaaaaacaaaagcaaagatgaaaatgaagataatgatgaagaaaaaaaattcaacgagatgaaagtatcaataataagaactacaacatatctagacctattattaccatcaaaaacagaaaaaaataaagaaaaagaagctcaaaaaatacgtaaaataatgaaagaattgattttttgtaatgaaaaaaatatgtcaccggaagaattcaatcaaaaggtgattaatataaaaatagaattaaggtcgctattaaaaaaagaatgggaagtaacaaaatcacttaaagaaatagaataa

SEQ ID NO: 288769 - DNA, 738 bp, Morganella morganii
atgccaccaaacgagtttaaatggaaacattttgctcccactatcatcctttggtgtctgcgttggtatggctccacaccgttaagctatgccaacgtcagtgatatgctggctgaacggaggatttcagttcaccgctcaacgatttatcgttggtttattgaatatgctcctattctccgtaaaaaactcaaaaaatatcaattcattcgggctgtttcctcctggcagcttgatgaaacctatgtcaaagtgaacggaaaatggttttacctttaccgggcaattgataaacacggcgatacgctggatgtctatttttccccgaaacgtaaccggcatgctgcctatgaatttctcaaacgggtattaaagccttacaccgctgagcggcaaccaaaaaccttaaacaccgataagcatgctgcttacggttacactattgcccgtttaattaaagaagggaaactccgggctgacgtgaaacaacggcaaatcaaaaccctcaataatcgaatagaatccggtcatgcaccgattaaaaagttaattgttgccacaggtggtttcaaaatcgctaagcgggcctggtcgacaatccaaggatttgaaacgttgcgaaaactgaataaggatcaatttgatgaatggttacgtcggaatgaacctgagtttcgtgtacgggagcgatctgcctttataaatcgcttattcaatgtggagacaatattagcctga

SEQ ID NO: 288770 - DNA, 654 bp, Morganella morganii
atgtgcagagtggtttttcctgaagattcttttgtatctcataatattaattcgggtgttgagaggggctgtaatcccgtaaatcagccgttgtttgttaatggcagcgttaatgttcagggcagcagcgaaggaacatcctatataaccgatttttttgctggcatcaatgaaaagcttatcaggatgatgatgctgataaataaactgcgcgacgcgctgcagctcattaaccaaaagaaacaggccctgggctgggggcttgaagtcaacgctctgcagcaaaatgttaaagccattgtaagtagcttttgtgccgcggtgcgcggggcggttggcggcattattggcggcgtgatgatggtcgctggcgcagctgtgggcgccgcttgcggtgaggtctggacgatgataggtaacgctgcggagaagttggtcaacaatgctggtgccttggcttccgcaagtaaaacccgcgaagcggatcaggagaaagccattggagggctgcagaatcaggccgcgcagtcatatgtcaaaacacaggatgattcgttggtaaagggcaatgaaatcaacaaacactcgatagattttaacagcaatatagtggagcaggagggccagatgttgcgcgcactttttcgctattaa

SEQ ID NO: 288771 - DNA, 600 bp, Morganella morganii
atgagcggaaacctgtcagtaaatcatcgtattaattttaacaccccgggcttcacaacgccggatattaccttgggtaccggcgataataataccgttgcggataacccggatagtaataatcctttcacctacgccttatcggtcctcgataatttgcgattggctttacaaaaaatagctaatgcactttttgccaggataaataccagcgccgatcgtgcgcgcaatactcaggatatggctaaccgaatggatgaagttattgccgacgctgcaaaaggtgatgataaaacccgtaaaccggttcccgatgaggtcatcaaatatatgcacgataacggcattctcgtcgatggtatgacgattgatgactacatcagtaagcataaggatacagatggcctcgataagggagcgctgcaggcggtcaaagcggctcttgataacagtgcgaaccgcgataccgacctgatgacccaggaacaactcaaaattcagaaaatatctcaggagatcaatgcagttatcacccagtcagccggagcaaacaataaactgggtgacttactcagcatgattgcgcagaagatgtactga

SEQ ID NO: 288772 - DNA, 849 bp, Morganella morganii
atgattaacagcaaggacggtaaattacgtattatacgtactgatatcactcctgatgccaaacttgataagttatcattaatctctaataaaatttccataaaaaaaagtaaattaaattctgatgaattaaatttcaatttattaacctcatccaaaagcaaaaaaacactttcagatactgttgtctatgtggatgcgtatggccgtgatggcatgcataaaataaagaaaaccaacctcaatcgaaaaccatcagaattatatatttctgctgactctgaagtaacagcaaacaatgttaacattaatcttcttgaatctaaattcaataacaaaggttcaatccatggccgggaaaatgtgcgcatcacctcaaaaaaacaaaatgaaggaaattatactactgtaaataatggtgatattatcactatgaataatatgggaactatccggggaaaaaatatcacaatggtcgcccatgacagaagccatatggaaaataatggtgaaattatcgctatgaaaaatatggatattgccctggacggtagtacattcgttaataatagaaatgtccataactatggaagctatggcaacaagaaaacgacaatcacttttgatcaggggtcattcataaacaatggtgaaatgaaaagtgataatttattaattacgaacacctcaaacggaaaatatatcaacaatggttcattagatttcaaatactatgatttgactgatttgagtgaacacaatcaagacaacaatccaatgcgtccgttcaaatttagtaacaacgaaaaatcaaataatcctgaccatgataccagtgacgttttctga

SEQ ID NO: 288773 - DNA, 1209 bp, Morganella morganii
atggcagttaccgactcatggcttcgctctatcaatggaaagccacaggaaaaaatgctaaccaaatcagacagggatggtttatctgtccgtgttaccccgaaaggtaaggtgatatttcagtttcggtatcgctgggacaataagggggaacgtatcgatatcggcacctatccggctactgggcttaaagaggcgcgtgatagtgccgtattttatcgcggtgaaattgaacagcatcgtaatccaaaggttgtgaaaagagtcaaaaagctggaggccattacatcctgcacggttgaagccgtgatccgagaatggtgggagaggtctgtaaaaacaacccaggtaaaagcaggggagcttttacggtcttttgaaatttatgttttcccgaaaatcggtgaactaccgcacaatgaagctaatttgcatgtgtggttgtctttgcttgaggatataacaaaaagtaaaccggctattggcgcacggattttacgctacgcaaaagcgtcacaccgctggggtgtcaggcgcgggcttataacagcaactccgttaacggaactatcacccgcagaccttggcgttaaaaataagcagggtgatcgggtattgtcggacgatgaattaaggtcacttttctgtcttattgatgctgatacatataacccaagaaacaggcttattattaaattagcgttattgtttggttgtcggataggtgaactactgaaagctaagataaccgactttgatttcaacactggcatttggactgtaccgccggaaaatcataaaacggggagcaaaagcaataaaccgctactcaggccaattattgggtctgcaaaattgttgattacagaagctatatcattgagtaaaggcggctatcttttcacggtatcaggtggtggtaaattaacggaaggtagtcatagtgtgtttattatcagcttgaataagaagatggctgaagatagtgatgactataaaacatggtcaatacacgatttacgaaaaacgatgagaaccggcgtgtctgaactaaccgcgccccatgttgctgaaattatgctgggtcacaaattgccgggagtatggcaggtgtacgataagcacacctaccttgatgaacaacgcgaggcttatgagaagtggtgggataaggtcaatcgaatcgtttaccagcacgccacgctttaa

SEQ ID NO: 288774 - DNA, 189 bp, Morganella morganii
atgagcgactattggagtacggcgaaggttgccgattatctgggagtaaaaaacaaaactgttattttatggaccggaacggggaagcaaagaaaaccgggcttccccaaagcaaaacataaactcaggtcaaaacaatttgaccccgaggaaattaaagcgtggcgtgctggtaaacgattcgattga

SEQ ID NO: 288775 - DNA, 609 bp, Morganella morganii
atgaaagaaaaattgccattcatagacgccggattactgcgtgctgctcttaccctgatttcggcaaaagatgatccgcgaccggtaacaaaggccgtccacattaacggcgaatttatcgagtcaaccaacggacacgccctagttcggatgaagcacaatgcacattttcaccatgatatcactgtgcaattcaacgatcccgtccctgatgacgctgagtttactgaaatcaaagtgcttgatgatggtcgttgcgttgttgtgtattaccgcgaggaaacagaagcagaatttgtaccgttcgacatatttgcactgacccgcagttcagagacatatcctgatttcgatatttttctgaagcgtgagtttgtaaacaatgccctgccaccggttggtgctaaatacctggcattaccttacctaatattcggcggcggtgttgtggatgcaacgtgtacaactgacgggaaagccgttctgttcaacatggacccgtttaccaatgaaatattcggtgacccacagctcgttaccatggcaattatgccggagtatctcgacgtctgccgtgcagcctgtgaagaaggtatgggggacgaatga

SEQ ID NO: 288776 - DNA, 450 bp, Morganella morganii
atgatctcttcaaaaaacgagaatgaagaaaaaaaatcaatgatggctgacatttatggtgaggctatcttcctcgcaatccctgttgttgcattaatatttattacagctgtaaaaaattctttttcctttgaaactatattttcatccttactactaacatcagattggtcaataatgtcgtctgttatatttggacaatgcgcttataaaatggcaagagttataacaatacttggatcaaaaactgatggtagaagatatgcacactacctcgccagaagaatatttctaatcactttatcattgttaatttatgcggctattgtttttgcaccaaatttgtatcttggtgcatttcagatcatattatttttttgctctatcttttttttcttcagagatagcgctggtgcctatatcttacttaaccgaattagtattaaataa

SEQ ID NO: 288777 - DNA, 720 bp, Morganella morganii
  misc_feature (655)..(684): n is a, c, g, or t
atgaataaagcgatagccataaaattcaattacaataaagatagaaacgatcctgaagatatcctaaacattctaaccggatacgttaaattttataagagaattggtttaatatcattatcatcaataaatgaaaaagacgatgctatttttgaattagtaggtttgcaagatggttcagctatagcgtggataagatgtataaaagaaaaatgggaaagccttatttttaattcagcgactacactagctgactacttgtatgaaattcctgaagtctcaacaagaaatgatattgaatctatttcaaatgttatttcagagtctatcattggcaattcaaaggagggaataaaagtagaaccttgcctagatttggaactactaggaaaaacactatctgattattcagttttaaattccagacttcacgaaaatgaaagtacatttattggtaaaggtgtcgtgggtagtgatgattttagtaactttaaagaattaaataataaatttactttcaatggaaatgttgaagatattctttcgaaaaggataaaacaccataaaagggcatccaaatttcacgtgaacgttccggtcaataaaggcgacaacatatggcgactagaggaattgattactgataacctgtttnnnnnnnnnnnnnnnnnnnnnnnnnnnnnntgttttcagctaaagttgcaaacagtgattggttag

SEQ ID NO: 288778 - DNA, 159 bp, Morganella morganii
atgtcacggaatcctttaacgctgatcatcattgccatcatcctgctgacaacttctctgttggctggttattatctgtatccactcccgaatcattgcaatccactgccgggtaatccgctggacggtgtgatttattatgagtgtgaagcgccatga

SEQ ID NO: 288779 - DNA, 768 bp, Morganella morganii
atgtccgtgagttcaaaaagaagcacaatttcaaaaatccgtaaagatatttctgatctacaaaaaaaactatcagatgaagtaagaaaaaaaacacaattgcaacaagaaataatacagttacaagagagtattgataaaaatatctcaccagacactataacattaaagcttaatcagatagcgcgtcataatagtgacgtagccaggcatttagaaaaaaaagatgaaattttaaaaaaaatagcatcaaaaaatattgatcttcaacgctatgaattacagctatcccaagatgaagaaaatgaaagaaaaaaacaagatcttgagataaagaagcgagcagaagaaaaaattgaatttgagaaaatactaacccgtgaagaggaggcaagaaacagagctgtacatactcagttagctttaagtaagcaagctcttgataacgaaattcatgatgtgaataccagcttacaacatgacgttttcatttctcatgtcagggaggataaagatgattttgttcgcccatttgctcgttatctgaaatcacttggtattagtgtctggtatgatgagttcaccctgcaaggggatgatagcttaataaagaagatagacagaggtcttgctaacgcaaagttcggcattttggttatctcaagagaattcgttaataaagactgggctgaatacgaagttaacgaccttcttgctaaagatattaatggtgtaagtacacccgtttcagttccacacactttttga

SEQ ID NO: 288780 - DNA, 1650 bp, Morganella morganii
atgttaaataaaattagaattaccacatcgctcctgttttttttagttttattctttatattacaattaggttccggtggtttttctttacaaacagtaaataaattcaatcatagatttaatactgttagcgaattaagagaccgttctgatgcaattgctgatgcatggatcgatttattaaaagccagaatggatttgagccgggcggcgagccgattaggattaaatggtagcgttgttgatgagagtgtcgcacctcttttaaattcagctgatgagcatcttaaaaaagcaacagatgaatttcagttattcaagtcactaccagaacctctggttaattatgacggaagtaaattagatgattcatttaataaatacaattctgagcttttgtatttatctaaatctttgcgtgatggtaaattagatgagtatttaaaacacccgactcaaagatatcaagataactttgaaactgaatacagtgaaaatataaagttaaatgacagtgcatacactaatcttgtggagatgaatgaaaatgcttataagcagtcaatatctcttcttatatttataatttttattgtctttgttcttgttacactaatttggctcggtatccgtaaaatgcttattacgccattaaatagcattgtatcgagtattcaattgattgccaaaggtgacctggttactccggttaatgttacaggaaacaatgaaattggtatgttagccaatacattgagacatatgcaacatgaactggcaggaacggtcggtgatgtccgtgatggagtgacagccatttataacggggccggtgaaattgcagccggaaataatgacctgtcatcccggacagagcagcaggcagcatccctcgaagaaacagctgcaagcatggaagagctgacggccaccgttcgacagaatgccgataatgcccgccaggcaagccatctggcattaacggcttctgaaactgctgagcgcggaggtaaggttgtcgatgatgtggtaaacaccatgcgtggtataggtgacagctcgaagaaaatcgccgatatcatcagtgtgattgacggcattgcgttccagaccaacattctggcactgaatgccgccgtggaagccgcacgggcgggtgaacagggccggggatttgccgttgtcgccggagaggtccgcaatcttgcccagcgcagtgcgcaggccgcacgggaaatcaaaaccctgatcgaggattcagtcggaaaagtcgatgccggcgccgcactggttgagcatgccggggagacaatggatgaaattgtcagcgctgttacacgggtcaccgatattatgagcgagattacttctgcatcagatgaacaaagccggggcattgatcagattggtgtggcggtgacagagatggacaaagttacccagcagaacgccgcattagtcgagcagtctgctgctgccgcagcttcacttgaggaacaggcaggcagactggctcaggctgtgtctgtctttcatatacaggcaggggaactgaagagcagcgttaaaaccaatacattggttccgttacaacgtcctgatataaaaaaacaaaaagataatgacgacgatgactgggaaacattttag

SEQ ID NO: 288781 - DNA, 621 bp, Morganella morganii
atgagtgaaacatcccgtcccgttctcacgctgaaccgtaaaccgaaagcggagccggaaaaaagcaaagataccccgatacagccggtgttccgcagaaaacagcggatagatgctgtcccgcgcccgaaaaaaaacaaagcggctccggcagcaaagccccccgctcccgtcaaaaaagcaaaaaaacctgaaccgcctgcggtgaagcctgaaaaagtcccggtcccgccgacaccgccgaaaaaacggatgaatatcattgaggcactggggattataacccggtactggccggaactgtttccggacggtcagctgcgtccgatgaaaaatgggctgcgtgaagatttatttcaggacaaaaaagccagagttttaccgttgtcagccagaacgctgacacgctgtttatcctcggtctctcattcaatcggctatcgtctgacggttgttgccggtgcggtacgttatgataaggacggtcagccctgcggaacagtaactccggaggaggaagcggattcagtactgcggatggaaaagttaagaaaacagcagctaaaggtaaggcctgataaatttagtccggcagaggagaggatgaacaaacaagtgtga

SEQ ID NO: 288782 - DNA, 213 bp, Morganella morganii
atgaaaaatataaagttaaccggtgattttcttatgcagtcgctcaatcacgctatcgataatttaggggttacctcagatgaggcgattaaaacgcaacaacttattatttgcgaggggattgtcgggacttatgacggactcaaaaaaatcgccgaaaaataccgtgataaaagaattcctgcagataccctcaaaggacacggttgctaa

SEQ ID NO: 288783 - DNA, 927 bp, Morganella morganii
atgtatactaaaaaccctttttctttaaagttactccatcccaaatatgccactacatggatagggattatggctttatttttattggttcaacttccttacaaatggcaaattaaacttggtggatttctgggtgaaaattcgaagtattttcttaaaagaagagtttcaataataaagagaaacttggaattatgttttccaaataaaaatgccaaagaaattgacgctctagttatagaaaacttaagagcacttggtatcgcattatttgaaacaggaatagcgtggttttggagtgataaaaaaatcaaaaaactttttcaagtcaaagggatgtctaactatcaagaagcctatgccaaaaatgaaggggtcattattatcggcgttcactttatgtcattagagttaggcggaagggttatggggctttgctttccggttaatgcgatgtataggccgcataataataaagctatggaatacattcaaacaaaaggacgttgtagatcaggaaaaggaatgattaaccgtaaaaatttaagatttatggtacaagaagtaaaaaaagggaaagctatctggtttgccccagatcaagattttggtcgaaaaggtaccgtgtttgccccatttttttctgttaaaaatacgtcaacgtcaaaaggaccctcaacactggcccagttatcccactctccaacgcttacagccacattaattcgcaatagtcatggtattccttatgatctggtactggggaagataatagagaattatcctacaggtgatgaactgcaagatgcaacgacaattaatcaggtgctagaaaaagaaataatgagagcaccagaacagtacctgtgggcacatcgacgatttaaaaccagacccgctgacgaaaagtccttatatcttagctaa

SEQ ID NO: 288784 - DNA, 243 bp, Morganella morganii
atggcaactatgaacatccgcatcgacgacgatttaaaggctcgttctggtgcggcacttgacgctttaggtattacaacatccgaagctgttcgccttgtcctggagtatgttgcgcaaaataaccgcttaccagtgcaggttgcattattagcagacgaagacgcggatatcatcgaactggcgcgcacacgcttggctaacccaggaaaacggatacgcgtgaaactcgatgacttatga

SEQ ID NO: 288785 - DNA, 300 bp, Morganella morganii
atgacttatgaaattgaattttacgaagaagctttcgatgaatggcacaggctggattccagcatacgtggacagtttaaaaagaagttagcgaagctggttgaaaacccacatcggccagctaacaggctgcgtgggcttgaaggttgttacaaaatcaagttacgcactgcaggcgtccgtttggtttataaagtcgaagatggtgaattagtgatcctggttgttgctgtaggtaagcgagataaaaatgctgtttacgactctgcccgcgagcgactattcacctcaaataaatag

SEQ ID NO: 288786 - DNA, 1224 bp, Morganella morganii
atgtatatcccgcgccctgccaaactcctgttcaccatcaatgacggctggaaccgccacctcgaaaaacacggtgacaacgtcagccagtggacccgcctctgtgttgaacgcatgcttgcatgtggcacctgcgcaatgggtgttcgccgctactgctgcgcctctccggactgtacccactcccgcttcttctgccagagctgcaagtcaaaggcctgcagcgcctgcggcatgaagtctactgagcaatggattgctgagcagcagcacattctgcccgactgcgaatggcagcacatcacttttactatgccacacctgctatggccgttctttaacaataactggcccctgctcaatgacctgttccgctgcgccacccgcgccatgctcacgtgggcacgtaaacagggtattgaagtcggcatattctgtgccctgcacacctatggccgccagctcaatcagcacccgcatatccacgtctccgtcactcggagcggtctcgacgttaagcataacgtctggcgaagccttttcttcaaaaagaaagccgtggaactcatctggcggagcgccgttatccgcctgctgcgcagcagctacgcccgcatcatgcccggcatgttgccggggctgggccacatccgcgacgaacgccggtggcatcgttatctgcaggcacagtatgggcggtactggaaggtgtattttgcaaaaaagacacggggggcgtggcacagcgtgaagtaccttggccggtacctgaaacgcccgccggtgtcggcttcccgcctgcggcactactgcggcggcgcggtggttcatcactatctcgatcaccgcacagggaagcataaacgtcagatgctgagccaggaagagatgatcgggcgctatgtcagccatgttccggcgcgccattttaagatggtgcgttactccgggtttctggccaaccgtaaaaggggggcactgctgcctcgggtatatgaagcgctgcagatgcaggcgcgggaaaaaccggagaaaccgggattcgctgcgctgatgaaaggctttctgggcacggatccgtacaaatgtatcctgtgtggcgaccgactgcgttttgccggcactcaggcaggtatccatgcaacagaattgctgtcagaaaggctgcgtggaatggagaaaaagcgatggttgcgaatgcctgaatgggatcagtgcgtctga

SEQ ID NO: 288787 - DNA, 159 bp, Morganella morganii
atgttgcccacctctgaaataaccgcctccccggcggtttttgtgctggatttttaccggaaatcccctgtttttatgctgttacctgatatcttttccccggaaaggtggctcttgtaccggtaccggaccttatttggtatgaaaacatcctgttaa

SEQ ID NO: 288788 - DNA, 939 bp, Morganella morganii
gtgtctgactccctgatacttcacaaaaaacaggagaatgcgggtaaagttcaccgtcatttttttccggtctttaaaggtaaattacccaagctcccggtcatcaggcgttttgcatccgcgctggaccagcatgactggaaccgtaatccgcatatttatcagctgcgctgtgaccgtaatcagcgtgtctccgtacgttccgagcgccgtgaaacctggtatgttctggcactcgcagtgatcgccaatacggactacaacccgatgagcgagaatgtatttgaggtgatgtgctcagtggaagcgctggctgcgcaatgcggtcagctttacctgtatgaaaacggccgcaaaagttatgacccggtactgcacgcactgcatgactgggaggcggcaaagctgatcgttattcatcgtgcttttgactgtgaaacaaaacagtacaaagcaatgcgcatctggttgcggccggagttttttgaagggctgggttttgatctggaggctctgcgcgatatcatcaggagcttcaggcgctggatggaacgtaacggattgcgggagaactataagaaacgctatgccaggcatgtgctgcgtatgaatcgttccaatgttgcatcactggataaccaccacgccctgaaaaaaatgctcaaaaagctgcgccgcctggtcatcggtgacgatgaggagctgaaaagagaaaaggatcatcaggaaaaagcactgaaagagaaaaaagcacagcttgaagcttcccgtccgaagaaagagacgccgggggaagcatggcgtctctatgaacgctggaagcagataaaccctgtcgcgacagtgcatgcgctggaaaaacggattaaatcacagttcccggcgctgaagggggagctgctgtatcagtgttatctggataatcttccggacgattaa

SEQ ID NO: 288789 - DNA, 1017 bp, Morganella morganii
atgcaaactaaacgtaaaacaatcggcaggacactgagtgcggtatccccggttttcccggcggcagaagccgctgagtcccggaggttcattctcaaatcaggtaaatctgcactttttcatctggttcatattccggcagaggaacttgaggagcgcacattcgtccgcttttcggtcaacggccgggatcagagtgcgctgaccccggagtcactgacggatatcacgcggacattaagtttacagcagttcttcccggccatcggttaccgtacgcacggaaagacagaaatactggatggttcacgacgacgcgctgccgctctgttatgccaggtggggttaaacgttctggtaacggataccgaaatcagcactgacgatgcccggcagctggccgctgatatccagactgcgaaggagcataacctgcgggagatcgggttgcgtcttatgcaactgcgtgaaaaaggaatgtcacagaaagaaattgcggcgtcagagcagttatctgcggcaaaagtgactcgggcaatccaggcggcttcggtacccggcgaccttatcgcacttttcccggttcagtccgagctgggccataatgattaccggctgttgctgctcatcgatagtctgatcaaatctgaggcactttcccgtaaaacgcttctgaaggaaatgaacgataaagttaatacgctcatcaataacggacagaccatccctgatgaactgaaaaaaattattctgtctgaacttaaggcactgacggataacctgatgcgcagaaacaaaccggacgtggccgtggttgttccgctccggacgtttaatgacaaaaatatgtatgcgcgtaaacgggccaaagacaggggattcagttatgaatttaaccgtgtgccgaaagcattacaggatgagcttgataaagagatacagaaggtcctgacacgctattatgccggggaagcggacagccatgagatgagagcagatgaacaggtagctgactga

SEQ ID NO: 288790 - DNA, 726 bp, Morganella morganii
atgacagacaacttccctgatctgccggagaccggcaggatatcccttcgccgccagagttccggcctgctgacaaccggtcatctggaacgggcccgtcagctgcgcacgctggcgattgctgctgaacttgattgcccgcgctatctgctggcaccggaaatcaaccgcctgttgcagtatgttccggatctgcatcagcgtactcttattgatacgctgtggaataccggcggtcgtattcatgaaataatggctctgactaaaggtgatttttattttgatacggaaacgccatttgttgtgctgaaaacactgaaacagcgtcagccggtggatatcacggtaaagcataagcagcaggcggtaaaaaaacgcgctgtaccgttatttgatgcagagtatgtgaggctgatgaaaagttactttgcgactatgcgctataaaaatcagaataagatctggccggtccgcagtgacaatacagtgcgtaactggttgcgtgaagcagtacgtcttgcagcagaggatggtttttctttagtaaccgaacctgtcacctgtcacacacttcgccatagttttgccatgcatcttatttttcacggtgtaccggtaaaagtcattcaatcttatctcggacataaaaaatcggcatcaactgacatttacacccggattttcacccttgacgctatgcttcactttgatatttctttccgctga

SEQ ID NO: 288791 - DNA, 135 bp, Morganella morganii
atgataatcattgtgaatattatttttgttaccggtgaaaagaaactgacagcaatttcaccgatcttttttactgtctctgccggaaagcagaaatgtattctgatcattgttcagatattaaattatttctga

SEQ ID NO: 288792 - DNA, 1008 bp, Morganella morganii
atgttacctaatatttctaattctcagcttccgctttcaggtgaggaaccgctgaatgtggtgtcagacaaacagccattgtcaggagaacaacgtgcggttcttgaaagactgataacgcagctggcatcgctgacaaaactccggcaggctgacttatggtcacagataaagcaggaagcagggatccggaataatgcacctttattgtcccggcattttgctgaggtagaaaaaaatattattcagagactcggggtcagcggccgtgatcgtacttattctctgcaattaatacaattaaccgagctgatgggacagggaaaaaacagttcagttgtcagagattttatccgggcacaatacggttatacagcactcagccagctaagccgtgagcagataaaagacgtcctgatgctgttacagcagacacctgacagcagttctctgattaaaggcagtgccgtcataaattccggcccgtatatacagaaggccggacatcattttcttagtcagttagtttctgcactggctgatataacaaaaaacccggaagaacaaatctggcagtctttgctgaaaatatcaggcagtaaaagcgcagcgttaattccatccggtgtgtatccccatctggttgctctgcttcaggcccgtactatgatggccgggcggagtaatatgacattggatacgatgcagtcggcactgaaacaaatactgaaaccggaagaattaatcatacttaaagagtacgctcaggattcttataagattcaggtgcaaactcccctgacagcggtgcaggtacaggagcttatcaattatattttccggcgccgtattgaaaataacggttattcgccggaaccgcagaatattcagccgatttataatccggtggtgccggtggctgaatcatcagaaaccccgcaatccctttccaaaattatattaatcacactgctgatcacatcagtcatacttttatttattttttaa

SEQ ID NO: 288793 - DNA, 300 bp, Morganella morganii
atgtcaccccggcaaaaaaaacaacgtaccgaatcaactttttcattgaatgaagaagtcggatttctgatacgaaaactgagagcatccagaaaaatgagcggtgaacaactcgctcagattgtcggaataagtcagcagcagatatcacgttacgagaatggaaaaacaaagctgacaattgaccagttagaagttatttctactgcttttgatatgagtatatggcgattcatgaacatattgcaatttaattcatacattgaaaaagaaaattgccgaaatcaaataaaaaaataa

SEQ ID NO: 288794 - DNA, 249 bp, Morganella morganii
atgtcagtaaaaaaactggctgatatgctgtatgtatcaaagaacactattcactcctatgaaagcggtaaagagcagatcagtattgatgcaatacacaaactaagctttcttttcaattgtaatataaatgacttcttcaccgaatcacttgtcaccaatcagaataatgatattaaaaataacaatgaaatatcacaaatgattatcaattactttagatcagagtcatttatgaaaatgatgtag

SEQ ID NO: 288795 - DNA, 789 bp, Morganella morganii
atggaatataaaattaataaagtaataaacttccgggttgatgacggcaaaatatggaattcactgagccctgataaatcggtaagattgtccataataccagcaaaaatactgagttaccttcttgaaaacagcaaaaccattgtaaaaagaaatgatttattagatgacatctggaataaaaacgggcttcaggcatcaaataattcactttctcaaaacatatcgatgctgcgtaaaattttacaggatatgggggctgatagtgatatcatcgtcaccattccaaaagtaggactacggatacatgaatcagcgatcgttgaaattgagcagggttcatcatcaacgtcagatacggctaaaaataaacctgcacccgcctctctgttagtggccaataaaaataaaataagagatgtttccattgttgttctgataataatatcaacatttctaatattattttttttgcagcgcaatggagctgataatgatttttattttgaaaaagaacaattatatttaatggggaatattgatagctgctacgtttatactatcaaaaaacactctactgaatataatgaagcaaatatgaaaattgccagtcaggtaataaataaacatattccatgcataaaaaactcgtcattcatatttcaggctgatgataataagctttacaatgatacagggaaagtttttataagcagatgtattacatcaacacctgaagggaagacattctcatcctgccaggacatatatttcaatgaataccaataa

SEQ ID NO: 288796 - DNA, 513 bp, Morganella morganii
atgaataccaataaaaaaaacacactgtttcttattattataagcattatacctttgataagttcaatactctttatttttattgattactctcatttttttaaaaggtcagtaagtatttcatgtatgtcacattactcagcccccttgcttcccggtaatatcagtataagaagcaatatcaccatagatttaagaaaaaacaatacgggttcactttatatatcaggagtactggagaaaaaacaaggtgataatgaacagagtaaaaccagcagtgcgattctgagagaaatcgagtttgactactcgattgaagataacggatttatatcaatctataacacagaggtctatcatcttgcctcggataaaatctcagatgattttttcaattcaaacgtgtttgatttgtcacttcctaacaggaaagtaaaaattaagaaaattaataattcgtggttattaagtacaccattctcaccgattatgatgtgtgttaataaaaattaa

SEQ ID NO: 288797 - DNA, 723 bp, Morganella morganii
gtgaatgggatttatacaccggaagggactgtcaataaagatgcactgtgggctaaatatcagtatttaatccgctatgaggcattaaaattacaggctaaacttcccggtagtattgagctcgatgatttgattcaggctgcgtcaatagcgtttatgcatgcattggatcaatacgataaaaataaaggtattgcacttagtacatacctggccaaccgtattcgctgggcactgattgatgagttacgggaaaatgattgggttcccagacgagtccgggcaaacagccgtgaaatatcgtcagttatttcccgtctggaacaaaaacagggacgaattgtgactgaaagtgaaatcgcagaggagatgggaatttcattagatgaataccatcagatgctgattgacagtaatacaagtcagattttttctcttgatgaattacaggaggaatatccggacagtattgatgagatatcctctcagcaggagtttaccgatccggcgcaaagcttaatggcccaaagtttaactgcgcagattagcggtagtataaaaaatcttcctgaacgggatcagttgttactttcgctatactatcagcaagagttaaacatgaaagaaatagcactgattttaggtataagcgaggtcagggtcagccagttacacagccaggcaataaagagattacgtgcttatttgtcaccagatgcgtaa

SEQ ID NO: 288798 - DNA, 339 bp, Morganella morganii
atgagttataacgaacatttgcagaacatccatgatatgaacttatcttatttactcctggctcagcgacttatcagagatgataaattagcagccggctttcagctcggtcttgatgaagatactattgagataataaaagatttgtcactgcctcaactcattaagctttcttctattggtcagttaatttgccggttacgtgtagacaacaatgctgttattgattgtctgacaaaggattcccgtattgatgcacttcagcgcattcataccggaattattttatcgacagagcttcttgattctctgtcagaacaagatatttctgtacaataa

SEQ ID NO: 288799 - DNA, 567 bp, Morganella morganii
atgtcagataaaagtattttacatgaaatgagagaagtgaatattgcgatagaattaatttctctcggcgcacgtatgcaggtattagaaactgaaaccagtctgagccgcagacgtttattacgcctgtataaagaacttaaagggtgttcgcctccgcggggattacttccgttttcaccggattggtttatggcatgggagcataatgttcattcttccatgttctacaatatttatttatatctgcaaaaatcccgggccggcagtgccattgaaaatacactgaaagcatacaagctttatctggaacaatgctcagatgataccaatgagaaacctgttcttggtttaacccgggcatggacattaatccgttttatcggatgtaatatgattacgcacacaaaatgttgcagttgcggcggctcatttatcgtcacaacagaacagagtgacagattatttacctgcagtctttgctctacaccatccagagcaataaaaagaagtcacgtaaaaggtatatcttctgccccggtttccgcatcaaatgaaaacatttaa

SEQ ID NO: 288800 - DNA, 897 bp, Morganella morganii
gtgcttgttattctaggatacatcatcattattgccactgtgtttggtggatttgttctatccggcggtaatctgagtgttctttatcagccgacagaacttcttattatcggcggagccggtgtcggtgcattcgttgtcggtaataacagcaaagttattaagagtacactgcagtcatttccgcgcttactccgcgggtctaagtacagtaaagatctgtacatggatttaatggccatgattttccttctgttaacgaaaagtcgtcagaacgggttagtcgcactggaaaatgatatcgaagatccgcaaaacagccctatcttcaccgcctatccgcgcctcatggaagactccgtattaatgaatttcctcgtcgattatctgcgcatgatgatcagcggaaatatgaatgcattcgaaatggaatcattaatggatgaggaaatcgaaacccgtgaacatgaagatgaagcatccgccagtacgctgaatgtaatgggtgatgccctccctgcttttggtatcgttgccgccgttatgggtgtggtaaacgcactggccgccgctgaccgccctgcggtggaaatgggtgagctgattgcacacgcaatggtgggaacattcctcggtattttattagcttacggctttgttttaccactcgcatcgctgctgcgtcagaaaagtgcagaacacacaaagctgctgcaatgcatcaaagtcacgctgttatccagtctgcatggttatgcacctcagatagccgttgaatttggccgtaaaaccctgttctcaacagaacgcccgagcttcgatgagctcgaagagcatgtccgtcaggccaaacaaccttccgccggtaccacatccacaacggaaaatccgtcatga

SEQ ID NO: 288801 - DNA, 1059 bp, Morganella morganii
atgagtaaaaagtcggctaagattgttgttgttaaaaaatcaaaaggtcacagcggtggcgggcaccatggtggttcatggaaaattgcctatgccgattttatgacggccatgatggcattctttctggtcatgtggctgttatccaattcatcaccgcaacaacgcaaacaaatagcagattactttaaaacccctgtcaatattgccgtcgccaatggcgacaaagacagcctcagcagcaacgttattccgggcggcggcggcgacgatatgatgaaacaggatggtgaagaatttcttcatgatattaatcgtgacaaagatgatttaagtgatctccaggaaaaaatagaagagttaattgaagttgatccccgcctgaatgcgtttaaatcgaacctgctattacgccttacagacagtggtttattaattcagattatcgacagccaggatcgcccgatgtttaaactgggcagtaaaaagccggaggaatatatggtgcatatccttcaggctctgacgccggtattcaatgatattccgaaccgtctgactcttaccggtcataccgattccattccgtttgccaacggtgaagtcggatacagtaactgggaattgtcatcagacagggccaatgaatcccgccaggttctggttaacgcagggctgcacagagataaagtgctgcaggtaatcggcatggcaagcaatatgggaacggatgaaactcagcctgactcagcgttagatcggcgtatgacaatacttgttgtctcaaaaagtaaagagaatcaaatcctgctggatgattccattatcaggcatgttgccatcgatgagaatgctaaccgtatacaaccgccgttaaatattgtgccggaaccggcgcctgtttctgttcctgtcccggtaccttccgtgtcggtgtcagcgccgccttcggcgcctgtttccgttcctgttcctgtttcggagccggccccggtaccggaacaagtcacagcaccagaaacggcaccggctcagaacacgaccccggattctaactaa

SEQ ID NO: 288802 - DNA, 2016 bp, Morganella morganii
atggatttcagcgatttttatcagacattttttgaagaagctgatgagcttctggcagatatggagaagcatcttttagaactggattatgcctctccggatactgaaagcctgaatgctatcttccgggctgcacattcaatcaaaggcggggccggtacgttcggatttaccgttttacaggaaacaacccatattctggaaaacctgctggatgatgcccggtgcggtgaactggcactgaccagcggaattatagatttatttctggagagcaaggatattatgcaggatcaactgaatgcttataagtcttcacaggagcctgaccaggaaagcttcaaatatatttgtgccgctttacgtcagatggctgaagatgcaaaacaacagacagagactcctgcatccggcaccgccccggaaccggctgacggcatccctgagagcggaaagacaacggccgcagctgaagataaacaggccgggaatgacggaaacgtattatccgtcgaactgcgtaatataaaagaaacagaataccagctgttactggatgagctgatgttgatgggtaaagtggaaaacccgcaacacaacgacagtcttttaacactggaactgaccacacatgagtcagtacaggatattgaagcggtattatgtttcctgctcgacagtgagcagatcgtgataaaaaatcacgaaaaagccgctgaagacgccgttgaaaaagcgccggaagagacaaaaacagaagtgccggaaaccagccccgtgtcagcgccggccgcagcagcgccgcgaaaagaaaggccgaagccgaaccggacgccggcacccgcatccgaatccggcagtatccgtgttgctgtcgataaggtcgatcaaatcatcaacctggtcggtgagctgattattacccagtcaatgctcagccagctctctgcaaatttagatcccgccgtccatgatgagctgatctcaagtattgctcagctggaacgtaatgcccgtgacttacaggaatcggtcatgtcaacgcggatgatgccgatggagtatgtcttcagccgcttcccgcgtctggttcatgatttggccggtaaattaaacaaacaggttgagctcacgcttatcgggggatccgccgaactggataagagcctgattgagcgcattatcgacccgctgacacatctggtacgaaacagcctcgaccacggtattgaaccgatggaagtccgccgtgcgtgcggtaaacctgaacagggaagactgacactgtctgcggaacatcacggcggtaatattatcattgaagtgattgatgacggtgccggccttaaccgtgaaaaaattctcgcccgtgctcatgcccagggtttgcagaccagtgacaatatgccggatgaagatgtctggatgctgatttttgccgccggtttttccacggccgaaaaggtcaccgatgtatcaggacgcggcgtgggaatggatgtggtccgccgtaatatccatgatatgggcgggcatgttgaaattcactcggaacagggcaagggatcaaagatccgtattattcttccgctgacactggctattctcgacggtatgtcgattcgtgccggtgacgaaatctatgtcctgccgctcaataccgtaatggaatcattactgctcagcgaggccgcaatctacaacatggccggtggtgagcgggtattgcaggtccgtgaagagtatctgccgcttattgaactgcacaaagtatttgatatctccggacagccgaatgatatcaatgaaagtattgccgtcattgttcagagcgccggaaaccgctatgcactgctggttgatcagcttattggtcagcatcaggtggtcgttaagaatatggaaaaaaattaccgcaaaatcccgggtatctctgccgcgacaattctgggtgacggaagtgttgcgctgattctggatgtcgccgttctgacaggattgtcaaaaaataaataa

SEQ ID NO: 288803 - DNA, 504 bp, Morganella morganii
atgaacttttctaattcagaacaagatattacaagcgacaaccatggccaggaatatctggtcttccggttgggctcagaagagtatggtattgagattttaaaggtccaggaaatccgcggctatgaccgtgtcacccggatcgccaataccccggcttttatctccggtgtgacaaacctgcgcggtgcaattgtcccgattgttgatttgcgtgtgaagtttcagctgccttctgctgagtttaatgaaaataccgttgttattgtgctgaacctcggcacccgtgttgtcggtattgtggttgatggtgtttctgatgtgctgtcgctgacaacagaacaaatcaaaccggcaccggatttcactgtcacattatcaagtgaatatctgctgggcctgggcgctctcgatgagcggatgctgattttggtggacattgaaaaactgctgaacagcgaagagattgaactggttgataaaacaattgatttggctggctga

SEQ ID NO: 288804 - DNA, 813 bp, Morganella morganii
atgaagacaacagactggcggacatggctgacatcggacagtcagcatgacgtttattttctgctgaacaagctggcccgccctgatccgtcagacctgttttaccggtatgactggattgatgaggcgcagccgctgtatgccggcacacccttgtcacacctgggctcagccggcccctggcttgtccgcgtcaaatggcaggccctgtccggaatggggcagtatctggataacaacccgtttccggatgaaagctggggctgggcctatcacagtaccggcagctgggatgcacagataacccactggcagcactaccagcggatgctgtttgagggggaggactgcattttgcggctgttcgatgcaagaattgcggctgtgattatccctgcctgcaaaccggcagactgggcttccctgctggcgccggccgccggctgctgtatcccgtcccctgacggtaatatcatcctgagccgtcccgcagataccggcacaatcgtaccttccggtctttttgttccgggccgccacctgacagaggcctggaataactctgtgcagtcacggcgtaatatcaccgataatttttatattcagttctgggaggatcattctgagctggctcttcagctggatgaacctcccggccgtctgatggcgctgattaatgattacatggatacctgccgggaggatctgacggatgtgacctgggcaggcaatgcgctctttatccgttatctgacagaccagaatattattcacccgcagacagggatcaccgatgcagacagagcaaaataa

SEQ ID NO: 288805 - DNA, 1944 bp, Morganella morganii
atgcagacagagcaaaataagacatttcagaccgtacagtataatgacccttactgcactgactgcagtaaacgacaggcatggattgaatttatgctggtcgatgaacataatgcccctgtggcggggatctcttattcattaatgatttacggcggtgaaacccggcaggggcgctccgggaaggatggtctcatcagggtggaaaatctgccgctgacctctgtgatattaaaaacagatgcacaggaactagcggatgagatggaactccgtccgctgcgtgaaggacgcggaccggaacattctgaggtaaaagtccaggcggccctgaatgaccacagttaccgctatgtggttattggtgagctgtgtgaccgcgctccggtgattcaaaagtggaattacgcggcattcgggctgccccgttaccattttaaaagcgagaccgattttccggggatccgtttttccggtaaagactttaaccgccgtcatatgattgaaatctgcccgttcagggcctggtcgctgatactgaatcacaccagaacgtatgatctggtcaacgcttataatctggccctgatggcgctgctctcctactgcaatgaaaccatgcaggatccggatgcggagaaaacggacatgcgtccggtactggatgagaaaaataccgtctcgtcctttttttacaatgcctgctttgatttatccgccccgccttcgtttgaggacggggcccggttttatgctgtcgccaccgatgttccgttcagagaacgctaccgcccggccatctttctcgacagttcgcaggccggggatacggcgaccctggaacataagagaaggatgttttttgtggagaacaacacccacattatcgtttcctggcgggggacggacggcaaacgggatctgatgacggatgtctcctacaagccggtgccgtacagccgggtagagaaggcaaaggctcattacgggtttctcgacgcttatgagtgtatgggccgatatttcaaagaccagttaggcgcgatacctgttgccgccagggataaacaattattcctttgcggtcacagcctcggcgggacgggtgcgctgctgcatgccgccgatttaaaaaacaagaacccgctggtgtacacctacggtatgccgcgggtcttcaccagaactgccgtgctcgccttccgtgaccttcctcatttcaggcatgtcaacgatgcggatgcggtcaccagtgtgcccagcgataccaacatggacagctggctgtttgaagcctggggatggtttggtatcgctctcggcacggcatggaccattgcctccgcgccgacactgccggtacagaaagcgctgccggattttggtgaggtatactggcatcatggtcagccggtggccttttttgaggccagacagataggggaagaccgtgcacatccggcaggaaaaggaaacagcaccgttaaagcccggtggcgttttgattccggctttaagttttatctggtgccggggatccgggaagacctcagtgacacattaaaagagcagcaggaatacctgataagctcggcggataaaaacgtgctgggagagaccttccctcagtacaccaaccctgcgcttgatacggtgggaatgagctttgctgcccacagtatgagcgaccagtatatgcgtatcatcagtaatcagatgataaggcagattaatgaaaagaacacccaggaacagaaccggaagcggacggattttatttcccggattgatcgcgctgatgcctatccgccgaatgtggcgcggaataatacctttcttcatatggaaagtgtgctgggtgaactgttcagatatcagcacagcaataacagcagcaaaacagccctgacacggtttgaggagaatacccgtgaatttatataa

SEQ ID NO: 288806 - DNA, 777 bp, Morganella morganii
gtgaatttatataacagtatcccagtggccgtcattctggccgcatcagccctgacggggtgttcctacaacacggcgctgtcgccgccggcagacagccggatgattcatttttcggcgacggtaccggacgcactggaatcgctgccgttatcggccgtctaccgttcaaaaaaatgtacccgtactgaatatgacagccgcgataagccttatgaggtggcgaaagcgaaccgggcggattatccgctgaccgcagtgaacggcagggtgagtgcagcggtgccggtgtccgggggcggatactgtgactggacactcagcaatctcacctatgaggtcagactgaaacatcctcataccgttgacccggaaatcactgataacttcgggtttaaaacggtgtttatcaccggaaattatgccccggcggtgtttaacggcggctatattccgcaccggggcgatttcaggggcaatttgctgttgttcccgtttattcgtgatatttttctcggaaaacaagaaaaaacatttcatctggttgctgatgagaacatgatcacgtaccggctggcgggggcggaaaatattcatctgacggtggattatgaacaggggatgctcagccgctggacagatataaaagaaaaaaaaccgggaaataaaaccgttatcacctatccggacggagaggaagaaagagaaagcgaaatctacccggactataagaaattactgaaaatcagggaagcacgccgggcggcacaaccttaa

SEQ ID NO: 288807 - DNA, 783 bp, Morganella morganii
gtgaatttatataacagtatcccggtggccgtcattctggccgcatcagccctgacgggctgttcctacaacacggcgctgtcgccgccggcagacagccggatgattcatttttccgccaccgtgcccgctgagctggaagcattaccgcttcataccatctaccgttctgatatctgccgcaaagagctgcagaatgctgactggaaaacctataccgtaccggggtatcaccgggagcgatatccgctgaccacggtcacaccgggtaaggcggaagccgatattcccgaatccgggggcggggagtgcaactggagactcagtaatatagtttttgaagtcaaactcaggaacccggctaaaatagattcgttaatttcaaaaaatcatggtgaagaagctacctttgtgtttgataatcatgccccgggcacttttgatggtggttacgaaaagaaagcaggggatgtgaatgaagtgctgatactgtttcctttgattacagaaagttttattggtggtcatgaaaaatcattctggctaatcggaaaatatgaaaccttaacctataaagtcaaaaatactaaaaacattaatctgaccgtagactacaaatcagatatgaaaacgcacagaattggaattaaaaagaaggaagaaaaagcgatggctacctttatttaccctgatggtgaacaggaaaaaaccagagagctcttccctgaatataaaaagctgatgaaaatatataatgagcgtaaaaataatagtgatcactaa

SEQ ID NO: 288808 - DNA, 2319 bp, Morganella morganii
atgccatttcacattgaagacagatattttcctgctgaaaccagcaacaactgcatcaacacaatagcccgctctgataccccgccggaggtgggcctgtgggaaaaaattaaggtgtttttctgctcagcgagcaagccggaagcgcaggcgctcatccggcagatttgtcatccgccggacggaacagaatgggagacggtgaccgaaaaatttgaacaactcaaaacgctcgcgcatgacggatttaaggaaagaattcaggtcggccgggacggggaaaatcacgcctgtattctggacgaaaacggtgatgagatgctgtcagtcaccgttgataaggagaccgggaactataccgtgaggtgtcaggagggcggtgaaactcaccatctcaccaccacagcagcacctcagactacacaggattatgaagcgatctggtctgcgtgggaaaatgcggcaccggcaggagaggctcccggccgggctgatgcgatacagaggatgcgtgactgcctgcataatgacgggacagaactcaatctgagcaaccttgaactcacctccttacccgactatctgccggcagggctgcaggagctgcgctgcgatggtaaccagctgaccgttctgccggcgttgccggcaggattacagaagctgaagtgcagtcataaccggctgacctgcctgccgtcggtgctgccggcaggattacagaagctgaactgcagttataacctgctgacctgcctgccgtcggtgctgccggcaggattacagaagctgacctgcagtgaaaccccgctgacctgcctgccgtcggaactgccggcaggattacagaagctgagctgcaattataaccagctgaccagcctgccgcctctgccaacaggactacagaagctgggctgctatcataaccagctgaccagactgccccctctgccaacaggactacaggagctgagctgcaatcataaccagctgaccagcctgctccctctgccaacaggactacaggagctgaactgctatcataaccagctgaccagcctgccccctctgccaacaggactacaggagctgagctgcaatgataaccagctgaccagcctgcccactctgccagcaggactacagacgctgcgctgcaatcataaccagctgacccgcctgccggcgctgcctgcagggctgcagaacctgttttgttgtgataaccagctgaccagcctgccggcgctgccgacagggctgctgcgcttgtatgccgtaaataaccagctgaccaccctgcctgaaagtatcgccggcctgttccgggctatactggtagctgtatccggtaatcctctttcagcgcactcggagactataacccgtgatctggcctattcgcccgcatcccggaagcctcgtccattgcacctggcggtcgctggctggctgacgccggcacaagagaagtcggatgaaccagtacctgcggacagatggcagtccttcagacaggaagataatgctgacgccttcagtaccttcctggacaggctgaagaagacggagaacttcagaaaagaccccggttttaaagctcagatagcctcctggctgacgcaactggctgaagatgatgcactgagagtaaaaacctttgccatggcaaccggggcaacgtcaagctgtgaggaccgggtcacacttgcgctgaaccagatgaagaacgtggtgcggatccacgatgcagaaaaaggaaaatacgataacaatctctctgaactggtatccgcagggcgtgaaatgttccggctggagaagctggagctgattgcccgcaataaggtccggacactgcgtgaagttgatgaaatagaagtttatctgggctaccagaataaactgaaagaacagcttgaactgagcagtgtaacggcagaaatgcggttctttgaggtttcatatattacagagtcagacctgcgggacgccggaatccgggtgaaaattgccgaaaacctccggttcagggagtggatactgcagtgggcaccgttacacagcgtgctcaagcgtacaaacccggaacactgggaaaaatgctgtgaaaagaaaatatcagattatagtgacacattccggatgctgtctgacacggcgctgaaaccgaatggactggctggtgataacgatgctgagcgggctgccggagtaagagcgctggagagtgcagagcgggcattcctgaatagactccgccctctggtgaacaatatgctgggcaactatctggggaagaaatggtttttataa

SEQ ID NO: 288809 - DNA, 618 bp, Morganella morganii
atgagatatggcgcacaggtttacaacaacggaacggaagaaatactctccccctacggagcttctgttttttataaaaagataagaataacgccgggagtcacacaactgtttcagcgcacggatcaatccacaccgcttgtttttatccgggctgcaaattttaccggaatatcattaaacggattatgtgatatcacagtggtaaataattactggtgtgtggatcttaaaggcgacccgggtatgccgtttgatatttatgtattcgtaaaatcatcgtattacatttccgccttccctcagaagtggggggtgcgtatttacaataacggattattaactcatgcatccagtcagagaccactgcgtatactgaccggacataattttggttcacagtcaggaacggcggaaaccggggttccctgcgctgttctgatatcaacgcttggcattcttggattaccggatgatcacggaggtaaaacggtaagaattacaggctgcggagcagggagtaaagccatatggaattcaatgattgtcgcaggacaaatgtcaggcaccaatatcggtaatcagtatttttatatagataccagggaatataactaa

SEQ ID NO: 288810 - DNA, 261 bp, Morganella morganii
atgtcatggggaatagaaatctacgatgacaaaggaaagccgataaaaattaccgggtccagttttattctcgaccagtttaatgtgaccatggacgggtcacgaacttattcaaatatcccgcatggtaaaacactttcaatatccgcaattaatatcagcccgagcataaccgggacgctcattagcgttaacggaaataccgtaagctggaaatgcggcaataatgccaatgtggtggtaatggtgatgatcacatga

SEQ ID NO: 288811 - DNA, 255 bp, Morganella morganii
atgaaaaaactaatagcagtcataacagcagtaatggtgtcagggtgtgcaacaggttatgaaaaagtgaactgcaccggtatttacagtattaaaacgccgggtatggggaataacgtgatcgttaaatttgataagcgacgacagaacaaacagggatacatgtatcaccaggttcctcagctcggtttcaggatcagaggaggatggataaaaccggaacaccttgaggagttctcatgtcatggggaatag

SEQ ID NO: 288812 - DNA, 309 bp, Morganella morganii
atgaataaatatattacgttattattatcatgtttatttttatcaaatgcagttgcagttgcagttgcagatgaagatagatattggtatgaagattgtcgtgtttatagtcttgatgaagtttcaagacttagcaagacagctaagaatgaaaaagttttaacctcagaagagttaaaagtaaaaggaaaggcgtttacggagaaatatataaaaaatgcagaatgtgacgttaaaaatctgacggaatacaaaaagtacttagagtatagattgtcagttatcgataattatttagataatgattaa

SEQ ID NO: 288813 - DNA, 294 bp, Morganella morganii
gtgaaagacattaatcttattgtaggtcagaatatccgcactttaaggtgccgtaacggtatgaccacaagaaacttagcagaccggctgggaatatcctcgcaacagatatcaaggtatgagcgtggaataaataaaatagatgccagcactgtatttaagataataaatatatttgatgttccttatgagagtttatttccagagccagaggtagaagtttttactcagaaaaaagattccctgatgtatatggatccagggatattccataatgagtatcagttttattaa

SEQ ID NO: 288814 - DNA, 2079 bp, Morganella morganii
gtggaagttaaactaccaaaaattacagatgatgatattgcttgggtggtgcaagtattaggtttacccgaggatgccttttccccagaaaaagatggcggcgcaagagagcgaatacttaaatctcttggtgaaacattggatgtatcggcttgtcccggaagtggaaaaacaactctacttgttgcaaagctagcaatacttgcacgtaactggccttatcgacgtcaaggcatgtgtattctatcgcatacgaatgtagcgaaagaagaaattgaaaagcgtctggggggcacagaggtcggccgagcgcttctttcatacccacattacattggaactatacatgggtttgttaatgaatttatggctctcccttggttgagatctaaagggtatccaattaaggctgttgacgatgatatagttaaaagacatagaattagttgtcttaattggaaagatcattcagatctgaaaaaatggctaaatagtaaggtaaaaagttcaaagtgggatgttaaaatctcagatatcattgacccatggactatctcgtcaccaacgttcaatgttgtagataaaagcggaatgccaatatttaaaaactccgtaaaatccaatgatcaactaaaaaatcttgtagagcgtgtagttgctagtggttatcaccgatatgacgaaatgtttatgtgggcaaatgatcttatcgactctttacctaccgtaaaacagtatatccgcggccgctttcctcttgtatttttcgatgaagttcaagataacagcgaagcccaatcatccatacttcaccggatattcatggaaggagatggcgcaagctgcagaatgcgattcggtgatagtgatcaggaaatatttaattctgctgttgaagttaacggagcaaaaactgataaatttccatcagatagaattaaatatgatctcccaaacagccatcgctttggtcaatctatagcaaatttagcttctcctctatcggtagggaaaatgagtttggcaggtcaaggacctctatacggtgcatcaaaagaagcagcccacgctatatttttaattgacgaagatagcgctgaggctgttttaaaagcctacggtcagtacctgctctcagtatttgatgaagaacaggagttgttagaccgattgacttttaccgcagttggcgctgtacaccgaaataaaaagggggcggaaaaacacaagccccataatttatctcattactacactaaatacgatccagatatcgttagtaacgatccagaacctaaaacctttttgcaatatgtcaacgctggtcatagattaggagagaagtttgctaccgaaggcaccggaggtgaatcactcactacagttgaacgtattactataggaataattaactttgctaaagaaatatcaagccaattcgatcctagaccaagaaaaagaaatcatcgattcattttggagtcgctaaaggatgaccgtacgaattacgataaatacctcaagcttattgtctatctcgctgttgaccgaaattttccttcggaggcggattggtgcaacacatggaaagatattgtaatcgatgtcgtaacttcattatccggtgtagttccgcagagtgaccactcttttctagactatcaactatctgaagatttttcttcaaatcatattaatacccggaacaatacatatactgtagagaatgacggacggaaagtaaatattaagttaggttcaattcattccgtaaaaggcgaaacgcataccgcaactttggtgttggatacattcaataagtcgcatcatttaaaaatgatttttccatggataaaatgcaaacccaaaaataaaatctccgactctgatgcgaagcgattaaagcttcattacgttgctatgacacgaccctcacatctactttgcctagcaatgaaaaggagctatatcgaaaataagagtggagaaataaaccaaaatgaagtcgaagcgttgaagaaacaaggatggagtaaagtagctatcgtcgataacactggtaagtgtaattggttgtga

SEQ ID NO: 288815 - DNA, 777 bp, Morganella morganii
atgaaaaaattcaaaaaaacctgcattggttgtgataaaaaaatgaaaaatccaactaaagagcatttctggcctaaatggcttatccgacatactaaaatggaaaaacataaaataatctggttaaacggcaagaagatacctccgttaactgctacaatcccactttgtgctgaatgcaattcagaaataggagggaagttagaagagccaatgatgaatctcttagttgatattgagtctggaagggggctatctgataatgaagctgaagtatttattcgatgggcgtggaaaatggaaggtttctcatggcgcttaatccagcctgaaggaaactattcatctgtttatacagttaaagaacggatcttgaaaaagatagatcaaataagaggcgggttagttttagccattgcacttttagaagatgcgtatgagggaagggaatatcttcctatgggactgtgtaacaccaatgaaattaatgcaatcgttgtctcaggagttataggccatgtggcctttattgttcttacagaagatcaaattggcaaactgccaataaattattcttattatagattaaaccctttgcgtgataatttaggggatacaaagtttttttatccagaaattggtttcagaacctttcgacaggcgcaaaatttaactagagatgctgcaagtttaatttcatactcttttgataaagaaaatagtgagttaattaaaaagacgaaaagagaagaatgcggtggcgttattgttctgtaa

SEQ ID NO: 288816 - DNA, 192 bp, Morganella morganii
atggataaatcagatctgattaaagaatgtgaggtttttgaaatgaccggcagaaaaagaacggcaatctggcacctacgcaaaaagaaaggatttcctaaccctattttcagccacccagcaaaatacagtcggtcagagattgagcgctggatgcgtgaaggcggcgttaatcgcgagacagcttcttga

SEQ ID NO: 288817 - DNA, 1176 bp, Morganella morganii
atggcgttaagcgacactaaactcagaagcattcacaataagccatactccggaaagccagagttgacagacggtgatggacttagcgcccgtgtgtcatcaaacggcactatagcattccagtaccgataccggtggaacagcaagcccgtgagattaaccataggtcattatcctgcggtatcattgaaagaggccagagttatcatcggtgacatgcgggaattgtacacgaaaggtcttgatccaaaaatatatttttctaaaggagagactgacgcaacgttaaaagactgccttgattactggtgggacaaatatgcgtcaggactgaaaccaaacacgcagacgctctataagtctgtcgtgtacaacacaatgtacacacaattcggtgaaacgccggtgtctgatgtgcctgtgtcatcgtggattaagttttttgataaacaggaaaaagcaaacccaaaaaaagccagggtattactgatgcaattaagatcggtaatcacatggtgtatcagtcgtcagtttattgcgtcctgtgaagtcatgaaattaagtcctaagaccatcgggaaacgacctgatatcggagatagggtcctgacatacaccgagttagccaagatttggcttgcgttagaaaattgcaaaatagttacgtctaataaggttcttcatcagttactgatgctatggggatcgagattatctgaaatgaggctggcaactgcgtcagagttcaatatggaggacagaatttggactacgccaacggcacactcaaaaatgggaaatgtcatccggaggccaatattcagccaggtagagccgtatattgaaaaactgctgaatatggggaatgaggttttatttccagggcaggaaatggatagagcgatcgataggtcgtcatcaaacctgtttatgcgaaagctaagggagacaatcgacgttcccgaatggcgcacacatgacttcaggcgctctattgtgacgaacctatcgagcgaaggggtgatgccccatgttaccgagaagatgctggggcatgaattaggtggggtaatggcggtatacaataaacatgactggatgaaagagcagaaagaagcgtatgagctgtatgcagataagatattctggcacgtcaagaagctgtctcgcgattaa

SEQ ID NO: 288818 - DNA, 150 bp, Morganella morganii
atggcacaggcaaaagaacgcaatattgaaatacgaacctcgattgattccaaatacctcttttgtgaggtcaaaaccaacggggtgccggggtatgataaccgggccagtgcgatggacggggaaataacagcatcagaatggagataa

SEQ ID NO: 288819 - DNA, 1047 bp, Morganella morganii
atgcagagattaaaaaagtgtaattgtatggcattcagacacagggttttactctcattacttatgttgacaggggctgccatggcacaggcaaaagaacgcaatattgaaattcggacttcgattgattccaagtaccttttttgtgaggtcaaaaccaacggggtgccggggtatgataaccgggccagtgcgatgagaggggagggggccggtaccaccagtacaaattcctatatcactatgagcaacggtgcaaatgacttaacggtggaagtgggggcgctggactggtttgctgaaaatgcggccgggattgagaataaaaacacgtttaatccggcagcctattgcaaagcggagatgacactggttgattacgataatgaccgggtggtgaaccttgccacgctggatatccgcatcaatgaacagggccagccggaggcgttccgtaataacgtgccggacaaggcggttgtctttaaagaaataaccgctcacccgaccgagcggattacaaaaaataaagcaacttcaggaaatgttaacccacgagcattcccggataatatgaccctttatcagtttacacagtcttttacagtttccggtctgccggactggcagtgggtgcattcagagccgtataccggcagtccggaacagattgctctgctgaaagaggcctacagcgaactgtggctgacgttaaaaaataaagacattaaaaaagtgagaaaactttacaccccggcggcagaagcctgggctatcaccacgcaaagcacaacagacagaattctggattctcaggattataataccatttatgatgaaaaccatgtggaaatgaagacgatagactgggacaatttttatattattccgatgaataacggtaaaatggtgcggatggtttataaggaaacattgaaattttctccagtgggtatgagttatattgactatgcaggttatagaagctcattctttttttccccgatattctcactggtaaacggaaagtatattccggttatctga

SEQ ID NO: 288820 - DNA, 1941 bp, Morganella morganii
atggaaattatacctaatataagaactatcattcatgacgcattatcgtcgtgtcagtcctgtaatttaccggaaccgtgttaccacgaactgattatcgataaattaacgttgttaccccgggataaatacatccgggacaatatcgtttactggccgcgtgaccattatttgctcttaccgacgctgatgcgggcggaaagcgaaatactggatctggatatcaagattctggcgttacacgcgtcagatggccataacgcattgattaccagtgcggacggacattatcagaaagagcttgttattaaagtcgccgataatgacagcctgaaagccggtaaccgtgttagcctgcctttatacaccgaaccctttgaatttacaccggagtatatgtgggacgtgatactcagccggtttacaccggcagacatattcaaatcaaccacattttatataaaaaagacccggtgtgaccgttccgttttaacgaagacgattatcgtcagaccggctgtgaaaatcggattttcagttaattttacctatgatttggaaaccgggacccgggaagataaagacaggaaaaatgagcagcgcaacaggaaaaaagaaaaagcaaaacaacataagcagacattaccgaagaatatgaatcatcttcactcgggatggacatctgataccgtacctttttttaagaccgcaacaacgacagcagacatggagtttttctgtgaaattgcgggaaggaagtcagcgttctcaccttacaagagtgaaaagtcagaaacaacattactggataatgtcaaaaatctggcaaaactggataaggtcatttcagtttttaaagagaatgtgattaacgtttcacccgaggccaaaaagagtgaaaaaaaagagtttccgattttttcattaacaatgaaaccgattgatatcggtatcacggtttattatgaagacaaggatacgccggccaaccccaaaatggtgatggggataaaaggggatccgttttttggtattgaactgaaaattgatgtgctgcaaatcatcgcatcctttgccggacctgccgtcaaaacctttgtggagaaaatacgggccacactggatgaccgtgacgcattttataaaaaaaataaaaacaataaggtggcgttaagcggcgggataaaggctgacattgttttatttaccgatgtctcctttttggtcggggtatcccgggaggaattcggtccggtaaaatttgaatgtgatgatgccgccatcggtgtcggattccgcggggaggtcagcgcacacctgaataccaaagtattgtgtatcatgacctcgctggatgccggttttaaaatcgagacgagagggaaaatcgaaatcgataatcacggtgagggtgttgatgccgtcctgtgtcatgacggtattaccctgaaagcctggtttaatgctgacatctctttagctgataggggaaaagataacataatggatgaggatctggcatttagcggtgagccgtattcctgtgcgctggccaataaactggataaggagcactcctgtgcacgggtgaatatcctcggaaaggaaagaacggtaccggacagggagtcatttaccccggtgctgataaaaggtgaagccggggatatcgatgcggcggtagcattagaggcagcggaaaaagcaaccgaaactgtcgtggccgcagcggccgccggggcggctgcaacaaaggctgcagagatagagcacgcagcaaatatggcgaaagccgccgagagagcaaaagcggcggaaatggcaatgcataaagccacagattgggtgatggaaagtacagcagagatggcaaaagcagcagatacggcaatggaaaaaatagcggaggtggcaaaaaatgcagagattaaaaaagtgtaa

SEQ ID NO: 288821 - DNA, 936 bp, Morganella morganii
atggctaaaccggaaaccggttatgcaatcattgatgcggcgtcagagccggatattttttcattgctggatgaatacagtccgccggcgtgctgcctgtacagtgagcctctgcaaccggatatggcggaattagccccgtatctggttgaagtgacagaggatgtcagaaaatggctggatacacgtaatacgccgtggggaatggttgtttataccacagtgacgatgcgggaattacggcaccatctgcggaaattcaccatggtgatcattcccggtcaggaaaaaccggtcttctggcgtttttatgatccgagaaatgtctgggaaattttagccacgtttgatgactggcggctgcatacgtttctcgggccggtaaccaaactggaaacaaacctgtggggaaacaaaaaatcggaccggtttgaggcacagcggaagggatatccggaacaggcaacgctgcgtggtatgtttatgaagttcagtcagcagcagtatgatgctgtcggccggactttcagcaataaactcgcggaaaaaattgctgtttttctttcccgtgatgttatgtatctgaatggcctgatcaggacggaatatacgattgcggataatctttatcaggtgatagagaataataaatttgacttcgtcagtgagcgaaaatttattccttcggctatttacgataaatcagaagcgacagcaaatagtctcgttgcgtttttaatagcgaatgatatccgggatattaattcaataggttatatcgcctaccttttcgcacatagaaaaatagccggttttgatgctgttccggaggaatggatcagcattctgacacaacccggtcagtcaggatattataaagtcaacactctgatgctgaaagagttcggtaaaatcccggtactctgtaaaggttaa

SEQ ID NO: 288822 - DNA, 1221 bp, Morganella morganii
atgttaatgtcatcacataatctgcaccaatactgggtcctggcatactataaggaaaaagacggtaatgccagccggggaaaaatgctggtgtatgcagagagcgagttctctgctgctggcgtctttcaggcctgtttcagggctcagggattttcttcgttttattacgaatcgcttattgcggcaacggtgtatcttgaacaaagccgggaagcggagtggttatgtatccgtgccctgcactccatgaccggacggacggcgctgattttcgaagaacggaaaattacctgtcctccggccattgaacaggactggttcacgctgaatgctgacagctcaccggaatgcataccggaggaggatcgggtttatctgctgatcgacggcgcactgtatcatacctgcagcggaaagtttattttacctgtcctgtattcccttaattgccggtggggatgcctgctgcagggagatgcacaggctgcatcagaagattacgccccttacctgattgaaattccttctgttccggaacggacattaacccagcaacagtttctgacatggtgttgtgagaatccggcgggcattttgttacattcctcacgggatttcgccgcattatcccatcatttccggaagtttacttacctgccggttacggataacaccacctggtgcttttttcgtttttatgaccccggtattttttatttgctggtaacacatctgaataccgcagaagtcagacatttttttcagggaattaccggctgccggtttttacatgaggggaatgcctatgtgctttcttatgaccctgagcagaacaataaggttactcctgagcgtgtcactattacgccgtatttacagcaggtatttcagcaggcccgtcaggcggcactgataaccaaaatagaggagagtctcccggccccggcggattcatcaggtgcaggattaccggcagatgagaggaagaacctgattatccggacactgaatcaggcgtatctgctcgggctgacacacccgaaagccctttattacttcctgaccgctgaaatctgttttccggatgaaaaccgggcttcccgctgggaggcggcggaggcgtattcatcgtcacagatcgtgcgcgcactacattatcttgaattaacactcaaatgccggattccgggagacagcgaatgccttcacgcagtatga

SEQ ID NO: 288823 - DNA, 3189 bp, Morganella morganii
atgccttcacgcagtatgacaatgttgactgatatcgttgacagagccaacaaacttttttctgacagtgatgatgccaccagcattatcgcaccctgtaaccgtaatatacgacctgtttatccggttcgctatgcgtatatgaattatttcacaacagagctgctgaaacctcagttgcctccctcggtcgggaccctgctccgggctgaatctcatcaggaaaccggcggttatgccgcccgtgtgctgcgggaggggtgggtgtatgtcaaagaagaagagccgctgatagcccgggggtctcaggctccggccggtattctgattttcaggcatatcctgaatgaaacagaagatcataatgatattaccggtgtgacggaaatattctctgagtatgtgtgggatgacagtgaacaggaataccgggaaaaaattcagagctgcccgccgcagggatttttgcctgttaaaaaagacattaaaaaaatcagtctgctgttcagcgatgtgccgttgtctccggttatgctcatgaagctcaacgatgacatcgcgctcagacagagtgtaatgcaaactattgatttggatagcgaagataaatatacactggagctcagtgccgataatttatcagcgcttgtcgaagactataaacctgcggataaacagttttcccgctaccatgaggatgtggatttagaagacggttacagttgcatactcagcaaggcaaccacgcagaacgggtatgttatcgaccccgtcaaaaaggaaaatacgttccgggcgtgttacggtgagggggaaaaagggactctggttatcctgcatgacccggtcgggcgtcagaaagatatcattgaaatctaccgtttcctcgtgacctatctgaaatcctttttctacaattacgattacccgattaccatcggtaattatattgaggcgttactgaaaaacgattctgaggagatccggaagaccgtttctgacagtctgaatcagaccgaatgggacagggactggacgggaattaaaaatatcattacaggcattaatgcccgtaaagccgatattttgtcgctgtataactcgtttgcatttaataaaaaactgaccaatgccccctgtgacggtcttaaaagacatctgggaagtctttttgtgttttttaccgcgccagctgatgaaagcggggtacaggaaatcggttatcttgcggatttactttatgatataaccaacgcattacagtttacggagctgggagcggctgtgctcgaacgcttcttttgtcaggagctgacctcatcagagacggtaaaaaaattacaggataaggaactgctgaaacactacgtgcagaaatataccctgtccgagaaatacgaccttctgccggttgttgcgacgatgatgctggataccgagagcggtgaaaaagcctttaaagcctactctgaaaccttaccgacagagaaaagcagcctgaccgaagactggaaagatattctcaccccgctgcacacgttcctgaataacaagataaccgaacggcctgatgttaaagacagcctgattaaagccttagataaactctttgtggtttttggtaaagggttcgctgtgtcattactgtatatggggacgtccgggaaagatacgtctgccctgaaagggcgggtattaatggcggatgttgctaaaaaatacgcagtactgtctggcattaacatcgatatttacaacaccgataccgtatctggacaggagctggacgatgagcttaaaaaaatgagcgggagccgggcggcggataaacccagaccggaaacagcgggtatgggaaccagactgtttgactgggataaactgaccgcccgtttaaaggacgataagtggataaagatcccccggatcataaaaacagcggacgcattcagccggatagggacggcagacagcccggttaacggtcagagagtcctgagttatatcgacaaatcattaccgggtctgagtttttgcttaaataccctggtcatcttctcgctcagtaatcagagtgtgcatcagcgtaataatccgcttaagtcgcgctacttaacgctttacggcttaaaaatgtcagaagcctttattgccgcttttgataacacccggataacggtcagtggtgcccggcagctgagaaaattaaagctgttttcagacagccggattatcaaagcggttgcgcgtctgccgaaatccccgctccttaaccagctgggtgtgatgaaaagtttccgctacctgggattggcgggggccgttgtttcggcgggcatctcaggttatgaggcgcacaactcgtaccgcattggtaatgatctcaatatgaccttcaaacttatcacgggggccggttatgtgatgatggcgttgggcattgccggaggcctgtttatggcaggcagtacagctatttcctggcctgtattgttgtttgtcgggacgattactatgctgctgggtgttaccggcgatttggctacggaatggaatgacctggagacattaatcaggtgttgtttttggggtaattctgaaaaataccctttctggagcgaagaaaagaaaccatatattaaaagattagagtctgcgcaaagtgataaagataaatataaagacggtttcctgatagagaatcaggagtttatcaatcttttttatatgccaaatttagaatggacttataccaataaggtactgacatttaaaatggaactgagtaatttcataccgtatgagtcgcagtttttttatcagttttgcagcacaataaaaacaaaaaataaaattgtggcgtctcagtataagaaaagagatgactattttttatataacaggacatcttatattaagaagtcatatggagagttggaattcaccttatctgacgatataaaagaacattatatttacaatgcggacagacagagtacgacccttgagctcactataaatacgccgaaaggtttttattttgataatgagatttttatttattaccggccatttgacgatacgattgccccgttacgttatgactggaatggcagcagtattgccagcctgaatgttacgcactacggaaaaatggttgcccgttcaggaggacagtcatggagctaa

SEQ ID NO: 288824 - DNA, 942 bp, Morganella morganii
atggagctaaaatacaaattaagtgattattatgaaccgttatcacagacggaaactacccggatgccgcataagcagatggaggttcttcagtttgttgataaaattaataatgtccgtctggtcatcaggcatgcctctgcaaatacccgtacaatgttggcaatacctctggccattatactgtttttgtcagcggcgtttacgtttgattatatttatattgatgaatggaaaagtacggaatacagtatcttagctatgatggaaagcaaagagaaaagaaaaaataatgtagctatattaaaatccgatatcaggacagagtggccggaagaaaaatatatcaaggacggccggttatcattctgggattttctgcattattattattgttatcgtagcagttcatcggtgatggtgggtttatttgctatattaagccctcttctgttttccataccatttttttactggggctttattataagaaacaggccgccattaatttgcgacagggagaaacaacttttctatacctgggatatgaaaatgaacgtctatgttgccaagtactcacaaattgagtttgccgatattcgtcccacactggcgttatttttataccgtgttgatgatgaaggtacattagtcccgtataaatactttcctaacttatcacttttcagttacttaggaacggcaagtgataatgataatgcctggggactggggtatataaccaaatatatatttaacgggctggcaccgttagccgaatccccgtatacccggaagcgttaccgtattttccgggatgcacctgttccggaggatcttgaacagcaaatacaggagcaggtgtgcaaggtagatgcggttttacccccggatgaagacactgaagttcgtctggccgagtcaattaagcgctcagtatga

SEQ ID NO: 288825 - DNA, 357 bp, Morganella morganii
atgcaaaggagtagcttggtcgagtatatcaaaaataactatggttctgttcctgagcatccatgggacaaatatcctaattatgttgtattccggcacccgaataataagaagtggtttgtacttattatggatgttcctgcagataagttacatatcggtgatacagatactattattgatatcattgatgttaaggtacgacctgaattggttggttcacttcgtttaaaggacggagtattcccggcgtatcatatgaataaagagcattgggtctccgtaattctgagtgatagttttgatgatggtgaacttaaatcaatgattgatgaaagttacaggttaacccagtga

SEQ ID NO: 288826 - DNA, 2277 bp, Morganella morganii
atgggactgacttacggatctgtctgttccggtattgaggccgcttcggtcgcctgggagcctatcggaatgaaacctatctggttcagcgaaattgaaccgttcccgtctgccgtactggctgcgcactggtcgcaggtggataacctcggcgatatgacgaaaatcgctgcagcgattcgcgctggtgatgtacccgcaccggatctgttggttggcggtacaccgtgtcaggcattcagtgttgccggattacgcggcggcctgagtgacgaacgcgggcaattaaccctttcttacgttgaattagcggacagcattgatgaaaaaagagaacaaaaaggtgagcaaccagcaatcattgtctgggaaaacgtccctggtgtcctcagcagcaaagataacgcctttggttgttttcttgcaggacttgccggagaaagtgaagaactcaagcctgcaggggaaaagtggacaaacgctggttatgtgtttggacccaagagagctatcgcgtggcggatcctcgatgctcaatatttcggagtcgcgcagcgccgccgccgtgtgttcgttgtcgcaagtgctcgaacagacatctgtcccgctgaaatactttttgagtgcgacagcctgcatggggatattgcgccgggcggagaagcggagaaagaaattaccggcactcttacagcacgcactcatggcgggggcgggcttggaacagacttcgagtgtaacggcggattaattccggcgagtttggatgcagaaaattataccggcaatagcgacctcagccgggaagtggttgcagctctgaccaaaaacggtgtaggcgcaacaggtgcagacgacaaccaggcacaggcaggacatctgattgcattcggtgggggcaatacttcgggggccattgatgttgcaactgcatgcacagcacacggcgtcagaatggattttgatacagaaacctttgcggtacatggctctcaggatccggacgtcaatcatgaactggcgcacactctgggacgtaaccacgggcaggaaaatgcacttttcgttcaggctgatgatgagggtatcactgatagagacattcggcttgtgcggcaatttcacggttttccggttaaaccgttatccgtttctgatgacaggcttgatcaggagaatgcctgtatcgcattcagctgtaaagactacggtgctgatgccaccaaaaacctgtctccgacattacgggccggtaacagcagcaacagcaaccagaatgcagggcagccgcctgctattgctttggccggaaatactattggccgcgcaccacaaaacggtggcaacggaaccggatatgatgaatccggcgtttcatataccctgacaaaatcagatattcatggtgtttcggtacgcaacaccgtccgccgcctgacccctgtcgagtgtgagcggctacagggatttcctgataaccacacacaaatcagctggcgcggtaaagatgctgctgactgcccggacggtccgcgttaccgcgctatcggtaacagcatggcggtaccggttatgcgctggattggtgagcgtattcttgctgctctacctcaggaggaaactccggatctgcgctcagattacgtaattgcgctggaagaattgtgcaacaagccatcccacatgctgaaagaggtcggtgaccagtggcggacgcctgatgcactgtactggggtatcaacgcgaagttcggcccattcactctcgacctgtttacagatggtcagaacagcaaatgcccgaactattacaccgctgaagataatgcactgactcaggactggtcaggaaagctgaaagagctgggcggtgcagcatacggcaacccgccatattcccgcagtagttatcacgataaacaggccgtaaccggtgttcgtaacatcatggaacacgctcaggctatgcgtgagaaaggtggccggtatgttttcctgctgaaagcagcaacgagcgaggtatggtggccggagtgggctgatcatgttgcattcatccgtggtcgtatcgggttcgatttaccggattggtttgtgccggcggatgaaaaacagaaaccgtcaggtgctttctttgccggtgcggttatcatcctggataaggactggcagggagacaaaatcagttacatcagccgtgatgaactgatcgccatcggtgaactgtttatgcagcaggcacattggctggtggagaaaacaggggaggctgcgtga

SEQ ID NO: 288827 - DNA, 993 bp, Morganella morganii
atggggttgtttactttggaagggcaggtttttgaggaagttactaaaactacatttatgaaggaatcagtactcgagcgtagagatattcagtcagcgttagccaaggatatcagtagatttattccggattgcttggtaattcaggaggaatttaacaattgggaaaacagtcagcgtagaattgatttactctgtattgataagagttttaatttggttgtcgttgagctcaagagggatgagcaaggcgctcatatggagttacaggcgataaggtatgctggtatgatctcacaaatgactttcactgagactgttgaatgctaccaaaaatatctcgataaaagtagttttgataaaaatgcagagcaagaaatactaaatttttgtgatagagatgaaagtgaaatagctgattttaactctcaggtaagagttattttaatttcagctgatttttctaaggaaatcactaatacagtgctctggctaaatgataatggacttaatattagctgttttaaattaagcccatatatacatagtgaaaagctattggttaattttgaacagataattccattgcctgaagctaaggattttttagttagacaaaagcgtaaacaaattgaaaaattgaatgctagtgaaaatagcgaaagagattactctaggtttattttcaataacgagatttttaataagagaaatttggcttttgagcttattagtgactggatttcagaaaataatcctgaagatatacaaacgataagaactgtatttgggaaagatattcatcgagccttagttaaatctcagcgggacgtaatagaatcacgaaaaaaacgatttcatgataaatcaatagaacttacctctggtgaggtaatactaattacaaaccaatggagcattggctcaatcaaaaaactgataaataaatttaaaatattaggttatgatattgaagcagagactgtaagttaa

SEQ ID NO: 288828 - DNA, 1146 bp, Morganella morganii
atgaaaatatttatagatgaatcagggttgttttcacaattaaatgatgatgacaaagttaaaaatggttgggcaacaataggagccctagtggtccctgaaaagagtgaacaggaattagaaaaagcactagaagagttaaaaaaatcccttaacattacaaaagatcaagagattaagagagatagaccggattgttctaacccttcatttgccaagtttgtaaataaaatcaacgaactaaagtgcacattatacgcaatggttatcaataggcaaacaattaaagacagcattgctattcagtataaggaagagctaattagagcattgaataattattatgtagtgatgaaagaatataatgatgatgaaaaacaggcggagctacataaagagcttgagtctcagtgcgaaatgatttcatcgttaagtaatgcagaattcattcaaatgaaaacacaatgttgtctgcatacttttatgttgtctaatataattatattttatgctaaatatgcccctgaagaacttaataagatcacattcatcagtgacaaaaagaatccgtcatttgaaaatgtcttcaagaaacaattccctcagtatgtagaagctgagcttactagagaacctagggtattgatgtgtaatgagaatttcaattacagttttttctttgatagttatggtatgaactatgatgatgaaaagatagatgaggacaataaccgaaaaataaatatttttggagtggactattcctcctttaataatggtggcatggtcccatatgatatattaaagatatttagtgatatgaggtttgaggattcaaaacaatctacaggattacaggtgattgatctattggcttcgaacataaacagaactctaaaaggtcattgtgatgatttggatgtacaagcttgcatattaggtaagcttactgtaaatacatcagatgaaaatatgccaaatattccagtgttaatttttgaaaactcgctcttagagaaggccgatgttaattttgatgctttagttaaaatgtcgaagcattcatatcctctatttaatgacatatataggaagaaatttggaactacgatgaaaaaaattaaagaattgattagagtaaaataa

SEQ ID NO: 288829 - DNA, 237 bp, Morganella morganii
atgctgagattttatttcatggagtttttctactgtatagtactgatcatctcggtctataaggacactgcacgacgcacaaagccatataccattgtcgatatgagaacgctcttctggggacatatttggatcgtaacgacgagcaccggcaccgggggcagcggcacaaatatgagcagcaacaccaatcatagtgacggcattcttcccttcatcactaggcccaactgttga

SEQ ID NO: 288830 - DNA, 933 bp, Morganella morganii
atggcaacagcgtttgagctcgaatttactgaagacatttattattcaataggtaacaacccaagtatcaaagagataatcgaatctcttcagggttgggaagcccttattttgcagtcgaagggcgttctgtcgaaactgacaaaaagtaaaattactcacatagaggtcagggtcagtaatctggttgtcggcagcctaatggagaaaattattgtaaaacttgggtttggctcccaagaagagtgcgataaattttttgagaacgctcacacaaaacttataggtaaaggcaaaatgagaagtgtgattgtctggacagttcttggtggtttgttgttcactgggatgcagactttggtaccatcaaaagaagctgctaagatagaagctaacaataatgtgtttatcaatattggtgccggagagacagacatttcaccagaaatgatcaaatcagttttgaatagtaatttagttgataaaaaacagttagctaaaaacacgttaaaggttttatccccctccaggaacgaccctgcgtctactatcaccatgggggccggaaaatataaaggcacggtaacgagtgatacgattaacgtagtcccaaaagaaatgccgataaatcaaaagtataaaacaattgactatgcagatgtcgatttggaaataagaaaattagacttagacaacatggataatggttgggctgctgtaataccagggttggttgatcgcagggttacattaacatttgcaccggatatagatcctaacaccatttctcataaatttgttgtcagagctgatgttcaggtgatttataagttatccggtgggaagaaacaatcatataagcctaacgaaatttacttaaaaagcattgtcactccagacctggaagatgatgttgatgatagtaatgaataa

SEQ ID NO: 288831 - DNA, 534 bp, Morganella morganii
atgggacaaatgcagggaatacagggacatcaggcgattcagaccctgaataatgatatttacgattcagcaggcagtaacagctcatcatcgtatgtcagtacatccgggattaagtctgttttattacatgcgtggaatgccgttaagtcagccgtttccggcatgttgtcatcatttggtgtgcatctcagcggacaacagggcagtgataagccgggcagaaagatagtaatggatgtgctttcgcgccctctgccaccgattccggaggatgatgacggaggtcattatgcacaagtcacttttgatgcagtgccgcagggatccactgaattgaaagatgagtcaataggtgaggctatctacgccactgtttcgaaatctactgttgcacagaaaggtgttaattactggaaagagtggggtgttgaagatgcaacgacaatgtccgatagtactgaatatactgaaactgctgatacgccaccacctgttccgggatatacagacagaacaccactttatacataa

SEQ ID NO: 288832 - DNA, 540 bp, Morganella morganii
atgaaattaaccaatatcataccaaaaaaaatcttcacaaaaccatgccataaaacaacatcgcaactcatgcttgtgactatgctaaatgagaaaataacacagatagaaaataaaaatctggaatttagcggtaagtatataaatataaccacagacatcaccagactaagtaatagcgtattaaaataccaggtcgatatagaatcaaatgacctgaaagtacatggcccttctaaggaagaaaaaaataaagaaccagatgacatattaaatgaaagattaaaagagtggtgtattcaagaaaaaaaaacagccataccctctattatctaccgaaaaatagacagggaagttgaagaaaaaggtataaaattatccggagaagtaaaagaaaaaataatgtgtataataaataaattatatataccaagccttacattagaaaagaaatcctctgtcatctctatgatgaatgctttaaagacagattttatatctgtctcttatacacatctgacgctgccgacgaaggcttag

SEQ ID NO: 288833 - DNA, 252 bp, Morganella morganii
atgaactttcagaacctaacgccggaatcgcagcaagcagcaagagagacactctctgaaatattgaagctggaacgagatcgttgttacgaattagcaacagggcaaagcaaagaaattgccatattcgtgaaagaggcttttatcgagttggaaaggggtgcggcaggacaatgcggccagacatcacctaaaagtgcatatgggatggggactcccatgattggcgcccttggtaaggcacttccctag

SEQ ID NO: 288834 - DNA, 279 bp, Morganella morganii
atggataatatgtatgccgcattttgcgcctggtttaaggattatcacggatttagtccgtcagtagcaccagatgatagccaccttgttggtgttcgcagaagggcttttgaggctggatataaagcatccctcaatgctttaactattaagttgccagcaaaagaaaaaagcccggcggatgataataattatgcgcatggatataaccgcgcaataaccgagtgctccgatgcaattaagcgtcagggatttactgtcgaattaactctgaaataa

SEQ ID NO: 288835 - DNA, 297 bp, Morganella morganii
atgtcaacgttaagactgttatcaaaacagtatttaaggatagtgaatgcgctgttactcctgttcccgctgatgctgtcagtgagctgcggaagtacgcagacggaatacgttcccgcgccggtggtgccaattccgccacaactgaccgctgattgtgagcaggtagatataccggatgatctgacgttcggtggtgcagttgagctgctggctgatgctatgaaatacattgccaattgtaatcacagtaagaaggcaatacgagaaatagaagcggagaggataaaaaaatag

SEQ ID NO: 288836 - DNA, 1644 bp, Morganella morganii
atgctgagccgttttaaaatatcaacaagcatgatgattatcatctgtttgttctttgcactgcaggtaacaacgggtgcctatctctttaactatgcgctgacagataaaaaattcaatgttgaaattgataacgaaacaaaaaaagcaatagatttggatgaggcacgagtttacttactgaaagccagattatcgatcaatatcgcatccagagtttttgataatgaagataaaagtgaagttaattcaagattgagtgcagccgctgaagagctgaaaaaagccaagtctttctgggatgcgtttgccgttcgcgagtcaaccattgatggcaaatatgattttgaaaaattacaggccagtttttatgcattttacgatttcaacgtgaaatcgtatgatttgcttaaaaataaccaggccgatgagttcctcagaatgccgataaacggtgccatgcgtgagtttgaaaaactccacggggactatcagggtttatacaatgattattatgaaagcaatataaaggcatcatctgagaagtatgtcaaaacgatatggttacttgtggtgatatttgcagttctgttagtgtgcatcgcgattatctggtcgggtatccgtaatattattattacaccgttaaatcgtattgtttcaggtattcagtctgttgccaaaggtgatctggtcacgccggtgaatgtgaccggcagaaacgaaatggggatgctgggtgatgcattgcgtcatatgcagcatgaactggcggttaccgtcggtgatgtccgtgatggtgccaatgctatttacagcggcgccagtgagatctcggccggtaataatgacctctcttcacggaccgagcaacaggctgcgtctcttgaagagaccgccgccagtatggaagagctgaccgcgaccgttcggcagaatgctgataatgcccgtcaggccagtcatctggcattaaccgcctctgagaccgcagagcgcggcgggaaagtggtggatgatgttgtggataccatgcgcggcattggtgacagctcgaagaaaattgccgatatcatcagtgtgatcgacggtatcgccttccagaccaatatcctggcgctgaatgccgccgtggaagccgcccgtgccggtgaacagggacgcgggttcgcggttgttgccggtgaggtgcgtaacctggcccagcgcagtgcgcaggctgcccgggaaattaaaaccctgatcgaggattcggtcggcagagtcgataccggtgcggtactggttgagcgtgccggtgagacgatgaatgaaattgtcagcgccgttacccgcgtcaccgatattatgagtgagatagcgtccgcctcggatgaacaaagccgcgggattgatcagattggtgtggcggtaacagaaatggacaaagtcactcagcagaatgcggcgttagtcgagcaatcggcagcggcagccgcatcgcttgcagagcaggccagcagactgacgcagtctgtggccgtgttccatatccgcgccggtgaactcagcagcggtgtgaaaacgagtaaaatagcgtcggcacaacagccggtatccaaaacatctccggttgataacggggatgactgggaaactttttaa

SEQ ID NO: 288837 - DNA, 702 bp, Morganella morganii
atgagtttctcatgtgtttccgcagaaaatcatgcgcactggagttatcagggccatgaccatcctgataactggggtaaactttctcctgagtttttattgtgcgaaaccggtaaagctcaatcacccgtcaatatagagggtcccctgaaaaaggtttccggtaaacctgaatttttctttattccagggaaacaggaaatgatgaataacggtcatactatccagattaatacagagggcggtaatctattgaaactgggtagtgacatttacatactacaacaatttcattttcatgcaccggccgaaaataccattaacggtaaacagtttccgttagaagctcactttgtttatcaggataaagacggcgcccttgctgttctggggctgatgtttgaagaagggaaaggtaatccgcaattagcccatgcctggcaacacatgccatcagcggccggggagactgctgtgctgaatacaccggtcaatattaaaaaattgctgccgggaaaacaggatgtttaccgtttcagtggttcactgaccacaccaccatgctctgaagatgttcagtggctgattctgaagaaaccggtcagtgcttctgcggaacaaatcagtcagttcagaacggtactcggccaggataataatcgtccggtacaaccgctgaacgggcgcactatccatcattga

SEQ ID NO: 288838 - DNA, 1128 bp, Morganella morganii
atggattatattattgaaaatttaaataatccatcagcaatttgggatcatatgctgaccaagcaagtaccaaaatgcgtttactatctcacttatcttgtatcacttaataatggtagcataactgaaaatacactacgtcaatgttataatgtttttttagatataattggttttgattttacacatgttgattatcttaaatttcacgactgtacaatgcttgctgtaaaatcgacgctacaaaggaaattagagaataataaagaacctgtgtatgatgttctaaatccatcaatatctgattattttatagaaaaattagatgataattcttcattgattccatcgcttttttcagctcttggaacaagacaatctctattaaatttagatacattaataaacaagaaaatatcaacatatttatcttctaaaataattaatgctatactatgtaatattgaaacttataaagatgaagattatatattagaatttatacgcattgttgtctccagtaataaagtaccattgactgaaaaaataaaatcagcgaaagttataaagacagagtattttgaatttgaaagattctatgctggtaataatttcaaagtgctcgagattgtcagctgggcttctttaaatatcccagattggattggttgtgttaatattaaacattatgtggagtcatctttactattaaatggtgctgatttaatccatgatgaattaaatatactagctcaaatatccaataccataggagagatagcgctatccgataaaattcgtgatttgctattagactattggcaaaatagcgtgcatgaatttatttctgaaaataatgatttctctgaatattatagtcttaatgatgaagatgatctaatatctagagctaaagattgcattaatgaattacttgctgaaagtacattatccttcacctcccatgatattgataatgtcatcgataatttagatgcatgcaatataatcgaacgtaatatagggaatgctccagactgggatggatataatgatgatatccgctatgggaaccaaaattatgggtttgatgtggtagatgatttattttctatagaaaaggtgtga

SEQ ID NO: 288839 - DNA, 792 bp, Morganella morganii
atgcccggcccggatcacttctttccagctgttatcaatccgggtgatacgatctttacctatctgctcaaactgattcacaccgatgttcagcgtctgctcattcgtgacatgaataaattcgtcatgacataccttgtgcttacgatcattcaccacggtatgcacttcatcatgtccgatatgctgggttttgttgtggttaatatggatgttattatcccgctgggcatggaggtaaatctcttcactcccgtctttatcctcaaaccgcagctcgttaaacccctcccccttatgggttttggtacggaacgtggtgcgggttttctcgaccggcagggtcagcggcgggctgttgcgcccgttatacgtgcagccggtgatgatcgggcaatcgatatccccgttaaggtaagaaataatcacttcctgcccgatacgcgggatcgacataaacccgaaaccgtccccgttccagccgtgggccacccgcacccagcaggaggcgctgtgatcaggcctgccgcgccggtcccagtgaaaacggaccgtgacagcgccatcggcgttggtatagatttcctcccccggcggcccgacgaccgttgccagctcgttaccgtcagcggtcggtttatagcggaacggcggacgccattcctgagcgcccgggataaactgcacggtattactgaaggtggtaccctcaccgccgctgttgtccgccaggggctgcacaccccggtgactgacactgatcacctgccacgactgattcatggctgctga

SEQ ID NO: 288840 - DNA, 360 bp, Morganella morganii
atgacagcgggtattcacctgacctacaacccgcaggcggatacagacacccgcgacagcacggcattctcctggcgctatgctgaacagttatgcggtgatattcagatccacaaagattacaacccgcagaatccctcctatccccttgaacatcagctgaccggggatgttcaccggcaacacaccacctttgaaagctacggccgttttcagcaggatgagcagggcggttactttacgatgctgcgctacgagcaatcccagaatgaacgtcagaccggcagtgcgggcaccaactgctttgcgctgaggccgggtaaactctttaccctgaaaaacccccgtcagcagccatga

SEQ ID NO: 288841 - DNA, 543 bp, Morganella morganii
ttgaaactatgggcaacaagcctgattccgctcgctatcgtggctattgctgctgtgccgttcgacatggtttctggggtaactgatgatgcacttttttatgaagtgatcgaccttcgcagcagcgaaaaatacggcggtagtatcgacgctgatacggtgctgtggtggctgggtaaaagtgaaaatgccaggggagaaattactaacagcacaaaaatgattgatctgcatgcttcactgactcgacttaattcgttttcctctgagttctgtgaagaacgtgtgcaggtatggggcaacggaagtaatttcgataatgtgatcctgcgtactgcatacgaaagttgcgaaataactccgttctggaagcactggaatgaccgggatgtgcgcaccattgtcgaacttggtcgcaatgccggcatcaacccgaaaaaagatttcccgtttgttggtgaagcacacaatgcactggatgatgcattgcaccaggttaattacgtggtcgcaatccaccagcatttattaaagaacttctaa

SEQ ID NO: 288842 - DNA, 459 bp, Morganella morganii; identical to SEQ ID NO: 288763

SEQ ID NO: 288843 - DNA, 630 bp, Morganella morganii
atggataccggtacgctgggtctggatggtttcaacatcatgaatatggtggcgacatctcaggttactgaaggaatgcaggttgttggcggtgctgataaatataatttagaaaagactgatattgaaaagcttgaaaccgaactgttcggtgccactggtaccggcggtaaaatgtatgcttacacagatgcaactactggtgatactgcatttatcggtgttgataaagatggtaactggaaagcaagtgtcgcaacaatcacaccggaaacaactccaggtgcaggtgatgcaaaaattgaatttgccactgcaactgatgtagatgcagcaaccgatccggtagttaaaagcctgacaattctgcagactatggatgatgcattggctatggtcgatgaaatgcgttcaggtctgggtgcttcccagaaccgctttaactctgttatcagcaacctggataacactgttatcaacctgtctgaatcccgtgcccgtatcctggatgcagacttcgcggtagaagtatctaacatgagccgtgcgaacatcctgcagtcagcgggtacaactgttctggcacaggcaaaccaggttccgcagaacgttctgactctgctgcgttaa

SEQ ID NO: 288844 - DNA, 579 bp, Morganella morganii
atgaaagtcaatgatgtatattttaatcgattcaatatcccaattgttacttctcctaatgttcatgctgaatcattagttcgtgatccagtaaaagtatttgtaatttctaattataattggggtattgggcatacaggtttagttgtaggtgagggtgaagatgctatcttatatgatcctgccggagggtattctagctgcccatcaaaaaaatgctacgataatatgaacgaaattcgtacaccacgcagttccggagagttctttgattatccggagttcgactgggatgattatttgtcatttcagctatgggatgggcccgatgttcaaatcattgaatttacattaccaagagaacaagctgaaaaaataaaagaacttatctttgatcatggcatggctgactggcttacctgctccagaactgtcttgagaattttaaaatccagtggtggtatttttgatgcgcttgaagaaagcattattttaagagaagacccttggaactttagagagaagttaattgatttacattatcctaaaagagggggggttatctccggtgcatactaa

SEQ ID NO: 288845 - DNA, 525 bp, Morganella morganii
atgaaaccgttattttcggtgttatttctgtgcagcatattcctttctgcttccgctgataccaatccggctgtactacgttccccatcggatgcagtgaatacaaaattggtgatttccagcctcagacaagcaaaaatcacgccggataattcgttattttcagagtttaacgacctggcatttgatgctatgcacaataaaaattacatatccgcaatcaaattcttttctgagaatttgcttcgttatccgtcaccgcaaatgatcattaattacaccgatgcaaatcttatgatgctgacagacaataaaaatacccccggtggctgtacactctccggcgggaatttacaagcagcactgcgttattaccattccgcgctgatcacagataattctgttaatttattatcccgtgatgaaaaaaagaatctgactgaaaaaattacgtgtctcgaagcatttcagaaaacaccggcccccgcaacattccggtgccggatattacaatctgagccataa

SEQ ID NO: 288846 - DNA, 459 bp, Morganella morganii; identical to SEQ ID NO: 288763

SEQ ID NO: 288847 - DNA, 309 bp, Morganella morganii
ttgttaagtaaaataaccacagagtcgctaaaaaaccccattgaccatgatatgtttaatgattttttgcgtgatgataagtacattgtctgccagtccttgcctgcactatgtattcaggatttcgtatttaacaatacagatgtgaattttccaagcttgctagaaaacgatagaatccatcgtgaaacagagtcaaaaaatgtcggtaaaaataaattatttcgcgaattaaatcgtatacgtgatcagtttaaagattttatttttaaaaaagcaattgagcgaaaaataaaatttaataaataa

SEQ ID NO: 288848 - DNA, 288 bp, Morganella morganii
atggggaataaagaaatttatctgcacttcatgtattcagataatcgggaaaaacaaaagcggtttatcgttgatgagttctcattcggcggcgggaacacaaggaaaagcaggccgtttaatatgcctgaacctcctcagggcaaaatccgaatccttaaatgcccgtgcggtggtaacagttggtcagagaatggccgctatatgcatgaatatgaatgtgattgctgcggacagtttgtagaagtttatccattcacccagcataaaaataaggaaaatcaatga

SEQ ID NO: 288849 - DNA, 147 bp, Morganella morganii
atgagcaataagattcaacgcccttataaaaataaagaaaaagctattaagtttcttgaagaaaaaggggtgccacagaacgattctttacgtatagtcacatttcagcacaagaactctgaaaatattgagattgcttttgattaa

SEQ ID NO: 288850 - DNA, 666 bp, Morganella morganii
atgtttaattgtgaaatgaagatagatgctgatctctataaaatgattgaaagtgatctaaactcatttgtggatactttatcatcgtggtttgaagataattattcaaacgcctctgtttgtgagatgttgggcatagaatatagtgaactatcactgcaagataaattaattttatcatctgagattgaaagcgctgaaatatctggtgagatggttttggctattgtccatggtggagggcgaacagcgattaagatagatgatagcaatttgtcttttttagcaaaatcatcagcgattcatgaaatgcttggttttgaaaaattagctaaacaaatgagaatgaaatatgctaatttaataatggaattaacactaaaagatattagagctaaagctatagaagagaaaataatatccaaggtgaataaaaccaaagcatcaaaaccaaggaatccttattatagtgaagtaatgtctgtaatcaaatgtacatgggaaaaatatccttgtgctagtaaaactggattaattgatgcgttgttctttcattatcgcggaaaggttagtcgaaatactttattaaattgggtaaataaatcaggttttcagcctggtaaacctaaaaagtattcatcttttgaattggttttccctcaataa

SEQ ID NO: 288851 - DNA, 474 bp, Morganella morganii
atgtcagagcacaatattttattagccctattcactcagcagaggattcaagttcttcatcttggtatacatcatgatgcctaccctgatgcttacatatatgcttgggagtctggcgtatatccttttctgagtgattccgatggaagtatcccaaatcgtccacacgaaccttattctgatttttttcaagtatcaaaagaaaaaggagagtttctgatcaaaagattagacgatgcctggcttgctaaagaaagagtaacgttctatggactcgaagatgaattgaacgttcgctatggtaattccgaatggagtcgttcagacctactacatctttgtaaatatttttatttggatggaagatttgatgatgacttttggaaaacattaaccacaaatggtgaatgtccaactgaggctcatgacataatgtatccgtttgataagtatagtgatatttattttatgtaa

SEQ ID NO: 288852 - DNA, 336 bp, Morganella morganii
atgagagccgggcgcatgaatcagcgtattgctgtccagcggtcaaaactaaaacccggcgcgataagcggtaatcaggtgatatgggaaaccattgctgtggtctgggcagaggtgaaaggcatccggggccgcgagtattttagcagtcagcaggtgcagagtgagaccacattgcgggtctggttacgttgttttcctgatatcacgtcaaaagaccgcctgaaatttcattacgccggatcagacggcgaatattggaatattaaaagcattgtgtcagacagagctgagggtcgtatggaaattatttgtgagggggcggaaagtgactga

SEQ ID NO: 288853 - DNA, 1134 bp, Morganella morganii
atgacggtatttattatgaatgttaaaaaacaacactttgtccctagattttatcttaaaaattttacaaataaccctaaagaaataggggtgtataattttaaaaataaaagattagttaagtcgagtaatttatataatcaatgtcaaaaagattttttttatgataatgataatgtcatagagaaaaatttatccgtcatagagaaagatgtatctgaattactcaagaagataattaaagataagagtctttctgtactttcgaatgaagaactatataatattttgtttttcgttgttttacaaaattcaagaactgaggtctcttgtgacaaaatttctcaactaggacatgctttttttgataaggtacttagtgataaagaattaagaataggaaaagggcatatacttgcaatgaagtatacatggatgcttacatatatatcatcggatttaaaattggcattactgataaatgaaactcaaattccatttataacatccgatcatcctgtatcaatgacaaatccaatatttgataaaataaatagcaggtcgctaggtggaacgggttatgctaaaaaaggtcttattatcgcttttccaatatcaagtaaactatgtttgatttactatgacgataactcctatttttttgggagaggggaaagtgacattgtaattaaaaatattaacaatatcaggtcaataaataaattatccgcatcgtcttgtaatgagaatttttattttgatcctatgttgtcagatgatgttattatgaatattgtatctgaatcaacatggaaaaaaaataaaaaatataatttaactagtattgaaagtactgagtgtttaaccaatgatactattggtttacggttacactcaagttctatacctgaatataggggatttttattaaatggagtaatgaaaataaataaaaaaggaattagattcattaaagaagctgaaagagattcaatgattattaataaaaaagaaggggttaggtgtttggagtgggttagtttaataaaaagtttccatgatgaagttaaaaaaggagcgtataaacataatgatcttcataaatttatagaagataagaagataagaagataa

SEQ ID NO: 288854 - DNA, 288 bp, Morganella morganii
atgacagatgtacgcattacctgtattacactctccagcactaatgcagtacatgagcatattactcatgttggtagccctcagtttatccctcaaggtagtaaatggactgtagctcaggtaattaacgcgatagaaagcaaacaacatacattccatgtaactgataactatggaaatcgtgctaatgtgggtgtagttaaccccggtggaaacaaacctaaatttattcgcacttatgcagatgggaagtggaataataacttgttatcactacctcaatgttag

SEQ ID NO: 288855 - DNA, 147 bp, Morganella morganii
atgactaactctattaagggctcagatctgctgtcaacgcgtatgatagccttaagtggcttactaatgacgctaagcaatattggtctaagcccttttattgcggtgcttcttggtatggcactagtgtatatcttacgtaagtaa

SEQ ID NO: 288856 - DNA, 339 bp, Morganella morganii
atgaaaaatatagccacacttgatcctattgaagatttaagacgtaaagctaatcagtttgtttcagttgaggaagtgttgacgattatttgttctaaactggattgctctagaaaagttgctgctgagattgttttgtctaagcttccggatgaatatgaccatgataaccgaccaatcaatcctttattttttggtaaaaaattaggaattgccaccttttcatattgcgataatcgcccattagttcgcgacatgctattgagtattatacaagacgaccaatatgcttttgaaaaagaagtgcttcctactgattttgacgatataccattttga

SEQ ID NO: 288857 - DNA, 723 bp, Morganella morganii
atggaacatttaaaattaaagccagaatatagagagtatgggttcattaaggaaaatctggaagaatgcttgggtttttctttagggaaaagtaatgattttttaccagattaccttaagccatataagacaaggataggcattcaattagatgaggctgcaaatatttttgcaggatgtaagcctggtgaacatataaattccggccctttggttgatattgttcgtggttataaagcctctctttgggatgcatatgacaatgatattttatcaggtactaatgttgttatggactataattataatgaagaatacagggttgatgttacgttagttaaagaccaggttactaaatgggctaaagagcataatctggactggccttttgaattacctgtaggtgaaatgagtaatgtaaatgaattagtcgatttactatcaaagattgaagagctggaattagaaaataaatctttaaaaatagaaattaatgaattaaaagagagtgtacccttactattatctgtatatagagacgatgacccattagctatagctattaaattaagaaatgaagagtggagggattatagcgaggatagcaggccgccatctcaagatgggttagtaaagcaaatcatgacagattatggaagcggtatgactgaagctcaggcaaaagcaatagaaaaagtggcctgcccaataaagcgtagatga

SEQ ID NO: 288858 - DNA, 219 bp, Morganella morganii
atgccaacagtcacaaccttaaaagaaaatctcattcgcttgcctgaagttatgcgtcgtactggctatggtaaagcgtggatttatcgcctcattgaaacaggtcaattcccgaaatcagtaaaaattggcactcgttctattgctttcgttgaatcggaagtggatgaatgggtagcaaataagattgctgaatcacgtacgagtgaggtggtgtaa

SEQ ID NO: 288859 - DNA, 594 bp, Morganella morganii
atggaaaatttaaaaagtggctttaatgccaccagccaaactcaccctaaatttgagtcagacgatattttgaatatcaactcagatgatatttcatttatccggtttgaagatgtgcaggtgcggattgttaaagttaataatgagccgtggtttattgctaaagatgtttgtgatgccttggaattatccaaccatagaatggcattgaaagcccttgattctgacgaaaagggggtaagtttaatttacacccctggcggaaagcagagagcaaatattgtctcggaatccggtttttataaactgattgcccgcagccgcaaagcaaccactaaaggcacttttgcacatcgtttcactaattgggtattccgggacgttatcccatctatccgcaagaccggcgcgtatggtgtgccgttcggtgaactgaatgacctgaccaaacgccagcagcagtacaaattaacctcatcacagcgcgggcgtgacctgcaatcatgcaagactgaaaaagccagcttacagcgtgaggaagtcgaactgtggcggaaatatcagcctgattttctcgatgaggagatccactga

SEQ ID NO: 288860 - DNA, 225 bp, Morganella morganii
atgaataacgtagatatcaccattatcaaaatattaatgcataccctgctcgaagttggctttgtagcggactgtgcggaacgtattgtttcgcgtgactctgggtatacaggatcggtggtaccgcattctctggctgctattcagcaattggccgccgccgcattacaggatgtcagcaatatcatgcagacagatattgcggccacagagggcaaggtatga

SEQ ID NO: 288861 - DNA, 219 bp, Morganella morganii
atgaacgaatacgcgagcggtaatatttgtgccggtcagaatgctgacagggcatttcagatagaagtcattgcggcattaattggattgtgtggcgcggaattagataaaagcgaaacgctggcagttgttgcgctgatcaagaaactggccgctgaaattagtctttcattatctgaattcgattctgtgaatgcgggggaaccgaacaatggttga

SEQ ID NO: 288862 - DNA, 333 bp, Morganella morganii
atggttgataaaactcagtgtgaaagtagtgaaaatgtcaccaataacttcataaattcgctgaaaatacgtcatttttacgacaaaagtgcggatgagttgcggcatataagcacaacgcagcgggaagccgttgacgctttattgtgtggcttgtctgccacggcaaatatggccatttatgccaccgcaaataaagactatgaggacgcaaatgaggatctgcggaaactcagtcattgcatgactttcaccagtgagattctgcattgtttcctttataactctgagtttgcggaacatgttctgcggcagcggggtgatcagaaatga

SEQ ID NO: 288863 - DNA, 540 bp, Morganella morganii
atgaatgaatttattcaaattataactaccgccattgtgtcactaggtggcggcgctgctattattgttggctttgtaaagtggtttggtgacaaatggatacaaaatctatttcaaaataaaaagcatgaactggatcaaatgctggagaattataaaataaaactcaaaaaatcagagtttattttccaaaaggagttcgaagctgcgtcagagattgtggcgttaatccgtagtcttttgccaacatataactatcctgatatggattggcacgatgcctgtgatgaaattgcccaaaattttagtcaaatagaaataaaccttaaaaggtatttagcaaaaaatggggccattttacagaaaattgatatagatttaattgaatgctgtattggcatggctggtgagagtaaatttgaaataaactcgccagaagtaccagattcagcaaataaagctgcaaatgagttatatgagaaactaaaagaagtagaaaaaaacctcctacatcagatccattcacagtctgatcattaa

SEQ ID NO: 288864 - DNA, 933 bp, Morganella morganii
atggaatttagatatcctacggctgttgccgcaacaaatgcaaaatcacttcaatacttaacagaaaacttgagcgaccctgaatcaggccgagtagcctttgagcaacttttgacagaattagggaattcaattgatgattaccccgattggcatcctatcctgactattcctcaatataatagccaagagcatggctcattacataacctatcaacatacgaaggcaatgatcatactgtgcggtttgtgaaaggctttgtaacctgcccttacgataaagctccagcaagtaagttagtaaaaaatgtaaacgcaacaatggggctttatgcctattacttagatacagctttgtattgtgatagtgcatatccagtagtagttaaggctacagacgttgagctggaggcggacggcactatacgtagtcgcgatgctcttgcttggtgcgtacaaggtctagttaaagatgctcggaatgctcagatggcagaatcttggtggaatttaaagcaatgtcttcttggtagcccacatggctcacgttcatcaatattggtgaatcagcataccggaggtcatataagaaaaattcttgaggctctgaacaatagcggtatgtatggaccaatcaaagaatggtctctagatatgctctcaaagaaaaaaagaaataaaattagtgaaactttaatcagaacagctataaataaacacagtaacgtaagtcaaaaatttgagtttgaactgcgaggagaaacgtgtaaagcagaggttcgagacacatgggatgacggtacggagctttctgttaaagtcatgattggagattttgatttatatgtaaacggtaactattacccaaaaaaagagctcttagagttgtctgacccaaaaggcaagcgttcattagctgagaaattcttatag

SEQ ID NO: 288865 - DNA, 627 bp, Morganella morganii
atgaaccagggtgacggaatcacggtcgttatcaatggcgtagttaatcgctgcgcggaccagacgttttgtcccttcttcagagcacggcttgataccgataccgcaatcctgcgggaagcggattttggttacgcccatttcgtcctgcaggaacttaatcactttgtctgcttccgcagaaccggctttccactcaataccggcgtagatgtcttccgcgttttcacggaaaatcaccatatcagtaagttcaggctgttttaccgggcttggcgtaccggcgtagtaacgcaccgggcgcagacaaacatacagatccagaatctgacgcagtgccacgttcagggagcggataccgccgccgaccggggtggtcagagggcctttgatagccacgcggtagtcacggataaaatcgagggtttcatccggcagccagacatcactgccatacagttttgtggatttctcaccggtgtagatttccatccaggagatttcacgcttaccgccataggctttttttacagcggcatcaacaactttaatcattacaggcgttacatcagccccgattccgtccccttcaataaacgggataaccggattgtccggaacgattaa

SEQ ID NO: 288866 - DNA, 450 bp, Morganella morganii
atgcaacaaaatatatttatttactttgatattgagcatgctttatctacacatgattggataatcaataactctggtggacgacatggagtaattgatgaaggacttttacatagccctttgcaaatgatacagaacgatctttactaccctacaattattgaaaagctaactcacttagtgtattcaattaataaaaaccatgctttcaatgacggaaataaacgctcatcacttgcacttggcgcttactttcttgaattaaatggctatgattatattgttaatctatttatcatagaaatggagaatattgctgtctgggttgcagacaatgctatttctaaagatttgcttacagagataatttcagatttaattaataactttgaaattagtgatataacaaaattaaaaatattgaatagtttatcaactcactatgaataa

SEQ ID NO: 288867 - DNA, 1014 bp, Morganella morganii
atgagcaaagatctaacagtttcccagcatgaccgacaaaatattttgaataataaatatgctattgaacaagtagagaaatacttatctctcggaggaattcagtataaaaatgatactgtattcaccaaacagcaagtatctgaaatgtatgatattagcgatgccactatagaaagatatataacatctaatggcgatgagttgaaatccaacggttacacgttacttaggggacaaagtttaagggaattcaaggaattaactgctggtaccctcatcagtgagggtaccaaaacgactgtactaggagtattttccttccgagcagttcttaacctgggaatgttgttaacagatagcgaaagagcaaaaataattcgctctaaagttttagatattgtgatggatgtcatggctcaaaaatcaggaggccatacaaaatatataaatcaacgagatgaagactatctattcgcatcattccaagaagataactatagaaaacagtttactgatgcattagacaaatatgtcgaaggaaatcaatggaaatttcccaagtttactaatttaatttaccaaagtatttttcatgaaaatgctaatgaatataaaaaaatattaaaactagctaaaaatgaaaaaattagggaaacgatgtattcagaagtgctgaacttaatcgctagctttgaagcaggaatcgcctatgaacttcaaataaaatcaaaccagttgaatagaaaattatcacaaaatgaagccgaagctatattagctaattttgaacaacatccattattttcgccattaatcttagatgtaagaacaaaaatggcgagcagagatttatgttttcgagatgcatttcatgaaaaattagaggcttatataaaatccgtaccagaagctgactttgaacgctttcttggagaaaaaagcaaatctctggaagaacaacttagtgatcctgaaacattagccgtctttaagcggcttaaggatcgttaa

SEQ ID NO: 288868 - DNA, 708 bp, Morganella morganii
atgaaactgccggaaattgatcctctggaaataattatttgccaaagcttagtgtcacccagtgctgtagcactttctatatatggattaaatccctatatggctaacaaggatatcccggcagagttttcagatgccctaaatcatgcaagacaaattatcctatataatgttagagcttgtattccttctgaatatggatatgcaaatataagaactgataccgctgttcctatagacatagcttttggatgtgcatatttttataaggataaaacgatagttcctgatttaataaaaaatagaatagaaagtgccttggataatatttactcagctcacaaaaaaaataacgaatgggaaaaatatttttctaattttgggggagtagatcttattaataagacaaaatccgaaagaaaaggttccgggcaaggaaattaccgaaaaaatgatgaattagtgtatagctataaactcgcaggtttatttctcgagctacttaaagaaaaaaataaaaatgggtgttcaccatctaaccgatacagcaatgaaaatggaaaatcaattcaaaaaaatatttatgatgatatttgctcattagcaaatagaatggatataaatctaatcggaataggaaaatcatctttcagtgaaaagataaataagatagaaaacataatggaagattataaaaatcaaagttaa

SEQ ID NO: 288869 - DNA, 837 bp, Morganella morganii
gtgaccctctataaaaccaatcttattataacgtttaatatagctcttgttttcttatttaaatccattgctcctggattatctattctagatatatttaacgatgctcaaatatattatttcttccaaacaacagcaataatacaattatatgtttttgtaatatcccttgggcatacatcagataaagagttttctttttttaatgttaggcaaattattcatttaattgttagaagtatttttctatctctgatattgattttttttgatatagctaatatttcagaaatgatatttccattccttttcgctttaatgattgtatttagctctattattgactttagaatgaaattctatagcctatttatctctagactttattttgttttttttgtcttgttattatcttttattttatctctattaacattaagcactatttattcacgtgtttttatacaagtagttccattttttttattttctttatttcttttcctcttaaatttaaaaaataaaaatatctggcttgaccataataataacaagagctctattaattttaatttattattctatgcattcctgacatccatttatgtattcattgatagacgtttttttggattttctttatatgcgatctataaaaataaaataacacttattataattacttcattttttatctttgtttgttcagtgatagtattatcaccctatatgaaaatagaatttgaaaatacatatctaattatttttattattcaaattattttttctttactactcattttctcctttggaagaaaaaataaattaatctgctaa

SEQ ID NO: 288870 - DNA, 309 bp, Morganella morganii
atgcaacagtacgcgcgtgcgcgcgagattcaagctgagctgctggctgaggaaataattgaaatagctgatgatagctccggtgatgtgattgttgatgatgacggaaaggaacagacaaatcatgagcgcgtagctaggtcacgtcttcgcgttgatgcccgcaagtggtatgcatccaagctggcgcctaagcgttatggcgaccgtatccagcacgatcaaaaaataactatcaccgatttaactgacgacgaaatagacaagcgcattaaggagctaagcaatggacagggagcagaaaattga

SEQ ID NO: 288871 - DNA, 159 bp, Morganella morganii
atgttttttgggttatttattattgctgcggggataatctccttacttgaaaactttggcgttattgcgggtgatgttaagtgggggcttcctctcgccattatctgttttggcgcaagtattgtttatgacgcagtcaaaggtaagaaaaaagattaa

SEQ ID NO: 288872 - DNA, 366 bp, Morganella morganii
atgaaccaatatcatttaaaattgccgtggccgccaacggtaaatatgtactggcgacattcaaagttcggcaattacatttcagaaaaagggaaaaaatacaggaaagaaatagtaaatctcatcaagcagcaaaacctcgatattaaaaccacctcccgcatcaaaatcacgattaccgcaaacccacctgacagacgaaaacgagacctcgataacctgccaaaggctgttttcgattcgctcacccacgccaatttctgggatgacgatgagcagattgacgatatgcgtatcaggcgtggtgaaagggtaagcggcggatcactggatgtcacgatatgggagataggggatgaaacctga

SEQ ID NO: 288873 - DNA, 528 bp, Morganella morganii
atgaacaactcatggtggcaggagtttgcacgttttttcctgcaaggaataacactgaatcggttggtttatatgcttgttatcttgattgctttggtgattttcaccccaacagaagtgaaggaatggattaattctcataatccagagttaatcccagactactggatgtattatgtgttgctggcctgtttaagctacatactttcatctgctgttagtgccacatattccttctgcaagccatcctgtattgatttgctaaaccatatctacaagagaaaggcagagcgttatatagagagactttcagaagatgaaaaagaatttttatgcatgtttcttgatatgaagaaaccaacaaatgaattcaccagaaatagcccattaatggttggattggtacagaagggggttcttattgacttggggccgatgccatatgagaacagtaaaaattcataccgaattaacgaatattattattctattattgtgatgaagcttggtgacaagtggagcaaataa

SEQ ID NO: 288874 - DNA, 696 bp, Morganella morganii
atgagctttcaaaacgacacaaaattgcatgaaatgacatgcataaaatcagatggcctgcaccggcattatcatttttccaatccgaggaattcgtgctactggttcgatattgtgacagtgcctggttatttattcatgaccggcgatatggggacgtgggcctttagccgtatacgcgacatgatccagttctttaatcacgacagcattgattatgggtactgggctgaaaaattacagatgggctcaaatcgtagtgaagcttcagctgcatacaaagaggtcgatttatcttcaactcttgaattttatcgccggtcattagaagaatggctcgcagataccattgaaggtgaggacgacaaagatacattaagtgcaattaaaagatcatacagagaatttgcggaacgtatcggccggttaaagtcacttatatctgattattcaagtggaagaatatcagagcatgttttttaccgcgctgtagcagaggcagacatggaagacgactcatggcttggtcactcgtcaccgtgggattgggaaaatttaagtccacatttcaaaccaacgcatcactacgcatgggcgtgtgaagcaattcaatatgcctgtcagcgtattgcgaataaagaaacagcagtgcaagctgttgataagttgattttgtttaaacaggtactcagatga

SEQ ID NO: 288875 - DNA, 1890 bp, Morganella morganii
atggcgggtaatgcctttgattttgaactgaatgcggatgatcgagcaagcggccagattacggttcttgaggaaaagatccgtagtctgaccccagccttggatgaggcgcgggaaaaactgaaactcggcggtgatgaatcagtaactgggttacgtgggatcggtgatttgctccgtgatgtatccgaggaggcgaaatccggcgttcagagtatcggagacatgatcccgccgctgaaaaactttggtgcactggccgggaagctgactggtattggtggtatcggtgcaattatcgccggtggcggcaagctgattacggggatggcggaggaaggtaaaaatatcactacatcagccgccaatactggtatgacagttgaagaaagcacccgtcttagcggtacattgcagcagaaaggcgtcagtaaggatgacgcccgaaatcagatggaggggtattacgaaaagctcagtcaggcggtaattggtaaagatgatcagttgctggcgtcaatccgaagcatcggtgctgatgttgtccgcaggcctgatggtagtgcggatgtgacaaacacactgctcagtattgaaaaggcgattaaaacactgccggagcaccgtaactgggaattgcgtgacaacctgaaactgacacccgatatgattgcattgctgcgcgagggggatttacaggggagactcaataaatcggataaattcggcctaaccatggatggggagttcgctgaaaaaatgaccgaggtggatactcagttaagcgaagctggcgctaaattgaccgggaaaatgaatcagatacagaagtcgctttatgagtttattgattcacccagcataatccctgacttcggtgatcttgatggtgccatgaaaaatatccgtgaatccgagctgcgtataaatgatacggaagataacttttatcatggtgataagcgtcaggatattattcgttgggctgctaaagacaaggagtacagggattcactaagttggtttgaggacttgcggatgactgccctcgacccggacgacaaaatgtatactgatatctataacaaatggagtgataaatgggaggaacagagggaacgagccgaagccggtaaaaacaagccagcattaaacagtaaggtgcctgataactgggtgcaggatgagcaatataatccaaaccggcgcggattgagaaataacaacccaggcaacctgatcgctgcacccaacagcacggggtatgattacggtaacgaccatcggtatgtcaaattcaggtcatccagagacgggatagcagcaatgtcacgccagctaatgcttgatgctgaagatgggctgaatactttcgacggactcctgaggaagtacgcaccagctaaggcaaaaaataacactcagggatacatagatcgggtatcaaaaggcactgggtttggtccgcatgagccgcttaatatgcatgatcctaatgtactggctaaggtcattcctcatatgattaaggtcgaaaacatcgagcagccgtacagctaccaggaggtaatggatggcataatggattcaattatggatgaccgctggaaagggcttcgtaaccccgatagggtcagagaacagcgtgacatgatagccatgcagcagactcaacaacaagagactgcatcagcagcgactgactttaaaatagacaaagacccgacccaggcattactggccttcaccgagcaattatcacaagttcttcaggaaaacaaagcgggtggcacattggaaattgtcctgactaacgcggaaaccggaacaaaaagtaccgtaaacgtgaagccaaaaggaagggttacaacagcgatgaatatgccgtag

SEQ ID NO: 288876 - DNA, 165 bp, Morganella morganii
atgaaacataaaattacaaagattagtagtgatttttacaaaaatttttatttaagagaaacattttctgatgatgttatcatgcattgcggtgtacccaatatagaatgtttttttctattaaaaataactctccgcataaaaaaatacaagaaagacttataa

SEQ ID NO: 288877 - DNA, 2265 bp, Morganella morganii
atgggattacaaagtataaggataaaaaatctattatcttttgatgatatgataataaattctctagaggatataaattgtattataggcatgaataatacagggaagtcaaatctcatgaaaatgttaaaatatttttatgataaacttgatgatgcaaaggtaataccacctgactttcattctaattacacaccatcgggaacaataacattaacgtatgatgtaacaagaataaaaaaaattgtaatgaaccctaataataatggtcgctttcataaacatatctataatacattatttaagccacagtcattcattcgggcatctcatagattaggtctcccgtttatcttttcttctgcttttcagaagaaaaatacgtatagcataactctcacaatttctaaagatgactcagtaacttggtcaattaaagaccctaatgctcgacgtttaattaagacgttatttccttttttttatattgaaaccagacatattgatttatacgactggaatagtatatggaaggtagttagcagcataaattcctttaatttttctgagattaaaaaggaagaacttcttgagtttttggatgaaaaaatatcaactaagcgaggtaattataagaaatatatagaaagagttgaaagcgctattcatacaaagccttatagttataaagataaagtagttaactatctcaagatagttttagacggtgatatttttacaaataaaggcgaagacttacatattcagtctgatggtacaaattctcacaaatatctagaggttatactcagcctattaatatcgttgacaagaacagaatttatcaatccaattatatatattgatgagcctgaaattggtttacacccgaagctgagtgaaagttttattgaaagcttaagtttaatatataagaaatatgataagacatctaaagaaattgagcatgataaatattcaacaccatatccacgttttttatttagtactcactcatcgagtttgttaaaacttacactaaagtcttttttagataaacaacagattttacatttttcaaaaggaagtgatggtgcaactaaagtatcaaagttaaactctaaatatgatgatgtcagatttataaatatgataagtgataatgaggcgcgtcttttttttagtgagtatatactctttgtcgaaggtgctacagaagttgaactatttagaaattataatttacagagtttatttccggtacttaaaaggctagatgtatatgattgtgatgaagtgatgttgaaaaacataaatccaaattattcgaatgccgctattccatttctagtagtaaaagatattgaccaaattgctgcagtagactttcttaataataagtttaaatttaatgcaaaaggaaggcatattatcaataaagctataaataatgaaaggctaagttatttctctaggcgtaaaaaaccatttcttgatgtggctaaatttcttgatagccaagatggacggaatgtggcctttagtaataatggtttgaagttcaaacagtttaatattggcagggttgttagtagtgtcaattttttatcctctaaagataatatatattatacatcaacaactatagaaggttcattaattaatgagttttctttagagttattttctaaatgggttgggaatgtaataatgaatgatttagacatagataataaaaatccatctaaaatgattaagggattgttgcagaagtataatatcaaaacacagtgcaagcagttgttttcaaagctattttccaattgtagagctaatcataatctgccatctcgtgatatgcgattgttaaaggctattaagatgagatacatgaaagagataatcaatgaatttaaagagaaaattcctgatatgaaggatcaattggctattattcgtcttgcttttggtggtaaaacagaaactctggtaagtatagagatgcattataaaattgaggaaaagccgatttgtcaagatatattaaattatattaaagaattgaagacagacaatttctattttttatatccttacatgggaaaaacatctggatgggttactagttttattgattttagtctaaattattatgcaggtttggataaagaaaaagttagaaaaaatttccgcttggctttccctgaattgtcacatattatagatcatgcttcttcttcgatagaagctggagggctcaaatga

SEQ ID NO: 288878 - DNA, 186 bp, Morganella morganii; identical to SEQ ID NO: 286990

SEQ ID NO: 288879 - DNA, 168 bp, Morganella morganii; identical to SEQ ID NO: 286976

SEQ ID NO: 288880 - DNA, 354 bp, Morganella morganii
ttgcgcgatcagttctgcccggatgatattcggcgtgacgattgcagaccccggtgcaaaacgggtgccgtcttctgccagcttcatacgcccgaatttactggtcacctgggtgcgcagataacgggagacaaacatcagcagatacagcgtttccacctgaaggtaactgtcgtcattatcgccgtaggcgtttttctggtaggtcgtgatgatattctcaacccggacagtgccgtcatcatccacggtaaatgtggaaataccactgtgcagcaggttgttgcgctcagtcagttcaagaatattcgtgtcgtccggcggcagcacgccactgataaccagcgtctgtaa

SEQ ID NO: 288881 - DNA, 381 bp, Morganella morganii
atgaccgttaaattccagaaagccatattgcgcgatcagttctgctttaatgatattcggcgtgacgattgcggaccccggcgcaaagcgggtgccgtcattcgccagcttcatacgtccgaatttactggtcacctgggtgcgcagatagcgggagacaaacatcagcagatacagggtttccacctgcagataactgtcgtcattgtcgccgtaggcatttttctggtaggtcgtgatgatattctcaacccgcacggtaccgtcatcgtccacggtaaatgtggaaatgccgctgtgcagcagattgttacgctcggtcagttcaagaatcttcgtgtcgtccggcggcagcacaccactgataaccagcgtctgtaa

SEQ ID NO: 288882 - DNA, 705 bp, Morganella morganii
atgatgcgtaaaaacattcaggcagctatttttgcacacgcagagcgtgaatatccccgcgagtgctgcggagtaatagctcaaaaatcccgggtggtgaaatactttccctgtcgtaatattgcggccacaccggaagagcacttcgtattatcaccggaggattacgccgctgctgaggattggggtacggtgaccggtattgtgcacagtcacccggatgctaccacccaaccgtcagaactggataaagcacagtgcgatgcccttggcgtgccgtggtatatcatcagctggccggaaggggatctgcggactgttcagccgcgcggtgaattaccattactcggtcggccgtttgtgctcgggtttacggactgctggggtctggtaatgagctggttccggcaggaacgcggcattgaactgccggattaccgggtggattacccctggtgggagcagggtgagaaccgttacgccgataactggcgggaagcgggatttattcagattgacgacccgcaacccggtgatgtcatcgtgatgcaggtacaggcaccggttgccaatcatgccggtattttattgcctgacaacatgcttctgcatcacttatacggtcacctgagccagcggataccatatggcggttactggcgtgaccgtacagtgatggtactgcgtcatgagcaactgatatga

SEQ ID NO: 288883 - DNA, 435 bp, Morganella morganii
atgctgaaggctaaagtcacgatacacgatactctggcgcactatctggatgcggtgaattttccggatggcaacccgtcggcagatcctgcccaggaaaaagtctcggtcttttatatcgacagcaaatcctcggaaaccaatgaggttatcgagtttgatttagccagcccgatggatttgcagggggtgttgatcccgacgcggcaactgcatgcaatgtgtacctggtgcatacgtggcaaatacaaatccggtgacggctgtgattatgccggtcagaacgggtatttcgataagcacggcaatcgtgtggatgatccggctcaggatcagtgcagcggcatgctgaatacggggtgctttccccgcttcggtaaaaacaatccgatcccgttcggcggctttccgggaacatcattactgaggaaatag

SEQ ID NO: 288884 - DNA, 435 bp, Morganella morganii
atgctgaaggctaaagtcacgatacacgatactctggcgcactatctggatgcggcgaattttccggatggcaacccgtcggcagatcctgcccaggaaaaagtctcggtcttttatatcgacagcaaatcctcggaaaccaatgaggttatcgagtttgatttagccagcccgatggatttgcagggggtgttgatcccgacgcggcaactgcatgcaatgtgtacctggtgcatacgcggcaaatacaaatccggtgacggttgtgattatgccgggcagaacgggtatttcgataagcacggcaatcgtgtggatgatccggcacaggatcagtgcagcggcatgctgaacacaggttgcttcccccgcttcggcaaaaacaatccgatcccgtttggcggctttccgggaacatctctactgaggaaatag

SEQ ID NO: 288885 - DNA, 717 bp, Morganella morganii
gtgattgagggggatctggaaacaccggagccgtgggagcgcctcgatgcgtacctgaaacaaatctggcggcgtgctgatggtcgcgggtttgccatcatggcggcctgcatggactccggcggacatcacacccaggccgtttatgatttctgtaaagcgcgtctcggtcgcaggatttgggctgtcaaaggcgaatccgcccgtggcggtaaacgctcaccgatctggccgacaaaacgcattacatcccgttcgaaagccggatttaaaccagtgattatcggtgtgaacgcggccaaagatgcggtgcgcggtcgtctgcatctggaaccgccggcagcaggcgaaccggcaccggcgtatatgcactttccggttgaccgggatttacagtatttcggtcagctgctggcagagcggtcagtaattaaagtgtccggcggtcagcggtaccgggtctgggagcagataccggggcgggcaaacgaagcgctggactgccgcgtgtacagctatgccgcgctgtgcggcctgatgtatatggggctgaaacttaatgcgctggctgacgctgtcgcctgtaatccggaacggcttattgcaccggcagagaatccggaaaccaaagttaaccttcgcttcccgggggccatcatcccggaggaaaccaatgaaaagcctcagcggaagcggatatcccagcttttgccataa

SEQ ID NO: 288886 - DNA, 294 bp, Morganella morganii
atgggcttcacggatgtgataggcgatcggggcaccgtcgctgtcaatctccaccccgccgcgtatattcggcatgtcaaaattctgctgcggattactcaggcggtcgggatcaataatctgaactgtcgtcgcataacgggccttaccgtgaccaagccggtcaggacggtactgcagaaccgccagcgcgtcaccgtccagcaacttgtgacggaaagccagccgcagcatctgcgatacggtctgtttacgttcaacatcacagtaccggcccttgtcatttgcccatga

SEQ ID NO: 288887 - DNA, 240 bp, Morganella morganii
atgcataccgggcaggccatgaccggcgtatccatgatgctgggcggtataatccagatgttgtccccgcagccgggcggacttgctatgaaagaccagggcgaaaataaaccatcatatgcattcggtgcgccggtgaacaccgtttctcagggctatccggtaccgatcggttatggtaagcgccgcatcggcggcgcggttatctcagccggaatttacgtcgaagatcagcagtaa

SEQ ID NO: 288888 - DNA, 294 bp, Morganella morganii
atgggcttcacggatgtgataggcgatcggggcaccgtcgctgtcaatctccaccccgccgcgtatattcggcatatcaaaattctgctgcgggttactcaggcggtcgggatcaacaatctgaaccgtcgtcgcataacgggccttaccgtgacccagccggtcaggacggtattgcagaaccgccagcgcatcaccgtccagcagcttgtgacggaaagccagccgcagcatctgcgatacggtctgtttacgttcaacatcacagtaccggcccttgtcatttgcccatga

SEQ ID NO: 288889 - DNA, 312 bp, Morganella morganii
gtgaaaaaaggccgccgcgctgaacgcaaacgctgtgcccgcatctttggcagcaaggctgccgctggtcgtccggatatggccgcacatctggcattcaatacccgcatgtcttcatccgaagcgatcagcaccctgaaagcaatgggtgcggtacagcccgcaacacagcgcccatcgctcgacagccgcatgcgggcagagcagcaggtacgcatcagtccggatgctcaggcaccggcagcgggtaccgccgccgcgctggttcatcagatgaccagtctttataacagcaacaagggagcgaaataa

SEQ ID NO: 288890 - DNA, 255 bp, Morganella morganii
atgccgttaacacgggcggcggatggctctctcggtgtccgggcgctcggcggaaatcagaacagcggttcagcggcgccacaggtgtttattaccatagacagtaacggcagcagccagacgcagtcgtcggctggttatgagcagtttggtaatgaaattgccgcattcgtcgatcagcgtttccgcgtactaatggacaaagacacccgccccggcggagccgtctggaatctgactaaggggaaaagatga

SEQ ID NO: 288891 - DNA, 252 bp, Morganella morganii
atggttaattttgggaaagcattagaagcagttaaagcaggtaagaaaatctcacgcgctggatggaatggtaaggggatgtatcttttcattattcctgctgacgtttggaatttcgaatgtgatattgagggtgtggatgggttagggacatgcggctttatttgcatgaaaacagcagataataagctcgtgccttggctggctagtcagtcagatgtgttagcggaagattgggtaattcaagaataa

SEQ ID NO: 288892 - DNA, 171 bp, Morganella morganii
atgaaaactctgagatatttattctatgacagatgggttctgattaagtggcggagagataacaatcccgatgccgatttagccgataacattatcagatgttacaaactgacaggttggatggcagaagacgtcaggcgcatctgtagtaaaccatctccggaggagtga

SEQ ID NO: 288893 - DNA, 210 bp, Morganella morganii
atggaaccaacggattttgaaaagtggtgtgctggggagcttggctatgcgccggagttcatcatgaacaaacggagaaaagactttttcggtacctatgggtacaagttgagcgagattgaagtcagataccgcgcctacatggccggagttcgcagcagactgccgtaccagacaccgccaaaaggagatgaagatggaatggattaa

SEQ ID NO: 288894 - DNA, 309 bp, Morganella morganii
atgaacaaatatcgtgacaaatcagactttgagattaataaggctgtggcgatttcgcgcggactaagcaagcttgatgattattgggaagtgggcgggaaagtttgcgttgatgaatggacattcgacccctgcaataacccagcggacgcaatgccgattatcctggataataaaatcgacttaactcatctcgtcggtgacatggtgtgcgcaaagcacaaagaatattggtgtattcgtaaaaatccataccgcgccggttgcgaggtttatttgctgatgaaggatgcggagaatgaaaaatag

SEQ ID NO: 288895 - DNA, 258 bp, Morganella morganii
atgaacttctacactcaggcaaactataccggcaaacaggtttgggctgcacagcgtaacggggcaaaacagccgcgtgaacgcagcgggatcaccaccctcgacctcgggatgacctaccaggtcatgccaaatgcgctgctgaacttcgcagtactgaacatcgccaatgagaaaggggatgatatcgagactaacgggaactggcagatcgatgaagggcgccggtattgggctaatctgaaactgaatttctga

SEQ ID NO: 288896 - DNA, 156 bp, Morganella morganii
atgtttggtcagaaacgtaatgtcagaattgaagtttacgcagataaaaagattgttgatttaagtggctactcagaggaagaggctattcacttgattgaggctagtgatagtattcgtgttgctaagcgggatgatgtagaagataataattaa

SEQ ID NO: 288897 - DNA, 804 bp, Morganella morganii
atgctaaaggaagtttgttatttttgtggtgaacaaaaggaaacgagggagcatgtaccacctaaatgttttttctctccagggcataatttaatcactgttccttcctgcaaaaaacacaataaccagaaatcagatctagatgagtcgatgcgaatttatttgattggatgcagcccaaacagaatatttgaaaaagtaccattagtgacagataaaatctggagcggtaagcatcggtctattgctaagatgaataaattatccgcaaaaactctttttaataggcattctgataatacttactctattaaccataaaagtattaaagagggagcaaggataaactatcatgaacataaacagatgcaggagtctattttacgaggcctatattaccacttaaatgatgagccttggagaaaaaaaatatatatatttccttattctataatatttaatcacagtaatgatggttctcattcctcaaaagcatctaagtctgaagttaaaatattaaaaaaaatcaagaaacattatcagtggttttttaaattatgtaattttaatgatttttttaaaaatagtggaagaaatacaaataacaatgaatatagtcttatttttcgttggaatgaatacaaaattcccgagccgcttaataatttagttataaatgtatgtctctatgattggtattatttttttgggattttttgtgatgaatctgagtatgctcaaataactgaattttttaaaggtcatattccaattagtgaatttaatctcttggttgttgactag

SEQ ID NO: 288898 - DNA, 582 bp, Morganella morganii
atgtctgatccgtaccgaccacgttatgccgtggatgtgcaattgctggatgctgacggcaaagaatccggtgcgccggtttacagcgcggtaccactgccgttaccaatggccggaagtgaaagcggcatgtttcagttcccgccggtcggtactgtggtggaaatcgcctttgagggcggacggcaggataagccgtttatccgccagaccctgagccagggcaataccatgccggatattaagccgggggagcagctgcaacagcagcgacaggaagtatcacagcgcatcactcaggaaggcagctggcagcggcagacagaccagacaatcagcgaatcatccatgcaccggcaggtaaccgcggattctgagaaacgggaactggtcacccgggacaccaccatacaggcaacggataaaaccgttgtgctcggtaccgccacattactggccggagccatccagcagatagcggacggtgattacagtattgcggccaaaggtagcctggtcggcagcgtcggtaaaaacatggaactggccataacggaaagtgccactcttgagatcgggtaa

SEQ ID NO: 288899 - DNA, 267 bp, Morganella morganii
atggccggtaaacaggttatctgtctcggtgatacgactgaccacggcggcgtagtcatctctgcgttggataattacactatcaacggccgcccggtggcaacggagggcgattcggtctcctgtccgaaatgcaaaggtgtctttcagattgcttccggttcttcccttatgacctttcagggtaaaaaaattgccctggagggcttgaaaaccacctgtggcgccacactgattgcgtcgcagtcattaatggtatcagagtaa

SEQ ID NO: 288900 - DNA, 222 bp, Morganella morganii
gtgaaaatcgaatttatctcaaacggcaacatagccaaggtggtgatccgttccttcatcaccggacaccggaaactgaaccgcctggttgacgcggccctgctccgtactccggttcagcaatcaaccaccggcctgttattccgcgtgacgactatctacggcaagcaaaaccatgtccgccgggcacataagattatctgccgggaggtgtcacgatga

SEQ ID NO: 288901 - DNA, 591 bp, Morganella morganii
atggaatttaaagcagctttctcctggcggtcagatgatatgcctgaaacgactgatgcggtggtttatgtatcccgttgcggcacggtagttaagaccggcagttacaaacactggaataaaaaaaatcagaactactcgacgcgtaaagagcgggtttaccggcaatcaacaaatcgcggcaaagatgtaaaatctgaaaacggtccgtatggaaaatataaacatgtttggattcgagatcgctggtatcaggttcatcgtctggtagctattgcctggatttgtaacccggaaggaaagcctcaggttaaccacattaacggggttaaatcagataaccgcgcagacaatcttgaatgggccaccaatctcgaaaacagacgtcatgccggagaaacgctgccgagaaatacgccccgtggtgagcaggttaataccgcaaaattaactgccctggacgtcattgatatcagagaacggttaaagactccctataaggggatctgccgtgatttagctgtggagttcggtgtggcgaaatcgaccattacctggataaaaaaaggcgaggtgtggaagcatgtttaa

SEQ ID NO: 288902 - DNA, 408 bp, Morganella morganii
atgtataaatttagcgctgaaacgacagggttttatctgattggatttcacactgacattcctgctgatgctgtcgatatcactgaggataaatggcgtgaattaatgagtggtcaggaggcagggaagataatcacggctgatgaaactgggcatcccgtgttgctggaaaggccagctacaacgcatgaacaatacgttgaattagcagagcagcataaacagacactgattgatgctgcaatgagttcaattagcgtgattcagttgaagttacaagctggtcgaaaagtgactgatgcagaaacttcgcggttaaatgtgacacttgattacatcgacgcagtgacggcaacagacaccgacaccgctccggatattatctggccggtcaagccggtggtgtag

SEQ ID NO: 288903 - DNA, 663 bp, Morganella morganii
atggtagataaaacctttgtatgcttaagtaagtctaagaaaaataatgatttttgtgttgccggtaagttgatctatgaagatggcactataggtgaatggataaggccaataaaccaaaatggcaccataaccagcgaagattgttgttattcagatcactcatcagctcataccctcgatatcatttctgctacttttctaaaaccaacccctcaaaagtttcaaactgaaaactatactattgatagtagattctgctgggaaaaagtagacgaatatgaatatacagacgccacattatctttattatgcgataccccaaattcattatgggataataataatgaatctggcggtgggaccaacgatcaagtaagtcctcaagaagctcaaaaaattgataatagtttatattttatttatgttgaaaaactaacaatcgattcatctaaatgggacaataaattaaagctaagaggcgagtttgtatataacaacactacttacaatttaaaaatcacagatatttattggttagattattatgaaaagcgaccattagatacatatattcatgacaatgcttatatcactattagtcttgctttagatactttcggtggtttccattataaacttatagcagacatactatcatga

SEQ ID NO: 288904 - DNA, 438 bp, Morganella morganii
atgaagatatactcaattggctttactgaaaaaactgctgagaaattttttaccttgattaagtcgcagccaatcaaaactctggttgatgtccggctaaacaacgtatcgcaacttgctggttttgctaaaaagaaagacctagaatttttccttcgtgagttgtgcggggtagactacgcccatgttccagatctcgccccgactaaagagatgctcgacccttataaaaaaggtaatatttcgtgggaggtttatgaagataactttatgaatcttatggcaaaaaggaatattgagcgtattgataagaacttaatctctgacggttgcttgttatgtagtgagcacaagccccatcactgtcatcgtcgtcttgtgatagaatatctgaataagcattggaatacagattttgaggttaagcatttaatatga

SEQ ID NO: 288905 - DNA, 591 bp, Morganella morganii
atgatgaaagtactgattatgtatcatcctgattttgcttcaaagggtaagtttgagcgaaagcttacccgtatcttctctgaatcgagtgaatacaaagtattctattttgaagataaccagaatttgatacataactatttttcttctgatttgatttttaaacttgatcctgatcttcttaccgatccttcgaatcttggtttaacgcacgccgttgtttttgattcagcgttgaaacctgagttcacaacaatttatgaaacgttagcattacaaattcctgtaaggtatataaaagacaaaattacttttgtatccaataaagacaggggtgaacacttcgatgtgtattgtggtcgcggtactttatggggtaatccctatgcgattggagccgatggtgatcgtgatgaagttataagaaaatttaagtatgactttgatagaaattttttaaaaggtggggaggatttcaaagaaaagctgaaggcacatagaggaaaaatccttggttgccattgtaaaccctatccgtgccacggagatgttcttgccagatttttaaacaaattagatgatggtgagtaa

SEQ ID NO: 288906 - DNA, 123 bp, Morganella morganii
atgagtgaggaagaggaagttatattcaatctttgtcctctggtgttccctgatgaaatatcagcctccattggccattaccagaatactgatatcatagtaggaatgttcggaaaggattaa

SEQ ID NO: 288907 - DNA, 855 bp, Morganella morganii
atgcgtacagtacagcacataatagatactcgttcgattaaacgagttcttaatatactcccagatcactgggttattcgcgaactaaccgagcgtgactatgggattgatcttctaatagaaatttttgaaaaaaatgatgtgaaaaataatggccatgacacctttcgttcgacaggtgctatattccatgcgcaggttaaaggtacaggttcagctttaaaaatcaataatgaaaaaatagcttattcattaaataaaggatctttactctacactgaaagatttagcactccttttttattatttagagtagatgtttcatcggacaaatctccctcatattttttatggattcagcgctatgtaagggatgttttagacttaggaaatcctgattggagaacagagaaaaaaaattcatttacagtatacataccggaacataacgatatttctttaagctttgaaaagatagaaaaaatagcgtcaaggccacgtttaattgaagaaatagtcgaatttcacgagagctacttccatctttcatcacaactaaatgccgctgccattggagaatacaatatagataagaattccttggaacatatggtaatattagcaaggaaaataaataatctgcaggttatctttaagtacaataactgcggtattgataaattatgtgcagaacaattattatcatttgtcgaattacttaatctcaatagtgttaagtctgatttttgcaatatacctcaccatgataaatttaaacttttggccgaaagcctcactagcattacagatattgagaatatagttatggaaaatagttacaatacagcctattga

SEQ ID NO: 288908 - DNA, 576 bp, Morganella morganii
atggcagaacgaaaatttataagtgaactatttttagagaataatcaattcatcttggtcggattaaccggacgaactggttcaggctgtactacaacagcaaatattttagaaagtaaacatatatcctttccggaattaaatagcctaaataacttttatactggattagatgcaaggcgatacactatagttaaaaattttgcagaagagcattgggagaatttttattctataaaggtcagtgaccttatatcaatatatttacttcttctcccgaccaaaaaaatgagtgacttcattcattcttgcggagaaaacttcactaagactgctagtactcatttagttaaaaatggagttttatcaaaaagctttttaaaagataaatatagtaatgttatcaagcaacttttagatcatcaatctgaaattgattttagcgatccaaaaataacacggtcgttcattagaatactacagttagttagaaaattcactagagatcttaaagcagagttaaatgaacttgaatctggtctatatgtctcagtatatcaatccgctggtaaataa

SEQ ID NO: 288909 - DNA, 468 bp, Morganella morganii
atgttagtccgtggagacacggttttcgtccgttttttagctcaagatgataacgggaattcttttgaagtgcagacaccaacgaggcccgaagagagaattcgcataggggatgggttgactaccatatacaagctgccagtagaccagaagctcctttttttggtcgctgagacgttagcccaagaaaatcatcttcaaccagagagtaaagtagaccgttttcaaaataaatgtatttccatgttttccattactatagatcacggcaaaactatacaagatgaggtcaacgaggaatgggtcactcgcttctttgagctcttcgatgctcatgggatttcgacgaatattgtcgaacctggcatggtcgatatttattctgacctatgtgttgaggatggcgaagacgtttatctgagtgatggtatgtacatgcgcccgaacgggacaatttacgaacgttaa

SEQ ID NO: 288910 - DNA, 189 bp, Morganella morganii
atggtgcgggctgcatctgaaattgtgtccggtaccgtggtggcgattgaatatttcgcgccgctgagcgtcaccggggcattgaatgacaacaccagttcggtatcactgtttaccgcgcggatcatcatgctgaccggtgctgtgccgttctcgatgctgataagctggccgggtgccacaccgtga

SEQ ID NO: 288911 - DNA, 795 bp, Morganella morganii; identical to SEQ ID NO: 279109

SEQ ID NO: 288912 - DNA, 306 bp, Morganella morganii
atggtgatgcaggaagtctccggaactgtgctgtatgccgaatacgtcgcggctgagtccggaatgctgctggtagacagtccgaaaaaaagtgaaatcggccgtactgacttatacgaaaagagcgtcagggcatccgttatgcgcggggctgtggacctgtgtatcagtaaggctattgaggacggagaaataaccacaggagaagcggatgcaatacggactgcacactacagagatatgcaggccagaacagacgaggttgaatccacgattattttatttacccggactcagaaagggtga

SEQ ID NO: 288913 - DNA, 1857 bp, Morganella morganii
atgaaaatcaaagcagaagtgaaaagcattgataaattaaaagattatttttttatcgttccagattatcaacgtgaatatgtctggaaggcagatgatcagattgagcaatttttgaacgatattgctgatgagtacgatcctcatgctaaacaacaaaccaattattttattggttccattattatagttaagaatagtgagaaatatgacgtaatagatggacaacagcgactaacaacgattgtaattagcttatgtgcattacgtgacgtattacaggaatgtggggaaaatggattattaaccggtaatcaaccaaaattattagatagtgttaaggaatggttatcaaattatgatctgaacactgatcaaattcagcctcgtttagagcttcaatatgaagaaagttcagactatcttttgaatgtaatagagcaaactttgtatcagggtgaaataacaccatctattgataaaatgcaacaagcatttgaacgtatatcaagtcattttagtgaatacaaaatgcagagcatcaatgccttgatagcttatgcccgttattttctcacagcgattgatcttgtagtgattgaatcagaggatttgagtagtgcgctgaaaatttttgaaactattaatcagcgaggagctagtttgaatgcgatggatttagttaaaaatctcatgttcagtaaagcgcgggaaactcaatttgttcaaattaaatcagtctggaaagaaattaatcgtaatttacaaagttgcgaagaaagtgacaatccactccggtttctgcgttatttcatgaccgctcgttatcatcagggaattttacgtgaagatgaattatataaatggattatttcaccagaaggtaaagcgagtttaaattatgaaaatgaaccactgaaattggttcaggaattacagtatgcttcaaaacgttattcagcactggtattagccacaaatagattaggtgacggaaccgattatccacatattactaatatcggctatattaataaatatcgttcacgtcagcatttagtattattaatggcattagatctccattgcccgaataacgtcattgattatttgggggcgcaactagagagctttttcttttttgtaaactcaatgggtattcaaaccaaaacctatgaacaacgcttctcttcatgggctgtgaaactacggggagtaaatactaaagaaaacattgatgtggtagtacaagcaacgttagtaccatttatattaaaacggttacctgatttttatcaggctttcagtcagatcaatcatactacctataatccacaatatcggcagcgctttattttgggatgtattgaaaatgaaattaggcgtcaatgtggattacctatcttgagccagttatctatccaaaattttcaaattgaacacattttaccgcaaactgttaaaaattatgaaaataatgctgatttttcagatccggatgtacataaccgttatgtttatcggttgggtaatgtcaccttactcgaaggtatgattaatcaggctgtcaataattgtaatgacctatcaaccgagtggttcacgcaaaaacaacaggagtatataaagtctgattctatgctaactcgtttaatggtagctgatttttcagtgggtcacgataccgcaattaaccgacttaaaaaccatttgaagcataattttactgaatggacgcaagaaaatattatgaagcgccagcaaatttttatggaattagctttagactattggcgtttttgtaaccaaagaattgatcagtattcaacagaattaatagcaaagtatatcgaataa

SEQ ID NO: 288914 - DNA, 792 bp, Morganella morganii
atgagaattaataagaaaagtgacttacctgttttttttgatttaaaaaattattcggaatttgaaaggctatcagacgaagaaattttatcattaatagtgtatcgtgcagatttatataataattccattgaaaaagaagaggcggaatatttattatcaaatccattagttggttattcaactaacgacgtaaaaacaatgaagtttcaaattggtaatgaacgtaatggcgatttgaaactttcagagacaagctgcatacatcctacgagcttatttgatctggaattctattacgaaaatcttggcggcgaattaagaaaaaaatataatattaatgacagtcatgagagtttgttgcgatttcttgaacatgtaaatacatcacttagtgctattgaaatgaacaaagaaactgatgataacgaggttattagtataaaaatagatcttggttattctgatgatatcatattgaatgatttgaaaagattaattccaatatggagagatgaattaaatgtatgcactaaaaataaacaaacagttccatcatgggaggttacacgaaaaaaaataattgagtattcagtgtttccattaatcgatttgaaactatgggctaaggctaataattacaccataacaaatagagtgttagctgttgcattatttccgctgggtgagtatggggaaatgaatttaatacaaacaatcattccttttatagaaaaaattcttgatattttttctatagaaaaattcattagggaaatttatcttaaataa

SEQ ID NO: 288915 - DNA, 204 bp, Morganella morganii
atgaacgaaagaaaaagatttatccgtttacctgaagtgttaaatagaacgggcctttgtaaagcttggatttatcgcctgattagtcgtaatgaattcccggcccaagtaaaacttggtgaaagagcaatagcattcttagaaagtgatattgataagtggattgaagaaaggatttctttatcacgtaataaagtagcataa

SEQ ID NO: 288916 - DNA, 315 bp, Morganella morganii; identical to SEQ ID NO: 170484

SEQ ID NO: 288917 - DNA, 297 bp, Morganella morganii; identical to SEQ ID NO: 228735

SEQ ID NO: 288918 - DNA, 237 bp, Morganella morganii
atgacaaataaaatatctgtagtagtaagtatgctgtgcgaaggaactcctaacgtaatgaatactattcaagacagctttgatgtatttgttgctctaagtgggtattcagtagaagaaatgataggggataagaacttgattgatgctttaaatagacatgtcaataacgatttagttgatgagttagatttggaatatggctccgttatcatcaatatcggttataacaactaa

SEQ ID NO: 288919 - DNA, 234 bp, Morganella morganii
atgaaagagattatattgaatagttatgaggaaacaaaaaacgaacttgttgctaacatcttacaaggatactgtgatgagatatatggtatttatgaaaaacatcctgaaacagcaatagatattttgaatgatggtttcctttcaggcatcacatatgacgttttgattgttcgtgagatgaagaaatactctgtcaaaaatgatgtatctgaatcaagaacacatcattga

SEQ ID NO: 288920 - DNA, 267 bp, Morganella morganii; identical to SEQ ID NO: 170488

SEQ ID NO: 288921 - DNA, 699 bp, Morganella morganii
atgacacaaatagattttcaatctcttagcagtttatccccctttcagctaacacagtatattgatgatcatcttttcactaatgaacagaaagtgcagatattcgaacattatcacagcacacataaagacactaccaatatctattcgagaaaagaaaacattaaatctattaaaaaagatgttgattatgtccatatgttcacaaaaaacttccagcaactcgcagaacttgatatttccaagaatgagttgaaggttatcgcaaggattttaaacatcatggagtttggaaactgctttcatatatcgcaagcaaagctatgccgcgacttagatattaaaaaatcaaatatgtctcttgtctttaaaaagctcaaaaagaaagggatcattattgataaagatggagatctctttatgaactccaacatatttcttaagggacaagcgcattctatcaatgccaaacaacgccctaatgttaaaaaggcactgggatttaacgctaataatgaaccagtatttgataatgtttacacatttaatcaaacaaatgattctgacaatcaacctacagagggaatgactacatctgagccaccaaaaacatctgatagctgttctaacaaagaaacagatccagcactgacgctgcagtatcctaaaacagaagagccagcttatgatgatgtttaa

SEQ ID NO: 288922 - DNA, 765 bp, Morganella morganii
atgaatgaaatagacgttgacttggatttaggattaaatcctttttgctttgagaccgagctaaagattgaaacacgaaagaaaaatctgaccgtttcaagaggcacagaacttatcgaaaagaaagatacaggtaaaagctacttcgccaatatcgtgcatacgcaagaggtcgataaagaagagttcattaaactctatacctctcagataaaagcgtactttgatctcacgaaaacagcatacaaagtgtttttcatatttttacgaatatatcaggatgcgataggcaaagatcatttctacctgagctgtaaaaaggcaatgtctcttgcggaaaagatagatcactttgtcttgtctgaatctatcttttacagagggatcaaagaactcatcgaaaaacgtattattgctaaaaccaatgagaaaaactggtatttcataaaccctgctattgtcttcaatggtgatcgtgctcgctttgtttcagagattataaaaaagaaagaagcaatggaagaacaacccgaaagcatagtcgtcaatggcggcggcaatagcacacttaaagataaaaacaggtcaattgaagcagttatacaagaagttaataaccaagatgacatagatttgttaatcgcaagattgcaggctaaaaagtctcaagggttagtgaagagtgaaagtataaataaaatcccttctgtagagaacacaagtcttgtgccaccagaagaaccgttagattgggataatatttag

SEQ ID NO: 288923 - DNA, 459 bp, Morganella morganii
atgcctgaacaggttaaacaaaaaatctttaaggatggtttcgttaatacaggtgcgcgggggatccggaataacaatccgggtaatatcgactacaacccgcgcaatccatggcagggacagttgccatatgatccggcaatagaatcccgcttctgccggtttcagtctcctgagtatggcatccgggcaatctataaattgcttcagacgtatcagacaatacacggtctgaactcagttaaagccattatcaaaaaatatgcgccaaataatgaaaacaacacggttggctatatcaaccgtgcagctgcggatatcggcgttggtattaatgaccacctgaacaccaaagacaaaaagaccggcattgcgctggctaaagcgattgtggctgtcgaaaacggacagcagccatacgtcgatgatgtttttaaacgagcctggacacttatctga

SEQ ID NO: 288924 - DNA, 1065 bp, Morganella morganii
atgtatttttttcatatagccatttttttaagtgttatctcactaatcttatatgaagaactagtgttgaatgaccccaagttatttatgaataaatttatttcaaagctaaagtgtcatttgatatttttatttggcctgaatgaatgtagcctaagcaaacaaccattgttttggcttggcatcacactcccaataattacagcatcttacttagaatatgaaatattatcagagtctaaaacaagtttaacaatagctaaccttgatgaaatatttaaattaagctcaattcccatttacatatctgcaataactccaactctagggatatttatatcaaacatccacaggacaatccaaacaaaaaagcaaattgatacatcaaataatcaggttaaaatagcattaaatcaattgcaaatagcacaaacaaaaaatactcaagatgggttctatgcacactataaacacattactgaatcctttaaaaatatagttttaatagcaaaggaagattccatttactcatcacttagaacacaaaaactttttattttaaggccgcactctttatataaaaaaatattttcacaatcatctatttctaatgggtgcataataacaatatcaaatgaattcgaagaaaaaataatagaaaaattaaacaacatctcttctgagattactaaaaatagaaatgatatttttgaatgtttttataaaaaacagaatcaaaatataaaaaaaataatatatgacattaacagagaaataagctcacttcttacctatgtttttgtttcttataataccgtaaaattcatagagcctgccgttaatgaaaaaggtgatataaaacagtcaacaacactatatgaaatcgctctaggaataaagaaaactcatgatatggtggttagtattatagatatatcagaaatttcaaatgagcagctaaaagaagcagttaaacgttttagaaaaactgttaacttctatacatctattcgtatggatatacgccgaaaaataaatacagatgagaatagtaatgttgaataa

SEQ ID NO: 288925 - DNA, 996 bp, Morganella morganii
atgaacgggatctgctacaaaaacacacaaactaacttacctggttggagagaagaactccatataacccagccactaggttatgcttatgagactaccactcattttgttcatttttatggaaacaatataggatttaatgttatttcagttggtttgactgcgattgaatataagagcggtacactaactgactgggttcagcgtgtttttggcgctcgtgatatcctaccactaaataaagaaatcggtcatgtcacacaaggagtatggagaccttcactttattacgcctatgatatagaaggtgcgctaggtattgatgaattcgagaagcgagcatctgaacaagctctgcgaattatcattgataagcttgatgatattttattatatgtcgaacctgactcaaatggattacaagcatatagccacaaatgtcgggaactattgattctcgcatgtactgaagtagaaaatcaatgggcatcaataataaatataacgaatggtatcaattcaaatggaagatataatacaaatgactatattaaacttttagataagtgttttctcaaggagtatagaatacagtatcgtaattactgtgggattaggaatttcaaaccatttgatagctggactgtaacaaatccgactacctcactccaatggtatgatgcatataataaaacaaaacataacaggtctggtgcatttcatttttcaacgctggagaatgtgatggatgcagtagctgcatgtattgtgatgtattgtgctaaatatgggccttttagtttgatcgaatctaagacgccactctcaacaatagtaaaccagcacttttctgtttcatttgagggtagcgatccttcaagttattatgtaccttgtattgaacttccccaaaatattaagcctaatttgtttgtttatgattgttaccgtgaaggtcataataaagcctgggttaaggatcctttggttatatga

SEQ ID NO: 288926 - DNA, 1200 bp, Morganella morganii
atgagtatttttgaagaaattgcaaaagaatatgctaaaaaaaatagcgttaatgaatattttactccatcaactcctgttttaaacccaatgcacttgaaagggcgagatgttgaaatgaagagtattattgcgaatttaactgtgccaggtagacactgtatgatctacggagagagaggtattggaaaaagttctcttgccaatgctacgattaatggtggtaagcaacataaaatcttaaaaggtgaggttttcaatgtaaaatgtgatacaagcactaaatttaaagatattgtatcagattgtgcaattcatatttcagtgcatgccaataagtataaagaagagaccgttattaaagctggcttatcagctaaatttctaagtttttttaccggcaacttggggtatgaagaaaaaataactgttgaaagagatgaaattacgccaagaaaagcagcaagtacagttggtattattgaaggtatactcgtcgttgacgaatttgatgttttagatgaagatactaaaagggcagttgcggaatttattaaacagcttagtgataacaactcaagattaaagatattattagttggtatttctaaagatgggaaaagtttaactgctggacatgagtctgtaaatagatgcttacatgaagtttcacttggtggaattgatgaaaaatatctaattgaaataattaaacttggtgaggatgggttggggatttcatttgatacagaagtaaagtcagaaatagtagatataagtaatggtttcccgtatttcactcatttactttgcaaggaagcagcagagtcagcactatcgtcatctaacaataggatagatttgaatttgttccgaaactctattgagaaatctgtagaaaatgcggaaggacgccttaaacgtgaatatgaagatgcagtacgttcatctaaaacagatgtatataaaaagatattattatcagcatctaaatttagaacaaatgaatttagtgttcaagcttggattaatcaaatatatgcggatactggtgtaagatataataaccaaagcatgagtaactatactggtagattgatgaagcctgcgtttggttctattataaaaagacttagtaggggggtgtacaaaataaatgacccaagaatgcccagctttatacgattagcaaatatgtaa

SEQ ID NO: 288927 - DNA, 354 bp, Morganella morganii
atggtggtgacaatgaacaaatatcgtgacaaatcagactttgagattaataaagaggtcgtgaaattaataaaaactaaaggaggctattcgtgcgttgattacgatgaaattgtgaaggtatatgtatcacaaaataccggcatatataaagagttcgacccctgcaatgacccatatgacgctatgccgattattattgaaaacggcatcagtctaatttcagactggaatgagattggcgtgtggggcgcgacctatcagccgtggatatcatcagaaaacaaaagcccactacgcgctgctatggaagtattcctgatgatgaaggatgcggagaatgagaaaatatga

SEQ ID NO: 288928 - DNA, 588 bp, Morganella morganii
atgacgttagtcgagaaattttctatcattggaagtgtagcctctgctatcgcaattgttgttagctttacgttctttactattcagaggcaagaagatatagccagaagaaatagtgatagaaataatgaattactagctttaaagaaaatcatcttatctaattgccagcaattaaggaaaattatagaagaaaacagtaagatactaaataaaatagaaatgaaaagttacgctgggattgaggcaaagcaagcgggagaaactttctatattaatttcaaggatggctatacagaaaaaccgagaaagtattactggaagactagtctaagattttatttattacgttcaaatttggaaaaagaagtgctggttattgccaaacacaatgttgaaatcattgatttgatacttggattaaacttgttaattgactcggcgaatgactcaattagatttatgtgtaataaattatatctttcgacgatagatgctttaattggtaaagctaatatcgtaaaaaatgatttcgagaaagtaatgcaaacaatcgacctagttgaaggtcaaataacattgcaataa

SEQ ID NO: 288929 - DNA, 1866 bp, Morganella morganii
atgctgatccagaagtcgctgggcttcctgtcgctgtgcctgcgtaagccgagttttatctctgatcactacgatgccaaaggcaataaaatttccaacctcggaaagccggtaaaagacggtgacgccgttaacctcggcacgatgaaggatcacatcagcgcgaaagataaacgctctctgcgcgttgcagataaggatattccggtactgcctaatgccgttaatcgcgccaataaactgctatcgttcgatgacaacgggaatccggttgttattgtgcctgagtctgggagtgctgcggatgttttgactgagttgggaaaacaagatggtttcgagctgataggcggactgacagaaaactaccttcgcgtgttcgataatgtagctgaaatggtagcagaaacatcactgccacttggggcaacggtcaaaacacgcgggtattactctcctggcgatggtggtgagggcatttatgcaatcacaaataatcagccagacacgctagtaaacgtcaatctggataacggactgacagcaacgctggatgtgacaaacggcgttgatatcctctctgttggcgctcaggcgaatactgatatcggtgctattcttgttggacttcaggatattgcagcaatgaacaccatcctgatccctaaaatgtcatttgattgcaacagtcaggttaaggtcaaaaagaacttccgtttttcttccggcgcacaatttattaacaggtctctgcgtgacgactggtttgtttttgaaactgacaatatcgaatttagcacagacggatatggcaataaggctcgtcttgctgtcgatagcaaactaacaggctggaatcactctgttgcgttggtattgggtaaaaataatttaagaaatttatccgtttgtaatattaaccttgtaggttgctatagtgatttttcaggagtagctctcacactgcgtgcagatttaagtggtgacggtagcagtgataccacgccaaataggcgatggaatagtattacatggtgcaagtttaataacctttcacttgaatattgtcatacagcaatttcgataaaggcgtttgagccgagagaagaagactctggcggtgctgagcgatatatgtcatggataacatcatgtcaattcagggatgcaaaaattgctggtgttataagaggtatagaattactgtgtgttcctattaccctaggggcatatccatataatacgcaagtttctgaaattcaaattgactttgtccagcagtggatgaactcttcaaaagaagctgtttatattgatggtgcaggtcaaaataaaatagaattttttgcatgggactatagtggataccaaataaaaccagggtacgcggtcgtgacaaagggggcagatggtcgtgacaattatatttctggaaatatggaacttaagcacatttcttttgcttctcctcagaatgcgtataattcacggtatagaacatatgaatataagtcagttcttcatcgccgtatttgtgcaataaagcatataggtggggggagtttcgaaattgagcgtggatatcatataccagtaggagtcaatggggtaaatatagacccaaatgattcttatgcattaattttgaattacatacctggctttgatgcataccaacgtccatatgtgatatgtcaagacacaaataatacgaaaggatattcattaaggccgttctataatcaaagtgcagcctcaataggtgaggtgagattttacatcattaaaaacaatggcaatgacgttgctaatctatcagaggttccaataggtgctatttttattgtagaaataatttgcatataa

SEQ ID NO: 288930 - DNA, 2295 bp, Morganella morganii
atgaaatgtgaatttatttgtctgacatatcaggctgtaagcaccataattaatgcaagaacattacaaagtgcagattttgataattcgtccattataataaatatagcaaatggtgaatcaatagaaatagataactctagcctaccagtttatagtattaataggaataagggattgtttattcttcatgatcaagatatttatgagtcagaaagaaactcagtgactttagattttagaacgctttcttttgatggtcttgatgacaatatgaagattacatgtatccagaaagcattgagattctgtattaaattttggggtaatcatacctatagttcatcagagatgatacctctagattccactaaaggaattatattcccattcccatcaaaaaatggtagttcatataaaattgttgttgagttagctccatttaagaacaaggcgaataaagagagaaaatataaagggaaacatatttgcatttataaatttgatcaaacctcagggtcaaaaagaaaagatgaatgtgaacttgtaaatttaaaaaaagctttagatggtatttttaatgttgaaacttttaaaagttattcagataaaggttttaatagtaaagaggttaacaatctaggagctgtggatcttgataaaaaagaattactgaatacaacctatcttttagggcgggccaaccccttcgaattactttcagataagcagttatcgtttatcaactctgattggcattatcctgcaaggttgcatggtccagccggtacaggaaagacaatatgtcttgtgttaaaagcgttaaaagtggcttctgaaagtgattccaagatgaaagcacttttcattgtgccaagcacctcaataagaaatacggttgaatattttttaaaagttacttcagaatcaactgaaatatttgatagttcatcgttgtcaaaaatcagagtaagaacaattcaacaagtttgtatggagcttttaggtaatgatattagtgaaactgagcttatagatgaagatagctatgaagctaaacagactcagcttctctatataatggaaattgttgaaaacataaaacataatttaaaaaaacataaaagaatgatttctgacgagctttataccctttttgataatgaagattcattgtctctctcagagttattaattcacgagtttggtgtggcaattaaaggtcggtgtagtggtaacaaagagttctatattaaaaataaagataagtatttctgcgtccctacctttaaggagaacgatagatattttatattcgatatattcgaaaattatcaattaaagttagacgacttgggccaatttgatccagacgatatagctatatcatctatgggacgtttagaaaccccgctttggaaacgacgtcgagcaactgaagcttacgattttatacttgtagatgagttacatctacttaattttaatgagttaggtatagttcattatttaacaaaacaaagtcacattgcaccaatatcatttgctgtggatgccacacaggccattggagatattgcatggaaaaacgattcggttttagattacttaaatattgaagaccatataaaatcagagaagaaaacagatcttactgctgtattcagatgctctgctaatataaccagactagcatcgataattactagttcaggaactgcactatttactaactttatcgatccattagcacatgcttctggtgttcaatatgatataaaagagtttcaaccagaatatattctatatgatgagtcaactgtatctatacaccaaaaagctatatcaatagccaatggtactcatgatgaattaggctgcttgaagcataaaatagtgattatatattttgacagattactattcgaagaagctaaagaagagtttagtcaatcgaataaaacagttagttgtttgcttgaacgtggtgatattagtgtcatcgaagaagctaaaaacaaaaatgattttattattgctatggtagattacgttggtggtcttgaatttgatgctgtaatccttgttggtgtagataaaggacgtctaccaagggaagatcgttcgattagtaacacgagtaaagtttttaataattatacttctcacaacaaaatgtatgtagccattactagagctacgaaaatggtaaaaattcttggggatagcagaagagggattagtccattacttgatagcgcagtcgatgatggtgctataaccgtctatgagtaa

SEQ ID NO: 288931 - DNA, 1251 bp, Morganella morganii
atggctcttactgatatcaaagtcagaacagttcagcctgcagacaaacctttcaaacttaccgatggtcaggggatgcacctgttggttaaccccaatggctcaaaatactggcgtcttcaatatcgttttagtggcaaacagaagatgctggcgttaggggtttatccaatggtttcattggcagaggctcgtaagaggcgcgatgccgcaaagaaactggtatctgatggtgtcgatccctctcaaaagaaaaaagaggacaagattgaagaaagcggagcactaacctttgaggctgtagcaagagattggcatgcatcctgtagcaaaaaatggtctgagtcccatagtgagcgggtgcttaaaagcttagtggataatcttttctctgcgttaggtaaacgtaagatttcggaactgaagactcgggatctactcgctccaattaaggtagtagaggcgagtgggcgatatgaagtagcttcgcgtcttcaacagcgaacgaccgcaatcctacgttttgccgtacaaaatggtctacttgattataatccagctcaagatatggctggcgcaatagctgtagctaaacgagtgcaccgcccagcgcttgatttcgaacgccttcccgaattgcttgatcgtatcgaatgctttaaaggtcgaaagttgactaaattagcagtgaaactaacactgttggtattcatacgatcaagtgaattgcgttttgcaagatgggaagaaatcgattttaaaaatgcgctttggacgatacctgcagaacgagaacctctgaagggcgtaaagcactcacatcgtggttctaaaatgcgtagccctcatcttgtacctctaagccgtcaggcactgaaaatattagaagagataaaacaaatcagtggggattacgagttggtcttcattggtgatcaccagccggataggccgatgagtgagaacactgttaacaaggccctgcgctcaatgggttacgacactaaaacggaagtttgcggacacgggtttagggcgatggcctgtagtgccttgatcgaatccggcttatggtcaaaagatgcagttgaacgtcagatgagccatcaggagcgtaataacgttcgcgctgcttacatccatcttgctgaacatctcgatgagcggaggctaatgcttcagtggtgggctgactatcttgatgccaatggagaaagagcggtcaggccgtttgagtttgcccacaggtga

SEQ ID NO: 288932 - DNA, 285 bp, Morganella morganii
atgatatcaggtcttaatggtggaaattttatccttagctcgatggctaaggaaagagtcaaatcaggtctacttgatagagcaacaatagaaggctctaaaggggagtataccgtgatttttgatggttcagaatgggaaggtaagccattagtcttaagtagttccagacagccttacgaagcacgagtcttcaaaagcatagatggtgcagctgcagaactactacgcataggcttaagtgaagcttcaatcaaaaataccactaaatcgaacaataaataa

SEQ ID NO: 288933 - DNA, 2019 bp, Morganella morganii
atggatattcaaaaagaaacgcttttttcagaagttgaaactgctaacagtaagcaggttgctgttttgaaggctaactttccgcagtgttttgataaaaacggagcgtttattcaagaaaagctgcttgagatcatcaaatcatcagatgttgaactctctaaagagtcatacagcttaaactggctgggtaagtcctatgcccggctgttggctaacctaccaccgaagacgttgctcaccgaagataaagaccataaccaacttgaagagaacaagaacagtcagaatctgttgatcaaaggggataacctcgaagtactgaagcatatgattaatgcttatgctgaaaaggtgaagatgatttacattgatcctccatacaatacaggtaaggatggattcgcatataacgatgatcgcaagtttacacctgaacagctttctgcacttgcaggtattgatcttgatgaagctacccgtatcctcgattttactgtcaaaggttcaagtagtcatagtgcatggcttacattcatttatcctcgtctttatattgctcgcgaactcctacgcgaagatggtgtgatctttatttcgattgatgaaaatgaactgaaccaactgaaaaccatttgtgatgaaatatttggtgaagcaaacttcatagaaaatatcgtatggaataaacgcattccaaagaatgataaaggcatcgggaacatccatgagtacatccttgcttatgcaaagactaatgaaataagcaaagagtttttgatgcggaaagatggaatcgatgatgtatatcaattcattgagaaattaaaaaaagaaaaggtaccattagatagagcagagcagcaactaaaaaaattctatagttctaatggatatgaccgcggaattacactttacaatggtctgaatgaagattacaggccatggggtaaaattaatatgagctggcctaatgcagattcatttggtcctacatatgaagttttacaccctttaactaacaatcctgtcaaaatcccagacagaggttggcgctggaaagaagatacttttaacgaaattgcgaaaagaatagatggaaaatatacagacattaaaaaactacatgatggtagcaccatctgtggtggaatttggtttgcttgtacagaaaacacccaaccaagttcggtgaaatttttagatgaagttgaagagtttttactcagatcaattatttcaaccaaaagtgatggtggtgttgaggttgaaaacctctttggtggaaaaggatatttttcttacccaaaaccaacaagtttaataaaaatactatttggttcggtaaactccaaagctaatgatatttatctagacttttttgcaggctctggaacaacagctcatggtattctagagttaaatatggaggatggaaagaatagaaacttcatctgtgttcaattagatgaaaaaacagataaaaagaaacaagcttataaagaaggatataaatccatcttcgacataaccaaagatcgtatcatcaaagctggagaaaagttaaaaaaagaaaatcccgattatgatggagatcttggcttcaaaatatttgaaacagttaacgacttccgtgcaaaaaatgaatcagaactaaccctctctaatcttactttctttgatgatgttgtactgactcctgaacagtatgacaccctattgactacatggtgtgtgtatgatggcagcttgttaacaacaccaattgaagatgtagatcttaacggctacaaagcacacttatgcgatggtcgcctgtatctgattgcgccaaactttaccagtgaagcactgaaagctttacttcaaaagttagatatggacaaagactttgcgccaaacaaagtcgtattttatggcagcaacttcgaaagtgcgaaacagatggaacttaatgaagcattaaaaagttatgccaataaaaaatcaattgatttggatttggtggtgaggaactaa

SEQ ID NO: 288934 - DNA, 336 bp, Morganella morganii
atgaacaaatatcgtgacaaatcagactttgagattaataaggctgtggctgaggcattaattcaatccggcttcattattggtattaaatatcatgataaacatatattagttactgataagtacgccaacaattacccattcgacccctgcaacaaccccgctgacgcaatgccgattgtttttgagaataaaatcaatttgaaacacttagcgaataatactaataacctagtgttagcaaaccacaaagaatattggtgtattcgtaaaaatccatatcgcgctgctatggaggtattcctgatgatgaaagaggcggagaatgaaaaatag

SEQ ID NO: 288935 - DNA, 1911 bp, Morganella morganii
atgtcagacattataccaaatgttgtagtctcaatgccaaatcagttatttacacttgcacgcaaatttcaggcggcgagtaacgggaaagtattcatcgggaaaattgacaccgatcccaccatacctgaaaaccaaattcaggtgtatctggaaaacgaggatgggacgcatgttcctgcccctcaacctctgatcattaaccaagctggctacccggtatataacgggcagattgcaaagttcgttaccgtagaaggccattctatggctgtgtatgattcatacggtgctcagcaattttacttttctaacattttaaaatatgaccctgatcagttcagtaaaatccttgctggtgaaaatgggtttacccttgttggcgggctgacagaaaactaccttcgcgtgttcgataatgtcgctgaaatggtagcagaaacatcactgccacttggggcaacagttaaaacacgcggatattactcccctggtgatggtggtgaaggcatttacactgtcacaaataatcagccagacacgctggtaaacgtcattctggataacggactgacagcaacactggatgtgacagacggcgttgatatcctctctgttggcgctcaggcgaataccgatatcggtgctattcttgttggcctgcaagatattgcagcagtaaacaccatcctgatccctaaaatgtcatttgattgcaacagccaagttaaggttaaaaagaacttccgattttctccaggcgcacaatttattaacaggtcactacgtgacgactggtttgtatttgaaaatgataacatcgaattcggcactgttggttacgggaataaggcaagaattgcggtagatagtaaattaacaggatggaatcacgccgttgcattggtgttgggtaaaaatgggataaggaatatcactatatgtaatatttcgctggttggctgttacactgattattccggaactgcacttgaattaagagccgacctcagtcgagatggcggcaaggccacagaccctagcaacaacgcaaggtggaatagtataacatggtctaaattcaataatttatcacttgaatattgtcatactgcgctttcagtgaatgcacacgagccaaaaagaagtgatgtaaatggtacgtctatgggggatggtgggtcatggatcacatcctgccaattcagggatatgaaaatagcaagcgtaattagagggattgagcttttatgtgttccgcttattgctgggtcatatcctaataatgttcaaattgctgaaattcaagtcgactttgttcagcaatggatgaatgatgccacagaggctgtttacattgatggcgcaggaatgaacaggattgaatttttttcatgggattatgacggatatagcaataagccaggaaaatctatagttgttaaaggaattgacggaagggataactatatatctggcaatatgagccttaagcatgtatattttgagtctcagcaaaatgcgtataattcactttatcagactttcgaatacaaggcatcacttcacagaaggatttgcgcaataaaacataacggaagtggtcagtttgaaatagagggcgggtaccatataccgataggcgtgagtaagatatatgtagataaaaatgactcgctcgcgcttatagttgagtacactcctggcatggggacttatcaattaccatatatactatgtcaagacacaaacaacacaaatggatattcattaaaaccgttctataatcaaggcgctgcatcaggtgggaaagcatggttttatatctcaaagcctgacgggaaaacgatatctccattatcagaagtcccaaatggcgccatttttatcattgaaattatttgtatttaa

SEQ ID NO: 288936 - DNA, 996 bp, Morganella morganii
atggtgaataataaagtaaattatatagattcaattagagcatatggtgctattgctgttattttaatacatgtgagtggatattatttatcatatacaccattcacaaatacgttaaattggaatattgccaatatagtagactcaatgagcagatttgcagtgcctatattttatatgatatctggatttatatttttcaatgacaaatctcctacaataaaaaattttataaaaataacaggggcaattctattttatagcgttttctctttaataataataaaagcaataacatttaattatggttttgagccatacccaaaatacaaagatatatttaaatcaccagcatactaccatctatggttcatgtacccattgataggtatatacatcatatcaatgatagtaaaaataaaaaacatcagttgtacaaagggggttgttatatcgttatttttatttattttctttaataaaaatgcagctgagcagctactattgctttttgatataaattactacttttattttatgtttgatggtgactttatattttacctactttacgcagttgttggcggatttttgcgaaatgttgacacaaaaaataaatatatatatctatgcgtatacatagtatcaaccatatcaatagccgtggttatttcacttaactatgaaagtaaaagtaacatacagagtttgctttatgggtacaatacaccattagttttcatatctgcggtttcattatttctgtttgcaaagaaatcaaataaaagtggcaaagtaacatcatttatttccaagcactcccttggtatatatgggtttcatgccccaatattaatggcgattcaagtagtgtttccttatagtaaattaacgccattaattggcataccggtggtatcactgattttaatggctatatgcattacactatcaagcataaccatctactttgataaaaataggtttgtatcttaa

SEQ ID NO: 288937 - DNA, 2661 bp, Morganella morganii
atgatgataaatataaagaaaaaagaagtatcgatattattagtaatattagcttgcctgttattaactcagtcagcttatgccgcagatttatttaccgttccggagacagacaaatcaaagctgtggtttctggatatcttattcccggagaatttagcggaaagccccttagccagcacaatgacgatcctcaacagcgctgttttactggttggtggcattttagctgcctacacactgattgccggaaccatgtcaacggcacatgacggagaaatgctgggtaagaaatggtcttccatgtggttgcccgtaagaactgcattaggcacggcaatgatactcccggcagcaggtggtttctgtgccgctcaggttatggtgctgtggatgattaatcagggagtcggtctggcagataccgtctggaatacctatgcatccaacccctcagatggggctgttattaccacatctgcatcttatcaggagcttgatcgcatagcgaaaaccgcctttatcaataacgtctgtatgttaaaggcgggagaattatggaagaaatcagcagcagccgatcccttcccacacgtcacgcctgcgtttgaaatgacaccggagaaaggtgcctatttatacacatacagttatggagccagcaatgccggtaatgatatgaataaaaatttactggtatccaaggctgcatgtggaagcatcacgcttacagacccgaaggccaaagcttcttatgacgaacaggctaaagctcaggctaccattgctgctggcggcatgtatatggcttatatgccacaggatataaagacgaatatttcagatgttattgaggcacacaatgccgcatttatcggtcttgataatagtatgaaaacgttggctgaacagtatgtggccgataataatattgatattcagaccggaataaacagcgcaacggcctcatatgtatccattattgatactgcagtacgaacagttttctccactggcgaccagtgggatgatttcaaagagaatgtccagaaagacggatggtttatggctggcgcatggagtatgaaactaatccgtgtgcaggatgcgattaatggagcagctcataatcttcctgtaggtgggcaagcgacaatggaatacggagatatattcgataacagcctgaacgcgattatggcaaaagtagctcaggatatggcgaaatcaacgacagcttcaagatatgcgaatggtattgatgcgcaaaaccgaacggaagccaataccagtggtaaaagtggcgctggccctaaaacagatgatgccgggaaaatagtttcttctcttcaaagtgaagccaataagagtatttctggtgcaatggcgggttttctcagttccagcgttattaatggaagaaagcaagggaaaattgtttcattttcaaccgacacaacggctgccaatttacaggcgataaacccgttattagccgttaaagggcttggggatacaatcagtgccgctggctggacgttattaggaagttctgcggttgttggcgcaggtcttggcgcatggacatcagcgactgcaagctgggtatcaggtgcatttggcgctatggggattgttatgccactggttatcccattatggatagctggcgatactttagccgtcgttattcctatgttgccttacgtcatgtggtttggtgtttgcgtcggctggatgatcctgtgccttgaagcaatggtcgcagcaccattatgggtaataacacatttacatccagacggtgatggcgtagtgggtcgtggtggcgctggttatggtctggttttatcgttaaccatgcgaccagcgctaatgataacaggattaatagcagcctatacgatgctccctatccttggtgggatcgtcaatgaaacattctccggcgcgtttggcatgatgtcagccaatgctgggataggtatcatcgagtcactggctctcattgctgtttatattgcgatgatgttcacggtagtgaagaaatcactttcactgattcacatcatccctgatgaaattatgaagtggcttggtgttcatggtggtcagagcatgtcgggttacgcacagtcggcatcaaaaggtgttgaaggtgctatgtttaccaaaaccgtgttggatcaggtttctcatacctcaaatgcgatgggtaatcagatcaggaatgcgcaaatcaacaaagaccgtgaacagcaacgtgagcttcaacaacagcaacaggctcaacaggggaaagcacaggcggctaataaagccaatgatacgggatctgcattcagaactcatatgagtaatgctggtccactggatcagcaggatgaatatcagtctcttgaaagtgctaactcggcttacaatgcggctgaggcagcagatgctgttggtgacacagcaggcgcagcgggttatatgaatgtagctcaaaaggctgctaacagggcagtatcatttggtgagcataacagaccgttgctgcctgtaagtttacaggcccaagcttcaccaattgaaagctttaaggctccagataaagggaatggtagcggttcttctggtgaaagtaatcgcccaaccagtggtagtaatatagaatga

SEQ ID NO: 288938 - DNA, 507 bp, Morganella morganii
atgcgtggcgttaaatcctatcgtgataaatccaaagtcagtaaggttgttgctggtaagaaacctattttgaaaacatcctcctctcaaaacccaaacagggcatccagaagcgcccctgaacgtgttaagagaaaacaggctattccacgtcaggataatatttttaaacgcttcacaactcttgtcattgattttttcaagcagaagtttgtatgggctaaagcaaacaaatcccaaattgatcttatcagtgaagaacatgataaacgtattgctgaaaactatgtctttgatgaagtattaggtcatcatgtttctcgttctgaatatgagaaaaaagccaagtttaaccaagatgactataagccaacgtctgatgagatcagccgtttcccaaaccgacctaagaacgaacagccggaaagcgatcatcgcatggatctcataccacatgccagcaaagataaagccccacctatgaggccaccgggatatagaaaatga

SEQ ID NO: 288939 - DNA, 660 bp, Morganella morganii
atgaactctatctattgggtgattttcatgggactgctgttaaacataccatcaccggttcctgttttgtttctccataagactcaaaagaacgtgaagatatctattgcgatcagactgtttctacttaacgctttcttggtgctgtcccttgtgacgctatcgcaaaatatcacgcaaaaatacgggctgtttccagtatggctggtgttagctgcaatagtgctgtttgcggtcacgctagtaccaacggtaaaattcgtgcgtaagcatttgactgttgggaaaagtcgggctgttatactctcatcattcctgattgtctatgctgtcaggtttcatggcgtgttttcagatttgaatggaagtggatatacgattaacggctataacacagtatggacatccttcttcctgtttgcctgtctactggcttatctcggttgtgctggacgtaaaacgtattctggttcttctgaatcgtcatctgcaccacaatcagattattttaagccgaacaaagaatatgaaacacaatctcaaattgactacgatattgctgtgaaggggcggagtgttatgtctgatcccaatctgagtattgttgagcagcagcgttatcgggatgctcttgagaaaaaagaaagagaaaactcgtaa

SEQ ID NO: 288940 - DNA, 357 bp, Morganella morganii
gtgagtcctatcttggaaggacttaaaagatcgggcttaatcgatattgaattcgaacaacaggggtttacccgtgttgcagccttatcagcaacagataaaggtgctaaagcgaaattttgggataaggagcatggggcttgcgtaggtactagaacagtggatgaaataaaagagtggactgaacccagcgacgctggtggtcaaaaagtaacacgggtatcatatacatggaaactctcagatattccaagctgggttgataaagatgctttctcaagcgtgaaaggagtgtcagaatcagaagaagcaaaaattattctggtgaaaaccaataacggctgggccacaaggtaa

SEQ ID NO: 288941 - DNA, 240 bp, Morganella morganii
atgtcaacccctaactattacctgctattcaaaacagccgatacaagctattgtggtggtatggtctggattgattactattctggccttgatgatgcggttctgacttacaaaaaaggtcagaaagtcagagtcactggaacagtcaacaacttcgaagttcgtggcttcgctaccgtcaacaatgccgatatgccagttcgtctggttgttctaagaaatggcactatcaatcattaa

SEQ ID NO: 288942 - DNA, 312 bp, Morganella morganii
atgagtacggatgataaaaacagaaagccaagaacagaaaaaacaattaagcaaaaaatagcatcagcgcagatgcgtttgaatcgtctcaaaaccaaagagaaatctttgtccaagagtgctgagacacgcctgaagataatccttggggcagaagtagctaaagcttttggctgtaaagtagaagacgtcgataaggagtttgtgttgggtatattaatacattttcaaaatgttgatgctgaggataaggcaaggctgaaattacgcggtaaaaggtttcttgaggatatggttggtagacaggaataa

SEQ ID NO: 288943 - DNA, 342 bp, Morganella morganii
atggaaatcttcgaaaaagatcaagaaatcgcttttgttgactcgtgcaacgatgctgttttgtcttacgaatacgaacaggcgggcttcaccatcaacttaatgaaacgctcggttcttctctttaaccatgttctaaacagcacatttatatattcatatagcaacatcagggagatcaattactcgttgcctgattgtaagtacagtcatgccgagatctgtattatgactgatgacgtatcaaatccagtctggacgctcagcgttccatttgacgcacattatatttgcgagcaatgtgtggaggtatttaataaccgaattttatttcgcccatag

SEQ ID NO: 288944 - DNA, 477 bp, Morganella morganii
atgtctggaaaaaatccgttttggaattatgattataatgcagcgcaacgtaatagagaaattgtagactcttaccaacaggcaaatgaggcaaggctggattctcaacagtcgcagtttgaagcgtctatggctaatgacagggttagtagaatacagatgcagttgaataacacaatcaatagccataagaaggttgtcgctgattatgagcaacgtctacagaagactaaaacggtagcatttaaattggctattcgttctaatattttcaaaagaaccttagttaaactgacagaagaatggcctgagaaaaaagaccatatccttgatgaaatccagcgccaaaaaaatcactgcacaacacaagagtatagagacaactggtggggttgggtaagtcagaacgatccttcttcagataatagttatcttgattttccatttcccgacagggagctaaaacataagccataa

SEQ ID NO: 288945 - DNA, 513 bp, Morganella morganii
atgcttaacatcttactactattttcttattatataaccatcatcaaatatccgataataaatatggtgaagaatatcatattgcgctgccataatggaatggtattcaaccatcgcgctaatcttttagcttttgataatttttattttgctcttaagatttttataaaaaatgagtcgtcattaaattcttctatttgccttatttccttgattattattgccaatgaaaaaaacatcataataagaaaggtgattgatgtgttatttaattgtttccctagggcgaagtattcatatatggcaacaattaacaggattaatacaaaaacgatcaatgccagcatcttacaccttggtttcttttttctcttcgagtctgagggtagagtatcttgttccttgaggctggaggtgttgacttctttattttttggttcgtcatatggagttttcatcgatattatccagataaaagacgagttggcaggaagcacaataaaagtgctttaa

SEQ ID NO: 288946 - DNA, 903 bp, Morganella morganii
atgaatgaatatgaagaaataaagcttatagatatctcagagatcagaatcgttaatccacgttcaagaagcaaatctattcacgatgaacttgttgaaagtataaaaaacatagggctaaaaaaacctattacggttaggttatctgactcaacctgtaagacgtatgtgtacgatttaatttgtgggcaaggacggattgaggcttatgaaatattaggtgaaaaacaaatcccagcaatagtaaagtcagttgatcatgaagatggtcatatcatgagtctggcagaaaatattgctcgaagaaaaccacgttcgacggagcttctcaacagcattatagaattaaagaataaaggtttttctgagttagagattgctaataaaattggccgttctaaaaattgggtagcttctattgtatcactaaaagaaaatggcgaagataaattactttctgctgttgagtctggcagaattccgatatatatagcggtagaaatatcaagagccaaaggagttgatatacaacacctgcttttagaaggatttaattctggtgaccttaactcaaagcagataggtgcaattaaaaggatcttatctcagagagagacatccggtaaaggaagtgataataattcttttgttcagggggtaaaaaagaagcggattacttctgatgagttaaaggaactttatcaagaaaatgtcaaaaggcataaaattattcatacaagatctgagtttacaatatctagcctaatggttgttaaagagataatggttaatttattgaggaatagagagttttcagaccttctatctgttgagagcctgaattctgttcctgcatttattctggataatgttgacccagaacgaggtcttgaaaatgaataa

SEQ ID NO: 288947 - DNA, 1104 bp, Morganella morganii
atgggcaatggaataattgaaacattagtttcaatgaacgacaagctggcacaagcaaccataacagcaaatgagaatcagaagaatgctgttgtaagtaatgccagtcaggcaatccaagaacagcgtatgaaaaatatcttaaacagaatacctgatgccaacgcctgtgaagaagtcacgagcgcaggtggtcgtggttcagcaggatccaatacaagctcagctaaagaggctttatctgaaaacagcgttaagatgtttacacaagcaaataccggaataaatgaggccaagaaaaacatcatgggcagagtatcaataaatgtttgctctgaagatgatgtgaaatataatcgaggtgggtgcaatactataggtcagtatcctgataaagataagtcggcatcaagcctaattacaccaccattatctaaatccgatgcattgtctaataaggtttcgaatcagtcctattctattgagcagattgaagttgctgaagcggcaaaaagaaatcttatagggaacttgcccgttgaaccattgaagaacaaaggattagaagacacaaatgaaggtcgagaatatttatctgccttttcgagctttgtctccagaagcactgctggaacaaacgccattgattccgtactggctatgaaaaaagcaagtaatgtatcagtgaactccagaggagccaaaataggatccacattaggttctacgcagggagcaaaccttgcttggtcagatgcttccgtaaaaaacaagtatgcgaccttatttcccggcacaacattcccggataatccttcagagtgggaaatgttaaggtatgagatctattcacgctatgcagatacaacaggcgctgacgcttggcaggtaaaaatcagtagtgctgatgaaaaagaaactgcgcatgagcaggcaagaatgcaggcacttgatttaagattacaaatgcttcaaatcgaaagaacagaagacacaaatattttgcttgcggctctgttaggacaacaactgcaaccggttgataagcagatgctgaataatttaaaaactaatgcaacaagagcgattcaggcaacaaaataa

SEQ ID NO: 288948 - DNA, 147 bp, Morganella morganii
atgactaactctattaatggctcagacctgctgtcaaagcgtatgtttgcctttagtggcttactaatgacgctaagcaatatcggtctaagcccatttattgcggtgcctcttggtatagcactagtgtgtgtcttacgtaagtaa

SEQ ID NO: 288949 - DNA, 351 bp, Morganella morganii
gtgagcacaaaaccgcagttatggccggcgggtgagcaattcacccgtgaggtgattatccagacaaacactgacccgataccggtgatgatcacttacaccgtgccgccttttgaggcggtagtcgaagcctggcagaatacggacccggcaaaaagctacccgcagttacggcagtttattatcggctgggatttacaggacacgctgacagacgatgtgcttatttcgtttctggcgtcatacagcgggacacacgaagtcattctgaatggttggtgtgagtacatgaaaaaaatattagaggctacgcaaaattcatattttgcatcatctgagttaattaattga

SEQ ID NO: 288950 - DNA, 351 bp, Morganella morganii
atgaatgaatttatggaagtggttaaaaactcctttaatgaatcaacaaattatcttacgtgggcttttttctccttagtggctgcatttatgtttgacagggcattagatcttaagggatttaaaaaaaaatgggtcaaccgattatttagatttttattcagagtatatttcttcctgtttttgataataggtgccgttaatatcaaatttataagcaatatctttgctgaaaattttggcggatctatttggtccaatatattttggatattgattatggtgatgattgtcgcgaatgcagggttgttggttattgggttagatgataaaaaaagtaaagatatgtaa

SEQ ID NO: 288951 - DNA, 156 bp, Morganella morganii
atgaagtatttttatcatgtaatttacatggttatcctgaaaatactgggtcaggaagtactttttaccgaaaaaatgatgctcacgattacttatctttttccccgtgactacttctgtgaggagactaactttcagatatcttgttcatcgtga

SEQ ID NO: 288952 - DNA, 1170 bp, Morganella morganii
atgatcaaaagaataagcgttagcgcattcaaatcgttagttgattttgagttaaaccttgactcgaagtttaactgcatcattggtttaaacggttcagggaaaagttcggttttacaattagttagctatgtatctgcacttattgaaggaaaaattgaccgttggttaagtgaaagaggttgggaagaaaaagatgtggcttctcatttcttccccacacgagaaacgtttgaccttgtactcgatattgagctttcagataagcaattgcgttgggaagccacttacaactggaaaaaaggcctgtgtacaagtgagactttaactgatttagccaacggtcagcagctgttacgtctatatcagggaagactcaaaactaagcgtcacagtttaccggacctaattttcaaatattcaggttcaatattgtctgctttggatgattcggctttaccacaagaagcagtcatttttcgaaattttatgactaatgttgatagtcatgaccttttatcgcctaaggtcatgcgttcaggtcgttttgcttcagctggaaaaacaggtagtgctggtgagtacttgattagttatatccacaatttggaaaagggtgcgcgagatactttgcgaacaaacttgtatggttattttcctcaggttgtgaatattgatactaaaactgagttggatggcacattaagccttttgctaacagagcggttttacaatgaggatgggtctcacaccgacgttgtaactaatgccaagcatatcaacgatggcatgttgcgtattttaatcatactggcaagtcaaagatttagttcgaaattccagcaatttgatgaagtggagaatggtgtaaactctgagattactgaaaagctcgttgaaacatttattcgatcaccacaacaagtattaatcacgactcatagtccaataatcttgaatttcattgatgaagaacttgcaaaaaactccgtacacctagtttataaaaatagccagggtcatactaaaacaacaaaatttttcgatctcgattctaccgctagaaaactggaagcattagctcccggcgaagctatgttggacctccacttgtccgatgtggcaaaggaagctgaaaaatctcgaatcgaggggttgaaaaaattatga

SEQ ID NO: 288953 - DNA, 759 bp, Morganella morganii
atgattatgcatctgattgctacaggtgaagggccaactgacatcggtattagccagaatggtttaggggtatcaaacggtgaagactttctacaaggcccaatgtacgccctgcttatcaagctgttagagaactgtttacctgagtggaatcaaggccaagattttacgcatacctttatttatcgtaaagagttagggcaaagagcaaaggctagcaaagtaagacttccgagcaaagataaagcggtaaaaggacatttagaacatgctaaacgagctgctgcgcttgctgaattcacaaaagagaattttccagaaacatgggctaatagcctatccgtatattttcatgactgtgacggtacacgatctgaattagaccgtgaaccagaaatgcaagctaatcgtgttaaagccgttttatctggttttaaggctgcagagtacgaacatggcgttgccatgattcctaaacctacatctgagtcatggatcatttgttcggttaaagaaaacccatattgtcactgccagaacctagaaacggatctttctggcaacgaccgttccgcagatagagctccgaaagttgtcctaggaaatgcaataaataatcatgactattgccgtgaagatctcagtactcttatagcggcaattgatgttgaccgattagaggacatgccaagcttccgtcagtttaagagtaatattatcgcagttgttgaaaaagcttgtggcgaagtgaggaattaa

SEQ ID NO: 288954 - DNA, 3627 bp, Morganella morganii
atgaatactgcaaaactaaaaaaatatgcccctcaagcaagacgtgagtttatcaccgctgtttcaaaacaatttaatcagctaggtatatacagcgacaaacagatatcagaggtaaaacaagaaggttcagtattactaattgaaggtaaaacctttgagtctagcgtaaaaactgccagagagcgattggtcaaaaaggttcaggcaatgggctataaccagctcgtggaacaggtagcttatacttggttcaaccgcctatgtgctattcgctatatggaaattcatgactatctaggccacggttttcgtgttttgtcgcacccagacaaccctaaaggctttgaaattatcgaccatgcgcaagatgctgcggatgaactcggattagatagagctcgcattattgaactcaagcttgcgggcaacaaagacgaagagctttatcgtgaactgctgttgggccagtgccataagcttcatgaagcgatgcctttcttatttgacgcattggacgatgaaacagaacttttgctaccagacaacctaactcgtacagattcaattctgcgtggattggtagacggtatccctgaagaggactggcaacaagtcgaagtgattggttggctttaccagttctacatttctgaaaagaaagatcaggtaatgggtaaggtgatcaagagtgaagacatccctgccgccacccagctatttacacccaactggattgtgaagtacctggtacaaaactcagtcggtcgtcaatggctgcaaacctacccagactctgccattaaaacgcagatggaatactacattgagcctgctgaacaatctgacgaagttaaccaacaactaaaagctattacgcctgaatccatcgagcctgaaaccatcaaagtactcgatcccgcttgtggctcgggccacatattgattgaagcctacaacgtactaaaagccatctacgaagaacgtggtttccgttctcgtgacattccaaagatgattctggagaacaacctctacgccctggacatagatgatcgtgcagcacagctatctggctttgcgctgatgatgatggctagagatgatgataagcgtatttttacccgtaatgtgcgactcaatgtactgtcattgcaagaaagtaaccatattgacctgccaaccttatggaaagcactcaatctatcgggaatttggcaaagcggcacatcacaaggactgttctctgacgaagagcaagatttaagcttgttcaatgcagacaaccgctaccaactgctgaagcgaacgttggcaagatttactcaggccaaaacctttggttctttggttgatgtaccaagcgatgagtatgatcagctaagagagctacttagcacacttgtcgagctgcaagaatcaggtgactcaatgcaaaagcctgcggcgaagcaattgattgaaattgttcatcaggctttggttttatctattcgttacgatgctgttattgcgaatcctccctatatgggaaataaaagcatgaactctcagttgaaaaaactcgcaaaagatgactatgcaaacagcaaggcagatttgtatgccatctttatggagagaggttttagcttgctcaatgaaagaggatttaatgcccaaattaacatgcactcatggatgttcataactagctttgaagaactaagacgtcaaattttgcaatacaaacgtatagttactatggctcatctaggggcaagagcgtttagtcaaattggtggagaggtagttcaaacaacagcttggattattaacaatacatacataaatagttacaagcctgtattttatcgtcttgtcgatggtgatgagaatgaaaagaaaatcagccttttgaatcggaataatgagcatagcacgatagaacaagaaaaccttacgaagttgccaggttctcctgttgcatactgggcaagcttggattttatcaaattaatggaaaatgctgacttattggatgcgcgagcggttaaagggcttgataccaatggtaatattgatttattcctcaaacgttggcatgaaatagatataaataaatttagtgaatttgctaacgatagaaaaaaatcagtctggtaccctatcgctaaaggaggagaattcagaaagtggtatggaaataatgaatacgttattaattatgaaaatgacggtcaagcattaaaggccaataaggcaaacttgagaaatatggataaatattttcaagaaggtgctacgtggacagtggtttcaacagcaggatttgcggttagatatttacctagaggatttacttttgatcaaggtggatctggaatatttgtaagcactaacgacagatattcgatatgggatgttctatcaagccttaattcttcaattgtgtacggagttgctaaattactttgcccaactttgaattatacaacgggtgatgttagaaaatttcctatttggaagtttgaatgtttagaagaagtaaccaaagagttagtcgatattcataaaaaggattgggattcgtcagaagtttcatggggtttccagagaaatgcgcttttagatgaagtggccgagaccaatatagagtgctctttggagaaatgcctgactaagcagtctgagttagtcagtagggcaattgagttagagactctaaataataaagtcattgagaaatcttttgataatgttgaaaaggaaaacatgcttgatgtatcaaatattacgatgcttgttaatcctttgtattcatttgggtcaaaaagtgttgatgattttaaaccattgtcaaagtcaaaattaatatcagaattaatatcgtactccatagggtgtatgatggggaggttttctcttttgaggaaaggccttgtatttgctgggtcagcaggtcgtgaatttgatgagcttttaattgatggtgcttatgagggttttattcccgatgaagatggaattattccgttaactgatagagagtggtttaaagatgatgctaccaaccgattccgcgagtttgttcaggttgtttggggtgatgatcatctgcaagaaaacttggatttcgtcgccgaatcactatgtctcaacgccattaaaccgaaaaaatctgaatcagcgttggagacgattcgccgttatttatcgactcagttctataaagaccacctgaagacttacaaaaaacggcctatttattggctatttagctctggcaaacagaaggcttttgaatgtttggtctacctccatcgatacaacgaagggacgctttctcgtatgcgtactgagtatgtcacgccgctactcggcaaatacgatgcttatgcagagcagcttgagaagcagattgaaacggcagactcgaccagtgaagcgaaccgtttcaagaaagagttggatgccttaatcaagaaacaggtcgaactacgagagtttgatgacaagctaaagcactatgccgatatgcgtatttcactggatcttgatgatggtgtgaaagtgaattacggcaagtttggtgatctgttggctgatgttaaggccattaccggttcggccccggaggttaactaa

SEQ ID NO: 288955 - DNA, 363 bp, Morganella morganii
atgaacaaatatcgtgacaaatcagactttgagattaataaggctgtggctgatttttatttgacgcgggaatacagattcaacagtgccgataaaatcgttgaacttatggatatagatttgtcttgtgagtttggcggtgaaattaacctaaaagataagtacgtcaccggcacgttcgacccctgcaacaacccggcggacgcaatgccgattattatggataacaaaatcgacttaactcacatcgtcggcaacatggtatgcgcaaagcacaaagaatactggtgtattcgtaaaaatccataccgcgccggttgcgaggtttatttgctgatgaaggatgcggagaatgaaaaatag

SEQ ID NO: 288956 - DNA, 342 bp, Morganella morganii
gtggtcggcagtgtgctgtttctgctgatggggctgatcccgccggtgacacttttcttcagcggattgccgctcgccatcggcagtgccgtgatgctggcaacttacctgccgctgatgttctcctcgctggctttcgtggataaaatttccctgaatgcacgtaatatttaccggctggcgatcccgctgtttgtcggcattttcctgatcaatccgcctgccgtctttatcagcgacctgccggtgctgctgcgcccgatgctggggaacggcatgctggtggcaattttgctggcggtgttgtcagaaagcctggtgcgctgggataaggtaaagtag

SEQ ID NO: 288957 - DNA, 606 bp, Morganella morganii
  misc_feature (579)..(588): n is a, c, g, or t
atgaatacatggttaatggggattcgtgattttcttgcacgttataaattagtttggagtgaaacctggaatatcagacatcaattagatactcctgtacgtgaaaaagatgaaagtgaatttttaccggctcatttagagctgattgaaactccggtatctaagcgacctcgcctggtggcttattttattatggcatttctgagtattgctattattttatctatattaggtaaggttgagattgttgctacggctaatggtaaattaacattaagtggtcggagcaaggaaatcaaaccaattgaaaactcaatagtaaaaaaaataatggtaagtgaaggcgattttgtaaaaaaaggagatgtattactggagttaactgcgctgggggctgaggctgatacactgaaggctcagtcttcattactacaggcaaaattggagcagtttcgttatcagactttgtctcgcgccatagaatcaaatcaactggtagagattaaactgcctgatgatcaggatcttagaggagtttctgatgaagaaattttccgtctgacatcattaattaaagannnnnnnnnnttaaagagcaattcttaa

SEQ ID NO: 288958 - DNA, 678 bp, Morganella morganii
atgactactaactacgacctattggcggatgaaatatcaaccattagtagtttgcatcaaaaaaatgatgcaacaggttttttcattcaagaatgtttgcgttttcacaccatttcaaaatcattaaagtattcggggcttgaccttagcatcgcgagtcctactgacaccagatacataacacatacactaacgcgctccttactggagaatttcattgcaataatttatatatttgacaaccaaacggacgtccaaaacagatataacatgctcctaaattctttcaaggaagactatcgaaaattaatgaatagccttcaaagcgcgccttggagcaacgttatcactagcaacaatttagtgctccaaccatgtaataccaattggagcactacgcctaaactgctaaatgtagaaagcatgttaagtaacgtaaaaaacgactatggtgatagattaaactatctttacgtggtttatcgaatatcaagctttgacactcatggtcgaagcttagaagctatatttaatgcggtgtttggccaaaaatgtaatttcccgatattggatatcgactatacttttgagctaattgcaagtgaatacttagctcttttaaaaagattgaggttgcaaagtttgaatgccaacgcgacattcaagttaataccatga

SEQ ID NO: 288959 - DNA, 537 bp, Morganella morganii
atggcagtttatacgagaaatactcccggggagtataaagacagttggcaaacaccggagtggcttttcactgcattggatctggagttcggtttttatctggatgctgcagcgagtgatatcaatgcactttgttcccggtatctgactgaacaggatgatgctctcaaatcggagtgggtcagtcatggtgctatctggtgtaacccgccatacagcaatatccgtccgtgggtggaaaaggcagccgaacaatcccgcatgcagaatcagcctgtcgtaatgctggtaccggaagacatgtctgttggctggtttctggaggcactgaaaacggttgatgaaatccgggtaattaccggcggccgtatcaacttcgttaatcccgtcacgggcgaggagaaaaagggtaacagcaagggctccatgcttcttatctggcgtccgtttatcaccccgcgccggttgtcttctttcgcgctgaaacaagagttggaagcgatcgggaatcagtatctggcggaggtatccgcatga

SEQ ID NO: 288960 - DNA, 369 bp, Morganella morganii
atgttcggaaatctgcaccggattgcctcgcggtatgttccgcagcaaaccgtactctggtaccgcttcaaaagccgtgagactgacgaacggggccatgatcagaacatgtattatgacccggttgaggttcgcgggagctggcaggcggtggatacccaggacattcagtctatggggctggacaccagtcaggtataccgccgtttgtatacatcccacgatatcagcgccattcagcgtggaacttcaccggattatctggtcttcggcggcaaacgctacgatgtgaccggcgatgccgactggtatgcacaggacggctggaagtcggttatctgcattgaggcaggcaattatgacggataa

SEQ ID NO: 288961 - DNA, 453 bp, Morganella morganii
gtggctttggccttatcgaatttcataccctgcactttgtcagccgtccgcaggattttttccatggagttaccggcaaacccgaatgatttcgccatcgcttccatgtctgactgcgccgcctcacgggtaccgccgagttcagccactgagccggcaaaggcatccacatctgccgtggcaacattgatttttttgccgaatttatccagggattcgatttcagcggcacgggcaacggattcaccgacaagggcagatgcgctcataaacaggccgacggctgccagggcttttttggcaaatccggccacagattcaccggccttccggtactgtacgtctgttttgctcagtgcatcctgtacttttttctgtgccgcgacttcgctgcggcctgctgcaacgctgtttttaccggcttcctccgcaatccggccaagttcacggtaa

SEQ ID NO: 288962 - DNA, 339 bp, Morganella morganii
atggatgaaatgtcctcaatgaaacgcaaaattgcccgtctggaaaaagccagaccgaccatggacaccggcgaactgttaaagcagatcggggaacgtgacgcactggcacaaaagctgacgccgtttatcggggtatttgaccacgcgccaatgacgaaacagcaggtggcggaatacggcgtggaaaaactcggtatccgctgcgataagggcacggaaagtattgctctgaacgcctggatgcaggggcgcacaccggattcacaaaaagtgcatgcgacgatggataccgccgcaggcacggactcaattatgaaaaagtggggtgaaaaataa

SEQ ID NO: 288963 - DNA, 204 bp, Morganella morganii
atggtcggtataccgaaagccacggagaaaggcgttgatgtcacctaccttatcgacggggaatcatcccttggtggcatgctgcgtctggacagcaaatacaatcccgccctgaacggggattacattatcgagcagctcaaattcgatattgcttctcacgacgatcctttcttttatcaggcaacctgcaaacgggcctga

SEQ ID NO: 288964 - DNA, 369 bp, Morganella morganii
atgttcggaaatctgcaccggattgcctcgcggtatattccgcaacaaaccgtactctggtaccgcttcaaaagccgggagcctgacgagcggggccatgaccagaatgtgtatcacaagccggtccccattagcggtagttggcaagcagtagatacgcaggatgtgaattcgatggggctggacaccaggcaggtatatcgccgcttgtatacgtccaacgatatcaaagccatccagcgtggatcttcgccggattatctggtcttcggcggcaaacgctacgatgttgccggggatgctgactggtatgcacaggacggctggaagtcggttatctgtattgaggcaggcaatcatgacggataa

SEQ ID NO: 288965 - DNA, 342 bp, Morganella morganii
atgctgcagcgcagcgaggggctgggaacggaggagttgtcggttacctggttaccgctggacagcccgaccgctgtcgaaaatgccgatattcagcttaagcaggcgcagaccgattctgcgtatgcagcggtcggtgcggttgacgggctggatatccgtaaaaagctggcggcggataaagaatcggcattttacggtattgacgtgaacgaggacgattatgctccggaaaatatgggtacgaaccaaacgggcacggtgggcggcatcccgtcaggcggttatgaagggcaagccgctgcaatattcggcagcagcccaaagccgttaccagcgtga

SEQ ID NO: 288966 - DNA, 342 bp, Morganella morganii
atgctgcagcgcagtgaggggttaggaacggaggcgttgtcggttacctggttgccgctggacagtccgactgctgtcgaaaacgccgatattcagcttaagcaggcgcagaccgactctgcatatgcggcggtcggcgctgtcgacggactggatatccgcaaaaagctggcggcggataaggaatcggcattttacggtattgacgtgaacgaggacgattatgccccggaaaatacgggtacgaacccgccgggaacggtgggcggcatcccgccgggcggttatgaagggcaaacccctgctgtatccggcagcggcccggagccgctatcagcgtga

SEQ ID NO: 288967 - DNA, 504 bp, Morganella morganii
gtgtttaatatcgatacggccggtgatttcgggttgtcggtatggtcccgtatcctcgatgttccgctggggatcgatattccgccgagtgaaaaagaaaaaatcggtgtcggattcgggaaaaagaaagccaattttcgggcaaacttccggcgtaatgcggattataccctgtcgctgacaccggagcagaaacggctgattatccggatgcggtactttaacctgacccaaagcccgactgtcaccaatatcaatgaatttcttaagcgttttttctggaatgaggacagtaaagtctttgtgctggatccgctcgatatgacgtacatgtactacgtcttcaactttaatccggatgagcgtctgcgcgttctgcttgaaaacttcgatctgatgccgcgtccgtccggggtgggtgtcaaataccgtattgtggctaaaaaagccttcggccacggcgaacatcgtaaaaacttcctggaaagtaacttcggagaataa

SEQ ID NO: 288968 - DNA, 255 bp, Morganella morganii
gtggtgcagtcaacagacggttctgtgtgcttatccctgcataatgataaagcagtctttgacggcccgaaatttatctctaatgcgccggaaaacgaatttaacggcaatgtgatcgtcaacggcaaccacgccgtaaacggtaacagtgaatcaaacggcggcactatgacgcataacggtaaaaatatcgggtctacccataaacattccggtgttcagggtggcaatagtgattcaggagagccggtatga

SEQ ID NO: 288969 - DNA, 255 bp, Morganella morganii
gtggtgcagtcaacagacggttctgtgtgcttatccctgcatgccgataaagcggtgctggacacaccgttgtttgaggttaatgcaccggaaaccatttacaccggcaatgtgaccgtcaacggtaaccacgctgtaaacggtaacagtgaatcaaacggcggcactatgaggcataacggcaaagatatcggttcaacgcataaacacagcggtatccagcggggtaatgaggattcaggggagccggtatga

SEQ ID NO: 288970 - DNA, 1566 bp, Morganella morganii
atgaaatttttagataacacacctaattatttattttttactggaaaaggtggtgtgggtaaaacctctgtttcctgtgcgacagcaattaagttggctgaaaaaggaaaaaaagttttactggtgagcaccgatccagcttctaacgttgggcaagtattctctcaatcgataggcaacaatattaagccaataacattggttccaaatctatttgctattgaaatagatcctcaagccgcagccgaagaatatcgaaacaaaattattaatccaatcaaagaaagtttacctgaagcggtaattcaaagtattacggaacagctatcaggtgcctgtaccacagagattgcagctttcgatgaatttaccgggttgttaaccaataccgaaattacagagcaatttgaccatatcatttttgataccgcaccaacggggcataccatccgtttattacaactcccgagtgcatggagtgactttattagtaataatcctgatggcgcgtcatgtttagggccaatgtctggtcttgataaacaacgtgagcagtacagcatggtggtggaagcgttgcgtgaacaagcggcatcagagtctatgccggaagcactacgctcgttacctgtcgatattctttatttacaaaatatcaatatggtgggtgtcgatgcactgaagcagttgttatctgatgacatgccacaaattccaactattacccctacaaaacaacctatttctttacctaccttgtcagaactggttggtgaaatatctcagcaacagcatgggctgattatgttaatgggcaaaggtggtgtagggaaaacaacgattgcggcatcaatcgcagttaaattggcagaaaaagggcttgatgtacatctgaccacatctgatccggccgcgcatattgaatcaaccctcgatggtgttttacccaatcttcaggttagccgaattgaccctgtcgctgaaactgagcgttatcgtaattatgtcttagaaaccaaagggaaagatttagatgaagaggggcgtgcattacttgaggaagatttacgctctccatgcacagaagaaatcgcggtatttcaggctttctctcgcatcattagagacgcgggtaaacgttttgtcgtcatggatactgcaccgaccgggcatacattattacttctggatgcaacaggggcataccataaagaaattgttaaaaaaatgggcgaaaaaggccactatttaacgccgatgatgcaattacaagatcctgaacgcactaaagttattattacgacactcgctgaaactacgcctgtgcttgaggcggagaacttacaaaatgatttaattcgggcagatatacatccgtgggcgtgggtgatcaataacagtctgtctatcacggaaacaatatcaccattgttactttcaagagcagaacaggaagtcgctcagattgaaaaggtgacatcaacattggcaaaacgtgttgctattgttcctttgcttgaaacagagcctgtggggatatctgcattaagtcagctcgcagaataa

SEQ ID NO: 288971 - DNA, 1371 bp, Morganella morganii
atgatgtatccagcagaaccgtatcgtattaaaagtgttgaaaccgtatccatgatccctcgcgaagagcgtatcaaaagaatgaaagaggccgggtacaacactttcttgctgaattccaaagacgtttatatcgatttattgaccgacagcggcaccaacgcaatgtccgataaacaatgggccggcatgatgatgggtgacgaagcatacgcgggcagcgaaaacttcttccatctggaaagaactgttcaggaattattcggctttaaacacatcgttcctactcaccagggtcgcggcgcagagaacttactctcttcattagctatcaaaccgggccagtatgttgcaggtaacatgtacttcaccaccacccgttatcaccaggaaaaaaatggtgcgacattcatcgatatcgtccgcgatgaagctcacgatgcgggcctggatgtgaaattcaaaggcaacatcgacattaaaaaactggaaaaactgattgctgagaaaggcgcggaaaatatcgcttatatctgtctggcggtaaccgtaaacctggcaggtggtcagccggtctctatggcaaacatgcgtgaagtccgccagttatgtgacaagcacggcatcaaagtgttctacgatgcgacccgctgtgtggaaaacgcctacttcatcaaagagcaggaagaaggcttcgaagatgtctccattaaagacatcgttcacgaaatgttcagctacgctgacggttgtaccatgagtggtaaaaaagactgtctggtgaacatcggtggtttcctgtgtatgaacgacgacgacatgttctctgctgcacgtgaactggttgtggtttatgaagggatgccttcttacggtggtctggccggtcgtgatatggaagcgatggctatcggtttacgcgaagcgatgcagttcgaatacatcgagcaccgcgtcaagcaggttcgttacctgggcgaaaaactgaaagcagccggtgtaccgattgttgagccggtcggcggccacgcagtattcctcgatgcacgccgtttctgcccgcatctgacccaggatgagttcccggcacagagcctggcagccagcatctacatggaaaccggtgtacgttctatggagcgcggtattatctccgcaggccgtaacaaagaaaccggcgaccatcaccgtccgaagctggaaaccgttcgtctgactattcctcgtcgtgtatacacctatgcacacatggatctggttgctgacggtattatcaaactgttcaaacacaaagaagacattaaagggctgaagttcgtatacgagccgaagcagttacgcttcttcactgcacgctttgattacgtgtaa

SEQ ID NO: 288972 - DNA, 516 bp, Morganella morganii
atgacggataacgatgttgagattgctgtccgtaaacagcttctggcgcagctggcgcaggcgggtattgatatcccggtcagggcagggtttcagtcagaaaaacaggggcgggaagataatttcgttatgttctttccggccggtgaaaatccgcagggctggcagaagcgcagttataacccacagggcagtgatgccggtcaccgggaggcacagcagtatgaaacaaccttccaggtgcaggcatttatcaccgaattcagcggttacaccgcgaaagatattacggctgtcgtccggatgatcgttaattcgttgccgtttactgaagcgctgcggaaacaggggatcggggtgcagcgggcgaccgccatccgtctcccgtattttgttaacgaccgcggcgattacgaacaaaacccgtcttttgattttaatgtgacctatacccgcacactccgtccggaaacggctgctgttaccgcactgtatccggatattcaccgcatataa

SEQ ID NO: 288973 - DNA, 354 bp, Morganella morganii
atgcctttgtatgtctattgcaccctgtccaacgaccagaactatgccacaccggacggtccggtatttatcgccggtcaggctaatgtcatgaccagacacatgtacaccccgcgcggccgtgtgactgaaatcagtgatgaacagtacacgcagctgaaaaataaccacgtctttatgctgcataaagaaaacgggtttatcgcggtggagaaccgcagagaggatccggacaaagtggcgaccgatatggaagccagcgacaaatccgccccgctgaccgaagaacaactagtcgcggaggggacagagccgccggtcagcaacaacggcaaaaagaacagtaaaaaataa

SEQ ID NO: 288974 - DNA, 4089 bp, Morganella morganii
atgacacaaatcacaggccgcaaaggtggcggtggcagcccgcgtgcgcccgtcgaacaaccggacgacttacagtccgtagccaaagccaaattgctgatcgccctcggtgaaggtgaatttgccggtgagctgaccgggaagaatatctttctggacggtaccccgctgctgaatgctgacggatcagaaaactttcccggcgtggtgtgggaataccgttccggcacccaggctcaaacctatattcaggggatgccggcggcggagaatgaaatcacagttggtaccacggtacaaagcagcacaccatgggcgcatgcgtttactaacccgcagttgtccgcggtccgcgtccgcctgaaatggccgtccctgttccgccaggaggataacggggatatggtcggcaacgaggtgaaatacgccattgatttgcagactgacggcggcagctggaaaaccgttgtggatggacgggtgaaaggtaaaaccacctcaggttatgagcgtactcaccgcattgatctgccgcagtcggccacatcctggacactgcgggtacggaaaatcacggaggatgccaacagtgccaaaattggtgacaccatggtgctgcagagttacaccgaggtgattgatgccaaactgacctatcctcacaccgcactgctgtatatcgagtttgattcaaagcagtttaacggctccatcccgcaggtcacctgtgagccgaagatgcgggttatccgcataccgtctaactatgatcctgaacaccgggcgtattccggtacctgggacggctcgtttaaatgggcgtggaccaataaccccgcctggatattttacgatattgtggtttccgatcgcttcggcctcggcgatcgcatcaaaatgcagaatatcgataaatgggagctgtaccgggttgcgcagtattgtgatcagccggtaccggacggcaagggcggcggcggtactgagccgcgctatatctgtgatgtgtatgtgcaggatcgtaatgaagcctataccgtgctgcgtgactttgcggctatcttccggggtatgacctactggggcggcaaccagattatcaccctggcggatatgccgcgtgacattgattacagttacaccaaagccaacgtgctggacggccgtttcacctattccggcagcagcagtaaggcccgctattcctccgcgctggtatcgtactcggatccgctgaacggctatgccgatgcgatggagccggtgtttgaaaatgagctggtttaccggttcggctttaatcagctggaaatgacggcaatcggctgtacccggcagtcagaggccaaccgtaaaggccgctggggcatactcaccaataacaaagaccgggtggtgacattcaaggtgggtctggatggcaatattccgcagccgggctacatcattgcggtggcggatgaaaacctgtccgggaaagtcaccggcggccgcgtcagtgcggtgaatggccggagtatcacactcgaccgtaaaccggatgccgcggcgggtgaccggctgatgctgaacctgccgtccggtaaatcacaggcccgcaccattcagatggtcacggataatgtgatcaccgttaccacggaatacagcgaaacgccggagccggaatgtgtctgggtaacggaatcagacgagctgtacgcccagcagtaccgggtggtgagcgtgactgagaatgatgacggtacgttcacgatatcggcggccatgcatgatccggacaaatacgaccggatagacaccggcgcggtactcgatgaacggccagtcagtgttattccgccgggcaaccagttcccgccgaaagatatcactgtcagctcttattctgtcgtgaaccaggggatcagcattgaaaccatgcaggtaacctggtcaccggcagagaacgcgattgcttatgaggcgcagtggcggcgtgatgacggcaactggatcaatgtgccgcgcaatgccaccacctcgtttgacgtgccaggggtctattcaggccgctatctggtgcgggtcagggcaatcaacgcagcggaaatctccagcggctgggggtattcagaggaaacccggctgaccggcaaggtgggtgatccgccgatgccgctgaacttccgggcgtccacactggtattcgggatcaaactgaactgggagttcgggaaattcacggaagatacactgaaaactgaaattcagtacagcaaaaccaacgatggtcagaatctgttgctgctggctgatgtgccgtacccgtcccgctctcacgaactggccggtctggccgccggtaccgcgttttatttccgcgcccggctggtggacaaaagtggtaattattcagcatggaccgattatgtcagggggatctctgaatttgatgcaggagaaatactggctgatttgtcagggaagataggccatgaccaattagcacaggacctgctgaccgaaatcaacagtaaagcggacagcagtgtggtcagtgctctggacgagcgtatgtcggatattggcggggaggtgactgaggcaacttctcaggtacaggcgttgtccggtaaactggacaaagtaaaggctgatttaacagagtcagttgttgttgatctggatctgtcagcattaagtgaaaatacttattacccggttattcttcctctgacgacctcccgccgctattacttcagggtatttcgtacactggggcaatacggagataacaaacccggttatgcaactcacggctccgggggctttgccatgattgttgagtggcaggtgagcggttcaggatgggggactcagtctgaaaaccgtattattgataatgttgactggcgatggacaaatcagtctcctgtcatgggccctgcgcagttgactcacagctcggtggaatatgtgtatttacgcggaggcgcaaaatatcagctgaccaggcataaaagtgtcagtcaccggattgtcactgatacttacacaggtaacgggcaatctgttacaccaaaaggttttgtcgccggtgaaataccggtgtccggtgaacagcggtttaatgccacagcaaatgcggtgaaccggcttgaaacgagtgtgacagaggtttcaggaagggtcacatcaacggctcagcaggtgacacgtctggaaagtcaggtcggggcggattcggcaaaaattgaacaaacctcaaaggttcttactgacttaaacggcaggatttctgcatcgtggacaatgaaagtccaactggacagcaaagggaataaggtcattacaggtatcggactggggtttaatgctcagggaaacagtcagtttcttgttaatgctcaaaattttgcagtgatatcgtcactgaacgggaaagtagtaaccccttttgttattcagaacggccaggcattttttaacgatgcgctaatcagccaggcaacaattgataagttactggtcggtaaccacatcagatcagtgaattatgaaacaggccggaacgggtattttctgaatgcgcagaccggaaatgcagaatttaacaatggagtgttcagagggaccctggacggtgtggacggtcgttttacggggacggtatatgcggagagactggtcggggatgttgcggttgccgcttcgtacccgcaggcatccgcacaaaatacacatggtggcgggggaggctggactacggcaacgtctgtaattacttacgcagggggaatgctttatgatatgacgttagtacttccttcgataactgccattattgaagataattccggcagcaatccgcgtccggtatcgggagaactgcggtttagtatacgtgtggatggagttggtcagcaggcaacttctcagtggtcaggacagagtgttatgggatcagctcatgcggttattcctcgtggacgaaagaatgtgaaaatagaaattgaagtgggagtcaggcataaaggcagggcacatgtggttctgagggaaggggttgtgatggccttcaaacgcagttccgcatcattcagatag

SEQ ID NO: 288975 - DNA, 663 bp, Morganella morganii
atgacacagactattcagcagttagcgtttcactcagaccttctgagggcgatcctgtggcagtacgaaggggcggataatctgaaagcgctggcccgttttaaatcggactggtttgaacgggcaaccgtcagcttctggcagaactggtaccgtgatgtgtttaatatcgatacggccaatgatttcgggttgtcggtatggtcccgtatcctcgatgttccgctggggattgatatcccgccgagtgaaaaagaaaaaatcggtatcggattcggcaggaagaaagccaacttccgggcaaatttccggcgcaatgccgattacaccctgtggctgacacaggaacaaaaacgtctgattatccggatgcggtactttaacctgacccaaagcccgaccgtcaccaatatcaatgaatttcttaagcgttttttctggaatgctgacagtaaagtctttgtgctggatccgctcgatatgacgtacatgtactatgtcttcaattttaatccggacgagcgtctgcgcgttctgctggaaaactttgatctgatgccgcgcccgtccggggtgggtgtcagataccgtattgtgacgaaaaaagccttcggtcacggcgaaaaccgtaaaaacttcctggaaagtaacttcggagagtaa

SEQ ID NO: 288976 - DNA, 615 bp, Morganella morganii
atgaatattgatgacatgcttcccgccaccgttgtgagttacgacgatgcgacaaaccgggcggtaattaaacccctggtgatgatggtcaccacggaagggaagaaaatcggacgtggtgcgctgccgaatatcccggtattccggtttggcggcggcggattctttatccggatgccggtaaaaccgggggatttcggctggctgaaagcgaacgaccgggatatcagcctgatttttcagcgcggcggcctggaggatgaaccgaatacggccaggctgcatacattcagtgatgccatgtttttccctgacacgctcaaaggctgggtgatcgacggcaaaaacgcggacgcactggtggtgcagtcaacagatggttctgtgtgcttatccctgcatgccgataaagcggtgctggacacaccgttgtttgaggttaatgcgccggaaaccatttacaccgggaatgtgacaattaacggtaaccacgcggtcaacggcaacagtgattcaaacggcggcaccatgaggcataacggtaaagatatcggatctgcccacaggcattccggtgttcagggagggaacggaaattcaggagagccggtatga

SEQ ID NO: 288977 - DNA, 870 bp, Morganella morganii
atgaatatattagcaattgatattggaggaacaaagatttcggctgcattaatcagccgggataatcaacttacacagcatactcaaattacaacccctgcaagtgcatcaccaactcagctctatgaagcgctggccgcgataacaacaccactaaaagcacatgcagatggtgtcgccgtagcctctacagggatcatctgtgatggtgtattaacggcattaaaccccgataatctggggggattaaaaaatttcccgttgaaaaaaatactctctgcattaacggatctgccttgctggttactcaatgatgctcaggctgctgcatgggctgaatatgattaccgccatgaaaatatctctgatatggcatttgttacagtatcgacaggtgttggtggcggcttgattcagcaaggacaattacaggcaggaaaacgaggtattgcaggccatcttggccataccattgctgatcctcatggcgctctttgcggctgtggtcgttatggatgtgtcgaagctatcgcttccggccgtgccattgcttcacaagctgtaaatgaacttgcagggaaagatgcgaaagctatttttgctgcctatcaccagggaagccttcaggcgaagacaataattgaaaactcagcaaatactatagctaatttagttgctgatattaaagcaacaatagatgccgactgtgttgttcttggtggaagtatcgggttagcaaacggatatattgagctcgttcaaacagctatcagacaacaaccggaggcattacaggtgcctattttagcagctcactatcatcatgatgccggactttggggtgcggctctctgggccagagtaaactaa

SEQ ID NO: 288978 - DNA, 792 bp, Morganella morganii
atggcaaacatgcgtgaagtccgccagttatgtgacaagcacggcatcaaagtgttctacgatgcgacccgctgtgtggaaaacgcctacttcatcaaagagcaggaagaaggcttcgaagatgtctccattaaagacatcgttcacgaaatgttcagctacgctgacggttgtaccatgagtggtaaaaaagactgtctggtgaacatcggtggtttcctgtgtatgaacgacgacgacatgttctctgctgcacgtgaactggttgtggtttatgaagggatgccttcttacggtggtctggccggtcgtgatatggaagcgatggctatcggtttacgcgaagcgatgcagttcgaatatatcgagcaccgcgtcaagcaggttcgttacctgggcgaaaaactgaaagcagccggtgtaccgattgttgagccggtcggcggccacgcagtattcctcgatgcacgccgtttctgcccgcatctgacccaggatgagttcccggcacagagcctggcagccagcatctacatggaaaccggtgtacgttctatggagcgcggtattatctccgcaggccgtaacaaagaaaccggcgaccatcaccgtccgaagctggaaaccgttcgtctgactattcctcgtcgtgtatacacctatgcacacatggatctggttgctgacggtattatcaaactgttcaaacacaaagaagacattaaagggctgaagttcgtatacgagccgaagcagttacgcttcttcactgcacgctttgattacgtgtaa

SEQ ID NO: 288979 - DNA, 744 bp, Morganella morganii; identical to SEQ ID NO: 278807

SEQ ID NO: 288980 - DNA, 504 bp, Morganella morganii
gtgtttaatatcgatacggccggtgatttcgggttgtcggtatggtcccgtatcctcgatgttccgctggggatcgatatcccgccgagtgaaaaagaaaaaatcggtgtcggattcgggaaaaagaaagccaattttcgggcaaacttccggcgtaatgcggattataccctgtcgctgacaccggagcagaaacggctgattatccggatgcggtactttaacctgacccaaagcccgactgtcaccaatatcaatgaatttcttaagcgttttttctggaatgaggacagtaaagtctttgtgctggatccgcttgatatgacgtatatgtactacgtcttcaactttaatccggatgagcgtctgcgcgttctgctggaaaacttcgatctgatgccgcgcccgtctggggtgggtgtcaaataccgtattgtggcgaaaaaagccttcggccacggcgaacaccgtaaaaacttcctggaaagtaacttcggagaataa

SEQ ID NO: 288981 - DNA, 240 bp, Morganella morganii
atgaccggactatttatattaggtatttttgttaaacgtgctaatgcaggtagtgcggtcgcaggcattatagtaagtatcattgctgtattagcagcccgttatggcagtgaccttaactttttcttctatggtgtaattggtgctatgtcagtagttattgttggtacaattactgcgccatttttctccgcagcaaaacaaatttcattggatgatagtgaaatatccgggaactaa

SEQ ID NO: 288982 - DNA, 366 bp, Morganella morganii
gtgctgcgggaggctgcgaaagccgcagcggatatgctgcgggatgaggtccggcagagtgcaccccgcataaccggcaggttagtgcgtaatatcgttaccggcggtcagcggagccgttataaaggtgaggttgtctccggtgtgtacatccggggaaccaacgccgcaggaaccaacagtgataacacactgaaaacggacgacccgcgtaatgcgttttactggcgtttcctggaaaacggtacatccaaaatggcaccacaaccgtttatccgtccggcatttgacggcaaagcggatgaggcagcagatctggcgctgagcaaactcagtcaggctatcgataaggtgctgagcggatga

SEQ ID NO: 288983 - DNA, 1959 bp, Morganella morganii
atgcaacctgtaactttagatggaatgatcgcagcatcccttccttgggctaaagaagtcatcaagaataaaataatcccaataatttcatcacgagttaaagattatttagatgatgttagagccgcgagatttctaaatgacagcatggaaaaattcctttctcgtgtcggaggacaatgttctttagtaaacacattagctttccaaaatacccccgttgaactaaaaaaaatatatgaaccaatttctgtataccatgacaacgagcaatcaaactatgagtgtttgattaataacaagattgacatcttaaattcttataatcatatattaataactgactccgcaggtatgggaaagtcaactttaatgaagcgaattgcattatattgcatagaagaaacgaatcacataccaatttatctggagcttcgtcgcatacaagattatagcattgctgaacaagtaaagaatcaactaggtttaggtaaaaacatttccaatgcatgccttaaagaaattccatttatttacttattcgatggcattgatgaaatacctcaaggaattaaatcctccgtagtcaactctttgcgtgagtttgcagacgatttttcagaaagcaaaataattataacttccagacatgatagcttcctctctgagctgtatggattctcaaggttcaaaataaaaccgttagattcttatcaagcgtatgatttacttagacgttacgataataccggaaatatttcgtcaaagttaatcaaaggtcttcgtttagaagaagggagaaacttcgatgattttctttcaaccccactatatgtttctttattattttgcgcatataaattcaaaccaataataccacgtaaaaaagaattgttttacagccaggtatttgatgctttatttgaatctcatgacctaacaaaagagcttggttacgtcagggaaaaacattcaaagcttgattcaactgacttccatcagattctgcgaagattaggattttggtgtttaaaggaaggtggaaggattgagttcactaaagatgatcttcaaataatcattaaagaaattgcatctaaaataccagggttgactatatctgcatcattattcataaaagatcttatcgaaaccgtaccgttatttgtcaaggaaggtgcaataattcgctggtcacataagtcacttatggaatatttcgcagccatgtttatatgtagggacactaaagaaagacagcgaggaatattaagaacgctttataaaaacgatgagtctataagacataaaaacctttttgaattatgtgcggatattgattattcgaccttccgttcgagtgttataaagaaccttttagaagattatgtccacttatatgaaaaaatcagccaacgatcgatagcaagcaccccaaaagaagtcatttctaaagttgaacttctatttccaggtcgctcactaatttatatcttctctaagggagaagaaaacaaaaccctttccaaactaataaatggagacttcagagagtttaaagagcttaataccaaagatggctacttaaacactacatttgcagatataggtaatgcatgggtagtaattgcacgtaatgaaacaataatctctcatgtattaagcatactaaaagtaaaaaatccagaatatttccatagtaatcatagattaacaagtgatgatacgaatcttacattagaggttcgtcgtgctataagacataatgatgaagtaaagattgacgtaaattttgaaaacatcctaaactgcgatgaaaaaaccaatcttaacttaatttcaggaattttgacttttgataaaactcctcaattaaaatatagaaaagctcttgctgaacttgacaaaataaactttgatgacagcaatggaataaatcaacttttggaaggattctaa

SEQ ID NO: 288984 - DNA, 1062 bp, Morganella morganii
atgcgtaataaagaatacccccacggcttggtcatagccgttcatccatatccgagatatataaatagtgattggattctgcatgagtacatcagcgaatataaggagccctttaaatggaaaagaaggaaagagatacttgaacagtttgattatggattggtgtttaatacttatgaagaagcattgaaggctgccggggcaataaataatttcataaaggaaaaaattagtgagcttgaaaccagtcaagaggtcaaagattcgtattttttaaaggctgaaaaagcaataatttccaggcaaaggcttcaaaatgaagaaaaattaatgctttctgaagctttaaatattacttcatcactgtcaagacccaaagaagatgaagtgattttaaaattaaatgcttatcaacgcgctagtatatctatcaaagatgaactgctacaagagattaatattaacccgctgattgaaattgctcatttgaaagaaaatagaatggttattggaaaacatgcaaacggagattggggtaggtatctctattacaatgaacagaccactaaagttgcatttagagagaagatatcaagagcgtttggattttcaggtcgagatcactggggcagagtaaagtcagaaattagaatacggttattaccacgtgcaaatgaactattacagctttccagtgtaaaaaggatgcttgcagatgctcatgcaaagggtcataaggtattaatggcgggtgggtatgtattttggtatgaagaaactggcgatgttggatgggttattaaagcgactaatagtagtgattcacttaaaagcggtgaaagtatctggcacgaaggaactattatatcgaaaaatcatggtagaatcgttgttttcccatatataaaagtgaatggtgaaaaagtccaagggcatacgaaaaatgcccctcacgacggaaaggctaaaccacgacatccaagtgaatatgttgaattaccattccatgtacttgaagacgatttgatgattggtctttttggtgagcttaaatatgagtga

SEQ ID NO: 288985 - DNA, 555 bp, Morganella morganii
gtgaccacactgacgctacagaaagcctttgaggcctgtcaggcaagcaaatccgcctggctgcaacgcagggaagaactgacgcaggccgaacaggcataccgcgaacagcttgccggtagcggccggagcctgcaaacactgcgcgagattatcgacgtgaaaaagtgggaaattaaccaggctgccgggcgttatatccgctcgcatgaggaggtgcagcgcatcagcatacgtaaccgtctgaatgattttatgcaggcgcacggcgcggagctggccgccgcccttgccccggagctgatgaattattccgggcaacattccgccgttcagcgctgcgccatgcaacactcactcgactatctgcgtgaggcgctacagctctggctggtcaccggtgaaaaaattaattattcggcgcaggataatgacattttaacggccatcggattcaggcctgacgcggcttcgcgcgatgataaccgtgaaaaatacacgcctgcacagaacctgaattacacccgccgccgtgcagaactggccgtgcagtag

SEQ ID NO: 288986 - DNA, 219 bp, Morganella morganii
atgtttcactgtccgttctgcaaaaccagcgcgcattcccgcaccagccggtatctgtccgataacgtcaaacagcgctatcaccagtgcatgaacatcgaatgctcggccacattccgcacgcttgaatccatcgacggggttatacgttcaccggcgaccgagccggttatccctgtacccgcaccggcggccaccgttaaccgtgccggtgcgtga

SEQ ID NO: 288987 - DNA, 618 bp, Morganella morganii
atgcaggaactgaaagagattgatacgtccattgaacgctgtaagcaggagcggcagaccgccctcagtgagagtgcagaggcggagcaggactggcgcagtcgcttccgcaccctgcgcggcagtctcacccctgaaatgaaagctgagcacagcaagcgtatcgccagtcgcgagctggccgacgagttcaccggcctgattgcggagctggagaccgaccggacacgcgccatgctgaatgcctgctccaccgccagtaaatacctgtcagtgcatgacgatgtctttaccgcttatgccggtgcggaatgggctcaggctatcaatgatgttcccgtcgcgctcattcgtgctttcctgctgcgcattcgcgccctcgaaatgaagggagacagtgcaccgcagtccgtggccatcggtgagctgcgcgatgccctcaaccgtcagggcagtctgtatcacttcgatatgaagcaggagccggtactcgccgtgacgggcatgcaccggccgcagattaccggtgtagatatggagctgttacgtagcccggcgaagagaatgatgctcgccagaaagctgtctgaaaatgacggcactaaggcggaggcataa

SEQ ID NO: 288988 - DNA, 360 bp, Morganella morganii
atgactgtttcgggtttcatgttcaggttcaagcgtgatgctgacccgacgtttgatttttgcggctatctggaaatgctgccgcagactaacgggatgtttatgggcaatgccagcatcgtcccgcgcaattaccgtaaatatctctatcacgcgtatctggcctatatggaggccaacggatacaggaacgtgctcagcctgaaaatgttcgggctggggctgcccatgatgctgaaagagtacggcctgaattatgagaagcggcacaccaagcaggggatacagactaacctgtcactgaaagaggaaagctacggcgactggctgccgaaatgcgatgaacccgcagcgacataa

SEQ ID NO: 288989 - DNA, 765 bp, Morganella morganii
atgtattccctgccatcggtgagatcctcgttcagcaaatcaaagcccagactttggttgaccactacacgtggggcgcttgagactgtacatcgactggtgcagcgcattaacgagataatgatctttgccgtaaatacagggctgatcgatgccaatccagcttccggggttggaatggcctttgagaagtccaaaaagcaaaacataccgacactgcggccagaagaattacctaagctaatgcgttctctcgttatgtcaaatttgtctattccgactcgctgtcttatcgagtggcaactcctcacccttgtacgtccatcggaggcctcaggagctcgttgggctgagatcgatcttgatgcaaaaatctgggttattccagcagaaagaatgaaggccaaaagagaacatatagttcctttatcgtctcaggcgttagatattttagaagtaatgaaatctattagtgcacatcgtgaacatatatttcctagtagaaatgaccctaaacagccaatgaatagccaaactgctaatgctgctttaaaacgaattggttttggcggaaaactagtcgctcatggcctccgttctattgcgagtacagtaatgaatgaagccggttttaacgcgaacgccattgaagctgctttagcccatgttgataaaaatgaaattaggcaagctcacaatcgctcgactgatataaaaaaaagagaagagctaatgcaacggtggggtaataaagtacacagttaa

SEQ ID NO: 288990 - DNA, 1809 bp, Morganella morganii
atggaaaattgttttaattttaagcctaatttggcaaacctaagagattgccagaaagatgcgtatttaacggttagagattactttgcagatcccgctaataccgagaagcatattttagtacagttgcctacggggacaggaaagtcagcggtaattgctatatcgccttatgacgtagctaaaggcaaagttttggttctaacaccaaacttgacacttgcaaatcaaattgagcaagatattgatatattcgaaaatcccactggtaatatatataagaaattagggattttttctgaagacttttatacagaaagcgaggcttatcctctgcggttaaacgatagtgttagttcgaatgatatagatgagcatcaaataattatagctaactatcaacagttaaatgacgttgaaaaatggtttaagggtaaagaggaacaggttgatttaataatcatagacgaggctcaccaccaaaaagctaaaacttatcaggaagtcattggctttttccctcaggctaaaattttaagtcttactgcaactccttttcgttctgatggtaagcctctagatggcaaggttgtttatacttatcatttttcagacgccataaaaaatggatacattaggaatattaaggtttgtgatatagctccggaatctatttcattagtaggtttgtttaatgataaggatggtaaagaatactctctcgaagatattcttgagttaaaagaagaagcatggttcagacgtggaatcgccttatcacaagattgttgcgacagcatagcaagtaaatcttttgaaaagcttttggagctaagaaattcaaatccaaatgatactcaccaaattatcgcagcagcaatatcgaaacgacatgccagagagtttgttaagccagcatttgaacgtctgggcttgaaagtcggcttggttagcactgatgagaaaaataatgaacttactatacagaagttaaagcaaggaaaaatcgatgtgatagtcaatattggtatgctcggtgagggatttgaccataagcctttaggtgtggcagctattttcaggccttttgcttctttgaatccatatatccaatttttaggcagagttattagagaaaatggtagtacaaaaaattgctgggttgtttcccatttagggttaaaccaaatatctagattcaatgagtttaaattgtttgatgccgatgataaggagattcttgaaaaacttttgtctggaaagaatactgaaggggtaggtggtgaatcttcttttgtcgatatacaagaaagaaacccaattgaagttacaattacagaaattggtgatagtcttgtggagtttaacgaagattatgtagatctttcaaaagttgataaaattgaaatggcgattgaaaggcttaatgagggcgaggctagagaattattaaccagactcggtcttgatgcaaattcaataaatgctgttacgacccgcaaaaaaagagttaaacctataaataagaaaaaagctgcgcaatctagtttaaatgaagcgtctaaatctattgctgtggatatactctccgaattaaacttgaagatgtacgatagaaactttaatccattgaaaaagaattttgtctgggttaagtcaaaaattgataaagaaataaacaagaagctaggaattaagcaagccgaaagaaaaaaagtgacaaatgctcagtatgatgaattttctaaaagtggtgaattaaatttaataagagaaaactgcttggagtattttaaaagcaagctttga

SEQ ID NO: 288991 - DNA, 741 bp, Morganella morganii
atgacagacattacctatgtaaaattttccgatattgataatatttatcaaaaaataactgcctatgatagcagctatatgcactatgactttacgaattcttatactaatgtcatagattatttcagacggatgcgggatgcgctttccctgggtttcacatatcagaatgacaagattcagagtattgacgattcggccctgcatagtattatctctgatactgataatgtgacagaaagcaccagaaaagagatattgacgattttaaactcattgaattctcacagcactgacctgaatgaaagaatgaataaacaatatctgctggccgacattgttactatgttaaataatgtcaccctttcaaatgacgaactgaccaaattaatccatgaattgaaccagcgtattaatgatctcacggcgagtaaaataccattaagctcaaaagaaaataattattatcttcagagtaatttattcccatctattgatgatctcatcagaaaacttcaggatgaaattaaaattttattatccagaattgaagataataataaattactgaaagttatcgttgaaataaatgaatgcatgttgtcaatgctggccgtgagtgcattatggttacataactcacaacgctttgatatctattttacaccggatgcaaatctcagcggacttgacacgcttgttgctgaacaaaaacaatacttcaccagtttcggcagttaa

SEQ ID NO: 288992 - DNA, 1119 bp, Morganella morganii
atgattttattgactgtttttatggaaaaattatggaaaaaaaaggataatcggacctcgacactgggtagcagggaaaataattacgtgaagatatcaaagctaaacatcattttatttttattattaatcgtgttcataacatcaacagttgtatttaacagaatgtatatgagtcagcgtcaggataataaaaaaataaaatctgcaaatgaaacactgatcaatacagttgttgtcaatgaaaatggtttaaaaagagtcaaaacgggtgttgacctacatctgaaacagctttatgcgaacactgccagggggtgcaacaatgacactgaaccatcatttgtatgctcaggattattagttcatggtttaaggcttcaggaacaagtttcaccatggtcacacagggatatcgataaaaatgtcagtgtagcgttctcttatctccgggatgaccataaatatacatcatctgttgattacagcagtggaattattttgtatccgaaaaatgaaattccagaaacgaaggatagctacacagtattatgtgcatatccgattgatggctggactgacggtaaaaagaatcatgccggagggtgcggtaattataatgaaaaccttattgaccagggaacaaaagacaatattgccagaacaaaactgcttaaagcagaaggtacatgtttagataataatttaaatacagcagaggaatggtttacgttccatcgtaaaaacaattattttgttaacaaatcagatttattatcattatttacctgctcttatcctatggatggtgatgataagcgagtgtcttcatttaatacgttatccgatatccgaaaaggatttgatcaaaatgaagaaattaagccagctaactggaataatgaaatattaatatctgcatgggatgaagaacatccggaacgattacctgtcatggctatcttttatacaaaagataatgtgtcatcactaaatgccgctcttctttatcaacgggcattttttgacaaaacaaatgaaatgatccctgtggttgaaataaaattcccgaaagataaatatgatacagccgagtttaaagaatacattaaaaattaa

SEQ ID NO: 288993 - DNA, 945 bp, Morganella morganii
atgataaaagatgaaattgtaaaaaaagaaattgtacttaatgatgggtgtagccatggtaaatatcatgttgcatttggtgtcgattccgggtttgtaaaagcagcagtggttacgattgcatcttttcttaaaaataataatggttgtgattttaatttttacattctgacatctgagataaaatctgatgatttaaaagaattgaataaattcagtcaatcaggagtgaaaataacggttatctatattaataataatatttttgataattatcaggttaaggagaatctgccaagatcaatgtattaccgattgcttattccatatgtactaaaagatattgcagataaggtattatatattgatgcggatacattatgtcttagccgggtcgacgatttattcgaatcttgccttgataattacattatagcggctgttgaggatagcggtgaagcagccattgatgcaaaactatctggcttattttcggatgggcggtattttaattccggcgttatgctgattaatataaaaagatggctggaaaaagatatttttagtttgtttaatcaagttatacacagtagtgactataaatatcctgatcaggatgtgttaaatataatattaacggataatattttatttttagataaaaaatataatacattttacaataatggtaattatgacaaagataatataagtattcttcattttgtcgggtcaccaaaaccctggatgtcatggtgtaaaaataaccagttgtatattgattatttgaagttaactccctggggcgaaaaaagtgttgatatgcctaaaaattataagcaatgtaagctattatcagcaaagctgggtaatgaaagaaaatatataaaaagtgcatattggtatataaagtatcttatatataaaattatgaaaataaaataa

SEQ ID NO: 288994 - DNA, 1146 bp, Morganella morganii
atgaaaattttacatctgattaatttacaaggattcggcggtgcagagcgcctttttattgagtatttaaaaaatagttcctttactaacgaagtgctttgcagcagtaatcagataaataaaaatattatttcagaattgaaatcctataaaatcatttatgcaaaccgtattggcaatacatccgttaagtatcctgcatttttgagaaaacatatattaagcagaaaaattaaccaaaggaattcggatataacgttagtctgggattttgtcccgaagctaaataaaaaacctgaaaatggtgtttttctgtattatgaccacggatgttcatggcgttatccggacaataaaaaaacatttacctttttgaatatgctggatggtgctatttcagtttctgtggcatcaaaacggattatgcaattacgattcaatcctgattttaagatcagtactgttattaatcggttacctatgaaaactgctgtcagttctcatactcctccgataaaaaaggttattctgggaaccgcctcccgtctcgttggcctgaaaggcatcggtgtttctattctttgtctgaaagaattaatagaatcggggaaagatgcagaactgattatcgctggtgacggagagcaaaaatgtcagctggaagaattagctgctaaattaaatatttctgataaagtcaaatttaccggttatcagcataatatggaaaatttctataacagtatagatatctacctgagcacaccagtgacagaaccattcggcttatcctgtattgaagctttatcacaaggtatacctgtaattttcccgttaatagacggacaaccggaagctgttaaagataaatactgcggtatcgggataaaaccgtcattatctgttgaaaaatatcaggaactgaccggtttgcctgttgatttcccctatgatgtttatgacccggtaaatgattgtctgatgactccacagttatctgcaccttcagatatagcaactgcggtcagtgatattatttccggctatgaaagctacagtaaaaatgcagtagactggtctcatgataccatgaattactactcttttattactgagtttgaaaatacacttaaaaactttaagtaa

SEQ ID NO: 288995 - DNA, 840 bp, Morganella morganii
atggatattttttacgaaaaaaagaaagatgattactacttaacaatggcaggtatatttgttgatggcataaacaaatcgtctatcagagcatcttctttttatttaaaatcaagcagtgttatccattcatttattggtgaaataaatgatttttgttcagagagatatcagatatgcaaaagtgaacgaacaacaacaaatgaaaagcacaaagcattagctgaactcagggaagaggatattattcttaataatgaattaatttccctgcaattaaataatttcagtaagtatctctatctggaagtatctaaattaaacggtgttgttacatatgtaataaaaggtcttgctttcgtcgggggtgtcggacaggttgctatggggttgccattaatatttgctcccggaattaatggtatgggaggggccgtttttggtgtggcactcgttgctcatggtgcaaataatatatatgagagcattcgtttttttaccggtactgaaaattcagttggttacgtaagggatttctatcggggaacatctaaggtctttgggggggatgatctgttaggtgataagatctatgctattgttgatataggattatcattgcatggattattcagtaaattttcagaaccaaatgcaaattcattgatttcaataagtaaatttggtccattaaagattaaaaattatgactctcctcacacaggaagaatatttaaagccgtgaatgctgattttaaaatgggaatacaaagagcatctaaattagcattatctatagaaatagccaatgatttccttagctttagaactatttattaa

SEQ ID NO: 288996 - DNA, 324 bp, Morganella morganii
atgcgttcaatgaacaggttactgcttgaagttggttataagcgtagtgaaatacatcagttcagaaaattatgtgcttctgcaaatgtcgattttgataaaaaaataacagaaacggcaaaaaaatcttttttctacaccctgctatttatatttgtagtgacaataacaataccactttcctttatatccaagccaacaaatgacctttttttcatgatcctaccatacatattatttggtttatttagccttttatttaaaacaacaagagaatatttaaaatttgcccgtatttatctaaaaatgaaaattaataaatag

SEQ ID NO: 288997 - DNA, 396 bp, Morganella morganii
gtggtgccgggatgtgcagccattgaatccgatatcgctgagccggaagatggtgaccgcgaagagtttatggctgaccccggcatcgaagaaccgggtctgaaccgtgtgatccgggccggttacgccctgctcaacctgcagacctacttcaccgccggtgtgaaagaagtccgtgcatggaccatccctgtcggcgccaccgcgccgcaggcagccggtaaaatccataccgatttcgaaaaaggctttatccgcgcccagaccatcgcatttgaggatttcatccggtacaaaggcgaacaaggtgcaaaagaagccggtaaaatgcgcgcagaaggtaaagactatattgtgaaagacggcgacgtgctgaatttcctgtttaatgtgtga

SEQ ID NO: 288998 - DNA, 150 bp, Morganella morganii
atgattgacctgattagcaatgcgttaattttatatttaatttatatgatttcattcttgattataaatgcagatgaactttacaatattatttacctgcaatataaattctttgcactaaataacacccatatattaattcatacctaa

SEQ ID NO: 288999 - DNA, 756 bp, Morganella morganii
atgcagccagtttcaacagggcagaatgtcagattaaccggttatatttcgtatcagggaactgatgctatgatcgatgacttaaaagaatcagcatccgtaaaacaatcgggtttatctgagcggttcactgagatccgcaacagtgcagcagagttttttacagcagtgaaaggcaaaataaataatgtgtttgagccattagggaacctgataaataagatagcaatcagggaagacaaaacgcaacctgatgcgaatcagaatgtacggatggcgctgaaaatagcgcaggaaaacgtgccgatctatttagataaaatcaatacattcatgggagaaaataagcctctgactgccaattcgctgaatatattctcaacatacacactgagaccattagtcacatttatgagctgtatgtataaagtaaaaggtatagataaagtagcagagttattcatagacggattgattaacagagtaaaccgcgtgttatccggtgctgtcggtttcggtctgaagcctgatgaaaaagtagatcagctcgggtcaatcagtgatgacggaaaggcagcggcttatttagccacagagaattttgaacagaatttcaacgcaagagtaatggagttggtgaaggatattcaggaattgattatggctgacctgatggatctcagacctgaagaggtcatcgcccgggagaaaccgcagactgagaataacgcctggcgccggttacctgataactga

SEQ ID NO: 289000 - DNA, 387 bp, Morganella morganii
atggcacagacagcattgttgtcagggattgtgcaggccttaatgaagcaccagggacgggctcagcgggatagacattatcccggctggcatacagcgccggtgtgcggcctgatgaatgatccggccggatttatttatcacagggggctctggcacctgttctatcagtgggatccgtttggctgcgaacataaatatccgtgctgggggcactggtcttcagcggatctggtcagctggacacatgagccggtcgcgctgctgccgtccggtaattatgataccggcggctgtttttccggcagtgcggtggtgaatgatgacgcactgaccctctgttataccggcagtctggtgtaccgtgacgggtcacggacattgtga

SEQ ID NO: 289001 - DNA, 756 bp, Morganella morganii
gtggatctgaagcggtttatgtcggatgtggattttgcatttgatcatgatttttttgagaaggttatttatatcaatctcgcatcacggccggatcgcaaattcgatattctggaagcgctggcaaatattgaaattccgcaccataaaattgtctgttttgatgcggtcgcgaaaagtccgggatttctgggatgtgcactttctcatgtcgcagtgatgaagatgattatcgacaatgactggggaccggtactggtcgtcgaggatgataacaatttttattatgatgatgagcatatccggcaggcgaatgtttttttatcggctttgcgggaaagagactgggatgtcgcgttactgggcggaaattattatcatgtctatgagcatgaaccggagtggtattcattgaaactgaaatattcacactgtacaaatgcctatattgtgaaccggggttacgcagagacactgtatcaggccttcagtgagtctgtttgccggattactgcaggcgatgaaccgaatgaatcgcacagtattgatgttgtctggaacgagctgatggataaagataactggtatggcttatacccgtgtattgcctatcaggaagccggattttcggatattcgtatggcaacactgaattatgaatatttgtttaataagccgttatcagatctgatattctttacccgcgatggtcatgtaaaaaaagcagaaacatccgccggcgcggatgtttcataa

SEQ ID NO: 289002 - DNA, 1194 bp, Morganella morganii
atgagtgatattagccagttagatgctgaaatggttacttgtccggcttgcggcagccaacatgattctggggtattgtgctcttgtagttatgaccctgaactggaaacagtaacggagggggattattttgcagaacatgcaattacagctattttggaaaaacaaaaaacgcctacagggtttgcatttgaaaaaactattggtaaagagtggactctagattctgaagatgttttaacatttgtttctcaagttaataaaaaatttagattaaagcgaaaaatacatggagtcatggataaaaataaattgccacttagtccaccttcagtatttgagagttacttgtctaaggggctaagtttttctgaattcgttgatcgtacaatgggattgatgaaaagagaagcgaatgaagataaatctaccttggtaggtggggcaattgtctttattcactatggtattaataatgataaaaataattttggtaatctgctggttttaatggttgataaaaaaggtgtttttaattttgataacgatttaatgccagagaaattagtatcggttgatatagattctttaagacaagcagtatcaattgatttggatttgtttaaatcagaatatatcaaagataacaataatccatatttacattttattagtggaaagtcgaaaagtgagttttttaagagagggctaggatgtaaccctaaacttgataacaatagaagtattgtagaggctaaaaaagcagttaatgattttttaaaaaaaattaaagttaagcctgttgataaaataaaagttaataaaaatattgagaagttcattgaggctaaatcaagagataaaaatgataaaaagaccagccttgatgatttaggcaagtgtattgcagattcattacctaaaaacagaaatatcatcaaacgatttagtgattttgtggatatgggggattattccattgatgaatattttgagccaagcgcatcatcgaaatatgaatttagtgaaataaagataatagatgaagattttgattatgaggttacatttgatattgaaagtataagtgatgatgaaaactcagggaaaaagataatttataaaaaaaatggttatttactcgttaaattgtctaatgatggcattagaaaaatagaaaaatatataaagtaa

SEQ ID NO: 289003 - DNA, 1167 bp, Morganella morganii
atggataataaaatagagagatttaggcaatttgttactgatttattttctctaaatatagagcaagatgatgaatatgttatattaacatcagaagataatagtattaactgtcatgaattctctattgtttttagtgaattttgctctgcgaaaatagaaaaagaaggctcatctgataatcaattaattattagctctagaattaatagatatgatggtgattattgtgtatatttgtcattggatagatttttaacagaagctatagggaataaaaaggtacctaataagtatgttattttgaaagaaaaaatatcttcaatagatgatactggtgaggtagtaaagaaaatatcagtttacctaaagtgggttgatgtacttaggggtatttcaaatcatgcaatagataagaaatatattatatatatacctgatgagagtggtggtaaagaaattataatagagtcatctgatcgcttggattttatttctgatcttatttataaggtcgattctgataatgcagctggtgattttttaaatattctaaatactaaagatcttcaatcggatgagcacttatatttaatgagagcatccatatgtaatttcttagaagaaagaaatgatagtagtataaagtcaataattgagatgggagacaaagtacataaacgatataaggcattattggatttatataccaaaaaattctctgttaataaaatactatcagagattgaccaaaaacagttggaatatacagcaaaaataaatgattttatatcatctagccagagtaaggcatttgctatacctagtgcacttattgctgttggtggtctggcaaaaagtagtgggttattagactctatattgatatatattggtttatgtcttgtttatgttgttacatatatatcaaatgacgctttacgcgagtcatataattctatggtagatgagttggatgggttaaaacaaaagtatattgagttaaaagatggcgaagaagttaaaagtgcagtagatgatatgttgcgtaaggttaaatttaaaatagccggtgctcagaaaagaataataaaaataaatttcatgagtgcggttatggttatagtaggtggtatgtatttagttttgaaattatttcattcttaa

SEQ ID NO: 289004 - DNA, 450 bp, Morganella morganii
atgaatttagataatttgttaaaacaaatagatgaaaaaaagagcgaaaatgaagagtttgaaaaggaaaataaacgacttatttcggaaaacaaggagttttatcaaggtgttatcaatgagttaactccgttggtaaatgaatatgaatcaaagttagccgaaataggcattaaggtatctgctactgtcacgcctcatatgatctcttttgagttaaggtataaagataactcatacagcaatttgttattagccccagatatagattctgataaatatttttgcatcacgacaaatggtaatgatagcggtaacggcaaaaattatactataagcaatggcgctagatatgggaaacataattggaaaaatgagatttacatcgaagcattagaaaagcacattaaagacttcattttttactcagataggcatggtgggttttaa

SEQ ID NO: 289005 - DNA, 384 bp, Morganella morganii
atgaacaaatatcgtgacaaatcagactttgaaattaataaggctgtggctgattgttatttgacgcgggaatacagattcaacagtgccgataaaatcgttgaacttatggatatagatttgtcttgtgagtttggcggtgaaattaacctaaaagataagtacgtcactggcacgttcgacccctgcaacaacccggaggacgcaatgccgattgttattgagaatgaaataagcatgaattatatcgataagaatattggctggggtgcgcgccattttgatgaagaaaaaggcgaacttgaaatttacggtaaaaactattatcgcgctgctatgatttgtttcctgatgatgaaggatgcggagaatgaaaaaatatga

SEQ ID NO: 289006 - DNA, 261 bp, Morganella morganii
atgaaaactgaatacatctatatctgcgctcaggcgtactgcaatgaccatggttgtggcatcgaatattacaccgaccatgagcgctttgataatcgaaatgacgctattaaaaacggctggaagcaacgggaatcagatgagtttaatatcggtgtcctggttaacggtcgccttgtttcattcgattggatggctaaaccaattgatacaaatccagaaacattacggaaaatcgaagaccagcttgagctgtattaa

SEQ ID NO: 289007 - DNA, 144 bp, Morganella morganii
atgaaaataacagtagatgtgacagaaaaagaaatgatggacatggaaatatcatcagctgaattacacacattcatcattcaggctcttgatgaatttggtgatttttgcggattcgatgttgaagttaatgtcactgactaa

SEQ ID NO: 289008 - DNA, 366 bp, Morganella morganii
atgagcaggaatggtaatcacaaacctcggatagagaaaaaagtaacaaaatcagcaatggagttactgattaagttgctcccaagtcagtatcggaaagaagatttttatttggacgatgaatgtaacgaatggcatttcggacgggctgactattggggggagtttgacgcttacgatgcattttatgaactacacaaaaacctgatcactgaaaccactgattgggaaggtgtgttcagagctggtgaaagtaatggcgatgaagccccatattattcaccgtggagactgagtaagaaagtgggtaggcgcgaggttatttctcattgccgtaagcttgttaaggctggcgttgtttggtga

SEQ ID NO: 289009 - DNA, 225 bp, Morganella morganii
atgaagacagcactcggagaaatgattaaacagcaggtgttcgataccaatgttgaccggctggtttcgctcagcgatgaacagtggaactttatcctgagcgaccaagatgagcacgcatggtctggtgggcactactacggacatcactatcatgaatgggacatacttatcgctcacgatattaaatatgtgaaaacaggattacgggagccgctgatatga

SEQ ID NO: 289010 - DNA, 351 bp, Morganella morganii
atgggcaaccagcagccacagcagcatttcccgctcagccagattgcagacgcagctgtgcttgtcattccgcagcagcattccggctttaatgaaagcgttgttcagttgagtgtctgtgccttttgcagatgggtaagcctcgcggaatttatcaacatcaaaaaccacaactccgtcatcactgactttcgcctgctgactgcgatactccatcagactgcggttcataccccaccttattcctcggcggttttcacgccttcagtattctgtttcattttttccgtgccggatttttgcgctgctttttctttcgattcagccttggaatccttcactttttcgtga

SEQ ID NO: 289011 - DNA, 819 bp, Morganella morganii
atggatgacttatataatggtggttacaatggaatttgtaatggtgaaataagagtaacaggaggagcggagacaataaaactcattgattcagctttaaaaaataaagcaagaatgtttatgtccctgattgattaccatcaaaaagtaataaaaacagataaggatacttcctttttatgtttttctcttttaatgggttcacataactccggagcaaaagcaaatgcctgtgaggatctgtctgtatttagagtgtttcttaatcttttcttcaataatataagatcaagagcattttaccgggatcatgtaacaggttacttctgggtgttgttgcaggattatgaatccggccaggtttatgcacatgtaaatttttatgttaacaaaaaaaatttcaatgatttttttgcaagggaaataaacagctcatggtataatatattaagaaagcatgattacaacggagaaataaaacatttcacaataaaagagggttttaataacggcaatattaataaagaaaaagacagaaaaaaaagcggtaaatttaaatataaagtatgcaggagatattgtactgacagaactattcgttattcaggagaacttattttagattttaacagtgaaaattattacggtgaatatgcgttcacgaataatcatgatgaaatttcatttggtcattatgttggatcactggtaagaaaagcctgttctctaccggggctgcgaagttttgatactgcatcacctgctatggcactgagaaaagcactacaaaagaaggctaaacatataatggaaaaataa

SEQ ID NO: 289012 - DNA, 915 bp, Morganella morganii
atgaatttagtttataaatataaacggggagccatggtgaatattgaatgttattacagtgatcctgagtctggtttttgtacggagatggtaaataaacaggtggccgatttactgtcagtgatgacaaaaagaaaagaaaaaaaacagtgtgataatgatatcccggtaatctgttcaacagttcaacattattatgacaaatgttacagtggtaatctattatattttattccaaaaaaagaaagaggtgattatcattttcgcgacaagagtgatgctattatcaccttggtctcaccagcagggaagataaaaaaaataatatattcaaatacgttacctgactatattttatataaaaatacggcagataaataccctgatacgcatcctgaggatgtgatttctgcaaaagaaccgaaaagcatggcagcagaaagaagaacggtggaaaacatcccggaatcagcaaatattccggagacagaatacacatctggaacagaatacacaccggagacagaatacacaccggagacagaatacacaccggagacagaatacatgacggcagcagatatgacgccggagtttctggttttccggctctccggcgccacaccggagaaaaagagtctcacgttacggtattatgagcaggaaaagggggcgcaggaaaaagccgctcaggttatcggctataccggaaaaaatcaggctgtcccggaaaactgcagacctgattattattgttcttatcatttcaggcagaaatatcagccacctgaaccggtgtttatttaccgggaaaagccggggcggtttaaattggaaaccggttcagaaccgcttagccggcgactgaaaacgatgaactctataaatggaattgatagtgttgatatattataa

SEQ ID NO: 289013 - DNA, 144 bp, Morganella morganii
atgaattttttaatcagtgaaaaggtgttgaaaatgttagaggcacgttacggcagcggaaaaacggaagttgtgcctctgtcccggtcagtcgcttcaacttttgttgaaagccggatcgcaggcaataaaaaagcgccctga

SEQ ID NO: 289014 - DNA, 1182 bp, Morganella morganii
atgactgataagcaaaccattaaatttggtgatatttgccgagaagtaaagcttaccactaaagacccgattgccgatggttatgagcgctacattggtttagagcatttggattcagattcactcaagataagtcgctggggtatcactgctgaagataacccagcatttacgcgtgttttcaaaaaaggacatgttcttttcggaaaacgccgtccttacctaaaaaaagcagcgattgcagagttcgatggtgtttgctctggtgatattattgtgcttgaaagtaaaggaaatgttgtaaataaatctctacttccatttatcataacctcagaaagtttttgggattgggcaattagaacctcttcggggtctctttcgccgcgcactaaatttaaagctctttctgaatttaaaattaatgaactggatagtgcaacccaaacattatttataaagatactttctttaatttcacacataactgttcaaagaagtaatgtaattagctttctaaatgatttttttgagatcctgataagaaatgagctttttgaattaaatgattccacaatattcaatgcaaatagctcaattgtaaaaactggcctagtagacacaaacttaggaaatgtactgctggatatagttgattgtgaacataaaacagcaccttacagcttagatgagactgagttcttggttataagaactaataatgtaaagaatggaaagattgatttcgatgatataaagacaaccgacaatgacagtttccgcgaatggacaaaacgtaagattccagagcctggcgatattatttttacaagagaggcacctgctggagaatcttgtcttattccagagaaattaaaaatttgtttaggtcaaagaacggttttattaatacctaataaggaaaaaattcttccggaatttttatcaagatatctaaatacgagattctgtagtcattatataaaaaaatatattgttggtacaaccgttgaaaggataaacataggtgatatccctagaataagattgatacttcctgatatgaataggcagaggaagctagttgatttgattaatagactagaattggtgttagaggttagccaaagttcattaaaatcaatatcgaatatacggcaggatttaattgaaaggatttaa

SEQ ID NO: 289015 - DNA, 354 bp, Morganella morganii
atgaaatcccaaccagaaaaggaaaaccctgagaagtcaggcggtatgctaaatagagaagaaaagaaaatactgaaagagctaaaaaacaatatattatttgttaatataaaatcaagtatttcatacacactcaagatagtggtgatatcatttattgctggtatttttatgcaaaaaaacaacaacgccacacttatttcagatatcaccatttctttgttcatatcactgctaatatacataactatgtctgtatttctttttaaaaaaacaacattatgtataaaactgacaatcatttatatcaaaataaaagtcaaaaaattagtcgtccgagtcttcggaaagtaa

SEQ ID NO: 289016 - DNA, 1488 bp, Morganella morganii
atggaaataacatccgatcagaagcggacaatctgtgtcatgctggctgaacaggccggacaccctgtccgcagcgcagaaatcacggccttgtgtgatgatgaaaccatccgcgccgcactgctcgtcctcagcagtctgattgacataaaatatcgtgaagtatccgccgcactggcggcggccagcgctgaacatgaacgcaataacccgcagatgatgatgggcagtgcgctcgctgacagcacactttctgcgccggcggatatgcctgtctcacagccggacaccgctcagaccgcattcccgcctgctgctgaaccggacctcctcattgttccgcctgcacctgaagggccggttatcacggacaacaccacggttacagaagaacaggcttctgcagaaattgaccgtttatccgcaatatttggtcagcatgcttttcttccggatgagcccgcagcgactgaaacacaacatttatctgctgaggatcattcggcagagttgacttttgtctgcaacgagcctgcgccagccgaccctgcgataccaccggctgacaacagcaccacagaatctgccccggcatatgctgaaccggtgataataaatcagttttcaacaccttctgatgatgaatccgcagagttcacctttgtatacaacgaacctgcggcagcagcatccgttacaccggcagccgcagacaatactgcactgaccgcctctgtattcagtgatagatccctgtttccggaacctgctgccctcagtgatccgctgaaagacggcaactggctgtttgacgacctggataccgatgacactgataccccggtaatcggagaactcccggaaccggcagaaattgcagcaggcgatgacattgttgccgccccgctgaccacagacacacctgccggatcaacccgtgataccctgcaggataacagctggtcattcagtgcagatacaatccccgctccgttacaggcggaatctgcagaacagaagccctgggggctgacggcgctgtttgctgcggggaaagagaacattccgccacaggcaacagcggcccccgtcagggagtctgcggaagaagacgctgttacacaaaacacctctcatgaaaataagactcctgcaacaatgccgccaccttccgggcaaccgggaatccgggtcaacatcgcccgcgcccggttgcttgaaccattcagttcaccggtcaccgcaacactggatgacggacgggaggtcactatcctcggtatttatttccagcgcaatatcggtcttagttttaacgataaaaccggtattctgcacggtacccctacagaatacggtgagtttccggtgcgggtggtatgggagctggcaccgaaaaaacggttttcctccgacatacattttgctgttgatcccggttcacacatttccacaccggcaccggccggcttttctccggtacagtaa

SEQ ID NO: 289017 - DNA, 828 bp, Morganella morganii
atggcgggtgcttatcgcctgaatgacaatttcagtttcggcctgggcctgaatgctgtttatgctgatgccgagatttcacgtcatgctggtgaggctggtgcctatggcccgatgattgggttacctgtcattcctgcaaacacaaatgcatcaaaactcgaaggtgatggctggggctatggctggaacgcaggagtgttatatgaactggataaagataaccggttcagcctgacttatcgttctaaagtaaaagtaaaattcaaagacggtgattatactaatgaccttccgattatcggaactaatggtcaaaccgtcaaaggtaaactggatcttaatcttccggatatgtgggaattatcagcatatcaccgtgttgctcccaaatgggcagtgcattataccttcgcctatactggctggagtgagtttaaggagctgaaagctgtaccaaaaaacaacccgggcggaaaacctttattcgaaaaacatgaaggttttgaaaatgcctaccgtgtagcattaggtactacctattaccacgacgataactggaccttccgtggtggtgttgcctttgatgacagtcctgtacctgcaggtaaccgttcaatctccattccggatcaggatcgtatctggttcagcctggggtcaacctacgcctttaacaaagatgcctctgttgatgtcggtgtcgcttatatgcatggccgaaaagttaatattgcagaaaaagcagaaccattgccgctgacatacaacttcagctcctccggcaaagcctggttatacggtgttaactttaactacagcttctga

SEQ ID NO: 289018 - DNA, 543 bp, Morganella morganii
atgaggagatcagtacttgtgaaaaacacaatccctcatgggaaaaatatatcaaagattttgctgaaattgctaataatgttacacttccggataataaattctataaaaaatacacaggaaataaaacgatttatttcacgatatatatcatcattcccgctttccaatgcgaaaaaaatattagccctgataaaaggaaaaacactggagataaaaaaaggggagaaagacgatttctttcttaataaagacaaaatagcctgcaagactgaccagagagaatatgacggaattatattatcttccggactgacaaattcatttctgaagaaagataacaacctctacactatcacgtcatccggcgatgatcatgataaagagataactccggaagatatttccgcattaaataaaaacggaatctggttgtcaggctcattactaagtaatcattatccattagttaactatataggattttgtgttaagcaggcatttctgttttccgaatcagtaaaagaacaaatatcagcgtga

SEQ ID NO: 289019 - DNA, 252 bp, Morganella morganii
atgatggaaagtaaccggaagtcattcctgatgataaagaagaatattattaaaaaagcaatcaatgacctgaaagatatacgattgtggtccatgaatatcagtatgctactgacgccactgacgatcacgcactcgtcacttcgcattgtcagaccggacaatgtgatgactgatgtctttcttgcccttgttatttatgcggggttttatgttctgataaaaaagatactgtattttatatttaaataa

SEQ ID NO: 289020 - DNA, 690 bp, Morganella morganii
gtgaaaaaaactctgctctggtgcgcggcattttctgcattttccgcgcaggcctcttcttcctgtcagtcgctctcagccccggatgagaaacagacgatgatgattaccggcacgtttgatcacaacggccaggcctgtgtgcagttgccgctgtctgaaaaacaggttgtgatcgctgaaagtgagaatatccgtgatttgtcactctatgacagtcagatgacaccccgccggacgctgcttaccgacaatcctgtcacagaaatgcaatctgtgacatttacattaccgtttgatgacacctggacgctgacctcacagggggtaccgggctctgaatggaagttggcgcttactaactatccgtatcagccgctggttgaaaacctctccctgccggtggacagtgttcgcctgcagcagctgataacgctggttaacgggggtgatacctcggctttctggcaggcggtgacagaaactccgctggttgaggagtatgacgagcaccacaaacggatcactttcctctggcgtggtgcaaaagtgaatgcttacatacttggtgcaccttccggacagcatgatccgatggccagactgaatgataccgatatctggtatcgctcctacattgttcccgcagagactgtcagccagtataaaatcgccccggatattccgtag

SEQ ID NO: 289021 - DNA, 192 bp, Morganella morganii
atggctattaaaagattttatttttcgcagctcgccgacttaagaatagaaggtgttggtattcatgccagttacgcaatcacactaatagtaaatgaagaagatagtaataacggaaagagaataagcgtgtcagcattaggtaaaagtaatgcggcaaaagcagcaggtttcggtaagttattattctga

SEQ ID NO: 289022 - DNA, 1497 bp, Morganella morganii
atgaaaaaaagtatattagctttaattatctcacctttatttattcataccgctaatgcagcgcgtacggatgttgtacctcttccgcttgcaaaggaaattggtgcatcgctgttccatttctcggctgataaagcggtgggtgatcgtgaggttgggatctctgagttagagcaggtcacagagcgtatcggaacgcacctctctgaagcctatgaatatattgatgatgtcagaaaagacagtgaaacgagagacactgttttagagaaaaaaataacgcatacccatcaggtggcaacaagtacccaaaaattggttgatacatttatcgatgacgcaggaaaaaaaatagtccctgagcatattaaccgtatcttaccggatgcaattaaaagcgaattgtcaccgctggaagaacggactgagtttttagaaaataaaacgcaggcgatgaatgctcagttggatatcacagccagaaaagcggagcataacaatacacttatcggtacccttcctgagcagattaatcgtatcttaccggacgcaattaaaagcgaattgtcaccgctggaagaacggactgaatttttagaaaataaaacgcaggcgatggatgctcagttggatatcacagccagaaaagcggagcataacaatacacttatcggtacccttcctgggctaataaaacaagaagttgagaaaaaatctgaagcacatcagaattatgttaatgaacagattatgccgctgaaacatgcgctttattcaaatgagcgtctgttacgcgaagagcaggatagcgctaaatcagccaaagtcgtcactcaggcactacttggtgcaacagaagacctggaaactgacgttgataagctgaaaaataaagtccttgctgtggagttgcaggccggttttgcaaaacattcggcgtataccagtgagaaggatatccgcgaacacaagaatcaacttagcgcacagtcccgggatattgcacaaaacaaaaaattgcttgaatccgctaaactggtaacctccgctatcactgacgctacgttagcgctggaagcggatgtggcgaagatggatacccgtatcagtaacgcatcgaaaaaagccggtacggccttaaatgtggctaatcaaaacacaaagagtattgatgggcaaaaagtaaaagttgagaaaaacacgctggatatcctgaaaaaccgccaggatctgcgttccctggaaaaggatttgcgtgaaaccaatgagcgtcttgataatggcctggcggccagcgcggcactgaatggtttattccagccgtacggtgtcggcaaactgaatatcactgcagctgtgggcggatatcaatccactcaggcagtcgcagtgggaaccggttaccggttcaacgagaacatcgccgtgaagaccggtatggcatacaccggttcgaacgatgtgatgtacaacatggcttttaaccttgaatggtaa

SEQ ID NO: 289023 - DNA, 357 bp, Morganella morganii
atgaacaatcattcagaatccggtaccaaaccggagaatattacctgccaacagtggggactaaagcgcaggatcacaccctgttttggcgctcgtctggtgcatgaaggcaaccgcctgcattttcttgctgaccgggccgggtttaacggtgctttcagcgacaaggatgcgttgcgcctggaccaagtttttcccctgatactcaaacaactggaactaatgctgaccagcggcgagctcaatccccagtataagcactgcgtcacgctatatcacaatgggctcacttgcgaagctgacacacttggtagttgcggctacgtatatatcaccgtttacccaactcaacgctaa

SEQ ID NO: 289024 - DNA, 645 bp, Morganella morganii
atgtttgctgattttggtgtcgtcaatttctggacgtacctgcttggtgcgacgctgatagtccttgtgccaggccctgaaaccatgttcgtgattaaaacgagcattaccagcggcatcaagcggggctttgctgcaatattttccattctgctgagcgacgttattctggttcttctggcatggtgtgggctggcggcggtcataagctcaacccctgccttgtttaacgccatcaagtacgcaggcgctgcttatcttttctatctcggtgtccagacaatacgcgctatctttaagccgactgtcgaaacgagtgaggaaaagaaatcttcagctgataccggggggatcatcggacgcggaatgctggttacgctattgaatccaaagacgctgctgttctatatatctttcttcgcccagttcattaatgttcaggctgaacactcctggatggcttttatcattctggcagcagtaatgttcgcaattactctcgtttatttcggctttctcgttttctgcggctcttatctgcttagccgtcttaaaggcaaccgacgtctttctgcaatcggaaacgcgctggtagggatgttcttcattggatttgcagcaagactcgcaagcgcaacttcctga

SEQ ID NO: 289025 - DNA, 393 bp, Morganella morganii
atgttttcttatgtgatgctgggtactaacgatctaccacgcgccatccgattctacgatccgttgatggaattgcttggacatccaaaggcaggccgtaatgaagaaggcgcatcctgggggacgttcagcaataaccataccatcggattgtgcgtcggcaggccctttaaccagcaaccagcgagcgttggtaatggcacgatggtggcgctgaacgcccgttctattgaacatatcagacagttgcatgagcttgcccttaatctgggaggcgcggatgaaggtgcgccggatcacaggccgcaatacggacaaggattccatagtgcctatgtacgcgatccggacgggaataagctggcgtttgtgttctatgccgatgagggttga

SEQ ID NO: 289026 - DNA, 477 bp, Morganella morganii
atgcaaataatatcgtcaagatgcatcattcgaccatttcagtcacacgaaattgaaagttttatggtgtatcgtaatgatgctgagtggatgaaatatcagggatttaaggggctaacaaaagaggactatgaagcagagttgctgggagttcttacacctgctcgcggtattcaattggccattgtcaacaagctgacgcaggttttgattggtgatatttatttacgtcagcaatgcgatgtgttttggctcggctataccatcagtcccgcttatgctcgccagggatatgcaattgaagcaattaccgccacgatcgactggataaaagagaacggtttttcactcatcaaagccggtgtgaatccggaaaataccctttcaataaaattacttatcaggattggcttcaacttttcaggcatcgaagaggatgagcatatttatgttctggatttaacaaaaggagaataa

SEQ ID NO: 289027 - DNA, 258 bp, Morganella morganii
atgaatttatcccgtcaggaacaacgtacgttacacgttctcgctaaaggtggacgtattgcgcacgtccgcgattcttcaggccgcgtcacttccgttgaatgctacagccgcgaagggctgttgctgaccgactgcacgctcgccgtcttcaaaaaactcaaaaccaaaaaacttatcaagtccgtcaatggtcagccctatcgaatcaacactaccgggctgaataacgttcgcgctcagctcgataatcgctaa

SEQ ID NO: 289028 - DNA, 552 bp, Morganella morganii
atgacagcacaccacttcacttttcaaatcacagatgaaagtgatgccagtgatatccgggaagtcgaaacccgcgcatttggcttcagcaaagaagccgatttaacggcctctttacttgaggatgaaagcgcgcgccctgcgttatcgctgctggcccgacatgaaggcaaagccgtcgggcatattttatttacccgggcaaccttcaaaggggaaatggattcaccgctgatgcatttcctcgctcccctggcagtcataccggaataccaggggatgggcgtgggaggacggttgatacgcactggcatcgagcacctgaaatcgatgggctgccagacagtattcgttctcggccacgccacctattaccccagacatgggttcgaaccctgtgccggagacaaaggctatccggcaccttatcccatcccggaggagcacaaagcctgctggatgatgcaatcactcaccgctcagcccatgaacgtgaccggccacatccagtgcgcgcaggccctgatgaaaccggagcactggcgtgaataa

SEQ ID NO: 289029 - DNA, 747 bp, Morganella morganii
atggatatcccacgtatttttaccatcagcgaaagtgaacaccgcatccataacccgttcaccgaagagaagtacgccacgctgggtcgcgtgctgcgtatgaagccgggcacccgcattcttgatctcggcagcggctcgggcgagatgctctgcacctgggcccgggatcatggcattacggggactggcatcgacatgagttcgctcttcaccgcgcaggccagacgccgcgcggaagaactcggcgtcagcgaacgcgtacattttattcataatgatgcggcgggttacgtcgccaatgaaaaatgtgacgtggcagcctgcgtcggcgcgacctggattgccggaggctttgccgggacagtcgaactgctggcgcagagccttaaaccgggcggcatcatgctcatcggtgaaccttactggcgccagcttccggcaacggacgagatagcccaggcctgcggcgtcagctcgacaagcgatttcctgacgcttcctgggcttgtcagcgcgtttgacgacctcggctacgacgtggtggaaatggtactggcggaccaggaaggctgggatcggtatgaggccgcgaaatggctgaccatgcgccgctggttggaagccaatcctgacgacgatttcgccgccgaagtcagggccgagctaaacatctcgccgaaacgccatgtaacgtacgcgcgggaatactttggctggggcgtgttcgcgctcatcgccaggtaa

SEQ ID NO: 289030 - DNA, 204 bp, Morganella morganii
atgtcacaacatgaacagttctgtcaggcttgcggaatgccgatgtcggcacccgatgcacaaagtgccagtgataaatattgtgcgtactgcagcgacagcaacggcaatcttaaaccctgggaagaagcggtatcaggcttagccagcttccttgattgctggcaaaaagtcgggtacaaaagcaggaaaaacgttacctga

SEQ ID NO: 289031 - DNA, 522 bp, Morganella morganii
atgccaaaaatagtaaagctgtccgttatcagcagtgcccttttactcgctcagtttgcctctgcagcggagattaccgttaaccctgcgtctgcggaatcgactcaggtcgtccgtcagggaaacaactccacgattaatatcgccccggcaaacacacacggtgtttcttataatgcctacgatcagtttaatgttgatcagcatggtgtggtatttaataaccgtgaagccggtgcagagatgattattaacgaagtgctttcaggtgaaaaatcacacctgcacggcaatatgcatgtagatggtcaaaaagcccacctgattatcgccaacccgaacggtattgcctgtaacggatgcagcgtatccggcacagatcaattcacattgaccggcggaaaaataatattatctaaggaagggacattattgggttatcacaatagtgaaaataacagaaacatttatattagtaacaccactgagaatgctttttcttcagtaaaaaattcaatgtga

SEQ ID NO: 289032 - DNA, 645 bp, Morganella morganii
atgcgatcaggcgcaatagtacagcaatcagttcgtgaaatacccctaaatcaaattacagcggaaaaccggaatatttttcagactgctgcggataagtttgtttctgttgtaaacagttgtaagacattctccacgggatgcagcacacagaaagatcataatattatgaaagcgtgtggtgcattactggcgaaaacgctggtgaaacaggaatactatacagagggattcaccggtgagtgcgtaaaaaaactgggtatgacactgcctgataagatcttcgccagaagtgaaacaggtgtacccggcagtgcatctattggcagactatctgcgctgaaagcatcggaatgctccgcacaggagctgtacgacatgctgagcaaacaactgcataaaccggataccgcaccagagatgcaggaaaaaatacgggcggtactggagatggcagaaaaaggctcaggcagtaacgctgtccggggaacagagtacgccgggatagttgagcgctatgcggataatatacgcagagatgttatttccgatatattattaatggatgatattaataatattgagcatggtccggtattaaagatggctgatactatcaggctgaaatcgatgaaagacagttga

SEQ ID NO: 289033 - DNA, 543 bp, Morganella morganii
atgaatatctcaaaaacaaaaataccagatgtactaataatagagcctaaagtttttggtgatgaacgtggatttttttacgaaagttataatcataaaaagtttgagcaagcagtcggtaaagaagtaaattttgtacaagataaccattcaaagtcaacaaaaggtgtattacgtggacttcactttcaaaaggcaccttatgctcaaggaaaattagttcgctgtgttgttggcgaagtattcgatgttgccgtagatatcagagaaaattcagatacatatgggcaatgggtaggaataattttatctgctgaaaacaaacgccaattgtggattcccgaaggctttgctcatggtttcttagttcttagtgaaactgctgagtttctatataaagcgactaattattatcatccagaaagtgagggtggaattatttgggatgataaaaacatctcaatagattggcctattgataataataatattattttatcacaaaaagatatggcacttttaagtattggtcaaaaaaaatga

SEQ ID NO: 289034 - DNA, 1512 bp, Morganella morganii
atggaatataactataacggatatcaggactcagagatagtcattggtttagtcggggctgtcggtgttgatttaaatcaggtaattgaaagcattaaggataaatttaattttttcaactaccatataaaaatgataaaaatatctgagcatgtgatatcagtactcagcgctgattttgatgcaccaaagaaaagatatgacagagttaactatcttatggaaaaggggaatatattaagaaataaaacaaaagataattcctttatggctaaggctgttgctgctaatattagcttttaccgtaactttaaaaaaacgaaaaaaaagaaggataatccgttaggccgtatcgcatttattatatcttcattgaaaacaccagacgaagttcacgaactgcggaaaatatactctgacggtttctttctgataggtgtttattcatcagagcgtttaagattagatgagttgactaaaaaaaacatgtctgaggatgaagcgagaaaattaatagaacgggatggcgatgagtcaaataaatatggtcaaaaaacacgtgacatctaccatttgtcagatttttttataaattatgatggggatgtacctaaactagctaatgatatagatcgtataattgatttaatattcgggcatccctatattacaccgacttttgatgaatatgctatgtttatggcattttcagcatcactgcgttcagcggatttatcacggcaggttggtgcggttgtaacttatgataatcaaatcttgtctaccggagcaaatgatatcccggcgtatggtggtggtttatattggcctgaatataatagggaaaataaaaaaatagaagattatcaggatggcagggattatataatcggttatgattcaaataagattgaacaatttagtattgttgataacattatccttgaccttgaatctgattctgaattagggctgagccatgaacaattaaaagaaataacaacaaagctaaggaagtcaaaaataaaagatatcacagaatatggcagagtcgttcatgcagaaatggaagctgtattatcttgtgcaagaaataatatatcaactaaaaatgccactttatattgtacaacatttccatgtcataactgtgcaaaacatattatcgcttcaggtattacgcgagttttgtatatagaaccatatccgaagagtaaagcattaaaatttcataaggattcaatttctcttactgattcagataaagatgaaaaaaataataaggttatttttgaaccatttgtgggggtcgggcctaaatcattctttaagctattttcaatgaatgtgggtattggtaacgttataaagagaaaagatcaggaaggaaaaaaaatagattttgttcgtgaaaatgctaaacttaagacagtaatgcttccttcatcttatattgaaagagaacgttatgcagcatcgcaattacttgatatgatggagaaaataaaatga

SEQ ID NO: 289035 - DNA, 183 bp, Morganella morganii
atgaacgatgatgaaaaacgagcattcttacaacatatcagagaatctaaagaaatcgttgatggttggccggcgtggaaacgtgaaaatagtgatagcattagaaataataatcacgcaaatcaactttatgagtgccgctctgatgagcattgtcgttcagaatctgaagttgagtcctga

SEQ ID NO: 289036 - DNA, 591 bp, Morganella morganii
atgtatttaatcaatatattcaaaaaatacggaatgtcattatttcccggagtaatgtatttatttatacttttaggaatatttacatacgccaaagcagaagttatatgtgataattgcaatatgaacgttgagttcaaaggaatatacaaagaggatacgtgcgctattttaattaatggcgcgtcggaaaatgaaacagtagtgttaccaactatttcatataagacactatccggaccgggaaaggaagcaggctccacattatttacggttgcattaaaggattgtccgacggaagttgaagttaaccttttctttaaaagctttgcgggtaatttaaatccggtaactgaaaatctgacaaacagaacggatgccggatttgcacaaaacgttgaactcaaactccgggatgcatcgtcaaaccatattgcaattgacaatcctgcatcaggacagcgttatgatatacagaatataaattcctcggtatttaagaattattacgtatcctattatgcgggaataaatccagttacaccgggcaatgtagaagctaaatcagtattggaagttgtctataaatag

SEQ ID NO: 289037 - DNA, 4266 bp, Morganella morganii
atgctgattaccagtaatgtatttaaccggattgattggtcagttaacggcgttgaacactgtacagggtgttatattcaaaatatagaccttggttttattaaaacaacttttatggatgaagcggattttattccccgcatacgatttaatcagtatgacaacagtgatgaagggttcggaaccggatggaacctgaatttatcctgtgttaaatcaattgatgacagaagactgctgcgactcggaaatggttcagtctattggattaaaaaacagagccagcctgttccggcatcagggcgtacgttagaactggaagacaaatattgcaaaacattttactgcacggaatatccggataacctgatttctgttttttacaaaaatggtatcagagaggatatccgggacgggcatttatcctctgttctttatcctaacggatatcatcttgattttcagtatcaggatgattgtcttatctcaatttatgatggactcagaaatacaccgttatcggtcagctataataaaaagaatgccgataatattgttgtttcggttaccaatcagcgtcggacagattattactatctcaataaaaataaatcagatgtttatgaattaaattcagtactgacaacatctgaatcaggaaatgaaacattattgctttatacttttcagtatcaggtttatgaaaataattatcttttgattacatcgctgacatcacttatggaaaataaccgaaaagaaaatattcgttatgaagaattaaaacggccttatggactatcgtcagtaattaaaagtgtatatgaaaatgttatttacaacggaacatcggaagatgaaaaacagtatgtaactgtaaaatatgaaacaacaaatgatttcaacttccttggtgccggggttggtggtgtaacacaatggcagaatgaaaaagataatctttttttactgacgggctataaaatatcacgcaaagtaacatccggaaaccaagcagtcagctatatttataataatgattaccttattaccgaaaaagcgatatcaccttcagggcctaacaagaaaaaaaataaaataatcacagcgtatagttacctccgggaagatccggatcataagggcgaaatatggccttctttttttctcccggtaaagatcaaagaatacgctgagaataataaattaagcggtatcccggcagttcaatcctatcgctatgataaatatggtaatgttctggagtctcaggatcgccggggaataagaacaatctttacctactatgacgggaagaatggatatcaggatgaatgtcctccggatccattcgggtttgataactatatcaaagagaaaaggattattcctgccggtaacgatataccctataaaaagagtacattatatcattacagtaagttaattaattgtgatcttgtaaaagtcaaacataaagaaatagcaattgaatataatgaaagtagtatcagggtgattagtgaaataaaggatttttattattttcccggagattatggcacagtaagcgtactgatgtctggcgtgttgaaagaagaaaaaacatcctttgtaaatgatgatgttaagaatgaaacagtcatgtctgacatttatcaatactctgtggatgtgagtaagaaaataatttattactcaaaaaatattgtatctggtaaggtaaattttaataatgttacaggtgtgactaccaattacaacacaggcgatacagaagaagaaaaaaaagaaagtggggaaactatccggtatgtatttgataagttaggacgaaaaaaagaaattatcagtttttactcagatataaataataatattcgatgtgtgtacacttatgatgataaaaaaggaatagttaatcgggttagtagtgacaaagataatgtagttaactctttattgtataaccgcagggggaaagttgtttctgaaaaagtaaaagtatctggatatgaagttttcttaagaaaatcatatgaatatgatgaacggaaccgaattataaaagaaataacatatgattattcttttgatgttaataaaaaacatcccgctctgatttgtaacgaaaataaaagttataaatggaattataatgatgatgttattatgctgggcgggagtggcttgataagaactaacattaattatgattacattaaaagagtaaaaacggttaaagaaaacaaaggaaaaaaggtcagatataaaataaatgtatcaggtgatatttatgaaaaaataacggttatgaagaaaagaacggaaatatatacgttcaacgggtttggattatgctcagggaaaacaattatagaacatggtaatatcaaatctcagacaacgtttttgtataatgagcaaggcgatttatcagaagagaaaataacagcagatggtcgtgagcgaattcagagatacagttatgataaacgccttggtaatgataaattatccgcgcactatcttaataaaagacgtattgaagccaataaatatgatctgttgggtcgggtgatattaaaagagaggaatcagttttctcaggaattaagatataactcagtcggttcttcctcttatcctgaatttataaaaacaggttcaggaaatgaatggagatacacaaggacatcgggtgataaacttaatgaaatcgtgttgtcaacaccatcgcttccgcatagtgactggaaacagcgctttacctataatgataagactggggagttattaaaagaagaggccagttgtttactgaataacactgggcgttatatattaagtgaatcatattcgggttcagtctataatataaagaaaaaaataacagattatctgttttataaaaacgaatacaagcgtatcaaatatttatcatcagaatgtaaatacagttctgaaggtagggttatttcagttgggaatgatgaatatcgtgaaatttacaaatatagcagaagtagtggtaatatagagcgtatatggtatgtcatcaatgggaaggtaaggtgcttctgtaaaccggagtatgataaaaataatcggatgaacaatattactgcgtatacttatgtgactgatgataaacagagaaatacgctattatatacaaagttacgttatgattatcattataacgccagaggtaatatacataaagcggaaatattatcagataatggcctgattggctcttccggagaaagaaaaagcgggaagctggaacaattaagtacactgattttaaattatgatgttaatgatcgcattgaaatgacaaaaattgatttattttcacctccggataaaagtcgtcaccatgaaaaaaggagtgaacgtaattataaagaactctatcattttaacagcctggatgaactgactgagtgcaaatatagtggagatttgtcactgacaaacaacatgggaaggatactgtctggtcagagccataaatataatgaagacggattacttattctcagtacccggcgtttcagttcgggtgccagcgatattgtcaattatcattataatgaaaaatcagccagcctgagttcactaacacattgtccttttaaagccgggtggccggaaatagaaaactatgtgtggaataaggacggtatgttgatttcccgtatccgttctgatggttataaagaagaatatgaatatggcggagagcaaaatgttgccagaatgacaataacagatccggataacaggaaaaccataaaaacatttctttatgattgccacggacatccggttattcagattattcagtcacctccgctatatgccggcggaccggctgttttccggcagattcatgatacctacaataatgaccatcttatgatccggaagatttttgatcgggagcttgttgatacgtctgttatgcctgaagaaacacattattatcactggtttcagaatcaggttattgcggtatcagtgcaggataatgccggtaatataaaaacgcatttcaattttaaccgaccggatggcacgacaatatgccggtgctcaccaacaaatcagctccggtatgtaaaaccgggtatctttgattatcgtcttaaaatggagtggatcgcacaggatcagcagggattattttatcagccggaaatgattgagttacagcaggtatgttttgaaatgaatctgactccgccgaaagtataa

SEQ ID NO: 289038 - DNA, 3087 bp, Morganella morganii
atggaaacgaaatcaaaaggtatatttagtaaattaatagatattgctgataaaagtgatgcggatatcaatatcagttttgtatctcatcaggatgttcagttagatatcattaaaaaagacattaaatcatccgaaactaaagaaaaagataataaagaactgacattattactgtccgatattaaagcaggttttcaacaaaccggcattccgctgaatatgactcaggggaatggtgaaaagaaagaaaacgttattaccgcacagaaatccgggaaagcttcattatcagaagcggaagttgccctgcaaaaaatgcagttacaggcacaggcgctgggtgcagagctggtgttaaccgaccgtccggcagtgatggcagaagaacgctgggcgttacctgaaatatctccgcaggaattccgcgcggctgacctgccggcgggggaaggtctggcgaaactggcggcggcgatcaaggcggtaacagacaaatatccgttacagatagcgctgatgatccggccggatttccgcccgcaggtgatgctgaatgtctctgccggtgaggtgaactggatttttgcggcaaaagaggggcgttacccgctgaaagatgtgctggccaaaatggcaggtaaaacggttacccacggctgggatgcgattgtggtgtatcagcgcggacaggccaataacctgctgcaacagcagcatattaaacggtttactaccggtaacacgttagcgccggtaaatggtgatattgaatcatccacagcgacccggctgctgacacataacctgacgctgagcgcaccgcatctgtcctttaacaaagcgggcagcggagattcaaccgcgcaggttgcgatggatttcgtcaaagggatgattgtctataaagaaaaagctgtcgatggtagttaccggattatgcggattgaaaaaatcaccccgctgaattccccgtatgttgcgatggatgtgccgttatccaaagcgccggggtcagtgagtgaaattggtgaagtgcagtttgatattaaagagggcgaccactttaccaataacctggtactgaatggtatggagcaggaaacgatcagtaattttttcaagcggagatttgtcgcaaccccggcagagcagcggatctataaactgggcaccatcagtaattatgaacatgaacaattccagccggaagattttgttatccgcaccatgggggcaccgaatacggcatcccgcgggtcgcaggatgaaggtgatggtgctgtcgtattatttgttcaggtaaaaaatggcagtcaggagcccgggaaaacggaggtggattggctgctgggggatgattatagttcagcattggtcgtttccagttgtcaactgtttgataaaatgatcagaaagccatcggaaataacgttggggtacaatttgacatttgaccggcattcggatggtgcgggcaaagcctgtaaattaaaggctgccagtggaataattggagagaatttttcatttactataagtcatccttggagtccaagtgatatctatgggcgttttgaatgtcttatttatacggatctacataataaaaaaataaaggatgtatccttacctttttcaataggttcttcatatagtggtggtgacaaatacgatatttgttctgaatataaatttgatggtcacatcggctctatttatagtgggaatgaagttagagccgctggttataggtatatttatgatgaacatggtcacattgaaaacccacagattgatgccggtggctattattctttacatttgtattttaaggcagtttataatgcagtgattaatgacggcgttatttcttttgtctatagtcctgatgaatcctcttattcactaacaatggataataatgtatgtgtttctggttgtgataaaattaagctatctactgtagataatatatcaaaagaatataggcaggagatatgcaataagattgttgataaaattaaagtctcttcggttaatattaaattaagcgatattaacacattttctctccgcaatttactgtttcctgctgataactattttcgtgtgcaatatgcccgtgtcccgggggatttactggttatgggtaaattgggtgccggttctgaatcatttgctgtcacccccactgaaaccacgattgttgccggttcggtctatcagtttacaactaccccggaagtcagcggcgtaaaatggcgtatttcggattctgaaaaaggcaataccaacgttgatttaggccatattgatgccgcgaccgggaaatatactgcaccgcaggctgcgacggtgacagaaggtgtgcgccatgtggtggtctgtgccgaaaaaggtgataccaaagtgtatgccctggcctctgttattgcgaaaggcgtgagtgtttcaccggcctatcaggttgttcagccgggcaaagagataaaattagccgccaactctgtcaacggcggtgaactgaaatgggatatgggggcaaataaacaaggctcatcactgacaaaagtcaccaataatgaatacacctataaagccggtaaaaaggtggcgaaattaaacctgaatctggaacgggtaacagtgacagatgaaaaaggagcaagcggtgaagcgctgatcctgatcccgaacagcactatggcgggtaaggtcactgtgtcatatgacaatgtcccggctgacagtgtgaaactgatttataccgttgtcatacaggtaccgaaactggacgaaaatggtgatcagatttatgacgaggatgataacccggagtttgatgaaaaagaggtcgaattaaccggcagtcaggcaaactggactgcggtcgaaaccggtggtgcaacctttgacaaaaaaacgggaatactgacatcggcaccgggtgtcggtgacgggtttgcagttatccgtgttgcctatacgaaagacacaacgcagtaccgctctgcgattgtgatcccgttaccactcagtacctataaaaaaaccattcttgaggcctattctccggaacagtaa

SEQ ID NO: 289039 - DNA, 2832 bp, Morganella morganii
atgactgaaaaatataaccaggcagaagtaaaaggccataactttatatcggacccttatttcggggaatggggtaacggtgactgggaaaaaggggagccgaataaatatacaaagaaaaaagacggtgacagaacttatctttatatcagcggtaaaggcagtatttcacaatctgttatgttaccgaaaaaaagctccggaaaatcggatgaaccgcctttttattcattgacttttgattactcggttaaaaataaggccaaagtctcattaattctgacttatctgagcggggaaagtgagcgggataaaaaagaaattacattaccggataaaaaagagtggtctctgtatgaattattgctggatgtctccgccgaagatactgacatcagggttgagttttatgccgggaaaacagcagggaataaagggattaatctgaccgctgttgatatgcagttacatatcggcggactgaatccggaatccatcgtgtttaataatcaaaatattccggcagataaacccctgctgcgccttaattacggacgcaaacacgtgcttaatatcaaaccggccgctgacagtgcatggcgtgaccttgattgtgcgctgaaatggggcggtgatattccggcgtctaactacccggtcagttttacaccagagctgaataccgcacaaccgttgaataaagaaggcggcatctgggaaatggcttgttcagcacagaaggtcagtggtattccggaaacattcagcgtaatgctggcatcagaatacagctcagagccttttattttcagcgcggaaatcggggattatctatataaattaacggaaccgaaaatcagcggaattgcagttattgctcagcgtatcccggcagacctgagtattcgggttgtctgtgattatgatgacgagtatccggatatgccgggagtatctgatgttgatgtttgctggaagatggatggcggggagattatcagcacagttaaaacagatactgagggggtggcagctctggcgtttttaccggagaaaagcgggaattataaactcgttgcattaataaccgataaaacagggcgtgaaagcagttattactttgacattattgtttatgatcgttcaccgtggctggatgacacccgggttgttgtcaataatactgatgttgacctgtcgggagaagccggatatgtgatgaacggagcggtgacaactcttcacctgacgtgtgataaaaaccgcaatgttttcggccgggttacgcttaaagataaagcggaaaatagcgatgtcacgatcacaccggcggaaggccgcgaaattccgccggaaggtttgtcgtgggatctcaatatcaccggcggcgacagcaaagaacgggcattcttattaaccagtgatcagttcggtatttcacaggaagtccgggttattgcattacagcatgacaccggaaaagaaattcagtcactgaaagttaacggcaaagtgccggcagatctggctcagttacgtgtcggtccgtcagaaagtatgacactcaattgtaccgtcaataaattactgtcccgcttacaggcagaaatgaacagtaaagacagcacattactgacagcagaaccggctttcggacaattacaggcactgaaaaataatgcagcggaatggaaattacacagtatcaatccgctgggcggcttctttgatcttgcgctgaatattccgccgctgactaatccgctggtagtttccggtcgtatactgccgcagaaaatcgcgtccgggattgaaacgatcaccctgaataatgcaccggtaaccgcacccggcgatttctttcttgcgccggacaaaaaatatacgctgacagtcaaaccccatccgttactgaaggatattcctgtttcattagtctctgaagcaggtaacagcgttacgattatcagtaatccgccgtttggcaaagaaatcaatctggcagaaaaagggttttcctggcagatttctgctgatcctgcttccgcacgcggaaaattctcactgcaaattcagagtcagtggggcggcgcaccagttcatctggatggtgttgtattgtctgcagatttaaaggatgaaggttctgttcagattaccgatggtttcagcggggaaaaatataaagttgatccgaatatcgggtttatctttgaagcagataaatcatatcagcttgctgtccgcctgaaaaagaataatctcatccacgggcaggaagtcgcctgggaattacctgacggagacagtcaccggaatgcagtttcttttgatcctgaagagcctgttgaattaaccacattaggcgctgaatgggaattcagttacacagaagaaggtgacacgcagtttgatttattactgatcagtcaggataaattcagctataaggttccatgccatatatttaatgatggcgattatctggaacggagtcagtgtaaatttattttaaacagtaaggatattatcccggatggtaatgatcacgagctggcgtataagaaagacatttctcttcagttaaaactatcacctgatgcagcaacatttctgaatggtatgtcattagcattaataacgcataatatggatgatgagagtgatagtctgattgtatcaccggataaaccggttcgtattacaccggagacccgggacgttcaatggaatattgaatctgatgtggctgtcggtcatcggtttaccctggaaattgtcgttgataattttaaaaacattacatcagttattaaatgtgtatcaatataa

SEQ ID NO: 289040 - DNA, 4509 bp, Morganella morganii
atgcctcgtaatgtaaaacagattttaaatcatctcgcagaaaaaaaacgggatgcctatgttgattactttactaattacatagtgggtgaaaatgagaatacagcaatgctgggagttactgatgctgatgacttgtatgattattttctgacggatgtgaaaacaagcgctgatttcatgaccagttatgtctcggatgcactggccagtattcaacaatatattaataatattcttaatcagaaggaacccggttactccggtgaattcagtgaggatattcagcagtggtggtccggttatctcgggcatatttcactgtggaaagcgtatcagaaaatagaggattatccggaagattataatttacctcattatatcaatgataagacacaactgttcagtgattttgccgcagacctggggagtaacagcctgaatgatgccgggataaaaacggcttttctcaaatatctgcgcagttatgaagcggttaatgcgatcagtgttatctccggctatgttgattatccgggagaacgaagcgatgcggatacattcagcggacatggttttctgaattctgattattattttatcggtgaaaacagttcatcacccgttggtttttactggcgtaaagccaatataagagctgacaaatcctccggttatatttctccgagggcatggcatgaatggcagccgcttatcatcactgacgatgcaaaagatattttacaaatacggattgtcaaagtgagtggttgcctttttattgtttacctggtcggtaaggaagaagaggttgcggataaagaaaaaccaacaaaaggaagccgggatgaaattaagaaacaatacaaggttgtgcttaaattaagtcgtatgggcctggacggaaagtgggatattcctaaacagttacatgaaaaaatctataatagtatgtcggagggtgtgccggatacgtttaaattaatatccgttgcgttcactcaggatgaaaagcggaatgattatctggttatcggatggctgggtaataatggagttaatgttttttcaggtgtgtttaatgttctcagagaaatatcatctgccagcagttcggatattttaggggataaatggcaggctgcattatcatcccggttttttgtcggtgggaaaaatatttgtcagcaccgcatctttgggattgaaaaagatataagcagtattactcattctgatgccaatccgaatttatcgctggaagcgttctattcgtgcaaaaatacccgccatcaactacgagtcagagggcactgtcatcgttctgataaaatacccgatcttgtttcgcttaacctgcaggcagtcgtcagtgaatggcgtaatggccgggttattatcagcggagaccggaataatattacggtcagagcagaagcaactcaaggtgctgactatttagcattattactgcctgatggtaaaaataaggttatttttaataagagtgattttactgagcataacggctggctttcagcagagaaaaaaatatcactttctcagagtcaatgtgacctgatagcggcgaaaaactacaaagaaatacgcagtggtgccggtttttcctggcagatagcatccggaggatctttacattcactggcacatataaaaaaccgtgtcagtacggtgatgcaacccgttacggcctctgctgagttgtctgtttttaatgacagtcttcaggggctgaaaaaagaggactggaaaggtgaactgatttatcagaagggaaaccatacaccgtggcgtacctttagctggagtggagacaccgataaagtccgctttaaattcggtttgacggatgaaagcattaaaggtgagtttacggtttcaattaaagcgctatcaaaaaatattccgttcattgaaaacttttcagagaatcagcagtttttgacatttgatcagtcagatgctgccctgaaacatgtacatcttaattctgttcaggttcgtgatcttatctatcgtgcgcagattgcagtcagacatatttttgactggaatgcccaaattacggaagagccggggtatggcgacaagacaaaagagatactcgatttatacggggctaacagccgctatttatgggaactgtttttttatttaccgtatcttgtggccagtcgtttttcacaaaatcgtctttactctcaggcgcgccagtggcttcactatattttttcgccttatgacgggcaccgtttatccgtaaaagacgacagtgaattgttgccgccaccttactggaattgccgtgtattaacccaacctgatctgaaatatcaaaataacgataatgcattacccgatccttttgcaatatccgaggatgcgccttctcattatcggaaatcggtctatttaatgtatatcgatactctgatttctgaggctgatttgaattatcgtcagctcagtcgtgacagtattacccgtgcctggggatgctatcaccaggctcagagtatgctgggtcgtataccaaaggactgcagtgtaccaaaatggcagtcatgtactgtcagtgaattactggggaataaaacggctcctgtacaggaaaatacctttcctgaattattttcggcgatatatccggaaaatatgcccaaacagcttaatggctttttctggtacggcagtttgggtaatacgcgatttcgtctgccggtacagagcagcttactggacagacaatccgttctggaacaccgtttatttaatttgcgtcattatctggatattgaaggcaatatgatgcagttgccattatatgctgctgcgtttgatccgtttgacctgctgcgctcccgtataggcgggacatctgaactgacctatttacagtccggctcattaagtattccgtcatattgtttccgcgtcatgctggaaaaagcaaaagaacaggcagcagcgctgattacattaggggataaacgtctcagttattacgagcaaaaagaacgttatcacactgaaaatatgcaattaaaggatgcgactgagcttgcgcaagccagtgccgctattcaatcactgttgctggaccagcaaaaatccgcgctggactctctgaaagcagcgaaaacgatggcggaaaataaacaagcatattacgccggactggctaaagacggtacaagtacaaaagagtgccaggcaaggaatttgttgctgacatcaacggtctttcagggcgctatttcgggtgctgctgttgccgcaggtattgcggctgcggttccgcgtatctttggtgtggcgcaggataccggtgaccatggtgtaagagcattgctcggagtggggggaaccgcggccttaagtgcggatattatgcgcggtactgcggattatgttcaactggatgaacaataccggcgtcgtcaggaggaatgggcgttttcagcagaacaggcaaaaaatgaagtcaccgtactggatgcgcaaataaaagcccaggaagtggcaatcaaagccgctgaaagcagcgtcaaatatacggactcgattcatgatgaggcaaaagcgctgtatgactatttcagtcagacccgccaggttaatgaaagtctgtacgagaaaatggccaatattattggtttattacatgaccaactgtgttcactggtcagaacattttgtgcattaacagaagcatcgtggcgttatgaaacagatgactacaaacgacagacgtttattcctgctgacctgtggagtggtgataatttaggtgttctggtcggtgttaaattacaaaaagccctgctggaaatggaaatggcgtatacacagcaaaatacacgccgcctgaatatcacaaaaacaatctcactgaaatcactgctcagcaggcatctgattaaaactgatgagaccccgctgacaacatgggtcgatgttaaagcggcattaaaaggtgcgaaaaagctgtcgtttgatttcactcatcagttttttgatacggattttccgggtcattacgcacgaaaaatccactctttatccgtgacatttccgacgttattaccgccatatcaaaatatgcgggttctgctggaacagacctcaaataccttactggttgcaccggatattgacgcggtgaaatcactctatacaccaacagaacagataagcagtgaatcccttatccgtaatctgcggataaaccagaaaattatactgtcccgcggcagtgatgacagcggcgagtttccggatgatggctttaccggcgggcaataccatagcttcgaacataccggtgctgtttcacactggcggttatccgttccgcggccgcaaaactgcccggaactccttgataatcttaatgacattattattaagcttaactatacggcaaaaagcggtgatgacgtatttgaaaccgctgtaaatgaattgctggaaaaaatgaatcagtaa

SEQ ID NO: 289041 - DNA, 3390 bp, Morganella morganii
gtgattcataattcatctaaggattcgtttactcagtcttttccggggtttttagttaactctattattataaatgatgcgaagagtgggtttgattcacaaaataaaaaatataatttgagttttagttttagttttaaatttgttctgaataaaccatatccattacatgatgacgattatcctgcgcatatccaattctgtgaacgtatgaggtgggcagagagtagtatttatcactcaatagcctattttaatgaggcgattaatattcccggtggtcctatcattgattctattgtgcttctttttaataaaaagaaaggactgtatggtttgtttttatatgattcatcaagtaagagaatagttcgtgtcaatagtgattatttttctactttgcagttatgtcttaaatataatggtgcagaggttaatacttacgatgtcagaataattcaaagtggcgggagttattttcgtggtgctgattatgtactcgattttataaatggaatatcaaaaggtgtttatttcagacttgtatgcccattgggttcttataatacgggtgatgcaagggcggttaggtttttgttctgcagagattttggtggtgtctctattaatgcatattttaaaattaataatgaagataaagactgtaatgaaaaacagtgggttaacaaaaaagataaccttgattcttataatgtggagtacatttcaaatgatgattcattcactgtttcatttgaaacgaataaggttgatgattaccgtgataagaaaataacttttgatattattggttttgttgattctgttgaggtgtttaaatataactgtgaatgttacgtgggattgtttgatagtgcccataatttaattggtataaagttcaataaaaataaagcacagtatcttgaatttaataataaatatggttctgcagggagtcgtatccggttaaatacattatttgcgaataaacttgtctctatggcaaataaaggtattgataatgtgttattgttaagtaatcaagggtttattgagccgaatattgattctgatgatgatgtaaataagtttccaatggactttaatggtgccaatgcgctttatttttgggaaatgttttattatgcaccgatgatgattacggatattttacttcagcatcaaagttacaatgaagctgaacgctggttacagtatatttttaaccctgccgggtatattgaggatgacatatacacagatcggtactggaatgtcagaccactggtggaggatacgcaatggaacgggaatgagtcactgccggatgataccgaccctgatgcaatagcactggcagacccgatgcattataaaatggccacatttatgaagacgctggagctgcttattgccagaggggataaggcgtatcgtgagctggagcgggattcgctgaatgaggcgaaatcctggtatatacaggcactatcattgctcggaaaagaaccggttacattgctgaataaaaactggtcttcacctgtcctggaggatgctgcaaatctgacagtacagtcagcaatacaacatttattaacgcagataaatactcccggcgtctcatcggctatttccgcagacagtgcaaatacgctgactaacgtgtttaaaccacaattaaatgaaaaactcatcgtctgcagagaaacgataaatcagcggctttttaacttgcgaaatgggctgtctattaatggtcagcgcctttatttgccgatattttcttcaccggttgatccgaggaatatgctggagtcacaggtcaatactataaatagtgaaaaaacatttaaaaataaaaaaatgctaatgtatcgttttccggaagttattgataatgcaaaaagcctggtggctcagttgattgaatttggtgataaattactgggttttaatgaacgcagggatgatgaacagttttctgaattacttattcatcaggggaatgatttactgacacaaagtatccggattcaggatgcggaaattaaaaatctgcaggcagaaaaaatatctctattgtcacaacagcgtgaaattattcaccgtgcggaacattatgaagcattacattctgaatatattttaccggaagaagcgggtgcgattgtattaaatacactggcagccggtttgtcagggcagtccagggtcataaaaggactgggtatgcttgctgatttggcaccgaatatattcggtgtggcggcagggggatctgactggagtgcgggtactgactgcgcctctgagttaatgggtggtgcagcagaaacaatgcaggggctggcatatccgcttgagaaaggagcggaataccgcagacgggctcaggagtggcaactggaatcagaatcggccagagaagaagaaaaacaaattgctgctgaactggaggcaatggatatccaaataaccgcagctaagatgcagagacactatatcgtaacagagcagcggcaaaaccagcagcaattacagtttttgcagcgcaaatttacccgtgctgaattgtacggctggttacgcgggcggctgatggccatttattctcctttttacgatttggcggtttcccgttgctttatggcagaagacgcctatcgctatgagatgaatgtcaatgcagaagaccgttcatttatcaacacctcggcatggaagggggcatattccggcctgatggccggtgaaagtctgatgctgaatctggcgcaactggaagaagcctatctggaaaaagataaacgggttctggaggttacccgcaccgtttcattagctaaattatacagttcaatgacgaataacagtttcggttttgacaaagttgcggagcttgtcagtaagggagaagtaaaccgatacggcaacacagataactatgtcgcaatgatcagtaccacagaacagcgcaaccgcatggaattgcaggcagttattaagctcgacggactgggtatttatacggattatcctaaggatttaggtgagcaccggctgattatgcaaatcagtgtgacattgcctgcgcttattgaaccctatcagaatgtccgtgcgctgcttgaatatatcactaaatctgatgaagaggtactgcctgaagggtgcagtgcgattgcggtttctcatggtatgaatgacagcggtctttttcacctgcaattcggggacagtacttatctgccgtttgaggggctgtcagttaagggtaaaggtcatttcaaactgcggttttttgatgtcggcggcggggaccagaaacgcttactgcaaaccctgactgatatcgtacttcatatccgttacaccatttactga

SEQ ID NO: 289042 - DNA, 1938 bp, Morganella morganii
atgttgaaaaaatacagagctgatattgatggacttagagctattgctgtgctttcagttattattttccatttaaatcctactttgctaccaggtggctttgttggtgttgatatattctttgtcatatcaggatatctaattacatcgattatatatggtgatattaagtcaaatgcatttagctacaaaaatttctacaatagaagaataaaaagaatcttacctatattttttattgtactactatcaaccatagctgcttcattcatgataatgatgcctgacgatttcaagttcatgatgcgctctgcattttctactgtaatcttctcttctaatatattcttttcaacgaatgttaattatttcgcccaggatgtaaaggaatatcctctacttcacacttggtcattatcgacagaggaacagtattactttatattaccaataatattttggtgttttttaaaatttagtaaatttgacaaaaaacacatactaactggacttgttgttatagctttcctgtcattttccttagccatatactctagatttaatactgaattattaaagttcaattattattacctgccatcaagagcatgggaaatgatgattggtagctgcattgcagtatataaatcaagtaacttaaaaaattttaacaatcgtactataccgcttattggtgtcttgataataatcatatctttatttataacaaaagatgaattttatccgaatttttattctttacttccttgtgttggtgcggcctgcatactaattcatagtggaattcaaaataacttcacgacaaaaatactatcatctagagtcgcttcaaccttaggattaatgtcatattcaatgtatttatggcattggcctataatatcactgcaaaagtattatttcattactggaagaatgcctgtaaaaaatatgattttcactttagcttccactattatcttatcttatttatcactgaaattgatagagacaccaataagaaaatcaaagatatcatttaaatcatctataatatttatatttttattgccatcattattagtttcttcaatatttattatttctgagaaaacaaaaggcatacctcagagatatggagataaatgggataatatgttcttagaaacagcctatctatatactccattctgtcacaatactgtaatagataaatgtacatttggtgattcgactaaggagcctagattcattgtgatgggagactctcacgcgggtcattttgttccaatgatagatgagtactcaaagaaaaaagggttgtcattcgaggagcgaacagcagatgcatgctatccactaataaataccgaaaataaaaaaccatcagattttggtggtattatttcaaaaaactgtagtgataatataaaatatttctctcaacgcgttaataactataatgacattgttttgattggggcatggagtctttattataataatatccctgattttgattcaatgctgaaggatactattttaaagttatcctctgagggaaaaaatatttatattttcgagcaaataccaactttcaaggatggttcttacatacatttatttagacagagatttgcacctttcggggacacaatggacttatcatctattgatttttccaatatgatctcgcctagagatggcggaaatgttgattttaaaggtgggaatgataaagtatataatgtcataaaaaatctaaacttgaataatgttcattatatcactccgatatcaaacattcctgatgttgctaaaaaattccctgtttataacggtaggcttatatacaaagatgatgctcattttaatgaggttggttctagagatctgataaaaaataatccaaacatgcttggcgattttataaaataa

SEQ ID NO: 289043 - DNA, 387 bp, Morganella morganii
atggatgaaaagaaactcaaagccctcgccaatcagctttccatgatgctcaaaaagctcaccgtcgaaaccgcactgaatgcggaacttactgaccatctcggtcatgataaaaatgcttccaaatcaggctctaatacccgtaacggatattcctctaaaacgatcctgacggatgatggtgagtttgaactgaccacgccccgtgaccgtgaagggacgtttgcaccacagttaatcaagaaaaatcagacacgtatcacgggtatggacagccagatcctgtcactgtacgccaaaggtatgaccacccgtgacatcgttgccactttcaaagaaatgtatgatgcggatgtatcatccacgctgattatccaaagtgactga

SEQ ID NO: 289044 - DNA, 540 bp, Morganella morganii
atgaggttggtaaaattcatatcaagcatattcacgaagaaaaaaagtaacgtgaataacgagaaaaagctcaggtcgctgccaactgttaaaagcgatgtgaaaaaatacttatcaaggcatgatatctatggcgtcctccaagaaataaaaaaagaatatacgagtatcacttttgacgatgatgacatgatagatagcatcttggctggttataacatgtttattgctggggagtccctgcggcgtctgaatgtagaaatatcaagttcagatgttaaagacatttgttcttggttatctggtcggtgcagttatctgaatcggtcaagaaaggctatgtctttagggataacgcatggaatatggattagttctggagtttgcggtcatcgtgggagtgataaaaaacatgataaatttaatggtaaaaaattctccctgaaagatgggctttcttactacggtaaaacctatttcccagggcatgaaaggtattgccgatgcggctataaaacttgcgaacccataaacgactaa

SEQ ID NO: 289045 - DNA, 171 bp, Morganella morganii
atgcagaaagcaaaagaaatgtctcagcgcagaattcggtttccagatgagctatgcaagttgattgaggagaatggaggaaaggagagccgccagtttaatacagaggttatttaccagctaaggaaggcgtatggattgcttggaaaagcggtgcatgagatgcaataa

SEQ ID NO: 289046 - DNA, 783 bp, Morganella morganii
atgagtcaaattacattagcaaacaataatgcagttgtcacgcaaagtcgctttacggttcctgaagtctactaccgtgatcagaaggtaatcactactgaatcactggcggtggggtatggagctgatgcgaaaaacatccaggacaatttctccaacaacaaagatcgatttgttgaaggaaaacattatttcaagctggaaggtgaagaattacagtcgtttaagagctaccccgataatttcgggttagttaataaatttgccagacatgtttatctctggactgagcgcggagcatcacgacacgccaagatgctggaaaccgatcaggcatgggactacttcgagttactggaagaaacctactttaattcccgcaaaaagaacgcagatctgataagcaaaaaagacctggccttgatggtgattcaggcagaggaagaaaaagaaattgcatacgcccagcgtgaccaggcgatagaaacaaaagcgtggattagccgccgtcgtgaagccacagcaatggctacggcatcggttgctgtgcgtgaaaagaatgctctcgccgcgaagcttggtgcctgcaaaaaacacgctacggttttggcggttgagaatatgaccgaaactaaattcaaatggcatccgctaaagaaatggtgcgccgacaatggagcagaggttctatctgtccctgatgagcgctacggtaaagcgaactcctatcctgctgaggcatggaaagcagttcacaatgtgaatcttgcaaaactgttctaa

SEQ ID NO: 289047 - DNA, 417 bp, Morganella morganii
atgcaggcgtattacagcccggggaaaaatggctttgtgctggaaatgcaaaaatatgcgtttcttgaaaagaacgatgatgacctgattaaagtcgatgatgttgtttataaggaatttatcgcagggaaggccggaatgataatgactcctgaccccggcaaaaagcagcctatgaaatggatgccgataccaccaccgacgaaagagcagttggttttccaggcggagtcagagaagcaactgagaatatcagaggcaagtgttgccatcgcaccgcttcaggatgccgtagatttagatatggcgacaccggaagaagagtcagcattgaaggagtggaaggaataccgggtattgctgaatcgcgtagatacatccaccgcaccagatatcacctggccagtgaaaccttaa

SEQ ID NO: 289048 - DNA, 402 bp, Morganella morganii
atgagtttattagcttcgcgttttggctctgctaacagtattcgtcgtgaccgtccactcaccattgaagaattatttcgtactgtgcctagcgttttctccgaagataagcatgggtcacgcagtgaacgttatacctacatcccaaccatcaccttgttagacagcctacaaaaagaaggcttttacccgttctttgcctgccagactcgagtgcgtgatgtcagccgtcgagagcacaccaagcacatgttgaggctgcggagacatgaccaaatcacgggcgtacaagtgcctgaaattattttgctcaatagccatgacggttcgagtagctaccagatgttgccggactctttagagctgtatgctccaacggtttggtgtgcggtgatgtattag

SEQ ID NO: 289049 - DNA, 540 bp, Morganella morganii
atgattaaacgcttacttattgttgctactgtgtttgctctttcggcctgcacaatcagtaatgatcctcactggggaaaaccaaagaagccagaatacccagcatacataccaactgacgggacatatgcatgcgtatacgatgtggaaacagaaaccggacagtctctacttataaataacgttagaactaaaaagccaccattggccgtccttggcgtgaagaaaatcagcgacagcaaaattgcagcaaaactacagcttgataccggcgctgagtttgagggttataatttggttagattagtgccggaaaaagggagcacaacttaccaacagtcaccatcgccaaaagatatggctaattcttactatttcttgggtgttatatatgccactgatgaaaatatggacgttattgggttgtctgcattctatcaggatgtatcctcaccagtaggtatcagtgctcactgcgtggagccatcaaaattcaaggaaatgatacaaaaaccaaattacggaatgtatcagtattga

SEQ ID NO: 289050 - DNA, 267 bp, Morganella morganii
atgaaccaattagacatctacttaaatcatggtgatgtgaaagaacatcaacagaaaaaacagttatttaaacttgtgtacatcgacgaggtggtgcatggttccttcctgatcactgagttttgcaatggtgaagttaaatattattctcagcggtcaggggaaatgccggtgttaaataacacgctgccatacagtaaagatgactccctgcacccatcgttagctgaacacattcatgcgttagctgttggtggtcagccctga

SEQ ID NO: 289051 - DNA, 534 bp, Morganella morganii
atgacttacgacagatttaatcctgagtggcgtcaaaatatcctgctggctttttatgaatgtaagtatggctgcgttaccaatgaggaatgggagttgctatgcgagccttacaaaacatataaagatttttacgacaacataatgtacttagtcgaccacggtttattggatatttccgagtgcccaagatcagggtctatggatagccagaatgccgggatgccaattgctcttgtgcctgaatggataagaataactaaccgtggtatagacttcctgcgagcagacggcgggctaagcgcaatactcaatgtcaacattatcaagtttcatgatgatacgctggaggctttatcctcctatattgacaggcttaacgtcagtgacgctgaaaaaagcgtgttaaaaactgaacttaaaaagttacccatcgatggtgttcgtcatgttatgacaaaagcaatagacgctgctctcactaacccaggcgagatactgaaagtgatatacgtcgcccttggtcagggctga

SEQ ID NO: 289052 - DNA, 240 bp, Morganella morganii
atgagcattacgtgtgatttttgcgaaagaaatgccacgaaatacaaaaatgtatattttatcgcaaatgatagtggcgacgttcatatctgtgaagattgcgcaaaatcagccaccatctacgctgaagaagaaagagaaaagaagaaatctaaaaacaataaagaattcaaacaagcattagaaaaaactcaagagaaacacgctgacgtcattaaccagctagcacgtcacgactaa

SEQ ID NO: 289053 - DNA, 273 bp, Morganella morganii
atgataacagaaatccccctttctccgacaccgaaccaatcactctcattcattctcggcggcagcacctacgacatcacactcgaatcccggctcgataaccttttcgctaccgtggtgaaagacggggaatacctggtatgcaaccgcatctgccggaatatgacttacatctgccagtggctgatatttgctgacacggcaggtaacacagacccggtttataccggccttggctcactatacaggatggtatggatagatggcatttaa

SEQ ID NO: 289054 - DNA, 888 bp, Morganella morganii
atggcatttaaccggaaagtaatcaggctgaatctcaccctgaacgggaaagatgaatcgttcacatcagacagccagaacaaactggaggctgtagggctgcgtatcagcgcggaaattaacttcggtaacgggatgcctgcaccgtcggccagactgcggatttatggccttcctgctgagacgatgaataaattactgcggattcggtggaaggatttagacggactgcgcgacagcgtcatggttgaggccggtgaccagggtgaagacctcataaccgtattcaaaggtggcataacgtttgcctaccccgactatgccgaagcgccgaatgtctcccttattatcgaggctcagaccgctgtccttgaggccatgacaccaagtgatgctgagagctatgaaggcactcacgatgtcataaacatcatgggaaacgtatgcaggcgcattggttacacgctggaagacaacggagttaagcagccgcttgagaacgtttatctctgcaatacagacatcagcaaaatcaaatggctggcagaggctgcaaatctcgatctgtatgttgagcaggggaatatcgccgttaccaaaaaaggacagccaaggaagcttaaaattcccgttgtttccccggactctggcctggttggctacccgacaccgacaaaagaaggcgttcagttcaagtgtttttacgatccgataattcgctttggtggccttgtccgcattaaagacagcattgtcgaacggtgtaatggcgactggataacctacggtgtccgcgtaacgctggagacagaaacagaaggcggtcggtggttcatggacgtagcagcatacccaagggggcaggatgaaatcgcagttaaacgataa

SEQ ID NO: 289055 - DNA, 150 bp, Morganella morganii
atgcttttaagagatggtatttatactgttgatggcagaggttttaagcaatacgttcccggtgcccttttttactgcttcatcagtgaaaattttgtcagttacattgaagccggagatgaagaaagggaagaggtcaatatcggataa

SEQ ID NO: 289056 - DNA, 207 bp, Morganella morganii
atggagcgcttcttcaggagcctgaaaaacgagtgggtgccggtgaccggctacaccagcttcagtgaagctgctcatgcaataacgggttatatcgtcgggtattacagcgaactcaggccgcacgaatataacggtggattaccaccaaacgaatcggaaaatcgataccggaaaaactctaaaaccgtggccagttttagttga

SEQ ID NO: 289057 - DNA, 396 bp, Morganella morganii
atggggcgatggcttgccggccgtcttatgaaggagctggggctggtgagttgtcagcagcctgttcaccgatataaacgtgggggacacgagcatattgctatcccgaatcacctcggacgtcagtttgcagtgacagtgcctgaccaggtatggtgcggcgatgtgacgtatatctggataggtaaacgctgggcttaccttgctgtggtactcgatctatttgcgcggaaacccgtggggtgggcaatgtcgttctctccggacagcaggctgaccaccagagcactggaaatggcatgggaaaggcgcggtaagccatccggggtcatgttccacagtgatcagggtagtcactatacaagcaggcagttcaggcagttactgtggcgatag

SEQ ID NO: 289058 - DNA, 303 bp, Morganella morganii
atgaaaaaacgaaatttcagtgcagaattcagacgtgaatccgctcagttagtggtggatcaacactatacggttgcagatgccgcaaatgccatgaatgtcggactttccactatgacccggtgggtaaagcagctacgggatgaatgtgccggcaaaacacctaaagcttcccctatcacaccggagcaaattgagatatgtgagctgaagaaaaaactccaacgcattgaaatggaaaatgaaatattaaaaaaggctaccgcgctcttgatgtcagattccctgaacaattctcgataa

SEQ ID NO: 289059 - DNA, 702 bp, Morganella morganii; identical to SEQ ID NO: 229663

SEQ ID NO: 289060 - DNA, 126 bp, Morganella morganii; identical to SEQ ID NO: 229662

SEQ ID NO: 289061 - DNA, 264 bp, Morganella morganii; identical to SEQ ID NO: 106556

SEQ ID NO: 289062 - DNA, 300 bp, Morganella morganii; identical to SEQ ID NO: 229660

SEQ ID NO: 289063 - DNA, 162 bp, Morganella morganii; identical to SEQ ID NO: 229659

SEQ ID NO: 289064 - DNA, 390 bp, Morganella morganii; identical to SEQ ID NO: 106559

SEQ ID NO: 289065 - DNA, 2106 bp, Morganella morganii; identical to SEQ ID NO: 229657

SEQ ID NO: 289066 - DNA, 1440 bp, Morganella morganii; identical to SEQ ID NO: 229656

SEQ ID NO: 289067 - DNA, 459 bp, Morganella morganii; identical to SEQ ID NO: 229655

SEQ ID NO: 289068 - DNA, 987 bp, Morganella morganii; identical to SEQ ID NO: 239466

SEQ ID NO: 289069 - DNA, 516 bp, Morganella morganii
atgcaaagcgtcaccgtagcgacagagacacagagacgaatcaggcaaagggagctggcagcagcagacgagaaggaggctcaggagcgcgaggaggcgcgaaagaacaaggggttcacacaggtatattcaaagggatggcggcgcgtcagggagctgtcaaagggcaatgcgggggccgctggcctgtatgccttcttcgctgaacacatcgaccctacctgtggcgctgttgtctgcgatcagcagttcctggctgaccatctggaggttagcacccgcacgattcggaactggctcaagtaccttgagacagaacgcgccttggtcagaatcccagtcgctgggcgggtttgcgcctacgctcttgacccccacgaggtctggaaagggtacgacaacgccaaagaatacgcggccttcgtgaccaagacgctggtcaacaaggacggcgatattaagcgccggatcatgtcgatgtttagcccagaggaacgcccagacgacagggagtga

SEQ ID NO: 289070 - DNA, 2421 bp, Morganella morganii
atgatggataaatcaaaaaaaacaatatatttcttctgtttctgcggattttcttcattatctcatgctgactacacctcatcaaaagatataaataaaataataagcagctatgattattatgcgcagatttctaatgagctggatggtttgtcaataaaaacaccaggcgatggaacatatcctaatacagccatttctttgatttataatggcgatgacagtattgattttgcaggcaagcaacttataattaaaaattcagaaattacagcaagtaaagcaccaccttctaaatatggttacagggctggaatctcatcactctcaaataatatttatgcagaaaatataaagttaacatcctttgatgatgactattatggaataagaaatgcaaataatgaaaactttgacaacaagagagaggaactatctacatccaggcttatcttagaaaacagcgaatttaatcttcatggtaaaaatagcaaaggaatatatacatataaaacatctataaatcctgattcattttcccacgttgaaataaataactcgaattttaatattttcggtgataactccgttggtattcaggctgtaaatgcatcttcggtttcaaaaaaatctaacttttaccttaacggaaataatagcattggtatttccgtttataatacaagtaaggttttaattgataactcatcaatgatctatagtaagtcggattcagcaacaggaatattgctctcaagatttagtgttcctttgtactgggcagatgatttaaaagatgatcagcaggtaacaattgataatagctctgttattgatgttaaaaatgggacaggaataagagctgcagccggaaacaatacggttaacgtaagtaatagctctcaaattattagtaaaaatataataaatgcaaaaaaagcgtctgaagattacaaaaaccatccaaccaatatcactctgaatgtttcagataaatcaattatcagtggagcagctataacagagcaggatgcaacatcatcagtaaatatttcatcaggttcagtttggaatattacaggagattcaaatttaactaacttaaaatcagataatgcaatagttaatttcaataaagataaaatgacatttactactactcatgtagatacgttatctggtaataatagtacatttaatttttcagttgatgtggaaaaacaagcaggctcgaaactcattatcaacaaaagcagtacaggctctcatattgtacaggttttcaacgatggaacacaaaatactactggtaatgaagaaattacactgattgaagataaaagtggtacaaactcaactgcagttttttatcccggtaaagatgtggagcttggaggttatacttatcaggttcagcgtgatgaatccaactcagataattggatattgactgcaaaacctggttccggctcagagaataaaccctcaccaaataatacttccaaagcaatcaccgggatgacaagtacttcttatctgataaaccaggctgaaatgcatagtctgcgccagagaaccggggatttgaccagtttgtccggagaaagttcatcagacaatatatctggtctgtggggaagagtgtatggcggaaactataaaacaaaaaataataataatctggcaaaagtagatatgaactattatggatttcagattgggggtgaaaaaaacactgtctattatggtcataataaaaatttcctggggattttcattggtcacacaacaggtaaaccggattatgattatggtgatgcaaccacaacatcatggtatggtggtgtttataatacatttatagcagaaaatggtatctatgttgactcggttgttaaaattgggcagtatcgaaataaatataacctcagagatagtcagggaaatgcgattgatggcaaagcacaatcaaaaatctttacaatttcatctcagcttggcaaacgctttattttagatcataatggaaattatgatatatacgcagaacctcaggttcaattaatatattccaggatagataaatttaatacaacagcctcaaatggcctgaacatcaaacaaaatgcgtataacccaacgaccggacgtctgggtgtgttactgggtagcaggattaacaggcagtctgatatttatctgaaagcttcatatttcaatgaatttagtaaagatgttaagtatacacttaataactcaccagaatactatagtgtcaatggtgatgggcttgaggtaggggtgggagttaatttaagtataaacaataatagctacttgtatgcagaaggggattatattaatagcaaatcaaattacactgggagtaaattcaatattggttatcggtatactttctag

SEQ ID NO: 289071 - DNA, 768 bp, Morganella morganii
atgaagttctctgaaagtgaatgggacttttttctgggatacttacacatctacggcggtacacaactgggctttgataaacgggtttcaccggacacaccgctgtatatcggtacctttgcaggattaacccagtgctcacaggactatcgcggcggggacggtactgtccgctcataccatctggggctttacaccacctatatggcggataacggtttctatgttgaccgtattgccaaggtctcccggctgaaaaataaattcagcgtatcggacagccagaacaataatgtcagcggcgacggcagctcaacgggtgtcagtttgtcagcggaagcaggccggaagttcagcctgaaccagaccggtaatggtttctatatcgaaccgcaggcgcagctgacttacagccatcaggactcaaccggtattcacgccagcaacggcctgaaaatcgacctcggcagctacgattctactatcggacgcaccggtacactgattggctatgaaaccaccaccggtgacagccagatcaacgtttacctgaaaaccggttttgtcagagagtttcagggcaacaccgactataaactgaacggctcccgcgaagcacacagcttcaaaggaagctggtggaacaacggtctgggcatcagcgccaatatcagcaaaaaacataccctgtatgcagaagctgacagctcaaccggttactggtttgatcagtatcagattaatggcggatatcgcttcagtttttag

SEQ ID NO: 289072 - DNA, 279 bp, Morganella morganii
atgaatgatattaattttattgtaggaagaaatatacggcgactaagacaatcaaatggattaaccacaaagcagttagcaaagatacttggtgtatcacagcagcagatttctagatacgaacgaggggaaaataagatagatgtaagcattatatttgaaatagttaattattttaatgttttttttgaggatgtttttcccgaaaaacaaaatgctgacaaaaatactctgcataaagaattaagcatttatattgacccgatagcaattcaatga

SEQ ID NO: 289073 - DNA, 378 bp, Morganella morganii
atgtctggttcagttgtggatacagcatgcaatattgatatgaactcgcgtgatcagactgtaaatatgggagagttacctgtaagcatactgaataatatcggttacggtccggtgaaaaattttgatatcaagcttaccgactgtcattttgaaaggtatgaccggcctgacagtaaatggaattcattaatgattacatttggcggcccatctgaaaatgattttttttcactttcaggtgaagctaaagggataaagttattacttagtgatgaatacaactcaaaagttatacccggcacagcatccctgccggaaactgttacagccggaaattactggacattgttaaattttaaaattgattataattaa

SEQ ID NO: 289074 - DNA, 573 bp, Morganella morganii
atgaaaaaacttttggttgttgcgaccttagtatcaacagctttaagtgctaatgtatttgccgctcaggcaaatgggcatggtaaagttaaatttcatggtgaaattattgatgcaccatgttcaatcagtgctgatactattgatcagacagtagaatttggccaaattgctaattctgcactggccaatggtggttcttcggcagctaaatcatttaatattgaattagttgactgcgtattccctaaagatgatcagcaacaagtttttaatgacaaggtcaaaattacctttacaggtcagagtgctgcatttaattcaaaattactggggatcaccggcttagatgcatctaatcctgatactgcaggtaatgttgcaattcagctgtcaaacggtgacggaacagctattgacatggatacttggacctccgcggatcgccagcttcaagaaggtaataacactctgacctacagtgcttatgtaaaaggtgcaaatgttgctgtagataaaattcctttaggtgaatttaatggtgtaacaaacttcaccctcgcatataactga

SEQ ID NO: 289075 - DNA, 465 bp, Morganella morganii
atgtggcagaacttccgtgaacatctggacaagctctatcaccactatctggccaatcccatatccgcagagcagatttgcggcggatacccagataaacctattgtgttgtgtgatggcctggaggaaaaacggctgaatgatggctcattattcaccgacgacggtgaggcgctttgttttaacggtaatgcggctgatgacatgaatcatgagacgtttattgttcagcgcgaaatccccgtagaggactactgggatttctgcaagacagcatacaaaccctatgacgtgtttgtagtcgcggcattactgttgttgtacaacctgtgcccgggatatttttcggtctcttctgacggggatatccgggactggcagccggtgctggactatgtcagtcaggtatttccttatcttatcctgacgttaccggaagggataggtttaccggaggcaggataa

SEQ ID NO: 289076 - DNA, 348 bp, Morganella morganii; identical to SEQ ID NO: 190917

SEQ ID NO: 289077 - DNA, 177 bp, Morganella morganii; identical to SEQ ID NO: 14595

SEQ ID NO: 289078 - DNA, 357 bp, Morganella morganii; identical to SEQ ID NO: 103758

SEQ ID NO: 289079 - DNA, 423 bp, Morganella morganii; identical to SEQ ID NO: 103759

SEQ ID NO: 289080 - DNA, 564 bp, Morganella morganii
atgacgatttgccacggtgctccacgtaatacttttttggtattaatcgtatggcctctggctgcaatcacccaaagaattaaagcgccaatagccgcaattgcactgattggaatacctaatggttctaagacaaagaaaccaataagtagcagtaccaataccagccaacctgttttaaacgttgtcatgtccttaatggctaaagtcggttcactcagtttggtaacatcatattgtttaggaatatctttgcggaaaaaccaatgcagcatcgctaatgttgcaataattgcagcaatatccactggcaccataatcgatgcatattcagtaaatccaatattaaagaagtccgcagaaacgatattcacgaggttcgaaacgatcagcggcaagctcgccgtatctgcaataaacccggcagccatgacaaatgctaatgtcgtgcctttgttgaaaccaagtgccaataacatcgcaatcacaatgggcgttaatatcaatgctgcgccatcattggcaaacaaggccgcaaccgttgcaccaagtaacacgatataa

SEQ ID NO: 289081 - DNA, 288 bp, Morganella morganii
atgaaagataaagaagataaagaaaatattatactatgtagatctgtgggttctgcaattaaagaaagaagaaaagagttagggtattctggagttgatatggcagatttattaaaaatcagtcagcagcaatactctcgctatgaaagaggacaaagtcaaatttctgcaatgatgttgtttaaaatagccagtattcttcaataccctatatgtcttttttttagtaattatatttgtggtcatgctgagtttattgaaggtacaaataaattatttatcgaataa

SEQ ID NO: 289082 - DNA, 558 bp, Morganella morganii
atggctaaaagcaagcttgaggaagcgctggagaagtacatgtcaggcactgctgtgacattgcgcgccggtattctcgaagaggccgtttaccccgacgggactcaggttgctcaggttggttacattcaggagttcggcgcttccatcaatcagcctgagcgaaccggaaccatctaccggaaagtcggaaaagacggtgtactcagcagaggaggtaaattcgtcaaggcgaaaaattccaactttgcaacgcaacatgccattgcagcccacactgtcaatattcccccgaggccttatttcaggacggtgatcgcagagggtaaatcgacatggcctgtgattcttgcgagcggaatcaaagagcgaggtagcgttaaaaaaggcctgcaataccttggcggagcgatagttgaggaactgcatgcttccgtaatgacgtggtcgtcaccaccaaacgcgccgtcaacgatcgccaataaaggcgctgacagcccactccgggacaccatgaagttatccaaatcattcagctacgaggtgaacgatgattaa

SEQ ID NO: 289083 - DNA, 498 bp, Morganella morganii
atgagtaacaattcaactgacgcaatgaagcagcctgaatttgtgttcacggctcaaccggtttgttttgttcgtcaggtcactccgttaacgcctcaggttgatatttcccgcgtccggacagatgaattctgtatgccggtatatgcagccatcagtgatgatgatatccggctgacggatggatacattgcagagctgcaggctcagggtgtggataagctggctgattctattcagggtacctacgatgccctgacgaaataccattctgctggtggcattatcatgactctgcttggcgaaatcagccgatgccggtcatttgctgcaaaattgcgatccccttccgttcagttctgcgattgtgacaactgcacccgcactaccggcacgaatgctttgtgtgaatcggtcatgaccgggcatacaaacctgtgtgataactgccgaaacaagctgaacgatggcggtctgcgtcagggagaatcatcatga

SEQ ID NO: 289084 - DNA, 567 bp, Morganella morganii
atggtggacttccaatctagcgctaaggatgtcatagagagaatatgtgaagcatatggattctcatctagacttcagtacgcgcagcatgtaggtatcagtaatgggtctcttggtaacaggatcaccaggaataatttccctgctgatttgatactgaggtgcgctttagaaactaaagcgtcaattgagtggctttcgtttggcactggtaagatttttaataactcagaaacagatatcgtgcatcttgatacctttaatctggttgatggcaacctgcaactatcaatcccaacaatgtttgataaggttatgttgccaggcgaatatcataaaatcgaaataattaattatttatctgacagttactttatagagcgtagattttcatctgttgatgaaggtaagtggttagttgaattttccggcaagcattcattcaatgatttacagcttattcccggtaacaaaatccggatggacggcggtaaatatcccattgactgcgatccgtccgacattaaagcaataggaaaggttatcgcgatatacgcgaggcagtga

SEQ ID NO: 289085 - DNA, 222 bp, Morganella morganii
atgcacactaagaacacaaaaggagaatcatgcctcatgaacatcacaaattcaatacaggatcatccgcgctgggttacttatggaaaattttgcgagatgaccggaatcaaactgagaactgctaaagcacatgtaagccaaggcaaattaaaaataaaaccaaaacaacataagtctggattggtattaattgactggtgggatttttgcaaagattaa

SEQ ID NO: 289086 - DNA, 150 bp, Morganella morganii
atggatattcgttgccgtttccacttccacaaatggactgtatataaaaaagtccacaagaccaacatgtacggacataaatacatcacccaacatttcggctgtctgcgttgcggaaagatgaaagcagaaacacaggagtgccggtaa

SEQ ID NO: 289087 - DNA, 681 bp, Morganella morganii
atggcaattaaaattgaagtaacgacagatttaattctgagtttgtacaatcggctgaatagtttatttccgtggcaaaagcgttggtatgagcaacgttttcagcgggatcgctgtttacataaaggccggcacattggcgcagattattattttgcacttgaagcggtacttgatgcatgccttaccgggcgaaataaaatatttatcgaaccggaaccatctgagccgagagatacgttttattcaaatgccgctcaatatgctgggcattttcttgggttaaatattaaatcaggtacgcaaattattacttttagtaatggcgctaaaatccgttttttaccggaaaatcatcagggatgggcttgttttaatggtgatacgtatgtatctgaatgggcttggtttagaaaaccacacgacataatggaaattgtatcatctgtaactatgcacgaaaaatggcgcagaacatattattcatcccgtggtgacggtgataatggtgccggaatcgtgttcagcgaaaaatcgtatttttatgatgtggttccgactcagtcatatgaatgtggtttagatcatgtgatgaaaattgacatgatgaatctgcggggtaccgagcattatattaatcagttgtatctgtgccagttaccacgaaatcagcaacattaa

SEQ ID NO: 289088 - DNA, 432 bp, Morganella morganii
atgaagaacaaaattccttcatacgaagattatcgaaaccatactgggctccattatcatagactatggaaagccatagaagacagctggagatgtccaagttgcggacgaagcaagtttcagataatgagatggacccgcagattcccaagtaaacctaatgcttttatggactgggttgctgcattacacatccaccacgaccattctgctagctacatggatataggtgcatataggtttcctgagacactaatctgtggtcagtgtaatgcagcggatggcacagtaaaaagaaagcttaaattgccaaaagatttctcgttttctccacaagagatgcgggaatttatcaaggctacaccgcacggaaaacatgaaattgattatgaacgagcacgtaatatattcacaagtttgaaacgttcttaa

SEQ ID NO: 289089 - DNA, 858 bp, Morganella morganii
atgatgtcattacgcgatgctgttagcgaagatgattggctgagtagtatgatgctcttattccgaagcgaaatgaatcgacatcgtatattgattgtagttgagggtatcacagatatacgatttttcaatgcatatcggcttgataatagaataatttatgagtcacctgaaaatggaaagcgtgaggtaatatctgctgttagtcaattacgtcttgcagggaatgatgctgtgtatggtgtatgtgacgctgattttgatgaattaagtggagtaaattacgaagggattttttatactgatgctcatgatcttgaaatgatgttagtgaaaggtggagtggttgataaattcattatgtcacacacagatagaaagctaattcaaggggaattggctgaaacattctgccatgatgtaaaaatgaatattctttgtgcatgttataaaattggacttcttaaatggtacaattatcttacacgtagtaatctgaatttcaaaggaatatctcacagggattttgtaagtattaatagaatagatgttttagttgacgaggataagtatataaaacatgtgcttgataggagtcgtactggtggggatttaaattcgtcagacttatatgatgaaatgcgtaaattagaatcaatgtcaccagaccatttttctatatgcaatgggcatgattttacatatatattaaaaatgatgtatggaacggatatatctgtaaataagaacatgcgtctggatgagatagatagttatatgcgtatgagttacgatcatcacacgtttaaaactacaaaattatataattgtctggaaaaattattaattttacattaa

SEQ ID NO: 289090 - DNA, 1164 bp, Morganella morganii
atgcttacaggtccaaatggatatggtaagacgatgattcttaaaatcatcaatggcattcttgcaaatgaattaaatatcctctgtaaacttaagttcggttttattaagattaattttcaaggtggttctgtttcaatttctcatgacactgagaaagatagcttgatattgaatcatctagaaaatagttctggaaacaccacgatagaaaaactcaagttacaaaaaaataaacccagtatggaagatgtattttatatacactggcatgagggagaagctaaatcaaaacaaaagtcacaaccggataagccattatcttcgaaggtgctaagtcacattacatcgaaagaagacgtatctttcatatgtgcagatcgattacaagtcaaagctgatgatgaaacagtcattgatttatgcgcaagaaaattaaaaaatttaatggaaagtgcacaagatgattccgctgcattatcacaaaaattagacgctacatttcctatccgattatttgagcgtttagaacaacaaaaacgattttcatcaggaaatattcaagagcgcttaaatggtattcaagataaacgtagacattacatgcggtatggtcttattcaggcagagaacgatctaatgcctgaaaaaagtacaagtcttcatagtagtaatgaatatctaggtgtcttggatctatacattgaagatgctcttgggaaattgtcaccgtttcagatattgcaccaaaagatcgatttatttgaatcaattttacaagaaaagattttagcttttaaaaaagtgatgattgatagagataacggattttttttcgaaagttcaaatggtgatttcattgatcgtaatatgctttcatcgggtgagcaaaaccaaatagttcttctttttaatttgattttcgatcttgtttcacaaaaagtaattcttatagacgaacccgaaatatcattgcacgttgcttggcaacaaactttcttggattctctcaaaaaaatacaaaagattaacaagtatgaaaaggtcattattgctacacattcaccacaagtaatcagtaagaattgggaattaacatatgatctgtatgaaatgattaaaaacaaaaatgaaagccaacagtcttcagaaggaaacgagtga

SEQ ID NO: 289091 - DNA, 369 bp, Morganella morganii
atgccttaccagcacagcgcgggcgcgtggacatcgggaatcggtcacactgccggtgtgacgccgaaagggaatcttactgagcatcaagcggcggcaaacctgcaaacggttgtgcttaataccgaacaacagctcggggtctgcatgccgctgaagataccactgtgcgcacatgacacgttgaccagtttctcgttcaacgtgggaaccagcgcgttttcggacacgaccaaagagctgtttagtggtatcaccagtgcgcaaagatcaactgttgctatatttttgtcaccactgaaactggcgttcgtttcattgtttcgccttgcgaaatggtttccgcatcatagcacccgacattattag

SEQ ID NO: 289092 - DNA, 162 bp, Morganella morganii
atgcgggatgacactctcggcacaacttttactcgttattacaggcacactgagggcgtcattgatacgatgctgcaggcaaatctggggttgtcgaagctggtgtctttcggggcgatgttcctcggaaaactggcgtggattgctgacttgggaggatga

SEQ ID NO: 289093 - DNA, 555 bp, Morganella morganii
atggcggtcatcggctatatccgcgtatcaacaactgaccaaaacagcgatttacagcgaaacgcgctcatcagcataaattgcgaccagatttttgaggacaaaatgagcggtaaaactgccgtcaggccgggactgaaacgggcattaaaggccatacagccgggcgatacactggcagtgtggaagctggacaggctcgggcgcagtgtcaaaaacctgatagccctgatatctgatctgcacgaacgcggcgcacacttccggtcattgacggacagtatcgacaccagcactgctatggggcgctttttctttcacgtcatgtcagcactggctgaaatggaacgcgaattgatagtcgagcggacgttggcaggattggccgcggcgagagcacagggcagagtcggcggacgaccggcggcattaacgcaagatgaccgagagcaaatcggccgtcttctggataacggatacacacggcagcaactggctattatttatggcgtgggggtatcgacgatttaccggtattttccagccacaacgtaa

SEQ ID NO: 289094 - DNA, 1032 bp, Morganella morganii
atgagaactttaaacttcaacggtaaaatttcgactctggaaccactgactgtaacagtaaaaaatgcggtctcaacttccggccatcgcttgcctcgtaacggtggattcaatgcagccccgtactttccaggtaccagcattcggggaactcttcgtcatgctgcgcataaggtcattgtcgatcgtgtgggccttaatgcagacggaaaatcacctttcgacctggcagaacatttcatgctggcccagggggtggatatcaatggtgaagccgaaaccttcgcgccaggtgaaatcaatgctggtgctgaactacgtagcaaaaacccgttaatcagcttgtttggtcgttggggattaagcggcaaagttggtatagggaatgctatcccggatggtgataaccagtgggggatgtttggtggtggtgcccgctcaattatgtttcagcgtgacgaaagtctgatggagtttcttgagacagaccaggttgatcgtcttgaacgcctgctcgaggaacaggctgaggcaagtgtggatatctctcagatcaaaacagagcaggatgcactcaaaaaggcgatgaagtcggctgataaagacaccaaagctgagcttcaaatcaaagtacgggagctcgatgaaaaaattcaggcccgcaaagatcagaagcaggaatctcgcgagtcaattcgccgcccgattgacccgtatgaagcgtttatcaccggcgcagaactcagccatcgcatgagtattaaaaatgcgactgatgaggaagcagggcttttcatttctgcattaatccgctttgcagccgaaccacgttttggcggtcatgcgaatcataactgcggtctggtggaggctcactggacagttacgacctggaagccgggtgaactggtaccagttacacttggagaaatcgtcatcacaccgaatggtgttgagattaccggggacgagttgtttgctatggtaaaggcattcaatgaaaatcaatcttttgatttcactgcccgctaa

SEQ ID NO: 289095 - DNA, 489 bp, Morganella morganii; identical to SEQ ID NO: 100630

SEQ ID NO: 289096 - DNA, 348 bp, Morganella morganii
atgctggcgatatgcgaatgtaagcggggagttcttgctttctgcttcttccagttcgcactgaatttcactttacgggcaagctggcgctgtaaccttgccagtctgctttggttctgtttaaaactgtttgttcacatgctggtcgaatacccaccaactgtgcaactgtcaaaactggttaacagcctgaaagccgtcacaagtcggcggctacggaatgaatttctggatttgcgggaggcgtacagtaagcctgttctctggtcacgcagctactttgttgggtcatgtggtggagcaccgctggaagtcgtaaagcgctacattcagcaccagcgcggctaa

SEQ ID NO: 289097 - DNA, 354 bp, Morganella morganii
atgtcaaaatcggcagcgggtacggtagacgagccggggcgcaacgttgcggcaaaatcaggtcttaaccgggcgatactggatcagggctggtacgaaatgcgccgccagctcgaatataagcagcgctggcgcggcggggaagtgcagaccgtaaacccggcatataccagccagaaatgctcctgctgtggtcataccgcgaagaaaaaccgtcaatcgcaggcagtatttgtctgtgtggcgtgtggttacgaagcgaacgccgacataaacggcgctcggaatattctcgcggcaggacatgccgtgttgtccgggattaaccccggacgcgcccgtaaggcggcgtaa

SEQ ID NO: 289098 - DNA, 423 bp, Morganella morganii; identical to SEQ ID NO: 95440

SEQ ID NO: 289099 - DNA, 1272 bp, Morganella morganii
atgtatgctctggcggatgtgaacagcttttattgcagtgttgagaaatgcttcagacccgatttacgcgataaaccagtggtcgtcctttctaacaacgacggctgcgttatagctcgttgtaaactggccaaaaaattcggcattcctatgggtttaccctggtttaagttgcgtgagcagcgcttcccggagcccgtgattgccttctccagtaactacgagctgtatgccagcatgagcgccagagtacatttctgcctggaggaattatcatcccgtgtcgaagagtattccatcgatgagtcttttatttgggctggtgggattgataactgcatgacgtttgaggaatacggacatcagctaagggatcatgttttccgctgcactggactgacgataggggtaggcctggcccctacaaaaacccttgcgaaagcctgccagtattccagtaagacctggccccagttcggaggggtactcgcactgactgcaggccagcgtaatcggatagataagatgctttctctgatgccggtagaggaggtgtggggggttggtggacgaaccacaagtaagcttcatgcaatgggcataaccactgcgctggagctggctcgtactaaccctgcattcataagacgaaacttcaccgtagttcttgaacgaacagtgagggaactacggggagaaagttgtatcgacctggaggatgccccgccaccaaaacaacagatcatatgcagcaggagctttgggcagcgtataacaacgtatgaatccatgcggcaggcaatttgccagtatgctgaacgtgctgcggaaaaattgcgccaggaacgtcaatactgcggtcaggtatcagttttcataaaaacctcgcctttttcaaaacatgaaccctattacagcaaagtctccagcgaacagctctgcattccatcacgtgatacgcgggacattatcgcggcggctggccgggctctggataaaatctggaaagaaggacataactatgcaaaggcgggagtcatgctcaacgatttccgtccctgcggagttacccagctatcgttatttgatgaagggaggtcgtatgcaaacagtgacgcgctcatgaacgtactggatacgataaacaactcaggcaaaggcaaagtatggtttgccggtcgtggcatcgcaccggcgtggtcaatgaagagagatatgctctctccagcctacacaacgaggtgggactcgataccgatcgctacactctga

SEQ ID NO: 289100 - DNA, 444 bp, Morganella morganii
atgaaaacttttagtttgtcctcaactccagccagaccacagcgcctctggcaggttgccgggttaaataatgctgatggtgtagcgctcctgggccaaatcaatgaaggcctggacgggaaggtggtgaaccggatcactgactgggccagaataacccagaatgacctgagaaaaatgtccggtatcccgtcaaccacatttagccgcagtgtgaaggcacgttttaacccggaacaaagtgaacgtctggtacggattatccgcgttattgatcgggcggtagatttgtttgaaggcgacagggaagccgcacagaagtggttgaacgaacctaaccgggcattgagctggaaagtgccagcagacctgatggcatccgaaacgggagcctatgaggtcattaagctgattacgcgtctggagcatggggtgtactcgtga

SEQ ID NO: 289101 - DNA, 471 bp, Morganella morganii
gtgatcttctacaggctgacgaaaacaaagtatctttctacggcctggaccggatatggtgcgaaagaggctggtgggcgctggaatagcgtgggggtgtcaatggtatatgtctccgaaacggcatcactaacgatgctggagaccctggtacacctgcatgcggcacagataatggactctttcacgctactgagtatcgatgtgcctgatgaactgatacaaagcgcaaacatggatgaattaccgggcaactgggctgatgaggatgcgcctcaggaactggctgattacggagatgcctggtcatttaccaggagctcggttgcactgcgtgttccctcagccttatcgccggtagagttcaattatctgttaaatcctgagcaccctgagttttacgggatcgtgcagaaggctcaacagataccgttccggtttgatagtcgtcttaaacctgacaggaagtga

SEQ ID NO: 289102 - DNA, 261 bp, Morganella morganii; identical to SEQ ID NO: 168463

SEQ ID NO: 289103 - DNA, 1182 bp, Morganella morganii
atgttgatgcagcatatcggtgtcggctattttgggtattaccgagcaactgcttatgcgatgaaacactctcttatgcccgagattgcgaagttaagaatgaaggctctgaacttctgggataagcacgggatccgtgccgcagctgatgcttttgacgtatcaacgcgaacactctactggtggcgccggttactgcgcaccggtggtccagaagcactaattccaagaagcaaagcccctctggttcgccgttcaaggcactggcatcctgatgtactcaaggagatcaggcgtctgagaactgagttacccaatctcggcaaagagcagatttttgtcaggctgaaaccatggtgtgaagcgcggcattttacctgtcccagcacgtcaaccattggaagaatcattgctggtgctcacgataaaatgcggatgatccccgtacgcctcagcgccaggggcaaagcccggttgataaaaaaacgctcagtgaagcccagaagaccaaaacaataccgcccggtaaaaacaggcgaactcatagggatggacgcgattgaactcaggatgggggacctacgccgctatatcattaccatgatcgacgagcacagcgactatgcgctggccctggcggtcccttcactcaacagcgatattaccagccatttcttcagcaaggccacaaagctctttcctgtcgctatcagacaagttgtcactgacaacggtaaggagttcctcggtaactttgataaaacgctacaggaagcctcgattaaacacatctggacctatccgtacacaccgaaaatgaatgcgacctgtgagcgatttaaccggacacttagagaacaatttattgaattcaatgaattgttgctttttgaggacctgaatttgtttaatcaaagaatggctgaatatctggtgctgtataacagcaaaaggccacataaatcactcgaactgatgacgccagtggactatattttacgtgagagtaaaaattgcaatatgtggtggacccatacatctccttgccttacggcagctaagaggctactctgttggtgtctagtcaagcagatggcctcgtgtggttggttaatgaaaattaacgtcctacggggctttcttctttctgcctcacaacatcaaaacactcaaacatcatga

SEQ ID NO: 289104 - DNA, 159 bp, Morganella morganii; identical to SEQ ID NO: 23262

SEQ ID NO: 289105 - DNA, 975 bp, Morganella morganii
atgaaaactcaaaacactccagctgatcacagcgacattctttttacccatatcgtgaatacgctggtggaccttgctaaacatgaaggtactctaatgacgtttgaaggccttctgcggaacggtatcgaggtagatgaagggatgatggatagcatgctgggggtgagtcaggactcagctgctcagtgcgtggttcagctaagggattgtggcgccataacgagccctgcggtatatgagatggttacacacgttgaacaactggcgatgcgtttagccccagactggtggaagcaaatcgtgccatggtcggttcagccgctgcggtactaccaggaagaggctagggcaaaacgcgagcgatttattgtctgtcagagggagcgccagtaccccttcaacgtctacgtaacaggtcaggtagaatatccggaagatgacccgatatatggcacgtacgttacagaaggtacgttcctggtaggtaaagcgaaaaccatacatgatgccctggaatgcgcaaaagaagcttttacgcggggtgaatggattgtcctggaagaagaagggcgggatgagttcgttgaccacctgacaggacgtgaccaggggccggtgagtttttccgaaaggactatagagatccgcgataagggtgacaggctggtgttaacaggcaatgcccgcacactggagtggcaccgccatgtaaccagccctgatgagatcgaaaagataaaagcacagcaaaaagacctctatcagaaagcaagctatgagagtggctgggacaactacgagactgcacgacagctgcggcggcaagctgaacagttatctctcggttttgttgaagaatgctggcgtaaccatccggaagtaattcaggcggtagagaagttcgagtatccggtgtttatagatgaggagatggctctttttaatgcagatcaggatgctggtattgactga

SEQ ID NO: 289106 - DNA, 378 bp, Morganella morganii
atgtccaggttcctgaagggtgttggtttgggtatggcgggcattgtgttgctgctgtgcggacttatcgcgctgtattattttgagtcgaaagcagcgctcagagctgatatcaaggcctgtcccacggttacagctggtcaggcaaccgatgccgtcattcaggacatactcgtgaacagagagcgcattttctctaagccacagctggagcgtcgggacatagtgattgaagaactgaacgtccagataggctattcaggaacccttgtccctttcaggatcaacggtgtcgatgatcgccggttttttggcatgtcgggatgtgcctctctcgactctgttgaatatgccacagagtttttgacccagcattag

SEQ ID NO: 289107 - DNA, 297 bp, Morganella morganii; identical to SEQ ID NO: 168466

SEQ ID NO: 289108 - DNA, 1068 bp, Morganella morganii
atgcgcagcaaaattagcaaaacctcgatctcacttatttgtctgatgctggtggccacctctgcggaagcagggtataaatccaatcggtcttcctacaaatcatccttccgcccatcgaccattaccaagtcgtacaactcttcaaccagaagccaggcaagccgcacggttaacgatacgccagcaccggctcgcaccaaaccactgaccaccagccagaaagcgatgattgcaggttatggagccgcattaacggtcggggcagtttccgcgtcctcagggaataaacagtcagagagcaccaccgggaaggtggagaaccagactggagggtatgctgttgtcagtagtcgacctcaggccaagggagataacgaagccgctgctgcaggcactacgccaaagaaatcagtgagcgggtcggagctggtggctaagaaagggactatacctgcatcaagtccaacatccgaaaaatcgtcgtctctcccgtcgtctcagagcattccaggaagttctgagcggggctcttcatctgtaaaattcatcccaccttcacagaaccttgtaagtaacatcatagagaaagataaaagtaatcatttcggtttctcgcatcttgcgatgctgtactggataacgagcagcagcaacagccatgcatcctcgcttacatccagcgacaaagagtggattcagcaacagatagaagagcaggaaagtagcggtgcaagccgcgaggcagctatcaatgagctcaaagctgccggggtagatacctcatcgatgacggttgcggataacagccaacacgcgtcgactgtctccttctcctacgatatgccgacagaattaaaggcgggtaaggtctggacgttcgttgtaaatgccacatggaatgataaaaaacaggctccgtcatgcaagttgcaaggcgcaaaatttatatcagacaaagacaagttatacggcatgtggaaagcacctgaaactgtcgggcagaaaacgcaaatgaagtgtaaagcgtttggtgtggaagaaattaaaacgctggtgtcttcctga

SEQ ID NO: 289109 - DNA, 348 bp, Morganella morganii
atgtatagccgtttcatgaacgatccacttgatgaggaatacctggtttcccctggcattgtgggttcctatgctgatggtgaaatcccggcagaagagattgaggtaagggaggcggtaatacgattcaaagtcacaggcgatcaggtgttgtccatgaacctgttccacaggctgtttcattaccggcgttacagtgaggttagggcatcattcaacaaaagcaggttagcgctggtggacgtggttaatcgttccccattccacaaagcagcaatgcggcgtatctacagtgatttgccagagcaaagcattgcccgtagggttctggttgatttcattggatag

SEQ ID NO: 289110 - DNA, 246 bp, Morganella morganii
atggagatgattacgaaaatagtatcatttgtaaaattagatagattcaatgaaaaattggacgacggtaaagcccttatcctcgctggttcctgtaaagacgtgaaacctctgaacatagcgagaaacatcatcgtaaggtcaacgccgctcaatgagcaaatggcaggctggtctgatgaagaaaaaaataagattgcacttgctgtatacagcaacagtaatttcagattcgtattgaattga

SEQ ID NO: 289111 - DNA, 357 bp, Morganella morganii
atgacatttctcaaatctctagactcgccgccgttcatcgcaacatatcgttgggcggggtcattcgatggacggtatatgccacaggcatattcgcttttgctggaactgaatcaacacacttatctgccggtggttaatgccgagtttgatatctgtgtcatcagctgcggcaaagagtggtggtgcttcaggctggtggatgtgaaatctgatgaacgtcaggaaggaatggtagcccggacggcataccggttaaaccagtcaatggggattgctgagcagatggttaacatgatccgcgcctggcagtccgttccgtaccttaatcctcctgcatctgactactttagttaa

SEQ ID NO: 289112 - DNA, 774 bp, Morganella morganii
atggacctgaccatgttgtcgaccatttttcttgtgttcgtcatgctgatcctgtcatgcatcatcctgtgcatctggccgcttatcagtaacatgttcagcgagcagcgcacacgaaatgcattaaagggggtgttagcagaccttgaagggacgcttatatctgacattaccctaccgctcaacgcctcccagacaacgcagatagaccatatctttatcagcacgaagggtattttcattatcgaagagaaaaactataccggtgacatttatggtgctctcgatgataaaacatggacggttgtatacggtttcggtaaagcgaaacataagatgttaaacccgtttgttcagaacaaaacccacatatccggagtgtgtcgggccataaagcggggtgatgagggttttgttaatgttgtgttactgacgggctccagtaagtttatggtagacccagtaccggagtggttgtgccgtaattgtgatgacctcgggaacaagttcactgcgtacgatactgagcccgtgtttagtgttgaggagactggctggatcgaaaatgacctgcgtaaagcaatgctgccgcagacgctgttgaccgacctgggtcacgtctattcactgaaactgaaacaccgacaaccaatatctgtaccgcacagggtgacctattttacgctactgactaccaccctgttcttccgtgcgctgaaaaagttattttcgcgtaagcgctcagaggtcatccacaagcagtaccgtgaatag

SEQ ID NO: 289113 - DNA, 1137 bp, Morganella morganii
atgtttaaaaaaagaccatcgaaacctgaaactggctcggttcaggacgtggtatcgcgtgaaagtaagaagttttaccgtttgtataaatcgcatgtgttatcaaaaataaccctgacgattattggtattgggtttgccggttttagcggctggtccatgtatcaggataaacagaaaaacggtaaaggggcagaccatatcgcggttatccgtatccatggtgaaatgggtactggctcgcctacaggcgacggtgtcattattgcccgcgctttacgtgaagcatgggataacccgcacgcaaaagcgatcctgattgaggccgaatctggcggcggtggtccgtctgacgctattaatatttatcgtgagataaacgagcttcgcgactccctccatggagtaccggggctcacaattgaaaactccgaccccacaacatccccgaataaaaaggatatgccaccagcgccctctgaagcggttaaacaggcgttgctgaaagccgtgggttctgggcatggcaaactgccagccgccgcccgggacgtccgccccatcatcgtcagtattaaaaatatgtgcgcctccgcctgttattacgcagcctcaccggctgatgcgatctatgcggatcccaacgccatcattggcagtattggcgtacgtatggaccactgggatgtgtccaggattatggaccgtcttggtgtggctaacgaaccgttgacggccggagcctggaaggcctcgcttgacccctggcgtccgattgatgacgaaaccaaggcctttctgcatagtgagttactcaacaaaatgcatgaccagtttatcaatgatgtcgaagccgggcgtaaaggaaagttactttcgcgtgaacaggcggacaaagaacagctctacacggggcgtttctggctgggggaccgtgcgaagcagtttggccttatcgatgatacagccaccagcacagaggtgcgtgaacgcctgagtattgtcttcggcaccacgcgttttcgcgactacaacgcgccaaaagcatcgttaagcagcatgttaggattgtcactggacgtgaaccttaaagaggctttatccagtgcgcttcacaccaccagcacagtgaggtag

SEQ ID NO: 289114 - DNA, 675 bp, Morganella morganii
atggctggaaaggatatgtcggcgcagagaatgacgatgatccggtttggattagggttgggtctgctgatttattttctgtttaacgtttacctggaagacactaacaaactttataaggatatcaccgctgaggtgaacgccagtaagttgcttatggatgtggatagatggcaggaggtaacgcgtaatacggaaaagacgtttaattacctttttgtcgaactaaacattacggcttacctgaataagactcttttgcctgaggatgataaaaccaaaccggcacgcggaatgaatctcgcggcaaacaaattcatgagcccgagctataccgctgcccgaaacatcccgttaatggtgtatcaggcgatttaccgctggtatttgctggctggatggttttttacattcctccctctgatgatagctctggcactggatggttattaccagtggaaaatgaagagatttgtttttggcgatgttacaattcagctttatcgcctctggttccgttcgctgtcgataatcggtgttttgataattgcttatctggtcatccctaacatgaatttattttatggactgacacagtattttccgccacttgccctggcgttgctcgctattgcaattaaccggcttctcgcgcactaccaaaaactcatgtga

SEQ ID NO: 289115 - DNA, 1098 bp, Morganella morganii
atggaatgcaaacaggtatcaagggaatcgttattcggtatgaattcctcccagcccaaatacatttcacgtgcaaccaagacactgaaactgtatggcatagatgttgatgacgaaggcctgccggaactactgtcacgttatgcgaagaagcttactggtgacatttgtaaggtctacgcccaatacacggttgatagtctcgacgtgctggcccgcacgctggcggagttttttattatccgttatgcggtgactatcgttacgcacgatgatacagaggtcacctgcaactggtctgtatcccagggcccttttaccgagtggctcaaggagcagctgagtaactgcatggcgaagagccacacggttgaagtgcagattgataaaaatcaggaacgcatggcttttatccagctcaatgccgagcgtcttggctggtacctgctgcctgagtttattgatattgcaggcttcctccccgttttccttgagatgcctgaacaggttgaataccaggttatgcggcgcaagcgacacggtaaggtgccagacatccaccagcacgatctggggattttcgaagaggatgctttgatatctggtttgaaagaaaagttacttttctggagtggcaacctgagcgatccacaggatgaatacacgtctcttttcaaccgtgttatagatctttccattctgggtaaccgccaccagcccgcgatgtaccgtaaaagcagcattattcagtcgttccttgatgaattttccgcctcagtgctgactcttcccgttcgcttcaacgacgatacccttatcgcactctggacgccatgggcagagccctttagtcagttctcgcgcttgcggccggttgaagaagatatggtatacacgccaaccccgggacaggtgcgctggaaaaatgaagatgttcgcagaaaagtaactttttctctcatctcccggttaatcgcgtcggatgacctggcgtgttcgggaattcttcacggctggaaaaatcattacctcaacagagaaagcaacattcgcctggcagccctttgggcagagctgttcactaataaaactgactga

SEQ ID NO: 289116 - DNA, 2127 bp, Morganella morganii
atgaaacgtagaagccgtaacaatctccatacgcaggaaatgctctaccgccctgcccttgaatttcgttcagcgctaatactcatacttttttctgcttacgtgcttatagactcatggaccagtaagtacggtatcagtgaaatacccttctattgctctctggggttaatagcgatggcaggatggagggtatggcacggggtaccggtcttcatagctcactggcgattatttcatcgcacgatggattttttatcactcgaagattttcgaatgattaataatgcacatttttttgctgatgaccgtaaatatcagaaactggtcagtttgcaggagtctggtggagcaccatcgaagaaaagtgtttaccagctccttcgtaagaaagaaaagattgtgatcccccagcgtacaacgtttctgtgcaatggtttcaaatggggaccggagcactctgaacgtacctaccaggtgcacaacctttccagtgatatgcatgaggtgcagttaccgtttatattgaatcccgttacccgtcactatcgaaaacttgccttcgacctgggcgggaattatgcgattttcggcgttgataaaaaaatcccgatattcgtcaatgaagaaaatttctttggacatactcttattacaggaaacgtaggtaccgggaaaacggttctccagcgccttctttccagttcaatgctacaccttggacacatcgttctcgttgttgaccctaaaaacgactatcagtggcaggaagggttaaaggaagaatgtgaaagtcttggtaagccttttatgcattttcacgcaggcaatccttcaacgtctgtatcttatgatgtcagcgctaactatgttaaggatacagacctttccgcccgtattatgagcattatttcaggtactgaaggaggtgaagatccgttcgtgcgtattgcagaggggcttgtcacaacggcgataggtgccctgaaactgggtggtacaaaaccgactatccagaatatttactacgccatacgctctaaacaggatctcattgttaccactcgtaacgctctcaggggtttttatacttaccatctcggggctgactggcatttaactgttcaggtatctccaaatcttacttttgcagacgaaatcgaaaagctgaaagaatatttccactgcaactactttgaagacaattctcccaaaaacatgcatggcatggatacggttctggaatgttttaaatacatctccggcgatgagtcgcactattacaaaatcactgccagcctgatgcctatgctcaagcgattgtcccagacccctatggatatattgctttcggcgaacgatgtcgagaaccctgaccgtaacatcgttaacagccatggactctttaacagcggtggcgtgctttacatttcgctggacggcctgtctgatccggcaacagcacgggacctctcccagctgattacttcggatattgccgctgaggcgggtagtcgctataacacagcatctgatttgtccactgtgcccagggtttccatattcattgatgaggctcatcaggcagttaatatgcaactgattaaccttctcgcccagggacgcgcggccaagatcgcattgttcatctctacgcagaccatttctgattttgtatcggccaccagcgccgatactgctgaccgtttaacgggcctttgcaacaactacatttccacacgtgttactgacgcgaagactcaggagcttgttctgaccaaagtcggccagactaatgtctcaatgaaccaggtcacttacaccaccagtgctggtacaaaacagtcacatacagatttcaatggttccatttccgagcgaaagtcgacaacgatggtaaatgctataccacaggaattactgtcgatgatcccaacccttcacttcatcgcctgcttacaggacgggcgtaaaattgtgggccagatgcctataaccgtgccgggcaaatcaatgcgtaggtcaacaaccgtctttgatatggtaacgacttcgccctacaaactaaaaatgagacgtaatctcaatgtagaagaaatacttagcaaatcacagaaggtgggctaa

SEQ ID NO: 289117 - DNA, 2934 bp, Morganella morganii
atgagtattatatccaggctttttttgaaaattagggtcgccctcttcggagggcctgaccacgatatcatttttgatacagatgatgagtacgatatcccgcacacgcctaacaaggatgtgcaaagctatcttgattatccaagtaagcctgcgggtataactctcttttcagagcgtgagattctatctgtacatgctaaccggttacaggaaattaatatgtatatcggtttgccaaattcagacctgagtgaggacgcctatactttcactaatctggtcattaagccattgatggaatatacacgctggatacatcttttacctgcgtctgaaaaccatcaccatgccggtacagggggcctgttaacgcacagtttagaaactgctttcctcgctttaaaatttgcgtacagtactgaattactccctattggtctgcaggatgaagaacagatccgaaaacgtcgttatctttatgcagcctttatttgtgggcttttacatgacgcagggaagatatttgatgtcgacgttatttcgtccaccccgggcgttaaaagcacctggcgtccgctctcgtccagcctgatggactgggcaaagtccaaccgtattttttcctatgaagttatctggcgtaaaaggcaggctaacgagcattccgtgcgggcacctgtattcctggaacgctgcttaaacgatacgtgccttaattatttgagcgacgtggtcaaagaacggttgtacgataaaatgctgtcggctttaggtaattatacaaccagtgatgattttatttctcgttgcatgagaacggccgactggcattccaccggcaccgataccagctaccggtatgataaacaatccggtattcgggcttctgatactgctgcacgagccatcgcgattctgaaagacaacatcagtactcttaatattaatggtttcgactcatcgtcagtacgacatgacagaaactcaccgcctccggtacatattatgattatcggtggctctgtttacatcaacgaacatgcggctcttgatttcatactgaatcagtttaaacatcttgggattaacttcccggatggggatattggccgcaaagcgttaaccgaccttctgttaagcgggggctatatagagccttacggcgaacaacgggttgcacactttttccatcgtggggattttacggaaactgacatacaacgaatgtttgatgagggtatcaaaggtctgagctggttctctctgttaaaaatcaaatgggttggctttctgtttaaatacgatattctgcccgaaagtacgccgggtattttcagtattaatgagactaatgactatgtttttgtcgaccgcaaagggaatgacacactttacgtacgccctcttgttaatggaacaaaatcaatccgtcttggagtaactcaatccactgataacgctgcagtctcaacggctgatacacaacctgcagcggaaagtaacagtacagtttcagatacagataatactgctgattctgaaaatgatgagacgacttccggtgagaatcagcaggttcaggaaaacactaataaaacaacccttagaacagatgcatctgaacctgagacacaagaacctgattctaaaaaacctgttaaaacccgccgtaaaaaaggtgaagtgagtcctgatgagtacatttccagactcctgcatcagttcaaaaataatgccattaatgctaatgaactggctttaatcgatggggtcctgtatgtatcagaaactcatattcgctccatagcgccgcttgaagagccgcgcttaatggagaccggtctttttgatctttctttacggtcaggaagcctcgatgaagaattcagcattccgtgcaatgacgggaaacggtatgttcagttaactgacgaagtatctcttgtccagttacgtcatcaacctgatattagagaggttgagatgctgcctttgctttctccagatttatttggtggggttaagactgatgatgaaggggtgtctttcacttttccgccgccactggctgaggtgaaacctgagccactccctccggaacgttatgaagagcaaacgcctgaacagactcgaactgaacatgaacctactgacataccatcagcggaattttccgatgatcaggaagatgatgttgaacaattctgggcggattacgcttcatattcgtacggtgatggctgtataaacccgttaaatcaaaccattgagagcactgatgttgatctagcacaggtcaaaaagtcactttcagagcatacaccggatgttagtacctctgtttacggaaaacacctggcagaggaggatgatttcgaccaaacggaagaggaagcgcaagaggaagattctggtgaggggatcggtgacattaacagcgactttgaagcgctgttttcccgtcagagtcaaattatcactgatccggctgtcgtcattgcagacaacatagaacagttaaaatccagtactccacccattcaggcgcatgctgatgccggaaacatcgaaacgcttcattctgatattgatacgattattattcagttaaacaaaatacgactgaataactcgccaattcagaccagagagttacgtcttgctattgttgtaactgatatcaatttttgcatgaggttgagaatctctgaagacattgcttcatggggttttcgtcaggaggagttaactgaactgcgtgctgctttcgcgcattttcctgtcgcgaaattaaaggtgggtataggcaggcctatcagtcactacatggttcgactgagtgaccttcaacaaggtgcgctgcgtaataacattttctacgaagaatttatttcgttttttaaccatcaggaagtaagccatgaaacgtag

SEQ ID NO: 289118 - DNA, 789 bp, Morganella morganii
atggctgacaacgcatccccaaaaactgaaccgcgcaatcaacgaaacgccggcaataaccgaccgttagggatggtcatttcaaaactaaagccactttcaagtgagttctatacgcactttcatgaaaaaaaccgagcctgcctgcgccagtttaacgccatctccaatgccatttataatattttccgcctggtagaaggtgaccaggcgacaagcactaaagttcagaaatggctctccggtgtttacgaagaactgtcgggtaatgtaaataccttcaaagagcagattgacaaaaatgtcgcccgactgcctctggatgattcttcattcgaagggttcgactatggtgaatttgaaattcgctggaaccacccaatgacctataaattgctggatattatccagaccatcaacgttctgactcgtcaggcacatcagttgtggttatacggtcagatatcacaacaggttcatgaccgaattatcctgcaactcctgagctcactgcgggttgcgatggacaacataactaaaatactgaacgctgaaaaccgcgtgaatggaaaatacgacgcattgccattcattcagaacattaagcggtttaaatcggtggaactttatattgccagtctcgaaactaaagcccctgttcagtccggtcacagtgacagttctgctgatgctggcagtgagccgacattaaaacctgaagcagcagctggcaccggtaaaccatctgacaaaacacagccttctgctactcctgtttcggtacaataa

SEQ ID NO: 289119 - DNA, 465 bp, Morganella morganii
atgaacccgataattacggcacatcaggaaatcgttatcgagaactcggttcgctatatcgagttactgaaatcggaggcttctaaaattctggatgaatactgggaggcctggaaggcacgaaaccaactgatatcccagaccacgtatgcaaacgggggaaggtttatacctggtcgttttgctcctgtgctgagaaaggttggatcgtcgcaaaaactgacaattgtatggaaagatttttcgcccaggttcaaaaacaaaattgaacatcatggcgtggttgttaaacctaaactcggaggatacagcgttagttgttttaaaaatgctctggactgggaactggagatgatccaggaaacagaaaacaaaattaaaccaatccgtgatctcctcgcggaattccatcaacgaaaactggccgacatcaaaagactggaaaaactgaagaggttaatataa

SEQ ID NO: 289120 - DNA, 756 bp, Morganella morganii
atggacgtacaacccaacgtacagactgacacggtcattaaggcgtttctccgctcggagttgcagttgatacgtagtcagaaaaaactactcagtgtgttgcctcgtgatctcgcgtcggactaccgctatataccggagaacctgctggagcgttttttccatcccgccactgatgcgcgtctaaatagaattgccctgtcagaagccagaccaggtagcctgctagttccccgtgtcaacgggaagcctgttttatggggtgagttaataaaattaattctggatgactctcagttactgaagtttgaaacgtacggcagaccttttgacagtaccgagatgaaaccaaatgagccatgcgaattattgagcgggaagcagtatgtttataaacccgtcgaccttgagttattcaggaaaaacatcgtctctatacagatgaatttcctggtcaatctatggaatctggccagatttaaaccggcttatgtcagggcttatttggccctgtctaatgacgcttttcagatgctcctcgatacagagatgtccgcctttgtggaggtgacaaatgtggttcttttcccccggtttataacctatgataccggacgacgtgattacaaagtatatgcatggggttacgagattatggctgatgttctggaaggtttcattccaagggaaaatatggaaaacttacgggtagaatttgctcttaaagattcatatgagaagctaaagttattttag

SEQ ID NO: 289121 - DNA, 525 bp, Morganella morganii
atgggctttaaaaagagcgaggtaagccagctaaatagtctggcaagtgccataaagttaatagaatttgatgccaataaatataccataacacatttgtatggtcgtaaagttgccgacagcctggagtaccccaaagggataaatacaagaaaaggggtaggtaaatggctcggtgaaaaatccgccatgttgctgtcaaatgtcgttgtaaacaatgctattcatattttcggatatgaccctcaaaatcctacagaatcaaccagagaaatggattttaatgcacttgttgatttgttaattaacacgggctatacgccggaatactacccgctcaaggtcaacaggattgtcgaagttctcaacgggatgtcggaagctgactataaagactattgcctggtatgtaaaaagcccttcatacatgcgccggacaggtatgattcctgcccgacatgtagcgcaaaaaaatgcaaagttgctattatgcgttattctcagtccttagttccctttgaataa

SEQ ID NO: 289122 - DNA, 543 bp, Morganella morganii
atggaaaatcagcttttacacacggcaagcaccatctgccatatcgcgtttgcatcgaagggaataacgacaccgtcagatgagcaggggttttttgatctttccgacagcatccataatcgcctgcgtgcgatttctcctgaccttcatgtccgttgtgcctcttatttattcctgcctgtcattcatacagagttaaaaactgccgaccttaaaaaccattttcctgcttatatcctgcaacttgttcaggaacttgcaccgttaaaaaggactacctgtccatccggaaaaatcaggtttgataaagagctggaagccatgttttcagccagtccagatgctgtcagcattcgtctggccgaatatctttcgggcccatcccgttttctccggatgataaaaaaccctgaccgtaaggcgagagttgagaaaatactcactgccagaaaatgtaatctttcgcatcagctgtcactcctgatgcaggcagaagaaaccgtgtccagatttaaatcgccgggtaatacctggcgtccctga

SEQ ID NO: 289123 - DNA, 1038 bp, Morganella morganii
atgcagaacaccaaaacttttatcctgaaagccgccattagttcgttgctggtgctttccactatgagcctggcggatacgcagaaagttgagaacacaccttttgtttcgggacaatccctgaaaaaaggtttcttctggtataacgataaagaaccggtaaaagatgaagaagaacaaccacaacagccattaacggggtcgccgtctcaggacaaaaaagaagagcttaagctcgattcacgctggctaaaagaaaatctgctgaatcttcgttatgcggcaatggataacccgaccaacgaaaacctgtcccgctattatactgcgcaacgtttaatgctggatattgccacccgtttctctgaccggacccgcgactatttccttaataacccgatgatgtcagaaaaacgacgacagccaaccgaaactgtcgcgttaaatgcacaccgtgcaggacttgaggaaaatcagcaaaaagcacttacctccatctttcagaaaggtggattgtttttctttttccagagtacctgtgcgtactgtcacgagcaaagccagatactgaatttcatgcagaactattatcacattgacattatgccggtgagtatagacgggcgacctcttcacaatggtttatttccccgttatggacgggcaacgatggagatgatcaagcaatacgccatcacagaagttcccactatttatctcatgtccaatgatggttctcaggctacaagagtcagtaccggtctggtgtccgctgacgaactgaaaaatacgattattcttgcggccagaggtatgaaccttctcgacgaagcgacattccagaacacgctcgatattaagaaacaatatgccattggcgacagagatgttctgaccgtgaacaaagagcgctatgaacaggatccttatctgcttcagcacataatggatgaaaaacttagcgggtacgacatgccaacaaccgatcgggttaataccggtatttcagaaaatgaagggggcttaagtggctactga

SEQ ID NO: 289124 - DNA, 1356 bp, Morganella morganii
atgttctttggtgtgttctccatgcagcaagtccatgctgccaacgtcatggagggcatatttaaaggtatggtggcttcaacagatcccgcttccgtaagaacggcatcacgtgtcggagctgttggggggagtttctcataccgccagcctcaggtgaataccaacctcgtcaatgtcagtttcccgaaagccagcgtcgggtgtaacggcatcgatattttcctcggcagtttcagcatgatcaatggtgatcagcttgtgcagattggacgcggtattgcgcaggggtcagcggtatatgcttttaacacggcagtatcggcaatctgtgccgattgcgcagcgatcattgccaacattcaggacaagctcgcagcactgaacaaatttgccaaagacagctgtaacgcaacctatgagtttttgcaaaacgggctgggtacacctcaggagtttactgagaaaatagggctcggcggcggcgctgttgactccatggtatcaggtatattcccggattttggtagcaccatgagtcagcctgccagtgaagtcaacaaaaagaactatgcaaaagatcctgatgcctttaaagagaaatatgcagggaatattgtttaccagggattcatgagcattgataacggcaatatgaatgtggggggcgtgactgaattaacaggttacaaacttgcagaacaaataatgtcgcttacaggaacacttatcgtcagctgggatagtaatggagaaaattcagcgataacaccgatcccacctacgatgaaagccgctgatttcataaaggggacaggatccggcaacgttaaattaaatgtttgtaacccaacacctgatttacgcagtaacaggaaagcacagtgtcttgaaatgcgtcaggactctatacaatttaaaggtctttctgaaaccattattgaaacattactcgaaattcagcgggctgtcaggaatgacactgagttgacgcaagaccaacgtaaacttatcagtatgttaggtgttaataacatcattccgactcttcagaccttgtctgctgctgagggggttcaatacatcaatgatatcagtacgatcgcggccaaaaacttcacaatagagttgctgagtagtgtgcagaataaaatgacgaatatgactttgccttcagaggcaatggcatcgtttaaggaccaactagaaaaaataaaccaaaccttcagaaaccagatccgcagcgcttcagaggttcagtccatacagaacactgaggaaaaaacggtcctggcttactgggatatggcatacgttaaaaaacggacctatggcgatagcgggaatggtggctga

SEQ ID NO: 289125 - DNA, 3939 bp, Morganella morganii; identical to SEQ ID NO: 100613

SEQ ID NO: 289126 - DNA, 288 bp, Morganella morganii; identical to SEQ ID NO: 100612

SEQ ID NO: 289127 - DNA, 357 bp, Morganella morganii; identical to SEQ ID NO: 100611

SEQ ID NO: 289128 - DNA, 129 bp, Morganella morganii; identical to SEQ ID NO: 100610

SEQ ID NO: 289129 - DNA, 612 bp, Morganella morganii; identical to SEQ ID NO: 100609

SEQ ID NO: 289130 - DNA, 282 bp, Morganella morganii
atggctaattttctgcattgggattatgtaacttattgtttttatgggctgtttgccttctccatcgttttactaggcttacagaaagttcttaaaaaccgaaaacaatcttgtgctgccgcaaaacaggctaaaggttttgaggcttcgtccggtgtatctggaattcatgtttctatacagagaccgtctcatcaaaatgaaggaagggttgaggctcttcatgaaaatctaggcaaaaactatgattttgaccgagaatatgattttgagcgttattaa

SEQ ID NO: 289131 - DNA, 3342 bp, Morganella morganii
gtgaatgaatcatcaataaaaaccgaaaatgtgttcctcttctggagagccattgaagccttaacccctcaggatattgataaggaaaatgcccgcgacaaactcaacccggtttacaaagtaggggcaggatccatgcttccctgggatgacccggaacatacccgtaaggatattgcgcctggcaaagtgtggcgctactccgctcaggcgggggtttatcatctgagcgtgattaccaaaatgctggaggataaaatcggtgcccatgaagcggtacctgaagaacgtaaatcagggaaatgcaggctttttgatattggtttcagtgaagaaggcatcccccagccagccacgttcatgttatccctgtctgcatggtcggcggctcagatactcaggcatgatcgcggcgtttacgctcttcatgctcccctttgctccgatgtgtccgacctgcccgcaccaaacgacagcctcccgctggtggatagcggtttttacgattttgataatctgactcttcatctcatgcagtgggtggacaatgaggcttatcgattacaggaggagggacagaaggccgatacagaatggttgaagacgcttgagaagctggtcatcgcaaaactgtattttccggtagaagccatggatacgacgatcgtcagtgtggttaagtgttccctgaccaggaaggcgaaagtcatccaggaagacagtgcaaagaaagacaataaaaagaaagaagcggtgcccgatgacctcattaacagttttttcattcaggaactgcgaaatctagacgcggagtggaggcaaggagggggtggggccggttttaaagactttatcatggcgataacccgggataaccaacagcgcctcgatatacgtactgaagaaggcctggattttgcatttgagaaactgttgcccacacagccaccagctggctcctggccttcaaagtacccgctggcattcagccagcagctggccgtcaatgaaatctggaccagaaattacactgaaccgggtatttttgctgtaaatggtcctccgggaacggggaagacaacactcctgcgtgatgtggtggccgcagtcgtcaccgatcgggcgagaaaactggttaaactcggagactctgcatttaaagccaaagacagcctcaaatacgatgacaggctgataccctattattcgcttcacccgtctctggcggggagtgccatcgtgattgcatcgtccaataacggagccgtggagaatatctcacttgagctccccgggatggaagcggtaccggaggatgtgtcagatcgcagcgattactttggcgggctggctaccgtaatacttaacaggcctgcctggggacttctggcggcaaggctgggcaataaaagtaacagagagcagttcgttaacacactgtggtggggaaatctgcagaaaagtgaaaaaggcgatgaagcacctccggagaagttttcacccgaacgtggagaggggctgaaataccatctgaatttactgcgaccgccacggaaagtcagagagcctgcactgacctggactgaggctgtcacacgttttgaacaggcacaggcggtggaggaagccgagcgtcagcaactggtcgccagttcagggctaacgcataaaattgagtggctcgaagaacaacgaagagtgtgggaagaaaggaagcaaaccgcaacgcttcagattgaggaatgccggaacgcgctacaggcgctctctgacagactcgccgcgatggaaatgaccctgaccctgtccagtggagatcgggacgaactcgatcagcgcatccaccagcatgaaaaaaataaacccggccttctggctaatctcttttcgctggggaggatatcgaaggcatggtgggatcgttatcaacggctgacagacgaatcagattctttgcgggcgacgttgactcagcaacggcaggaactgcagctggcgcaatcagaaaaacataatgcagacaatgaactcaggagccttgagcgtgagctcactcaggtgatcagcaacggtcaggcggtctgtaaagagcaggaacagaataataccttgctgaagcaggctatatccgatctgggagcctcctggccggagcggactgcaacagatgaacgaagggagttgtcagcaccatggcttcatgagcgctggagaaaggcgagggaagatgtgtttatcgcagcattagacgttcaccgggcgtttattgaaaataatcctgtaaaaatggccgctaatatagggcttgcaatggactggttaaaagggcgaaaactgaccgaaaaacaggcgggtctggctctcgactccttatctctggtcgtcccggttatatcaagcacctttgcgtccatgccccggatgttcagggatacaggtcaggaagcgataggctggttgctgattgatgaagccggacaggcacaacctcagcatgcgattggggctatctggagagcaaaacgcacggttctggtaggtgacccaaaacaactggagccggtcagcggtattccgtccactgtagagggggcgctgggaaaacattataagatcccgtcctgctggtggcccggaaaagtctcagcacagatactggcagaccagacgatgaacgttggcacctatctgcccgacccggagtcagaacagatttgggtgggctgtccgttacgggttcaccggcgctgtgatgacccaatgttcagtatcagtaaccatattgcctatgacgggctcatggtccacgggaaaaagccgggcctggtggatttccctgaaagcggatggctggatgtgaaagggaggacatgcgagggaaactgggtagtggaggaaggggcggcagtggaaaagttacttttggcgttgcgtcaccagtattcactcacacctgacgacgtgtttctgatctcgccattcaaggactgcgctaagcagcttaaccggatcgcaaagaggctgggattcaggatggacagaacggggaccgtacataaaacacagggcaaggaagctactgtggttatcctcgtgctgggaggcaacataaaaagtcagggggcgaaagcctgggcggcggaaaaacccaatcttctgaacgtcgcggtaagcagggcgaaacaacgcatttatgtcatcggcgagcgtgcattatgggagaagcaaccttacttttccacgctgtcccgggcactgggaaggctggatgtgccggtgagcaacagcaacccgcgtgcgatgtcatatatggaagagtacttaaccactgaatggcgctga

SEQ ID NO: 289132 - DNA, 615 bp, Morganella morganii
atgactagattattttttggagcggtgctgttcgccactttaaccgtcaatgcaaatgcagcattcaatcccccaccggatcgaccgaagccccaaaatgtacccgaaacggttaaaaacgaatgtttaactgacgccgcgcgtttcttcgggattgaccgtgaccttgtctttactctttttgataacgaaggtggaaagattggctctttcgtccttaacaccaatggcacatgggatattggcccaatgcagattaactcatcaaatctggctgaggtgaaatcccacttccccgcaattacctggcgtgagctcgcttatgacgcctgtgcttctttttgggttgggacatggtggctgcaccggaaaattattgaccgtaaagggaacgtgtttgaaggtattgctgactacaacagtaaaacgcctcgcgtaagagccaactatattttcaaatttatggaacgttataaccggcgtctgcagcgtaacggcaaaatgatgcagctcaatgcatggaccggtcttgatcgtgtaaagcagaatcctcccgaggtaacaggtaagctcgctaacaactctcatcagcaatcctggcaatcctatagataa

SEQ ID NO: 289133 - DNA, 729 bp, Morganella morganii
atgattaaacccattgcagttgctctgatattgttaactccatcggcctatgctgatgttgatttacctgcagaattaaaggacaaaattgaagccgttggtatcaaccccgtctctgcagagaaatctccggtaagtggtatttactcagtcttttcaaaagaagggacgagttacgtcacgtctgacggtgaatacatcttcaccggaaatttattcaaagtgaaagggacagaagtggaaaacaccacggacgagtttatcagtaaagggatgcgatcctatattgagaagctcgatactatcacctacaaagcaccagatgagaaatatgtcatcggtgtttttactgatatcacctgtggcttttgccagaaactacatagcgacctgcaatcctatctggataaaggcatcactattaaattcatcgcatacccacgtgccgggatgaactccatgatagcccgaaacatggcatctgtctggtgtgcagatgacaaacctgcagctttaaccagagcaatgaaaggggatggtttgcctgaaaagcaaccgacaaagacctgcatggactccattcagagccaatttaatgcagggaacatgttcaaactctcaggcacgcctagcggtttaagcctgaaaggtgagccgatggtatttgcggggttacgtgaccctgaccagatgctgaacagcctgaaaacggccaatcagaaaaaataa

SEQ ID NO: 289134 - DNA, 312 bp, Morganella morganii; identical to SEQ ID NO: 95403

SEQ ID NO: 289135 - DNA, 342 bp, Morganella morganii; identical to SEQ ID NO: 95402

SEQ ID NO: 289136 - DNA, 957 bp, Morganella morganii; identical to SEQ ID NO: 95401

SEQ ID NO: 289137 - DNA, 957 bp, Morganella morganii
atgaacaccaatgtacatcatgtccaagaaaatttttatatatcattgcaggattgtataaataaagaagagaaaacaaaaaaaacatgcattgagtactggcgacgtgaagctgagagggcgaaggaagaaagcgcaagacgtagagcactgtctataaagataattaccgaaaaaagcatgattcttgaaacgttatttctaaatatacaaaaaacaaatgcgctcaaagaacagtatgaaagaaacctgatagctaaatggggtggcgttattgatgacgataagacaaaggattatggtatattcctccctagtttggaacatttatctgcttatgtatcatgtgcaaagaacgatgaatatagcagggaagtgctttataacagacccgaattatcaaggggtatcaagtatgacaatagttattactgcccgcaggaaaaaaaattcatctatatgaggaatgacaaatttcgtccagatcttgaacttctgacaaatcctccttatcctgatttttgtaagaatttactttacttttatgtcaggtcattttcgctgcatctcaaaaaaggagagcctgggaaaccattggagataggtattcgcaattcagtgagcaaaaacacttatgaagacttgtgtataggtctggaaatacttatgccatacatgtgcaaaactgaaagcggcaaagtgattattaatgatgaaggatacttatcatgtgatagctattatagaagcatactggttaacccgaaaacagggggggctgagttagttatatacagaaaggggcgctttgaccatcgacagaaaccgaatacacgagaacctcgtaagtggttgaatgaagatataataattaaagaatttcctaacatacgaattgtttttctatatatcatatcgtgtcggtatcagcagcacttcaaaaacagggatatatag

SEQ ID NO: 289138 - DNA, 516 bp, Morganella morganii; identical to SEQ ID NO: 95399

SEQ ID NO: 289139 - DNA, 603 bp, Morganella morganii
atggcaggggcattgttttcactttctgctggtggggtgatgtttgcaacagctgttgttattatcatctttagtgctatgctatatgacagtatagttaaaagacgttctaaaaatattaacccaccagagtttacaggatcacctcaactagcatcttgcaattgttcaggtggtactgtcctgctttatcttgattttgatggagtcctccatcgaaggatgaatgagacatttgaaagaatgcctctactggaaaaaattttaaaacaatgtccagaattacatatagtcgtgtccagcagttggagggaaacaatgactttagaagggcttaaatacctttttccagtagcattcagacacagaataataggtgttacaccttcacttcaggaagtaaaggataccgaatatgttcggtacagagagtgccttttacatgccagacatatgggggtcaacaagtttattatcattgatgatgaatcacaccgttttccacctgggtgcgaaaatctggtgtcaacgaattacagtgaggggatgactgaccaaacagtagcatctgtcattatgaaatattgtcagtacttaacatga

SEQ ID NO: 289140 - DNA, 657 bp, Morganella morganii; identical to SEQ ID NO: 95397

SEQ ID NO: 289141 - DNA, 480 bp, Morganella morganii
atgttaagaatgttacaaacaccggggttgcagagtacaatgataattaatcaaaaaatattagaggctgatattacaaatataatcaatacatttgaaaggctaatggatgaaagtaataaaagtattataccagtaaaatccagacatgttgatggcttggccttgttcgaaaacatgtatatacgtgcacgtagcaaacatgcatctttgctgggtaaacctgttctggttgtttcatcagtttctgtatttatcactaatcaaggctgcttcagtacacttctttctcacttaaaagcccattgtaagaacaagagttacctgttaaaaattgagagcgtaatctctcaggaactcaggagatatcttgccaggcaaatgttcgtattcattggagaagaatgggagtgcgggtctggttattgggtgcctgaagatgatccagtatacccatctttaaatacactaccttattga

SEQ ID NO: 289142 - DNA, 510 bp, Morganella morganii
atggccaatatccttatgcccgattgtcttgtgaagttaaacaatctcttacaggctattgagaatgcacccgttgagtgcgatggtcatacattaatgataagcagtgctctaaatcatgcaggcatttctcatcaacgaatgtgcggggtagttaaaaaccccaaaacgtattttgagttatatccacatttctggattgagataggtgaattcactctggattaccgactcaggatatgggttgagttatattcaggtggaaaactatcagagggtgcccctcacggcatatttgatgcgcgtgggcttgagtatctttacacttctggaagcatttgcccaccacctgccctggactttaatttattaaacttaatcagtgatggttattacgaaaaaattaactttaccgagctaacaacactggcacattctgtagatattagtttaatcagtgatgttaagaatgttacaaacaccggggttgcagagtacaatgataattaa

SEQ ID NO: 289143 - DNA, 198 bp, Morganella morganii; identical to SEQ ID NO: 185147

SEQ ID NO: 289144 - DNA, 1221 bp, Morganella morganii; identical to SEQ ID NO: 218052

SEQ ID NO: 289145 - DNA, 1149 bp, Morganella morganii; identical to SEQ ID NO: 278490

SEQ ID NO: 289146 - DNA, 759 bp, Morganella morganii
atgtatattatgtcattagattcaaagatgaaaagaaaaccagtgattatttttctttggggtattgtagttggtattggtgggtattttgttttgactgtcggggcattaaatggattgtttgatttatatgaaaatatttccgacaggttttttcaaaaaaaagcagaagataatataaatgtgatttatacgggctcgtctataaagtatatagaatcaatatttggtgcgccggtaaaggaggaacactcggagaacggcgagataagtgaatatacatattcgtttaagaaattctatcttcaagttgtttataataaaaataacagggttatattttactctgtaactagtaaagataaaaatttccatcctaaggttccttatcttggaggggttcttggtgatagttttgaaagttttggtaataatattgattatttacagtctggttactcttcaaaattttatcagtacgaagaggggcattttttagggtatccaggaaactataggaatttctatctatcctataatcctgcgggtattgagtatatggagttgaaaccattaactgattggtataacaataataattcatatcctgatgctgaagaacttattgaatttagaaaaaataatgcaccgaatacatttggtgtaggtgatataaatggatctcatgatggacctgagttattttatgggattggaattgagtattatgatgccagagatataccagacaaagattaa

SEQ ID NO: 289147 - DNA, 300 bp, Morganella morganii
atgttaaacatagaatcacgtacggattataccatacagagttttactggtgacggaatagacattatcccaaatgtaacgacagttactggtacggtggaagagatagccccgctcttgcaatacatcaaccagagctacgatactttttcttttttctatactgttaaggtaacgggaaataagctagtagacgttcaaattgaactggcttttttcggtcaggatataactaatttagatatagatgcatttgctcagaagtttaatatcccaagtggtagctacgttattcgctga

SEQ ID NO: 289148 - DNA, 297 bp, Morganella morganii
atgcgtcttttactcaacagtattctgctgattttttcgatgactgcggcagcgtcctgtttatggggagtgagccatctcgcctggtattatgcactgcctgccctgatcggttttatgctgattaacaatatgccgttcgctattctgcatgaagcggtacatggtgtggccgcccgcactgccgccggtaatcgcgccatcgggattattgccgcgtgggcgtttccgacttcttttaccctgcagcgccgtgcgcatctgaatcaccataaaaataaccggacagataaatag

SEQ ID NO: 289149 - DNA, 606 bp, Morganella morganii
atgagttacgacaaaaagaccgatgataaattaaataaaccggttcggattattagccatgatcaaataatccgatttggtgaaaggttgaaagaagcaatgaatggcatgtcaaacaacgcttttgctaaacaatgtggttggtctgaaaaggttatacgtaactatttaaacggtgaaagttacccttcactagatcgtttagtaacaatagcaaacgttagtggccggtctgttggatggctagctacgggagaatttgacgatacctcggatatattgactaggcaacttccatctcaggcaacccccgaacaacatcaggtctggaaagagattctcgagagaatgactccagcggaacgggaacatgttttggataatgtattcagacaaggtatcagcgcattggttggaagcagccaacaaatacctagcgcgacaagtaaaagtgtaataggtgacttatcagctgaagacatgcttatagctcgaatgtatgcgtcattaacacctgaagacaaaaagagttttttggcatctttcattgaagaagggaaaaaccaagctgaccgcagtatgagcggtaaaaccaaggccagctaa

SEQ ID NO: 289150 - DNA, 333 bp, Morganella morganii
atggtatctcgatacgtacctgattctggcgatttgatttggattgactttgatccagttgaaggacatgagcagggcggtcatcgtccagcagttgtccttagcccttttgcatacaataataaagtagggctcttactatgcgtaccatgtacaactaaaggcaaaggctatccatttgaatgcgaactctcgaacgaaagagacagctacgcattagcggatcaagttacatgtgttgactggagagctcgtaaagttactaaaaagggcaaagtggaggcatcagaactggcagagataaaagctaaagcaaaggcgttaataggatag

SEQ ID NO: 289151 - DNA, 246 bp, Morganella morganii
atggctcaggtcacagtaaaaaaatggggcaatagcccgtctgtacggcttcctgttgcaatcatgcaaaaagcggcacttagcgttgatgatacggttgaaatagcggtagaagaaggtcgtatcatcattacgccagttaaagcggtagaatactcattagataatttgttagccggtatcacaccggagaatatccatgagaaagtagacttcggagctcgaacaggtaaggaattaatttaa

SEQ ID NO: 289152 - DNA, 624 bp, Morganella morganii
gtgaaagtaatttcttttttaaatccgaaaggcggctctggaaaaacaaccaccgtcataaatgttgctactgctatgcagaaagcaggttattcattagcagttgtagatacagatcctcaaatgagcctatctaactggtctaaagaagggaactgtgattatgatgttttcaccgccgccagtgagaaagacgtttatagtatccgtaaagatctaagtgattatgattttgtcatcgtagatggagctggttcactttctgtcattacatcagcagcggttatggttagtgatctagttataattccagtctcgccaagccctcttgatttttccgcagccggtagtgttacatcggtcctcgaagctcaagcatacagccgtaaagtagaagctagatttctgattactcgtaaaattgaccaaacaactatgttgcaagtattaaaagacaacctcaaagatactggcttgccttctttcaaaacagctatttctcaacggcagagctatatcaaatctattctagatggtaagagtatttttgaaactaatgatggaaatgcaaaaggcgagatagaaatactaaccagagaaattttgactatttttgagtcataa

SEQ ID NO: 289153 - DNA, 228 bp, Morganella morganii
atggcacttaaaaaagtaaacgaatcagcaaattcacagaaaatgaaattcggtaaaaacagagacttagataaaattcttgataaaagtacaaaaaccaaacgcattaatgtagatcttgacgaagatactcaaattcgattcaaagctgcatgtgtcaaacgaaacaccacaatgaaagaagtaatatcagattatgttcatcagtggctaaaggaaaatgaatag

SEQ ID NO: 289154 - DNA, 369 bp, Morganella morganii
atgtttgtttttaaagaagatacgttccaacggaaccccaataatccatgtccagataatgaattcaatagtgacgtgattgattttataaaggaaataagaaagttttatcctgagttagaacattggagcaataccggtgtactgtttgcttgggaaggatatctgcaagatatatacgcggtcggttggactgaattggtacgcaagagagagaacggctttctcgcatactgctacatatcgcagttacgaccatgctttgattttggtggaacagggacatacaacactgaaatttgggatcttggagagcaagagccgtggaaaaaacaaccattgccaaaactaccagattggctcgaataa

SEQ ID NO: 289155 - DNA, 579 bp, Morganella morganii
atgaaaataaatgatgtgtactttaatcgattcaacgttcccatcgtaagttcaccagacccttaccgtgattcattaatagatgatccagttaaaatctttatagttgttaattacaattgggggattgggcatacaggtatagtggttggagaaggtgaagatgctcttttgtatgacccatcagggggatactctgagtgcccttccagagagtgctataataatattgaagaattacgagcgccacgtagttcaggtgaatttttccaatatcctgagtttaattgggatgattacctttcttttcagttgtgggatggtccagacgttcagataattgaatttgtagtgcctagagttcaagcagaaaaaataaaagagttaatatttgaacatggcggagctggatgggctatgtgttcagaaacagtgttttatatacttaaagacagtggcggtatatttaactctttggataaaaagattttcttccgcgaagatccttggaatttcagagagaaattaattgacctacattacccaaaacgcgggggggtcatatcaggtgcttattaa

SEQ ID NO: 289156 - DNA, 348 bp, Morganella morganii
ttgaaccacaactgcattaacgtccgctattctgatacgagtggattgtacgcctgggaattcgagaaagatgctcagaaattcagtctgaaagtcaaagggcaatatattgcgaacagcacgattcatcagctcgatgcagcattagacgggctggggattgcctatattcccgagtatgttgcagatggatatatcaaaagcggcaagctgattgctgttctgaccgagtggtgtccatattttgacggctaccatatttattatcctcaccgccgacaggattctcctgcgtttatggcttttctgcaagttttgcgtgacaggtacaataatggaataagataa

SEQ ID NO: 289157 - DNA, 705 bp, Morganella morganii; identical to SEQ ID NO: 8686

SEQ ID NO: 289158 - DNA, 321 bp, Morganella morganii
atgtcagaaatgatttacttaacgctaaagggaaacaagcaagggcttatctctgcgggttgttcgagctatgattcaattggtaataaatatcaagatggtcataaagatcagatacttgtctactcaacaacctatgatctagcacgaaaacaaaatgtatctcacgcgccattcatcttgataaaagccgatgacaaatcctccccccttctgttaactgcaatgtcaaacaatgagattttagagtgcctttttgaatattatcgcgtagataaaagcggggtaatgattccttacaaaaggcactgttgcaaatag

SEQ ID NO: 289159 - DNA, 423 bp, Morganella morganii
atggctaaggcagaccaaatttcaaattgtaacgttcaaaatcctaattatgtgatggcagaaatgaaacgagatcaaacagttctaaactatgccctatttaaagcgcgtgagaagctacacgagctcaaacacctaatgaatacgtcacagtgcagtgaaagtgaaattttgcgctataacggggttttggagatgctggatagcatattttcatcagatgaaaaggaacgtcagaacttatatcactctatgatcatgtctggtgtacaaatcatgtccggtaagttaagtggtgagaatagacaagccgtattagaagcaacgacaccagatcagttggatgaggttttaaaagcctcggaaaatgaggtatggactgagttgcaactgctatgtgaacagcagaacaacctaaactaa

SEQ ID NO: 289160 - DNA, 345 bp, Morganella morganii
atggaattacttaacaaggtgcaactgatcgcacgattaggttcgtccccgaaagataatctgaagtattcagaacgtaacggtgaggcaatgacctacttctctgttgcaattaaccggcatgactctaaaggaaacccgataacagattggtttaacattagtgcatacggaaaaatagcagaaatagcagctaattttggtcagaaaggacaacttgtttacatcgaagcaaggctacaaccgactaataattcctgttctataataatgaattaccagacaggtgtgtttagagtattacctaatagtaaaaatacaaatgcaggagagcagaatggctaa

SEQ ID NO: 289161 - DNA, 1047 bp, Morganella morganii
atgaatactaacgcagcaatttcaacgaatagcagtcaacaaaattcgaatatgagcaaggtacttctcaatgacctaccctaccctactctgaagaaaaatactgaagcgcacaatatctcaacattacgcaaaatgtctgatgcctttgaggaaaaggtgtgttcgcgtggtgatatttatcgcgttaacgttgagttactgtacgtacaggaaggtttcaatcttcgggagattgatactgaacatgctggacgaatcaagaattcgtatgtatcaggtgtttatgttccacctatcgttgtgaaagttataacggttgataatctgccacgcttacagattattgatggacaccacagatattgcgctctacgcatggcaatggaagaaggatgcacgattaaaggcgtatacgtcacggagttctcaggcagtcagcaacttgagatcgtcaatatgctgacatcttcagaaggaaaacctttagctccgttagaaaaagctgatggtttccatcgtttacttagtatgggatgggaaaaaaaggaaattgcacgatatacgaacacaagtgttgttacgatcaacagattattacgcttgttccgagcagattacagaatcactgatcttgtcagaaagaacctgattacttcagatttagccatagaaatactgcttgagtgtgaagaaactaatcaagaggcatatgatgtgatcattgcaggattgcagaaggcgactgacagcggcaaaaataaagtcacacggaaatttgtaccttcagcgaagaaagtacctttttcaaaaaaagaaatacattccgtgttttcacaattaagtgaaatccgcacaacaattcacgacaaagttgctgatattcaagaaaatgatgaaacagtgactgtcgaaatgccggtaacaattgtgaccctgcttaatgatgttcttcagaagtttgcgaatgatgaatccgccgcatctaatgatgatgagaacgaaccgagcaaaaccgaatccaacactgaagctattcaggcttaa

SEQ ID NO: 289162 - DNA, 819 bp, Morganella morganii
atgactactaaactagataccatattaaccatgactactaaacttccagaatcgatagcagaccaattatccgatacgctatcaattttagaaaaccatcttggtgaaactattcaggcggttcatctgtttggttctgcagttgatggcggtttaaaaccatttagtgatatagacctgttgatcactgtgagtactcctttaggcgaatcaactagggtggcattgatgtccgacctgctgttggtatcagcttttccaggcaccgatgctaagcgccgtgcacttgaggtgactatattggcacaaaaagacgtggtgccgtggcgatatccggcgagacggcaaatgcaatttggtgaatggttgcgtcacgatatcaatgcaggtatttttgagccggcaatgacggaccacgacctagctatcttgttgacgaaggtgaggctgcatagcctagctttgtatggtccagcagctcaagagtttttcgatgagattcctgctattgatgtgcaacgttcactgctggaaacgttggcgctctggactacagaggcagattgggagggagatgaaagaaacatagttcttgccttagtacgtatttggtacactgcgatgaccggagatattgcgtctaaggatgccgctgctgattgggctcttcagcgtctgcccagcgagaataagcacatcgttattgccgcaagagatgggtatcttggactgggaacagtcgatctggcagcctatccacaagagcgggcggaacttctgaactacatccggtctagcgtgacgacgaagctgcaatag

SEQ ID NO: 289163 - DNA, 333 bp, Morganella morganii
atggctaaagcaaaatcttcattctcagaagtacaaattgcccgttgtattaaagaggggcgtggtcaagggcatggtaaggactatattccatggttaacagtacaagaagtctcttcagcaggtcgttcccaccgtatttactctcataaaatgggactagttcaccatttgctctctgatttagaacttgctgtttttctcagtcttgaatgggagagcggcgtgttgggtatacgtgagcattttcccttattacctagtgacaccaagcagattgcaatagatagtggcattaagcatcctgctactccggctatcgaccaagggtag

SEQ ID NO: 289164 - DNA, 1074 bp, Morganella morganii
atgtttgccttagttgatgtaaacagtttctacgccagttgtgagcgcatttttcgccctgatattgccaataagccagttattgttttatcaaacaacgatggttgtgttattgcacgttcaaaggaagtgaagttgcttgggatcaaaatgggggctctatactttgagattcagtctctgattaaaaagcatgatattcaggtgtttagtagtaactacgccctttatgctgacatcagcaaccgagtcatggacacactatctgattttgccccaagagtagaaacgtatagtatcgacgagcagtatctagatatgaccggcatgtctagatactttccattagaagattacggtcgcaagatacaacaacgaattttgcagatagctcatgtaccggtcggtgttggttttgctcaaactaaaacactggctaaactggcaaaccatgctgctaaaacatggaccaaaacaggcggtgtagtcgatttgagtgctacttcacgccagaaacggctcatgtcccttgtgcctgttaatgaagtatggggtgtgggtagaaaaataagtaaccggctaaatgctatggggatagttacagcgcttgatttggctagggctgaaacaaccatgatccgtaaaacattcggtgtggttgtagaacgcactgtgagagagctgaacggtgaatcttgcatcgagcttgaagaagtagcaaaaactaaagagcaaatcatttgttcacgttcatttggaaaaaaaattgagctctatgagcatatgcatcaggctatctgcgagtattcagagagagcagcagagaaacttcgagctgaaaaacgagtctgttcctttgtttctgtttttatccaaaccagccattacgccagcggacctcaatactacaaccaccgttctgaacggttagaatatccaagtgctgatacaagagacattatcaatgcagcagtgcgtctgttaaagaccatctggaaatcgggagttaaatatcacaaagctggcatcatgctcactgatttttctgatccatctgtcaattctagtaattaa

SEQ ID NO: 289165 - DNA, 417 bp, Morganella morganii
atgaaattaaccttatgcaacgttgagaaaacacttccgcttcctttattcgctgatcaagtacaagccggtttcccgtcaccggcgagtgactacttagaggaccgcattgatttaaactctttgctaatcaagcacccttcaggcacatactttttacgagtatctggtacttctatgatggacgcacaaattctagatggagatatcgtcatagtagatagttcgattgatgcaaaacacggagatatcgttattgcttcactcgatggagagtttacgataaaacggctacaaaccagccctgttactgctcttatacccatgaacagcagctactcaccgatatacatcagtgatggtgaagaattaagtatattcggcactgtgacctacattattcacaaggcgagataa

SEQ ID NO: 289166 - DNA, 1053 bp, Morganella morganii
gtgagcaaattactagtttttatagaacctaaacttatcaataatactacctcctattgggctatgttctatgcggctatttttaaagctctatcttatcaaaccaatatgcaacacccacttggagaacagtcccctcagtctcacagagggaatctctctacaccgtcaaactacttggcagggattagtgatcatttaaggaatcatgcatttgaatatttaatgatggatttgttgcggtcagaatatggagatattacacgagatattttagttaccagacttttatctctgtatggcataactgattttgaatacaagtatcttaatatatataaaatgggtaaggatagtattcaccataaattacaattaaaaaattcatttgatataaaggtcataacacctaaaaatcctaatcttctagcttgctcaaaaacaaattatcaggcgtttacctttcctattcatacagcttttgaaaattttccatattctgacttgctacttattgtttctgatggaaaaaatcatacctatggttttttaggtgaaatagaaggtaaaaatggacaacaattgtttagaaatagctactggtcaaaaggaaaaggtgattatgcaacttttgcaatagggatttccagtaaaaacacactgaaaataggtgccgaaaaacaccaacttagtcacaacacagtaatttttagtgatgaaatgaataggcaaatattgaactactcaaatttctcagcctttgctgttgattatgttaaagcggttaataatatggagctatttttcaatggacaaacaaaacatcttagcatagaggataaaggtcacgcatatatcactgatataataatgaaaaattgggataaaccaagcggatatataattgaattactgaaccaacatgtaatttacgcttatagtcatgcatcaacattatataacctattggaccctgaaaccaataagctctcttttaaaccgaatatgctggcattagaaaactcatattgcttacatcaagtaaaagaataa

SEQ ID NO: 289167 - DNA, 357 bp, Morganella morganii
atgaaattagcctacccacgcaccaaagaaaactacacccttaaagtattacgtttgtatgcccttactgaaatatttgtaaccccgccagttgtgaccggtgatatctataccgtagatctagcactgctgcatattatgacccctaacaatcactttaaagatgaaagtaaaatagcgagtctaaaacattcctatacacatggcgaaaaggtttcaccactattggtttcagtcgtcattgtcgatgggctccctaaactggctgttatggatggattccaacgttactgcgcactgatggaaatagttgctgaaggtggtcaaattgaaggggtggacgtaaaagaagcgtga

SEQ ID NO: 289168 - DNA, 426 bp, Morganella morganii
atgatgaacaacacagcgttgttacagcacatagcctctgaatttatagcccattcaggagttcctgcgaaaccggcatttgataaaattagtgcaggtgatgaaacattcattaatgaactgtcaccatcggatctgcttgaattactcgaaaaccccctgcctattatcatcaatactttgaccggtgagcctcattccgcaatacatagccacagtgacgatatattgcccgactgtacaaactatgcatatgggatagggtatgagtctgctactgctttgtttgtattggtagaggggattgagagttactatctcgcgcttaaagcaaaagcatatctgaagaaccaaaattatttgccgttcctgataaaatttaacggtttagacaaacatcctgacagccaaaatctatactattaa

SEQ ID NO: 289169 - DNA, 294 bp, Morganella morganii
atgaagaaaaaaacacaacgggaattctcaaccgctcgtttttacttttgtgcttcagttgccatgttttcgttgatggggtgcgtctcattggaggaacgtgaaagagttgcgtttgaactcgtaacaaatgaaccaaaccaagagaatattcaatcttatctgaagctggctgaagaactacaaagaaagcaggttgatgaagccagacaagcggcagatgcggctacgtatgagcgagacaaagagctcaatgaatatttcaaacagtatgggaggacctataaaaaatga

SEQ ID NO: 289170 - DNA, 834 bp, Morganella morganii
atgcttgatagctatattggttcattgctgaagtacctccaccagcttgactctctttttcgagatacaaaggtaatttcagcccttacctgtgtcattccaccggtagaaaatggttgtgatgatatcggtaaatgcattgagccggttgtgaattggggtcctcatgcctatacatcggttatctcatgttggcaggacttatacatttctccgttgtactcacaaaagtttgcgaggcgaacagccggatatgtacagttatcaactgcggctatggaacttgctgatcatctaatcaaaatcaataccgtaaaaaacaatatcagaagctcggttgtcgcactgccgaaatctgagcgtttcagaattttgcgtaaacatctgagtaacgtaatgacactgcatttgtaccggaacattcctgtatttaactctgacgatgtgatcactcatgcttcatatacgtggggcttaaaaggactcatgcagaaaacagaccctgttaagctttatcagctcatagctgacatagcaaaaggcaacgctgagttacaggacttaatggataaaatccaagagtgccctgctaataggctcagaataaagcgtagcgttacgccgcagccgatctgcaacctaacctttgccagtgggaaaaaacgctgcataaacgctcctgtgccgtttttgatagtgcaggatcaggattttaaagtaagtcccctgccattgtttactgctgaagcagacagacaggagcgttctgacaaacacaaaacgactctccttggcgtgtttagggggcaacagataattaagttggaaaaatga

SEQ ID NO: 289171 - DNA, 228 bp, Morganella morganii
atgatgtataaaaataaacgattacaagaaaaaattactcagttcagtttgcagaacccgaattataaaaaaaatgctatgttgaaccatattcaggatgatttatttgaaatgaaatcatcaggcatgtcttggaatgcgattatggatgctttaccggcttacggcttgatggtcagtgatagcagttttaaaaaatttttgaagaaatccagagaacaagaataa

SEQ ID NO: 289172 - DNA, 837 bp, Morganella morganii
atgaaaaagaagcaaatcagtaacttaacactttatactaatgttcgtcattctgatgatttcaatctttctctcgccagcttacctataccggcgaaaagagtgctgtttcttattctcgctcagatatctgatcctagagaatctgttgatgaagatgaaatatgctttgaggttaaagctaaggagtatgctgaaatttgtgacgtggacctttcaactgcgtataaatcccttccactcgccgtagatactctgttgagctctcacatatatgaagatctaagtgaggaaggttttaaacgagcttcaaaaaccaacattacaacgagtgctacatattactttgacgaaggctactgcaaaatattctttaaccgtagggtatttccctatttctttgaattatcaaaaaaattcacgacacaaaaccttttttatgtagctagattatcggatgctagtttggcaaatctatatcagctaattatgaaacggtactctaaacgtaatactattgccgaatataaaacgtctttcacaattggagttgacgaacttaaggacgaaatgtggctgttcaatatagataagaaaggcaataaggaatatctctatcaaagctataagtattttggtcagtttttaaagcggctggcggttagtttgggtgaacaaacgaatatcaaggatgtttcaattgcgattgagtcacgtaaaggacgcaaggcttctgtgttacgcatatcctatgttattcacaatgaaaaagtgggtggttctatgcctaccgataaggaactggacgagctcgaaaagcagataggtttattatag

SEQ ID NO: 289173 - DNA, 492 bp, Morganella morganii
atgtccgaacaagtgtatggtgagactttaaagttcttcgccgattggcagaaacacgaaaagaaacgttcctgtcttaactttcaaaaggtagtttccagatctggcgttcctacccttaacatcgagatagcacctcttgaaaaggatggaactgcaagatgggaacagaaaatgactattcagttatccttaaaagaattgactcaactcactgcattagttcttctatcaaagaagtatattgataatctagatgcccgatatcatgggggtcatagaaacaaagggttgtctgtctttgataatggcaagtcaggaatgattttcttgatctctgaagcaggacagacgctagaacacggtatagatcaataccaacgtttggaacttgctgtgttcatcgtacagcagctatccgcagcgttaaaaataagttatgcatgtactgttgtaacgctaaaaagtctgtatttgaacgacactcattaa

SEQ ID NO: 289174 - DNA, 381 bp, Morganella morganii
atgaaacaagagcgtaaaaagataattttgtatcttcgtcccgaactcagcgaggctgataaattcgcaattaaaaagattgaagaatcgccggttcaaactgaagcagtacgtacagcgttactggcagggatcgcattaggggaaattgatgatagattgccttctttgctggcttcaattctatcagacaggacaaaggctgataccttcaaagtaatgttagattcctttctaactgttgatagtgacggcactcatgctcacaataaagtaaatttgagtcaggcaaaacaggcgttactgactgataaagtaaaaatagagaaggagcccccaagtcaggcagcacagaatttgaaaggttcattaccagattga

SEQ ID NO: 289175 - DNA, 960 bp, Morganella morganii
atgcgtatttatatagatgatggttctactaacataaaaatgctgtgggaacaggatcaggaaggtgaagtaattaaaattagtcctaacagcttcaaacgcggttggggtacggcttttggtactggcaaaccattcaactataccgttgataacgagaagtattcattcgatattattgatcctgacaatttgccaactaacaacgtagcttggcagtatagccctctaaacgcagttgcagtgcaacatgcacttcagattagcggtttacctccccaagaggttgaaatcgttgtcactctaccattggcagaattttacgatcaggatgcgcaatatcgaatggataacatccaacgcaaaaaagataacttaatgcgcgaagttcaagtaagccggaatgaacctttcaaaatcaaaaaagtaaccgttcgtcctgagtcaattcctgcgggtatatctttgtgtgatgaattaagacccaatcattctgtactgattattgatattggaggcaccacaactgatatctcaatggtttctggtcaaatgacgtctgtatcacgcatttttggtgatcctacgcttggcgtatcattggtgactaacgaagtcaaaagagctttggcgaacgcttcaacagaaacatccagctataacgcagatcaactcattattaaccggcacgatgaaaactatctgttagataacatcaacagcgttgatgatattcagatggtgaaagatgccatgaatagcagtattgaacgactaaatacccgtgtgctcgatgcggtcagcacctttaagggctatacacatgtcatggttattggtggtggagctgcgctttccgctgatgcaatcagaaagaaaatagcaatccaaccagaacgtttctacgtggctgaagaacctcagtttgctttggttcggggtctgaaattattaggataa

SEQ ID NO: 289176 - DNA, 1035 bp, Morganella morganii
atgtcacctcaactccaagacgctctaggcatgttcgcctttctcgctatcgagctatcggttttattcattggcattagcttgctggtcggagttcttcaacgtcacatcccaccatccaaggtggaagcgttactgacttccagtgggaagcgaggctattttcttgctgctggtttaggagctataacgcccttctgtagttgctcgactatccccatgttgaaagggttgattcaggcacgggccggttttgggccgatgatggtgtttcttttcacatctccgttgctgaatcctatcgtcgtcggcctgctggttgccacgtttggatggacacttactgctatctatgtgctcgccgctttggtggtcgcggtaggtgccggatggctgcttcacacgcttggcttcgagcgttatgtgcgccggacggcgacacaagagagcagtggatgtagttcatcagcaagcccgtgcagtgctacatcgaccgcatcgagttgcggcaccaacagctgcgacaccactccgaagacggcttcttgcggggctgataggaagacaacagtctctacgtctagcgaatgctgtgacagtcaacccactgtcacggttaagaaagaagggaagtacaatggtgtgtggcgggaagcttggtcggactttatcgatgtgttgccttacctgctcatcgctattgcgattggcagcgtgatctatggtttcatgcccactgacttattggagcagtatgcaggcccagataatccctttgccattccagttgccgctgtcatcggcgtgccgttgtatattcgcgctgaagccgtcatacctctggcagcggctctgatggccaaaggcgtgggtgccgggacggtgcttgcgttgatcatcggcagtgccggagccagcctgactgagctcattctgttgcgctctttgttcacgctgaagcttttagcggcgtttttagcagtcatttttgctatggcgatgattgccggttacgccacctacctgtttttctga

SEQ ID NO: 289177 - DNA, 528 bp, Morganella morganii
atgaaccttaataccaatactaatatcatcgaatcaattgagatagacagagtaattgcaatccgagaacatgctattagcctatataaagaatcactctctaaagcagcagaggctatcgaaatattaaaaacaattcccaataccaacaatcattttcctcaccaatgcatagaggacgatttaattgatttgcaataccctagaaatactaatgatgatgataacagaacacggtttgaactttggttagacagaaagatatggaaaatgtttattgataaatctggtatcaaaacaatcatgagcaataaacaaatagaaaagttacattacgacctttacgatatgaaatcgcctatattcaactttgagaatgcattaagcacttttacaagtttaagcgctaacaaagctgattcatttaagaatggattgatggatgcgttgcaatctgtctcatgggattacaagagtaataatcctcgctatcttggcaaaaaaagggtatccggaatttctggttga

SEQ ID NO: 289178 - DNA, 228 bp, Morganella morganii
atggctacttatggaaaaacagcagtacaaacagtattgaattatgatgcggcaggggatctggcaaagcaatgggaagtgcaaatttcaagtctgacccagtccggaagcgttattaataaaggttgtccgcgtgctgcattcctgggtctctgcgaagaaggtgtagtgaagaatatacccgggaataattatggggctggtgaaaaaataaacaccatgcgttga

SEQ ID NO: 289179 - DNA, 336 bp, Morganella morganii
atgtctacagaatcgttactttcaacaatgctcgaatatgatttcttttacaatcaagacagcaaggtttcaggcatcgctcagcgggcaattgataacgggtttaacactctttctgaagcacaaaaaagagtgttaaacccatttctcaccaagccttgcgagggcgtaacaaaccctggcggacaccataataactgccaaaaacctttgtctggagatgaactggaaatcgccattagaaacgaaagttattacggtaatcttttatgtgaaaattgcataaatgaaactgaagactaccgccgtgaatgggagaatattgaagcacaataa

SEQ ID NO: 289180 - DNA, 183 bp, Morganella morganii
atgtataaaatcacttataacctaaagacacaaagcggtcaaaatacatatgagtttactgttgatgaagtagatgaaaatgatgaaaaaactcaactagatttagctcggaaggactcatgcaaataccacgagtcaggaatatcttctgttcaaatcattagtgtcattcgcgcagagtaa

SEQ ID NO: 289181 - DNA, 336 bp, Morganella morganii
atgcacgccattacgtggaatatgttcattgaacgcactagtcaactctctgaggttgaagcgccgctgtttccagacctcaagcatatctacaaaaatgtctgcctcatcaataatgaggtacatattttctttgtcaccgaggatgcggtgattacacatacagtcgaccattaccatcgcatgggtcgtaacaataaagttagcactgagagcattcaggcgaatatcatcaatgtcctgtatatcatcccagatggagtaggtgaccatctctggcgtgatctgcgctggcagttcaccatactcttcttcaaactcaaccagaggttttga

SEQ ID NO: 289182 - DNA, 567 bp, Morganella morganii
atgattttctacgataatgcgtttcggttgcgtatctctcacacaagtgtttaccggatccaccagcacctggattttttcatgcaggaacgtaagggagagaagctgccgtactcttttaaaatttttcccggtaccgggaatgattcgagactgctggtccgcacagccacagctctggagctgccaggggagaaaaaaagagagcttattctctctgagggccatgaaattaagttcattacgtcaatggccatctttcataaaggaacaaagtcagaaggccatggccgacgccagtttgctccatctgatgaagcgagttatcagatggccctcaccaaattagcgaaggctggtcttgactcccgtcaaatcgtcgtgagtggcccggaattcgtccatatcgacaagggcaatgctcgccgtggttttatgcttcctgtcttcactgttcagggggccgccactatcagcaatcaacaggaagctgaaatggccatcgtttatggcgtcggccctaaacgcgtttttggttgtggtttcatgcatctggcaggggagtag

SEQ ID NO: 289183 - DNA, 792 bp, Morganella morganii
ttgaatcatcctgtagagtcagtatatagcactctgacgagtattttattgccctatatgggtgagcctgtgcctgtgcaacgaaattgctcatgctgcggcagagcgccctcagagttcgacggggtaggcttcgagctggtcaacgcctacagggaacgtgttgtgcattgccgcccttgccagacattttttgtttctgctccagagctgatgggcgtggagaaccccaaaaaaccaacaaccggccagaaatttggcatgtggtctggtgttggggctgttattaacgttgaagacaattcttcggttcttttagcccctcagggagtggtcaataaactacctgagcattttttcgatcacgtagaagtcatcacggccaccagcggtcagcatctggaatacctgtttaacaccgaactgaaattcccgctgatttatattcaaaacttcggcgtgaaaacctacgagcttgttcgctcactgcgggtcagtctgagtgccgacgcaatttatacctgtgccgatcaactactcacccggcagaacgaagtcctttacatgctggatttaaaaaaggctaaagaactccatcaggaaataaaaaactactccaagaaagagatggatatctttatcagaacagtaaccctgctggcctattcgcggataactcctgaagccgcctcgaatgagtttaagaaaaacaacctcattccgttactgctgcttctgccgactgatccccatcaacgcctgagcattttgcacctcttgaaaaaggtataa

SEQ ID NO: 289184 - DNA, 414 bp, Morganella morganii
ttgaaattcaataacaatcaaaatgaaaaatgtctcaataaggtgttgagttttttctcagaaaaagatactaaccttattgtcgttataatagggccttccgggtcagggaaaacccttctggcgaagcgtgcattaattgatggcttatttatttcaccagatgagccgattgcaggggagaaatttattcagagtttatcaaataaagatatcatcgttgatgatgttgtcctttttgatatgcggaatgtgttgaaatacgttcttcattcacttgcctcgggaaggaaagtgattttgaccgggcgtccggaagatgagtctttgtatcagaagcttctgttaaatttgcctaaggaaatttcaccattatttattaagctggcgggtgaaaattccttgtatctgtga

SEQ ID NO: 289185 - DNA, 489 bp, Morganella morganii
atgaatcttgataaaaacttacctgctttagtaatgaaaaatgttgaggataacatgggggttattaccaaatatctcaagcaaacagaagataacgctcttgtatttattattggagaaacagggtctggtaaatcctgtttggctgaacttgagtttccggatgctctctacccgactgctcaacaatttgaagaatgtgatcacatttcggaaatgttcacaggttttgatgtagtgattgatgacattttccgttttgatgctgacaaagtcctggagtgtattctggctgtgcatgcttctggccataaggttctggtcaccggacaaccgtcagaccatgaattgtgcattggtttaatgtcacgcttgccagtgggttatcgtactatgtacgtgactctgatgggccatcaagacctgcaagagatgtctggcgatggcaaggacaagggtaattcggaaacaaaaaccgtcctgcattag

SEQ ID NO: 289186 - DNA, 411 bp, Morganella morganii; identical to SEQ ID NO: 95502

SEQ ID NO: 289187 - DNA, 408 bp, Morganella morganii; identical to SEQ ID NO: 95503

SEQ ID NO: 289188 - DNA, 396 bp, Morganella morganii; identical to SEQ ID NO: 95504

SEQ ID NO: 289189 - DNA, 183 bp, Morganella morganii; identical to SEQ ID NO: 95505

SEQ ID NO: 289190 - DNA, 1242 bp, Morganella morganii; identical to SEQ ID NO: 95506

SEQ ID NO: 289191 - DNA, 165 bp, Morganella morganii; identical to SEQ ID NO: 23280

SEQ ID NO: 289192 - DNA, 456 bp, Morganella morganii; identical to SEQ ID NO: 95508

SEQ ID NO: 289193 - DNA, 609 bp, Morganella morganii; identical to SEQ ID NO: 23282

SEQ ID NO: 289194 - DNA, 450 bp, Morganella morganii; identical to SEQ ID NO: 95510

SEQ ID NO: 289195 - DNA, 186 bp, Morganella morganii; identical to SEQ ID NO: 23284

SEQ ID NO: 289196 - DNA, 768 bp, Morganella morganii; identical to SEQ ID NO: 23285

SEQ ID NO: 289197 - DNA, 525 bp, Morganella morganii; identical to SEQ ID NO: 23286

SEQ ID NO: 289198 - DNA, 288 bp, Morganella morganii; identical to SEQ ID NO: 23287

SEQ ID NO: 289199 - DNA, 177 bp, Morganella morganii; identical to SEQ ID NO: 95457

SEQ ID NO: 289200 - DNA, 273 bp, Morganella morganii
atgaagcttactaacgcacagatctacacactgcggcgattatccggggggagtaaaaatcaactccgtggtgacggaaaaaaggcgcgggaatgcaggccaggatcagggatattcaccgatgatatttctgcaccatctattcctgtcctgtttcgtctcgggctggtggactatgtacataagggggggagagaacacgccttgttttatgcggtcacgcttaccgacacggggaaacaagccgctgccaccatgaatatcaaggattga

SEQ ID NO: 289201 - DNA, 207 bp, Morganella morganii; identical to SEQ ID NO: 95455

SEQ ID NO: 289202 - DNA, 198 bp, Morganella morganii; identical to SEQ ID NO: 23291

SEQ ID NO: 289203 - DNA, 900 bp, Morganella morganii
atgaacaattcatttgagtgcagcaagagaaccgatatcaccgaacaaccgcagagccatgatctactcatcgcaaacggaaatgaaacggccaatttgctacgccacctggcaaataacgagatcgactccgactattttgcagttgtctcggaatgcgaaagctacgggcaagaaactgacgcagagctatcaatcacggcgtttgcccttcgtgccgctggttacgttgatgcgctggtagagtcactggagaaggccctgcagcgtattgctgagctggataaagactgcagagtatacgaaaataacgtaaaaaatcttcttgaacgtgccggttcagcagagtcctcgtgcgcagaggctgctcggattcttcaaagtggtgagcgcatggcattaactcgcgctatcactattctgctggcaaatggcatgaaggtggaggctgagccagtggcggtatgcactgtaaagggcggtcaaatgtgccctgatggtgtgcacgaacttttcgccgcccctcagccaacgctggtagtgccggaagaagctactccggacagtatcgagattcttgccagcgccaggcgtcttgaccacgctgtattccagtgggatgaagaccagcgaaatgcggccgctgattcctggaacgctttccgggccgctatgctccaggcagtcaactctccggtaattggcattgaccaggcaacaggtgctgacagaacagtggaagttcgctacgtagcacctcctggttacgtgatgttaccgaaggaaccgacaaaagagatgattgatgccgggtggctgcactacatggccaccaagaacccttcatcaaaaggcacatacaaagccatgctcgcagccgccccacaggaggtgaaatga

SEQ ID NO: 289204 - DNA, 336 bp, Morganella morganii; identical to SEQ ID NO: 23293

SEQ ID NO: 289205 - DNA, 216 bp, Morganella morganii; identical to SEQ ID NO: 23294

SEQ ID NO: 289206 - DNA, 387 bp, Morganella morganii; identical to SEQ ID NO: 23295

SEQ ID NO: 289207 - DNA, 645 bp, Morganella morganii
atgacaacagaaaccttaagcagagagtggttacagcatcaaatttcagcaattgaaggcgctggcatcactgacagcaacacattggctgctttcaagctggcgctggccgcgatgagtagcaagccggtagtggcggatgaggtcgagcatgttgccgctgtattagagcttatcggtagctttgaggctactgatattgatagcgacacagtagatttacgttttgagatcgctgatatcgacactggctctgacgtatccattactgaatatgccgcacgcggttccgctattatccgcatgctgactggcatctcatcggaattaccagatggttgcgttctggaggcgctgaagaacacgcaaaccgagaatgaactggcacgaggccagttattcatagcccagcgaacgctattaaatcagcagcgaaagattgcagagctggagtcccgcaccgtgcagctgccgaaacctaaagattctgacccgggttggaaaattgatccagaatttatcagcaaagttcagaacgcaatagggtacgatgaccaatgcgaatgttgggagggtacaccgtccatggaggtagtagaggccgttttgctggccgccgctggcatcaagatggaggttgaatag

SEQ ID NO: 289208 - DNA, 228 bp, Morganella morganii
atgacaaaatataacgagcttgactcaaaaatactgactaaaattagcgggcatccaacgccattttctagtctgtacgtcaaagatgttgcagaagaatgtatccgacttgcaacggaggagaataaacctgagccctttcgcattctcgatcgccgactccaggcgctacgtaaagctggtgtaatccgcagcacaactaagggatgggtgagggctaaatcatga

SEQ ID NO: 289209 - DNA, 279 bp, Morganella morganii
atggctaagcgcgatttttacccaactggtgcgacatgctggcagggcgggagttgcacacgcagggggatcacacgtcgtcatcgttatgtcactggtggggatggacgaaaattcgaatcgtgcccctacactgacgactggtacgcactcggcgacacgattgacacctttggaaatccataccggtatagaattactggtgagaaggccagagttcttactcagttctgcatagacaatttaaaacatgagaaatctgacaatgacaaaatataa

SEQ ID NO: 289210 - DNA, 420 bp, Morganella morganii
atgaatacctataatgtatcgtataaggttaatcttaataacaataactatgctctagcttcatttgatgtacaagcaaagtctgaaaaggaagcgcgtagaataataagcaagtcgaatataggtgttgaagaatatactgttactgagaaagactttttctcggtaacgtggtgtgctgaagatattcatgcaagtattgtttccggttgggatagtgaaacagaattagatgaatttaataaaactgatcttgatgttttctattttaatttaagtgataatgataaaaagaatttttgtttagatgtattggaggcacttaaaaacaaccatgattgtaattacggtattaattggggtgtaattaaaatatcagcagattcaagtatggatatatggaaaagattaattaattaa

SEQ ID NO: 289211 - DNA, 459 bp, Morganella morganii
atgtcagtatcatatgaagatgcgttattgctaaagctggaagcaatccttgctgactgtgaggaagcaataactgtatgcgctgataatgcggtaaatctgatccaacagtttatgcaagaaataaataacaaacagctattctccccatacctgccagtaattcataacgacaggggctcagtacggattcgatggggaatggttgtgatgaacaaggcgactaaaaaagttggctctatgcgtaatgctccaaccacaggtaatggcgattttgacatacgctatttttcaattcggtctgatgaagtacgccaacttattcaaaaatacgaggataagtttaaaattatcagggctgacattaagcaaaccaaaaatattactaaatcattgaaaatgagaattacacatttgaaaaagggcacaagaaaaacggttatcggtgttactcgctga

SEQ ID NO: 289212 - DNA, 549 bp, Morganella morganii
atgaaacgctttcttctgtttttaagcatttttaatgctgcgatttgcgaggctgctgttgtagatttaactaatacctcgtgggaaaagcacgctaaacaatgtaacctcgatccgcttttactctatgctattgctcttaaagagagctcccatagaacaggcgataaatcctttgttgcaccccatcgctatgctttaaataacccaattatgggctcttattatccggtgaaccgagatgatgctgtccgaaaagtgcgggaatatgtaagcgtttcagcattgactgatatcggtattacacaaattaattggcgttggaacggtagtaattatgtttctgaccctgctgagttattagatgtagataagaacattgaggtatcagcgaaggtcttgtgtcgagcgattgaactatctccaaatgatatagcgcaagccatcggtaattatcacacaccaaatccagcgttaaagaacaaagctaaagaatatggtgaatcagttctgctcatatggaaaagattgaaagaaaatgaacaataa

SEQ ID NO: 289213 - DNA, 522 bp, Morganella morganii
atgactgatgtacttttcagtttattaagtaattctgaaagagttgataataatccatttgtgatcgtcaattctgacaaaacctgttttgttgaagatttttccattatgagagattttttcagtggattgaaagtgcctgcttatatattaagctataaagaggattctcagtctttatatactaagaaagacccaaattttaaaaaatctctgttggatgtttcatttttgcgtttaacaatgctaattgaatcagcaattattaacagcatgtctggcacagatactaatcatttcttttggtttaatgattgtcagtcatacaatacaattaataagttttcttttaaggaaatactgttttctttgtattcaaagcaaataaatatttctccaatttacagaccttcgattatatcaactagattagtcgatagtgatggttatcataaaaaatatgatgatgtattattctatcttaaatctagagcgcgcttatgtggaaaggtgtttaaatga

SEQ ID NO: 289214 - DNA, 561 bp, Morganella morganii
atgaaattaactattgcgccagaagattatcaattagcaattgatatgataaaacttgggtttagaaagaatgtaatattgtctgagattccagcaatatctccacgtatgtatggatgtttacgaaatgattcaggaattgataatgaggataatgattttacgttaggacgactaagaaaaattagcactatattagctaatcaacatgataaacgatctgcaactgattttttacatgtatatttaatgactgcacaagatccagaaaatagattgcaaatagaagaattggttggtgcttataaagcataccgccatttatttaatgttcattgtggtttctttgatgatccattaaagaaacacataattgatccgaacttggcatggcaaattgcaaccaattaccgaaatggaataattggtttaactggctgttttgagtgtcggcagaaatatatctatcttacacacgaatcagaggattcctgcaatatgaaatgtccttattgctctgaatctaaagaaaatgaattcattaataataagggtgaataa

SEQ ID NO: 289215 - DNA, 840 bp, Morganella morganii
atgaaaagttgtaaaatgattacaggaattctattttcattagtgttatccggctgtgctaataatgaaaatagtaattggatatataataatgaggcttcaaaaccagtggttgaaaatggaagtgaagctctcaaaattgctaaatcaatagggttgaataatctagatgatgatgcggataattacacaatctttgctgtgttagtaccaagtcagaaaggaaattcattaaaaaaaattaaggaacctattgttgtaagcgatacaaaagggatggatcagttaagagaaatcatctcacaaagtaagaatgcagtaaatgtagtggatcttacccttgctgcaacagtaaaccctgtttttgggctcttagcttttgatacaagcacaccagaagaacgagcgcctatgatggaaggtcgtttactagtaaccgaatggggatctacaccgctgagtttcagtgaccaacttttgaaaacgaagcgtattaactctgtctttgataaatacttatcaaatgcaattaaagctgaagtggctggaaatgttttagcatgtaacgctgctaaatttgtatctgttactgaaaatagaaatatttccgatcagaatctatatgtaaatgtgcatcaagcaccattcactaatctgaagtattcatataattatacggatcatgagtgtgttcattatttacacgatactggtaggtatgaggaagaattcaagaaaattagtgttgagttaggtcctgaaaccgtactgtttttgccgagcaatttgaaaagtgagccaaaaataatacggaatggtcaggtatataaatttagataa

SEQ ID NO: 289216 - DNA, 2772 bp, Morganella morganii
atgattcaaaattttaggagaagaaatttttcttcggtggtgacacatttatcactaatagcctatctctcagtgatgataacacccgttaactcatttgctgaagtttcgacaaaacctccagaaaacacaggtaaatatcagacagataaaaataatctggagggagttactgctggtcatgacacagctaaagaggctttaaatttttataaaacattaccaagcctaaatgtagattcgaaaggtacttcacaatttggtaaaggtgaatctgtcaattttaacaatatttattataaagacagctttgctatgggggtagatgatgtatcaaacgtctatggcaatgatagcaaaacaaatgaaattgggtttcatgaatcaaaaaaactgaaaacagaacaaagccccaaaggagaggcataccgaactttagtaggggcatcccgtcactcctcaattgacattaacaaagatgatgatgtttttaatgttcataacgattttctctcaaatgaaaaaaaatattccgatgctatttcaaaatgcgaaacaaaacaggtatttgaggattatgtagataaaaagcacatacctgattataaggaatgcacaaaaacagtcgatgtgacaggtggttacatagttaatcatccatatttagcaggtttggtatctcataattcaggtcctgcaaatattaaaacctgtggtgagacatgtgttgatatctggttaggaaaagtaggtgatgactattggaaaggtaactgccgaatatttgaagattatatgtctgtgaatgttattaacccaaccgctgttattagcgcaaaaataacccgcgctaaatgggatgattacatgcaaatctatgctggtacaagcactgatcttgaacaggtatggggtggaccacacggaaaagatgtttttccacctgaaactcctggtcggtgcgaactttcaacgagttgggatcagcagttaaatgttgatgtgactgaaaaatttagtaaagtccaaccgaatgatgaggtattttttaaaaacagagtatcagtaaccggtgcaggtgaaggctttgcacaattacgcattcaatttgataagaaaaaagcacttactaatgatgtctggagctcgccacagcaaagtgaatttaacaaggctgtaaaagccattaaagaaggattttgtcaggattacactgttgtttgtcatgacacaataatccccgataaagacggttgtgctgtcatagatggtgtcaaactctgtaaagaggacttcgtaccacctccgttagataaaatatcaccattctgtaagagagcagaagtgatcacgcattgcggtaaagagcatggggtaaacaacacatgcaagaaatacgagaagcaaggttgttcgtttataaaatctcaatgtttaacaggaaaagaaggtgatattgctggttgctggcaatctagtgaaacatgggattgtggaaaagatgttacctttaataatggcgcagtccatgaaaagctaatttgtgacggcgctgtacaatgtctaaatggatcatgtttacgtccttcatctcaagagaatggtgattttgcaacagcggctgctatgttgaatgcggcatcttttgcattggcagatacgaattgtgctgatgcagaagaagcaaacaacggtgaatcttctttgaataaagagcaatgtgtcattttcaaaggtgaagctctgacatgccgaacggcaatgggaggatgggtagattgttgtgatcaaccggtcggtgtgagctggatagaatacgtacagctttcaatgatgactatgagagcggcagatgccttagcgatagaagcagggttgtttgatggtggtgtaggcttatttgatatggcaagcacagcagctatggatgcggtggaagctattacaaaacctgctatttccgcttttaactcttttgttggaaatgccggtgctgaagtagctcaaggagtcgctgaaaaaggcgttgtctcgatgacaacagcagcgcttaacaacctaacaaccaaagttgccgaatggactgcaaacaccttcggtgaggctgttacaaacgctattttccaatccgcagctactgaaggcggaaaaactgcaactcaatcattagcagaaaacggaggggctagctcaggtgcttcagtagtgcaactttcatcaacgatcacaacagccatgtcagttgtcggatatgcatacttggcataccaaatggcaaacctattggtgaatattatatgggcttgtaccgatgaagaattcaaactggcaatcaaaaaagaaactaagttagcgacaaaggtagacagttggtgttctaagaaggtccttggcgcatgtatcgaaaagaaaagtagctactgtgcgtataactctcaggtagccagaataatcactgagcacgttagaggaacaataggatacggtgatacaaaaaatccgaattgtgaaggaattacattagcagatatggataaagtagacttcaccaaaatagacttttctgaatggaccgcaactcttaaagaagccgacatgcttcctgatttcaaagaatttgacctcgataaatatacgggttctggaagtacactcaatgctgatggaaagcgagtaaactctgtcgagcgatttaccagaggggttgaaggtacagatttagaagaagttagacaaagagcgaaaacaaggttaagtgttaaagatgaatag

SEQ ID NO: 289217 - DNA, 255 bp, Morganella morganii
atgtcttttaatcacggtttcatatacagacgaccgcgttattatcacttcacccgttcgtgtaagtgtcatgcggagagaatgcaaaaaacagaacaacaagccgcagaacagcgtcaacatgatattgatttatatggctctgcttatgttaggaagcgtgaaaacggttctggtttcggtagttttttagaagattatggattaggtattgctatcgtcgtttttctggtgttttttttaatgccaatttga

SEQ ID NO: 289218 - DNA, 1941 bp, Morganella morganii
atgatggcatcagtaccgatgttgggcgcatttgtggtgtttggttcctcttatgctttcacgggattaacaaaaggtctatcaacaactggtgctcctgatacgtcaccaatgactccagatgctactgattctcctgctttacacaagcaatcagcagttactgaacaatcagcacataatgcagtatcaacgataactggcgggaatagcactgctccaaaactggacttatcaaatacgcgacaacaagctatacaatctgcttccagcagaaatattacagctcaagaaactttaacttctgctattgataaaggtgttagttctttgagttctatggggataaatacatctcataactacggatctaccatcaatagtgatacaggtttgagcaatacagttagcaattcatccaatagtggttcgatgctcacaactggtaatacatcttccactattgatgagagtgccaaaattacggctttatccggtgacgcaagcgtatcaggtggtatgggtgtaggttctccagaaacgggtggtgctggtggtaaaggagtttctattggtggtagcactgccgttagcgctcaatcctccgatattcaccgtaattccggagctcaaacaaccggcataatgacaaatgactctgttgcaacgaatgacgcaactagtgtatctaataacattcaatttgctgaacacattgcggatcagcttgataaacatggtggtactcaagaaacagcacaacttgctcaaagcatccgacaagccgcttcacaagcagaaacagcacaagaatcatatagtgatactgtttctgcgaataattcagtatctaccaaacagtcttataccgcaggtcaggtggcaactttagcaaatgaaaacagtaatgttatagacaaaatcaataacgaaaacctaagtaatgatgaatttcaaaacagaaaaaaagaataccaacagcagcttagttccattatgggagcttcagatgcagaaagcgctgcgacaatatatgcggcaaatgatactggtggtttagctaatcactttggcgaattgttcggtcctgcaacaaaccctaccggtgcaatgaatggcgaagaaagtagaaacatgaatgttgcacaaaatacagagacaaaagttcaagaaaatattgtgaataatcagggggctgttaataccaagttcgttaatacaactgctcaagcccaacagtacctaaacagccaacaggctaatatagaagatgagtcagccaaaaataatgcaggactaggtatggctgagcattattcagaatctaggagagctagagagcaattacatggtagctcggtatcagaaaatagttctcgaataatttcaaatgaaggtacaagtgttgctactagcatgaatgcattgaccaattcagttagtaacgtgggtgcagaccaaaacaatatagaatcagatacaacagcaaatttaaattctatgaagtcagtaaacgctgcaactatgccgtatgagcagtccaacaatattactgacggtctggcaaaatatgcagctattgctaaaaattccacctctattaatcaaattaatgaagcagcaacaaatttcgcaaatacatattatgaaaatggtggtaatgctagccgtgaccaactttacagcgcacttaataatgtgcaaattgaagcaagaactgggtctggaaatactcaattaaacattaccaacaacacattagctggtggtaacggcaatcaaattcctcaaagaagtcgtcgagatataattaccggtactgatctctcacctagttctataccagaaaaaccagaaaaatcagaaggttctggtgaagataaagcaattattacaaaaggtaatccaatgccaagagtagaacaaattaaaccacgataa

SEQ ID NO: 289219 - DNA, 195 bp, Morganella morganii
atgttaaaacagagtgatatgacagagaaagcaaagcgggtttttgattcagtaacaggcgaacctgccacatcgggtgaaattgcctgggtaaataatttaacagattcttgctgccaactaatactgacacagttaacgatggcgggattaatcaaagaaaacatcaaagaaaaaacatatcaaaatatctga

SEQ ID NO: 289220 - DNA, 360 bp, Morganella morganii
atggaaaaaaaattattttgtctgtcttcgtcattcgagtttttgcgaagatcaatggctctgatgtcacctgctgttttaattttagtggttttatcattcaatgcttttacggtagtagatcctcagtcttggaaatatacagtattaacagcattgtcagcaggtttcttacttgtagttttttgggctatctggattgactatcgatctttttggaaaaacgcacattgcggcaacagaattatcaatacgttattgctgatatttttctttttctttattgttttagttctgggttacagtgtattgactgcatcaaccctatactcatcgattttccatgctacaggaaaatag

SEQ ID NO: 289221 - DNA, 285 bp, Morganella morganii
atgaaaaacgaagctattaaaaaagcgatcaagattgcaggcgggcagcaaaaattagccacgctctgcggtgtcagccaaccaacggtttggcggtggcttcatggcggtggtatcgatgcgaagttcgtcatgttgattaccggcgcaacaaataatcaagtcactcccgccgagatccgtcctgacttaacagacttaatgaaagcgaacactccattaagtaaccaagcatatacagcgcagcagtcagatgtaactacaacccaacctgaaagcgagtag

SEQ ID NO: 289222 - DNA, 1716 bp, Morganella morganii
gtggacaaaagtggtaattattcagcatggaccgattatgtcagggggatctctgaatttgatgcaggagaaatactggctgatttgtcagggaagataggccatgaccaattagcacaggacctgctgaccgaaatcaacagtaaagcggacagcagtgtggtcagtgctctggatgagcgtatgtcggatattggcggggaggggactgaggcaacttctcaggtacaggcgttgtccggtaaactggacaaagtaaaggctgatttaacagagtcagttgttgttgatctggatctgtcagcattaaatgaaaatacttattacccggttattctccctctgacgacctcccgccgctattacttcagggtatttcgtacactggggcaatacggagataacaaacccggttatgcaactcacggctccgggggctttgccatgattgttgagtggcaggtgagtggttcaggatgggggactcagtctgaaaaccgtattattgataatgttgactggcgatggacaaatcagtctcctgtcatgggccctgcgcagttgactcacagctcggtggaatatgtgtatttacgcggaggcgcaaaatatcagctgaccaggcataaaagtgtcagtcaccggattgtcactgatacttacacaggtaacgggcaatctgttacaccaaaaggttttgtcgccggtgaaataccggtgtccggtgaacagcggtttaatgccacagcaaatgcggtgaaccggcttgaaacgagtgtgacagaggtttcaggaagggtcacatcaacggctcagcaggtgacacgtctggaaagtcaggtcggggcggattcggcaaaaattgaacaaacgtcaaaggttcttactgacttaaacggcaggatttctgcatcgtggacaatgaaagtccagctggacagcaaagggaataaagtcattacaggtatcggactggggtttaatgctcagggaaacagtcagtttcttgttaatgctcaaaattttgcagtgatatcgtcactgaacgggaaagtagtaaccccttttgttattcagaacggccaggcattttttaacgatgcgctaatcagccaggcaacaattgataagttactggtcggtaaccacatcagatcagtgaattatgaaacaggccggaacgggtattttctgaatgcgcagaccggaaatgcagaatttaacaatggagtgttcagagggaccctggacggtgtggacggtcgttttacggggacggtatatgcggagagactggtcggggatgttgcggttgccgcttcgtacccgcaggcatccgcacaaaatacacatggtggcgggggaggctggactacggcaacgtctgtaattacttacgcagggggaatgctttatgatatgacgttagtacttccttcgataactgccattattgaagataattccggcagcaatccgcgtccggtatcgggagaactgcggtttagtatacgtgtggatggcgttggtcagcaggcaacttctcagtggtcaggacagagtgttatgggatcagctcatgcggttattcctcgtggacgaaagaatgtgaaaatagaaattgaagtgggagtcaggcataaaggcagggcacatgtggttctgagggaaggggttgtgatggccttcaaacgcagttccgcatcattcagatag

SEQ ID NO: 289223 - DNA, 699 bp, Morganella morganii; identical to SEQ ID NO: 277961

SEQ ID NO: 289224 - DNA, 705 bp, Morganella morganii; identical to SEQ ID NO: 8686

SEQ ID NO: 289225 - DNA, 348 bp, Morganella morganii; identical to SEQ ID NO: 289156

SEQ ID NO: 289226 - DNA, 816 bp, Morganella morganii
atgagccatattcaacgggaaacgtcttgctcgaggccgcgattaaattccaacctggatgctgatttatatgggtatagatgggctcgcgataatgtcgggcaatcaggtgcgacaatctatcgattgtatgggaagcccgatgcgccagagttgtttctgaaacatggcaaaggtagcgttgccaatgatgttacagatgagatggtcagactaaactggctgacggcatttatgcctcttccgaccatcaagcattttatccgtactcctgatgatgcatggttactcaccactgcgatccccgggaaaacagcattccaggtattagaagaatatcctgattcaggtgaaaatattgttgatgcgctggcagcgttcctgcgccggttgcattcgattcctgtttgtaattgtccttttaacagcgatcgcgcatttcgtctcgctcaggcgcaatcacgaatgaataacggtttggttgatgcgagtgattttgatgacgagcgtaatggctggcctgttgaacaagtctggaaagaaatgcataagcttttgccattctcaccggattcagtcgtcactcatggtgatttctcacttgataaccttatttttgacgaggggaaattaataggttgtattgatgttggacgagtcggaatcgcagaccgataccaggatcttgccatcctatggaactgcctcggtgagttttctccttcattacagaaacggctttttcaaaaatatggtattgataatcctgatatgaataaattgcagtttcatttgatgctcgatgagtttttctaa

SEQ ID NO: 289227 - DNA, 705 bp, Morganella morganii; identical to SEQ ID NO: 8686

SEQ ID NO: 289228 - DNA, 885 bp, Morganella morganii; identical to SEQ ID NO: 48589

SEQ ID NO: 289229 - DNA, 1476 bp, Morganella morganii; identical to SEQ ID NO: 48588

SEQ ID NO: 289230 - DNA, 1056 bp, Morganella morganii
atgaacaaatttaaattgttattatcatctgcactcctgttaacttcgttaagctatgcagaaagtgtacaaaataataatactgcatcattcacatgcaaggataatgaatttttaacaaagggcaaaatgtttactgatgtttgctggagttgcatttttccaataaagatatcaggagctaatattggacctagcggtgatatgcctgatgatgccgcaaagggcgtattctgcgcctgtcctgacggattaggggtttatcacgcagggttgttaactggagtgtgggaacctcgcaaaattatggaagttacgcgagttcctggttgcttctctacgatgggcgggttaaaaatcaatgtggggaataaatacagttacggtacacaggtatcagatacaggtcatgagatagacacgaattctggtatcagtttctatcactatcattactactcagctccactgttacgtatattagatttgtggttgccaaaaggttgtcaaccagacgcatacagtgactttgatatcattagtttttcagagattgacccaacttggcatagcgccacgctagcctttttccaacatcctgagtctgttgcggtagcaaatataattgcacatcaagcatgtacaatggaatccgttgccattactggcggaggaaagcctatgaataagctgtggtggtgcgccggatcatggggtggtcaatatccattaaccggttctacatcatcgagagacacaccacggacaaccagcctgacagcagcaaaatcattatcacttgaacaccgcagagggctagcacgtctaaccgtggggcgtgaagtggcttgtaagcctcgtgtttacccaactatccctaaacagcaatataagttcaatatggtgtttcctacaccggagaccaaaagctcacacgtacttggtgagacaccttacaaatggcaggggggctcattcagataccctacgggatcaggacaagaaagtacgtatatgatctttcagtggatggattgttgtagaatcatactttaa

SEQ ID NO: 289231 - DNA, 1221 bp, Morganella morganii
atggtaaaaaagaaagttacattattgatttctctattaacactatccattacatccagtgcaaatagtaaattaaatatggttactccatatacagagtccattcctactgtcgaacgatctactgatgcggacatggcagatttggaaaaactaaaagcagtggcagcggcacaagctgaagttcacagagaggcaacgcgccagcttatcgcagataaaaacgttatggcaaatcaggctattaacaagctaacgactgatgaagggcagatactaaaggagatgatcaaaagccagaatgaaagtgaaagtttcaaccaacagcaaaaaggtaatgtattttacatattgatttcggcaagccttaaagatactgaagtaattgatattatgcggtcagtatcaggtcgtaatgatgtaatcctagttgttcagggagttagaaataaagattcactggtcgatgaaataaatcactggcataaattaattcgcgatacaaagtcagaagtgaatttcacaatagatccgaacatttttattaaatatggtgtgcgaaccattccgactatcattcatgaaaatgacggtgaatttgtatctctggtacatggaatttccaatgttaattatctcgataacaaaacagggaatatgggtgtgcaaggaccagttgttgaggtaattgaacgtaatatgctggatttaattgaagaaggtattaaaaatctagatttcgaaaaaatgaaaaaggatgcctataaccgatactggaagaataaagatatatacaaattccctgaagctctaaaagatagcacccactatgtagacccaagcgttgtgataccacaggatatattatctccagatggacgcataattgccaaaaaagggcgagtaaaccctatggacgttatcccatttaacttgaagttaattttcttcaatcctgcttcagaatggcaacgtatatttgcacaacaacaatatcaaaatgccaaagatgaaaatttaattcctacattgattgcaactgacgtatatggggatggttgggaaacattttcagatagcaatttgtatggtgataatgccactttatattttatacaggaaggtatgaaagaacgttttgggattcgtaatgttccaagcattgtaaccggtgatgataagcaatttattgttaatgaatatgcagaaaggaattactga

SEQ ID NO: 289232 - DNA, 324 bp, Morganella morganii
atggacaaagatattcagaaagggaaaacatttgcttttcggtctgaatacatcagtagcattgcgatcaaatttatagacggtgtagctggtgacaaggttagggtcaatcctgaagaaaccacggtcaatgatctgatggtgggtgaaggacttctattagcaagagaatctggtcatacagagcaggaattacaacgtgaggggataattcctgccggtcatatctggctaatgggtcgcactaaggtcagttttgattcacggtattggggcgtactccccatagaaaatgtgatcgggagagcatatccgatatggtaa

SEQ ID NO: 289233 - DNA, 1095 bp, Morganella morganii
atgactgataccgtagaactgacattaggcaatcagatttattccggctggaaaacactggatgcgaccagcagcctcgaagacatgtccgggcagttcagtctcggtatcaccgtaaaaaataatgattccccgctggtgatgaaaccgggtgccgcctgtcagctgtccatcaacggccagccggtggtaacgggttatgttgattcggttgatgtcagcatcagcgcggatgaacggacgattacgttatcaggccgggataaaaccggggatttggtggattgtgccgccgctcacggcaaaggccagtggcgcagcgtgagtctggaaaccatcgccaaagacctgtgtcgcccgttcggggtgactgtccgctgggaagtgacagacacggctgccacagccgttttccgccagtggcagattgaacccggtgaaaccgtgttcgataacctgtcccgtgccgcccgtcaccgtggtgtcatcatgaccagtaatgccgccggtgaactggtttttgcctctgccggcagtaaaaaagtggcgacgctggtactcggacaatccggcaaacccggcgtaaaaattttagatctcgagacctcactgtcatggcttgaccgtttcagtctgtaccgtgtgaaaggagccactgctgccggtggcaaatggggggaaacacagacggccgttcagtctacggcagtttatatggacgccggagacccggaaatcacccgttaccgtccgaccatgtttatcgcagatgacaacatgactaaagccaaaggcaccgcccgtgccgcatgggagcagaagcgggcaatggctcacggcatacgcgccacggccggtgtcagaggctggctgaagcctgacggtcaggtgtggaaaaagaatgaacaggttgtattacaggcaccgcaggccggtttcccggatgaaaccctgctgattgtctcggtcaattacctgctggacagtgacagcggcaccctcacccgactggagctgatgccgcgtgaggggttcaccgaaccggcagacccggagaaaaaagtcaaaagtgcagatgtaaggtggaagccatga

SEQ ID NO: 289234 - DNA, 1335 bp, Morganella morganii
atggaatttgagcaggtaatgtcacttttcagcgattcatcatggcgcagccggattacgcccggcctcggttcattccggggcgtgccgttttatatcgtcgatgatgccacggtcagcggtggccgccgtgtggtgcgccatgaatacccgctgcgtgatgatggtgaaaccgaagatatggggttgtccacgcgggaatatgccattaccgccgtggtgttcggtgatgattatctggataaaaaagaggcgctgattgacgcgctggaagaagacggacccggtgaaatagaccatccgtattaccgcaaacagcaggtgcagattgaaacatggacggtacgcgaatcctgttatgctggcggtaaagccgtcttctcggtgacctttattccggcggctgataatacctccccggtggtatcgtctgaggcagagctggacggctccgcgctgacggacagcacactggccgatatcaccgcgaactgggaagccttcacagataacgtcagttacctctctgagcgtttaaatgcggctgaaaacacccttaacactattgtaaacggtatccgcagcctgcctgccgggtcaggtatgaacgccctgctgggggcagcgctggggctgaaaggctcactgaagaacctcattaatgccccaggggatctgttcggttcggtcagtgacctgattggcgggattgcggatgtcgctgttcctgatgcggccaaccgggcactgcgaaaaacctctgccgccattgcgtcacagtatccgtcaaatacccccgctgtggcggaatttcagaatgtgatgaacaccaccacgcaggtttttattgcccgtgaactggcggtgctgacactggatgcggccgttgcctctgcccgtgagcaacagaccgccccggcactgacggcggtcacccgtcagcgtgacctgaccccgctgctgcccggcagtgaaacacccgcagatgaggcggccatcccgctgattgaaaccgtggatgatgtgcgtcagagcagcgcagaccttgacgggacactgacacagttaatcgtggataccggtgatttcggctggttccgtacctcagagcagttacgtgacttccggatcatctttcttgagctgatgcagaccacggcggaaatgttacctgcggccgtgaccgtccgggtgaatgataccgaaccggcacttgtcctgctttaccgtgaaaccggcaccaccgcacagattgaacggttcgtccgccggaacggtgtgcggcacccggcctttgtgaccggcgcactggatgtggaggtcatcaatgactga

SEQ ID NO: 289235 - DNA, 1626 bp, Morganella morganii
atgatttttaccaaaatcattaggggattcatcagtgcaaaacatctgttagtcttgattgatggtatcagacttaataatgccggtattgcaggagctgcggatcttaatcagttccctatagctttggtacaacgcgtggaatacattcgcggggctcgctcagcagtttatggttctgatgctattggtggtgtattaaatattatcacgctacgtgatgatattggctcaaatattacagccggagttggctctaacggcttccagaattattcgggcaccactcagcaaaaaattggtgagaatacacagattacagctgccggtgcttatactgattcgaagggttacgatattatctctgactatacgaataaatatcagccatcagacaggcattatggttttttaaacaaaacactgtggttaggcgcaactcataatttttctgatgaaatttctgcttttacgagagtttacggatttaacaatcattcaaattatcatccctggatggctggcgcgatggatacccgtgaattagaaagcagaacatttgatattggcggaagttttaaccgggacatttattctactcagctcacttttagcctcactcatactaaagattataattttaacggagaggctgggcgttatgctgaaggtcgggcattagatgactctaagcaatatagccttcagtggggtaatcatctgcaactgggcaatggaggcttaagttcaggaattgattatcaaaaacagactattcaacccggcacatctatgacaccggaaagtaaatcactttcagatacaggattatatattacagggcagcaacagattgattctgtgacattggaaggagctgtgcgatcagatcaccaatccgagtccggatggcatacgacatggcagacaagtgcggggtgggaatttattgatggctaccggctggtaggatcctatgcaacagcatttaaagcaccaaatattggccagatgtatgcgtatcaaccagatcctttttatcctgactatggtgtaaagggtaatcctgatttgaaaccggaagaaagcaagcagtgggaggttgctctggaggggttgaccggtgaattgaattggagattagggacataccacaatgatatagatgaattaattgatttcagatcaggaacaaatgggcaaccgggtaactatcagaatatcaaaaaagccaaaatcaaaggtgtcgagtgggtaggggaatttgatacctggattttccatcatcagatgacttatcaatacctggatgcaaaagacaaagagacggataagcgtctggcgcgccgtgcacagcagcaggttaaatatcagctggactggacggtggccgatgttgatatggggctgacctatcagtatatcggtaaacgttatgatgatgcggcgaataagcaaaaactcggcggtgccagtgtttttgatatcacagctgcatatccgatcactgaccatctgacaattcgtggtaaagtagctaacctgtttgataaagactacgagactgcgtatggctatcgaaccgctggccgcgaatacttccttacaggaagctacaacttctga

SEQ ID NO: 289236 - DNA, 153 bp, Morganella morganii
atgaaaggcgtaggcagcgcactcaatcggttagctgacttttacatggatatggcacaagacctgttccctgtaattgaaattgaccctgccagatcaatagattttgttgtcacaaaaggcgttcaacttcaattcagacaaactaattaa

SEQ ID NO: 289237 - DNA, 513 bp, Morganella morganii
atgaaatttttactattgccactgatggttttaactaccctttcattaaccgcctgttcatctcttatggtcggtgaaacagagtttggctgtaaaggtatgcctaattcagtaacgtgtatgagtgttcgtgacgtacacaaattgactgatggtgaaaactatcaagaaaaaattgatacggtttctcaaatgcagctcaacggagaagtagtaagcaaaagcgatatggataacatactcaaatcagaaaatagtaaatgggttggtacggagtctggacaatatgtgcctgtgccaaaacctgcggcaaacccacaacccattagaagcgagtcgatggtaatgcgtgttttaatcgacccatacgaaaacacagatggagatcttatcatcacagggtatgtctacacggagatatcgcctcgtaaatgggaagtcggtgtttctcgtccagatcgcaagcacaatgcggttctcaaaccactacaaacaccagataaccgaaaatag

SEQ ID NO: 289238 - DNA, 765 bp, Morganella morganii
atgaaaaataagatacaccttagtttaatctcattagctttagcattcacaaccgcacacgctcatgcgaactatgctgatatcgaaaaaacaaatactcagactgttttcaatcaagaagcattaaaagcacatcccacaaaaacgcctgatattcccaaatttctattaccaagcaatgggataattgcgctaaataacaatggtagtttacagcttcttacctcgaatgggcgctttgttatcaagggaactttatatgatacatgggcgaaaaaagatttaacctcgtttgaagaaattcaaaagtacggctcaattattcctgtaaagaacctcaatattaaaatggatgatttgcagtctgcaacatggggaaaaggtccaaagcagaccattattttcactgacccgttctgcgttcagtgccatgaaactttacaacaactaaatgatcttgaccctgagaaatacactgttcatgtactttccgtaggcgttttaaacagtgatagccagcaacgcaattttgaattgtattgtgcaaaagacagatacagagctgacagggcaatcattactgggaataacagtgttcgtttcgagcaaattgaaaactgtgaccgtgaggctttgatgaaaagggaaattaccgcacaagtttttggtgtgagcatgattccattcattattcgtgacgatggtacttacaacgttggtaaaccagttgaagggttaaagtcatttttggagagtggtaaataa

SEQ ID NO: 289239 - DNA, 633 bp, Morganella morganii
atgctggacaaagccagtcgttatgcagatatggcgagactggtaactactactgatccgttcattgatgaaaacaatcgccgatccacatcctcatttgcggctatggagcaaacacgagtagctgacgaaaacagaggacgtgttttgaatagcatttcaagtaaagcaggtatctttttcttttttaaaggaaaggactgtcctttatgtgagaagcaagcctttgttttaaaaacatttagtcatgaaactagtataaatgtaattcctatttctgttgatggtctccctctacctcaaaatgaatttaacaatatgaaaattgataccggtcaagccaaaaaacttggaattactaatgtaccagcgattgcattagccataccccctaaagatatcagaatcatttcatttagcgctatcagtagtgattctctgaaggaacgcactgtgttgattgctaaagatgcaaaactaatttctgaacaagattacacaagcacacttccccttaatcacaatggatatattgacagcgacataatcaaagatatgccagacgatattttaaatgacccaattctatttgttgaatatatccaaaaacgatctcaagttacaaaaccttaa

SEQ ID NO: 289240 - DNA, 1410 bp, Morganella morganii
atgaaaaagacattattaagtttggttgttacagctcttttcggatttactcctattagtcaatccgctgatgtaaacgagcaattaaataagatgtttggctctatgtcgaacacaaccagcggtggttcttataagagtgttactcgcgaggggtacgtaggagggggcttcgtggtccgtaatcaactacgaacccttacacccgttaacgtaacgttacctaaagcgtctggtgggtgtgccggtattgatttctttgcagggtcattcagtttcattaacacggaagaatttattcaattgctccgaaatatcgcggctaattctgtcggactggcatttcagttggctattaacgctatggatgccgtactgggaggggaattatcaaaactacaatccatcatacaaaagctgaatgaatacaccgccaactcatgtcaattatcaaaaggcttaatggtagatatggcaggtgcaattagcgaagaaatgaaaacgtcagtgtctgcacagctttcgtctaaaggtattcaggattcattcaatagctataaatccgaggtgttaggtaaacaaccgccaatgatagcagcacaaaaagccggtttaacaaaaccgtgtactcactacggtaatgtaatgtggtgtttattaagtaaaggtggatttaatagtggatttttaaattctactgacgaacaaaaagaattagttatgagtttaaccggtatggttattgtaaaagaagccacacaatctaatgacaaatccactcccatattgcaccaaacaattgcccccatccctattgaggaagtctatgaactgttgatgaaaggctcaaaagaaaaagaaaatgttcaaatctatggctgtggtacatcaaaagacacctgcatagctccagcaccgaagaaaattaaggttgatgggcttcagactcaattcttagatatatttgaaaaatataactatcttcaaaaatatataagcaatgagaaacctgctgaaaacataaagcaaaaagtattgtttttcaatgttaatggggctgtcactaatggttacaaattaatagaaggtcaagatactactagagcaatgcactattacagaaatatatctgaaataattagttatgaagcagccttcgtatatttaaacgatatgttaactgtcgcagaaagcagtgcagatagaattatagaaaacaatgaggaacctatttttgctcatatcaaaaaacagcgtgaaatgatacgagatgcaaaagtaacccttcgacaaatacatgatggttacattgttaagcatggtggtttagtcagaataaacgaaatatttaatacattcatggtcggtacgaaaccaattcacgttccagatggtgtgaacgcccaataa

SEQ ID NO: 289241 - DNA, 1269 bp, Morganella morganii
atgagtattcatagtgccgatacaaataaatcacccggactgaccagcggaaccatgcttgttatagcaacagtcgttggcggcggtatgttttctttgccgattgcgatggccggtgtctggttttccggtgccaccgttattttgattttagttgcaattatgatgttactgaccggtctgatgttagttgaagttaacctgcattttgaaccgggcgccagctttaataccttcaccaccgagttactgggcaaaaaatggaatattgtcgtgggtattgccttcgggtttgtactctatattctgacgtatgcctatatctccgggtcatccgctgttctgactcagacgatattaaaatataccggtgtcgccctgccgataaaagccgcggtcgtgattgtcgcctgtctggtggctgcgattgtctggtacagctcattatgggtcggacgtattaccaccattttaattttcggtaagtttatcgcgttctttgccaccttctccggactggttgcacacgtggaaattgccaatctgctggattccgcatcagtggcaatacccggaacgaaatatctgccttatgttctgatgacactgccgttctgtattatttcgtttggcttccacggtaacgtgccgagcctggtgaagttgtacggcaaaaccaaattccgctttattacccgttcaattattatcgggacaatatttgcggtactgctgtatatcttctggctgggtgtcacgatgggcaatatcagccgtgccaacttctctccgattattgccaaaggcgggaacattgatgtgttcgttgaggctatcggcggggtgatgtcagggaaaaccatggatcttatcctgacattcttcggtaactttgcggtggccagttccctgctggcagcaacactcggcctgtttgactatattgccgacctgctgaactttaaaaatgacagcgccggtcgtttcaaaacagcagtagtgacgtatctgccaccagcggtggtgtgtttcttcttcccgaacggattcgtttatgccatcggttatgccggtctggcctttactatctggagtgtgattttaccgccgttcctggtaaaagcctcccgcaaacgctacagcgacagcgataccatttaccgttcgccgtgtaacagcgcggtactgaatctggtgattgtctgcggtgcgattgtgtatctgacggtcattctggatgtgttcggctggctgccggcatttaaataa

SEQ ID NO: 289242 - DNA, 1521 bp, Morganella morganii
atggggcacggttggattcataaattagggaattcaaatgagtggatcagcgtacctgacgacttaatgacgctacatacgtcattaactggtactacgggttccggtaaaacgactctttacaaattacttattctgcaagctgctttaaaacggcaacctcttattctaattgaccctaaaaatgatgaggaacttgctgattatatgtacaagtgcatgaaactaatggaacgagaagatgatttttattatctttccattgcacacttggataaatccaaccggatttcaccaatatcaaattattccaactcaactgaagtagccagccgtattatttccgttatccagaaggctgataacacaactgatccatttatttcatttgcgacaatgacgttgacaactattgtgcagttgatgaatttcgcaaacgtaaagcctactcttgtaaatataaaagcacagcttggtactaatttgggtaattttgctgaattacttgttaaagcaatcgacaaattaggatatgagctatttcctgatgtatacgactcacttcttgatcgtagactagaacatcaatcaatgactagaacgacaggaactatcgagaaccatgccggaataagaatcactatctatctgaatgatattgcaaaaattaaggaatatacattcattaaaagtggaattgacctatttcagcataatcgtgaacatttccaaaagatgatattaacggcactacctgtattaagcatgttaactagtgatgggttagatgaagtattgtcaccgtccagtgagaatattgatgatgaaagagtcattactaatatgaaagatatcatcaatacaaacgggatgatgtatttagggcttaattctcttgctgatggtgataaaggaaacgctgttggctcaatatttctaagcgatatcactgctgttgcggctgatatttataactatgcaaaaccgcgcggtgaaaagaaacgcgatacaaatattcttattgatgaagctgctgaagttatcaacgatcaggttattcggcttcaaaataaagggagaggggcagggtttaagttattcattgcctcacagtctaccactgactacgttgctacccttggctctgaagcgaaaaaagaacaagttagtataaatgcgaaccataacattgcattacggactatcaatattcaaggtcaaaaagatttaatagaaagaataccaactacaaatttcaagtacatccaaagagggcatggtacgagttcgggggaagatccagaaaaaatcaccggaagtattggtgagcgattgatggaggttgagagtgagttatttcctccacaactattaggaaacctcccaaatctagagttttgcgctattttaaaagcggggaatatatgtaaaggtcaaattccaattgtacaattaccaaccagcgaaaaagaagtattaaagttaaagatgctaatcaaagaatttaataaggcacgttaa

SEQ ID NO: 289243 - DNA, 351 bp, Morganella morganii
atggataatattgtcccagagtatgagtttagatccaatgcaagcgacatatattttgctcgttttcttctccagtggaatatttgtagccgtcagatcatattgatgcttctatctatgaaggacactgaatttgaaaccattttctgtgactacttcaacgaacaaattgagaaatattatcaaagaaaaaaaactgatttgaagatttcagattgggacaatctagcaatagtcatttcaaaatccataatttttctttcaaagttaaataacacttcgcctttagatgaatatcacaagtataaattccctgaaaggttagataatagcgttatttccagtttctaa

SEQ ID NO: 289244 - DNA, 789 bp, Morganella morganii
atgagcaatctgattattgtcgatggtattaatgtgcgccgggatatggccggtcgctattgcctgaatgatttgcaccgggccgctggtggagaggaaaggcataaaccaccttactggctgagaaatgctcagacagagcaacttattgccgagttgcaaatctgcgactcgggtacacagccggtaaatgtgctgcgtggtggcaccgaacagggcacctacgtgtgcaaagaattggtttatgcctatgcgatgtggatcagtccttcattcaatctgaaagtgatccgcacgttcgatgtggtggccggaacacagcaggcgatacagctggctgataaagttcaggccggagctatcctgctggagtctatggcgaaaacattgaacctgtcgaattcctcaaggctggctgggtatcagaagctgcaaaagatggctgatcttcctgatctggctccgtcctatgcgattgatgcaccggctggcgcggtggatggttccagcagaccgacaacgtccctgactacgttgctgaaaaatcacaatgccgcattgtctgcgaccagagcatacaaacgtcttgctgagctggggattgtggagcagaaagcccggcctggatccagaggtacacagcgcctgttctggtcgataacgacgcgtggactggcatacggtaaaaacatgacatccccggcaaatccgcgggaaacgcagccgcatttctttgagagcaaatcagcggaacttctggcactgatgatgactccggcggtggcctga

SEQ ID NO: 289245 - DNA, 933 bp, Morganella morganii
atgggagagttaattttacgtgacaacgtaacagatattgttgatgtaaataacatgacgaaaaacaccaacaatccagcaaccagctacttgctacggctccgttccaaacaaagccaaaagacaatgcgatcctgtctagtgtcagtggtgaaattgtttcgtgctatggacccgtttactttcgattggtcaatcatggatcgagatgccgttcaattagtacttcagaaattaatactggagaaaaagaccccaaatagtatcaacttgatattgagtgccattaaaggggtggctgaagaagccagagcatcacgagtcatagatagtgatacatatcaggatattagaagcatacgccggattcgtgggaaccgtattggtcgagggcgttcactgagtagtagtgaaataacgcacatttatcagcatcttgatagcataaataccgcagtctcggtacgtgatgcagcgattgtatcattaatgcttggctgtggtttgcgccgtgctgaagtcactttgttggatatggaagatatcaattttgataattactccattaaaatcatgggtaaaggaaacaaagaaagaactaacttcatgccaagtgacacgctccgtcgtattcgcttatggatagaaactgtaagaggggatcataccggtgcagtttttacccgcatacatagaataacaaccgatggtttacggtatattattgataaattggtgaaagattcagactcagattcatttacaccgcatgattgccgacgaacctatgccactaagttgttagaactaggtgaggacctacttactgtcagagaagctatgggacacagtagtgtcgctactacacagcgatatgataaacgaggtgtaacacgcttagaggctgctgcacgtaatctgcaatattattag

SEQ ID NO: 289246 - DNA, 270 bp, Morganella morganii
atgtcagcggtaaatgacttgggctttggtttggttattacattttggatctgtctagcattcgtcatgttattagtttacatattcaaatccgattttaataagaaagccgtgaaagatggaaagcgatatagccagttaaaaatttatcgaaccatcgagcgagattataaaattctctacgtactaggtgatgaaagttacagtattgaagtagataaggattattacgatgcggctattgatagatataatcagtcgatgaagtga

SEQ ID NO: 289247 - DNA, 255 bp, Morganella morganii
atgaatttaaaaaaactagaaatggtaatcagtcttgtattttcaataatggtttttattttatttggtatgtttctatttgaaggttcaattcgattaaatggattcttctttgttctattatatattctatctggtgcaaatatctttttgattacctataaccaaaatggagcaacaagcaaagttattgcctacttagtagcttcaattttgttgttaatcctgatttttgctttgatattcgttctttaa

SEQ ID NO: 289248 - DNA, 1407 bp, Morganella morganii
atgcgccaatttatatcatcaggtcgttggaccccaaacgttcctcctagtccgatttggtcaacgccagatggggtctacattatttgggctagtgccgctgaagaattatgcaaagagataaaaaaccttggaatttttatcccacaatcagcagatagtttaggtgagatactattagctcatgatgtaatcattgaagcgccaagaggttcactctattggaagattgcaccaaaaaagttactcaaatcagcgtcgtttataaaagatccagacacgttcttttactgcgtgaaattagcttcagacgaattactatttggcgaaaatataaagccaacacatgcatctgtttatgtcaaaaacgaaacgagttgggttagttttgaaccaaaaacaggaactaatgtagaaatcacaggtgaaaaaactgaaccaactatcgtaaacaatgattttaagcatcaaccgattgatattgtagataaaataataaatgatacacctccagaatctgataatgtaactagcataatggaaacgcttgaagaactagccattatcgagccggtatgtaatgaacaagccgttgaagtacctgaagttcaagttatagcagcatgtgatctcaagatacagggtggtgatacactgccagtaggcaatcctgcttctgagataacccataaacacagcctagggttaaaagaacggattattgccatgagtaaaccgtcagtagcactaccaatgaaatcactgactgatataccagtagctactcaattatctgagcagaaatcattgtttgcagacgtgaaacttgatgacaccgactccgtagagattacaactcaaaagggtatgcatagtgatatctatattacagctgatcttcatatcagagaggcttttgaaatatatctattagggctttcaaaaaaacagttaattagcaacataaatcaaaatcacttactggttgatgataaactcgaaataccctcggcatggaaagccagaagccctcaagcatcgcgttctaaagatgatgaagcgctggtgcttttaagatcaaatttctatcttgttttgaaaaaagaattactcattgatgtatttatcatcactggattttctgaaattgaacaaatgttaaatccagtcattcctgacttagcaacttcattaattgaagatgtcatattttctattcacaatgaaaacgacatttcagaaaaccaatttaaaacgattcaatatatagagttgagtcggacagaacttattgaaatatctgctaagttgggggtgtctcaaacgacattcaaacaaatcatggctgttaggtttgaaagctacaacagccattttggacttcaatttatgcgagaaaaacaatga

SEQ ID NO: 289249 - DNA, 675 bp, Morganella morganii
  misc_feature (526)..(541): n is a, c, g, or t
atgagtcaggataaagaagttgtcgattcagtaactacacgaaaaacaagacggaaaaaagtaacttctgtaccgtcgtctgaataccaaatgcatttagataccactattgcgattgatgcctatcatcaacggttctttgtagcaagccaagccgcctatttgttggaacagcgccttgaacgctgtcttatgcatcgagacaaaattatgcgtgatcgagctgctgctatcatgaagtcactcaatcaggcagttgatagtaatttttctgatatagaaaactataagcagacattggcacaggtcatagctgaagtagaggctgaacggggtactaaatatgagttattgagttactctactccccgcgatatgacgattgaaaaccgtacctatctggctacacgaatgtgcagtggtttagaaacactggatctcataatcaagtaccttgatgtttgccgacattactcgttagtaccattggctgaaatactggaaactcaaatcactgccgataagnnnnnnnnnnnnnnnnttcgcggtatatttagtacgattattcgtcatggcgaaacaatgaagcgtttagaaatcgatcattcgataaatgcaaaaaatgctaaaaatgaattaaataataatgacagcactggtgctgaagataaataa

SEQ ID NO: 289250 - DNA, 282 bp, Morganella morganii
atgcttaataaatccagtcatttaattacgtcagttttagcgagtatttttgttttcaatatcattacgttggctgtcaattttcatttgtctaacacgcttagaacatttaatagcgatatttcaaaagtcacattgagctctgtctatcttgaagatgaaagcgaacttgtattgaagttatttgagctcactaaagatgaactcgaagcgactaatcaaatgccacaaaggaaaatgatttctcgtagcgatttaatagaacttggtcagaagaaatga

SEQ ID NO: 289251 - DNA, 750 bp, Morganella morganii
atgaacttcataagtacccttattcttgcacttatcctacgaattctttacctcatatatcgaaaacgtaagcctagtttttatactgttagcttggtaataatatcagttattgtgtggtccgttaaatcctacctattggactattacattatcccaacatcctctatggcaccgacattaaaagccggtgatctcatttttgcaaagccggttgacacgcaaaaagagcaattgatgcgtggagatatcgtgattttccgagctcctgcattcccttcattcatttatgtaaaacgcataatcggattggctggcgatactatcacttatgccgatgataagtcagtccagatcaacggaaggatgatcgggcagctaaaccatcataatgaccatacgagtacctatcaggcgcttcaggaacgtaatgcgcaacaatatgagtacgtcattgataaccgtaaaccattcgttaagccaatttatacacaatgggtaatccctgatggatatgtttttgttcttggcgataacagggatcactcatgggattcacggttttttgaaaatgcagttggaactccaaggcatttgcgagggcttgttaaaaaggaacttttgataagccggtatttagccacggcttttacacttgagtttatgaaaagcgattttgatataggggagaatagcttaaaagtaatttctgaagctcaaacggcagaggggaatgatggggataaatag

SEQ ID NO: 289252 - DNA, 585 bp, Morganella morganii
ttgctgaataagaagttcgataagaccggcgggaagatcacaggacagacggatattgaggcgccgggcggtcgcacccagacactgaaagcaaaagctggcacatcggtataccaggagttgtaccttcaggatatcttcgctgcatggtgggggattaccgctggtaacaagttaagcctggaaaacaggattacaggtaatacgcttactatcggtactgatggtttcaaaattgacggtaaaaatattgcgactacagatcagctttttggtgtcggacaaacctacaaaaatctgacgtccagccgccaaaataaagtctggtataccaacaccgatagtaagccccgcattatccatgtcgaatcaaacagaaccggcacacaataccctttcagtattgatattcagattattgatacgggtggacagaatcgcggggattaccgctggacagcggcggatgaggtggtttccctgacggctacagttccgcccggagcaagatatagcgttaacgggggatgggggcaaccgacagaatgggttgttattaatagctggctggagatgtcactatga

SEQ ID NO: 289253 - DNA, 639 bp, Morganella morganii
atgtcagataaagatacccagtttactcagcatacggttccggacggatactggcgtgacgccagaggctgcctgattccggttgatatgcttaaagacattgaccgcgcccgcgataccgtggtcggcgatattgtcagccttgcagaagcgcaacaggaggcacttaaagcctttaaaaattatgcctttgatgaagtggatgcattccgtgaactgtcatccgaacagtacggtgtggggctgggtggcaaaaaaggcaacattcagctgcacagttttgacggtgaataccgtgttcaggtggcaattcaggatcacaccgcatttgatgaacggctacaggccgcgaaggcgctgattgatgagtgcatccgggactggtcaaccggtgcccgtcctgaaatcatggctatcattgaggatgcctttaaagtcgataccgtgggcaatatccggacaaaggatattctcaaactacgccgtctgaatatcacggatgaaaaatggctgcgggccatgaccgctatcagcgagtctatccagactatcagcagcagccgttatatccgcatctacaaacggagcggcactgatggtaaatatgttcagatttcattagatatcgcaggggtgtga

SEQ ID NO: 289254 - DNA, 543 bp, Morganella morganii
atgttaatagatcttggtattttagaatgcattgataaacaagaaatctttttgtctgaagttaatgaattgaaactttcaaagtatacatttaataatgcgcttgttcttattaatcatggatgggttgttaccaacaataatttatctgcgcctaattggtggcttgaaaataacaaggataataagaatgttcataatagccactacgatgaaaggaaagaaataaccggtaatgatagcagacaattgtatatgtttgttaaatcagaattagagggcatactaaacactattcatgaaaataagcgtatcgaagaattgtcagatgtaacgtatttaggttatacacttgcagatttaacgacctacattggtattacttcagttaaggtagcagggcaggtcacaaagaacaataaaacccacatgagctattttatggataaaccttataatataaagaaaatgttgattaactttggttggaaagtttcagatgattcattagcagctcctgaatggtggtctaatgaagaataa

SEQ ID NO: 289255 - DNA, 351 bp, Morganella morganii
  misc_feature (291)..(306): n is a, c, g, or t
atgcaattaatttatcagattcaacaagatatgtatcttggtgatcgtgatcaaatgaaaattgtgatcatagatgaagcatgggcgttactgacagggaacatcggtgcatttattgagaaaggctaccgccggttccgtaagtattacggcagtgctattacgattacccaatctatcaatgatatgtataaggaccgtgtcggtcttgctatcactgataattccgcatttcttgccatgcttggacaaaccgaatctgcggtgaataaagcacgaagggaagaacgnnnnnnnnnnnnnnnntttgccgctcgacgaagccggttacgaatttttgaaaacagttaa

SEQ ID NO: 289256 - DNA, 426 bp, Morganella morganii
atgacaaactcatcccgcaaccgttttaaattcagtcagcgcagtgaaaataatctcagaggggttaacgctgttctggtgcagattatccgccgtgcgctggagctgtctgagtatgattttgctgttatcgaagggctgagaacgccggagaaacaagcggaatatgtcagtaagggaagttcacagacccgtaacagccgtcacctgaccggacatgccgttgacattctgccgtccgccatgaagcccggtatggactggaacgaaaatgcccatctttttgaaccgattttgcaggccattaaacaggcggcagacgggctgggtgtgatactgcgtttcgggaaaaactggcaaagtgatccttctctcccggtacagacaagattccctgattacccgcatgtggaaatcccgcgatga

SEQ ID NO: 289257 - DNA, 354 bp, Morganella morganii
ttgcaggaagaaaccggcattggtctggcgctggtcggtaacaatcaggtctattcaaagctgaccggcggcaactcccggaatgttgactttgcccgtctgttcagccggatagcaaaaaaggtcgccattctgaaaaccaaaaaagacgatgtgaaagccatttctgcggcgtggggactgggtgacagagagcgagaccttgtgacgcaactggctgaacgcccgggggcattgcggacggtatcccacacactgcgccttgcggcaatgtttgccaccggcgcaaatgaagcactgtgtgaaaagcatatccgcgcagcggtaaaagacctggagggaacagagttatga

SEQ ID NO: 289258 - DNA, 486 bp, Morganella morganii
atggctgtatataacagcggtaagtattacacccccacagcctcgggtaataaggacgtggcggataaatgggaaaaaagtgactcatacactcgtaccattactaaattactcaggagtgttgcattaggtgatgtacccgctggctatgaaattatggggatcaataatgctggcatttctatacctaattgcgcgttcagaacaaatagcccacaagataatatcaaatacaccttcagcgaagggcagtatctgtccggcagtaatttcggcgtaataattggtgtagcgaaaaacgttggtaacacaactgtcactgttgatgagtcactgtgtacgcacccaagattagcggcaagagcactttggagtaataacacgttagaaccacagcaatctactgaggcttattttgtaattcgtaaatctaatacggcagaggaaacacgttctgaaaattctcgccctcgtttagcggagtaa

SEQ ID NO: 289259 - DNA, 192 bp, Morganella morganii; identical to SEQ ID NO: 279001

SEQ ID NO: 289260 - DNA, 300 bp, Morganella morganii
gtggccgttgatgccaaaggtgtccgtccggtgggtctgaaaagcggtgacagcgtggtgtatcaccttgagggtcataatgttctgctgacggaagacggggtaatccgggtgacctgcaaacggctggagttcgttgttgaggaagaaaccgtgtttgattgcccacaaaccacgattaaaggaaaccttgatattctcggggtgagcaccgccgaagaccaccagtccgggggtaagagcggaaaagaccacactcacgatgagcatgacggatacagtacgggcaaaccgaaatga

SEQ ID NO: 289261 - DNA, 300 bp, Morganella morganii
gtgctgcctgacggcggtaatgaccggcgcggatggtggggggattcttatcagaaaagacccatcggcagccggttatggctgctttcccgggaaaagcagatgtccgttgtattacggctggcgaaattctacgcggaagaagcccttgagtggatgacggaagatggtcacatccgcagtgcagtggtttcggccacgtcccctgcggacggttttttattactgaatgttcagctgaccctgcctgacggcagcgtgttaccgctggagttcaaaacctttttaagcgggatttaa

SEQ ID NO: 289262 - DNA, 234 bp, Morganella morganii
atgatcggaatgtttgagttagaccctgttgcgtataacacatgtcttaaaactgactctgtaaagttaactttagataaagacaaggcagaaagccgttctcttggtgtttcaggcacacctacaacggtaatagttgataataaaactggagaaaaacgtgtgatagaaggtgctgtaccaatggatatgtttgtaaacaccatcgaagctatgatgaaaaaatcacaataa

SEQ ID NO: 289263 - DNA, 294 bp, Morganella morganii
gtggtgttcagctttctcgctcattccatggtcagcaactatatgtcccttatcagtaatcaggtgctgagacaacttgatgaaaacaacacgccgtatgcaaaaagaaagcgtgacgattttatttcaaaaatcgatcatagtgatgcctatccgccgaacgtggcgcgtaataatacctttatccacctggaaagtgtcctcggcgagctgtttaaacatcagcacagtaatgcagtcagccagaccgcactgacccggtttacggagaaagcccatgaatttacaaaataa

SEQ ID NO: 289264 - DNA, 453 bp, Morganella morganii
atgaactggaaagaggcggcaattgccgcgatgtttattgttgccgcgtggtgggtatatgacacctaccgggataaccagcagttgaaggtcgataacgcagccctgagtggtcagcttgcagagcagatagcggagaatgaaaaatatcaggaacgcacacagaagcttcatgaactggacaccagacacacacaggaactggtaaatgcaaaaactgaaattgaccggctgcgtattgctgctgaccgtaaccctgagcgggtgtacatcaaagccagttgtcctaaaaccagcagcgttaccgccaccggcatggatgatgcagccaccgcccgacctgatgacgccgctgtcagaaattattggttactcagagagcgaatcgcagagtcaaagcagatgatcctgggattacaggaatatataaatactcagtgcctcgctaaatag

SEQ ID NO: 289265 - DNA, 927 bp, Morganella morganii
atgaacttagtaatttatatcatcatttgcctatgtattggtatttggatatgtgtgcagcgtgataagtttatgttgaactcagacagtttacataaacagtggctatttagattagctattatttttcctttagtttcaagcgtttattttatattatggctaggtgcaccatatccatggagatttgatgcttatggatacagcaccttcttagagataaataaattctcattgggaatattagctttatctccaatattaggcgcttttattgtatccgcacataggtcaattcaaactactaagcagattgaagtaactgagaaaaaaaacaaagttgatatatatttcagcactagaaaatatatcaacgaacaattaaatttatttaaaactattgacaacgaagaaatccgtcaacctaacgctctatataacaaagcattcaacttaacaaacaatcatgaagatacacctaataaagaattctttgattatattgataatagcataaagactttagctaattcatttttatccataagagataatatatttactgatcatatatatatagaagaaaataagttcaggatagatgcttccacaagcagaatgtcatttcaaatgagaaatttgaaagaacacttagaaatagataaccattccgatttttttttagcatcaaagtgtaatcattatcttgaagaaaatgaaatagcaataaaaaatgatggtggcaacttctatgaattcagatatacattgcttatagcaggcgaaattctttctcttttaaactcaatagaggaaataattttaatattatctttagaaaaagatattaatacagtactacctagctttagatacgctttagattcttgcacactagaaagcatgacggtatcacttgctgaataa

SEQ ID NO: 289266 - DNA, 2760 bp, Morganella morganii
gtgttgttaaacaccaccacgggcaaaaaaatgaaactcaataaactttcctttctgatactttccgcaatggggatgtcgtacgcctctgccggttatgctgtaacgcctgagccgattcccgcatttgacttcagcgatgaatcaaaacgtattgatgatattaaaaacggcggcagctatagcaatgcggatgctgatgccgtgagtaaaagtggcttcattctcggagatcagaaatttatttcggatatacacatcggcttctctgccgatcaatttattctcccgataacagaactctataacgacagctatctgctggggacacacctcggccgtatcaatatgcgtctgggggttgatcccaaaagcgcaccaacagatcactccgttgcttataatgttgtaatggaaggactcagttcctcaaaactcagcagcttacagataaatgaaggaacaaaagcatataacaccacggtggggaaattcagtacgatggaagtccgcactgcgtcacgggacgggcagcgggccgaagcttataacacccaggtgaatgaaggcggacgactgactgtcagttacaattcctatgccgaaaacaatctgatagatgccggtgaactgtacatccctgtcagtaacccggatgcagaaacccaaaatacccttattcagaatggcggtacctatacacagaacagcggtaccgccaccaataactatattaccggtgcaggaagctatcacgcggtttccggactggcactgaataactatatctatgacggcggctatcagtcggtttatgtcaatgatcgcaccggtgccaaaaacaccacaatctatgcgggcggcacacagcgggtacgctccgggacggttgaggataccgtggtatatggtcagcagttagtgacaaaccacagcggggactggaaagatggccggtgggttgaagatagtgatcctgatgaagaatggggtaatgatccgacagccattaatacacaggtcatggcaggcggtattcagaatgtcggactgaacggtaaggcctccgataccactatttataaagacggccttcagcttgtcggcaaatatgcggaagcggccactaccctggttgacggcgggatccagcatgttctgacttacggcggcacagaaggtaccaccatccgcaacggcgggcagaccatcctcgattacggtgcttactccttctataacctggatgtggaagacggttctctggtaatggaaggcggcgatcagcatccgtggctcagcaacttcggcaaaggctcgtatgcgcagaatgtgaatctggccggtgataaagcgtatctctatatccgccataacggtgacacaaacgaatccgttgtcactatcgataatctggttaacaacggtgtcaccgtcctcggtgaaccgggcagcagtaataccggacgtaacagtcagctcaacatcaaagaactcaccggtaacggcctgtttgtgatgaataccagtctcgcagacggcagcggggatttcctcagtatctcggataatacagacggtaagtttggtgtccgtgttatggattcaggtaaggcgctggtcagtaataccaccgaaccggatcgctatcatctgatccacgccgccggcagtcagaacgatacttttaccatgaccaacaagagtgtggatctcggggcgtataaatattatctgacacaggataaagattcagcggatgaatggtatctgtcacccaccaaagaaactacgccggtagatccggatcctaaaccagatcctaaaccagatccaaaaccggaactgcctgatctctctgagccaagtaaaaccgcaatgatgattgccaacgccctgccgcaaatctggcggagcgaactgagcacattgcgcgcccgtctcggcgagctgcgcaataatccgcaggtgaacctcggtgtatggtcgaaagtcaccggcggacgccacaatatcagtaataatgaagtcgcctaccgtcatgatatcagcgggattgtcgccggtggtgacaaaatgacagagctggagaacggctatctctggagcggcgttgtcgccggatattctcactcgtccctgaaaatggataaaaacgacggtaccattaacagttacagcctcggcgtttacaccacctggcagcataaatccggtatttatgtggatggcgtggtgaaagccaaccatttccgcagtgattatgacgcacagtttaatgacggcaaaacctccgccaacagtaacaccagcggtatcggcttctctgttgaaaccggtaagtacttcgaaaaagagaattactttatcgagccgtacgccatggtagccgccttccgcggccagggcgcggattaccgctacagtaatgagatgagcatcaaagccgatgctgcccgttcgttcagcggtgagctgggtgccaccttcgggaaaaatttcgtgctggaaaacggcacgcaaatcaaaccgtatatccgcgtggccgtgaaccatgaattcctgaaaaacggcgatgtggagctgaataaacaagggaaacggaccaatgatatgtccggcaccaccgggaaatacggcattggtgtggatgcaaaactgaataataactgggccatctacggcgaattcaactacgccaacggcagtaaacaggaaacgccgtacagtggcttcctgggtgtgaattaccggttctga

SEQ ID NO: 289267 - DNA, 1179 bp, Morganella morganii
  misc_feature (4)..(13): n is a, c, g, or t
atgnnnnnnnnnnttaaacgtaaattaaaaaatatttcctggaatacaggttatgattttaatgatgaatggaagtttaaaacgatactttcttatcaaaatatggatatagatagattgtttatggacggaacgttacaagatgattctcaggatattttgtattcagaagcaagagctaattatgaggggggggatctaagtggaattataggggtatcatttcaaaagatgggttatagacatgataatttatctgtagggaaagtcggaatgggaggaaaaaaatctgataatgatatttataattactctggatattttgatggtgcatacaggataaatgacaattgggagttaggtgcaggggctcgtttttctcacgaaaaagcaaaaactcgaatgattattttagaaaaaggaaaaggtgagtttaattataataataatgcagtttttaatgcctttattccacgagcaagtatcgcctggcttccaaatgagcagaatcgtatatggtttggagttggccgcggttttaaacctggtggttttaacaaagaaggggttgataaactagctctgacttcttataaatcggaaattgccacggaaatggaattaggttggaaatggcacagtgttaatgataaccatatggccgaaattactttatatcaaatagatagtaaagatgttcaaggatatgtaggtgttattggttatcaggcattatctaatatgggagattcaagaagtcgagggatagaatatctttggaaatcaaagcttacccctaatcatagtatttcactgggtggcatgttcaatcaatcagagtttaccagtggagaacataaaaataaaagacctgcttatactcctagttatagttcattaatttcatgggagggcttatatggcaaggagcaaaagtggtcttctcggattgcagtcagatttaatggaccattttactttaatgagcaaaataatttagaacaagggcattatactgttgttgatgcatcaatatcatggcaccctacaaagcaatatgaacttagtatctatgcgaaaaatattggtgatgctttatatcgaacgtatgcatttggtaataaagcacagctaggtaatccgagagagatcggggttcagggaagtattaacttttag

SEQ ID NO: 289268 - DNA, 774 bp, Morganella morganii
  misc_feature (761)..(770): n is a, c, g, or t
atggtaacagtaagctctgtagctgccacagaacagcatgataatacaataactgttactgcaactaagcgcattcaaagtagttttgatgtaattggtaatgtgaatgttcaaactgatgaacagttaaaaaaatctttagttaatcaaactgatgatttgagcgcagtttttcctgagttgttatctgcaaaccgaagttcgcgtatttataacaatatgactcttcggggccaatcttcggccgatttcttttctccaagtttgggactgtttgttgatggtgctccccagctttctcaatcgtatgctcaatctcttcaaggggttgagcaagttgagctacttaaaggcccacaaggagttatttatgggcgtggcacattgggagggattatcagtgttattaccaaaaaacccagtagtcacgctgaagcatggttaggggggcaatattttggtcaaggggaaagaatcaatacaggaggaagcactggctacatggaaaacggctgggcttttcaggggaatgttagtctcgatagaaataatggttctttgaacaatccagcatgggataaaaaaaatgttgatagcagagatataaaagctggatggttgtctgctaattatatttcccctgatacattatttgagtctaatttaaaagtaggtggagaaaattaccattctcatgaggaatattttgttcctttttcacctctttcacgttcaaaaattgatactgaatggttatatgnnnnnnnnnnttaa

SEQ ID NO: 289269 - DNA, 165 bp, Morganella morganii
atgataaccccatggcgaacacctgttcttctgctctctctgctgctttccccgcaattgtatgccgcttccgaacccgccgctgaagcccgcaacgggatggtggtctcttcccagcatctggcgtcacaggccggggctgatattctgaaagccggcgagtaa

SEQ ID NO: 289270 - DNA, 201 bp, Morganella morganii
atggaatggattaaggttagcaaaaggtatcctgagaatggcgctgtggtgttagttgtcgatatcgatggatttatatatttagcaacacatgagtatttttcatttcaaatcatcaccaaagaagatggtgatctcatcgaaacagtagccagattcgtaacccactggatgccactgccacaaccaccggaggagtga

SEQ ID NO: 289271 - DNA, 258 bp, Morganella morganii
atgaatgaaattatcaaatacgcggccaccggcctgatggcaatcggctatgtctggattatcgcaaaatcagccgagtggttcctgggtctgatagcaagaaagacaatccggcgcatgattaaagaccgcaggcagaaagcagtaaacgagctttacgatgcctatgacctcggtaatatcaagcagggcggagatgtcaaaatcgcaatgaagagcgggctggttattctcatataccgccagtcaaaggagtag

SEQ ID NO: 289272 - DNA, 255 bp, Morganella morganii
atggggcaggttgttcagattgaaaacacaaaaactggcgagatgataatcctcattagctttaaagatgtcgattgttttaatgctgatgttgtatctcatgagtcagtacatgccgcatggaaggtgttagaaatagttggcatcaaagtagattacgaaaatcatgaggcattggcgtatctaactggctggattgctaatgagataaataagttttattacaaaattagcgttaacggtgatggcttatga

SEQ ID NO: 289273 - DNA, 504 bp, Morganella morganii
atggcggcaagaacacacgaagttctaaccagagaaagattaatggaagtgcttgattacaaccctgataccggcgttttcatctggaagcagaagttaagtaacagaggcgctgtaggtaaaaaagctggagcaatatcatatggatataatgtgattaacattgatagggttcgttatttcgctcacagactggcttggttatatgtttatggcgtttggccagaaaaagaaatcgaccatatggacagaaacagatttaacaattctatctccaaccttagagatgtaagccggacggttaacgctctgaataatgggctgagaagcgatgcaacgtcaggactgaaaggcgttacctggtgccaagaaagaaaaaaatggcaggcgcaaataaatatttcagggagaaatcttacgctcggtcgttatgacaccattgatgaggctgcgatagcttataaagctgcaaacatggtttctgacttcctgttgaataaatga

SEQ ID NO: 289274 - DNA, 213 bp, Morganella morganii
atgaaaccacaaaaaacacagcagtactctatattttttcgtcgcgcatttaatatcattagaaatgagtggtcagggaaaaacataaataatagcgaatgcaagatggacgagcaagaaagaaaatcaaacgacgaaagtattgaacatatggtgtctttatatctgaagatagaccttgttttattggcattgttgttcatgataacatga

SEQ ID NO: 289275 - DNA, 1176 bp, Morganella morganii
atgaataattatccgtcatatcttttaaacataaacttatatgctttattatctgtgtactcagtttttgccatgttaacatctggactatactctggtgattatcttggtatgcaggtgttctcaaatggcgatagccagtacataatgctactgtctctaatcctgatactgtcgcaagtttcaattctatactcccttatgctcgtgagggctggagttgatccgcatgatgattccagtataaaatatatatcattaattgtatttacagggataacaatatcatatattggggcgatatacttcaattacggagttgctggaaaattctctgaaaataaatttggatttatatttaaagtaataccaattgatatacttatatacttttacatatataaaaaattcaaaaaaatcaatgaattaccgtgggtaatgataatctactacatatcacttaaggtcatgaccgggtggaccggaatgattttttatctggctgtatttatagccacattaaagccatatatgattttcaacaaaaagtctttattttttatttttgtaatggcgcttctaatacctgttgtatacgctggaaagttatattttagagggtattatcctgcattaaaatcatatatggatatgagtataattgatatgtacttctatgcagtatcaacatacatcgataggcttgcatacttccagaataacttggttctattatctaaaatagacatgataaaagaactatcattaaaccacatagatgaattctggtatgtgaaggaattctttggaggatttctaccgaaaggattactatcattaaaagtatataacgttgaaaatttcatgcctatgatagtggggaaggaattagattatggcgttagttatatttccggcatgctatctaaagcaatatttgtttttaattacggtatatttaatgttgctgtattcatttcttttatcttagcggttatgttttctataaacagagttcttaagtatatttttggtaaagacagtaaattattttttatttttttcatgtgcccttttttagttactggtcacataggcaatctatcaactattttttatggaacatttttttatttagtggcgcaaaaaatacacatgtttttgtctcgacaatga

SEQ ID NO: 289276 - DNA, 669 bp, Morganella morganii
atggcactgactgcaaaaggttttttgtttgatctggacggcacactggccgattccctgcatgtggtggagcgtgcctggctggcgtttgcccgccgtatcggtgcggatgaggatgaagtaaaacattttattcacggcaaaccggcggttgagtccatccgccattttctgccggatgcggatgagaacgaaatcgccgcgcagctggcgtgggtgacagagcaggagatcagggagagtgaccaggtcactgatctgcccggtgcgcaggcactgctggcgcgtctggtttctcttgaaattccgtgggcgatagtcacctccggttctgtggcgattgcccgtccgcgtcacagtgcggcaaatctgccggagccggatgcctgggtgacggcggataatatcacccgcggcaaaccggatccgcagccctatctgctgggcgcggaaaagctggggctggcgccgcgcgactgttttgtgtttgaggatgccaccgccggtctgctctccgggctggatgccggttgtcaggtggttgccgtgcatgttccggccggaacaccacgtacggatgaactggctatgcgggtggattcactgacagaaattgaggttgagaaagcggcggacggtacggtaacactgacccgccgtcccggctga

SEQ ID NO: 289277 - DNA, 264 bp, Morganella morganii
atgatcgtaatggttatggccttagaaaaggctccgtttcttaagagtggttatggaaaaaatgaccacattgtcgtgtctgaaaaaaatgaatctggtgataattaccaggtgaaattattagtaaaagaagtaaaccgaatcactgaagtaggaaaagagcacatgctttttgctacggacagcgcccctgactctgatgatgataaaggatgggaaaaggtatggcaggatgcagagtcaataggatatcaattttattaa

SEQ ID NO: 289278 - DNA, 969 bp, Morganella morganii
atggatttattgacatttgatgaagcactagccgaagctggcgatgatatctctgttttgttggggaacgggttctctcaagcttatgatcaccatatttttaattatagaaacttactggataacgcaaatttcggcgttagacatgaaagtataaaagatatttttagaaaacttgaaacttatgactttgaaaaagttatgcaatctcttgagtttaccgaaatagtaaattcaatttatagagcgccacaacagcttattgattatattgctgacgatatggaaaatttaaaaaatgcactcgttaatgcaattgccaactctcatccgcaaagatccagttatgtaagcacacaacaatatcgccgttcatgtgaatttatttctaatttttctaatgtatttactcttaattatgaccttttgttatattggacaataaacaaactatctgatacgggtgattacgatgatggttttagaagaggtggatgttggaacacaccggaaagacaaaatatttttttcctacatggagctctacatctattagaaggaaatgatgggatgacaactaaactacgttttaatgatcgagatgaccaaagtataattgacgctgttgcagataatttgcacaccaatacttttcctctatttgtttctgagccaacatcgataaaaaaactacaaaaaataagaaagtcaccatatttaaatcgttgttttgaagaattaaaatacatatctggatccttatttatacatggacactctatggatgaaaatgataggcatatcttcagtaaaataaatgaaagcaatattagtcgtgtttttattagtatgttcggaaacattaatagcgagccgaaccgtagtttagaggcgaattctatgagatttttccgtcgggacatgaacattaatttttatgatgcatcaagtacttcaatttggaattaa

SEQ ID NO: 289279 - DNA, 249 bp, Morganella morganii
atgtttgagtctaaagatggtgagcgagattttgtaggtatcatgaaaaaaaaccaatggccagacaaagtgaaaaaccttgagttgctcgggaagcatgtccgcgttcaagcatttcgtgagcaagttagcaatgaactgaccggcaaagatggggatccgatacaatcaacggggtttgacctactaggtttgaccacagagcagcttttacaattgcgcgaaaaagcaaggaaatatccgtcttaa

SEQ ID NO: 289280 - DNA, 291 bp, Morganella morganii
atggatatcaatgtcgatctgtttgatgaggaagttcgcagagagatagcacggcgcagcctgcatgaattgattcagtacattaacccggaatatatcaccagctacttttcagaaatggtttgtgcatctctggataaccttttgattgagatgatgaccggtaagcacccggatatcgcctcactgattcaggcgaaactgaatgttaaaagtgagccgcagtttgccgaagcatatctaacctttaatgcactcgacagtgcgtttgaactcagaagtggcgtgtag

SEQ ID NO: 289281 - DNA, 2187 bp, Morganella morganii
atggctattctctccatccacggcgttcgcagttatcagggtgaaaagccagtggaattcgacttgagtaagtatgtcactcttatctatggacaaaatggctcaggaaaatcaaccatttccggttacttttataagcatggtcgacccgattacagtcagtgcaacctgcaacctccgttgaatatgaactacctagtatttaatcaggagtatgtagatgatattttcagtcaaccttctcaaccaggcgttttcactttaaatagtgaaaatgcagaaattaaaactgaaatagatactctggaagcacaatgcaaacgcctccgtactgatagcgatgctttggatgtacaaaaacgtgatgttgagagtatgtcagaaagagttaaaagtgaatcagcacaacaaatttatagttccaccgcagaaatcagaaaaacagatttatgggatttaatggctggaaccaaacaaaccgataagctttatcagacaatcttagaacacactgaaattgaagatacatcaacacaggaattggctgaagaattgcacaaacttgaggcaagtagaggtaacccttatgctttactcgaagccttgccagcattccctttgaatgaaaccgacattacgttattgatacaacctcttattccaacaggtgatagccgccttgctgctgcaattaatcaattaggcaacattgactgggtgaggaatgggcagtcgtggctgattgatgatatttgcccattttgtcaaacaccaatagatacccagcaacttcaacaggaaattaccgccctttttgatacctcatgggaagcagcgatggggcagttgcgggaactccaggatagatatcaatcctggtgcgataaacccaaagatatgcgccagttaataaaagcgtgtccgttagttgatcaggaacatcctgtttatctctatttacttgaactggaacaggcatatcagagaaacaaactgtgtattgatgataaattaacatcaccttcgatgtcgatctctcttgaagatctttctgttcttgaaaatgctatttcagcgcagcttactgatattaatgcggtaattggtgaacataaccgaaaggctgacaattatcatgttgagcggctaagactgaaacagaagttactcggtcatatacgaaaactggcaacagatacaataactagtcatgataaacaattagcggagtttgctgaggagtcagaaaaattaacggaatatcagaaaaaaatctcgaccgagcttaatgctctgaccgtaattattaacgataaatccagccttatcgtcaatactcatgaaacgattgatcggattaattgcagtttgaatagtctcgggataactgggtttcatattgctccctatgaaggtcgggatgattatcgtctgattcgggaaggtgagaacagcgaagcgccagtttttagtagcctgagtgagggggaaaaaacgctaattgcttttctctattttctagagacttgcacagggagaaaaagtcgcgatgacaatgaccagcgaacacgtttaatagtcattgacgaccctatatccagcctatcacaaaattatgttttcgaaattgcttcactgattcagtaccatattatacgagccagaattgctgaaaaaattattattctgacgcacagcctatttttctttcaagagttgctactttctgcggaaagaaagaaaagacctgcgggttcttgccctccagaatggacactttatcggatatccaaatccctacatagttctgcttctcctgtttctgaaaaagaattactgaacgactatcaggcactatggtatgtcttgcgccatacccaaaaaaatgacactgccagtgttgtgatcccaaatactatgcggcaaatccttgaatattattttggtttttcggggaaaagtgaaacccttcaccgagcgcttgaaacactggccaacggacctgaaggtgaacctgggtttcgcatatttgcccgttatctgaacagacattctcaccaagacactcgcaatatctctcttcatgaaggggcatcggttgaacgttatcttacttggtttaagaaagtatttgaggcggcgaaagatgaagaacattacacatcaatgatgacagaggatacataa

SEQ ID NO: 289282 - DNA, 165 bp, Morganella morganii
atgtttattcataaaattatcacaccgatgtttatccggcgctttgaatgcgtcggttctgaatgcctgtcgcactgctgccaggactggtttatcagtatcgataagaaaacctataaaaaatatcacagtgcggacagcattgaaattaaacagatttcttag

SEQ ID NO: 289283 - DNA, 993 bp, Morganella morganii
atgggactttatcgtatctttgacaaaaatcttacagcattagatagaacaacatatgctaaggagggattacaggagcgatatgatttacaagaggctatcaaaaaaaatatagaaattattgctccagattgcctggttatttctgaggagttctccgattgggaagatagtaggcgaagaattgatttattagctatagataagcaggcaaaccttgttgttattgaattgaagcgtgatgaaagcggtgctcatatggaattgcaggcattaagatatgcagcgatgatttcaacgatgagttttagtaaagcatgcgaatattatgagaaatatttagaagataatgatatagatgcaaaagaaaaaattcttgactttgtcgaacttgaagaaactgatctggttaatttcggcaaggatatccgtattattttagcttccgctgattttgacaaggaattgactacaactgcaatatggcttaacgacaaaggtgttgatatcaaatgtattaggctcacaccgtataattttaatggtgaaatacttatcaatgctgagcaaattatacctgtaccagagctagaggaataccaagttaggtttagagaaaaacgtacagagcagataattagtagccagcaattagaaagagattattctgtttatcggtataatggggttatatacaataaacgaaaacttgcacttgttctttttactgattggataaacaagcataaacccgctaatttttatgaacttaaagaaaaattaagtactattttgaggagcagaactattatattagctgaaaagattacggaagaaaggaaacatcgttttcactttcaggataattgtcttatccagctttcttccggtgaacgtgttgcgatctctaatcagtggggaatagggaatattaataaattactcgattttgttcggcgtgatggtttttttgttgaaaaaatagatagataa

SEQ ID NO: 289284 - DNA, 951 bp, Morganella morganii
atgttgagcgcattcagagttgataataagcgtttgcaacgtcttgatttagaagagggcgacgccctgacagatgcgctgtgggtggatatttcggaaccggaagaacatgaacggcagctgattcagactcagttcaaccaggaactggcaaccagcccggaactggatgatatcgaagcctccgcgcgtttctttgaggacgatgacgggcttcacgtccactcctttttctattacgaagatgcggacgaccacgccggaaactccactgtcgcatttaccctgcgtgacgggcgtttatacacgctgcgtgagcgggaactgcctgcattccgtctgtaccgtatgcgcgcgcgcaaacaaaccatgcaggacggcaacggttacgaaatcctgctggatctgtttgaaaccaaaatcgagcagctggcggatgaaatcgaaaacatctacagcaatctggaaacactcagccgggcgattatgaaaggcaaacaggatgatgagttcgataaagccctgtctgccctggctgaacaggaagatatcggctggaaagtccgtctgtgtctgatggatacccagcgtgcgctgaacttcctggtccgccgtacccgtctgccggcgaatcagctggagcaggcacgcgaaatcctgcgcgatatcgaatccctgctgccgcataatgaatccctgttccagaaagtgaacttcctgatgcaggcggcgatgggctttatcaatatcgaacagagccgcattatcaaaatcttctccgttgtttccgtggtattcctgccgccgacactggtggcatcgagttacgggatgaacttcaaatttatgccggagctggactggtcgctggggtatcctgccgcgatcggggtgatggttgccgccgcactcgcgccgtatctttattttaaacgcaagaactggctgtaa

SEQ ID NO: 289285 - DNA, 1455 bp, Morganella morganii
atgtcaaaaaataaaaaacaaaaaattaagagtcagaaaagcagaacaaaattaaatcagcacacaaaaaaaggaaaaacattatctcccgcatttagccaattaaaaaatacacttggtgatagaatgctattctccaactgggctacagatagattgccagaattattatgggttgctattatcagagtaatatattcacagagtgaagccattgacaattacaacagaatattatcttttataaaaataaaaaatagtgaatccctatctgatatttcattgtctgggctatcacatctttctccattattgaaggaagaattcatatcttgcattcttgaagataaaaaaactgcagatgcgctaactgttttgggattattcaaaagtcttccagccagagaaatatgggttaaactactacctaatactaaaccagatttaactattctaatgaaagctatcggattctgtttatttcaccaaacacaagagtcaacagactgtcgttggtttagcctaatggcttattattattctggtaaaataataatacctgacgcactgacatatgacttaataaactatccacatacaggcgaacaaaagttagtgagaccattcatcagagctatggagatggttaccccactgaatgatatcactctcgataataatactagtattaaaatctcatggagtgaggacttttggaatgaaaattggtctaaaactccttgcttaacgcataataatgataattcacaatatactacggaattaattagcataaaaaaagaactatattatcattggaaaataactcatattacaacccgtatagacccaaaacatgatgcaatatttggatttactctttatacactgagaatagtaaatgaaatatctgcctcaacgatagctcatggaatagttggacgactaggaatgagaagcattcttgagtgctatattacactccactatttgatcaaaaaaaacgatccagacctttggtctacatggagacgatatggttctggacaagcaaaacttaatgcattgcgctttgatgaagaaatatctcaacctgaatatataaactcagaatcccttgaaatgatatgcggtgaggattcctgggaggaatatctagacatagaactaggaaattggaccaaactagacctacgtaaaataagtattcattccggggttaaggatttatatgataaatattactcttggacatcatcctattctcatggccactggggagcaattcgagaatcatcgtttcaaacttgtagtaatccacttcatcgactacataggattccttatgaaaacactctggaatgtgtcataaatgatgcaaaatttatattcaatttaattctagatgaccttgacgaaatttatccaagtttcaaatatagattatctatataa

SEQ ID NO: 289286 - DNA, 483 bp, Morganella morganii
atggaattaagtgaaaaggtaataataacagttatatcctcatctatatctttattcatcgctataactggctttgtaataagccttataaagatgaaaaaagaaagaaataaaacaatcttagaaataaaaaataactacactacggttttatatgaaaaaaggatagagttatatccttatgctttcgaattatcatctaaaataaaaaaactaaaacccccattgtatataataccttatgaacaacaattacgaatccttagagaccttaattattgggtggagaaaaaatctggaatatttttgtctcaagaagtaatatcatcttattacatattaaggaaagcattagaaaaaaaaccagggaatggagatagttataccgaaacacaaataaataacctatggatagctagaaataacttcagatctgcattacgacaagatattagtaatttacacaaaaaaaataatttatag

SEQ ID NO: 289287 - DNA, 1068 bp, Morganella morganii
atgaccaattatatctgtgcatttaatcccatagatgcggcacttaaagacggtgctgtgactgttgcaatcacgatttccgccaattccgagaagatggccagagcaatggccgccgtgatgctggaggaaacttaccctgaaaatacagggaagtttgatgtggcggcaccaataatctgcgaagctcaggcaggcaaaccggcaccggccggtgatagctttgatgaacattttgccaaagagtacgagttcaacggtactgactggcagaaacgtgaagaagaaatggtcgtgtttgcaaaaacggcaccagtcgttcgtattgcggcgatcatgctgtatgaaaaaacacaatttacccgcaatgagtaccgcaaagcggtcgattttgttcacgaaagtgatgaatacccgcagatccggaatattgcaaaaggtatcgcggccacacgcacggtttccctgctgaatgaacaggatttagaagcgctggtaaatactgttctggaaaaagctcaggatggtattaccgaagcagaagcacagaagctggcagaagaatacctgttccctgcagaaccggccaccgggcaactccctgtcccggagcaaaagcaacgtaattttgaacataattacgcgacactggatcaggaaatagccctcgcccttcttcccggtaattttgacccatgggaaattcagccaagcaaacttaccgctgcgaaaaagctgatcagtgatgaagatgaaagctggcggcgctggtctactgagttccgtattatcccgactgcactgcagatcccgcgtgaaacagtctttgctgtcgtacgtgaaggaaaagaattacctgacctgataagcgatgcggcagcccgtaaacagtttgtagctgaccgtatcggcatgacgccggcagaaagcagtcatgaccaggaaacaggccggtccggtccggatattacggaagataaaccacccgtagcagcaaagcaggaaagaccaggcgcacacgtactaaaaaagcagataaaccggcagagaaaccagctccggaagtag

SEQ ID NO: 289288 - DNA, 552 bp, Morganella morganii
atgaattacatgcaagcaaaagaaaaaatcataaaattgagagtgttaggatggtttttgttaattcctagtgctgcaactgtaatcgtttcactgcttaaatctctatatattttcggtaaaacaaataattcccttattggtttaggtcgagttattagtaacttaatagccgatgtatataatactgattatttccctaaatttatgtggaacatatcgccaacagttaaagttgaagatctcttaagtcttgataatatgaatttttttattatctacgcagtgtctattgtgagtgtttcacttttgaaaaatgcatctactttaagttacaagttaaatagaatagatgaagatataaacatagagcaaataaaacaatcacggctcggaaattatgactttaaagctgaagatacgagaaatatagccaagctacctgaggctggtcaatcattttctaacagcctattaaagtcaatactgatttacttagtttttcctttagccgtcggtattatcttaatatatctgaacaaaatattatga

SEQ ID NO: 289289 - DNA, 456 bp, Morganella morganii
atgaactggaaagaggcggtaattgccgcgatgtttattgttgctgcctggtgggtatatgacacctactgggataaccagcagctgaaggtcgataacgcaaccctgagaggtcagcttgcagagcagatagcggagaatgaaaaatatcaagaacgcacacagaagcttcatgaactggacaccaggcacacacaggaactggcaaatgcaaaaactgaaattgaccggctgcgtattgctgctgatcgtaaccctgagcgggtgttcatcaaagccagttgttctaaaaccggcagcgataccgccaccggcatggatgatgcagcccccgcccgacctgatgacaccactatcagaaattattggttactcagagagcggattgcagaatcagagcagatgattaaggggttgcaggattacattaaaaatgaatgttttatagcgtattaa

SEQ ID NO: 289290 - DNA, 864 bp, Morganella morganii
atggaaaaagttaaaaataaatgtaataagtgtaagctggaaactaatcatgatattttatttgacaaagtatctagtggtacccctgatgaatatagatttatagaaaattatcgggtggtaaaatgttgtggatgtgataatgtatctttccgttatgaatttcatgatgaagaggcggcatatccagttggagacgatgagtgggaggttcctgctgatatagatatatatccaccacttgccattaataaaataaatacatcgtctcttcctaatacagtcagaaacatttttaatgaaacatgtgcggcaatttccaataaatctctaacattgtctggtgtaggtctccgtgcaactatagaagcagtttgtatagagcaagcaattccggggaaagaattaaaaacaaaaattaataatttatcaagtaaaggattaatatcaaaaaaagattgtagtttattacactcgatccgatttattggcaatgatgctgctcatgaaattactcaaccatcaattcaatcgttaaatgaagctttggcgataatagagcacatgcttcagtcaatttatattttcgataagagctccaattcattgccaaaggttatagaaaattacagtggctttgttgaattgttaaataaatgcttgggttcttttgaggttggcgttgaagttcctattcaggcctttttgaaaaaagaaatgagaagggtttcagaaaatattaaagagtttgagcctgagcttattaaagaaattaatacaggaaagtatactagattaaaattaggtaaatatgaaaaatatcaaggttcaactcaagatgttcagcatttcattgttatctaa

SEQ ID NO: 289291 - DNA, 1044 bp, Morganella morganii
gtgtcagagggatatatccagagctttaaacttaaagttcatgaaagtaacggaatagaatatgaaaatttattttcgaaagttatgtcatattatcgtcccggattcgataaagtaaaacctcatggtaacataggtgacagaggtaatgatggatgggtatatggtgcaggaatttactatcaggtatacgctccagaggacctgcctagtaatgaaaagaaatcgctagataaaatgaaggctgatttcgaaaaacttttctcgtattggaatactatttccacagtcagggagttttattatgttgtcaatgataaatattacggcatcccaccatatctaaacaatgccatcgccgaaattaaaaataaacataacttaaatgaagcgagggtgattggtgctacggcccttgagagtttttttgcaacgctgagtaatgaacaaaaaaattatatatgtgggcaatcgactcgtaaccagttcaaaacagagcgctaccttgtagaatgcctcacaagtaagatgtatcttcatgcctgggataacattagcgataaccttatcgctaatggaatgcaatctgaagttgttgatggattttatgaggcctgccagaccgttctgacaacccaaatgccaggccgacttcccaaccttgacttatcaatgattgagcttgctaaccatgcgtattacctttgcgaacatataactaatatgaactttgcaagtaacataaatggtttttggaagagggacatgagttgggaaaaaatcacaatggaccaagataaatatcatgagaaatatgacacctatgagcactggagaagagaactatttcggctacactataatttagctcatgcgttaaatcttttttctttagaggtcagaaagtcacttgatcctgatttcttttttggaactcaattcggaataaacgatagcattggcacctacaataaactggaacctatgtatcttattccaagatcgtattgctcaaattatctagagttatttggtgataattga

SEQ ID NO: 289292 - DNA, 309 bp, Morganella morganii
atgaacaaatatcgtgacaaatcagactttgagattaataaggctgtggcaatttcgcgtggctataaagttatgtcgtgcgaagaatcagtcatggcatacattgatagcgggtataagccattcgacccatgcaacaacccagcggacgcaatgccgattgttattgagaataggatatcaatgattaaaagctcagggggatggatgtgctgtcatggtgcagccggtgtaattgagcgtgaaagcttatatcgcgccgctatggaagtattcctgatgatgaaggatgcggagaatgaaaaatag

SEQ ID NO: 289293 - DNA, 627 bp, Morganella morganii
atgagcgaaatatcatcactggcaacagataaagatattgtagatatggccacagcacttataggcgcattttgtttggctattggtggagccattggtttttttactaaatatttttatgaaaataaaaaaatcaatgaaagtaaaaaagccctgcgccaacaaatgataacaaacaatatagctccaatgaggcaggcatggattaatgatgttagggagcgagcatcaaacttcattcatcaatcgaaagtattacgaatgatactattctcagccatttctgatgcgttaaatctcacccaagaacaaaaaaaagaaagagaaaataatgccagtataatctattaccaactaaatgaatccgctcaatatctagacctaatattaccatactccattgatggtgacagaagcgagactgaagccgataatttaagaaaaaacatcatggatattattgatatttttgattctatatttagagaaattgactctagaaatacaggcggcatagatgatcatttaaataaaatactttcaacaactgaactcgctagtaaaaatactaaatctgttcttctaaaggaatggagagagacaaaatcactgaaagaaattgaatga

SEQ ID NO: 289294 - DNA, 750 bp, Morganella morganii
atgacaccttcttcacttccaacgaagctatatcgtgcgctgggagaggttaagcaatatgttgaaaaaatgcctgatggcgtaaccctcagcgacatacaaaataaagttcattactaccatgagttaaataaaaaagaacgggaacagctgattaaccatatcagtgaccgctcaatgcttttagtcctgaaagccaaaaaaggaaaatcaccacggttaacgacatttcttcgccataaaaaatacggctatccaagtgagatgcctggttatgaatacccgattggcggcggggttaaattaaagaaatgcgggaaatgccacgaagaaaaaactctggatgagtttcacataaataacagcaggaaagatggcaggcaggcatattgcaaggaatgcgacagcctgaacagccaaacacgagactggacggcgactgacaactacggaaagaaaaagcccgagttacctgaaaccgaaaaaacaaatggtgaaattatgagcgcattaaaaagcccggaacagatgaggaaagaggcggaagaacttattcgcgccgctgaacaggctgaaaaaaatcaggcaaccgagcaatggaagcttgagtttaaagcgaaatttgaacagcaaaaactggaagtcatgcaggcggtgggaatggccaaccgcaaattcgatgaaatgatggacgctatggcgcagctggctaaagccggtgaaaaactcaaagaacttaaagttgaataa

SEQ ID NO: 289295 - DNA, 1242 bp, Morganella morganii
atgaaattacctaataaaaaactgaatgataataagagcattaatctatacgcatatataagttcaatatcagatttcgatattaaagaacaagactatgagccatataacttaagcatcacattaaccgtcattaataaagaaacatttgaaaatcaatattacaacaatgagagtggatgtgacacaataattttatctatcggtgaaaactcatattttaaccatgagattatcaattttattaattttattaactacccttatgaaaacaactggcttgaaataaaaggtaatatttgcaaaaaatctgaatcaaacttatatttttaccaggctttttctgaattaggtttagaccaaacatatataaatattaatgaaataaatttaatcaaaaatgaaattccaagtccgccaccacaaatcacatctctaagtgatttagaatcattaattgaaaatgaagaaggaaatgaagcagaattcttttcatttcatgtaggacagggtatgtgctcacttatgacaataggcagagtaggaatcatttttgatatgggcgcaggaaaaccgatacaaagacaaacatatagtagtaaaaaaaatgagctatccgaaaattatataaataaattagaatatatatatatattaatctcacatcttgatgaagaccactggaggttaatggagtgggaaatagctaggaacccccgcatattggataagataaagcaagtaataattccaaattctggcactgagctattatttaaaaactcaaaaataattaataaagtaggaacgttagattttgacctttccatttattccactgaatttcttttaaatatatatagaagcaaaccaaaatgtataaataatagcaataataattgcttagtctgtgatattgaattaaatgaaaatactatcttgattcctggtgattatgtatatagcaacatgcttaaggataaaaacacaaaaatccaagcaatccctaataacaactattctttaattatagttcctcatcatggagatgagaaaagttcaaagaatgtaccaaattcagttgcagagccattcacctccagggcttacttttctgcaggcacacatgctggatataaacacccacgacaatcatccatagatgctcacaataaaaatcattttcaagagatagttgacaaccaatgtgacatcattaaagtcgcagtatcgataaaataa

SEQ ID NO: 289296 - DNA, 279 bp, Morganella morganii
atggattattttttagcaccgcccgatagtggaagcagagcggttttacacaaaaaaacatgcaataagctacaacaggtgaaaggggccgagtacatcggatacttcctcggggagtgcagagctattcggcatgcggaaattattgcaaaagatactgtcaccctatgtcccacatgcttgagtcataatgacaataaagcagatgataacttgatggttaacctttacagaacttctggtcaagttacaacccaacaaccaaaagatatttggtag

SEQ ID NO: 289297 - DNA, 324 bp, Morganella morganii
atggaattccaaaaagaaggtatcgaagaagagttaaaaaaaataactatagataatatagtggaaatcattggcgcggcctgcggaaatgtattcaaatgtactgtatgcgggggaactagtttttcctttattgttgattcagaagataaaacgttacttactcctttttacacgccgtcattggtcgatggcaatactgatgagcattgcgtgcactataaaatgcattgcaacacatgtgccaatgaaataaattttaacgcctttgctgtaatcgaaagactcaaggaattgaaaaatgagttacagcaagaagattga

SEQ ID NO: 289298 - DNA, 381 bp, Morganella morganii
atggaaactaacatcattgagcagcggttttttaaagacgctgaaaatacggttttttgtctggatatcatgccgatgaatcaggattcatggcaatcagaaattcaggacggctggcaggaaatcagcaaaaaagaagccgataaaatcagaaatccaccgctgacgaaagagcaactgattgaacgggcggaggctgaaaagcaacttttgattgcggaagtcaccgcagaaacagaaatgctccgggcgaaactggcacttaagcgcatcaagccagacgaagaagccaggttaatcgcctggctggattatctggatgagctggaggcagtggacgtatccaccgcaccggatatcacctggccggttaagccttaa

SEQ ID NO: 289299 - DNA, 192 bp, Morganella morganii; identical to SEQ ID NO: 278789

SEQ ID NO: 289300 - DNA, 234 bp, Morganella morganii
gtgacagataaaacaggtggggctgcgtttccggcaagtggtcacccggggaagcagcacttatcgcaggaaggaatgacgcttcgtgactactttgcagcaaaggccatgcaggggttcttttcatctggaacaaaagcaaacatgggaacaagatacaaagaagatatggaatatctggccgttgctttctactcgatggctgacgcaatgctaaaggtgcggggtgaataa

SEQ ID NO: 289301 - DNA, 240 bp, Morganella morganii
atggacaggctaccagttgctgatttcgaggatatgcaaccagaccaaacatatctctggtatcgaaatgacaatgacattgattttgcatggctaagtgccgatgggttgtatctggtaactaccgaagcatttggtaagccagattattgggagctatcgattggattggttggtgttctatatggaccggtaaatgctgaaacgaccgttaacccagagcattctagcgacaattag

SEQ ID NO: 289302 - DNA, 405 bp, Morganella morganii
atgatcgaccgtaagaatctgaagtttatggtatcggaactaaaacgcgggcaggctatttggtttgctccggatcaggactttggaactaaaggtactatcttcgccccttttttttcggtagctaatgcttctacatcaaaaggagtggcagctatagccaaattatcgaagtcgccgatacttactgcaacgatgataagaaataatgaaagtggtaagaggccttatgaattaataattggtaaagaaattgctgattttccgtgtggagatgacctggcagatgctgagaaactaaatcagattattgaggcagaaatcatgcatgctccggaccaatacttgtgggcacacagaaggtttaagaccagacctccgggagaaaattctctgtacaaataa

SEQ ID NO: 289303 - DNA, 186 bp, Morganella morganii
atggaatggattaaatgctcggaaagaatgccagaagcagacgtttctgttttggctctactgaacgggcaaccactggttctgcattggttttcactcacaggaatgtgggatgacggtgattttttgtcgttcatagagctggatgaagtcacccactggatgccattactagaaaaaccataa

SEQ ID NO: 289304 - DNA, 237 bp, Morganella morganii
atgatttccggcgagttatatcttgcacatagtgatttgacaattaatgaaaacatagctgtgacaaaaatgtttcctttgatggtgatgagagagattttaccggaaagtgatataatggctttttacttctacagtgatttacaagaaaataaactccgctttgtttgtccttaccctaatgttacaacgtacactctcctcgaacaaaacttaattatagataacttagagtga

SEQ ID NO: 289305 - DNA, 342 bp, Morganella morganii
atgtgcaaaagggaaggtcaaaaaaatagaaaattaagtgatttgattgatacattattgtatgcgcacaatatccatctcagagattgggaaaaaagaagtaaagcagttgatttagtaaggtatttgcgcaattcggtggtacactgcaatggactggtaaatgatggtatttataaagaggattgcataaaattttggggtgaagatttgtttaaatgtagtcctcattacccaacactgacgtttacccagtcactcaatctactacgagaatttaaaagcatcgctgatgaatattcagaagtagtttttaaattattgcagcggacaatttgttga

SEQ ID NO: 289306 - DNA, 210 bp, Morganella morganii
atgaaaattgagcgttgtagtaaggctggttgtcagcggccatttgaagtatccgaatttggtgggcaaatgcctgggacaaaagaatctgaggatattacttgcccatattgtcgacataccatcacaaggcgtagtaacggcatgtttcagacacatgcgctttcgtctgagcaagaggctaagtacaatttggagaacccgctttaa

SEQ ID NO: 289307 - DNA, 489 bp, Morganella morganii
atgcataaaattgatagaagaattctaaatttttttggttcaagtgatatgtttgatcgtatggtaactcgtcagctcagccatattaaaggaaattgggagctcacttggaataatcaagaagataaattcgatctagaagaaaatagttatgctgaaattatcaataacttacttgctgaattaagcatgttggaacctcctggttgttatcatgataatgaagaccaactcgcagaatattgtaaagaatctttaaactggccaatctacaaggttggtaaattttggcgtggaatggaatatgtatctatactagaacagggcggtttcagtgatgaatgtcaaacgaatctttgcctatcaattacagggagattaacagctgcaataaatcgaaatcaacttcattttgacgatatggaaagatcacaccaaaatatattggctaatgtaatagccattattctttatcatcgaagcgaataa

SEQ ID NO: 289308 - DNA, 645 bp, Morganella morganii
atgataaaaattgcaggaaaacgaactatatcagaatgggagagtctatcagaaaaattgcatgatggcttttcagtagaacattgggaagaagctcttaagttttttgatgacagaattgaagaacgctatctcaaacctgtccgctatattaggggggatggaaatcataataatttacagggttctggctttgctatctgtacgttactttgcgctctgattgaaaatctggaaactttctataaggggattaatttcaacaactcagcctctgggcaatatgagtatagtaatcgttgcagtaaaaaactattcacggatttcttaaaaacaaagatgccattcaagactttttttgaaggctctcccgctctagctgatagtttttatactggtgtacgctgttcattattacatgatgcatctacgtgtgatggatgggtaataaacattgaagaacatgatattatcataatcaaaggcaacaaaaaaatactacatcgatctttatttatgtccggaattgagaaatatattaaaaattataagcggctattgatgcattctgagaacagtgaccttcgtgaagcatttatcagaaaatttaatgggatttgtaaagcagcaaaaacaggaatgtaa

SEQ ID NO: 289309 - DNA, 447 bp, Morganella morganii
  misc_feature (435)..(444): n is a, c, g, or t
atgccaatgatttttattggtgcttataaaatgatgggacaagcccgtctaagaatagccgatcatttacgaaaaatcccgattggctggttttcttctcaacgcagtggtgatcttgcatcacggcttactgctgatttagagatcattgaaaatatctggtcacatttcttaggaatgtttatcagtactttagcgatgcctgtttttctctcactattcttagtatgggtagattggcaactcactttaattatattattttctattccaatcgctctgttcgcattatccataagccataaaataatgttaaaagctgcacaacaggcagctgatgctaatgccaatgtacaatccgaattactcgattatatccaaggaattatggttattcgtagttttgggcgacttggtcctgcatggaaaaaactnnnnnnnnnntag

SEQ ID NO: 289310 - DNA, 396 bp, Morganella morganii
atggcaattaacgtgattactgtcagcagcaatatcggaaaggattgtgtgcaacgatggactccggcagggaaagccgttgcatcgttcagtctgccggttaggcagggatatggcgagcacgaaaagacatcgtgggttatctgcaaaatgttcggcgcgaaagctgagaaattgccagagcacctgaaaaaaggaacgaaggtgacggttattggcgagtttgtcatggaggaatggactgatcagaatggcagtaaacggtctgcaccagtgattatcgtgaatcaactggatttcggcggcaatcaggcaggaggccagaagccgcagacgcagcaagctccagcacggaatgagccaccgatggattttgactatgatgttccgttttag

SEQ ID NO: 289311 - DNA, 243 bp, Morganella morganii
atgccaactatacattgtatgtcaaataatggtgcgccagaagtggatatccgtacaggcattgctgtgagtgcgttcctgtttcgctttatcgatcgtacctcgcatgaaattaaacaggtcacagcaacagatgaggaacaggcacgagacgttttaggcggaactcttgtattcgcagcgcgttttcgccagaacgataatttccgagttatggggggatatcatggcacaggaaattaa

SEQ ID NO: 289312 - DNA, 642 bp, Morganella morganii; identical to SEQ ID NO: 31871

SEQ ID NO: 289313 - DNA, 123 bp, Morganella morganii; identical to SEQ ID NO: 8077

SEQ ID NO: 289314 - DNA, 1263 bp, Morganella morganii; identical to SEQ ID NO: 67462

SEQ ID NO: 289315 - DNA, 1782 bp, Morganella morganii
atgtcagtagaatcaaccattgatttttatttagccgaagaaaatcctggttatgcattgcaaataactggagaatggggagctggaaaaacacacacgataaaaacattcttagaagacaacatgtattatctcagtttgtttgatatgcaaagtgcagatgaaatttactcttcaattttttatttaatgcagaaaaaaagaagtaaaaccagaaacgctttgaatagtttaaaaaacattgaagtatcattattgggaataaaaataccagcaggggaattattctcttctttatctaacgtcattgcaagaacagaagtaaataatgacaaaccaattgtttttgatgatatagaaagaagtggcgttcctcaagaagttatttttggcatcatcagcaactatattgaaaatcatggctgccgtgtaatcatcttaatgaatgacaatgaaaaaaaagatgaaaaagaatacaaaaatctctctgaaaaaaccattggaagaattataaaagttatcccaaagtactcagaaagctatgatcacttcatctctcattcaaaaaataaagaactactatctttactaaaatctcagattatatctatttttgaaaaatcaaattgcaattcattgcgaatattaaagcgcattatttttgaaatagacacaatatgtagttgtattgactttgaaaaaaacaatgatatagctaaaaaaatacatgaggggttatatgttttcacaatattaagcattgctgcaaagcaagggtatataaatcaagaaaacattaaaaaaagaagatcagccttttactacaggttaaaagaatcaaataataacaataaagatggaaatataagcgatgaacttgaaatatatgaaagggtatataaggcacactctgatgacatagacatttcaacaacaatattaagtgacgttgtttttaatgatataatattcaatggcgaatatgaccgatcgttgattattgaatcaatagattcttaccagcgaattaataaaaacaacaaagaaataccgtggaaaataatctataacttcatgaagtatagtgatagcgatatcaaagatgctgtgaatgaaaccaaagatataattaaaaatcgaacttactacccacttgctcacatactacaatttatatcagccataatatttatatcggactatattaattatgattttggtggaaatgacatggagaattatttttacaactatatagatgacctttataaagaagaactattagaaaccattgatttttccaacccagctaatttttataactttgattcctgcgaccattatggttatttttcaagagacaacgaacaatttaaaaaaatcaaagcatatttaatagaaaagtcggataagttaaggagtaaaaaaatagacacagaaagcaaaaaaatattaattttaatgaaaaacgacacagacatgctttcaaaaatattaatcgatgaatctagtgagtttatacatgaaccactacttagcaacatagattacaatgaattcgctgattcattcattgatttagattttttacgatttaacagagttaatgaaatcattacaacaaggctttatagaaatcatgcttatcctaaattaaaaagtgaacatgactggcttatggaaataataaaaatattaaaaataaaaatacttacgttttctggaataaaaaaattcagaatacaatgtgctatagatagatttcagactgtatttaactaa

SEQ ID NO: 289316 - DNA, 141 bp, Morganella morganii
atggaagattcaggaaatagttattgttattttcgtactgagtataccctcagtacctccgtaatttcaatgcgattaaaaaatcaaaaaatcattgtaaaacagggatgtaatgcaattgaagaagaatgtttattctaa

SEQ ID NO: 289317 - DNA, 507 bp, Morganella morganii
atgctgctgcgcatgatccacatacagatacgcgctggcatcaaacacggtgtaatggccgtaggtatcaccgccggatttcagttcacccacatagcgggcagccagttccgcaccccactgttttgccggggcgtcataaccgatgcggccgcgggtaaagagttccgggatatcgttgagtgtcgcgccgtttttggtatccagccagttacgggtgatatccccggagacataccaggactcatcaaagttcagtttggtcgccagtaccacacctttggtacggatttcaccatcaccgttaacccatttatcgtatttaccgactttcactgtcgtgatcagatcattgatttcacgggcgtaggccgttgcaccgaactgccatgcaccgccgttttcccacttcgtcaggtagtcaaaaccggcttcgatgtttttactggtttccgctttcaggttggcatcaccgatggtttgcttactttcatctttgacatataa

SEQ ID NO: 289318 - DNA, 348 bp, Morganella morganii
atgatggtcacgtttgttcattgcctgacggtgatggttcggggacaccatatccagatcggcctgtgtgtactggtagaatccctgcaattgtgcggtatccgcaatagtctgggtaacctggacaccaacagatgtcacgtcatagccacgctttttctgaccgatcgtgccgttgtaatcactgtcgcgatatggctgataaccgtcagatttactgcgggttacccacgccatcagaccggttttgccgatatcgttatcaaacgctttctcgacgtaaccctctccgtaacggcctttatccgtatccgcgccgacactgaattcaccggacagtacctctga

SEQ ID NO: 289319 - DNA, 378 bp, Morganella morganii
atgcgcctgaatcagatgctgaaagtgaagctgcgcgaagaagggatccgctacgaaggtgaactgcgcccggaagatccgatggctcagcaccgcatgctgccggtcaaacgccttgtccgccgtctggaactgacggaatacatgcacaaagcgccgatgactgatgagatctacgcgccgcagcaggtgattatcccgttacgtcagcatatcggtgccccggcggtaccggttgtcagtgaaggggataacgtcacggcgggcatgctgatcgccgctgtcccggaaaaagcactgggtgcgccggttcacgccagtatcagcggtgtggttcgccatattgacagctcggctgtcacgatagagaaggaataa

SEQ ID NO: 289320 - DNA, 204 bp, Morganella morganii
atggctacgactgttactctgagtttgacttctgccattgcagttgctctgacgaacagtggttataccattagcatggtgttctcttgcctcactttctatacaatccctgcttgtctgggtatcactatttccggaggaataattatcactattcgtgtgccattcgctatattgtcctgttggggcgatgatccccgctaa

SEQ ID NO: 289321 - DNA, 441 bp, Morganella morganii
atgtctcaattatttcgtttggcatcgccagaagattacgaatacatcgaagaattaaatttatgggaattgtcatttgataagcgaccggttcaaggggttcgttgtgaagatccggtgatcggggcagaaaaatataatcaagggcgtgaaaaatttaaggcgttagcgtcacggcataaaaaacactggaaaccgaacggattgaccttttcggagttgatccgctgggcaatagaatgcggaactccagaacaatgtcagcttgttttagcgttataccattgcacaaacgatgatgattatcaggcgatgggaattcagttaagccgaagtattgataatgcaaatgtcagtccgatcatctttttcacaggtaaaaatcaacggttattaggtgatatttcgatgctaaaacagctcgaagaaaaggtgcgctga

SEQ ID NO: 289322 - DNA, 159 bp, Morganella morganii
atgccacggaatcctttaacgctgatcaccattgctatcatcctgctgactactgttctgctgtcggtttgttatctgtattcactcccgaatcactgtaaaccgctgccggacaacccgctggccggtgtgatccattataagtgtgaagcgctatga

SEQ ID NO: 289323 - DNA, 216 bp, Morganella morganii
atggaagttatctatatcaatacagcaaaaaatagctatgccatcatcaatcaaatgaacgaaatgatcccgatgaaaataatgaaaatggcctcaggagcaaactatgaagctatgaataaaaattatacatacaaactttatacaaaaggtaataaagcagatttagttgaaggaaatgataaagctgtattaatcgattgtaatgcaggttga

SEQ ID NO: 289324 - DNA, 1245 bp, Morganella morganii
atgtcgaaatcggcttccccccatcctcatacagctgcacctacatggagtgggtttatttatcaagggcatttagcgctttatcattccatagaatgtgtgctcaataaaatgtcgtttgagttgcaaatcgacagcattgatgattttgcgataattgaaaatggaattgcagtttctacgcatcaggtaaaagcgctagcagatgataaaagagctgcctataaggaggctctcgaaaaagctgcatctacatatatgttgtgtgataagtctaccaaaagatattttcatacatctgcgcgccttgatgatgcttctgattttgttggcagcaatgggaatgtcgttaaattttatacttacgatggactgccttactgctatctccaagatgttgaagaaaaaacgaaatcaaaaattgagaagtacttggtttccgaagagttaccttgtagtgattttttagtgaatttgaagttcgaggctttgcagagtcatattgccgctcaagtaatatatatacacgcgtgcaatcaggatgggttaatgagcgccgcaaaagccgcgtttactcaaactttaaaaagtgagaagattgtagagttattaagcctcaccgctacccatgaagacgacattgtatacaaaatattccaagctcggatggccgtttgtaaatcattgtatgggtataccaatacaatggaaaaaacagcagatagaactgttattcaaaaagttgcaaatgtttacgatcagattaaagagttgggtgatactccatttatatggttgtggaagtcgttatgttttggatcttccacaatggtcgtgagtgagaacagtgtttatgattatgtggatgtgatctacgatatagataaagcaccactgagtgagcaaaagcctccttactataggtgctctgacggagatttttatttgccaacagcaatttcggcagacaatgctcgacgggagcataggtttgctgaagatctaatggagcagctgaaaagcgatccagaactgatagatatcttagttgaatatcaatggctaatcgcagctagagcaaatattttttcgccctctgagcgattttgtgcagctaccggagcttcgcgggatgctgtagaagatgagtttttattgatgggtaaggatcgtaacaaaataactaaagcctttgatgcaaaaataatttcaaaggaagaggcgagggtgaagttgaatgattaa

SEQ ID NO: 289325 - DNA, 726 bp, Morganella morganii
atgattaaagatattgttctacaggctgccttgaaacatgagtttactttgtttaataccggcgactattctaaagcagatgacgtcaccatagagtattcggcaggagaaactttagctggccttgaaggtgttgattataagtctttgacttattttagtcaggatagtggagataggaagcgattcctcgctgtggttgagtgtgaaaatataccatcaccgcaggtgctgaataaattagtgttactgtatgctcctgaagcattcaaatctgatcctgccttcgataaaaataccgacctgattattttgcataaattaagacgtcgagctgattttaatggaattgagagtaaggtgtttggtattgaagaaaatccatattatagcgaagaagagcttaggttgttagaagggcacaacttcgaaagcgtttcagcgatggttgtcgatgataggatgttttcagaatatcgagaacaaccgctatcgcctacattatatagtgtcgcggcgagaatttttataaagcttccatttgtaaaggttcctgttaaggaaagctcactgaagccgcttgatatttatgtagaggaagcactcgccgagaaaaaattgaccggtcttcatctcaaaatctttaatgcttctgcatctgggattgaagcagataaactaatcgagactctgattcatgaagaaatggaaaatatccagccttaa

SEQ ID NO: 289326 - DNA, 2328 bp, Morganella morganii
atgaagaaatggaaaatatccagccttaagattgaaaatttcaagccatttgaaaatacatctattgattttcgagctgccaccatgattaccttggatggccccaatggttttggaaaaaccagcatatttgatgcgttggagcttttgtttactggtgttatacaaagaattatcaatacaaatgatgcaacagttgcaaaacgttcgcgcaaaaaacaatttgaagaaaacatatactggaatagaaataaagaaggcgacatcgctattagagctgagcttataaatcaagattcaggagagtcaattttcctagctcgtgttgctaccatagcggacctatcgaacccggataataatgcacctgataacttctctatttttaagctttacgaaataagcagtattgactccaataagtttggagagagtcttgattctaaagcactagagagtattctaggagagaacttcttaaaaaatttctctttattgaactatcttgagcaagggcagaatagatacctgtactcgacggatgccacagaaagaaaaaaaggcattgagcatcttattaataccgataaattgacgaaacagatatcatattgctccgcgttagaaagtattattacggaatcttatactgggaaagtgcatactgacctccaagctgagttgaatgaaaaaattaaacagcttagtggtcagtttcaagatgccgagaatgccgttgacttcaagcggttaagtaccgcgctgccgtcacctggttgggatgttgaacagcctctatcggctgtaaatgatacagatattgaaactctgatacgtgaattacggaatatatttagaatatatcagaactttgatgaggttctgacgagaaaggctaatagtaatattgatgagtttttaaaaagagaggtcgatataaagttggctcttcagttgggttctgaagtagctggatatgaaggtctgaaagtaaaagagtcaacgctagttgggctggatcatgatcttttgatattcagaaagtcagcttcagagataaatgaagtagacctaaacagtcttaagaacgctgctgatttggttggtgtaaatagtctcattgaggcacgggatctaattaaatctgatagtgcagctaagaacgcaaagcttgtaaatttactaaatgctcatgcagagttgctgcagcaacaccaagaatgtaaagatttgaaaatttccggttgtccattctgtgggttctcatgggcgacttacgctgcgttagaggaagccgctgtaaatagtgcggaaagaattagatctgaaatagatgcttctgcccagaagttggaggagacagtaaggtcaatacaggacttactaaatttacagataacagcattcacacagcagcgtgacctagtcgcaaaagatttcgatagtgtgctttttaaggctctcacagcagcagaagctaagttctcaatcataagtgaagtggctttgcagttggtaaattatggcgtatcaaaagatcttagttttacggctgatgatgcagctctgctgttacggtttaatgaagcaaaagggattattgctacagctaaaaaaccagaaaaggatgtgctccctttagactggtcatctagcttagagatagctttcttgaacgcatcagatataacctcacttagtgtttcggattttgaaaataaagaatcctatctcagagccgctcattctaaattcaaaagcgaagagtacaagtccaaagtagcggagcttgaaaagctcagttctaggatcgaagctggcaaaaaaataaaagcaaaaattattaagcttaggaagcaattggacgacactgcgaagcagtatgcgaaaaagactattggtgatatagagctgttattccatatatatagtggaagactcatacagaattatcagcgtggattaggtttgtttatagtgagtggtaaaggagatatactcaaattcaatactgcgctgaagtctgatcatgatgcaatcctgtctatgagtagtggacaaatcgcatcattaggtttggcatttttcctaacattgaatagggtatatgcgcttaatccatttatactgattgatgatccagtacagtcaatggatgagattaacattgcttcattgagtgatttgttacgggtagagctttcagatcgtcagattttgttgtcaaaccatgagatggaagtgtcaacatatatgcggtataaattcaagcgcgcaggattgtctcaagcatctgtttctatgttgccaagaaacataatagaataa

SEQ ID NO: 289327 - DNA, 1557 bp, Morganella morganii
atgtcatcgctggccttcgggctgatttatctgctgctggcggtggtcagtctgcgccgcttccgtgctgacgggcagcgcctgtcgctcggtttcctgctgctcagtatcggctttatctcgctggcagtgccgctggctctttcgccgcagtggacatccgtggcctggacgattgaagggctggcgatactgtggttcgcctgtctgcaaaaacagcggattgtcggctggagtgccaccgggctggtgctgctcgggtttgcgtctctgctctacagcatggactttatttactggtcagaacaaagcgtctggatgtatatcttccagtggggcgggttgctggttgccgggacgcttcatcaccattttcgcctgatgaatcgcagcaaactgatttccggactgctgattatcccggccatgatcacctggctctcgtggctgtggatgctgccgtggttatcaccggcgggtgaattactgtccggtgaggaatatgtgctgaccgggcttgtgatctcggtctggagctggttcttcctggcgcgcaaagtgcagtggactcagctgtattactgcatcagtgcgctgtggatagtgagcctgctgatactgtgtgactatatccttaccggaacacatgcggccggttcgctgtacggcggctttatctggttgctggttatcggcagtatgatcacctttatccggctgctgccggaacaggcaccgcgcattatcagcaatctgatgcacggcgcgtcactctggaccgtcatcggcctggtcgccgccgaagtgatgtgggcggaaatgcagttgccgtggggcatggaagagtggggttactttattgccatgctgtcggcgtgcggcgtgattttcgtgctttacgccatgcagcgcctgcaccggccgccgatggacaatcatgccgcgctgtactggcagagtgcctatccgctggctgtgttgctgggactggcactgtttaccggaaatatgcaggatggtcagctgtcgctctggcagtatgtgccgctgctgaacccgctggatgaagccgggctgttcgggcttgctgcactgtggtgtgtgcgtgatgcgctgatacggaccacaccggcagtgcatttccgggcagatgtggtgcgcggcctgggtattgccatcgctgtgcttggaatctggtgggcgaacggtattctgatccgcgcactggcctttgcggacggtaccacatggacaaccaccgggctgctgcagtcccgtcttattcagaccacgctggcgattgtctgggcactgaccgccgtgatcctgatgaccaccgcaacccgccggcataaacgccatctgtggctggccggggcggctgtctttgccgtggtgattattaaactctttgtggttgatatgaaccagagcagcgggcttgccagggccggtgcatttatcggggtggctctgctgatactggttgtgggatatttctcgccgttaccgccgaaaacaggcactgacatacagaataataaggaagataactga

SEQ ID NO: 289328 - DNA, 915 bp, Morganella morganii
atgaacttagtaatttatatcatcatttgcctatgtattggtatttggatatgtgtgcagcgtgataagtttatgttgaactcagacagtttacataaacagtggctatttagattagctattatttttcctttagtttcaagcgtttattttatattatggctaggtgcaccatatccatggagatttgatgcttatggatacagcaccttcttagagataaataaattctcattgggaatattagctttatctccaatattaggcgcttttattgtatccgcacataggtcaattcaaactactaagcagattgaagtaactgagagaaaaaataaagttgatatatatttctctgaaaggaaatttataatagaacaattaggaaaaataaaatcaacaaattatggagaatgcatcaatgagaacaacacatatgaaaaatttataaattttaatgattatgatagtgagttaataaaagaatcatttgatctcattgattcccgtgtaaaagaaatatacgaatcatataattacgcatgcaaatatatagatgaaaaccctgataacaactccacactagaacatttaatctcaaagtcaaatttaagtaacatagaagttctaattgaaagtgtaatactttactgcgagatcaaaatagatagaaacaagtttagaataaataaaataatcaatgatttttttgaaaaaaacgatataaatataaataattatgagataaaccttaataacttactacttgaagtttcttttgagatagctaaactatattattttcttcatgggttatttgcaataattttgctaaataaagatattccaaaggttctcccacatctcccatgcttagagaacattaaaccaattcgttcccataatggcacttaa

SEQ ID NO: 289329 - DNA, 2838 bp, Morganella morganii
gtgttattaaacaccaccacgggcaaaaaaatgaaactcaataaactttcctttctgatactttccgcaatggggatgacgtacgcctctgccggttatgctgtaacacctgagccggttcccgcatttgacttcagcgatgaatcaaaacgtattgatgatattaaaaacggcggcagctataccaatgcggatgctgatgccgtcagtaaaagtggcttcattctcggagatcagaaatttatttcggatatacacatcggattctctgccgatcaatttactctcccgataacagaactctataacgacagctatctgctggggacacatctcggccgtatcaatatgcgtctgggggttgatcccaaaagtgcgccaacagatcactccgttgcttataatgttgtgatggaaggactcagttcctcaaaactcagcagcttacagataaatgaaggaacaaaagcatataacaccacggtgggaaaattcagtacgatggaagtccgcactgcgtcacgggacgggcagcgggccgaagcttataacacccgggtgaatgaaggcggacgactgactgtcagttacaattcctatgccgaaaacaaccttattgacggcggtgagctgaccgttccgatctccgctcctgatgccaccgtaaaaacgaatattattcaaaacggcggcaccttcctgctttatgccggttcagccattgatacctatattacaggaaaaggcagttatcagtacattaccggcggtgtatctgagaataactatctttatgacggtgcctatcagcgaatctttaccaccgatcagacaagtgctctgaatacacatatttatcagggagccacacagcggatacaatccggcagcgccgaaaataccctggtacagggaacacaaatcatctctaaccacgatggtgactggaaaaacggggaatgggttccatccgctgacccggatgatacatggggggatgatccggaagcgaaaaaatcacaaatagtggcaggcggtatccaggatgtcgggctgaatggtaaagcctccgatactactatttataaaaacggtacccagaatatcgggccacatggtaaagcctccgataccactatttataaagacggccttcagcttgtcggcaaatatgcggaagcggccaccaccctggttgacggcgggatccagcatgttctggcttacggcggtacagaaggtaccaccatccgcaacggcggacaaaccatcctcgattacggtgcttactccttctataacctgaatgtggaagacggctctctggtgatggaaggcggggatcagcatccgtggctcagcaacttcggcaaaggctcgtatgcgcagaatgtgaatctggccggtgataaagcgtatctctatatccgccataacggtgacacaagcgaatccgttgtcactatcgataaactggtcaacaacggtgtcaccgtcttcggcgaaccgggcagcagtaataccggacgcaacagtcagctcaacatcaaagaactcaccggtaacggcctgtttgtgatgaataccagcctcgcggacggcagcggggatttcctcagtatctcggataatacagacggtaagtttggtgtccgtgttatggattctggtaaagcgctggtcagtaataccaccgaaccggatcgctatcatctgatccacgccgccggcagtcagaacgatacttttaccatgaccaacaagagtgtggatctcggggcgtataaatattatctgactcaggataaggattcagcggatgaatggtatctgtcccccaccaaggagactgcaccggttgatccggatccgaaaccagatccgaaacctgacccgaaaccagatactgaccaggaagaagaattgcctgatctctctgagccaagtaaaaccgcaatgatgattgccaacgccctgccgcaaatctggcggagcgaactgagcacattgcgcgcccgtctcggcgagctgcgcaataatccgcaggtgaacctcggtgtatggtcgaaagtcaccggcggacgccacaatatcagtaataatgaagtcgcctaccgtcatgatatcagcgggattgtcgccggtggtgacaaaatgacagagctggagaacggctatctctggagcggcgttgtcgccggatattctcactcgtccctgaaaatggataaaaacgacggtaccattaacagttacagcctcggcgtttacaccacctggcagcataaatccggtatttatgtggatggcgtggtgaaagccaaccatttccgcagtgattatgacgcacagtttaatgacggcaaaacctccgccaacagtaacaccagcggtatcggcttctctgttgaaaccggtaagtacttcgaaaaagagaattactttatcgagccgtacgccatggtagccgccttccgcggccagggcgcggattaccgctacagtaatgagatgagcatcaaagccgatgctgcccgttcgttcagcggtgagctgggtgccaccttcgggaaaaatttcgtgctggaaaacggcacgcaaatcaaaccgtatatccgcgtggccgtgaaccatgaattcctgaaaaacggcgatgtggaactgaataaacaagggaaacggaccaatgatatgtccggcaccaccgggaaatacggcattggtgtggatgcaaaactgaataataactgggccatctacggcgaattcaactacgccaacggcagtaaacaggaaacgccgtacagcggcttcctgggtgtgaattaccggttctga

SEQ ID NO: 289330 - DNA, 189 bp, Morganella morganii
atggataatttactgcaacttaccccgagcaagtgggtgacagagcctgttcttgttgccatcaccggaatgaaaccaggcactatcaaaagagcaagagaaacatcatgggctgtaggccgcgaatatttgcatgtttctccagaaggtaagccaaaaagcaactctgaatgcatgtacaatcactag

SEQ ID NO: 289331 - DNA, 1302 bp, Morganella morganii
atgagcaaatacccgccgggagtcgaattacacaacggctccctaaggataaacttcgtgcataaaggcaggcgaatcagaaagtggctctccctgccagacacagcaaaaaacaggaggatcgccggagaataccgggcatccattgtgtacaaaataaagatggggacgtttaattacgatgaggagttcccggacaataagccatctggtacctgtgattccagaataacttttattgagctggcagatctgtacatggatctgaagaaaatagaaatcgctgagagcacattaaagcgctacgaatcaatgatacggtcactgatggcgtttattgaccacagaaaactaatttcatcgtactcacaaagtgatttactaaaaatacgtaataacctgctgacctcacatcagctgccaaataaatacagaccggtaaacgagataggaaggagtgttgcgacagtaaacaactacatgcgtatgcttttatccctgtttcgatttgcgtacagcaataaatacatctcagatgatctgacaacaaatttctcatatctgaaaaaggaaaggccgcagcctgacccgctatcagaagatgagtttttaagactgattagttgctgccaaaacgaccaggcaagaaacatgctcatcctgtcagtgtataccgggttgcgaccgggagaactgatcgggctggcgtgggaagatattgacatggtcaaaaaaatactaatggtcagacgtaatatatgtggcccatcaaagttctcttaccctaaaacagaagcaggaaccgacagagttattcatcttgtcgacgctgcattcgattgcctgaaaaaccaatcggcgcacacaaagctcacgcaacagattgatgtcactgtcagcaccagagagttcaagaagttcagaacagaccagtgcacttttgtgtttcaaccatccctggttggtgttaatggttgcgatggtaaatattattctcccggcgggttctcacaaatatggaaatcgctaatccgcaggtctggggtaagacaccggaagtcatatcaaaccagacacacatacgcgtgctggatgctgagtgccggagcaaatccagcatttatagcgacacaaatgggacatgcttcatcaaagatggttcacgatgtttatggtgcctggatgcctgagaacgaccaagaccaaatttcactcctgaacaaaaaatttagtaattctgtcccctatgtgtccccaagtaacagtaaaaaccattcaatccgtttaatttcaaatggttaa

SEQ ID NO: 289332 - DNA, 366 bp, Morganella morganii
atgggtgggatgaagggtgatgaaaatagcaattcacatctggctatttataatgggagtaatatcaatctcattaaggttaaggatagtcgtaatggcacatcatggcaattgcttggtaagatatctgactcctttggtactgacaaactaaatattgagattgtcatgaaaaggaaaaataatgtaacaaacctaattatatctgttaatggctcatcaatgtatatgaccagtgaaaataataattttgatattcctgttggtgggtacatcggcgggtcagtgtcacttcctgaattaacaactacatcgggtgacattgtggtgactgacttgcaggtattaaattacaaatgtgattaa

SEQ ID NO: 289333 - DNA, 636 bp, Morganella morganii
atgaccgccattgtttcccctcatgtttcctgtaatgacgggattattacggatttatccggttatggctgcattcccggaaaccttggtttaccggaaaagtatcagccgaaggggacttatgccaacggagacatattttattaccaaggtaatgagaggggtattgccggaagtaacggggaaagcttcgttacggggaacgcattaggccataccggcgtttataaagatggctgggtatggatgtttaatgcttccggggtaatgatttatggtgatgttcctgttgcgagaatttctgatttaaatacaaagctgtttggcgtcggacagtcagtgcagaacgtgacatcacagcgtagtgttggcacaacatacaaaaataacaccgggaaagcgatttgcgtctctgccggtggcacggcaaaggcaaccaccgagcctgtgttcctgtctctggaagttgatggttatctcatggcaacaagtaagacagcaacaggcggcggggctaatggtatgtcgcatgtctttgtttgtggcactgtgctaccgggttcctcatatatcgttaaagacggcactgcgggtaatgacaaagttgatttaaaattctggacagaggtgcgctga

SEQ ID NO: 289334 - DNA, 2328 bp, Morganella morganii
atgtctgactttaaaagtattttaaatataaatgagagtgttgatttagaatgcaaacaagcgcaaggcaaagatggtaacggtgagttacctcatgatttttggccaacatattcagccatggcaaatgcctacggtggaaaagtactccttggagtgaaagaaaaaaatgaaaagttcatagttgttggaataaataatgttgaaaagataaaaaaagatttatttaacacattaaataacaaatcaaaagttagccataacattttgaatgactcatgtgtttacgttaaagaaattgatgataaaaatattataattattgaaatacctcaagcaacaattaaacaaaggcctatatatataaatggtaacccactgacaggaacatatattcgtcaacatgaaggagaccgaaaatgcagcgatgacgatataaaaaatatgttagcagagcaaggatccgatacattagatggaaagatacatcatggttttaatatagatgatttagataaaaaaactttacaagcatatagaatatcattctctagaataaaacctcatcatccatggctagaatatgatgacctagatttgatgaaagcgttaaatgggtggaaaaaagatagaaaaactggagaagaaggtttaacaactgctggactattaatgtttggtagttggtcatcaatacaagaagctatccctaattacttcatcgaatatcaagaacaagatgattctactaatagatggatagatcgtattgttcctgatggaacatggtcaggtaatatttttgatttttatagaaaagtatatttaaagctcacagaagatttaaaagttccattctctcttgataaagatgggtaccgaactgaggatagtccaatacatgaagcattacgagaagcgctagtaaatacattagttcactctaattataatgatcaaaccccaataaaaattattaaaaagcatggtttattttattttagaaatcctggaacaataagaatccctctagaaacagctaaagttggtggtttaagtgattgccgtaacaaatatttgcatcaaatgtttctaatggcgggtttaggtgaaagagccggttccggattacctaaaatttatagtggctggaaatcacaacattggtcagaaccacaacttaaagaaaatagaaatgaaaacattaccactctagaactacttacggagaatatgataccacaagatatatttgatgagataaaatcactttgtggcgataaattcaagaaattaaatgagatagatgtatttatcttatcggaagctataaaaacaaaaataataagtcatgatttaattaaaaaaaataccattgctgatagtagaaaaataactttatccttagctaaattagttaagcatggttttttaaaatcagatgggattcaaaaatacaaacgatactacctatcaacatatacacctgtaacacctgataataaaaaaggaatcgaacgattaaaaacatttgtaaacattccaaaatcagtaataacagataaagaaatggcattggaaatcactaatgagtcagatgacaaaacattcaatgatggtgagccaatcccgatagaaatactctgtgatatattaattaacgattcattccttgaaaagttcatttcattagtaaatgaaacactaaccacacacttaaataaattagaagaaaccaaaaccaagcttattgcagagaaaagttgtagcttagatgataatacagataatgatatagatgttaaaattaatgatattgaatcacaaatagaagaaataaaatctgacacaatcgtttcagaatttactaaattcattactaatgataatggtgaaataaaaacatttttcgaagttattacaaataagaaattccaatacgacataccagacccaacaaaaaaaataaaaacatatagagaagccaaagagttagacaaagaattaagatgggctgagcttatggaaatatctaaaccaattagggaaggaagtaaaagaaaagtaacaaaaaatgaaattactagaatgatactaattatttcagcccgaagttttttaacagtacgaaatttctcagaattacttggaagaaatccaaaatcattacgacgagattaccttgttccattagttaaagatgaggtgttaattttagcttaccctacaacgccaactcatcaacatcaaggatatagattaaataataagatattgattcagctaccattaatcatgaaaccagatgttaaagatgataacaaataa

SEQ ID NO: 289335 - DNA, 273 bp, Morganella morganii
atggaaaatacgtatatagataatgtgaaacgcagtcagctagatgagaaaatctcaaaaattgcaaaaaagattgcaaaaaacgagctgggtggtggcccaatggttgttgcaattgagaatgaagatggctctgtatacagagtgataacaacatatggaatgtcctcttaccttgatattgttgacaggcttgccgatcttgggctgacagacttacttgcagaagacctgtcaccaggcaaatacgacagcctgtttgtattccgttaa

SEQ ID NO: 289336 - DNA, 156 bp, Morganella morganii
atgaatcgtgagacttatataaaaaaatatatggcgaagtacgaagtcattatttcgcgagaagcgctgaaattactggttaaggaaaacatgcttaattatgccgataaatatttatcaaaaaatgagcaacataacgttgctcatggatattaa

SEQ ID NO: 289337 - DNA, 1494 bp, Morganella morganii
atgattggggtaatattagctgcaggtgtaggttccagactcagaccaatgacaaataataaacccaaatgtttggtaacaactgcaggaaaaccaattctccaataccaacttgatgcatataaaaatgcaggcataacggacattattattattgtaggctatgaaggtgatgcaattcgtaattattgtaaatatatcaaagatataaacattcacattattgaaaatagcgaatacgaagatagtaataatatgtattccttatatttagcaaaagatttcataaaaggaaaaccattcattcttaataatgcagaccttgccattgaaagtaatttaatactagatatggtttcatcatcagagaaagatattgttgctgttgatttttctgcatataatgaagaatcgatgaaagtcacttgtaacaacgatggttttatcattaatatatccaaacaaataaacaaagaaaacacacttggatgctcaattgatttttacaagttttcagatatatcttctgacatcttctttgaagaactcgaacgaattatagttaaagaaaacaacaagaaagactggactgagattgctatgcaacgcttattccagtcacaaaaattaaaatttaaaccattcgacatacaaaaaatggcatgggttgagattgataactattcagatttagcagaatcagataaaatcttttctcaattaaaaaagaagataactgattataaatgctattgttttgatttagatggaacagtttatgtcggagaggaagttataccacaggttatcaattcaattaagtatctaaaagaaaataataaaatagtaaagtttatttccaataactcatctaaaagtaataacgaatatttattaaaattaaaaactattggtattgactgtgctattgatgatattaaactatcaacagatagtgtcattagttatttaaaagataaaaaagtaagcaaagtatacgttctaggaacaaaaagtcttcaaaaacaaataattgatgctggatttgaattttgctcccactctccagaatttattattgttggttatgataatgaattaacttattcaaaacttaaaaacacatgtcgattaatcaataataatatagattatatcgcaacacattgcgatattttttgcccaagtgaagatggcccaattccggatataggaactataatatcaacccttgaaaaaacaacaaatgtaagtccatataagatatttggaaaaccaaactctgatttaattgaacttatatcaaaagaaaataagttaaaaaattcagatatattgatgataggagatcgtttgtatacagatatattgatggcgtctaatgcaaatgttgattctgttctggtattaagtggagatactaaacgagatgaaattgaaaatagtgaaataaaacctacatatatcttgaataaatttgatttaacggagtaa

SEQ ID NO: 289338 - DNA, 150 bp, Morganella morganii
atgtcaccaccatgctcttttatttgtgagcaccatgcagtattaattgtggagatgttaattgtttctgcatttgctgtgagagtatatgttttagacaaagaggtgtttattgatgatattgtttcgtattttttctcaaattcataa

SEQ ID NO: 289339 - DNA, 1179 bp, Morganella morganii
atgagtgagctgaattatctggaaaagctactgaatggcgttgaggttgagtggaagactattggagatgtcacgagtgtcttgcggggaaaaaggttaactaaaaatttgctttcagcagaagaggaattcccggtatttcatggcggcttagaaccgttaggatattataacaaatcgaatcgtccggctaataccgttatgattatcaatgttggcgcttcagcaggcactgttggttatagcaccgttgacttctggtcttctgatggatgcttttgcttggaacaaaatgagttgttagataatagatttttatatttcgcactgattggttatcaaagtttgctgaaatcaaaggtgagaattgcaggcattccaacgcttgatgcaatcgtagttaataaactgcttatccccatcccctgccccggcaacccagaaatgtctctggcaattcagtctgaaatcgtccggattttggatacattcaccacccttaccgctgagcttaccgctgagcttaccgcacgtaaaaagcaatacgattactatcgtgaccagttgctgagttttaaatatggatggatttccccatatatggaaaagctgctggatggggttgaggttgaatggctaccattagagttaattgcaaaaattaagcatggaaaagactggaaaggtttaggaaaagggattgtgccagtttatggttcaggtggtgttatgggatacgttgatacatgctcttacgatcagccttccgtattaattccacgaaaaggaagcatcaccaatattttttatgttgaagctccattttggaatgttgataccatttattacacagatatagaaacctcaaagatcataccaaaatacctttatcattttataaaaacgatagatctgatggcgttagatactggttctggaagaccaagtcttacacaagctattctaaataaattacatattcccataccttgtcctaacaacccggaaaaatccctttctattcaagctgaaattgtccgtattctggataaatttgacaaattaaccggctccatcaccgaaggcttgccccgtgaaatcgagttacgccaaaagcagtacgaatattaccgggatttactgttcagctttccgaaaccggaatccgtgaaccactga

SEQ ID NO: 289340 - DNA, 1557 bp, Morganella morganii
  misc_feature (13)..(22): n is a, c, g, or t
atgctgttaaaannnnnnnnnnaatctaccctggatgcagtttttgaatatcttggtggctcccttaaagatcttgtggctgtgtgcgaccacgggcgtcggcgtcgttccaaggttattgcagcttcagccaccgtatcctctccagaaaggcagctagaacatctctatcaacgttcaattccagcagtgcagtttccagaacctggaccatctctgtatgagtctttctatgcaaaacctgcattggcagaagaagagctccgaaaaaagcatcccgacattgaggtcgcaagtcgacaggcacgtatatatacggcttttatgactaacggtaagccacacacatcaactagtgtcgcggttctatcagggtttcatttaactattagtcggctatttgacaaccttaccagtggtgctgagctgcaattccaaattgctcgtcagatgttagctggacatgtatcaaagggatcacttcaaaaactgcatacgcaggtgttatccgaggctaatgcttctgaattagctacgcttatcgacttgcaccgcattgcgctgacctatgtcactaataagaagggcggtgatcaaattatggcagcagaaactgaggagacgcgcaaacgacatattaacgaaggtattgagcttgggggactggacactcgtcttattaccggctcagtggagcaaggtgagattcaaagcgtggtggatactgcacaacggcgtgtcgccccaggagaaccactacctccgttaagagaacagctacgttccgttatcgcgacttcagctatctcacatggtgtcgacgtagatgagtttaactcaatgttctttgccggaatgccttctgacattgccgagtatatccaggcttcctctcgagttgggcgtacacatataggttttattgtccttgtcccgacgccacaacgtcgcagggataggcacatcgtgcatatattcgatatttttcatcgatttcttgaacgaatggtgcaacccgctgctattgatcgttgggcagaacgtgctatcgatcgcgtatatcctagcctattccaggcatatttgttgggtgttcgccctagtagtgaattaattcagctgcctgaaggggagaaagccagaactcctgattacagttttattccaaatgtacgcaaagagtttacttctcgaggtgattcatttattgatgaaataaacaagtttatagagttagcagtggggttgaacggtacctttgtacctgaaggtgaggagtactatcgtgatcgcattaatcaaaggactcgtaatctcattgtaaacgcttggagtagtccgatgtgggggaatggtaatatcgatacgtactttaatggtcaaacagatcccatgattaagccaatgacgtcgctacgcgatgttgatcaaacaggcatcatccaggcatcattcctagatgtaaatggcaaaaagcaatcaattgatgaaatacagttagtaatggatttccttcgtcatggtgtggctggcaatgatggttcggacaatgcatag

SEQ ID NO: 289341 - DNA, 315 bp, Morganella morganii
atgaacaaatatcgtgaaaaatcagactttgagattaataaggctgtggctgatgaattgaagttaaattatgaaattgattatagcatgcgcattgttgttataggtgagcacatcatctataacccctgcttaaaccccagtcaagcaatgccgattgttattgagaatggcatcagccttatttcagactggaacgagattggtgtgtggggtgcgacctatcagccgtggtatacatcagaaaataaaaacccactacgcgccgctatggaagtattcctgatgatgaaggatgcggagaatgaaaaatag

SEQ ID NO: 289342 - DNA, 258 bp, Morganella morganii
atgtctgaattaacgaaagaggaaacaaaatgggcggacatgcttcaggaactactggataaatgcccgagtaaccgcatcggatttatcaccataggcgataaagacctggctttatatgacacgtcaaaaatggataagatattaattcatcttggcaagggaaatattgagtatggcacggcggctcaaaaagctggtgcattgtttaacaggtggattaattttccaaactgcattgacagcacatccggatga

SEQ ID NO: 289343 - DNA, 396 bp, Morganella morganii
atggaattatacatagatgaagttaaaaatgcaggtgagatagagaatgagtgcttagttttgaagtgctacagcaatgacactgattggcctgaaaattacatggtttttgatcagacctatgatagtgatggtgatgtgtcaaacaaggttaggcattgttatattttccccgagaaaataaaaagcgaagatgacgatagtccgacttatcataaatggagcgatggcgataaaatagagttatacacacgaaatggaagaaacagaatcgtaaacgaaaacggcacaaaagtgtttaaatacttctggaagcttggcaatacagtatggaatgctgatggggatgtggtgaattttatcaaaatcgcaggtaaggtggatttaaaaatataa

SEQ ID NO: 289344 - DNA, 663 bp, Morganella morganii
atggaagttatattaattatcgctggcgttgtggccgttatcatttatttcattaatcagaacaaaacccgcgtttctgatcgcactgttgtgacacaacatcgcactatcaaaaccgatgatggtgaaatcaaagtgcagcgtactcaggttgtagatagcacatctacgcaataccacagctcaggcgctccaagcgttgcaaagcagacggagtatgatctgcaagccattaacgattactataagcagttgaatgagaagccggtaccgcaacaaattccgcaggaaaaaccagctattgacgtaacgcccgttcagacccgtcagccagtaaccaacactgtacaaccaaccccagtaaccccggagccaaccaagcaaattgagccaccgaaactgcttgatatcgtagttgagaaaaagaagtgtccgcgctgttgccgcaacctacagttcgataaatacggcaaatctcagaaatacaatgatggcatgacactatggtgccttgaatgccttaaagcgccgcgagatacaccgaagatgaagtattgtcctaagtgcggcaagcgccggtacaaaaccagtttttatgcgaacagcaaacgtaaagacggtctgacgctgtggtgtaaagaatgtatggataaatcaaaatga

SEQ ID NO: 289345 - DNA, 795 bp, Morganella morganii
atgacagcaatcgcattcaatcacgctgaagattggttaattaatgttgattctccaaatactgcggaacaatataaacctggaacatggaaagtagaaaagcttagtccaacagcgacaagatcttatctgcataaatatattgccgttaggccaggtgctacatatacagtaaatatcatggctaaaacttttaatccggataagtcttcaatacgattggagtataaagaaactttaataaatgaagtattaatttctcaccccgattggaaaatgtatagcttaagatttactattccaatgcatatcgatcggtcagatacttttaaatggaatgaacactatatacatttggttgctggttttacatctgacactaatcagtttgggtcatcggaaatagctgatgtatatgtgaatgaagaaaatggtttttgcacaccaagaatcgccgcaatgggtaaattgaattttgacaaaggtaggtattggatagataccaaatattccaatgttggtatcagggatttgaaagtaacgggtgataggagtaagttggatgttggtatcacaaaaatatacaatatgacttatgggacagcacctgtgttcgttgtccaaggatacaatgacgcaaaggaagtttgtgcaagaataagtaacgactctgtaggtacaaggttatatatacacctctataaaaaagatggcgtcacaccactaagtattgatgatataaatacaactggtaatacaaagcctttcagtttgtcgattatgggttttttctga

SEQ ID NO: 289346 - DNA, 525 bp, Morganella morganii
atgggtgttagtatgaaaggtaaattacgttatagtgcaatgtttatcacatcagcccttgctcttggtatttttttgtttctaatttacagtaatgatgatgcttgcaacaagggtaagtatattttatgcactatagaatctgatggtttaatatgtacatcatcagatcgtaatactatttcaggaatgaagattagtcttataaaagattataatgtttatatctatgatgatggattattcaataaggaagtgatgtatactaattatgttaattcagatggttatgtcagttctttgaatgaaatagagttaagtgcaaatgaactaaactctggagataataagataaaaataaaaaaaatagatccaagtctgggatatgaactaatcaatgatttggataataattatacagataaaacagtagatatagatggacgagtcatttttttatctgactcagataaacgtggttttgataatttttacagtaaagttgttggtagatttaataattaa

SEQ ID NO: 289347 - DNA, 501 bp, Morganella morganii
atgcaaaagtttaatcgtgaattacagaatcacattcttaccgtctgcattgcgtcatacccacatcacacatcatggaatcagtatgacccggaatcatttcccagattaatggatgagtatatacttgctgccaatatttattaccttagtgagcacggtttaatttcagtctctccgcagcgcacagatgacccatattctcttcttgaaaatattagggctactgctgacggcatagattttatgatgggtgatgaagggttaaagtcggtgctggatatcagaacaattaaaattcactctgatacaatgactcaacttattgatattatttcttcttcagatattcctgcagaagagaagcatggtattttatcaaaactccgagggcttcctgcaagtgccataacacatttgacgaatgaattaacggtgaaggctgctcttgccctgccgggcgcacttcaactaattcaaaagtacttgcagaatctttag

SEQ ID NO: 289348 - DNA, 360 bp, Morganella morganii
atgagggggagtaatgtcattgagcgagatgtccctcagtgggtgacgagagctgaacgccacaatcatggcggcggcggaggaggaaacatggaatcacgagtagcgaaacttgaatctgatgtcagcgatattaaaactacactcactgatataaaagccgatatgaagatagtgcaatcagatatcgggacgctaaaaacagatgtggctgttattaaatcaaactatgcaaaaaaagaagatgtagcctcatctgcaaacaaaataatcctatgggtggctggcgttgtagttttttctcagcttgttcctgcaatgcctaaaatcatagaggctattgggaaacttgccagctga

SEQ ID NO: 289349 - DNA, 252 bp, Morganella morganii
atgaaaggcatgagaagcatatctccatttggtgtccggatgccagatgacctaaaagaaaggttgtctgtgcgtgcagcagaaaacggcaggtcattaaactccgaaatcgtcatgatcttacaggatgctattgattcctcatcatccaagccaaaaagtagcgcggaacacgccgcagctatccaggcagaggaagtgaagaagatggttttcgatactctcgttaagctttacgaggacaaaaaataa

SEQ ID NO: 289350 - DNA, 726 bp, Morganella morganii
atggatatccaactttaccacgggtgctgttttgacgttcttccaacaatcgaaagcggcaccatcgatatggtttgcgctgacatcccatatggcacaacacaatgcaaatgggactccgtattaaacctgcagcgaatgtgggaagagctgtaccgggtggcaaaaccagaggctgcaatagtcctgttttcagcgcagccattcaccagcgtattggttgcaagcaatatcagagattggaaaacggaatggatatgggagaaaacccacgctacagggtttctgaatgcgaagagacaaccattaagggcgcatgaaaatatccaggtattttacagaaagcctccggtgtacaacccacaaatgacgcatggtcatgaaagaaaaacgtcatcccgtggcgaacaaaagacagaggtttacggcgctgcaacaaagatggtttcttatgattcaacatcaagatacccaagggatgtgcaaaaattcccaagcgataagcaaaaaaacggaggcctgcatccgacgcaaaaaccagtttcttttgttcaatatctcattgagacatacagcaaccaaggggaaaccgtattggatttcacaatggggagcgggacagcagcaatcgccagtaaaaatagcggcagacggtttattggcattgagcgagaactgcagtactacaaaatagccaagcagagggttaatgaattaggaggctaa

SEQ ID NO: 289351 - DNA, 207 bp, Morganella morganii
atgaaatggattaagtgttcggaaaaaatgccagaggatggagctgtagttttaactgaatgcggcggtcatttaaatgttggtgtcggaaattgctcaggcgccagctaccgatacatcacatccgcaatcaacaacagaggactgacggttactcactggattgattttgatgatatcccgctgccacaaccaccggaggagtga

SEQ ID NO: 289352 - DNA, 1089 bp, Morganella morganii
atgaacagtaatgttgcatacgctgactttggagccgcacgacggcaagagaggccaacggtggcagatcttgataacggttacaccaggatagcaaatgagattttggatgctgtcatgattgccggactcaccaagcatcagctgttaatcatcatggcagtatggcgaaaaacatacggttataacaagaaaacagactggattggaaatgagcaaatggagctgatgatcggcattgataaaacgaaatgctcaacagcaaaaaatcagctaatcagaatgaaaatccttatccaggaaggacgcaaggtaggtattaacaagagcatttctgagtggaatacagacattgacagaaacggtaaaacatttaccgaaacagtaaaggttagttttaccgaaacagtaaaatcggctttaccgaaacggtcaaacacaaaagacaataatacaaaagacaagaaagacaataacccccttacccccgagggggaaaatatcgctcttgaaattctcgggtactacaacgagctgaccggttcaagatgccaatcaatcgcaccaatcctgaaagcgcttaacactgtcaagtcgaaaggcgagtgcttcactgcagacgaaataaaactggttatggaatgggcggtgaagaaatggaaaaacggcaagtccgttaagcctgaaaacatctgcaggatgacgcggttcgacggatatctttctgacgcgatgaagtggaaatatcgtgacggaataaaccctgagccatgcccgcatgaagagctgattaaatcctggaaccggcatgttcctgaacgcgccgttgatctgcgtgactggacaaaacaacgcccggcatacagccatctggaagaggtctggaatggaaaaacaaacaaagaccagtggcgggaagtgaaacacgtcgatacctgtttccgcctgatctcacagtcatcgctgtttaccggactgagtgaaaagcagtggctgagtatcgactgggtacttaaccctgcgaagtggctgcaggtgtacgagcaggcgaagcgagaatacaaggaacggcagagcggagttaactaa

SEQ ID NO: 289353 - DNA, 183 bp, Morganella morganii
atgaaacgtaaacggaatcatagttttaactatcacgctgtgcacaaaaacatcgccgaatacaacgagacacggagtgtcactgagcaaggcgcgaaagcactcagggcggcttttaacgatgctttattgcgaaaagcccatagggaagaactgaccggaggtaaacggcatgaacagtaa

SEQ ID NO: 289354 - DNA, 813 bp, Morganella morganii
atgaagcaagaagaagactctctgcaaaatacggaacaaggtgaactatttcagttagaatttactgattacactccatccagccttggcactgttcatttgtctggatttgccattgcctctgatgaaatggaatacgccgtaaaaagtgtaaacagtggcatcactattcccgtggtaaaccctagtcaagttcccgcatcagaatggttttgtacaagcttggctgagttgtgtggtatcgcgactccggtatgcaaaatacttaaatgcctatcaagtggtgagtatgtttttgggtctagaatcgagttgtctgcatggaaaacagggttaaatgatgttgagtggataggaatactgactaatgcaagtgacggtctaaaaaggcaaatgtgggcaatatatgcctttgaccaatttatccataacatagatagacacttcaataactatctatacatgcagaatacgttaggcaatacaattgtaaaaacgtttgacttcagtttaagctcttttgttatcggatggccaaggggaacgggtacaactctaccaacagattcaacaacttatataaactgggagtttgcaaaaagaattttaggagactctagtgagtttaaagcttccgcactgaatatacttgataaaattgagaaaattggaagtagtaaaatatctgatatacttgatagtatgccagagcaatggatgccaagccaccataaggagtacttgctgagatggtgggaaagtgaggaaagaaaaaaaagactagacgcgatccgtcaggagattaattcatga

SEQ ID NO: 289355 - DNA, 816 bp, Morganella morganii
atgagcacataccggtatagcttaataaggcttacccctaattttgaaaaaggggaaactattaacgttgggctagttgtgtatctggatcatgggattgatgtcagaataatcaatagtgaatcaaaattaaaagccattgataccaacttagatctaacgtatctcaatgatttaacaaattccctaattcagatttctgagatagtggaagatgttaagttgctcccaaaattatttaaagggtcattgtcattatcaagttttggcatgttttcattacataaaaattgcacttatgatgaaaaaataaaagacctaatggatagactaattaacccacacaagaaaaaatataaaaaggtaaaaagaaacatattctttgatattaaagatgtttttaaaaaacaaggcatcttggggcaatcggacgatgatttgttaaatcataaagttgtaaccaattttacaattagtcatgatgaaggactgtctgctgatttccttttaaaaaatgggcgttatcacttaacagaaacaattgatttcagatctgaaaacataaaaaaacaaatgggtgaggctgccattagtgctattaccataagtaaagcaaatgaaatctataacaacaatcttgattcatttatcatttatgctgctgaaactgttgcacaggaacaaagtgcaagaaagcaacttaacttactagagaagcatgctgatacgctaattaactcgtatagcaaaacagacatggatttttattatgaaaagatgctacgtgcagcaaatgacatgatcgccaatcactaa

SEQ ID NO: 289356 - DNA, 1089 bp, Morganella morganii
atgtcagatatggttaatgcgggtgtagacggtggttctggttatacctttcaacgatgttgtgttgtataccttctttttgatgattatgaaaagctaagctcgtcatcgatcgattatttcatatgtgttgagcatcatgacgattttctttttgctttttttgacgaaaatagtaatattcagacaattaacacctatcaagctaaaaaatcaaggaatgactggaaaacagatcaagaattttgtgaaattattggaaaaatatctcttgtaggcaatcagcttgttaaggatacaagtccaaagtctgatggttataaacatgtcctgtctttcctaacaaatcgaaatattcatcttcagggcaaaaaaacgccaaaacagaaacaacaaattgagaagatacaaatctctaacacttctgtaaattactcagatctccatgatgaaattaaagataatatccagaaaaagctagttaatggaagagattcagattttaatcaattacctaatataacgtttaactttatagatcttcctcaaagctataaaggatggaaaagagtattaacgggattatcaattgaggttttaggtagtagtattaacgatcatgaggctgtagtaaccactttaatgtctttgctacaagatattgaattagaatataatgattcaggatatgttctactctccgataagtcaaaacgtttaactaaacaaaaagtagatgaaacttttaatatattcactgagagcaagaaagcattcgatttttggagagcccatgcagatgctttagcagagtgcttaactataactcttcccataaggaggagagctcaagagttactagataattgctttgatttttttaaagatatccaacaattagaatataaaaaaatctataaatatgtatctgagaataagcatgttgatgaaaaacatataaatgaaactgattgtgttatagagttgtatcagaattatattaaagagagtaattcaagactagaaaaacatatgattgcatttgcaattatagctgcatatgtagaaacaagaggaatatatgtctaa

SEQ ID NO: 289357 - DNA, 144 bp, Morganella morganii
atgaatgttatctatctcggtattgatctggctaaaaatatttttcagctttgtggattaaatcaggcgggtaaaccggtttataaaaaacgcactgatcgtaaaacgttactacaaccgtcgcgaatattccggcctgcctga

SEQ ID NO: 289358 - DNA, 1575 bp, Morganella morganii
gtgaataagtacaaaatcagtaccaggctgacggccggattcggggtactcattgtctgctcattactgatgatgatcagcgggatctggcaactatggcagacggatagaaatgtacacaggatgactgagtttccggtattgaaagagcggattgcggctgactggtatgcggctgtcagtaccagtactcagcgtgtttctgcacttgctcagagtaccgatagttctctgggggagacctttgcagccgagaacattaaatcaggtaaagcggtctctgaattactgagcagattcagcgaactggtaaatacgccggaggaggaacattttcttaccacactgactgatatccgggctgcctatgtccgggcccgggacgaagtcacgtcggcaaacaggagaggtgagtatgatgttgccgggcaacggtattccgcagatttcataacagccgctcatgattatctggggatactgaatgagattcgggattatcagcgggacactatcagtctgatgaaatcggatatcgataaaaaaacgacagatggttatatttttctcggattactgggcttcatcattaccgtcgctggttccctgatggcatggcggctgagcctcagtatagtcacgccgcttaacagcgcgacgcggctgaccaaatcggttactgagggtgacctgactgcagaggtctgtatccgtggcagggatgaaactgccggtctgctgcattcagttcaggagatgacagtccggctgcgggatatagccgggaatgtccggcagggcgccgcagcagtctccggagcggcaactctgatgacggaggcaaatacggagctgtcaggaagaaccgaagaacagtctgctgcactgcaggaatctgccgcggctattgagcagctggcctcaacggtcaggcgcaatgcagataatgccggtcatgcggagttgctggttaaaacaacggcagagcaggcccgctccggtgctcagctgatggaaaacgtgattaaaacgatgcgggatattgagtctgcatcggacaaaatcgtggatattatcgctgttattgacggcattgcttttcagacgaatatactggctcttaatgccgcagtagaagcagccagagctggtgagcaggggcgcggatttgcggtggtggccggagaagtgcgtaatctggcacagaaaagctctgattctgcaaaagaaattaaaatgctgatcggtacttcagtacaaacggtggaagcaggacatattctggtggataaagccggagaagcgatgacagaaatagtcagcaatatcctgcaggtaagcgatttggtgactgaaattacagatgcgggacgagagcaggcacagggaatcgatcagataagtgtggcagtgagccagatggaacagtcaactcagcagaatgtgtcgctggtcagtgaagcatcttcagccatgttgtcacttcagcagcaggcagaacaactggagcaggtggtcagtatattccggttaccggatgattccggaatggctggtgaaaaaaatgacggatga

SEQ ID NO: 289359 - DNA, 135 bp, Morganella morganii
atgataaaagttaaacagaaagtattaaatgaaattatgataagaaatgagaaccggtatgctttatttaatcagataatcaaacggatgcttataacttccaaacataagaataagaaaatcatagttagttga

SEQ ID NO: 289360 - DNA, 1107 bp, Morganella morganii
atgaatattgacaacgaggacatcgtggccctcattgaagcatcattggatgctaactacagcgaagtcagaagcgtaagcaatcgaattgtgaaatcgatcagcgagtatgacttggatatggctaaaaagatcaagtctatacttcgtagaaaaggggtacctttacgtagctctggttatatagaaagtataccggtggatccaaagtcaaggatgcctcttgtggaagaggttcaatggcctgtaacaccattgtttcttgataaaaacgaacaggacgtttttaatgcattcattgaaagtgtaaatcatcaacataaattaattgagaatggtttatcgagtcgtttaagtttacttctatctggaccaccaggaacgggaaaaactctagttgcaggtcatatagctgcgcaattaaataaacctctatatattgttaggttagactctgtaatttcatcattactaggtgatacggcaaaaaacttaaggcaaatatttgatttcgtgccatctaagaatggtgttttatttttagatgaagttgatgctgtagcaaaacttcgtgatgatacacatgaagtcggggagttaaaacgggtcgtcaatacattaatccaaggattggattcattggatgataatgcagtagtaatagcagcaacaaatcattctgctttattggatcctgcaatatggcgaagattccctttcaagataaagtttggaatacctaatttagatgtacgcagtgtattgtgggaccactttttattccaagataaaggggaccccagtacgaataaagtactcgcatctatatcagaagggcttagcggagcagacattgaaaacataagcttagccgccagaagaaaaagtgtcctcggtaatacggaaattaatataccatcagtaattcaagtggtgatggagagtgataatgataacacagcactacccactattagcggacctagtattgtgcaaaaaaaacggatagtagaaattcttcaccatacgcataaatttagccaagctgacatagcaagattcttgaatgtgagtaggcaaacagtatctagttaccttaaggaataa

SEQ ID NO: 289361 - DNA, 2259 bp, Morganella morganii
atggttgacaattcacggacaccactactaaaccctataatttcgttgctaaaagagccagttccctcgacggttacaggaggtgggaaaagtagagcaagtattgttcgttctcgacttgcacagcagagggaaaaactggtaaatgaccttgctagcataaagaaagagcctagtcgaattgttagccatgcagggaaagcacactttgttgttagaatgtttgatgattccacggccccttcttggacgccagatgaccttttcagtgcaggtactttgagtcgcatcgttgcaccatcctatgatggatatttggtagaaataccactatcgtcaatagatgatttgatggctaaaataactaaggcaaaaacaattggtgaagaagttgatatttctagagttgaatcaattagcatatttaataaacagaatgttttaagaaaaaaaacaataaatgagctatttaacgatggggaaggaaataattatcgacagtttaacttatggttgttacctttttatgacattaaatcaagagagtctgtgattatttctttactgtctttatatgataatggagttataaagtcaggtttttctgagtttgatgtgagaaaaaatgataatgatgcaataataattgcaagtagtggcagaactcttagtccttcgctaatgaatgcaattaaaaaatataaacgagaaggtcatgcttcattttctattatcgtagaaaatgaattggatatggtcaaaattataagttctggtgcagtctatcgagtcgaaccgatatcacatgtaagagtgaatgaaactccccctgggaatggtgcggagccgacaccacaaagcttaaaaaacaaggatctacctaccgttgtaattgttgatggtgggtgttctgcaacttcttatttgcctttaaatatattatcagttaagccgttagtatctgattatgatgcagatatggctcatggaaaccaagtcacttcattggtttgccatgggtatgcctggaataataatttatcattacctgaaattgaatgtaattttgttagcgtacaagcaattaataagactggtgttgtaaggcaacctactacagatcaatttataagttatttaagaggagttgcaaaagaaactaaaggtatttctaatgtgtggaatttatcctttaatgagtctcagcctgcaatgttcagtagtgaaataagttatcttggtcatgaaattagaaaaatagcacgtgagtataatatattgcctgtaatatcaatcggcaatgtatcaaagaaaaatagtagtagactatgtcccccagcagattgcgaagctgccttaacaataagtggtaggatttcaaatggacaagggaagccacttggcccatgccctttaagccttaaagggccagctcctgcaggaatgaaaaaaccagaattatcatggttttctaatcttagaatgattgggggagtaagtaaaactggcactagctatagcactcctttaatctcatcagtcgcagcgcacacttttaaaaatttgaagaaccccactcctgatttagttcgtgcattacttataaacaaaagtggaaatttagaacatgatattcatttaggttgggggaccccatggcgtgatgatacacttccttggttatgtcaacctggcacagtaactttaacttggatatcaaaacttaaagctggttatgcttattattggaatgacataccattacctcctgaaatgctggtaaatggtttattagcaggaactatatctctcacagcaattcttaatcctatagtttcggagatggcaggagagaactatttcgctacgaggctggaatgtgcattgcaagctgtcgataaaaatggcgatgacttcaaagtaaaaaatcttctaggaacaatgaaagagtctaaggaaaaagaaagctcttcccgaaaagacttagcgaaatggagtcctgtgaggcaccatgcaaaagaatttagtagaacaattatcgctaatcactctcttagattatatgcaaggatttatgcaagagatctttatcaatttaatatggagtcgcatagagaactggatgagcaagaagtttcttttgtgttaacttttaaaagtactgatgaaaattctggaatctataactctatgactcaaagtctgggggcatatgtggagagtgctgtagttaatcaaaatattgagattaacctttaa

SEQ ID NO: 289362 - DNA, 354 bp, Morganella morganii
atgccttatatcgggctggtcggctcctggcgtcataaagatacagagattggtggcatctttaaattcagtaatttagttcaggcaaaaagtaacgataaccactatgaccgagatctgattattcgcactaaaggaagtaactctttgcatttctcagtagtattaaatgccggatattatatcatgcctcagacaaagctctacgctgaggcagcatatacccggtatgaagaatcaaagagtggtatggaatggaaagaagcgggcattacatcaaactatgatggtgactggggtggaatggataataaatactatacactatcattaagtatacaacactcgttttaa

SEQ ID NO: 289363 - DNA, 363 bp, Morganella morganii
atgaccatcaaaaaaaatatttttactggactcttactgatagcatcgacatcagtgcttgcttcaaacaaagccgcgcacttagaaggaagatcaggtgatgaaattcatttttcagttgaaagcaagcctactacaggctatagatggatgataaaaggcataccggaatcactaatttttgtatccagcgattacaaacagtctgaagactgtaaagatggagccgttggctgctcaggtaaacagacgttcacttttatcgcacaaaaaacgggcaagggggagttgacgctcattaacggacagccatttgacaaatctacctggaaagaaaaagtaatgattgtaaatatcaaataa

SEQ ID NO: 289364 - DNA, 396 bp, Morganella morganii
atgtctgttgaagaaaatatcaaaacggttcaaaagttttatcgtctgattgaagaaaataaatatgatgaggtgaaaaacctctgccatccggattttaaattctattctcaggtggatacaccgctgaacagtgagcagtttatcgtacaggaaaaaggccatatggatgcttttccgggatttaccatgcgtatccacgaaatctttgccagagacgataaagtcgcctgctatcttatctttgaaggcgtgcagacccgtgaattccttgggcatcctgccagcggcaggaaagtgcgcttttctctgatgtttatgatcactctgaaagacgggaaatatatagaaaaacgcgctcattataatacagcagatatcatccgacagttataa

SEQ ID NO: 289365 - DNA, 990 bp, Morganella morganii
atgtccaccatcactgtcgcgatagtgatcaccgaagggttcagtacatttcatgtctccgttcccctgatcctgttcggggaaatactggaagggaagaaactcttcagtcgccgggtatgtgcggaggaacctgggcttatctggtctgctgaaggtacggcggtgagggcagaatacgggcttgatgcactggcagaggccgatatcgttattattcctttctggaaacacatccatgaaaggccttctgaaactctgctcagtgccctggttgcagcctgggaaaatggagctcaggtggtgggcctgtgccttgggagttttgttctggcttacaccggtctgctggacggtaaacgggcggccacgcactgggaggctgaacaggatttccagatgcttttcccagcggtttatctggatgttaacgtgctttatgttgaggacgagcggattatcacctctgccggtacagccgcggcactggactgttgcctccatgtaatccggcagcgcctgggcagccatacggctaatcaaatcgcccgccggatggttgcccctccttatcgggaaggcggacaggcacagtaccggcagccgcttattcccaaaagtacgtccgataaccgcataaaccagttgctggaatacctgttcgtgaatctggagttaccgcataatattgatacgctggctaatttagcctccatgagccggagaacgctgacacgccatttttatgcggctacaggtatgacggtctgggagtggatcacctcagagcgtctccggcggagtcaggaactgctggaaagtacagacattgcagtggagcaggttgccgaacaggcaggctttcagtccgccactactttccggcagacattccggcagcggatgggagtcagtcccagtgaatggcgaaaaacatttaacggaacgccgcaagacaatatcccagtgggtaaagaaactgaagaatga

SEQ ID NO: 289366 - DNA, 777 bp, Morganella morganii
atgaagatcatccaggtacgtaacgccacacaactcatttcttacgctggtaaaaaatttcttgtcgatccgatgcttgcgaaaaaagaagcctatccgggattcgaaggaacggcccggtcagatatccgcatcccgatgactgagctgccttttgaccttgatgtactgctggatgtggatgccattattgtcacccacacacaccctgaccactgggatgaagcggctgtagcgcacatcccgaaagataaactgatttatgttcagaatgaacatgatgaaaagatcctgcgttcccagggcttcagcaaccttgttattctgtctgacaaaagcacatttggcgaaatttcacttattaaaaccgtttgtcagcatggttcggacgaagcctatgctaacccgcaactcgcagcaatccttggggatgcctgtggagtggtcttccagcatccgtccgaaaaaacgctctatctggtcggggataccatctggatcaaggctgtagaggataatttacgtcggttcaatcctggcgtcgttatcatgaatacgggctgggcgcatgttctcggattcggccccattattttcggcagggaagatgtcctgaaagcccatcgtatcgtgccagaggcacagattgtggcaacgcacatggacgccgtaaaccactgtctgctgacccgtcaggaactgctggaatatgcccgcgataaccagatccaggcgtcagttaccgctcctgctgatggtgaatccgtcacgatttaa

SEQ ID NO: 289367 - DNA, 303 bp, Morganella morganii
atgaaaaaatatatagtctcactggcgctgatttttactgctccattagcttattcacacacagccctgctgtcttgttttgacgagggagacggtacaatcacttgtgaaggggggtttagtgacggaagcagtgccagcggtgttgggttttatcttgagaaagatggcgatgtgattttgactaaaaagtttagtgaaacaaatgaggttaattttgataaacagcaaggtgactacgtcattgttttagatgccggtgaagggcatgaagtcagaatcaaaagttcagacgttaaataa

SEQ ID NO: 289368 - DNA, 798 bp, Morganella morganii
atgaataagctcacgttagtatcaggtgttgctctgacattatacgcaggctctgccttagctcattttcaaacagtgtacacaccggagtcagctttggcgaaaggtgagacaattcaactggctactatttttacacatccgttctccgatgaacacgtaatggatatgggggttccggaagatttttatgttatacataaaaacaaaaagcaggatttgaaagaagccctacgtccgattgaatggaaagggaattcaaataccgccaaggcatttgaaactgaatataaagcacggggaatgggcgatcatatttttgtgcttacgccaacaccttaccttgaaaaaagtgagggcgcatatatccagcaaattaccaaagtagtggttaacgttgcgggtttaccaactgattgggacaaaacgcttggcttgaaagcagagattgtacctctgacaaaaccctattcagtctggactgattcgacgttctcaggcgtggtaatgagcgaagggaagccggtgccatttgctgatattgaagttgaataccttaactctgatttagatttgaaaaataaagttacaggtaaaactaagtacaaagctccgcaggatagctttgtaactttaggtattaaagctgatgccaatggtaattttacatttgggattcctaaagccggatggtgggggtttgctgctatgggggtcgggccggataaaacctttgagggtaaagagttgagtcaggatggtgttatctgggttcaggcaaaagacatgacggagtaa

SEQ ID NO: 289369 - DNA, 1545 bp, Morganella morganii
atgagtagaaataaacctactttaactaaactcagcttaattcttaccatcattttattgatgacattaagcttattaacttcatttgtaatgataaaagggtctggattaactacatctgttaaaaatatttttcttttatctatattgatgattgtttttaactcatcaaaaaaagcatttttatatatattaataccaatgggaattatctatacagtttatgcacctattgggataacatttggcccacccagctatcaatatttatcctctgtaatagcaaccgatctattggaagggactgaatttttttctcagattccaacttttaattattttattgcaatatcaattatccctcttctgtctctttatagatacatatctataaagtataatatcaagccatataaaaataaaactatactttgtgtatttatatttatgtcattaataaatcaatcacctactgaatttttcagaaaagcatatagtgcaataatggctgtttatagtgactataaagaaattagcaaaatgagtaaaaaaagtgagtggggtgattcacatatttcagataaatcaacatatgataattatattattataattggtgagagcgccagaagagattatcatcatgcatacggatatcctgtaaacaatactccttttatatcgaactctaactcatttatagttgatggattaatggctggcggaacaaatacagtatcatcattaagactaatgctcacaaaaccaaataaacaatcgaaagaaccaaattattcattaaattttattgatatggcaaaatctgctgatatagaaacgtactggttttcaaatcaaggggtaattagttcggtagatacacctatcgcagctatcgccaatagaagtgatcataagtttttccttaaatatggtgattataaatcaaaaaatactagtgattttgaattgattgggttattaaaaaagacacttttaaagaaaaaacataacagaggtaaatcactttacgtattgcatctttacggctcacacccaaatgcatgtgatcgaatatctgattacaatatcaaatatagaaatgataattataaatatatatcatgctatgtatcatcaataaataaaactgatgatattatcagggaaacattaaatatctttgaagaaaacaaagaaaaaacaaacgagtcatattcaatattgtacttttcagatcatggtctatcgcataatattgttgatggtgaaataatattaaatcatgcggattctggcaagtatcatcatgatatacctctgtttatgattaactctgactcagttaataaaataaaatgtaaatcatttaaatcagccctgaattttacggaagggcttggtaactggattggaatatccaataaaaatatagatgttaagtataacctttttaattgcgttagtgatgatgatgactttggtttattcaatgcattagaaagagtaactaaaaatgaccctgcaataagcataataaaataa

SEQ ID NO: 289370 - DNA, 705 bp, Morganella morganii
atgctgcagtccgagtctttctttgtacgcgataccggcgcggctacgcttagatatacactgccgttagttgccgggatgaaggttgtaataaaattcaatggtaaaaacgctggcgccggcgccgggagagtcggcatcgaatcaccagatgctggcactttagtcaatcaccagcctattttatctaatgattggattaattacacaaccactttcacagcgcctttagtcagtaatagaacagaagggattattcaaatattcatagggttaagcggggcagataaggcaggggaagtttctgtatcagacatagagatatatacaagcaacaccgtatcagctccacttggtgcagtatgtgttgtccatcaagagaagggaaagcaaccagttatacatggtgagtacatagagcatggaatagaatcaattgcatattcaactgaagttcaacactatataataaaaacaggaatgacgcgaaagaataatgatgtaagaaaaggcgtatgtattgctcagttgctagggatagagcttggcgggtatgaaataagaccatccgctgttaatggtgacgggacaatatacatgagaattcttgataaccagggacgacatgtgtatttatctgatattacagagaggaaattcttattttcagttatttttttggagtgtaaatgtagggtcgcgtag

SEQ ID NO: 289371 - DNA, 378 bp, Morganella morganii; identical to SEQ ID NO: 278131

SEQ ID NO: 289372 - DNA, 399 bp, Morganella morganii
atgtcaggacacccacatgctgaccttatggctaaggcagcagaaatagcgaagacggataaagagtggtatcagcactttcaatttaaaactgatagatgcagcgactggcgtgatatgtcttgtgatttcctgttttatgaacatgtcgaataccgtctgaaaccccgcttcatcgacattaacgggcatcaggttccggagccagtgcgggaaatcccagtgactggcgacattctttatatcgctgatactacattaaagcccagcggcgagctgcggctgcaatggataggccatgatttgtgcatgagactacttaacagtggcctcttgcacacgacaaaagaagcagcagaacaccacgtagccgccctgctctctttcacacagaagtaa

SEQ ID NO: 289373 - DNA, 639 bp, Morganella morganii
atgacccgctccggcgggtttttttacggggcaaatatgtcacaggaaattatggtgaaaattatactcggtggtgtgctgggtaaaaccttcggcaaaacacatcaacgcctggtcagcacaacctccgaagcggtccgtgcgttatgctgcacaattcccgggtttgaacgctatctgaataccagtaaatcccgcggcttaacgtatgcggtatttcgcgggaaaaagaatatcggggtggatgacctcggttttccggtgacggatgatgttatccggattgtgcctgttgtgatcggcagcaaacgcgggggattactgcaggttattttcggtgcggtaatggtagcagctgcattctggacaggcggtgcgtcagtagcggcatggggagcgatgcataccgggctggccatgaccggcgtatccatgatgctgggcggtattatccagatgttgtccccgcaaccaaacggaatcgccatgaaagaccagggcgaaaataaaccgtcctatgcgttcggcgcgccgacgaataccgtttctcagggctaccctgtaccgatcggttacggtaagcgccgcatcggcggagccgttatctcagccggagtttacgtcgaagatcagcagtaa

SEQ ID NO: 289374 - DNA, 252 bp, Morganella morganii
  misc_feature (237)..(246): n is a, c, g, or t
atgttgaataaacaacgtttagttatgtctgtggttgctctcgccgtattatccgcaagtcagttaagtatggctgcaacaactgttaccggtggtaccgttcactttaccggacgaattgtgaatgccgcgtgtgctgtcagcgctgactctactgatcagacggtcaatatggggcagtaccgcactgcattctttaatgtcaaagggaaaaaatccggtgatgtaccgttttcnnnnnnnnnnctgtga

SEQ ID NO: 289375 - DNA, 174 bp, Morganella morganii
atgggcaaaggtatcggctttattctgattgataaacagctcaccgccctgttttacggtgataccgtcatctgccgtcagttcattcagcgtgatatcggtattgcgcagttcaaaacggccttcctcaatattgagtttttcaaaaccgtcaattttactgcggtcctgtaa

SEQ ID NO: 289376 - DNA, 615 bp, Morganella morganii
atgaaacgtaatattgatgatttcgacggaatgaaagattttattatcagcattattactgtggtggcttgggttttaataggtacgattgtaattatagggtattttaccattgaaacaaaaggcgaaagcattatgctttctttcatatctacaatattcactattatttcctcactaggaattgcagtcactataggtgtttatttctggcaaaaaaatgaccaagaaaataacaataacaaaattcttaacagaaggaaggaatcaataaagcacctaataaaaataagcgtttccaattttattttatatttaaatagactcgaggtagaactacattatggagatatggaagatattatttaccaacttgaaatgattgaaacgaaatatattgaaaaatgccttattgacgcaaaagacattgatttggaaatgttttatttaatatcaaatttgcttgatgcagttattgaacaaaaagatataataaaaaaaagagtgactaaaaaatacaataatgaggaagactatatccaagccaccgagttgcaatgctatcacgcaaaagaagaaataagtttccttcatgtctgcataagtaaatgttag

SEQ ID NO: 289377 - DNA, 372 bp, Morganella morganii
gtgaaaggctgggtcggtatgggggattcggcagagattgaacagaacgttaaccgtaccgtgaccacgaagggcaaactggagtacagcatcccggaaaccccgtctctcagtgaagaggaaacactgaaacttgccggacaaatcaccggccatgtcaccacgctggcggctaacccgatggcatccctgaccagcggaacgatcagtaatcagtctgcggtcagcaatgaaaatattatctctgtcggtgaggtcagtatcgttgccaaagacggtgatccgcagactattgcggcggatatcgttgaggtgctgcggcagcacatcgaaaatatgggacatgaatataattcggggatggagaaatga

SEQ ID NO: 289378 - DNA, 2595 bp, Morganella morganii
atgattgaaaatatcgttgcagatgaaaaactattaataaaaaaacgaagcgttaaagatcttgctgattacatcaggataagatcaggcacctcaccaaactactctttatttttgggcgctggggcctcagtcacatcagggattagaacaggttttgaactggttcaggaatggaggaaggaaatcttcaatcgttttgcaactgtaccttactctgattcaaaagaagcaattgattggcttgccaagaaccatcctgattggtatgaccaaagtaacgagtattcttcattatttgagaaaaaatttgatttaccttctcaacgtagacgatttgttgaattacaagtagataaaaggcttccttctataggatatgcatatcttgtagaattatttgaaactaaattttttgatactgtgtttactacaaattttgatgacctaattaacgaagcattttatcagttttcttcggatagaccgttgctatgcgcacacgactcatcgataaagggcatatcgataacttcatcacgaccgaaaataataaaacttcatggcgattatttgtttgacagcatcaaaagttcgttaaaagaaacagagtcccttgaaaacaacacaagagagaaactgggtgaattcgcaaaggaatatggtttaatatttgttggttatgctggtaatgataattcaataatggacgtcttaaaatatctcttgaaacaagaagattatttaaggaacggtatttattggtgtaaacgcaggggcgatcaaatatccccagaattatttaaactacttaaccatgaaaaggtctattgggtagaaatagatggctttgatgagttaatggctgaattagttcatgagctaggtagcgaattatcattaagcggcgcccaaaaatcaaccaaaagagaacgtatgattcagaatttcatttctgatgagtataaactaaacagaaatgaatatataaagaaagatttatttaaattaaagaaacacactctaacacaagacatatcttcattaatcaatgaactttctgacagcgacagtcaaaaaatacctgaggaagattttaaaaatttattgtttgtagataatttaattcgtgagaagaaatataagcttgctgaagataaattaaataagttaatcaaggatgacattagcgacaatatgaagtctaaatatttaagaagattaatagaaattaaagaagaccagaatgatacaaaatccgctttagattatagcgatagactgattgagttagatgaatttaatctcaactacgctttatccaggacaaacatattcccaaaagtaagagacaaaatacattacctaaaagagttgcattgtaaattcaaatacagcgttgatcttaaaaatcacctatctagaatttcattaaattatttagaggaagaggaagaggatgaagacatcatcactttctctgaaattcatattctcctcgaggagagtcttaaacaagatagcggcttggataatcgtgcctggcgaataaaatacgatacaataaagtgccagcacttacctaatcataacaaaaaagaacgtaacactttactattgaatttgttaaatcaaataaaaaccattaaccctatccatgatacatatctttatctgtattcgaccttcactaatgaatgtcataaaaaaccagaaatacttgagtgtattgatgtattatcgcatgcgtatgagatttcatcaaaaaacaaaaggagaaatatcttaaaatatctttcatcgttgcacctgggattatttgaaacagaatttgagtctgacacgcctaacttgatgaaaaacttcatcactaaatacgcagaagataaaacagaatcttcaattgcaccattcattatctttaaagccagatacgaaataggctgtaataaggatgtaccaactgctatttcacttgctaaagaggctatggatagtccgtggcgacacaatcacattcagagtattgttgatatattattaacagacaaatctaatatcccgttagtagaagagttcttggaaaacctgcccagagatacatctgaaattcagatattaaaagttaaagctgacatcctctcattgaatcgagattttccatccgctctcaatttaatggaagaggcgcataaaaagggatgggatttcagaaattatgccttagcaaaagtgtacgctaacctcttagcaagagagtatcacaaagcaattagaattgctgatgaaagccttttaaaaataaaagatttcagagaaagagatgtactaataatcaatagggaaatagctaagaagaaacttggcctagaaattaaaaagcatgaactattatctatcattgcacatcaccaatccaaaggtgatgtggcaatgtgcgcattcttccttattggagatgagctaaatgcaaataggcagctacaaacttgcattgaacgcgattacatgaattatttcagatatttagagtggccagcattaccagataatattctcgctcggttcagtttaaccaatactcaggttgcttga

SEQ ID NO: 289379 - DNA, 489 bp, Morganella morganii
atgccgataatagcaccaattccccgcgacgaacgacgcctgatgcaaaaagcaatatataaaactcatgataaaaattatgcccgcaggctgaccgtcatgctgatgctacaccggggcgctcgtgtcagtgacgttgccagaacgctctgctgcgcccgttcctcagtcgggagctggattaactggttcacgctgtcgggcgttgaaggtttggaatcattacccgcaggacgttcccgccgctggccatttgagcatatctgcacattgttacgcgagctggtcaaatactctcctggtgattttggttatcagcgttcacgctggagcacagaactactggcaataaaaatcaataagataaccggatgtcagttacatcggcgcagttatttagagctggcaatgtccgcttttggcacaaagcggcctgtcagattaggtttagatctgtgccgtagctgtgtcagattaaatctgagctaa

SEQ ID NO: 289380 - DNA, 1785 bp, Morganella morganii
atgagttctgcaatcacaccacagttagtacaacgcgtatttgaattgtaccttgaggatggtcttgtagttaacagaagatatcaacgaaaattggtctggacagtagaagaaaaaatgaaattcatcgattctctgcttaaaggttatccaattccgatgatacttacatcaaaacaagaaaacaacgagttaaagttagaaatccttgatggccttcagaggttgaattctattacgtcctttattgaaggcgatttctctattaatgggtgctatttcgatctggatgcaatttcactgactaaaacattaaaagaatccggtaaacttaaacaaaaaatgcctatgctggatgcaaagcagtgctcaacattactcaattaccaaatcccatttctaacaacacacattaatactccggaattcattgacgaaacattccgtagaatcaatacaggtgggcgccgcctatcaatgcaagatgtcaggcaagcaggttctcttggtttaatccctgatactattaataaaatatcgaattatgttagaaaggattcctcaagaactgatatagttactcttaaaaatatgaaaaatataagtattggtgacgatatattaaactatggaatcaatattaacgatattttctgggtaaaaaatgaaattattcgcaaagaagatattcgcgaatctcgagacgaagagttaatagcacatcttctaagttacgttgcacatccagaaaaagctgacactagatctgattatttaaataagatctacgacacagctacaactgaatgcaatgacctttccaatgcaattagtaaatataaagatgattatttaataaaaacattcaatcatatttttgatgaattaggtaaaatatttaaagaagaaagaagtaatttttccaggacgatttataaagataagaaaataaaatcatctcgtagtttccaagttttattcttatctttatatgaattaataattaaagaaagcatgaccattataaactataaagaccttcacacctcactcactaatatttatgataaccactaccacgctattatgaataataataggaagtggcataatgatgaacgtactagcttgattgaggcaaccaagggaattattcggtcacatttcaaaaaaagttcctcgcgtcaattcgagccgggtaattggatacgtaacattgaaaatattatcaatgaatctcgtacagaacaacaatcgtatgactttaaaatgggattctgcactcttaaggaagaccacgcattcaatcgtaatatgattgataaagttctaaaaacattaactgcaatgacaaatagtattgagggggaatgtactgttattgttggtgttgctgagagtgaagctgatgcaaaagagcatgaaaaaaaattcaaacgcagctatattaaatatggtagcaaatacattgtcggtgtagatagtgaagcagattatctttattctggaatggaccaatatctaaaaataattaaagactacataaataaaagtaaagatattacagatgcatttaaaaagcaagttctcaacaaactatctaactttacgtacaaagagaaggagattattattttccgagcagagcgttcctctgccccagaaacctatgctgggaaatattatgagcgtcacctatctcataatgatgaagtcaaacctggtgcatcaatgatagatttatttatgcgatttcaaaaaaatcaaacaataaatattatctaa

SEQ ID NO: 289381 - DNA, 750 bp, Morganella morganii
gtgataacaatcagttctgttaaaaaaaagtatgaaaaatccacaaatcattctaatccttttattggtcttgatgagttcgagagggattggtttgtaaaaacatatttcaacgggtctgagcatgaaacaaaagcattgtttaatgaatttgtagcttttaatttagccgaaagaataggcttgccttggccaaaaggccatgttgctaagctttctgaaaaagtaaagagtgaactaggcttatcaatttcttatgttattgcatatgagtacatacatagcatggaagatatacccggtgattttaaattcagtgatgagcagataaatgatctttatgggaaatcgatatttgataactggctatctataggtgacgcaaaacccgatacctgcaagttatcaaatggcaatcttctctttatggatgctggaatcgcctttgaaggtgatagtggtgatacatgggatgaaaatggccttatctggacagataataaattatttattgaatcatcgccatgtcatgacggaattttgcattccgcagaaggatataaaccatggatgaataaaatctgtgaaatacctactgattattatcaacttatcacagatagcatccctcaagactgggatattccgcaaagttacaaatcaaaatttgttgaggtattttcatcatcttgtgacaaatttattcctatgatggactcctatattaagtgggaattgagtctccgataa

SEQ ID NO: 289382 - DNA, 237 bp, Morganella morganii
atgcgaaaagctcttattgaattaagtgatgggatgaaatatgcggcactgaatgctggcgcacaaggaactggaagatgcctatttatgataataatgtctaatgatctgaatacagccatcactccagatcgatggcttaaagccatgaataaatgctatgcaaaagctgaagaattaaaatatgaagtggcttacgtccgcggtgagagcctgaccagaccacttactgattga

SEQ ID NO: 289383 - DNA, 927 bp, Morganella morganii
atgttaaaagtcatagatctttttgccggtattggtggtatccgtctagggttcgacagagctttcggaggggttgattgtgtatttacctcagaaatagataaatttgctgttcagacgtatagcgcgaatttcggcgatgataatatctatggtgatataactgagatttcagagcaggatgttccagatcacgatattttgttagcaggttttccgtgtcagccattttcacaggctggacttaaaaaaggtttttcagacacaaggggaactcttttcttcgacattgaacgcattctccttgagaaaaaacccaaggcttttttgctggagaacgtaaagcagttaaaaggtcatgataaaggacgaacccttcaggttattctggatcatttgaaagatgcgggctatgttgtttattacgatgtactaaaagccagagatttcggtatcccacaaaatagagagcgtatatttatcgttggtttcttggatcatgatgtgaagtttagttttcctgctccaactggtgctgatactcgggtaggttctattttagagtcagaacctgatgattcgtatacaatctcggatcgattatgggaaggtcaccaacgccgcaaaatccaaaataaattggacggtaaaggttttggttttggcctttttaatgctgattccccttatacgaatacgatttcggcgcgctattataaagatggtagtgaaattttaattgaccagcccggtaaaaacccgagaaaactcacacccagagaagccgctcgactacaaggttacccagatacatatataatccctgtatctaatgttcaagcttataaacagtttggtaacagtgtttgtgttccggttattgaagcgattgcaaaagaaatgcgtaaagccatgaagctatcctga

SEQ ID NO: 289384 - DNA, 891 bp, Morganella morganii
atgaatagtagtattcagaatttaatccggctaaatgatgatgaagaaaagaaattttctgactttatcaaaaaaaccagaaaaaaactcatatccgcccccaaaattgcggcacaaaaagcgacagcatctaaccaagagttgatagttggcttgctggaaaaacagaaggttactcaagcaatagttcagttacgtgagttagcctacgatgaatttctgaaagaagaatctgtttttaacgcagtaattttaaaggaaataggcgagaaattttcagctccgaaagcaaagctggaagaactttgtattcagttatcattatcggatctgagtgacattgagtcattgacgcacacaatcactgagctatttggtagctattcaggatatatcagtccgtatatctatcagctgtgcttgagtaatactcaatcaagacgttcaagagcaggtaagacattcgaaggaattatatattttttatatgattactataaatacccttttgaatcacaagcctctattggtaaaaaagcattcactgatttagggttgggaaaagtagttgattctattttgccaagcattagtgcatttaatcagcgcagggacaaaacgattgtgggtacaatgaaaacaacgttgcgggagcgttggcaggaagttgtcgaggaagttgctaggtctaaccttcctaatatacatttacttactgttgatgagagtattgccgaatccaaagcagagcaaatggctcgtcataacatcgtattagttgtaagagatcacataaaaaattcagaaacaatgaaaaacaagcgaagtattattgattttgaaacgtattttttagatgagttacctacaacattaaatttttggaaatag

SEQ ID NO: 289385 - DNA, 420 bp, Morganella morganii
atggcggcggcagagaatgcagtaacggtagatgaaattcttgttgtaagggcactggagcaccgcgcccctgaatgggaacgtgccgttatatattcactggacgaaaaaataaacggattaaaccgtgctgcaaaagtacgcggtaaattttttgcgaataaagaccatatcaacggtaaaaagataaaccacggaatagatgtttttttaaaagaaatgcgttgcagttcaaataatagagaaagggaaaataagcgggttctgagtgctattttctttttagctgagatagaaaagcaaaagcatgaattagatttctgtgaattaaatgaagatgagcaattgcgattaatagaggcaattaaccaaataaaggcagtggcatccatatttccgacagacttagcaattaagtaa

SEQ ID NO: 289386 - DNA, 165 bp, Morganella morganii
atgagcaaaattatcaaaacgaaccagcgtgtaggtgacagcatgccacctggtctagccaaagctatttatgagcaagccaaacagcagcaacagcagtcaactaacacgcagaccaatcagtcctctcctaaatccggtggaggcaacagcaaaaatcagtga

SEQ ID NO: 289387 - DNA, 468 bp, Morganella morganii
atgaaccgagcacaattgttatatcagatttattattcttaccgactgcatacgatgtttagtgtactactcggaagaatagataaaactttatcatttttacttctgttgctcggttcatccgtcatcgggaatataggtaaccatgtgtttattggcatttgcattgcaattattacatcaataaggatggctttttcatttgaaaaagcatctgaatccgccagaaaacaagccatgagttacttaaatttatacacatccaaggtgctaaccataccggaagatcagctaatagaaaaattgatgagtattcaagcaagtgactcgaatgtttggatatcactggtcagtgccgcagaaattcgtactcggctcacctttgatgagcctattgaaactacactgagcttctgggaaaaatttatggcatttttgtcgggtgatttaccaaaagtaaaaaagtaa

SEQ ID NO: 289388 - DNA, 153 bp, Morganella morganii
atgatggaacacatcataaaaaccggcaggtgcgaaggtgatctggttgccgatttctttatggggtcagggacgacactgaaagctgtgctgggacataaccgctgggagtggaaatggcagcagaacggtttgagcagactaagagtctga

SEQ ID NO: 289389 - DNA, 1020 bp, Morganella morganii
atgggttttatgtctaaactgcgtcagttttttttacctaataataaatccggagtcgcggataagtgcttagataagaaggatgataaacgaaaacgtaatgcgaatattcaaaaaaaatggttaacactaaatactccccctttttttggcaaagcgtgtatgtcacccaacaaacgctgggttgttggatgcagtgatgatgatggtcacggtactggtggctgcagggataaggggtgcggtcgggtgttattcttagattatgagaatgataacgttgtcttcgagttgacaaatattgctcgcccagtctcagctgcagtagctgacactgggcgatttctggtgttggattgttgctttggaacagagcttcaaagtgaattgattactattgatccagataaaacagaagtatacagacgttacttaaaggcgaatattttcagcatggggatttcaaaatgtggtagatatgcaattttgcaaacatgcaacgcaccaaatgaagatggaaatattttatctctgatggatttgcaaagtcagtctgttctattttctgtgactccgtctacgagttgggcagatcgttataaatttaaggtgggtactgatggtctattagtttccgttctgtgtgaggaaaaaaatgtaggttggtttagctacgcagcagatggaacatttaatgatagctcggcttatctaaaggctcgtttggaaaaaggcgattatagcgtaaaaattctggcagctaaggaattattggatttaagtgccgagaaacaagatgccaagatagcattagaagttgtagataccgcacttttagatggagccaatatgcgatccgactggagcgctagtgcgcataagatacgtggagaggcatttgaaatactggatgaaccatgcaaagcattagaggcatatgagaccgctttagggctaaaccctaaaattggtgtgaaaaggaagattgccgctataaaaaaatcattaacaataaattag

SEQ ID NO: 289390 - DNA, 459 bp, Morganella morganii; identical to SEQ ID NO: 281564

SEQ ID NO: 289391 - DNA, 354 bp, Morganella morganii; identical to SEQ ID NO: 288973

SEQ ID NO: 289392 - DNA, 1269 bp, Morganella morganii; identical to SEQ ID NO: 282109

SEQ ID NO: 289393 - DNA, 951 bp, Morganella morganii
atgtacaaagggattaagcagatagatccgcaatgggtcacacccgatttaacggatgccaatttacaggatccggccagccctgatttttatgaaccgacgtactgggttatcggcggccgccggtaccacaaatcgcatttcgtgaagttcgtgccgttccctgtgccggacattctcaaacccacctataactatttcggcgtatccgttcccgaacgggtgtatgagcgtgtttatgcctctgagcgtactgccaacgaagcaccgcagctggcgatgacaaaacgcctgctgaccatcggtatggctgatgttgagggcatggatacaaagactatccacgaaaatatgctcgattttatggatatgcgggacaactacggcgttcagacggtcggggtgaatgatactgttcagcagtttgatacctcgctggcggatctggatgccacgattatgacgcagtatcagcttgttgccgctgccgcaaacgttcctgcaacaaaactgctcgggacaaccccgaaagggtttaactccaccggggaatacgaggaagccaactaccgagaagaactggaaagtattcaggccaatgacctggaggagctgctgcaacggcactatgacatgttacagcgcagtgaagggctgggaacggcggcgttgtcggttacctggcggccgctggacagcccgaccgctgtcgaaaacgccgatattcagcttaagcaggcgcagaccgattccgcgtatgcggcggtcggcgctgtcgacggactggatatccgcaaaaagctggcggcggataaggaatcggcattttacggtattgacgtgaacgaggacgattatgccccggaaaatacgggtacgaacccgccgggcggttatgaagggcaaacccctgctgtatccggcagcggcccggagccgttatcagcgtga

SEQ ID NO: 289394 - DNA, 2139 bp, Morganella morganii
atgtcattgatggatacctttgttcaggtctttgaatttgatacccggcaggctgacagtgcatttgaccgtgtgcagcgttcaacggatgacattatcgacgggatgaagcaggcgcagactgccgcgcagcagggggctgattctctcggcggcgtgttcactgaactctggcagtcattacaggggctgtccggtgagcacgctgttgatttttccacgaacgcggctgatgtggcagagcagaccggggcggtaaaagcgcaggtggatgcggtaaccgattccctgtctgaactggaatctcagcaggcgggctctgatgccggatggcaggatattcaggcctcactgacgggtacggaggccggttatcaggcgctggttcaggcagtggcagcactgagcagtgacaccgccgttctgacggatgaggagagtcgcggtaatgcagtccggcagctggccggtggcatcattaaagcactgcagggggattaccgtgaacttggccggattgcggaggaagccggtaaaaacagcgttgcagcaggcagcagcgaagtcgcggcacagaaaaaagtacaggatgcactgagcaaaacagacgtacagtaccggaaggccggtgaatctgtggccggatttgccaaaaaagccctggcagctgccggcctgtttatgagcgcctctgcccttgtcggtgaatccgttgcccgtgccgctgaaatcgaatccctggataaattcggcaaaaaaatcaatgttgccgcggcggatgtggatgcttttgccgggtcagtggctgaactcggcggtacacgggagtccgctcaggcagatatgggggcaatggcgaagtcgtttggttttgccggtaactccatggaaaaaatcctgcggacggctgacaaagtgcaggggatgaaattcgataaggccaaagccacactcggtgcgctcggtgtgtcggatgataaaaccgttgagctgatgatgaaaggccgcaaagaactcgaacggatgatgggggtgcaaaaggaatattccggcatcaccagagagagcattgagcagtctgtcaaattcaacaaatccatgcagagttttaaacagtcctccggtctgctgaaaaacagctttctggagatggtgatcccgatcctggcaacctgcctggaatgggtcagtaaatttgtcggcttctgcaaagaaaacaaaaccctgatcacgggattttttattgcagtcggtatcgcactggcaacctattacgttccgccgatgctcgcggctgcggcggccacactggcggcaacatggccgattattgccattattgcggtcatagccctgctggcggcagcgtttgcgctggtgtatgacgacatcatgaatttcatcgacggtaacgattcgatgattggccggatcctggataaatatcccggactgaaagccgtcattctggcgctgtgggacgttttcaaaaaactgtttaatttcattattgatgttgccgttattgtcggcaaagcggcagctgatgctttcaatctcattattgacgccggtaaatcgttgtggaactggctgctcggttttatcaaaagtctggggaactggggaaaaagctttcagggggttttcgataacgtctccaatgctgtggttggtattttcaaatggctgtggaaacagatagaagcttaccttggctggatcaacaaagggctgaataagattaaagagggctgggcggcctttaaaagctggtttggtgccggtgatgatgatattgaggttgaccagaccgttaaccgcacggtgaatgaacaggggcagattgggtacgacatgccacctgaaaaaacgatcagtgaggaggacgcggcaaaaatggcgcaggccatgaccgcacatctttacggtgtgtcaaatgacccgatgaaccctgtcaccagtcaggcgatcagcaatcagtcgacgaccagtaatgaaacaaacatcagtatcggtgaacttaaggtcgaaacacaggcaacggatgcacagggtatggcggcgggagccaaagatgcactcggatctcagttgcaggactttggacatcagacaaatacggggctggggaaatga

SEQ ID NO: 289395 - DNA, 663 bp, Morganella morganii
atgacacagactattcagcagttagcgtttcactccgaccttctgagggcgatcctgtggcagtacgaaggggcggataatctgaaagcgctggcccgttttaaatcggactggtttgaacgggcaacagccagcttctggcagaactggtaccgtgatgtgtttaatatcgatacggccaatgatttcgggttgtcggtatggtcccgtatcctcgatgttccgctggggattgatatcccgccgagtgaaaaagaaaaaaccggtatcggattcggcaggaagaaagccaatttccgggcaaatttccggcgcaatgccgattacaccctgtggctgacacaggaacaaaaacgtctgattatccggatgcggtactttaacctgacccaaagcccgaccgtcaccaatatcaatgaatttcttaagcgttttttctggaatgctgacagtaaagtctttgtgctggatccgctcgatatgacgcacatgtactatgtcttcaattttaatccggacgagcgtctgcgcgttctgctggaaaactttgatctgatgccgcgcccgtccggggtgggtgtcagataccgtattgtgacgaaaaaagccttcggtcacggcgaaaaccgtaaaaacttcctggaaagtaacttcggagagtaa

SEQ ID NO: 289396 - DNA, 171 bp, Morganella morganii
atgaccatcgtcaatcatattacggtgacaggaaatggtgacgctgtacttgcgcaggcaatgaaggaagccgcacaacaagggacagaagcaggcgcacagaaagctcacgcgatgatgttacaagactttcaaagtaatggtgcagcacgcagaacattaggagtttaa

SEQ ID NO: 289397 - DNA, 918 bp, Morganella morganii
atgtttgatgattttgattttaacttactaagctcagatgaatttaaagaggattcagtcagagaagagttgattttaccaattattaaagctcttggttataaagcatcgggagatagccgtataatcaggagcaaaacgcttacacatccatttgtctcaataggttcacagccaagaaagatttcaatagtaccggattatgtttttctttctaacgaccgaccatattggattcttgatgcaaaggctcctaatgaaaaaataaccaaaagcatgcatgttgagcaagcctatagttatgctatacatccagaaataagggcagagatgtatgcattgtgcaatgggaatgaatttgttctatatagcatacgggaactccacccaatactcagattttctttaaaagacattggtaatcactgggaaaaattatttaggatattaaatccagatattaaagccaatccggatgttttgaattatgcgcctgattttggaattcacattcgaaaaatgggtttggttaaagatggttcttttagtgccccagctataaacactaaatttattagtcgattgagcgaacggtcatacacgtgcatatctacaatacccggagatattgatatggccatttctctggactttaacaaaaaaacattcaaacagctacttaaagtccttccatcagaacaagcaaataaaattagacaggctttaggtcaacaaccttttcacatacatttctctgaaaacgatcctgacgtaaaattcggaatcacaagtaatatcagtaatgaaatacatcacaatgctgaagaaagctacattcctttcatagttaaagaggtatttccttataataactcaatcgacgaatgggaagaattagctaaaagagaaatagagtaa

SEQ ID NO: 289398 - DNA, 759 bp, Morganella morganii
atgagcttgcaccctgaaatactatttcattttacagataaagacgggttgttaaatatacttgaacacacatttaaaatatcatacgcgagagaaaggatacaaggtaagaatgaaataagagaatttggtattcctatggtttctttttgtgatatcaaactttccgatctaaaggatcatattgataagtatggggattatggtattggtttaaataaggcatgggcaaattcaaaagggctcaatccagtttggtatgtaagtaaaaatagcgaattccccgatgcatttacctctgcattaaactctttatatcgaaaaatggattctatattggacaataaagagtataaagaatttaatgaaacttacatgaaattcatggatatatatagatatcttaaaaattacgaaggggaactaaaaagatccaaggaagtaattgaaaactataggtttgcggatgaaaaagaatggagattcgttccaagtatcagcgaagaagatatattaccattcgtacctattactaaaataaaaacaaaaagccagaaagcggaatataataataagatcagtcatcttcgcttgagctttgagccaaaagatataaagtatatcattgtcaaagatgatcatgatattattgatattgttaatcatcttaaaatggttaaaaatagattctcttctcttgatataacacaactacaaacgcgcatattgactactgagcaaataaaaactgacatgtga

SEQ ID NO: 289399 - DNA, 2967 bp, Morganella morganii; identical to SEQ ID NO: 5007

SEQ ID NO: 289400 - DNA, 2316 bp, Morganella morganii
atggcctgtattacgcctgatatgagcgaagagctgggactgacctcatctgcaaaaggggatttgacctggtggcataacggagagtgcgcggatccggcatcactgccggggatgactctgcgggcggattttgctgccggggcactgcgtgtcagtctgccgcaggcctatctggaatataccgcagataactgggatccgccgtcacgctgggatgagggaattgccggttttatccttgattacaacctcaatacacaactgacaaaacagcgcgaggccggacacagtgaccggcaggacatcagcggtaacggcaccaccgggctgaatgccggtgcctggcgtctgcgtgcggactggcaggggcgctattcgcgtactaatcatgaatcggatcaacgctgggactggaaccggttttacgcttaccgcgcgattgcaccgctgcgggcaaaattaacactgggggaaaattatctcacctccggcatgtttgacagctttcgctataccggtgtggcactggatacggatgacatgatgctgccgccgaatctgcgcggctatgccccggaagtctccggagtggcgaaaaccaacgccagggtcaccgtgaaacagcagggacgggtgatttatgaaaccacggttgccgccggaccgtttcagatccgggatttaagcaatgcgctgtccggcaaactggatgtggaagtggcggagcaggatggttcagtacagacctttcaggtagatgcggcgagtgtaccgtatctgacccgtccgggactggtgcgttacaaagtggcgctcggtaaaccctcggaatatgaccaccgtgtcaaaggaccggagtttatcagcagtgagttttcatggggtatcagtaacggctggtctgtttacggcggcgggttatttgccggtaaatataatgctgtctcggcgggtatcggccgtgacctgctgatgctgggggcattatccgccgatatcacccaatcccgcgcgtcactgccggacggtgaaaccaaaaaaggcggctcttaccggctgagttattccaaacggttcgatgccaccaacagccaggtcacctttgccggataccggttttcagagcgggattttatgaccatgtcgcaatatctgaatgcccgttatcacaattcagcggtaacgggtaacggcaaagagatgtacaccatgacattcagtcaatcgctcagttcgctgaataccaatgtgtacctgaattttaaccaccagacctactgggatcgcccggcaagtgataactggaatgtttccacctctcattatttcgatatcgggcaggtgaaaaatatcagcctgaatttatcggcttaccgcaaccgccacgaaaacggacgcgatgacgggatgtatgtcgggctgtctgtgccgtggggggagagtggtagttttggttacagcggacaattcagtaaagggcagaacagtcactcggcggattatagtgaccggattaatgagcggacaaattaccgtctcagcacaggagtgaccggcgatcaccgggtcaccggtaacggttatatgaattatcgcggcgataaagcggaagtaaccgcaactgccggattttccggtgaacgctacagtgcggccgggctgtctgtacgcggcgggtttaccgccaccgccgaaggtgcggcactgcaccgcagtggtgtgatgggcggaacacggatgctggtggataccggcggagtagctgatgttcctgtccggggcggcggcgctgaaaccacaaccaactatttcggtaaagcggtggtcagtgatgtcagtaactattaccgcagcagtgtcaatgtggatctgaaccggctgagggaaaacgccgaagccacccgttctgtcgtgcagggcacgatgacggaaggtgctgtcggttaccgccgcttcggtattgtctcaggacagaaagcgatggcggtactcagcctggctgacggagatgttccgccgttcggggctgtggttcagaaccacgatcatatacagaccgggatggtcagtgaagatggcatggtctggctctccggtatcaatccggaagagacaatgcaggtgtcatggggcggggatgttcagtgtgaaatccgtttcccggcgacgatcccggacggaaatctgctgttgccgtgtgtctctgcgtcgaatccggtacctgaaaagtcagaaaaatcagtaaaaacagaaaaaatatcccgttggctgacagatgctgacgcggaaaacaccagagagagtaagcaatga

SEQ ID NO: 289401 - DNA, 222 bp, Morganella morganii
atgttaattatcacccccgccaaaccggatcatttcccgcgcctggttgccatctgggaatcatctgtccgcgccactcacgattttttatgtgaggctgatattgaaaaactgcatccgctgctgctcaatacctatctgccgaacctgaatgtggtagtggcgcaggatgaaaacggtgtgatcctcggttttctcggcacagacgcgaaccggatttag

SEQ ID NO: 289402 - DNA, 1020 bp, Morganella morganii
ttgaaaaaatatgcgttttggaataacaaaggtggtacaggtaaaacgagtttatcgttccagtgcatatgtagatacgcagagcttaaccctgaagaggagatattggtaattgatgtctgtccgcaggcaaacctatctgagttgttacttggcggattggtagggaagggaagcgaccatttattatcgagacaagcacaaactgttagggctacacttggtggttactttcagtcaagactccctactccgtatcaaaaaccaactattaatggcacggattttcttactaagcctcatgatttcaatgagagcataccgcgcaatatcaacttgatttgtggtgatccactgcttgaattacagtcaaatgcaataaacacattatcaactcagcaaataccaggtactaatacatgggtatctataattgactggattaatgatttattagccagcatgaatggccgattcacaacgttatttgttgattgcaatcctagtttctctatctatacgcaaattgcactggctgctgttgataaattaattttaccagttatggctgatgattcatcaaggcgggcaattcagaatgctttctctctgatatatggactaaaacttccgtctgaaatctatgcaacatatgctttcgcaaataaattgcgtgatgcaggaagagatctgcctaaagtacacctgattgtaaaaaacagaataactcagtacatggggccagcgtctgcttatgcggcagtatttaggtctattgactctgatatagttcaacttcttaacactcacggtgaaatttttactttccaaagcgtaagtaatggcatggttgatataaaagactttcaaacaacaggtgttgtagcctttgccaaggggtgcccattctcaattcttccatcaggaaggattagtgtgatggggcaaagaatacgagtaaataatccatacagggagtcctgcctctccgcaattgatattctggttggtaagttataa

SEQ ID NO: 289403 - DNA, 828 bp, Morganella morganii
atgcgtaatttgaccgtttctgtgctattggcattatgtttaaccggcagtgcattcgcagataacactgcagctgtcacaccagcgacaacaacacctgtcaccgcgccggcagcaaccgccggtcagcctgctcagacgcctgaacaaccggcggccccggtatccgcgacagaggttcctgttcaggaaatcagcgcagtcccggcagacggtaaccgtggttttgcggctgagctgtccgtgatttccatgtatcagggcgcggatcttatcgcttcccgccgccgtatccgccgtgaagcggcagcaatcaaagatgcccgctcgctggatgaagcagctgccatcgccgatacattcgggaaaaagagcgtcacccggatgttggtgcttgatgccgtcaatgagcggactgcatctgaaaaaagccgtgatctgagcggcatcaaagaccgtgtgacattccgtcaggagcgtatcgttgccggtgttgcccgtcatatgggacgcggtaacggctatctggccactatcggggctatttcaccgtttgtcggcctgtttggtaccgtatggggtatcatgaacagctttatcggtatcgctcactcacagaccaccaacctcgcggttgtggcacccgggattgcagaagcactgctggcaacggcactgggtctggtcgcggcaattcctgcggtcgttatctacaacatctttgcccgtatgatttccgcttaccgtggtgacctgggtgataccgcagcacacactattttatggctgggccgtgatctcgacctggcagacagcaaagcagggtaa

SEQ ID NO: 289404 - DNA, 1548 bp, Morganella morganii
atgtcagaaccacgcctgggtaatctgattaccgttttactacctgcgcgtagctacaagatcaactgcgctttgaccactgaaaaactgatgcctggaattgaacagtttgcatgtcgcttgctgctgatttttgaccagctctaccccagcgagttacagaattactttggtctaaccgaccgcgagcgagaggtattgcttgatggcttgctggcgaacagactgatcagcattaaccctgatgggcatattgaggctagttcattcctacgtaagcatgcagctagtaatggtgggaagccaagtttagttaagtatcaagaacgtaccgaggaagtggcattcgatctactaactctttcaatatgtaaaccacaaccgaatcgtcgctttacttctggactgccagagttattacctcggcatcagatcggtggagatgctgcagcggtaacagaggcttttagttcccagtttcaccaccatcttttgctcagccgcaacagcgattatgagcgtcaacggactagattatataagataatgggctgtagctcgcatgaaatggtgcagcttccaatagagatagaggttagctacgatgcttctgctggtagcattgagccgcagaaatatactcgctcctatgagtacttaggtaacacccgactgccgctttcaaatgagctggaggctcatatcgcagattttttgggagaacataagctagatgagtttggcatcgactgtgacgatttctgtaaactagcaaatgataaaatgttgtcgcaatttgctaatggctatacgtttgactattccggctggatagaggctcgtgaacaacggaaaactggctacggtacttcattgactactggcatgttaggggctgtatatttaccgcataactctaagctgttcattagtatgttgcataatgcattacgtgattatgtaggtaaaacagttccaaaggccctgtggtatagcagtaaagtaccactttggggagctaatggcagccaactttcgcgttttaatcgcgatcttagcgatatccttggcaattatgccgacgataaaattgctcgtatttcgcttttacacccaagcgctgatgaaggtgagaaacgtcaaggacgtaagcgacactttggtcgttttcctaccggtattggccttacttcagaggctaagtttgatcgtttggagatactcttaattcctgatgtgattgctttggtgcaataccacggccaacctaattctgatagtgcattaaccctgcctattggttatataaccgttgaaccagagcgtttagaattacttaaaaacctaatgattgaacgagttgaaggggcaactgcaaccatcaattggtctgaatataaacttgaaaatttaacttcgctattacctgttgagcttctgattaaactagacaaaaagagtggtgaagacgtagaaactgcaatcctccaaaagcacattgttgaccgcggtgaaattgcacgagcaattctatcgttacgtaaataa

SEQ ID NO: 289405 - DNA, 4968 bp, Morganella morganii
  misc_feature (276)..(285): n is a, c, g, or t
  misc_feature (2229)..(2238): n is a, c, g, or t
gtgaagtatcagatagtaggtggtgcaggcctgcaccgcagcgaaaccaaaacagttgatatgatggtcaagcagttaccagatagttggtttggttatgctggcttggttgttactgatagtcaaggatcgatggaaatcgatacgctaattattactgctgaccgactattattagtcgagcttaaagagtggaatggtaacatcacatacgaagggggtaagtggctgcaaaatggtaagccacgaggcaaaagtccctaccagattaaacgnnnnnnnnnngcgaccaactcgggtctcacgcagagctatctcagcccacaatgtttgcatgttgaagctcatgtagtgctgtgtggcagtgctggtcctgagaacttgccatcaagtgagagccgctatgtccatactcgtgatgaattcttgactataggtaaccccaaaaattacgaaaagctggtgcaagacactaacttttctcatttatttgaagggggaaaacctcggccaaattcagatgaggcattaccgatcattaagtctttctttgaaggcccaaaagtaaggcctttaccacttaaagaaagcggttatcttgcaagcgataagccattctttagtcatcctcatattgtctacaacgaatttagggctactcataaagataatagtcaacacaggggtctgctacgtcagtggaactttgatgccctaggtgtagcaaatgcaatgcaaacattgtgggctgagatagctctgcgtgagacccgagttggtcgcttagttcgtcatggcagtgcaactatgcaggattatatgttacgtgcggtaagtgaattatccgaggaggatataactgatgatgcccgtgagctgtatgagttacgccgtagttttagccgactggatgagatactagatagcgaagctgacggatggagtaattctgatcgtattgatcgcgttcgtgcattattggcccccttctctgaattacatagcctaggtatcggccattgtgatattgacccgcacaatctatggtacgcaggggatcaaaagagcattgtcgttactggttttggtgcagcctcactggaggggcgtaatagcctggaggcattacgtccaacattgcaaagtgctccatatactctgcccgaagatgcttttgaagaagcagttgagccctatcgcctagatgtattcatgttggctgtaattgcttatcgtatttgttttgcaggcgaatcgttactgactcctggacagatgccagaatggcgagttccattgactgatccgtttagcggcgttttaaataactggtttgagcaagctcttaaccttgagtcaaataaacgctttccacgtgcggatataatgctcaatgagtttaatgctgcaactaaggatcatagccaagaatttgatgaggctaaccagatttatgaagagttaaagcaaaacaaattctttcgtgaagggatgaacagcgttggtgtgttaatcgagtttcctccattgcctgaacagttgtctaaggtttaccctgcgcttgctgccattgctacgactggcagcatcagttatcactgtgaacaagatggaaaggccctacaggtaaaattgtgggatagtggaattttgaaccctcaacagcctggtgttaaccgccgtatccacgcttttaagcagcgaatcgataagctaacgcatataaatttgccaactcctgaggtgtattcctgtggactgttaggacaaggcggcttgtatgtagtgagcgagcatgtggatggtctgtcgtggtcacagtttattgctgagaacacattagaacaatcccaacgtttcacaattgcggagaagttgatcaacaccattcatgcttttcatgaaaagcagttacctcatggagatctttgcccagagaaactgctagtacaaatcggggagcagacagtaatcactctgattggattgtttgaattcagtgatgaattaactgcagatattcgctaccagcccgatcatcctgaaagtactgatgcttttggccgagattgctttgcagtatatcgtatggtagaggagctatttagtgaagatatgccagtaccggtgcaaattgagttagaacgtgcaaagcaaaccgttgacggtatacctatcgcgctcgatcctttgctgcagtcacttcgagaaccggaacaagctgagatnnnnnnnnnngctgagatcaagcaagttgttgagtctgagccacaggaacaagcaattcctgtttgctggggtacagatgattggccacaagaagtgaagcgtctagaacaaaatgatggaatctatcattttcgctgtcgctggtcagctaacccacgctttgcgcatgaattgcgttgttacatcactggcctaggtgagcagctattggtagacctggatcctgacaatcgaactattaatagaatgttgtaccatacaggattatcgatcgaagaaagtataaaggctagtaaatattcccaagctaaaattaatactcaactttcattacagcgtggctcacttaatcagcgtaatacttttattgaactgctgtttaatctcgagccggtaattgatgccatcattgagcgagctaatcccaatcaagagatggatgaagatgacttcgatagtagtgagtcaagtccagttgagttgtggcaggcattgtctgacactgaagtagagctacgagatatagtcaacatcgattcatctgactttcaggaatcaccaagtggttgcttactctatccatacaccacggaatccggtgctgacctcagctttgaacttgatgataagatcattatttatattaaagataagcgtgaatcagtacagttaggggagttgcggctaagcgagactacgccaaatctattggctattcgcttagacttcgacgctgctcgtaagcgaatcaatagcggcagccagctacaattggagtcgatccgtgacaaatcatcacgagagttgcgtcaaaaagcccttcaacgagtaattgaaaacaaagctgagatccagcatctaccacaatattttgattatcatcaaaagcccaagatgcagcaaatacagccgcgaccatcagctgaaatattacgtgagctttatgaccagcctgggcaacgttttaatgaacaacaacttatggcgttccaacagctagtcgaattaggacctgttggagttctgcagggaccacccggaacaggtaaaacaacttttatttcaaaatttattcactatctgtatcaacattgcggtgtgaataatgttcttctggtcggccaatcccatgcgtctgttgataatgtagccatcaaagctcgggagctctgccatacaaaaggaatggagctagatacagtacgtattggtaatgaacttatgatcgatgagggtatgctaagtgttgcaactaaagctcttcagcgacagattcagcataaatttcatcgtgaatatgatctgcgagttagctccctaggaaagcgtctagggatggctccactattagtcaaacagttatgtcagttacatcgtacgctgaatcccttgatggtgacatatggtcaatatagccgcgagctggataaattagaacagaccaagagcagtagtattagtcatcaagagcgactgactgaattattagaacaaagcaaccagcttaaactgcgaacgcaagaaattattaactcaatattcgatgacagcttgctgaaaactctcgtctatgatgagaccttgataagacagttggctgagaaaattgccatacaatgcagttataacaaccccgagaaccttgaacgttttctgcagctattagaaatgagccaagagtggatggatgtattacgcggcggtgaggctgggtttgatcgatttatgttcaaaagtaagcgattagtttgcggaactcttgttggtgttggtaaccgtcgactagagctagctgagtctagttttgattgggtaatagttgatgaggctggtcgagcacaagctgctgaattgatggtagcgctgcaatcaggcaagcgagtgttgctggtaggggatcataagcaattgccgccattctatcatcaacagcatcttaagttagcctctaagaagttagaactcgggaaagggatcttttacgagtctgattttgaacgtgcttttaaagcaacagacggcgtaacactcgatactcaatatagaatggtagaaccaattggcgagttagtatcggagtgcttttacgctcaagatatcggtaaactgcattcatctaggaaagtttcaccagattggtattcccagttaccaagtccttggaacaaaactgttacttggatagatagctctagccctagtgaagcaggtgcagaagagcataagggtaatggccgttactacaatcaacgagaagttcggctactgttagaggctttgcagtcattgtcgagcgatgactgcattgcacaacttgagcatactattaccacagagcagccatatccgattggtataatcacaatgtatcgtcagcaaaaagaggaaattgacaatgctatcagtcgggccgaatgggcagcatcgttacgtggtttgattaagatcgatactgttgattcatatcagggccaggagaacaagataattatcctcagtctggttcgcgataatcctaacaagctacaaggtttcctacgcgatgcgccgcgaataaacgttgctatttcgcgagctcaagaaaggttgttgattctgggagctaggcgtatgtggtcaaagaccaataatgactcagcccttggaaacgttcatgaatttattagtacacaggttgccgtagatgaacccaactaccaaatcctgtgtggtcaaagtctgcttggagataacaactaa

SEQ ID NO: 289406 - DNA, 2598 bp, Morganella morganii
atgtctgaattagcacaagaatcaatcgcaaccaatgacttcgaaaaatggctgaatgagcgtaataagtggcttcaaacggcagcaaaacagcttattgagaataaacggttacccaatgaggtcgaactcactgagctggttcgactctgcaaacaggaagcggctaaacaagatgattctgggttcttgaaggttgaacccggttcattctcagcagggttactccagcgaaatgtacgtgttgaagaagtaagccaagtatttggtgtaaatgccatcaagcctggggcatccttaccattcggcgctggtagtttagctgttatttatgggcagaatggttcagggaaaagtagtttttctcgtctgctcaaacaactctgtggctcacgttcaagggacgaaatccgcccgaatgttttcagcaacgaagagcatacatgtagtgctcaatgtcgaattaccattgatgataaacctgtagaaatcaattggcgagctggggctgccccacatccgatgctcaagtatgcccaagtatttgactcgaaaactgcggctcaatatatggggcgcactgaatcaagctacgaaccaagcagcatgcgttttatatctttgctcattcagatctcaggaatggtttctgaacaactaagtcgagagaaggaaaaacttgtccgtgctcttccacttttcccaagtgaccttacagagaccgccgaaaatacttggttcaactctcttaaagcatcaacctccgctgaaaaaattgggtcgttttgccaatatggtaatgatttggaagatgagcgtattaaaggtgaagctctgttagcagagaaagacatcaagggacgcctgattacaattaataaggaagagattgcctctgaaaacattaagcaggccatgaagttattgaaggaaggacttgcggatgggaaagccgaggaattgtttaaggcaaaagaattggctgttgcagcaagaaaggctgccaacatagttgcgcagcaggcattcgcaacagcccctctacaaggcgttggtgaaacggcttggaagctaatgtgggagcaagccagaaactactccactgttcatgcttaccatagccgcgaatttcccgttactaatgcagatgcatattgtgtgctctgccaacaaaaacttactgaggaaggctcatctcgactcaaaagttttgaggctttcgttacggctggtttagagaccacggcaaaaactgcggaagccactagtgctgaactcattacgaagatcgttcaattaccttcaatagaggattggattgctcggctggctcaattgaaatttgatgagacctttgctcgtgcctgttatgaaactttgaaagcaaggcgctcacagtttgaggcatgcaccgccgttggttctatcgtcgcattcgattgggcacttattgatcagatagttgaaaaacgtgctgtcgacttaattgctgagaagattagtttgatgcaattgcaacaagatgggcaacgccaacaacttgaaaaacgcattaagcaactcaaggcactgcaatggttatgtcaaaacaaattggcaattctcgccgagcgtgaacgcttggtggcagtggatttgctagataaagcagtgagactaacggccagtaattctttgacaactaagcgaaccgaactagggaaaactgagcttgatgctggatatcagagccgttttgatgcggagttaaaggtacttggtggacggcgtttgccggtagtgccgcagagcaaagctcaaggcaaaggagtaataacttttgggctaaccctcgtcggggcaagggctggcttcactcctgatgtaatactcagtgaaggagaagcccgcattgttgcattagcggcattcttggccgatacgactggttcgaatcagttagcccccttcatctttgatgaccctatttcgtcattagatcaggacttcgaagagcgggttgtagctaggcttgtcgaattagcgaagaccagacaggtcataatcttcacacaccgcctttcgcttgtttccatcattgatgctgtaattaaaaagcacagtgagaatccggctaatgaaaaaattaaccatacagtgcaatcgcttagacgtttagataaaatttcgggaatcttggcacaacacaacttgcgggatgccaagcctgaaaagtcgcttaatatgattagggatcatgtcatccctaagctcaaaaagcatcaagtagatgcagatgctgatatttatgatcttacggcaaaaagtgcatgtagtgattttcggataatcttggaacgaatagtagaatttgtccttttgaatgatgtagttgtccggttcagacgtgatgtcaataccaaagggaagctgcggggcataaccaaggtaactgcagaagactgtgatcttattgacgcgctgatgaccaagtattcagtttacgagcactctcaatccgatgagctgcctctagttccggttgaacttgatgaattcgaaaaagatgtattggagctgattgtatggatcaatgagtttaaaactcgaatcggctga

SEQ ID NO: 289407 - DNA, 537 bp, Morganella morganii
atgcgtgatgtgatttcgacaatgaacagcgttagtacatcatccggacgaatggttgaaatcgtgtcagtgatcgacagtattgcattccagaccaatattctggcactgaatgccgccgtcgaggccgcgcgtgccggtgattccgggcgaggctttgcagtggtggcgactgaagtcagatcactggctcagcgcagtgcacaggcagcacaggagattaaggcgctgattgatgagtctgtgcagaatgtcaaaaccggcagtaatcaggtgcatgaagccggagaaacgctggcagatctggtgatggatgtgttgcaggtaagacagctgatgagtgatatccgcgttgccggtgaggagcagagcaaagggctggccgaggttacgatggctgtctcagagatggataccacggtacagcagaatgccacattaattgatgatgctgcttcacggacgcaaatcctgcgaagagaagccgaacagctttcgcagatggtatcggcctttaaattaccggaaccgcgttaa

SEQ ID NO: 289408 - DNA, 1074 bp, Morganella morganii
atgaaacaaactatgaaagtgggcctggcactttccggtggtggagcgattggtgcttatgaagctggtgtcgttaaagcgcttgcagagtctagaaccagcgttcatatggtctctggggctagcattggcgctctgaacggagcgattatagcctcttcttcaggactgccacaggcggcggaacggatggtggaaatctggcgtcatttgggtaatagcaccgttttgtcagtcaacaaatcagcctacctttctgtgttgttgcagtttggcattggaatggggttctcccctatgcttagtaagacaggaagtatgctcagtacggtcctcaatcgcgcggcgcttattactgggataaaaggatttgaaaatcagcctttgctctcggatcaaccgttaattgctctgattgatagttaccttgacatgaatgctcttgccatcggtttaccgcttttcgtctcgttgtatcccactgaaggtggattgaaggatatagccaactgtattgctgctgaactgggcttaggttcaactcgcgattctgaattttatcatgtgcaaaacttacccttagatcagcaaaaagaggcgctactagcctcggcggcactaccgttgctgttcaaacctcgtgaagtcaacggtacttattatagcgatggtggaatggggggctgggcgagtacgcagggtaatacgcctgtaacccctctagttgaagctggctgcaatatggtgatcgtcactcatttgagtgacgcatctttgtgggatcgaaagacattccctgatactattgtgctggaaattcggccacagcgctctctgcgccgtaacgatggggcactaggcggtgcaaaagatttgctgggctttacagcgatgcatattgattcatggattgaacaaggttatcaggacacaatgagcatacttgatcgcatcaacaaaccgcttcaggctcatgatacattacaagcgtctagttctgcacttgagcgcagtctggtaggaaatgccacggtggattcggtattaaaaaacgtaatgtcccgacttaaatga

SEQ ID NO: 289409 - DNA, 903 bp, Morganella morganii
atgatcacaattcaggaagcacttcccgacaatgaggcatgtcaggttctagcgtgcctgccggaaaagtttattgttgatttagccaacggtatcgatattgtgcaagaccacttacgggtgcagaaaaaccgtagcttcttcacgcgagtgaaagaaaagctctgtgggcaatcttcctctcgacagcacgcaattaatagcacgcttgtagatggagttgaagcctcaatgatgtggctcactgaacttacctcttctttggcaaccactaactatgccctaacgcaggtgaatgacagagtgacgtctctggtcaatgataccgtaatgatcgcccaatattctgctgacacccgtgagcagttgaacgtactatctttacaagtgaatcaaaagttgagtcacctcgaacagcagcttcatcgcgttgatatgctgcaacgtggacagctacatcttgaacaaatattttccagctggagtgccgggcgctattctgcactgtcgttagctggacgctgttatgtcgcccttgaggagctacgttggggagcattcggagatgtgatacgccatggcgatacgcatcaggcaagccagctgatcgatatcctcaaaaataaagcattagctcaactcgctaccgatcacaacagtctagtgagtacgcgacacgacactcaaagctggttgtcatggaatacagacatgattcaacaaaatgactggctcgatactctcaactggatggctgactggtgtactgaagatactcatcctgttatctggtctactacccaaaaatacgacgatttaccgttacgtatgccacgactgtgttcagcagagcgaatttctacaagcatggttgatgaaatgttcagtcaggaggttgcatga

SEQ ID NO: 289410 - DNA, 2385 bp, Morganella morganii
atgcacgagaacaatatcacgttactgtgtaatgaagcagagcgattattacagcttaatattaagctgctgcaaaaaatggttgatgagccgaatgtacttctcgagaacaaacaaaacgacaatgagcaattatttaataaaaaaaaagcaataaaaagaattgaggaattaaagggtgaacaaaccaaaattacccataaagagatggtactggccgtcgttgggacaatgaaagccggaaaatcgaccaccatcaacgccattgtgggcaaagagatccttccaaaccgaaatcgcccaatgacctcaatcccgacacttattcgtcacgtaccaggaaaacatatcccgaaccttcagctcaataatattgacccaattcatcacctgctgaccgagctcaaaaataagataacgaccgatgaaggtaaaaggcatgtacttgaactcgataaggatcaggagaaaagtaagttattgaagattgccacggatgatagctggttaaaaaataattatgctggtgaagcagaaatttttacatgtctcgcctcgcttaatgacctggtacgccttgccgcaattctaaatgtagaatttccgtttgaagcctatgatgaagtacatgaacttcctgtgattgaagtggagtttagccacctgacgggaatggatgataaccaaggaatactcaccctgctggatactcctggtccaaatgaggccggccaaccccagctacaggcaatgatgcgcgatcagttacaaaaagcctctgcggttctggctgtgctggattacactcaattaaattctgaagctgatcatcaggttcgtgcagaactgaatgatattgcaaatgtggcggcaggtcgtttatttgtcctagtcaataaatttgatcaaaaagatcgtaatagtgatgacgctgaaacggtcaaacagagcgtgcccgcaatgcttgaccatggcgttttgaatagcgatcaggtttatccgggttcttctcgtcacgcatatctggctaaccgtgcccgcaacgtgataagtcaggctggagcgctgtccgttcaggaagaatgggtggaagatttcgcgaaattagcctttggcttatcctgggaagaagaggatctcgcaagtcctgatgatgtcagaagaaacgccgacaaaatctggcgccgttcactgtttgataagctcattaccgaagttattcaggctgcacatgctaaagcagctgcgctggctgtcgattctgccacagccaagctggttcagaacgcagaaaatgccaatgaatatctctcggtgcgtcatcagggactgttgacaagtatccagatcttacaaagtcagatcaatggtttgcttagtgatattgataatatcactatctgccagaaagatgtcgatggcgaagtgaaacgagccatgaaaggtattactcgtaagacggatgcattacttgaacaggctgagaaaacattaagtaaagatctgaatgaatactttaaaaatgggaagcgtcaagagaaagaaacgttcaagctagatcagcagaaacagttaccgagccgtaatttctttagctcgctgatgaactctctgactagtacataccagcaaccagagcgtgatttcgatccggacaacccagaaatgaaatttaatgagcgttctgatgctgaaaaatttattcagcaaatagaagactctgtcactgatttgctggcggaggccgaagaaaaaattaaaccgatgctgactgagattgttgctggtatagaaaacagttttcacagcaatgcgctccaggctgttgaaaaaattgccaatcaaatcaacactcgtcttgaaggcgatggctttacggttaatattcacttccctaaagtgagtcagttacagacccatctgtctattagaacccgcatgaccagcctactggaggaaaaaaccttcagtgaaactaggcgtcgccgttcagaaggagtatggggaacggtatgtaagtggttcaaaaccgatgactggggttgggaagattacagcatcaatgttatccggagtgtagtggatattcgtaagattaaaacggccgtgaaaaaacagaccaaagaacatttcgcagagttaaacgagagcatcgatgctggcatcaaccaacctatcctcgccgagattgagtcattctttggggcctttaaaggaaaagtggagcaactacgtaatacacttatccagagcactgaagatcatagaaatagtcaaaatgagcaggagcagctgaccttgcgcttgtccgagctgaaaaaacttacgccggagatgatcagcgacggcaaagcactcaaagaagaactggagcagattctgtaa

SEQ ID NO: 289411 - DNA, 888 bp, Morganella morganii
atgagcatgattttaactgcacgggctttgcagataaaaacaggcaacccgctgcgaaaactggtactggtcaaactggcggacaatgccaacgaccagggggaatcatggccgtctgtgccgtacattgctgagcagtgtgaaatatctgaacgctcagtgcagaaccacatcaatgccctggtgaaaatggggctggttcgtgttgagtcacgaaaatcggccaacggtctgaaccagtcaaatatttatcatctgtgcctgaatgctaccgctgtgagtggtgaatctcctgcatcctgtggtgcaaatcctgcgggggtgagtggtgcaaatggttcccggactggtgcagcagatgcaccgggtggtgcaaatggttccggtagtggtgcaggagctgcacccggaatcagtcatgatccgatcatagatccagataataaaaatattatcccgcgtactgaaaaatccggccccaaaacagccatgccggaaaatttccgaccggcagctgaccatgcccgaaaagccgaggcatccggactggatgttcaggaagagtatcagaagttcagcgattaccacgccagcaagggtacgaaatataccgactggcaccgcgcattcagctactggcttggacaggctgccaacttcaaacgcagaactgcaggaaacaacactaactccatagagcgtgacgaggcattcacccgcctgatcagctcccgctcaaaaccccggaaccgtactgaggagatagcggctgagctcgccggtaaaacgggcatccgtcgcatgaccgagttcatggggcgtaagacctggattgatatctggaaacaggccacagagcaggccgcaaaagaacgggaggttgcgtga

SEQ ID NO: 289412 - DNA, 285 bp, Morganella morganii; identical to SEQ ID NO: 277114

SEQ ID NO: 289413 - DNA, 873 bp, Morganella morganii
atgaaccaacaccctgaattagggagggttatttcagcctttcctgcttcatttaaaaaccgatttttcaaccaactcaagcacctaatcaactactcacccaccatcggtctgatgggtaaaactggatccggaaaatccagcctcatcaatgcattattccagtccgccctatcatccatcagtaatgtctcgggttgtacacggcaggctcagcgcttcagtatgacgatgaacaaccacacactcacctttgttgatttacccggtgtgggggaaagccttgagcgagataaagaataccaccagctctatcgtaatttattaccagaactggatttaatcatttgggtactcaaagcggatgacagagcatggtcttcggatgaacagtgttatcgctttctcactgagcaatgcgattatcaacctaagagatttctatttgtgctgaaccaagccgacaagatagagccctgtcgccagtgggatgaacaacagcatcagccctccccggagcaagcgactaacttagtattcaaacgagaagctgtaatagccgcttttaagccgcatcaccctgtgatgatcgtgtctgcagttgaaaactatcaattcactgaattagcggagcaattaatacaggtgttaccagcacaagccagcagcggggtagctaggcaactgcaccgcccttaccggacgcaatccatagagaactctgcacgtaacgattttgggcaatgtgttagtgatatcgtcgatacgctgatagacatccttgccctacctgtcttgataaaaagcacgattggtacagtcaaaaacagcattgtatctgtcgctaaatccctgtggagcctgttcttttag

SEQ ID NO: 289414 - DNA, 873 bp, Morganella morganii
atgaaaataacattattctatctcatatttatttttccagcggtggcatttgctaataactcatgcattccaaacctcatcaaagaagatatgtgcgtttctgcaaaaaaaataacaacggcgatgcaaaaagagctacctgtgaaaataacagaaaacatggtaataaccacagcaacagccgaacaacgcagagttattttgacagcgtcactatcctataacctcgacacgctgatcaatatggctgacggagacaaagagttcatagccaaagcaagagctatcaacaaaaaggtcagcagaaaaacaatatgtgaaaataggaaaattcgtgcatttatcaacctaggtggtgaggttcagtatgactatattttcaatgatggctccgtttacgatatagtaacaatcacatcctgtgacaaccccaccacaacaaaaccagaaacagaccagataaacaaaaaattatccggtgtttacccaacgccggatagctatgaaaatagtgcgttcgaccccattggtgtgaatctcaattctcaacatgaaccgagggtaaaccccgcaccgccggagcccccactgacactcagtgatgcatttgctgttataccaacttataaagcagtaaatgattacaatccatttagcgatccacatggccttgaaggatatgaattgtgggcagataaatttatatcttcccagtcgccgcaagaaacagaagcaattaagaaaagaattgatgcacgacgtgaagttcttggtatcgatacgccggggcaattttcccttcttatagccgccggcgtaattggtataatcgtgttaatgatattcttttactgttggggtaaaaaacactga

SEQ ID NO: 289415 - DNA, 303 bp, Morganella morganii
atggctaatccattgtcctacattgtttttggggtatttgtatggggagtatgcaaactttgtgaaaaatatcaattagttggtgtggctgttagaggtgtgctcaggtatcttttttgctttatgtggccgatcattttttttaccacatcgctattatattacggaaaacgttcagagggcatggcgctgctatttgcgattcttggtgttgttacttctgtggcggcggtggttgttgcgtcgaatgacccagggaaaacatatcgagcaatacgggcgtttatctctcgatttttctga

SEQ ID NO: 289416 - DNA, 186 bp, Morganella morganii
ttgtccggaataaaagccggggcggactggatgaaaatcaataacctgatctatgaacaaatgattgaaattctctacaaacccgcatatatgggtgaatcaaggcacctcggtaatattatgccatcactggacagtgtcagaagagaaatggcaccagaactggtgctgaaactggttaaatag

SEQ ID NO: 289417 - DNA, 213 bp, Morganella morganii; identical to SEQ ID NO: 278670

SEQ ID NO: 289418 - DNA, 1728 bp, Morganella morganii; identical to SEQ ID NO: 281193

SEQ ID NO: 289419 - DNA, 1020 bp, Morganella morganii
atggtatttagtgggatattaacagcgaatctcgttattatagcaccagtaggtgggtggatgtatttaaatcaagatattgatttatctacttatattttatttttaatgacatcccccctcgtacttgcgccgttattacgactaacatttgtgctaggagaacaagctcaacgaaaacaaaccttaaaacatatcagtatgatccttgaactttcagagcataaacaacatgataaacattttactctccctaaaaatagtgatattacttttaaagatgtctgtttggatcatggtgataaaccgatattagagaaaattagttttaatgcccaagcgggtacaacaactgcaattgtaggccacagtggtgcaggaaaatcctcattattaaaactaattccccgtttttatgattgtacttctggccaaataaaaataggtcaatatgatatcaactactggccagaaattgatttactttctcaaataagtgttgtttttcaagatgtatatctatttcatggaactattttagaaaatttactcatagcaaatcctaatgccttatttgaggatattatcaaagcaactaaagcagccaatattcatcatgttattgaaaaactcccggcagggtataatacattaattggtgaacaaggaaataaactttcaggtggagagaaacagcgattatcaattgcaagagcactattaaaaaactctccaatcctacttctcgatgaaattactgccaatgttgatgctgaaaatgaaattttgatctatcgcgcattaaagagtctatgccagaatcggactgttattatgatcactcataacctacatactattattaacgcagataaaattattgtgcttgataatggaaagattattgatacaggtacacacacccatttattaaaccaatgcccaacctatcaaaaattatggaatgattatagtcacactattcattggcaattaatccaggagaataataatgattaa

SEQ ID NO: 289420 - DNA, 153 bp, Morganella morganii
atgttgttcttagcacctaccggactggtgttagcgacattgcaaatgctagatatctcctataacaaatggcttaaatttattatgccgatggtgatatttatgtttgtactttcagcaacactgttattggttcaagtcgcttttttataa

SEQ ID NO: 289421 - DNA, 372 bp, Morganella morganii
atgtggatatgggagcatcatagctggcccggatttacgtatgatttaccgcagttattgccgctgctgcgggaggctgcttttcttcagggtgatttatacggcagtaataaagcgcttgagcttgctgaagataagacactggatacgattctggcaaatattatctactcaagtgatattgagggggaaaaaccggatgcccgttctgtcagatcatcactggctaatcaccttggtatttctgaggaggtctcttatccggcggacaaacgtacggaaggtctggtggagtcagcgctggatgcaatcaataatcccggtgaaccgctttctgcggctcgccttctgaaatggcatacctggttctga

SEQ ID NO: 289422 - DNA, 474 bp, Morganella morganii; identical to SEQ ID NO: 96879

SEQ ID NO: 289423 - DNA, 633 bp, Morganella morganii
atgaaagagcgcggaataattttcaacgcggagatggttcgcgccattctcgatggcaggaagacgcagacgcggcgaattgttaaagcagttccgattactcacgacttccacggctgggtaatgtccagcacatgcgcgaaagatgaaggtaaagcctgctgggctatcggcgattcaccgttactcaaagacccgattcgccgtaatttccctttcggcaagactggcgaccggctttgggtgcgtgaaacatggcaatgtgggttatgcacagagtcaacttttgcatacagggctacacataaaccctccgatcttgaggagggctggagcgaaataataaagtggcgcccatcatcacaaatgccccgctgggcttcacgcatactgctggaaataaccggtgttcgtgttgagcggttgcaggatatcaatgaagaagatgccgtagcagaaggcgttgagcctctacacggtggttactggaagcattaccagcctgactggactcagcgccaacttagcgcgagagggtctttcgtgacactctggaattctattaacggagttgatgcctggtataaaaacccgtgggtatgggtgatcgagtttaagcagattcaggggtga

SEQ ID NO: 289424 - DNA, 492 bp, Morganella morganii
atggcagcaccaaaaggaaatagattctgggaggctagaagtagtcacggaagaaaacccatattcgagtctcctgatgatttatggaacgcttgttgtgaatacttcgagtgggttgaagaaaatccactgtatgaaactaaggcgtttgcattccaaggggtagtgactaaagagacattgcctaaaatgcgagctatgacgctatcagggctttgtttgttcttggatatacatgaggacacatggcgactgtatcgagccagagaagattttatcgaggtcactacgcgagctgaaaaagttatctacgatcagaaattctcaggtgctgcagctgacttgttgaatgcaaatattattgctcgtgatttaggtctcaaagacagacaagaggtcgaggatgtaactccagataagggagaccgtgacaagcgacgctctcgaattaaggagttattcaaccgtggaaaatctggatcagatacttga

SEQ ID NO: 289425 - DNA, 2598 bp, Morganella morganii
atggttaatgatattaaaattccctttcagaaaaaggatgaattttatacatggattagccatggtatgcctgatagtccatctgtcagttcagaaaatctgattatagattatagagatactattaacatagagagcagactccctgagaaactctatccggtaaatgagattgtcagggatagttttagtcatcatttagctgcagaaaatatattgttgaattcttcatcaatagatttgaagtcaaaaataggtgcaattaataatttaaatgttcaggctaaagagaaaatttattcacgtgaaagtacattggtagcgggtaagtcattatcattaacagcagatagtattgaacttgaaaataccaatataaagtccggtgagctgtctcttattgcaaagaaaggcgatgtaatatactcaacaggaatcaggcctgtatttacatctgacatttctgcgctgcctctgttacatgcacctggtggcatctatgcagatgcaggaggtgatattacattcaaaaatatagcattcacattaaatagtcatgtggatttatcttcccgaaaaaatatactgattgattttgatccgaaaacgatatcaggaatatccacaaaaaaggcagattatgaaataaaatcactgtcagataaatttcaggaatggacactttcagattatatcaccctgaatgccggaagtgatattgctattaatggtacagatattagcagcaaaaatgatataggtttttattccggcggaaatatagatattacctttgataaaaaatgggaaggccgtagtgatatctatgcaagatatttaaggcccaaaatacgcattcattcagaaagaaactttattattaactctgccggagatgtaaatctattgaatgcaggcctgcatgctgataaatctttattgttgttttctggtggggaatttaatctgacaggaattccctattcagcaataaggtattcttatgatgattacattgataatcgctatgtaagttcttatcttacagcaaagaaaaatatcacattagtggcgaaaggtgatgttaatctgcatgcagcaatactctcctctgatgattatatatatattcgtaatagtggaaatattcagttgggatctgaaaaaatacactatcgtcagaaaagacgtgattatctggaagatacatatcgccatgtcagtacactggtaaaaagcaagaacaaattaacactattgtctgaaggcagtgttttatttcagggtgctgagcttatttctgatggtgtaatggatatctcggcaaagggcgggtatttatatgcacaggcaatggaagaaacgagtcattatgaagataagaaaaagaaatgtaatcgttggacattctgtataacaaaaaaagaagttacaaaggtaaagcatgaagtaaaaaataaaacgacagaatttacatcgaaagaagatattaatttaatcgccctggatgatatcacacttgaagctgcaaaaatttcagcagctaaaaatgccaggctgaaaagtatctcagggaaaattaattttaaagctgttaacgactcactttatgagcaaaccgtcagccattccagggggttctacattacccgccgtgatcaggggcactcgctgagccgctggcggttaccgcagatttattacggcggaaatttatctgttgatgcagcaaaaggcataaccgcagacagtaaaacattcagcattcctgaatttaaagaatccgcaatgatgctgagcagccataccggaaccggttggctgaaagaactgataacccgcgatgatgttcagtggaaccgggttgctgatgcctatcagcgctgggactataaagagcagcaccttaatcaggtagcatcagctgttctggctgttgccgtcaccgctgcgacatcgggctccgggctggcagcgtgggcggggagtaccgcatcttccgcagccacaggaacggctgccgctgttatttccggagccgcgcattccggaatgatagcactgacaacacaggcagcggttgcactggcggagaataaaggcaatttatctgaaacatttaaatctctggggcgcagtgaaagtgttaagtctgttattggtcagatggttgtcggaggggcgttcaatggtctggataaatcgatgggctggcagaacggaaatccggcacaatcgcggattccgttactgagtgacggagattggcacaaggttgcacagcgcgtttccgcccagtctgtaatcagctcagcggtgggttcggcagtatcagaaacaagcttcagggagaactttattaatgcgcttctcagtaacacgggaagtcagtttaatgctgaaggcgcaaaattaattggtgaccacggtgaaatattaacggaaccgggcaaagcaattacgcatgctgcggttgccgctgtcagagccgagctgaccaaccggagtgtcagggaagcggttaccgggggcgctggcagcgtcggcagccggtattatattaggcgattctttagatcagacagcgcaggaacatga

SEQ ID NO: 289426 - DNA, 1335 bp, Morganella morganii
atggaatttgagcaggtaatgtcacttttcagtgatccatcgtggcgcagccggattacgcccggcctcggttcattccggggcgtgccgttttatatcgtcgatgatgccacggtcagcggtggccgccgtgtggtgcgtcacgaatacccgctgcgtgatgacggtgaaaccgaagatatggggttgtccacgcgggaatatgccattaccgccgtggtgttcggtgatgattatctggataaaaaagaggcgctgattgacgcgctggaagaagaaggacccggtgaaatagaccatccgtattaccgcaaacagcaggtgcagattgaaacgtggacggtacgcgagtcctgttatgcgggtggtaaagcggtcttttcggtgacctttattccggcggctgacaatacctccccggtggtatcgtctgaggcagagctggacggctccgcgctgacggacagcacactggccgatatcaccgcgaactgggaagccttcacagataacgtcagttacctcactgagcgtttaaatgcggctgaaagcacccttaacactattgtaaacggtatccgcagcctgcctgccgggtcaggtatgaacgccctgctgggggcagcgctggggctgaaaggctcactgaagaacctcattaatgccccgggggatctgttcggttcggtcagtgacctgattggcgggattgcggatgtcgcggttcctgatgcggccaaccgggcactgcgaaaaacctctgccgccattgcgtcacagtatccgtcaaatacccccgctgtagcggaatttcagaatgtgatgaacaccaccacgcaggtttttattgcccgtgaactggcggtgctgacactggatgcggccgttgcctctgcccgtgagcagcagaccgccccggcactgacggcggtcacccgtcagcgtgacctgaccccgctgctgcccggcagtgaagcgtccgctgatgaggcggccatcccgctgattgaaaccgtggatgatgtgcgtcagagcagcgcagaccttgacgggacactgacacagttaatcgtggataccggtgatttcggctggttccgtacctcagagcagttacgtgacttccggatcatctttcttgagctgatgcagaccacggcggaaatgttaccggcggccgtgaccgtccgggtgaatgacaccgaaccggcgcttgtcctgctttaccgtgaaaccggcaccaccgcacagattgagcggtttgtccgccggaacggtgtgcggcacccggcttttgtgaccggcgcactggatgtggaggtcatcaatgactga

SEQ ID NO: 289427 - DNA, 225 bp, Morganella morganii
atgaggggatctctcagtgcccggcgtgtgatgtgctgtgatatccggtgcgatgaccgggggattgttcagggaatgcgtattgttccggggcagccgctgataccgtaccgccatctcactcacggcggtaattttgccctgctgacagagggggatgagcttccgtggtgggaactgtttgaaaaaacacaaacactgatttattgggggagcgatgattga

SEQ ID NO: 289428 - DNA, 924 bp, Morganella morganii
atggctatcgtaacccccgcgttaatcaaatcgctttttaccggctggaacggcgactttcaggacgggctggcggatgctccgagccagtatgaaaaaattgcgatgactgttccgagtaccacgaaatccaatacttacggctggctgggtaaattcccgggcatgcgtgaatggattggtaagcgtgttatcagtgatatgcagtcacatggctatcagctgattaaccgcccgtttgaaagtaccgtcggcgttgaccgtgatgatatcgacgatgacaacatcgggatctattcaccgctctttactgaaatgggccgcgcggccggtgttcagccggatgaaatgtgctttggtgcgctgaccaaaggtttcagcaccctgtgttacgacaagcagaatttctttgataccgaccatccggtttacccgaatgttgacggcaccggcgatgcggaggttgtcagcaacattctggcagaagaaggttataccggtcagccgtggtttgttctggattgttcccgtgcggtcaagccaatcattttccagcagcgcaaagcgcctgaactggtggcaatggataaggtggatgatgaagaaaacttcatgcagaaactgatccgttatggtgtcgatacccgctgtgaagccggttattccttctggcagctggcttatgccgcgaaagcttcactgaccgcagacaacgtatggacggttatccagaacatgcgcagcttcaaatctgacggtggccgtccgctggcaatccgtccgactcatctggtggttccgccgtcaatggaaaaagcggccacacagctgcttgagcgtgaactgacggttgacagcaaaggcggcaccatcagcaatgaaatgaaaggccgtcttgaactgattgtcggcgattacctttaa

SEQ ID NO: 289429 - DNA, 354 bp, Morganella morganii
ttgcaggaagaaaccggcattggtctggcgctggtcggtaacaatcaggtctattcaaagctgaccggcggcaactcccggaatgttgactttgcccgtctgttcagccggatagcaaaaaaggtcgccattctgaaaaccaaaaaagacgatgtgaaagccatttctgcggcgtggggactgggtgacagagagcgagaccttgtgacgcagctggctgaacgcccgggggcattgcggacggtatcccacacactgcgccttgcggcaatgtttgccaccggcgcaaatgaagcactgtgtgaaaagcatatccgcgcagcggtaaaagacctggagggaacagagttatga

SEQ ID NO: 289430 - DNA, 282 bp, Morganella morganii
atgaacatcaccatcaataccgaaaatcagtcagtgatatcagcgctgttacaggctgaatccgtggcgcagcagcttactgagcgcggtatatcagtcctgagtgttgtggcccgttgcggcagagcctgcattcatattgcccgtcacagttactgtgatgaattaatccgcagcggcaaagcatcttatcagtatctcagcaaaaatttttccggtgtccgtcagggtgtgtttaacgagtcaggctgtcgtgtgtactggtctgaatccattcattga

SEQ ID NO: 289431 - DNA, 483 bp, Morganella morganii
atgctggcaaccggtgaggaactggcgcgtgttgatgcggttaatgaatcattgttacaggaaatctttgctgaccgtgcattcatactgcttgaggactgggaagactttgctggtctgccggattgcagtattgaccgtgaatcttccgtcgatgcccgccgcagagcagttaaagccaaactggtgatgtccggcagtctgtgtaaccagttttacgaacgtctggccgcagaccgcggctataacatccggattgaggaacgctacccacatcactgtctgcgtacctgtcttcatccgatttatccggatatcaactggttccgcgtgttcgtccatgtggccgacaaaaccactcactgggctaccgttctggacaactgccggcagcgcctgcgtatcgctgatgcggctgatttggagtgtcttctggaacgttacgcccccgcagaaactgaatttgtctttatttatgagtga

SEQ ID NO: 289432 - DNA, 459 bp, Morganella morganii; identical to SEQ ID NO: 287743

SEQ ID NO: 289433 - DNA, 219 bp, Morganella morganii
atgatgcaaaccaataaagaaaaacatccaaagcttattcgtttacccgaggtaatgaacagaaccggattcggtaaaacgtggatctatgaacttattaaagcaggtcattttcctgctcagataaaaacaggcatcagggcgattgcttttattgagagtgaagtggacgaatggatcgaacaggctattacggcctcgcgcgaagtttcaatgtaa

SEQ ID NO: 289434 - DNA, 306 bp, Morganella morganii
atgattttagaaataaaaacaacaaagcagtttaatacagtggcagaaaggttatttaatgagaacataaataagctgagaggagatatgccggggttttataagtcactgatgaaaaacaagaaggaaatggacaggttcattgagattattatcgatctgacgaaagagcatttttataaaggacatgatgcacaaagtgggtattgtctgttcaaaaatgtaaaccagataaaagcaagagcatttttgcattcactggcattcactcaccagtatgtatataaatgttttttcgtgcagtaa

SEQ ID NO: 289435 - DNA, 294 bp, Morganella morganii
atgttcagttttaaaaatgaagcaacggggatgttctttggtatgtcattgcaaatctattcagatatgtttaacttggcagatgaagagacgcaacgtgtgatatatacaaaggtaatggacccggaattcattaacagttttatcaggctggcaatcatcatggctgaaaaatgttttagggattccgtctggaaagaaaatacagaagaaaaactggcagaagttgatttcagagaagtaaagcaggcgttgttcaaaacgcattatgaagtgctggctgagtcgttatga

SEQ ID NO: 289436 - DNA, 453 bp, Morganella morganii
atgagaaaaatacaattagataacagcgacattattgactatttaaacactctcgaagaattaaagaaatatccatctatggctgaatacagacagcaatatggtgagttacgacgagataacgccccgaccgcagtgacaaagcaattttattccgctcataccatgttgcgtcgtctggataaaaagaaaaaaaacctgttaggttcatttatttctgaactcaatccggtgaaaagggaacataccttagagagcgcagagcgccgctcattagccagagcgcttatccgtgagaaaagtgatgatgagatcgtctctatgcttataaaccaacgcacagaggctgcacttgagcttcaacgtgctgttgagcagagccttgaacaacttgcaaaactgacttctgcccgcgagcatcagcaaacaccacgccgtaaggtctcaccttaa

SEQ ID NO: 289437 - DNA, 666 bp, Morganella morganii
atgatgcagatagattttacatcccttggcagcttatcaccctttcagctaacacagtatattgatgaaaaccatttcaccactgaacagaaagtacagatatttgaacattattatagtacacataaagatacaaccaatatctattcaagaaaagaaaacattaaatctatcaaaaaggatgttgattatgtccacatgttcacaaaaaacttccagcaactcgcagaacttgatatttccaagaatgagttaaaggtcatcgcaaggatcttaaacatcatggagtttggaaactgctttcatatctcgcaggcaaagctatgccgtgacttagacataaaaaaatcgaatatgtctcttgtatttaaaaaactcaaaagcaaagggattatcatagataaagacggagatctctttatgaactctaatatatttcttaaaggacaggcgcattctatcaatgcgaaacaacgtcctaatgtaaaaaaagcgcagggctttgttgttgatgaaaaagaaagatttgagaacgtttatacttttaaaccagattctgatgacaatagtaacatggacattaatagtaaaacttctgcagatgatgaatacttgtcgctagaggctcctgaaatatccgaatgtctatttgatgaagaagaataa

SEQ ID NO: 289438 - DNA, 249 bp, Morganella morganii
atgctattggtttttgattatatgtgtgaaggctttgcctgcatacttaacctgtgccatccagatgaaggcacctttgatttaaagtgcatgttgttttccatcatgatgtattgcagcgaagtgattgtcttatacaatcacaaagagctgcgtcctgaggttaaagttataattacagattgctatatatggcaggttttactcttggatttgttagcggctgtcgctgcgatcttttatggataa

SEQ ID NO: 289439 - DNA, 270 bp, Morganella morganii
atggaaagcataaaaataataagtatctttaaaataaacgaaaaagtaccctttatgacctgtgtcgcaaccgatatggaagaaagtgaagacagaataaagctcatgctggaaagtggtgaaagcatctgcattaaagattacggttattacgtcctgtcagaagctgacggtgatttgggcagagaacaaatgataaacagctacagaggattattttctgaactctgcgggataagtaaagtgacagtaaattcattaatgccctga

SEQ ID NO: 289440 - DNA, 288 bp, Morganella morganii
atgcgtaaatttttagtcgctgcggggcttgctgcgctgatatcaggctgcggagataatggtatttatggtagctatgaaaaccctcaatatggggtacgacttgatattcaaaaagatgtgatcaagttccgggatggcgtttttacggtaaaaagctgggatgaaagccagaagccaatatatatcgccaaaacgcaaaacaaagatcttggctcttggacttttaaaattgaaaaagtcaaagatggtgttgtttatcaaggtgcagtttttaaaaaggattga

SEQ ID NO: 289441 - DNA, 276 bp, Morganella morganii
atggaaaacaatacaattaaatgtccattttgtctgaaagaaagtcagaggggcgtccatgtttgcaccggctgcatggcgactgttttatatggagcctaccccggctggtatgctttcgtggttatattattgaccttcgccctgtctatactgatcggaatgtctacaggcatggcgggagctactatcagcctaccaatcattgcggctgttgggtttgtcgtgggtaaggcaattttctctgataatgttgtgttcaggagaaggatgtag

SEQ ID NO: 289442 - DNA, 195 bp, Morganella morganii
atggagagatttctatcatatttgtataataaaaggatttgtaatttttttttagtatttatgattgttttaaactttctggctttaagtcaaaaggtttatgcttttaatattttgtcaataatggtcatgccattttggtggatcatcctcagcgtcgatatggacgccgatgctaaggataaaaatccgtag

SEQ ID NO: 289443 - DNA, 501 bp, Morganella morganii
atgctatcaatgtctaatgtaaagaatgcactcaggaaaatttcaattttatcaaaaaaaacattcatattttccctcaaagaagtaaataacacgtttacttccaatccctttgaggaaggaaagaaaacaagaaaaataattgtatttatagcactgctatttatttcatacttattgagcggtgttatattcaaccttcgaattcaaattctttttttcctccctataattttggggattgttttatcacattacacgtacaaagaaactaaagtattattaaaatatgggtctgattacgctctattcacagtagcgacaattacatcagcatatcttgttattaacacaacaactgaaaaagtcgatttttttaatcattacatgcaaaatggcataggatttttgattactaatatttttgctgtagcagcatcaatccgctgttatatcagttttatggaatttaaacgcatttatagtaaattcaaagagtaa

SEQ ID NO: 289444 - DNA, 1515 bp, Morganella morganii
atggctatttttcatcttgattttaaaattgtgaaacgttctgaaggcaagtcttccgttgcaaaagctgcctatcatgcccgtacacgtataacagatgaaagaacaggtgatacctatgattatagccgccgtactgatttatacggacattttatattagcacctgtaaataccccacctcatattattgaaagctcctcagcgctttggaatgaggttgagaggatagaacgtcaaagtaatggtcaaacatctcgttttttcgatgtcgccattcctgccgaattaaacaatgacgacaaggaaaaacttgttcttgaatactgccagaaaaatttcgttgataaaggcatgattgccgatattgctttccatgatcttgatagcgataatcctcatgctcacgttatgttgacattaaaaaccattggcccggaaggcttcggtaaaaaagaaaggagctggaatgacagaaaaatgtctgtgttgtggcgtgagtcgtgggcatctatggctaacagctacctttctgccgctggttcaccagaacgtatcgatcatcgatctctccaagctcagaatgaggaagcattagagaaagcagcggtcgctctggataatgaagaaaaagcgctatggcttgccaaggccgctgaaacaaaccgccctgcaatgaagcgtattcacagtgccaaatggcgtagtaaagcagctcaacaacagcgtgctgctgaacaggctgttcgtgatgctgccaagcaagaagcggttgaagtctataaggccttcagcgaacttgaccttgaaatcgtcgttgatgtcagaagcttcactgtagctgttcttgccgaaccagaacaaattgtattacctgaaacgcactccggttcttctaccagtgaaacacaaagacctgtattggtagcacctgctccttatactcatactcgtgtgcgtggagttaaatcttaccgtgataaatccaaagtcagtaaggttgttgctggtaagaaaccatctgtcagtattactgactctggaaaaaataccattctgaaaacatcctcctctcaaaacccaaacagggcatccagaagcgcctctgaccatgttaagaggaagcaggctactccgcgtcaggataatatctttaaacgctttacagctcttttggttgattttatcagggataaattcatatgggctaaaacagacaaaactaaagttgatattattagtgaagaacatgataaacgtattgctgaaaactacatctttgacgaagtattgggccgtcgtgttcctcgcgatgaatatgagaaacaagccaagtttagccaagatgactacaagccaacacaggatgagatcagccgtttcccaagccgtccgaaagaggataagggtgatgttgataacagtgtggatctcacaccatccattccaccagaccatacaagaaagaatcgtggtctatgtctgagaccacctcaaaaaaatataacacagtaa

SEQ ID NO: 289445 - DNA, 312 bp, Morganella morganii
atgaatacggatgataaaaacagaaagccaagaacagaaaaaaccatcaagcaaaaaatagcatcagcgcagatgcgtttgaatcgtctcaagaccaaagagaaatctttatccaagagtgctgagacacgcttgaagattatccttggggcggaagtggctaaagttgctggctgtaaaatagaagatgtcgataaggaatttatattaggcgtgttattacagtctcagcacattagttctgaaagcaaaataaaattaaaaatgcgaggcaaaagatttcttgaagatatggccgggagacaatattaa

SEQ ID NO: 289446 - DNA, 1635 bp, Morganella morganii
atgaaatttaaagccgatcaaactgcgcaaaagttacgaggtggatattatactcctcaggaaattgcagattttgcaaccaaatgggttctaaaaaataatcctcgcaatgtgcttgagcctagctgcggtgatggagtattctttcaatcattgttcaataatgattgcgataaaaacattaacatcttcggatttgaattgtttgatatcgaggctaaaaaatctattgacctatgcaataaacttaaatttgaaaatgttaatatcagggagggagatttccttgaatggtttaatagtgaaacgcttaaaacgtcaactaaatttgatgctataattggtaatccaccatttatcagatatcagtttttagaaaaagaatttcagaaaaacactgaaaatgttttcagtaatttaaatcttaaatttactaaacatactaatgcatgggttccatttattatatctggcattgaattacttaatcccgggggccgtctcagcatggtaatcccttcggaaattattaatgtaatgcatgcacaatctctgagaacatttttaggcgagcattgttcgaaaattgttattatcgatcctaaggaaatttggtttacagatactttacaaggtgctgtaattattctggcagaaaagaaaattgataataaattgaagagcgaaggagtaggcatcaaaagtgttagtggatttgattttcttgaaacggatccagaggaaatgtttgctaatacagatgctatcaatggtgaaaccgtcaaaggaaaatggactaaagccgtattagaaagagatgaaatcgatttaataaaaaaaatagttacgcaccctcaggttcataactttgactctattgcaaaggttgaagttggcatagtaacaggagccaacgaatttttcttagttaataaagctgtcgtggatgagtataagcttaatgacttcgcttatcctatgtttggaagaagtcagcattgtcaaggtatagtctatgatgaaatacaacataaaaaaaatgtcgataataatctgccggtattctttctttacttcgataaagaatataaagatttacccataaaggccaaagaatatatcctttttggtgaatctcaagatttacatacgcgatacaaatgtagaatacgtaaaccttggtacaaggtgccatctattttcagcacaaaactagcaatgttaaaaagagcgcatgaagcacctcgactaatctataatgatttccaagcatacacgacagatactgcttatagaattgaaacaaaaaatgatattgatgaaatgcgggttgcgtattttttcatgaatccacttactgctatctttgccgaattagagggtagatcatatggtggtggtgtaatggagcttgtcccatctgaaattagaaaactatttattcctttaccttcaaacttagactttgatatcaatgagttaaatgatttgattttaacaagaagaatggatgaatgtcttgaagtacaaggacgtaagatcttcaacgccctcggttttgaagcagaagtcaatgatgcattaatgaatatatggcgaaaattaaaaaatagaagacaaagaattaccgaataa

SEQ ID NO: 289447 - DNA, 1134 bp, Morganella morganii
atgcctatatcaacactaatttttcaaggtttaaatcaaaattgtgatcatttaacatcaattcgtaatatgttatatgatcaaactgcaagaaaatttatcataagcgtagcttacgcccgagtaaatggtgttgagcaattgcgagatctcctattaaacaataataataagattaccgcttatgtaggtatcgctaacggagttacttcgtatcaagctctttataatttgctaagttatggggtaaacgtttttggtatacatatgggaagtgattctaggatatatcatccaaagatatactcatcaatttcacaagataaaatgagggttattgtaggtagtgcaaacctaacattttcaggtttgaacgaaaatattgaaattagctgcgatatgactttagacaataacgaacctaatgaaagaaaaaatatcaatgacattataaacaccttttcaaatctggataaaaacttcccaaataatgtattccatattaccgaagaggctattttaaaaaaaatgctcaatgaagggcatttggagaatgagctaatcaaaaagtcagcaaacataactggccactcaactacgtatgctccaaatgcaattataataccacctttccctaaatttaatacaagacaaagaccattacgtcgcgcaatagaaaataatttcacacaaacaagggtaggtgaggcgtggaaaagtaaggcattgactgagcgcgacttaaatattcctaaggcattaggaactaatccaactggatctatgtttttcaataaagggcaactcgaaaatattgaccaaagacattactttagggatgttgttttcgggaatcttggctggaacaatgacacatcttcattatcaaaaatgcacttagagagagcctttgcatatttcgaaatcattataaatgggacatcttatggagagtttaaattgaaactaacacatgatagtcgtaccgatagtcgatcatatttgcaacgtaatagtatgactcaagtacattggggtgaagctaaaccattagtttctcgtgtcgagcttcttggaaaaatagcagtgctatatcatgtaaaaaatgatcattatcagttatctataaattaa

SEQ ID NO: 289448 - DNA, 471 bp, Morganella morganii; identical to SEQ ID NO: 279238

SEQ ID NO: 289449 - DNA, 354 bp, Morganella morganii
atgaaatattacaaaacgaaaaataatgaagtttatgcacttgaagataacgactctgcaaaagagtggataaaagaaaaagtgactgaaatcaccaaagaggaagctgataacatcacaaatccgcgaccaacgaaagaacaactgatcgcaaaagctgaatacgataaacaggcgctgattacagaggttcaggctgaaactcagttactgcaaacaaaactggcacttggccgtatcagtgataatgaaaaggcgcggttaaacgcctggctggattatctggacgaactggaggcagtggacgtatccaccgccccggatattatctggccggtgaagccggtggtgtag

SEQ ID NO: 289450 - DNA, 195 bp, Morganella morganii
atgtcccggttgtctgcgaagcagtttaatgaccgctacccggtggggtcttattttatctatcagccgaaccgtattttacgcggcgggccgccagccagaacattaagccgggccaaagatgaagataaccggactattgtggaaatcgatattgagccttattacaccgatattgattcattaaactgctga

SEQ ID NO: 289451 - DNA, 375 bp, Morganella morganii
atggatttctataataaaaatgattatgggttatatgctttggaaatattggcacagtaccataatatttctgttaatcctgaggaaatcagacacaaatttgatattgatggtaagggcctggatttaacatcatggctgcttgcagcgaaatcgcttgaactaaaagtaaaatcagtaaaaaaaacatcagacagattaggttttgtttatcttcctgctttaatttggcgggaagacggaaaacattttattctgactaagattaataatgaatctggtcgttatttgatttatgatttggaacaacgcaatcctcgcgttcttgaaagagatgagtttgaaaaattataccaggggaaaaatatttattga

SEQ ID NO: 289452 - DNA, 3075 bp, Morganella morganii
atgccgacattaacaactgcacaaattaaatcatcactgaactcagctaaacaatcagcaggtaaaaagctgcaatcagctggagcatcaacaaaagatgctttaaaaaaagcagccgaacaatttcgtaatgcaggtaataagcttattttgtttatacccaaagattatcagggacagggttcaggtcttaatgatctggtcaaagcagcagatgaattaggtattgaggttcagtacgaggaaaaaaatggtacggcgatagcaaagcaagtatttggtacaacagaaaaactgtttggcctgactgagcgtggtatcgctatatttgcacctcagctagataagttgatgcagaaacatcaaaatatcggtaataaactgggaggaagtgcagaaaacttggggaataacctgagtaaagcagggggcgtattatcaactctgcagaattttttaggaattgcactgtcttcaatggaattagacgacttattaaaaaaacaacataaaggtgaagatgttagttcgaatgaactggcaaaagcaagtatcgagcttattaaccaactggtggatacagcagcaagtgttaacaataatattgatgcattttcagagcaaatcaataaattaggtggtttgttgtctaatacaaaacatttgaaaggtatcggcaacaaattacaaaatctaccggatcttggaaaattgggtacagggttagatactatttccggtattttatcagcaatttcagctggttttattttgggaaatgaaaatgcagatggaggaaccaaagctgctgccggtgttgaattaactacaaaaatattaggaaacgtaggtaaagctgtatctcagtatattctcgcacaacgtgtggcacaggggttgtcaactactgctgccggggctggtctgattgcttcagcggttgcattggcgatcagtccgctgtcattcctggcagtcgctgacaaatttaaacgtgcgcgtcaaattgaagagtattctcagcgttttaaaaaatttggttatgaaggtgatagcttacttgcttctttccataaagaaaccggtgctattgatgcatcattaaccaccatcagtacggtgttaagttctgtatcggcaggtgttggtgcagctgcaactgcatcacttgtgggtgcaccgataagtgcgttggtaggtgctattacgggtattatttccggtatactggaagcctcaaaacaggcaatgtttgaacatgttgctaataaaatggctaataccattgctgaatgggaaaaaaaacatggtaaaaactattttgaaaatgggtatgacgcccgccactctgcatttttagaagataactttaagttattatctaaatatagcgaggaatattctgttgaacgggctgttcttatcactcagcaacactgggatgaattaattggtgaactggccggtgctactaaaaatggagacagagctcttagtggtaagggctatgttgattattatgaagaaggaaagcgtctggaaaagaaaccagatgaatttaaaaagcaggtttttgatccattaaaaggaaatattgatctttctgacagcacatcttcgacattacttaaatttgttacaccattattaactccgggggaggaaacccgcagcagaagacaatccggtaaatatgagtatatgacggaattgttagttaaaggagtagataaatggactgtcaaaggtgtcagggataaaggctctgtatacgattattctaacttaatccagcatgctgtggttggtcataaccaataccgggaaattcgtattgagtcacagttaggtgatggcgatgataaaatatttttatctgccggttctgccaatatttacgcaggtaaggggcatgatgttgtttattacgataaaacagatactggttatttaactattgatggaactaaagcaaccgaagccggtcgttatactgttacccgtgaactggggggcgatgttcaaattctgcaggaagttgtgaaggaacaagagactaaagtcgggaaaagaactgagaaaactcagtatcgccattatgagcttaaacatatcaacggaaattctctgacatcagtagataatttgcattctgtggaagaaattatcggtagtagccgtggagatacgtttttaggcagccggttcggtgatattttccatggtgcagatggtgatgataaaattgagggaaatgacggtaatgatcgcttatatggtgacaaaggtaatgataccttaagaggtgataatggagatgatcaattatatggcggtgatggtaacgataaattaattggcggtaccggtaataattaccttcacggtggtgatggtgatgatgaactgcaggtacacggtagtaatacccggaatgttttattgggaggtaaaggcaacgataagctatatggcagtgaggggtctgatctgcttgatggtggggaaggaaatgatgtactgaagggtgggtatggtgatgatatatatcgctatctttcaggttatgggcatcatattattgaagatgaaggtggcaaaaatgataagctaagtttagctgacattgatttccgagatgttaccttcagacaggaaggtgatgaccttgtcatgtataaagcagagaataatgtagtttcgtttggtcataaaaatggtattacttttaaaaactggtttaaacaaacatcacatgaaatttcaaatcataaaatagagcagattattgataagaaagggagagtcattaccccggactcactaaaaaaagcacttgaataccaaagcaaaaataatcatttaaactatgtggatggacataatgcatcaacctatgaaaatgaaaataatcttaatttattaagaaatgatattagtaaaataatttcagcagctggcagctttgatatcagggatacaagacctgctgatatttcatcattactgacttctcatggtatcagtaatttttcttatagcaacagtgcactgaccgtaacctcattagtgtaa

SEQ ID NO: 289453 - DNA, 1356 bp, Morganella morganii
atgaacgacgtgaccatcatcgacagattcctcgatacgttctcgcgctacatcgactccggtttcgggctattgcaaggcgaagtcgcgttcctgacggccacgcttatcgccatcgacatgaccatcgccggcctgtattgggccatgagccatgccaccggccagggcgaggacgtgatcgccaagctgctgcgcaaggtgctttacgtcggtgccttcgcctacatcatcaacaacttcaactggctgtcgggcatcgtgttccggtcatttgcggggctgggtatcaccgccaccggctcggcgatcacgatggagaacttcttgcagccgggccacctggcgaagaccggcatcgacgcggccgcgccgatcctcgaccagatcggcgacatggccggcttccccgaagtgttcgtgaacctcgaccccatcgtggtgctgttcatcgcctggctggtggtgatcctctgtttcttcgtgctcgcggtacagcttttcatcacgctgatcgagttcaagctgaccacacttgccggcttcgtcttgattccgttcgcactctggaacaagacgagcttccttgcggaaaaggtgctcggcaacgtggtttcgtcgggcatcaaggtcttggtgctggccgtcatcgtcggtatcggctcgggcctgttcgcggagttccaggttcatcccgacgagccttccatcgaccatgcgctggtcgtgatgctggcctcgctcgcgctgctggcgctgggcatcttcggccccggcatcgccacgggcctggtgtccggtgcgccgcagcttggcgcgggcgcgatggccggcgctgccgtcggcgcggtcggcactggcgttgccatcggtgccgccgcgaccggcgtgggcggtgcggtcatggcgggcgcgcgtatggccccggccgccgccaagctggccggtagcggtgcacgcgccgccacgtcggcggccagcagcgccaagtccgcattccaggccggttccgccgctgcgggtggcggggccaagggcgcggcggctggccttggcaatgtcgccaagaccggcgcgcaggcggcaggccgccgcgccgcatcgggcgcttccgccgccgggcagaaggtggccgattccttccgttctggctggaacggcggcgcggccggttccggccaggccgccgccggcgaaggcgcggacagcgcaccgaagcaggagcaacccgcctgggccaagcggatgcaccgccgccagcagatcacccatgccgcgaccaccgccgcccacacgctgcgcggtggcgacggcggcggctcggggcaaggcccgagcctgcgccccgatgagtga

SEQ ID NO: 289454 - DNA, 327 bp, Morganella morganii
atgcgatgcgttcctgtcctgctggccgtgctgctgaccgcttgcggccagcagccggccgaagacctggccgcgaccttggccgccgatcccgtgcggctcaaggcgctgcgtgcccaatgcgcgaccgaccggcacaccgcaggcgaagacacctgccgcgccgccgccgaagccttccggcggcgcttcttcgccggccaaaccgggccggacgaataccggacgctggcagaactgccgccgatcccgcccagcttcgacacacccgccgacgacgcgccggaaggcgatgcgccgctcgccgctgcggaggacacgccatga

SEQ ID NO: 289455 - DNA, 618 bp, Morganella morganii
atgaatacctctatttcaccggcccggctccttctggtgctaagccttgctgcgaccttgtctggctgtgcatcaaacggaatgacgagatctgcgtttcttggtaattacgatgcattggaaaaaacgaagtacgagaacgttttactctttaaagcgcctggctttgagccccgtcattaccgggaaatagtagtcgagggtgctcagatagtgacgggaactggacgcattgatggtcttgactcggagcaagtgcgtgagcttctcgatcatgtcaacagtgaactgcgacacctccaaaccaagtccgaagctccctcctcgtcaggccgcatacgtgtgcgtgtggcaattacgaccattgagacacctaatcgagcagtcaataccctaacgacgttgcttgttgggccagtgacaaccggcggagccagtttggagttcgaggcagtagatgaacaaacaggtcgtcgagttgctgctgctagctgcttcgggcacggcaacgctctcgctgatttcaaagggtcctatacactgctcggacatgcaaagtctgcaatctccacctgccttgaacagatcaatagcgcttggagaagtgctgactcgtga

SEQ ID NO: 289456 - DNA, 639 bp, Morganella morganii
atgatcgtcgcgctgctcaaccagaaaggcggcgtcggcaagaccacgcttgccacacacatcgccggcgagctggcgctacacggccagcatgtcgtcctgctcgatgccgacccgcagggttcatctctggactggacacagcgcagaagtcagcaaggcttgccacggctgttcagcgccgtgggcctagcccgcgaaacgctgcatcaggaagcgccagaactcgccaggcgggccgatcacgtcatcatcgacggcccgccgcgcatcgccgccctggcgcgctccgcgctgctggcggccgagcgcgtgctgatcccggtgcagcccagcccctacgatctgtgggccagtgccgagatggtggcgctgatccgcgaggcgcaggtgttccggcctgcgctgcgcgcggccttcgtcatcaaccggcgcgtcagcaccacagtgatcgggcgcgaagcgcggcaatcgctggctgaacagccgctgcccgcgctgcgttcggaagtgcatcagcgcatcgtgttcgccgacagcgtggccgctggccggctcgcacgcgagacagcgcccgacagtgccgccgcccgcgagatcaccgccctggtggacgaactgctgcggtggccgacatga

SEQ ID NO: 289457 - DNA, 279 bp, Morganella morganii
atgagcagccatcacgactacatcatcgaaatcaccgcccagcatgatgcgctcaagccgttcgcgccggagaacggccagccgctgcgcttcaagatcggtgacgcggtgatctacaccaacgaatacggcgtgcagttccgtagctgcatcaacgggttctaccgcccgaccgagccttcggggctgtatgcgcgcggtatgcgctactacctcgattcgtcagcgccgtggatgccggttgcgcaatccagcctgcgccctgacgactcggcctga

SEQ ID NO: 289458 - DNA, 351 bp, Morganella morganii
atgaacaacctactcatcactaccgagcagcgcatcgtgctgctggccaacggccgcgcatcgctggagaacccggacttcgatccggctccagtggtcaagctgttcacgccggacggcggcgcgacttggctgctgaccgagattgatccagacgaccacgaccacgcctttggtctttgcgacctgggcctgggggagccggaaatcggctgggtcagcttggacgagctggcgagcgtgcgcggcgggctgggcctgccgatcgagcgcgacctgtctttccgggcagagaagcgtctaagcggctatgcgcgtgatgcgcggctggccgggcgaatcgtcgtctga

SEQ ID NO: 289459 - DNA, 510 bp, Morganella morganii
atgtcgcaactgtccttttcctcgttcgattcctcgctgatggtgcgtgacacgcagggccgctacctgctggcgactgccgagcagattctggacgccgcgcgccaggccatcgagcgcaagatgcagcgcggtacgtcgttcacatcgccggcggcagtcaaggaatacctgtgcgccaagctggccggcttcgagcatgaagtcttcgcggtgctgttcctcgatacacaccatcggttgatcgaatacgccgagatgttccgcggcaccatcgacggcgcatcggtgtatccgcgcgagctggtcaaggaagcgctgcggcacaacgcggcggcggtcatcatttcgcacaaccacccgagcggcaatcccgagccgtcgcaggccgacaaggtactgacgcagcggctcaatgaggcgctgaggctggtggacgtgcgcgtgctggatcacgtcatcgtcgcgggcaacagcacggcatccttcgccgaacgcggcctgatttga

SEQ ID NO: 289460 - DNA, 1200 bp, Morganella morganii
atggcaaagatcaagctcaccaagaccgccgtagaggcggcgcaaccccaggccaaggacgtcgaactgcgggataccgtagtgcccggcttcctgtgcaagattaccccagcgggccgcaaggtgttcatgctccagtaccgcacgaacgccggtcagccccgcaagccctcgctggggctgtacggggaactgaccgtggagcaggcgcgcgtcatggcgcaggactggctggccgaggttcgccggggtggcgaccccggcggcgccaaggccgaggcgcgcaaggcgcccacgatggaggcgctgtgcaaaaagttcatggaggactactccaagaagcgcaacaagcccaccacgcagcgcggctaccaggccgtcattgaccgctgcatcgttccggtgctggggcgcaagaaagtgcaggacgtgaagcggcccgacattgccgcgttgatggaaaagttcgcctacaagccggccgaggcgaacaacgcctttggcgtgctgcgcaagatgttcaacctggccgaagtgtggggctaccgcccggacggcacgaacccgtgccgccacgttccgatgttcccgcccggcgaggaaacccggctcatcgttgacgacgagctggcgctgatctttcgccaactggagaagctggaggccgaagggctggagaactacgtcatcccgctggcgatccgcctgcaattcgagttcgctggccgccgttctgaaatctgcacgctcgaatggagctggatcgacctggaaaatcgccgcgtcgtgtggcccgacagcaagaccggcggcctttccaagcccatgagcgcggaagcccatcggctgctttcgacggccccgcgccgggagggttgcccgtatgtcctgccgtctcccaacgacccggcccggcacctgaccttcggcgagcactatggcggctggtgccgggtactcaaggccgctggcgtcccgcatgtcggcacgcacggcatccgccaccgctccacgaccgacattgccaattcgggcgtaccgaccaaggtaggcatgaagctgacgggccacaagaccgtggcgatgttcatgcactacgtccacaccgaggacaagccggtgcgcgatgcggccgagctggtggccagccgacgccaggccatcactggcgcacggcaggccgaaggagtggcggcatga

SEQ ID NO: 289461 - DNA, 297 bp, Morganella morganii
atgaccagcctgtgcggcgcggatggcatcaatcgcaattttgatattgccgtcagtaccgtttttgaaaccgaccgggcaggagagcgcggaggccatttcgcggtggatctggctttccgtggtccgggctccgatggccccccaactgataagatccgcaatatactgcccggtaaccatatcgagaaactcggtagccgtcgggacattcagtgcattaacgtcgatcagcagtttgcgcgccagccggataccttcattgacctggcaggagttatccagacgcggatctga

SEQ ID NO: 289462 - DNA, 690 bp, Morganella morganii
atgccggtcgcgattacttacccggagatttgctcgttgaataataaaccattgataataattggtggcggaggtcatgccagcatattagttgatatattattatctcaaaagagaaagatactgggtattatttctccggataatatttctgggagacgaattttttcaggtatcccacattataaaaacgatgatgacatcaaacaattctctccggaaaaagtaatgctggtaaatggaattggcatgactccatattcgtccttgcgaaaaaaaataactcaatattatttatcacgtaattatcagttcgaaacaattatctcaaataatgcgataatttctgattatgcagaaatcagacaaggcgcacaaatctttgccggcgctatcatacaaccaggagtaataatcagcgaatactctattattaatactggtgtagttatagaccatgactgctatataggaatacataatcatattgcgccaggagcaacgctatgcggaaatgtaaattctgaggatgatgtatacgtaggcgcaggatcctgtattatacaaaatgtaaaacttgcatatggcagtatcattgctgctggtacaactatcctgaaaaacacatccgagctaacattaactattaataaaatgaatcagataaacaagttggttaaaaatgactaa

SEQ ID NO: 289463 - DNA, 633 bp, Morganella morganii
atgactaatagttggaaaaaagcaattctacttcagaatgctacaataaaagaagccttggaaatacttaatactagctctatgcgtgcagttttggttacggatactgaaaaccatctcaaaggtgttgttacagacggtgatattcgcagaggtatacttaatggtattgatttgaattcaaatgtagatagcataatgaataaatctccaattaccgctcaatcaggtattgataaaaatcatctaatacaaataatgagaaaacatgatttattatttatacctataatagaaaataaaaaattggttggattagagacaatacatggtgctttagctaatcaacctacatatcaaaatcctgtatttattatggctggtggctttggaacccggttaagaccattaactgataattgcccaaagccaatgttgaaaattggcagtaaacctatattagaaacagtcataaatagtttcattagtgccggatttgttaatttttatatttctacccactatatgcctgaacaaatacataattattttggtgatggctcacgttttggtattaatatcacatatattcatgaagagattcctcttggtactggcggagcactgggctaa

SEQ ID NO: 289464 - DNA, 396 bp, Morganella morganii
atgataaatggtgatatattaacaaatgttgattttcagaatttattagaatttcacctcacccaagaagctgatgccactatgtgtgttcgtgagtataattatcaaattccatatggtgtagttcatggtgatggtaataaaattctaaatatggttgagaaacctattcaacgttattttgtaaacgctggaatttatgttatctcttctcatattattcaatcagttcctaaaaactaccggatcgatatgcctactttgttagaagagcatataaagaaaaataataatatactgatgtttcctatacacgagtattggttggatattggccgcatggatgattttaaccgagctcaggttgatatccacacacttggattagattcgtga

SEQ ID NO: 289465 - DNA, 969 bp, Morganella morganii
atgcaaaaaatagcagttattggactcggcaatattagtagccgtcaccgtcaaaatttaaaaaaattatttccggattctatattatttgctatgtctgccagtggaaggagacctgaagagccaatagaaaatgctgacataatttgtacttcgatagaagagttaattaagcaaggaattgaattagcgattatagcctcgccagcctcattacatgctcaacatgcaattccgttaattaaagcaaacattccgatactaatagaaaaaccaatatcatctatacttagtgatgctgaattaattaaaaataaaactaccgaatataatactcctgtagccataggatattgcttacgttacctttcatctgcaaaaaaaataaaagaatatcttgatgataagataatcggcaatatttaccatgtaaatattgaagtaggtcaatatctgccggactggcgaccaaataaagattatctcaccagtgtatctgcaaataaatgtctcggtggcggggcattacttgaattaagtcatgagctcgactatgcacgatggttatttggtccactgacgttaaatcacgctattttgcgaacttcagatgaactaaatctaaatgtagaagatagtgtagatttgcttgcttcaactaaaaaaaatgctgttatacatattcatctggattttttacagcgcaaagcacaaagaatatgtcggattgtaggtagcaaaggagctttagactggaatttaattaccaatgaaatatattttcactccttaacagacagtcttctgctttacagcgagccaacatgggataaaaatttgatgtatatctcaatgctaactgattttattgcaaaaataaattccgaagaaaatcaggttgctgacatatcagattcagttgagacaataagattcattgaagatataaaaaattcatacccgaattaa

SEQ ID NO: 289466 - DNA, 480 bp, Morganella morganii
  misc_feature (377)..(386): n is a, c, g, or t
atgagtaaatttaaaatagcaattattaattatgatatgggtaacattcagtctatctcaaatgctataaataatattggcgattttgatatatacattacaagctccgaagatacaattaaatctgctgattgtctgatacttcccggtgtaggcgcttttcctgatgcgatgaaaaagctgaaagaaaaaaatttgattaacctacttactcatgaagttatcgataataaaaaacctgttcttggtatttgtcttggtatgcaattattatttgactattcaaatgaaatatctcatgaaaaaggattaggatggatacctggagttgttgaatatattaaacccggaaatggacttcgggttcctcatgtagnnnnnnnnnnggatggaatacattggaaatccagaaaaacaatgtattctttgattcattgtctgatgataaagatttttatttcgttcatagtttatgcgtga

SEQ ID NO: 289467 - DNA, 1731 bp, Morganella morganii
atggcaaccgtagcagatgggatccggtacgccgaacaggtagttgccggagaaatagttacgggcgaactgatacgcctggcgtgtcagcggtttcttgatgatttagagcgtggccctgagcgcgacatctttttcattgaagaacgcgcccagcatattctggatttttaccagtttgtcccgcacgtcaaaggggcgctggcaggcaagccgatagagctgatgccgtggcatacctttattctgattaatatctttggtttcgtgatcccgctggttgatgaactcagcggtgaggctcagtacgacgatgacggcgatccggtactggttcgtcgcttccggacagcctataacgaagttgcacgtaaaaacgccaaatccacactttcatccggcatcggcctgtatatgaccggtgctgacggtgaggggggcgccgaggtttactcggcagctacaacccgtgatcaggcccgtatcgtgtttgaagatgcgaaaaacatgattaaaaaggccaaaagctcactcggccgcctgtttgaatttaataagctggcgatttaccaggagcggtccgcatccaagtttgagccgctttccagcgatgcaaacaacctcgacggcctgaatattcactgcggcattgtggacgaacttcacgcccacaaaacccgtgatgtgtgggatgtgctggaaaccgggaccggtgcccgtctgcaatcgcttctgtttgcgatcaccacagcgggatttaaccgcgaaggcatctgctacgaactgcgggattacgccatcaaggtactgcggggcgtagtggaggatgacacttttttcgcggccatttacacgctggataaagatgatgaaccgttcgatgagtctgtctggataaaggctaatcctgggctgggtgtctgcaagcgctttgatgatatgcgccgcctggcgaaaaaagcaaaagagcagattgccgcccggcctaactttctgaccaaacacctcaatatgtgggttaacgcggagtcgatctggatggactcaggaaaatgggacaactgccctgaaaacgcgccggatgatgaactgaagaactacccggtctgggtcggtgttgacctggcaaataaaatcgacgtggccgcggcaattaaggtttatgaagatccgcgcggacaggtgcatgttaagtgtaaattctggctgccggaagaccggatagaaaccgcaccgaatcatattgcggagctgtaccggaaatgggcggccgccgggcatctggagctgactgatggtgaggttattgatcatgacatcatcaaagccgacattctggcatggtgcgaaggtgatgacctgcgtgagctcgggtttgacccgtggagcgcggtgcagttctcacgccgcctggcggaagaggggatcccgctggtggaagtggcgcagacggtgaaaaacatgtctgaatccatgaaaacagtacaggccgatgtctattccggaaaatttcaccatgatcacaatccgatgatgtcctggatgatgtcgaacgtaaccgtaaaaccggacaaaaacgacaacattttcccgaacaaatcgacaccggaaaacaaaatcgacggaccggtcgcgctgtttacggccaaatcacgccagatggtgaacggcggggaggataagcaggatctttccggattctttgaaaacccaattatggtaggtatttaa

SEQ ID NO: 289468 - DNA, 396 bp, Morganella morganii
atgaaatttacagagctaccgaacaatgcacagcatctcgcggcaaaagtactgactgatattttaaatgaaggttgtcatacagaagaatcagcaatcattgacgcagccaaaaaagtaaaaaatgcgtttgccgaactgtatggcagagccggttctgatattcagataggaagcgtaacagtacactcaaattcagccgcgaaggattctgtcgaagatgtaatggcagatttccagcccggcgaattaagcgtatttcacattgtgaaaatggtcaatgccgtcaacctgacaatacgcaatgaactggccccctatgacaacgatcataacgacacggataaagcagcaaaagccatattaaaaacagctcttgccgcattagacagatag

SEQ ID NO: 289469 - DNA, 201 bp, Morganella morganii
atgagcaatgaaaaaatcttttctgatatttctgttgagaaatttgtttatgacatggcgctatctttaactaataaagatcccagtatttccactccggaagaattcattaagcggatgctggaattaatcccagaatgtcacaaagcagcagaaattaacttaccgaaggcgaaaagttttttttctagaaagcgctaa

SEQ ID NO: 289470 - DNA, 333 bp, Morganella morganii
atgaaagcacaacctgaaacactaaaagtaacactttacatccatgccaaaaagcaatttgacggcactatcgcgttcgaagcgtacacctataaattcaaagcgactgacggcatgggctttcctgttgccgagcaccagttcgaattacctgtccccgcaatcagcaaacccgatttggttcgggccgaaattgaaagtttacgtgcggaacaaaacaagattctcgctgacgcggaaattaaatcagggctgcttgaagatcgtatccaggcgctgctgtgtctggagggcaaagttatttccaaagacgacgaagcgttaccttactga

SEQ ID NO: 289471 - DNA, 303 bp, Morganella morganii
gtgataacggtattaaccacagatatttttgatgactggataggtgcgctgaaagatatccgagcgaaaacaaaaattcaggcacgtatcaggcgaattaaaaacggtaatttcggagatattgaaccgataggcgagggcttttctgaactgaggatacatgagggaaagggttacagggtttatttgcggaaaacaaacacgtttattgtgattttactttgcggcggggataaaaccacgcaacaaaaagatattgaaaaagccaaattgattttcaaagaaatcgagggggaagtatga

SEQ ID NO: 289472 - DNA, 288 bp, Morganella morganii
atgaaagttaaaattaaagaatatgatatcgccgagcatttaaacaacgaagaagaaatgcaactttatttaaatgagattttagaagatggcgaccccgcgttattactttccgcgttaggtgatattgcccgagccaaaaatatgagccagctttccagagaagccggtatgtccagagaggggctttatcacgctttatcagggaaaggtaatccgacattcagttccatgctgaaaatcaccaaggcgttaggcttgaaacttcatttcaccgcaggggcgtag

SEQ ID NO: 289473 - DNA, 552 bp, Morganella morganii
atgaaacaaattaaattcaggttaacggatgatgaatacgaaaatatcaataataaattgaatgaaaaattaaaaacatcggttcctggattttttaaaaatgtgggaatggaaattcttaatcgcgatcctgatattaaaaaatcattaaatgacgaaaatattaatattaatgatttatcagaatactgtgacgaacgtttacaggttttggtaacacatgagcaatctgttgcattgcaaaaaatggcggataagcacggttggtcactatccaaagaaatccggttccggttacaaaatacgctcaataataatctggattttttcgatcaggaattggacgaaatgcatgcctgtcgtaatcagataagaaaaataggtattaatattaatatgattttacggcgggatgaaggcagagttttagataaagacggatttaaacaagacattgatgatttgaaaaatcaattatctgacttagaaagtagatttaattattttctgaaacaatgccgaggcagaattacatccagtaaaggggagtga

SEQ ID NO: 289474 - DNA, 237 bp, Morganella morganii
atgaaaagcaaaaaaaatgaattaatagccacattggttttactttcaatgggattattagccgcctgcaaagaggaaactaaatcatacgattggtacctcgataacaaagaggacgcttatcgggtgtatgaaaaatgccaaaaatcaggggagggttctgataactgcgaaaatgcccgcagagcatataacgcccatgaaagggcaaaacaattcggttattccctaaaatag

SEQ ID NO: 289475 - DNA, 267 bp, Morganella morganii
atgactaactgtaatcgtattgatccccaatatttagatcaaatctttcctgaaaaaaaactcaccatagcccaaaagcaggacgcactgctgtatgcaatgggtgcatcggtgaatgagcttgccggaatgaacgatcgccactctgataccgtcagaaagcgattaaatgagacgacactgacagttgccggctgcacagaaatcaaaaacttgagaacagtcacattaataagaattttaaatctgttactgatgaaaagttaa

SEQ ID NO: 289476 - DNA, 747 bp, Morganella morganii
atgaaagggaaaaaacctgaatcaataaccatgaccttgaacctgcgcgggaaaaatatcgtgatgagcaatgccattacgagagcagcgcaaagcctgtcactggcagaaaaacgcatcatttttgctgcaatagccaaaatgggcgggcagtactccccgattaaaatcacggcggaagaatacgccaatacgtttggaatgccgttaaaacaagcgtattcacaattaaaaatcgccgctgacaatttttttaatcgatatattagtttcagaataaacgaagtcagcgaaacagacgttgatgtgtggaaaataagatggttaggcgcttacaaatacaatgaaggcgaagcccatgttgttctgagcttcacaccacaggtcaccccctatctatgcgaactggaagaaaatttcactaaataccagctatcgcaggcgtgcggactgcgctctgttcactcatggcggttacttgagttattcgagcaaatgaatacccataaagacaataacggatggttatccatatcgttggatgattttcatcatgcaatggaaacccctgaaagttataaaaaaacctttggattacttagggaaagggtgatagaacccgccgtaaaagaactgacagaaaaggataattggatcatccaatggaaaccgttaaaaagaggcaaaaaagtcgttaggcttgaattctggtttcaaaaagatgaccaactaaaaattgatatttaa

SEQ ID NO: 289477 - DNA, 882 bp, Morganella morganii
atggaatatttgcaaagtgaatatggggaaaatgcaattaatgcagttttacacttggacgagcaaactccacatattcacgcctttataacaccaatcgaaaataaaaacggaatatataaactaaacaataaatcgtatatgaaaaaatacgaaacaatgcaggatatatattttaaatacaataagccattaggtttaatccgtgggattaaaaaagaggtttcgaatgcagaatataaggaagttaaagaattttacagcgatattaaaaacattaagaatgaaaccgaattagaaatagaaaataataaaattgaaaaaattagagttgttgaaacagaagaaaagaaaaaattatttagagatccggaggtagtgcctaagcactacacaggagctgaggttaatcgttacatacgaaaggctctaaaaccttacaagaacgaacgaaagcccattatagctcgtctaaacgggtttaagagccgtttagagcattcagaggctgagttgtctgatctccgtcagaacttcaacagaagagtccaggaacgggtacaacaggagcaaaagttagcagtggccagagccacggctgagcaagaacaaatcattcaaaataaaaacagaaaaataaaagatatggagttggaaataatagaatacaaaaggcagttaaaggaaaatgcttcaatttctcagagatatgaaaaatataaaattaacagtgatgttttagatctaatacaagagcataaaccggcagaatttaaacaactcttcaatgctgctattgcagcagcagatgccgaatattcacagaaacagcaaaataataactacacaccccagaataagccaaaggctttaaaattataa

SEQ ID NO: 289478 - DNA, 606 bp, Morganella morganii
atgaaaaaaaataaattagtaaataaagaaaattactcaatattagagactttgccggaagatccattatttgaaaataaatcgactttagaaattgatttaaatcaattcgatttatttaatagaattgcaaacgaaactgtagaagaacttataataaaagaagttaacgatcctaatgaccgaagcgataagagcaatggtgttaatttaaatgcaaaagtttatgtagaaaaagaaaaaaagacttcattaaaaaaagattttgttattacatttgtagataatcttgaggctttagcaaaattaaatttaaaacctaatgagtttagaattatcgtcgagattgtaaaggttatggaatacggaaatttaattaacctttcacaatctacaattgcgaaaaatttaaatcttgcaaaatcaaatgtaagttattattttaaaaaccttaaaaagaaaaatatattagtagaaaaagacggacacgtctttatgaatagtaatattttttctaaaggattagcccatcgtttggacgaagaaaaaagaaaaaatttgaaatccgcacaagtcgaagacgataattttaaaaactcattttaa

SEQ ID NO: 289479 - DNA, 186 bp, Morganella morganii
atgtttaaacatgaattaggtcaggttgtgcaggtcaccatcagcggcgaagaaggtcatgtgaaagcccgtgctgaatatcataacggcccgaatcagtatctcattcactatctggcagcggatggccgtggaactgatggctggtttgaggaaggtgagctgtccccggcagaaccacaataa

SEQ ID NO: 289480 - DNA, 189 bp, Morganella morganii
atgatatacggattgttcatgctgatttgctctgccaccggctgcgagtaccagccctacggctacgtttatccggatgaaaaaaactgcctgatggataaagaaatactgaccgtgaaggggattttgtcagagtgctatctgatcgatgaaattatttcagccgattttgctcagacaaaaagttga

SEQ ID NO: 289481 - DNA, 225 bp, Morganella morganii
atgattttgctcgcagaacagagaaccgtctgcgtcacgcaggtaacgcagagcaacctgtttgttgttttccataacaggttcagtcagtggtttgccgtccaggaatttttcttcaaccacctcatagccccaaccctcaccgatcggcccgaaaatttcggtagcacgcataaacatgtagttactgttaatgctggtaccctgaaatcccgctccctctaa

SEQ ID NO: 289482 - DNA, 261 bp, Morganella morganii
atggaaaaagacatcagccactatccggaagctggttgggtgtttacaaagcgggcacacggtaagggctatgccggtgaagcattgggagccatactgaactggctgaaagaggtgcgcggtattaatgaatgcgtgtgtattattgctccagagaataaaccctccatccggctggcagagcgtaacggattccgcccgcaggagacactgagaatgaatcataaatccgttattttctatcacgttacactggactga

SEQ ID NO: 289483 - DNA, 537 bp, Morganella morganii
atgacaaaccaaaataaaatccctttttacgctttactatcatgtattggaggatttactgatgccagttcctttattcttttaaaaacatttacagggcatctaactggtaatagtatacttagtttaatttatcttacaacatttaattggtccatgttaatacttacattagtatcaatatttgggtttttattaggcacaatattcggctacaaatttagattaaaaaatgaaggccaaaaatcacagacttatattttattatttactttatgcataataacattagtattctctatttattttttatttaatgagattgataataactatatatttactattgcaataagtttatcgatgggaatacagaatggtaatttttcaaatttcaataacacagggatacatacaacatacatcactggaatgtctactaatttaattggaacattattaaaatcaccacaatgtaataatgaaaaaaaatctacttatgtcttattgtatcttttattttgggaggtattttag

SEQ ID NO: 289484 - DNA, 483 bp, Morganella morganii
atgacaaagaaatttaatttaccagtggtaccaactcccctcatattattacctataacaggatattttgacctaatcatatatcatttttttacacaatatacacagtttcaaattccatacaaacacaagggcggattgattcccgcaacacagtttaccgtcctggtagaaaatacactaatcttccggggtaatgtctttcagccttggtacagaggatgttttaccaaagacataaaaaatgaaaaacgagccagttatataaaatacagttgcaaattagtagcagactgcgccgaaaaccgggaggcgcagtttaccctgagctttcaccggttctgctatctgaatgatgcggaactgcgtttgaaggccatcacaaccccttccctcagaaccacatgtgccctgcctctatgcctgactcccacttcaatttctattttcacattctttcgtccacgaggaataaccgcatga

SEQ ID NO: 289485 - DNA, 2292 bp, Morganella morganii
atgcttgaaagaattcatcaaattaccagcgttggtttattccaggatatccgccctgctggtatgtcctttaaaaaaatgacctttgtctatgctgataatgggcgtggtaaatccacccttgcgtctattctgcgttcctacactgaaataaattcagatattgtacggcacaggaaaacgattggagaaacagcccctcaaaatattcatctgcagttttctcagggaaatcgtgcgatattcgataacggcacatggaatggtaagtattcagatgtgcatgtcttcgacctagattttgttgatcgtaatgtttactcaggtggtgaaatcagcgctagccatagaaagcgactgctgagttttgcgctgggcagtgatgcagtagcagcaagagctgcttttattgatgcatcagacaaggcagaggaggccaaaagagttacgagactggcaagtgaaaagctgacggtagcacggggagatgtaacgctagctagatacataaagcctattcatgaagagaacattcaggaaaaaattgcattagttgaatcagaactggatctctgcaaaagaacagagacgatccgcaaccgtacgggctatcttccattacctctttacactcctgatttcagttcttttttttccacacttgcatcgagttatgacagcctcagtgcaggtgcagaagaggtcgtccttgcgcatattgaccatatcaatgtcgaaggttttgagcgatgggcgagtagcggccttgattatataaaagacgaacattgtcctttctgtactcaaagtctagatggtgttcaacttatccggtactaccgggagcggtttaatcttgcatacaaagctttactcaataaggttacaggtctagataacgttgtggcgacagccatgcgcgttttcaatctagccttacttgagagcaagattgagcaggcggctttagtgactgaaaactggaaagattgtctccagttgaccgtgagtctccctgatttcgaaaaaattaaagctaatttagaaggtcttcagtcatcgctgagtcgcttaacggaagccaagaaaaacgatccgctttcaaaaacccaaggcgactatgaaaaagaaatcgctgatgcagtaactgcaatcaatgatgagctttctgcctttaattcgggcgtggaagctgccaatatggatattcaggcttataaagaggcgcttgaaaccaaaaatgaagaaagcctgcgggttacattatcccagtatgaagcaacccgacttcgtctatcacctgtggtagtcggttttatctctgattatcaggccgctaaaacagctgaagtggcggcttcagaactaaaggaaatacggaggggtgaactgaatgtgatcatggactcgacccttggaaagtatcaatcctctattaatgatttattgatgaagtttggtgcaagctttcgcatcacagaaattaattataactatgccggcggcggtgagcctaaatctgaatatgcaattgaacttagaggggaaaaaatttcgctaactggagagaaatccagtttccgaagctcactcagtgaaggggataaaaggacgctagccttcgcattcttcatctctgtgttgcttcatgacgttgatcttgagagaaaaattgtcgtgattgatgatccgatgtgtagtctggacaatcatcgcaggaaccacacaatcaccatcattaaacagatttatctccgcagcttgcaggtaatcatcttggcgcacgacctgttctttatccgtaccatgcgagatgagttcctgaaaatgcctgctactcaaatacaggacatttcagccttacgcattgtccatattgctggtgatttcagtgacttggataaactagatgtcgatctggaatgtgaatctccctactataaaaatcatcggcttgtgagcggatttatcgatggtactcatcatcagttacacgatacggctgtggcaatcagaccgcttcttgagggctatctgcatcgacgttttccaggacaaatttcaccgggaaatctgtttggagaggtagtaatgcagattgcacaagcacaaccaaatgatccgttattcttcgcgaagtcactggtacctgagttgaatgaaattaacaattatgctggtcgctatcatcatgacactaaccctcaggcatcatcagaacccatcacacctggtgaactgatgtcttactctcgacgggctttgaatgtgatttatcgcggaaacgtatga

SEQ ID NO: 289486 - DNA, 477 bp, Morganella morganii
atgaataaccgattatttaaaaaagtcatggctgcctgtactgccggggcgattgccggcgcgctggcgctgatccccgcgtatgagggcgtgagatatgagccatatcaggatgtcgccggagtctggacaatttgctacgggcatacgggtagcgatattcagcccggcaagttgtatacggatgctgaatgtaaggcattgctgcacgacgacctgacgaaagtccggcgcgcggttgacccgatgatcaaagtgtcgattgatgacaacacccgggcggcgatctactcctttgtttacaacgtcggccccggcgcgttctcgcgttcgactatgctgcggaaactcaatgctggtgacatctccggtgcctgtgaagaaatgaaacgctggacatttgccggaggtaaacagtggcagggtctgatcaaccggcgcgagacggagaaagcggtatgccacggaaccctttaa

SEQ ID NO: 289487 - DNA, 336 bp, Morganella morganii
atgaaagaatctgatttgttttctttgcttgacccggtgctgccgggcagggtttttccatatgtggctccgcaggatgagcctaaaattcagccgccgtggtgtgttttttcactttatgataccggcggcgatgtgctgtgcggtcgtgctgagacaatgaccaatatccagattgatgtgtatgcaaaaaccatcgatgaagcccgccggatccgtgaactgtctgttgctgctgtttctccgctttcaccggcagagtttacagaaaagcagggctatgaagcggatacctcgcttttccgggccacgctggagtgtcaggtctggcaataa

SEQ ID NO: 289488 - DNA, 1518 bp, Morganella morganii
  misc_feature (1484)..(1493): n is a, c, g, or t
gtgatactaaattcgggtaattaccagaatattatcagttcaaatagcgccttttctcccctctactatctgcgctcaaccccaataaatgtacaacaacaatcccaagaaacggcaatcatagctggatttttatatgattatcttactgaacaaaatattgatttcgacaacctcttgtcagaaaaaaaatcagcagatgaccatggcattatcgctagctatcagtcattaatggctaattggctaaatttaatagcacaatatccacaaactacactcaattcccccccaactaatagtacccagcgaacgctaatagaaaatttgcagcgccacaaaaacaatttaacagacatactcaaaggtaaaaaatcagctctaacactatttgatgatccctattggtcaccagaacaagtcactatgcgtattgatggaatgcactactccttagaaaatttactacaacaaataagagaacttcatcattcactaaaaaggccaataaaaatcattcaattaggtgctagaagcggtatttcagcaaattatattctgcaacgattacccaataatatggttaccctactgctaactgatgagtctctttcaatggtaacgcaagctaaccaaaatttatcagattatcaaaatagttatgctgagcctcttacagaagtatttcttcataaaaatcgatatagtgcagatatcatttggatgaacaattatcttcatcgattagacagcccacaaaaagagatacaaaaattcgtttcactctgtgctccgagtggaatgatttttatacaagaagtgttacatgcccctgcacaatcactgataagcatctctttattacaacaaaatggtagtgatcctgctgatgaattattaacagcaaaaaaatgcaaagatatctttagcgcttctactgcgacttataaaagtgaaggagttaacggcgaaatattgacacagttataccaagcaccagaaaaaatttatttaccagataaaaataagctagagcatgatttgcgccaatttttaccagactatatgatcccaaaacatatttattttctaactgagttccccttaaccgcaaatggcaaaatagataaccaatcattaaaattgtattgtcaggaataccaagaagaatacctaaatcaacaacctatcaatggtaaagaacagatcatcataacaatatggcaaaagctccttggcaccaacaagatacaccgtcacagtcatttctttcgtgaagggggagatagcctagttgctattcgattgatctctgatttaaaccatattggctaccaagttgaactggagcatatctttgcttatccgatcctttctgattttgcacaaaatataaagcagagcgaagttttcgaaaaacagccagcaatttcacataacgaggcgtatagatacaatccatttccactcactgatattcagcnnnnnnnnnntagcggaaaatttagatgtacctaa

SEQ ID NO: 289489 - DNA, 1587 bp, Morganella morganii
  misc_feature (1532)..(1541): n is a, c, g, or t
gtgtataagagacaggattataacaatgacttgttccggaatgatgttataacaacaatatttgatgtttatatttctcgtatacgccaacttgccaacgatcctaatgcctggattgaaacccaacctgatttaattcctaaaaaacaattaaaaaatagaatatcagttatcaaaaaagataattcactattaccacatacactgcataagtctattttccataattattcaaattcatcaaaaattgctgtcattgatatcgactctcaggaatggagctacaaaaaattattatctaaagcaacaatactcagtgatcaaataatacaacaaggttataaaccagaagacagaattggtgtatgtatgccaaaaggagtagggcaaatcattagcgttctggctattttattaatggggggaacttatgttccgattgatgtactacaaccagaagaacgtataaaccgcattgctaaaaatgctcagctttcattactcatcgtatctgatagcgatccatcctattcaatctatgctacattttgtaacaggattgtttggcaaaaagttcaaccctccgagaataaaccactacacaatatagatatatctcctcatcaagcagcttatgttatttatacttcaggttctactggagagcctaaaggtgttgttgtatcccatgccagcgcaatgaatacctgccttgatctcaatcggcgatataacatttcagacaaagatcgggtacttgccatatcagcactacattttgatctgtctgtttatgatattttcggtgttttaaatgccggagggactcttgtattagttaaagaagatgagcgccgtaatcctgatgcatggttacgacttattaaccaacataaaataacactttggaacagcgtacctgcactgtttgatatgttactaacctatgcagaaggaatagggtcatccattccacaatcgctgctattaatctatctctctggagattggattgggcttgatctcccgacacgttactataatttctgccctgatggacaaatagtcgccatgggaggtgccacagaagccgctatttggtctaactattttaatgtcacaacattagacccatcctggagctcgataccttatggatatcctttatccaaccaacgttatcgtattgttaatgctagaggagaagattgccctgattgggtatcaggagaactttggattggtggtgcaggcgttgcgttaggctacctaaacgatcccgaaaaaacagcacaacagtttgtaaaacaaaatggtgaaaattggtataaaacaggtgatatgggaagatatctccctggcggtatacttgaatttttaggaagacgtgaccgccaagttaagattggcggataccgtatagaaccaggggaaattgatgccgcattcaataagcttcagggtgtgcaaaatgcgattacactatgccttggtaatattatcgccgccagtcagtacggtaccgaaggggnnnnnnnnnntgccttggtaatggtaataaagaaaaagcattacactcttttgtga

SEQ ID NO: 289490 - DNA, 1713 bp, Morganella morganii
atgctgaattttgaaactttctatggtaatagtgaacctatagctgttattggtctttctggtcgcttccctgatgcacaaaatattgatcaattttggcataacataattaataaacacgatagctctcgtcttttttctgaagaagaactaaaagccgcaggtgtcgctgaacaaacttatcgttcacctgattttgttaatcgtggcgcgccgttagatgaagcggaatattttgacgctactctatttaattattcacgctcagaagctgaacttatcgatccccagcaaagaatttttttacaaggtgcttggcatgctttagagcatgctggatatgccccttgcaatataaccatcaaaacaggtgtttttgcttcagcaagaatgagcagctatcctgcccagcaagatttagcattgcacaatattggccatgtccgtggcatgcaaaaattattagggaatgataaagactatctcgcaacacgtattgcatataaattaaatttaactggtccagcattaactatacaaaccgcttgttctagctccttagttgccgtacatatggcttgtgaaagtttacgctctggtgaatgcagtatggctattgctggtggaattggtatcacatttccacaaaccggtggttatctatatcagaaaggcatgatcttctcaccagatggtatttgtcgtccttttgattcagaggcaaacggtacttttgctggtaatggatttggtattgtagtgttacgtcgtcttgaagatgccttagtggatggaaacacaattattgctgtattacgtggtagtgccattaataatgatggtcatcaaaaagcgggattcacagctccctccgtagcaggccaagtttcagttattagagaagcaatacaactggccgatattaaaaatgaagatattgaacttattgaagcacacgcaacagctacaccattaggtgatccaattgagtttagtgcattatgtcaggttttcgctgatcgctctcttactgcttctaaatgcgctattggctcagttaaaggcaatatcggacatctggatacagcagcaggtatcactggcctaattaaaacgatattagcggtaaataaagcacttattcctccatctatgcattttaatcacccaaatcctcaattacaaatagaaaaaagcccgttctacattcctaaaagccctaaagcttggtctagcagaatacgaactgctggtgtttcttcatttggtattggtggaacaaactgtcatatcattgtgcaatcattgcctgactcattagtatcaatcaaacctgaacaagaggtagacaataattttgaatactcattattgcttagtgccgccacaaaagagagtctaaaaaaacttgctggtgattatgcaccattaataaaaattaccccagcaaacattctggctcataatgcattacagcaaagacaactcaacttaccatggcgcttatctatccccttaacaagtgagagtgatatttcactgttagctttctctcaaggaagtgctgattctttaatacaatatggtcatacatcaacaaataagaaaatagcgtggaacttgttaatgccagttatattcaagcggctattgtcgcctatgaaatcgcaatggcagcacattggcgagcaatcggtattttacctgaaataa

SEQ ID NO: 289491 - DNA, 354 bp, Morganella morganii; identical to SEQ ID NO: 289429

SEQ ID NO: 289492 - DNA, 282 bp, Morganella morganii; identical to SEQ ID NO: 289430

SEQ ID NO: 289493 - DNA, 153 bp, Morganella morganii
atgaaagaccagggcgaaaataaaccgtcttatgcgttcggtgccccgacgaacaccgtttctcagggctacccggtaccgatcggttacggtaagcgccgcatcggcggagccgttatctcagccggtatttacgtcgaagatcagcagtaa

SEQ ID NO: 289494 - DNA, 384 bp, Morganella morganii
atgaacaaatatcgtgacaaatctgactttgagattaataaggctgtggctgaaattattcacccaggaaaggtattcactcatgcatattcattcggtgatgcatacggaaactcagtgcagtggatatgtggctatgctgaatatatccacgtcgattattgcaacaacccggcggacgcaatgccgattattattgagaataatatttcattacatgctccggttttttcagagggatggatggcggaatacaccggcagtgatgacgatgttaatgacgggtttcaggcagattattttgattcacataatcaaaacccactacgcgccgctatggaagtattcctgatgatgaaggatgcggagaatgaaaaagtatga

SEQ ID NO: 289495 - DNA, 1836 bp, Morganella morganii
atgcaaaataaaaaatttagagctgatattaatggattaagggccattgctgttttatcagtgatgttattccattttaaccaagggttgattcctggtggttttgctggtgttgatgtattttttgtcatatctggttttttaatgacatcaattatatttaggggattagaaaataataacttttctctatggagtttttttaaagcaagagctagacgtattgttccagcgttaataactatcatattgattgtattatcacttggttatttattctttgaaccattaacatatcagttagtcggtaagcatgggttttctagtttactttttatatctaatatcacttatgctaatgaggcaggttattttgatacagactcatttagtaagatatttttacacacatggtctttatcagtagaatggcaattttatataatttatccaatggtgttgcttatcttatcaaagctactatcaataaatgctcttaaaaaggttgttgtgatttccgctgttattagctttattttttgcatttatttatcctccgtgaataaagctctttcttacttcatgatttacactagaggatgggagatgcttttaggtggtatcgcatttttatacccactatcaacaacagataataaaaaaagaataattgatgtgctagggttaattctgattattacatcattctttattttttcaaaaaattataactggcctagttataatgctttgcttcctgtttttggcgcgtatctctgcattctatctaataacaagaaaaccttactatctaatgttataattcaaaaaattggatttttgtcttattcaatttatcttatccactggccttttattgttttctttaaaaaaataaatataaatgtatctattttaacttatttaacaatcaccatattactttcatttatattatataatctcatagaaaaaagaaggaattacagttatgggttaatggcattttggattctatctatatgtgtatcttattacatctccattgacggagttagtagtagagttgatgacaagtacaaactaactaatagtgaatttcatgaaaaatattatggaggcacaaacattgaatcaatcggaaatattgaaaaaataaacaacaataagaaaaaaacaataatattagctggagatagttttgccaggcaatacgctaacttcttcaaaaaaagtgaatacaacttaatatatatctttgttgatggttgtttttcaactgaaaatttccaaagcgtacacggtgatgatggtcatcagtctgcatgtagaaaaagatataataatatgaataaagctattaatgagaatcctaacgcaattgtcatatacagtcaaaattgggattcttatatggttaaaaacatcaaaaataataacagcaaagaactaaaatcaacagatatactatatgatgagatattaaatataacatcaaaatataataataaatttattctcataggtgctgttaatggctcgatgggttattcattattcgagtgcgaagcaaaaaattcattaaacacatacagctcaacatgtctacataatgtagaaaaaagagaaatagcatcaaataatatcttatataaattatccaaacatgctgaaaatatcgaattcattaatccaaacgattacatgtgtgatagttcatcatgtaaattatcagatggcgcgggaggttttatatattcagacaatgaccacttgtcaatatatggtgctaattttgttggcgggaaaatattaagagaaataaagaaatattaa

SEQ ID NO: 289496 - DNA, 426 bp, Morganella morganii
atgatgacatatttatacagtgcaaaaacaaacagcttttatccgattgagatgaaagaatcgtatgagaattcagggacgtggcctgattttggcgttgaagtaaatgacgatgttttcagtgaatttgcaggatcggagcctccgggcggaaaggtgcgcggcagtgacaataaaggctatccgtgttgggttgatatccctccactgactcatgaagagcatattgagatagcagaacgcaaaaaacaaaacctgattaccgaggtcactcaggaaacagaaatgctgagaactaaactggctctcggtcgtatcaaagaggatgaaaaggcactgttaaacgcctggctggattatctggatgaactggagacagtagacgtaaccaccgcgccagatatcacctggccggttaagccttaa

SEQ ID NO: 289497 - DNA, 480 bp, Morganella morganii
atgaataaatggagtgatgttttttcatatgtcaatggggatctggtttggaatatcagggcatcacaaagagttaaggtcggcgggattgcgggatgggagggaggtgatggaagaattagtgtggaatataaaggtgtgagttatttggcacaccggattatttgggagctccactatggggagattccagaaggtatggttatagatcacatcaaccacaacccaaaagataatcgcatagaaaaccttaggctggtttcattcgcacagaacgcaagaaacagaaagcttccgacaaacaacacatctggtgttattggggttagttggaataagtttcgtggtaaatggcgcgttcagataaacgcaaatgggaaaaagaaacatgtaggtctttttgatgatctcaatgatgccattttggctaggaagaaagctaatgatgagcatggatatcacgaaaatcatggattgtag

SEQ ID NO: 289498 - DNA, 210 bp, Morganella morganii
atggaaccaacggattttgaaaagtggtgtgcggaagaaaccgggattccggtttttatgattgtgagccaacgcaaaaataattcacgcgatatcgatgggtatgaataccgtgaaattaacaccagataccgcgcatggatggcaggcgtaacgagcatgctgccgtatcagacaccgccaaaaggagatgaagatgaaatggattaa

SEQ ID NO: 289499 - DNA, 123 bp, Morganella morganii
atggaacagaaatacgattttgtattaattttctccctgctggctcagatggagcagtgtgtaaataaaattagcgaattaaacaaaaaattgggcgaatcatggacagaaaaaactcagtga

SEQ ID NO: 289500 - DNA, 162 bp, Morganella morganii
atggaattttacgaagtttacgtttacgaatgtggagaatatttcagcaccatttttattcatgcgagtgaccgggattccgctgaggagcaactcagaaaactaaacagcgtgagcaatgaccacctgtttgcgctgaccggacgggtacaggagaaataa

SEQ ID NO: 289501 - DNA, 393 bp, Morganella morganii
atgtcaggacatccacatgctgaccttatggctaaggcagcagaaatagcgaagacggataaagagtggtatcggcactttgaatttaaaactgataaatgcagtgattggcgtgatatgtcttgtgatttcctgttttatgagcatgtcgaatatcgtcttaaaccccgcttcatcgacattaacggccatcaggttccggagccggtgcgggaattgccggataacgatgattttctttggattgccgacatcacgcagccaacggctgctaagttgatgtggacgagccatccatcagatatcctgatgtttgagcgcggaattcttcacctgacaaaagaagcagcagaagcccacatagccgccctgctctcttccacacagaagtaa

SEQ ID NO: 289502 - DNA, 189 bp, Morganella morganii
gtggggaataaatttaaagtcggcgataaggtgtgtccgacagtagatgattcaagctggattgcgccaaatgagccgtgcgtaattataggtattgatacaacttctatctgcatagaaaacgaagaagggtttgttgattattatcaacctgacgaactggagttagtcaatgaacaaatatcgtga

SEQ ID NO: 289503 - DNA, 321 bp, Morganella morganii
atgaacaaatatcgtgacaaatcagactatgagattaataaggctgtggctgttaacattaatggcgctaacgctgttttagaaaagttcggtagcatatatatcagtgatggagatagaggtgcgatggtgagcttctccccctgcagcaacccggcggacgcaatgccgattattattgagaataaaatcgacctaactcatctcgtcggtgacatggtgtgcgcaaagcacaaagaatactggtgtattcgtaaaaatccatatcgcgctgctatggaagtattactgatgatgaaagaggcggagaatgaaaaatag

SEQ ID NO: 289504 - DNA, 498 bp, Morganella morganii; identical to SEQ ID NO: 283566

SEQ ID NO: 289505 - DNA, 2964 bp, Morganella morganii
atgaaaaaacaatataatatacttatgagaaaagacaactatcgactgaaatgtatctttttcatgacttttgtttttttaccaaactcatatgcagttagcgatgaaaaaattgtatatattgatgatgaaatctcaacaaaagattgggctgtaactatttatgatagaggtgattttcttgttaagggcaaagatggaaaacaagaaataactattgatcgcaatgccgcaaatattggagggattggaaggcgatacgcatcaaaaaatgtggataaaataatttttgatttagataaattaaatataaaccttataaataaaggcgataatgtttcagctataggaggtggagcctcacaattggatgcatcaaaaacagatgtttttattaatataaatcaaaaaaaaacagataggtttggtaggggcgagatatatggtgttttagctggaagttcagttacaatgggcattaatggagatgacgataactttaattctagtcaatatgctattgcggagtttaaaaacttagatattaaacaaaactcagacgcatctactttaacactaaataacgcattaagggctatccaaggtgcttacagggattcaggtactggtccagcaggtaaaataattgttaatggtgatacatctatttatctaaatggtgcaagacaagaggctatttatgtatcaggtaaaggtaaaggttatgacggtaatgaaggtgtaattagttctgttatattaaaaggcaataccaatatcatcctgaataatgccgcaggaaatgataatagtgctattaaaattggaaagacaagacaaataggtacagggcaaggatattttgaatctatgggtaatttatctatagatatgaaaaattcgaaaggatctgctgtgaaattagctgtttctggttctgaattaaaagcagattttgatagcagttcaactaatattaaaaccaatggtaatgcaataaatatagggcaaaatgactggggaactcaatcatcagctaatggtattaaagcatctttcaaaaatgctaattttgagacaacatcaacaaatgattcattattgaaagtatttcaaaatcagggaagggtattatttaattttaatggtgaaagaacaaatctagtcatgagagatgatcaaagttggttaattgatatagataactcaaaagagaatgggtatgaaaataaagtaacccttaacttaaaggattcggctaagattatggggttgtcaaatattgatggggatagtgaactgatcttgaacctgagtaattcattatggcatcttaatgaaaataaatatggaagaatatcttcatttactactttgaacttgaatgattcctcaaagcttattgcagaaagtaataacttcactttaaatggagctgtcaataatacatcaggcatcattgatttggtaaatcataaagatatcaatgataaaactaagttagttacattaaccattaatggaaattatactggtggtaatattaaaccaacggatgcaactccttttccagacggaaatagtcagttaattgttaacactatctggaataatgataacgactctgtaacagatcttctgcatatcaaaggtactgctaccggatacactcaggttcagactcaaaatggtattatcggtaatgtgactcgcggggatgctgaaaaatattctgttcctgttgtcacggtagacaatcaccaggaaggggctaacgccttctacggttttgcggataccaccggcgcggctcaggcccttctggtgcagaaagatgccaataattacacttggtatctggctaaaaatgatacacctgtagaccctgtagaccctgtagaccctgtagaccctgtagaccctgtagacccagtgaagccggaagtttccggatttattcgtatgccgacggcgaatatggaaatggggtataaccttatccgtacattgcatgaacgggtgagtgagcaacaaacaatggcctgggatgattgcatccagtgccagtcaactcaccgcgatgatcaggtctggggtaaaatgctgggtaacttagcacgggctgacggtgataaccgttatggttaccgttctaaaatgtggggtggtcagtttggctatgactttaacgttaactataacgagaataccggctcacgtcgtcattccggcatgatggtgacatatgcacacgacacgctgaaatttaatgatcgtcgttctgtattctttgatactggtaacggacagtatgctgaaaaggataagcgtacgggtaccggtaaaagtgatatggtggcgcttggggcttatactacgttctacgataagaatggcagctacttagatttagttggtaatctggattacactcataacaaatatgagtctgtccgcggctctgaatcaagcaatgattcttacggtgttgcggtatccggggaactaggccggccttttgcgctgaccgataatggtatcagtaatggtgactgggaaattgagcctcaggctcagcttatctaccagtaccgtaccttcagtaatttcaaaaccgagcatgatgtcagtgttaatcaaaaagaccgtcatggattaagaggtcgtgcaggggtaagactggcgtataacaccggaacgccggaactgaaaaccaacacgatctattttgtgagtaacgttgtgcatgatttcattgataatgaccaaacggtgaaaatcggttcagacagtatcaaagaaaaaactgcctctacctttggtgaagtgggcggggggattcagttaccggttggtgaaacctcctacctatatatggatgcccgctacagccattccttgagtaacagtgatggtaaggctgataatatgcgcggtaaccttggttttaaataccacttttaa

SEQ ID NO: 289506 - DNA, 351 bp, Morganella morganii
atgagaaaagacagaaacattgatttgctttatagcgtttccactaattcattaagccaaaatgctgggttgctaattaatgcgttaaggaaaaataaaaaaatcagcggtgatgttcttgctggatttgttggtataagtcagcaacaaatatcccgttatgaaagaggtgaaacagaattaacactggagaaaataaaaaaattttccaccttctttaatattagcgtatgggaattcatggatatgttatatttattttatgctggaaaaagtgatgctcttcatgagatagataacattatattacagtcattttatgatagaaatcagtggtgggagaggggttga

SEQ ID NO: 289507 - DNA, 597 bp, Morganella morganii
atgcctgaatctcatcccgcggcagttcataataattcgccagggcatcaaggttcatcagctctttggtatttactcccggaaagtttttcttcaccagggcgtctgtttccgcatcacttaacccgtcggttttttcggtcagtatggtatacagcaccggtgagataccggcggacagcgcaagctgtgccgcggaggccgttcctttgctcagaatattgtccggcagcgaaaaatcctgttgtgccatggcttcgcgtaccagctcaaacggggcgttatacggggtcacaccactgtagcgggatgtcgccagggtttcatcgtaagcggctttatctgtcttgccggcttttgccatcagtgccgtttccagctgatcatttgccagcgtcagggtggaaacttccttatccagattctcctgggagagaaccagttttgccaggtcagggcggcgtttatccaggttatgcgtactgtttgtctgatgcagaccccgggcctcacggtaaagctccgtcagataaccggccggggaaaacattgaagatactgaccccggggcggcaaactcatcagcacgcggcataa

SEQ ID NO: 289508 - DNA, 924 bp, Morganella morganii
gtgacgcaccatccgtcaaaaagctgcctgtcactggaatttaaataccgcggcagctataaagaaccggaaaccgcacaactctcctgttttcttgatcccgctgtctcctccgccggtattttattattgtggctgagtcagtattttgatcatatcgaacaggctcacggcgatatgctgtatcacggtgacgaaacccggttcagctttattcctcagatcggaaaaaataattcggtattagaaggagcagaggaaaaaccgaactggccgcaaaaactgctggaagggttatatatcgatcatgtgcaccattttatcaatattgatgttccggcgattgttccggaacttgactgggcattatcagacaccttcacactgaatatttatttcagcaaacagctgccgctgcgtaatgatcagctgacaaacagttttctgcttaattgtgccgccgtggtgaatcaggaagaacaaaaagaaatcatactggattttcatgaaaatgaagcggtttaccgtctgccgctggatgatgcccactacattacggaactggaacatattcagctggctttcgagcctcacgaggaattccgcggcgttgtcgctgacttctacccggtaacacacctggcaccggcttcccgcctgctgccgcaatatcaggatgcctggttttacgcgctcagcatcgataaaaccatcaccggccagaatcattattatatccatttttatgataatcacggtaaagcactgaccgttctgccgggcccgcattccgctgtacttaccgctgtattatcagtgcaccgcaaagccgtgcggaggatatctgccatctcagcccgctgctgccggatctgctggaagccaccggtatcatacaatgcacgccgtgctacccgccgataa

SEQ ID NO: 289509 - DNA, 789 bp, Morganella morganii
gtgttaagtctttcagcactggatctggcgctggcagttaatgaaggggaactcattgaggagatcctgctgacactgctggccgctccgcaactggcctggttttttgaaaagcatccgcggttacgccgtgcggtgctgactgatatgccgtcatggcggaaatcgctggaagaacgggtgaaagaggcgctggttccggccgccctggcagatgagttccgtctttaccagaaaagcaccgctgcagacaggacagaattttaccgcctgctgccggagatcctcaaagcgctggaggatataaactcgccgttctcgccggaagcacaccgcctgcacagagatgagcaggaaaccacctcccatcagatattattcaatcagcgctggcgtctcagcctgattttacaggtcaccacctatcacaaagagattctggagcaggaaaaagaacagctcctcgccgaacttcagcaacacctggcgctgagcggtaatcttgatccgctgatcagtgaaaatgagcaggcttccggtaagttatgggatctggcgaaaggatcactgaaatcccccggcccgtcggacgatctcctgcttcgttacagcgagtttttaaaatcccagccggaactggaaaaactggcctcactgctggggcgcagccagacggcaaaatccgttcctcaggacagtgcaggacagtgcagtgacagagccggtcaccattaccgaactggtgccggatcagaccccggaagaagtcagcggggtcgggctgagtga

SEQ ID NO: 289510 - DNA, 135 bp, Morganella morganii
atgaaaaaattgcggcggcaggaagatccccgtgttaccgggttgttttccgctgatgatctgttataccgtgaacactatttgattacgttatcttattatgttatccggccggacagtgtctccggactttaa

SEQ ID NO: 289511 - DNA, 906 bp, Morganella morganii
  misc_feature (875)..(884): n is a, c, g, or t
atgcagatattggcggcgatactgaaaaaagtaagtaacgaaggtgataataccgaaaagacattatgtgatttaatgccactatcctatgctgaaatttatgaaaaatatcatgatattatttcagacaatgaggcaagaatactttttcagcaagtgcagagacaaaagaaaaaaaatcggtttactgatgccaaaatagcggcacataataatccgcagataaaaaatataccctgcctgcataccggacaatcattggaactcagttatgaaaatgactttattcccgacagaatttcggagtatgccgagccggatatggtttcttctatgttttctccggctgcatatctgaccgagttataccgggaagcaagagggttacatataaaagactcagaatatcaccttgataaccgccgtcctgacctgaaaaaattatccctttcgcaggagaatcttaacgatgagatttcaacgctggaactttcaaatgaggtcttgtttgcggtgcttaaagaaggcggggatgagcaatctgtattaaaaaggttatccgaaaaatatcaaccggtaaatttcccctatcacgagccatttcaaataataagaaaagtatcagagctgaaaaaaatatttccaatagtcaataaatatccattcgttattaataataaaaaaactaacaaaacatggttgaagactatttattgtaatttatctccggcacttttatatatgttaagagatatatatctaagaattaattatactatgggtgaacaacttgatgaacttattaaaaagtatatagcagatgtcttttcatatttttacactttgaaaaatgtaatgaattacctggagttaannnnnnnnnngtattctggcggatttttttaa

SEQ ID NO: 289512 - DNA, 1116 bp, Morganella morganii
atgaacaaagtcattatagcttccgctggagcaggtaaaagtacctttgtggtcagtgaagcattgaaggctgttacttcaggcaagcgtattctgattactacgttcaccgaggcttgtcgggatgaaataaatgtcaaaatcattaaagaaaatgggtgtgtcccacctaatttatatgtgatcacctggttttcctttttgattaaacactggataaaaccctatcaggggtgtttatttgactacgacattaaaggaatgctcctttgcagcagtaaatccggtgtaaaaccttataaggtggcaggaaaaccagtctactggggggaaaaagatttcagacagcactatttcagttctgattttaaactttattccgataaaatggccaaactctctcttcgctgtgatactgagtcgagcggaaaagtcatcactcggctagcgtcgtgctttgatgaaatctatgtggatgaggtccaggatcttgccggttacgaccttgaaatccttcaaacactattcaggtcacctattaaaataactctggtcggtgacccgcgccaggccacttacagcaccgtcaataccgagaaaaatgcgaagtacaaaaaagccgccatcgtgaatttctttgatgataaggcagcaggagtcaaagttgatgataaaatgctgaatgagaactttcggtgctttcatgaaataaatgatttcgctaacaaactttatcctgcctttgctccatcaacctctaacgttcgtgaaatatccggtcatgatggagttttcctattacctgcaaaattactgagtcactacttaaaaacctacacccccgtacagttacgctgggataaacggcgtatcgttgatgaacgttatcctgtctttacctttggcacatccaaaggtctgacatttgaacgagtggtcatctttcctaccgaacccatgctaaagtggtttcaggataatagtgctgcactcaccaatgattctcgcgccaaattatatgttggcctaacccgaccaattaaaagtgttgcaattgtctttaatggcggagtggcttttaattctaatgggattaaaatttacacttcaaattag

SEQ ID NO: 289513 - DNA, 1653 bp, Morganella morganii
atggttattacaaagttaattatagaaggttttaagggcttcaaagacagattctccattgagttcaatgagtcagtgaacattatcgtaggtgataatgaagcggggaaaagtactatccttgaagctatcaatttggggttgactgggttatatgcagggaaacctgtcaagaacaatatcagccaatatctctttaatgatcaattgataaaagaatatctagcaagccttgcaaccgcagccagactgccaccaccagcattattcgttgagctccacttccaaaaaacgcctgacaccattttcctagagggagatggtaactgccagaagtcatcctcagtgggagttgtattcaaaatcaagtttaacgaggactacaaggctgcctatgaagcacttctgaaagctggtgatatcagaacattacccatcgaatattacgatattgagtggaaaagcttcagtagggacgctcttttatcacgtaacatccccctcaaatctgcatttatcgattcgtcctcggccagaggcaataatgggtcagatgtttatattagcagaattatcaaagatttactgactgacgatgaagttattagcgtttctcagtctcaccgcaaaatgaaagaagccttcatatcagacacgtctatcgaaaccatcaataaaaaaattatcagtgcaagcaagatcaccagtaaaaaggttactatctcggttgagctctcctctcaaaaggcatgggaatcaagtctgattacctgcctggatgatgttccgtttaactacattggaaagggcgagcaaagcattgtaaagacaaacttggcgctctcgcataataaagcgaaagagtcgaatgtcattctgatcgaagaacctgaaaataatctgtcgcacaccaagctgaatctactaatcaagaccattaaaaacaactgtcaaggtaaacaaatcatcattacgactcatagtagtttcgttgcgaataaactcggccttggtgatctgatttttctctcgaaccgtaagacaaccaaactggcttcgttaacaccaggtacaaaagaatttttcgaaaaaattgcgggctacgacacacttcggatggttttgtgtaaaaaggctattctggttgaaggcgactcggacgagctagtggttcagaaggcctacatggatgcaaaccaaggacggctgcccattgaagacgggatcgaagtcatttcagtggggatttcttttctgcgatttcttgaaatagctgcgattatcgacaaacccacccgcgtcgtcacggacaatgatggcgatattgccgcaatccagaaaaaatacagcgcctatctgggggcaaataaaaaaccacacattgatatctgtgttgacccaactattgataccggtacgctgatggtgggtacaaaaaaatacaattacaatacgcttgagcctaaattgctgaaggcgaatagtagagcaaaccttaatgccattttaggaactacatatacttctgatgatgatttactcatttacatgcgtgcgaataaaactgattgcgcattgaagttatttaactatacgaagacttcggggctcagcatacggtatccgcagtacattctggatgcgatcaaatga

SEQ ID NO: 289514 - DNA, 2529 bp, Morganella morganii
atgactacacgcacacatcaagaacaagtttgggagaccaacttgagaataaaaatcaaaaatctgcttaagcgaggatttaaaaagtttgatgagatattaccactgtgtgatggagcccaacctaaagatgcatttcgcatatttaacgaactgaaagaaaccaattttggaacatctactaattcgcttgactataaatctaaatttttcttcaaactccctgcggccaaccctaaatttttccaatggtggtatactcttgaatcacaagagttaatgactactaggattctggatattcataatgatcatgacattgcctgcataggcactcctactttagccgcaacaatttcttcatacaacaaagaagtaacattacttgatattgatgaagatgttgtatctttatttaataaagtatttaaaggtatatcaaatgccgaggtacatgatgtaaatatcggcaatattggcttacatggaaaaaaatatgactgcataacaatagaccctccttggtatccttctgaatttaaaaagtttatttctagagcaatacagttatcaaaagatggagcaacaatctattgttctatcccacaaaatcttacacgaccagggattggagaggagagagcggaactaatttcatctttgcaaaaatgtggtcatgatatattatacattgagcctggcgtgatgaaatatatagttccatattttgaagaagaagcattaaaaaatagtggtattgagacaaagaatcaaccatggagatcttctgatttattagtaataaaagtcaatggaactaatacactaagctttgagtccgaagtgattaacaaggtcagatctttctctagggttgggaataatcatgtttttcgggtgttcatagaagaaaaaaatgtagaatctggattcccaattagaagagttgatggtttttccaaatctattagcaatagagacaatgttgaaaaagtaaatttatggacttcggaaaaacaaggattccaagttaacgatatagtcttttttaacgaagtaatcgaattatggagtgatggcaataatatagaagagacaataaatattattggtaaaaaaaataacgacaaagctaatataaactcaattaaacagataattgaacagctagaagaatatactggattttgggcgatgaccccagaatctccagtacgtcgcacatctgaagaaataaaaaagaaaaatgatgctttatctagtgagtgggcagccaaagcctctgaaagagaacatggaagcagaagtgatggctttcgtatagaatttcaaagggatcgagatagaattatctggtcgaatggatttagaaaactcgctgataaaactcaattattccctcttgaagaagatgaacatttaagacaacgactggcacatagcatagaggtaatgcagctagcatcgactattggtgctgctttcggtttagataagaacttaatagaagctggctcattggctcatgacatagggcatactccatttgggcatgctggcgaacacgcaatagatcaaatgtttcgaaaattaggttttaaaggtggctttaaccattatgagcacggtgtggatgttgttcgatttttggaaggttcatatcaatacagcgttattgaatcgcataatgggctaaatttaacaccagaggtatgtgattgcattttaaaacatacatattgccacaatggggatggacctagtcaagaaaatatatggaaacatacaaaacatcaaaaatacctgaaatgtggaggatacagtcaccttgaaggtcaggcagttagagctgctgataaaatatcttatctactatcagatatagaggatggaataaagttaggagctatacaacttcatgacctcttaggttcaagactgtttcatcgagctccaatagactttagaatgagaagcggcgaaaatctatatggtaagtttatagagcaaaggggatctataataaaactcctgatggaagatatcattctggagtcaacaaagaggattagtaaattaaaatccagagccgatgtttttaatgcgggccattactgtgtatttcatagtgaacagatagataatgacatgggagagatttggaataaaattcaagtcaacaaacttcacctagatccgagagtcttatctgctaatatgaaggcttcaaaaatggtaagcgagttattgttactttttacattattccctgaacatataaacacacaatttagaatggaacatgagagattaaattcaactgaatacttgaagtattatagagaccaacataaaacaattgaaataccttatgaccttttaaaattcttgcctttggatatgatgataggtttccatccgggaaatactaaatatatagatgtctatcaattaattttggccaaggattatgttgcaagcctaacagataagaaactgaagagggtttacaacgagctattagattaa

SEQ ID NO: 289515 - DNA, 738 bp, Morganella morganii
atgttaaaagaagatgctatggatgacgatcccagaagatcaaaatcgcttgaagaactgaacaagccattgatgcgggaaggctatgaggcattctatggtgatgataaccttttgtatatacggcatataggtaccaaaacagtttcagtaagtaataatccccatcggcccttaactcctcacgaaataaaacgcagaacattattgaccgtgtttctcgataactgttctgaagatgaactgatagaagaggtactcctccctttattccggcaactaggttttcaccggataacagcagcgggacataaagataaagcactggaatacgggaaagacatctggatgaaattcatactgccaactcagcatgttctttatttcggcattcaggcaaaaaaaggcaagctcgatgcatccggcgtcagcaaagctaagaatttaaacgtggcagaaatccacaaccaggtgctgatgatgcttggccatgaaatatttgacccagaaacaaacagaaaggtgttggttgaccatgcctttattgttgctggcggagaaattactaaacaggcaaggaattggctgggtgggaaacttgatgccagcaaaagaagccagataatgtttatggatagggaagacattcttaatttatatactgtaagtaatatacctttacccagagatgcactcatctctgatgatgtcatcaagaacgatgatattccgttctaa

SEQ ID NO: 289516 - DNA, 963 bp, Morganella morganii
atgaatgatattacgtttgaatacctgacagagcagtatttttacagtaaatcactgcgtccggcgacgataagcagttaccggaaagttgtccggacctttgaagcgtttacggcggttccgcctgcggacgtggatcatcatatcgtactgcgctggcgtaaccacgttctgaaagacgaaaaacgggcaccgagaacctggaataacaaagtgacccacatgcgggcgctgttcaactttgcgatagcgcagggatttttgccccatgagcagaacccgtttcattacgcggtggtcagagcaggtaaaaagcggaaaaaaatcctgacgaaaagccagatggatgcgctgtaccggcgggttgatttttatctggatatcgaaaaagcccacggttgttgtgtgctgtacaacggacgcgtcaatgccatgcatccggcgtggttctggggcacggccattaatgtgctgcgctatactgctatccgtatgagtcaactgcttcatattcgtttgtgtgatgtcagcctggaagaccgctggatcgatctgagttcgggcgggtctaaaaaccacgatgaacacagggttccggttgtcacggcgctgtatccgtcgctggcctatttactggcgcgcgctgaagaagcagggatggaaccggagcatcagttgtttaatgtgggctggtttgatctgcgccggaaatacaaatatccggaactgatggatgaacggccgctgcgggcatttttccggcgattatccagggaatgcaattttaccgtcacaccacaccgttttcgccataccgtcgcgacacatatgatgaaatcgccggagcgcaatctgtacgtagtaaagcgtctgctcggccatgccagcctggcatcgacgatggaatacattgatgaaagtgttgacggtctgcgtaacatactggaaaccgagctgatgtag

SEQ ID NO: 289517 - DNA, 543 bp, Morganella morganii; identical to SEQ ID NO: 276022

SEQ ID NO: 289518 - DNA, 282 bp, Morganella morganii
atgggtctatttacagagcgtttcttcaggagcttgaaaaacgagtgggtaccgatgaccggctacatcagcttcagtgaagctgctcatgtaataacggattatatcgttgggaattacagcgaattcaggctgcacgaatataactgtgattaccaccaaacgaatcagaaaaccgataccgaaaaaactctaaaaccgtggtcagttttagttgaccactacattacattgattacaatagaattccagaaaccgataatacctgtggtgcttcgttga

SEQ ID NO: 289519 - DNA, 1689 bp, Morganella morganii
atggaatcagaaaggatgaacaacagtctacctaaagtctctttatttaatgttgatgatgatgttatcaccactctctcaaaggctgggtttaataccaacccccataaacttaatggaaaacactactttcatagagaagctggatttactaataaatcctatgatttcacctgtgacatcccatccgacttacatgaatctgatatagtcgtcattgacacacaagaggtgtccacactaaaaagccatgaaggaaatattttttctttatatttcaagagggttccgccatatattgatttaatgccatatgatataatggaaattaataaacattttaacaaaaaaagtaaaaaaagatgtgtaattatattttgtgaacaatttaacactgaaacatacggtttaatcgacaagaaagccaactcatataatgagttcagttcaaatactttcaagttcaatttttactttcagtctattgaaaaatatggctcaagatataactcacctgcggtgacaaaatttactacattgcatcaaggcattatcaagcatgctaatgaattaacgtataatgtagtattcgatcaacattacggcgatgatttagttctgctaacaaacgagaacaatgaaactatatcatggtataaatttgaggaaaattcattctatttatttctcccaaacataaaatcaaaagatggttttttatttgacttgttgacaaccgtgttaccagacatgcctttcctctctgatatctttccaaaccacggtagttttcaatggcaaaacgattttgcatacatatcgaaagaagaaaaagatatagtcaaccgttccaatgaaattgatattcaatacaaaaaagataaagaatcaattactcaagagctagcaaaaacaagagcaaagttggaaaataagtatcttaaaaacctcctaaaagaaacggatgatgtattagttcatgctgttcagtggttcctttcatatttaggctttgaaatggtacaagccccagatgaacatataaaggatggtgatatttttgaagaagatcttagaattgatggtaaagatgcaacgttgctttttgaagtaaagggaataggaggaacatctactgatgcacaatgttcacaaatatcaaaaatcacgctaagaaatagaaaagctaatccagcacatcattttcatgggatttatatcgttaataatcagcgctacaaagcaccgctccaaagaacacttcccccattcaacgaaaaacagatagaagatgcggaaatttcacttcgcggtatgacttatacttatgagctattccaagtttatcacatgatagagctaggaattttggcaaaagaacaagtcagagaagcttttttaaaagatggacttttagattttaaatatagtttaataaaattaccaaaaccacatgaatacacgaatcatagtgtatattccttcgatctaggtgactctgagtctatcttaattaaagatgtagactatattgttatctgtgacaacgaatgtcattggcacaagctagacatagttagcatacaagtagataaaaaagacgtaacgtctatcaataaaggtaaagttggaattaaagtcgataggttaatagataaagcaacagggtattaccttttacaacagtaa

SEQ ID NO: 289520 - DNA, 1836 bp, Morganella morganii
atgaagaaaaaattattcagtaaagactacatcacagtggccgatgtttacttggcttatagaaaagcaaaagcagaggcttttttcgataacttctatcccaatgcaatttcatttagtgagttcgagaaagacattaataataatatattaaaactacactcgataattattaatggtgagcatgaatggtgggaagatgcgagttttatcggaaagtactattatgtaccaaaatctcttgacgactcttcttggaacaatagtttaaatgttcattatagctctgttgatccgatagaggattggaaacgtcgattcgaagaaaataaaaatagacgtctgaagccaaaatatcgtttaattcaatctccaagtgtggaatatcaaattatatctaccttatggattctaaaagtaggacacaagtttgaagctaggctagataaaaatttatcatatggtaatagactaagacgaaagaaacatatattcgaaggtttcggatcttataatggtccagttaatcttgattcaagtagtttgttttctccatacttttcagcatacaaaaattggaggaataaaggcttgaataaaatgaaagagctcattgaagagggatgttcagttaccgccattacaatggatcttgaaagtttttaccatagcgcatctgctaattttattctccgcccatcatttctaaaaaaaattaatgttgacttaaataacgatgaaaaaaaatttacaacactttttttgaattctattacaagttggtataaagagactcctgactttaaaaagagagaggaaggagcattacctgtaggtttatcagcctcaaaggtaatttcaaatgttctcttatacgagctcgatgttcagatacaacaaggtctcgacccttcatactatggtagatatgtcgatgatatatttctagttttcaagacgccagttgatttatcagtgaatggagacgctattctaacatatatgtcgaaacatgttgagtgcttaaaaattaagcgtgaatcaggtgagcaacctgctctaagacttagatttaattatgctactgatagtgtattaaagtttacagctagcaagcaaaaaatattttcactatcaggtaaacacggtctggattttattgaccagattgcaagccagattaaagcacaatccagcgaatatagaatgcttcctgaggttcccaaagattcagtggaaatggcaaacaaaacgttgcttgcttcagaaaatgcctcattgagtgcagacgctctccgtaaggcggatggtgtatcggtgcgcagactgggattatcactgcttctgagagatattgaaagctattcagaggatctttccagcgaagaatgggaacaagttagaattgaattctatgggttggtagagcgttacttattgactcctaaaggattatttgacctttttggatacctgcaccgagttttcaaattgatgattacaaacggtgattttcattgtgctgataattttatggataaattttcagagtgtttgaaactgataggtgaaactactgataaatctacattgtcagagctagatagttgcagagaatacttcttcgaaaggctttttgaagttgcattacaatcttctacaacaaaaagttttgataaatggggagctctaagaaagttgcttattaagctaaatacacgcataaatgatgatgtcaataaacttactaaaacacagattaaggaattaagttatagcctacttttagctgacttcggtgatctcttccctttcttcagtaccggtataaagtag

SEQ ID NO: 289521 - DNA, 708 bp, Morganella morganii
atggatattaatacccttatttacgcatcccgatatgaccggctttcagcggatgaaagcaaaattccctgggatgaaccagcattcagccagcgcatgctggcgaaccacttgtcgcaggatcacgactgggccagccgcaggcaggagatcattgagcagcaggtagagtggatcgccagccagttatcccctggcgcgcacatcctcgatctcggctgcggtccaggcttttatacccaccgcttagcggagcgcggatttcgctgcaccggcgtggatttctcaccagcatctgtgagctgggcccgccagcaggcgcaaaatgccaatttgaacatcaactatattcagcaggatatccgtgcatactggccggataggtcattcgatttcatcatgatgacgttcggggaactgaatgtgttcagcactgcggatgcacgcttactagtcagccggtgcgcgctgtggctggagttgggtggcaggctgctcactgaagtccatactttcgaagaagttaagcgtcagggaatggctgaagcgagctggcaacgctgtccggatggactttttctgggcgtccctcatctgctgctgacggaacatagctgggataaagaagaacagaccagctcaacgcagttctgggccatagaggcaaacggtcacaccactcgtttcggcagccaaatgacggcctag

SEQ ID NO: 289522 - DNA, 276 bp, Morganella morganii; identical to SEQ ID NO: 284960

SEQ ID NO: 289523 - DNA, 723 bp, Morganella morganii; identical to SEQ ID NO: 284962

SEQ ID NO: 289524 - DNA, 894 bp, Morganella morganii
atgactgaaaaatacgaagtcacagccaccaaaaaggacggtacgacatatcacggactgaccactacagtagaagctaaaggacaagctgatgataataccgaagccatcctcgatgaattatcagggcagattgggcgagaccaattagctcaagacttattgggtgagattaacagtaaagctgaacaatcagctgttatggcgctaaataatcaaattaaagctaaccacgatgcaattttagcggagaaaatagaacgaggtacggcgattgaacaaagtgaaaggaaactggatgaaacgggtaagttattatccgaacggcttaatcaggtttcaaccgcgacggaagcacaagtggctgctattaaacaagaggaacaatcacgtattgagggggataaaaccgaggcgcaacaacgacaatctttaaccatacaacttcgtggtgattataccggtaatgatttatcccaattaaccgctggtctcatctcagcagagaagcaagctcgtattacgggtgaccaggcggaggcaaaagccaggcaatcactggaaacccggatgaatgggaatgtttcagtaattaataaatctttagaagcgctcacgtcaaaacagcaggcgcaagcgcaagagctttcaatcctcaattcaaatcttaaagggaaagcggatagtaactcggtaaatgaattaaatacgcgcgtatctgatattgatggcaaagtgacgtcagcaacttctcgggtgcaaacgttatccagcaaattagacaaagtaaaggccgatttatcagagtcagttgttgatctggatctgtcagcattagatgaaagtacttattacccggttatgcaactcacggctccggcggttttgccatga

SEQ ID NO: 289525 - DNA, 213 bp, Morganella morganii
atgtctgtttttaaattaatgaccaccacgcttggtgtggtaacggtggcgttagccacgtactgtgcctggcaggcggctgctgaggcggcagacaaagaggatgccaccgcagccgaaaaactggcggcggggctcagtgccgcgctggcctgctcagccgtactgggtggtacccttgaccgtctgctcggtcggctctttccccgctga

SEQ ID NO: 289526 - DNA, 369 bp, Morganella morganii
gtgctgctcagtccggaaaacggtgccccctgtctggtctaccatgagccaccgcaatccgccccgacgctgttcggcggcttttatgtggtgacgcaggcgattgtccggagacggctgctcagcttccgctgtgacggtcaggagcatgagggcatggctccctacaagctgatttattttcagcgggactggtatctgtgcggggaatggcagtctgccctgcgggtgttccggttcagtcagctgcagaacattgccgtgtccggacgccgcttccggcaggatgcggttatcgcacggacagtcacccgtcccgaatttatcaccgcattaccccattatcagtttatccgttcattaccttaa

SEQ ID NO: 289527 - DNA, 450 bp, Morganella morganii
atgaaaagaagtctgacactgcttggttgtttactgctgtccgccccggtttttgcactacgcatgcccggtgaggtgcagcctgaccgttacacttattacctgaccccggaatacgggcagcagctgaaaatgcagaacgacggcaaagaccggaaacctgcgtggcagccactccctgccggagagctgaggagtgagacaagagcggatttgtccaaaggctatccggctccggtggccatgacctgtatcagcagtatttattataacaccggtgcccgggctaactggctgaaggtgggctgtatcgataataacggtctggagtatgaaaccagtaagaaatggccgccgaaatccgtcgcggagcgggtctgcaaagccggagagggagactgtgagtccttcctgcagatggatactgacagctggtccggtccgcagtaa

SEQ ID NO: 289528 - DNA, 213 bp, Morganella morganii
atgtctgtttttaaattaatggccaccacgctcggtgtggtaacggtggcgttagccacgtactgcgcctggcaggccgcggctgaggcggcagacaatgaggatgcctccgcagcggaaaagctggcggcaggcctcagtgccgcgctggcctgctcagctgtgctgggtggtacccttgaccgtctgctgggccggctctttccccgctga

SEQ ID NO: 289529 - DNA, 441 bp, Morganella morganii
atgacgttatcagcacttccgctgcaggagcctgcggctgtcaaaagcaatctggttcatccccgcggcagagacacattctggcggttttatttcggcagcgtaccggactggcagcgcctggaaggcgacatttttaagatgatggataatctgtgtgacatttatcacggtgcattctgggagttcagcatgctcaccaacggcggcgcatttatctggcctgacatgattgaaacgtcgctcccgatgattaacccgcataacggcaatgacgcggaactgagccccgaagcggccggtatcgcggtatgtctcattacttacagtctctggtcatttaaaaccgaaagtccggagatggtggagtatttttatcagttgcgggactacgccctgcagcatgaggagtgtgccgctattttccgtcttatcgattaa

SEQ ID NO: 289530 - DNA, 369 bp, Morganella morganii; identical to SEQ ID NO: 289526

SEQ ID NO: 289531 - DNA, 450 bp, Morganella morganii; identical to SEQ ID NO: 289527

SEQ ID NO: 289532 - DNA, 213 bp, Morganella morganii; identical to SEQ ID NO: 289528

SEQ ID NO: 289533 - DNA, 441 bp, Morganella morganii
atgacgttatcagcacttccgctgcaggagcctgcggctgtcaaaagcaatctggttcatccccgcggcagagacacattctggcggttttatttcggcagcgtaccggactggcagcgcctggaaagcgacatttttaagatgatggataatctgtgtgacatttatcacggtgcattctgggagttcagcatgctcaccaacggcggcgcatttatctggcctgacatgattgaaacgtcactcccgatggttaacccgcataacggcaatgacgcggaactgagccccgaagcggccggtatcgcggtatgtctcatcacttacagtctctggtcatttaaaaccgaaagtccggagatggtggagtatttttatcagttgcgggactacgccctgcagcatgaggagtgtgccgctattttccgtcttatcgattaa

SEQ ID NO: 289534 - DNA, 450 bp, Morganella morganii
atgaaaagaagtctgacactgctcggttgtttactgctgtccgccccggtttttgcactacgcatgcccggtgaggtgcagcctgaccgttacacttattacctgaccccggaatacgggcagcagctgaaaatgcagaacgacggcaaagaccggaaacctgcgtggcagccactccctgccggagagctgaggagtgagacaagagcggatttgtccaaaggctatccggctccggtggccatgacctgtatcagcagtatttattataacaccggtgcccgggctaactggctgaaggtgggctgtatcgataataacggtctggagtatgaaaccagtaagaaatggccgccgaaatccgtcgcggagcgggtctgcaaagccggagagggagactgtgagtccttcctgcagatggatactgacagctggtccggtccgcagtaa

SEQ ID NO: 289535 - DNA, 672 bp, Morganella morganii
atgcatacgtcagattcacgccatgaccggcttgcattccggctggccatgattatcagccgcctgttccggggcgaaacactgtatccggcacagctcgcccgtgagtttaatgtctctgcacgcacgctgcagcgagatttcagtgagcgtctggtctttctggacacggagccgtatcagggcggataccggctggccgccggtcagcgcccttaccggacagacagcgatattctgtactttgccgatatcacccatatcaccccgctgttcccttcgcttgaccgcaggctgctgtccgtgctgctcagtccggaaaacggcgctccctgtctggtctaccatgaaccaccgcaatccaccccgacgctgttcggcggcttttatgtggtgacgcaggcgattgtccggagacggctgctcagcttccgctgtgacggtcaggagcatgagggcatggctccctacaagctgatttattttcagcgggactggtatctgtgcggggaatggcagtctgccctgcgggtgttccggttcagtcagctgcagaacattgccgtgtccggacgccgcttccggcaggatgcggttatcgcacggacggtcacccgtcccgaatttatcaccgcattaccccattatcagtttatccgttcattaccttaa

SEQ ID NO: 289536 - DNA, 213 bp, Morganella morganii
atgtctgtttttaaattaatggccaccacgctcggcgtggtaacggtggcgttagccacgtactgcgcctggcaggcggctgctgaggcggcagacaatgaggatgccacttcagcggaaaaactggcggctggcctcagtgccgcgctggcctgctcagccgtgctgggcggtacccttgaccgtctgctgggacggctctttccccgctga

SEQ ID NO: 289537 - DNA, 450 bp, Morganella morganii; identical to SEQ ID NO: 289527

SEQ ID NO: 289538 - DNA, 369 bp, Morganella morganii; identical to SEQ ID NO: 289526

SEQ ID NO: 289539 - DNA, 249 bp, Morganella morganii
atgctcaccaacggtggcgcatttatctggcctgacatgattgaaacgtcgctcccgatgattaacccgcataacggcaatgacgcggaactgagccccgaagcggccggtatcgcggtatgtctcattacctacagcctctggtcatttaaaaccgaaagtccggagatggtggagtatttttatcagttgcgggactacgccctgcagcatgaggagtgtgccgctattttccgtcttatcgattaa

SEQ ID NO: 289540 - DNA, 255 bp, Morganella morganii
gtgaccagctccggtgtcgcagccctgcagtttgccacgattgccgctgtcggggtgattgaggcgatgggcggtattgccacctgggggacgctctttgccgccaaccgggcgctgggggtactggccggtcctgtcgggattgcgctaagctccgcctggctgatagccgatatcgccggtcccgcttaccgggtcaccgttccggcctgcatcattgtggcgtacctgcgccagaagaccctggcggcctga

SEQ ID NO: 289541 - DNA, 195 bp, Morganella morganii
atggtcggggtaaaagagctgatattccggggaggtggtcagagactccgccaggcgctttttgccgtctttgctgtcatgagtcaggacggagaccagcagaccgaggtcctcattgctgcactgaccgataaacgcgaggtcggggtcgatacggtaggttgccataacagaaattccttacaggtgatttaa

SEQ ID NO: 289542 - DNA, 141 bp, Morganella morganii
atggatttaggacgatggcgcgtggtgcgttgggggagtcaggtctatgtgcaagtatcccgcataattgagccattcacatttagagatcgtccggctgatctcttcacttttgacctgactcagttcccccacgactga

SEQ ID NO: 289543 - DNA, 1857 bp, Morganella morganii
atggtttattcgataaaacacggcattgtcaaacaggacgggtgtccaatcgatcccgaattgctttttagacttggcaaatttgtagcggaggatagagacagcgaaactactttggtcatatcaaaacgtccagctgaactgaaattccggttcagccatgaaccatcgccttcattcagattgtttttcagggaggcagagcttactcctgatcaggtgaattctttggtggaatacggttattttattgctgatagcaaacgggtgtattttgtcagtgacagacttaaggatttctccgtatctgcctgcaacaagctgtcactccccggattgctcaaactacttcgcaaactatacagtgatggacttattgacgctcttccatcatcccttgtagagaagctcagggcacagcagcagaaaatatcactccacgataaactctttgtcagggaactctacccctaccagaatgaaggggttgcatggctgaccttctgtgcatccaacggtgtgggtaccatccttgccgacgatatgggtctgggtaagactgctcaagtgattgccctgtgctgcgatgttctcgaacacaatcctgaaggtaggatccttattgttgttcccaatcctctgctagccaactggatcagagaattttctttttttgctccttcactcagaccttttctccattatgggcagaacaggagcggtctcagttcagatctttccgagcacaatataattgttactccctataccgtattgagttccgatatttcgatgctggaagaaatcctgtttgaccttgtactttatgatgaagccagtatgctgaaaaatcctcggtcgggaagatctcttgcagcaagacgtcttgattctgttgcttccgttgcaatgtcgggaactcctgtcgagaactgccttcttgacgtctgggctctctgtgacctggttttccccggttttctcggaaacgagcaggatttcagatctcgttatgtccatcgcgaactgtccaaaacactcaatacggatctacacgggcttgaaaacagtctccgacagataaccctgcgacgtatgaaaaaagatgtcctgacacagctgcctgaaaaaatggatattcacagagctgttaccgcaggagacaaggaacgaaatacctatgaatccatcattgaggagatgcagctggatgcggcaaacggaggaagaggtatgctacccctgatcaacaaactacagcagtttactgcacatccggctcttctagatccgagcataccccatgatgtcaaatccctatgcctccacagcgccaaattcgaactactgatgatggaactggacggcatagaacaatccggagaaaaagtcatcatctttgccacattccagaaggcactcgatctgctaggtgctgcagttagggaacgttatggcatcaccccaggagtgattgacggacggactccaaatgaacaacggcagccgctgattgacagattttccaaatcgtctggattcgatctgctgctgttgcaccctaaaacagccggtatggggctaaatatcaccgctgccaccaatgtaatccactattgccgacagtggaatccggcccttgaagcacaggctacggcaagagcctggagaaatggacagaaatctgtggttagtgtttattacatgtattacgcggatactgtcgaagaaatgatcgatgaacggatacgaatgaaacagaagcttagcgagcaggttgttgcagtggccgattataaagaaacagacaaacagctgatgctggaatatttggaatcgataaaaaatgacagataa

SEQ ID NO: 289544 - DNA, 1599 bp, Morganella morganii
atgacagataaaattgaattacaggaaaatgatttccgcccttctgctgcgaggctggtcgaaagcctccgtgatacgggatacagtgaaaaagcggcatttgctgatattgtagacaattcaatagcagctaatgctacgaaaattgccatcgagctccaatatttgatgggtgagttccgagtagtcattaccgataacggtgatggaatgactgaatccgagctgaagaatgctatgcggtacggttccgaaaaacggccgaatccgaagtcactgggcaaattcggaatggggctgaaaactgcgtctacggcattctgccgtagactagtggtactttcacagaaagaaggaactgcagtaggccgtatctgggatctcgataccatcagtgaaaaagatcgctgggaactcgagaccccagatgaaaacgactattacgacgatttcgaagttcttgaagatttctccggaaattcaggcaccatgattgtctgggaaaaaattgatcgtctgatcaagccaggcagcgatagacagatgcttgatcagatccggaccctcggcaaggaacttgttgacgaactgagtgccgtctttttcaaatatctttcctccggaaacgtagaaatttcgctcaaaattgcggatgaacccgaaatccttctccaaggatgggatccactgtctactgaacttgttaccagtggcggggcccgtccccagctcttgaaagaaaagaaaatccacgtagagttcaacggaaacagctattctttcacaatcagaggaagcctgattccatcgcagaatgagctgactgcggaagagcaggaggctgtgagatacggattggataaccaagggttctatatctatcgagaagaccggttgatatggaatgacggctggcctcaccgaatgtataaaaaggaaggtaagatcacccgtctgcgtgtcgagcttgttttctcccatgaacttgatgatgtattcagtatcgatttccgcaaaagccgagtgataattcctgttgaaatccgtagggaactgcagtcgctgattgctccatggcgtcaagcactactttccgttccgtcaaaaaaacaatctgaacagcccagttcgacacgtgcgcatggtcctgctgataatgcgatagataagcagaaaaaccgtacaaaaaactcggatataaaggttgatggcgaaacagttaccatcagaaaccagaaccagcccaaacctacagtaatcaacgatatacgcgtctatgaggacaagactgtcagggttcacgaagaaaactccctgatgggtgacaatctctgggaaccctcatgtgacattgatgggaatacctgcgtaacacttgggaagtcgcatccatatttcctgagaatgtatgatgtctgcaaggacaatgtagaagccatgaaagctctcgacatgcttctgtggagccttgcaaatgccgagcatggtgaatactcagaagcgaacaagcacaccctgaaaggattccgccagaaggtcagtgagagtcttcgttatctcagccttgaactgccggatccggaagaggattcagaatga

SEQ ID NO: 289545 - DNA, 924 bp, Morganella morganii
atgaattatgaatacgatctggccgatttcaaacgttacctttacgacaaaaaccacagttacagggtcgatggactgattttctggcagaacaggattccgctgccgattgacctgttcaatcgaatattcgatgaatcagatctgataactgcagatttcgtctatcaggtagcagcaagcgctgccgttttcagcgaaaaagagtcattcgagagtaccttcgggctggaagtgataaatcttccaaccaacaagcttaaaacggaaataccagcactgttcacgtgggtggatgaacatctgcctgaaaattgcaaaattgtccgtatgatatatgaaatcgcggagcttctaggcctttcagagttccggttttccggtgataggatcgcaaaatcgcttgcacaccaagggaaaaagtatgcccgtctattcatgccgagtccggtaaaggatctggtgaacaacattcagggatgtgacaccatcgggcaggacaatactgacatgttcggtaatatcattgctgaccgttataatatttaccgttcaggtttcagtgatgccttggctatcatattcaatgccctactcgaatttaggctcctgttttctggaaaaagcggcaatctgcctagatttagagtaatgatgactgctcctgacgacatcgatattcgtttcggtaaaacagccgacggttcattgtgggaacctggttacggggacgatcatttcattaccatcaatactgaacatcccgtgatgaaaaatcaggcgaaagaccagggctgtacactggccgaattactgttttttatggggcaatatgaaaactctcagttttcggaccaaaacaagaaatttattgaaaacatgcgacagacaatatccagaaatctctggatcaagtatgactaa

SEQ ID NO: 289546 - DNA, 1941 bp, Morganella morganii
atgctttcagaactggatatggtgatgaactggttcaaaaatgaacctgaatcggcatggcaattcgatgagataggattcgatgatgaaacaagaacggttctatcaacaaccggactgacattgctggaccatacagcacggatggaaactggaagcgggtatcactgttatataccatgccagtatctaatgtatatgctaaagatcgggccatttgtaagactactggataactacatctctgtattcgaagaaatcaaaaaaaatatgtttccggcagaattcgaagcaatgatcgaaagcggaacgtcaaacgagcaggcgctcgtttcgctggacatctacagccgcagtaactttttctgggctttcaaagatcccagaacaagacttgaggcaaaaaatctaataaacacgagctcaaaaaccgggaaaaagagttataggcaatccgatgattttgtcaaatcggtcttgctggcatcattaccggtcccgaatgtaagctcggaaacactcggtaccctgattcttgatctggtacgttctcaagaaacatatgattaccttcaaaggagatatatgcccagtcttccttatatgttcagtgttcctgatggggatgaactgctgttcagaataatgacaaccattggctggtccggtcagtttgagcctttactggggactgaccccgatgccgaatttgtttcatggaatgatatagacagggcatttcttctccgcccatccagggaacccggcaatgcgctgtatgtccagaatcccgtccatttttctgttccgctggagaaatatattttcatcagaaaggggctcttggatactcccgattcacttgaaaaaatatcggttctggtttccggtttatggctggggatgagtatccggaacagagagggcaagttctttttcgagtcatcgaccagagcttccgtaaccggatctagagtgaccggtggaacgaacagaatcttctatggggcacccggtacgggaaaaagttacagggtccatggtgaaatgagtgacggtgcagaaaagattgtcacagttttccatcctgatactcagcataacgattttatcggtgccctgaagcctaaaatggaaaaggatgagcagggcgaaagcagcataacctacagtttcagaccaggcccctttacctgcgcactcatactggccattgctcatccagacagaaaggtctgtctcattatcgaagaaatcaaccgtgcttctgctgcagctgtcttcggcgagcttttccagcttctagacagggagcctgatggaacgagtacctacagtatcaatgccactgatccggatatgatcgagtatataaatacggaactaggtactatgggatgtactcctgtcgatagcctacagatcccgtccaatatgtctctactggctactatgaacagcagtgatcaggcagttatgccgctggatactgcattcaaacggcgctggaatttcgaatatctgccaatcgatttatcaaaaccggagatcccacaaaccgaaatcgttttcaccaccaattcaggtaaatattcagtactctggcgcgattttgctcgaataattaatgacacccttgtcgaatgtgaaatagcagaggatcgtctgatcggcccgtttttcctagattctaaagaactggaaaatgggaaagcagcgaaagctgcccttggcggaaaactgttcatctatttgtgggatgatgtgctgagacatgtcggacaccaaaaaatatttgcgtctaccttcaggactttcggcaacctatctgcagcatttcgcaatgacatggccgttttctccactgccgtagagaacagacttgaaggggtgggcactcctgttgacatgaacagagatccgcaagatgttgccagctga

SEQ ID NO: 289547 - DNA, 1275 bp, Morganella morganii
atgttgccagctgatattctgtatctttcagacaggacacctgtcaccgatcgcagtattcctgcgaccgtgctcgatgagctgagaaacagggggttgctggcccccgacatgcagaaaatccatttctgtggagtaatgtctttcagtggaggtctggctgtatttctgccacgaaataactgttcttctcgtgaatcgcaggctctttcagcacattatctgctccgctcactcctgaaattctaccgagatagagacaccggtgtttttgatggggatgcaggaaccggacttatcggtggtgaattcctgtcgttggcaactgcactgattgacgactatcagacgaatggtctctatgtccgccggattagagtcgatacaaccaactccggaaaagttgtatggccggggactattgcccgagggactgcctatcctagcccatctgggcctgtatatatcgatcctgtaaccacacgttcgcgctacctcaccgatagcgagacagcaaagattcatgcctctgtaatgagggagctctatccggtatacggaatgctctggacaggcagtcagggcacacctgaacgactgcagaatgttccgtgtcctgagggaaatgttttctcatgggttgtacacctaagaagagaactgcagttcagctattccgaaagggatattttccttttgcgcagactgatcatgtatcttgaaacagggagaggaacggggaatggcggggttcttgtcggtgtcaggaagtttcacagtctgtgggaagccatgctggatgaatgcttggtgggtaaataccgagttaacaataaattgcctattcccgtgtatcgggccggcagtgacaggtttgttcccgttgccaacaagagccagagaacggatacggttctccacaatgcagagaaaacacacgtcgcgatcatagatgccaaatactatgatgcgaagacacctgatagtgctcctggttggccggatctggtaaaacagtttttctaccagaaggcgctttcttacctagtgccggtcggtaccaacatcacaaaccatttcatttttcctggaacagaaaagccactcagggctgtccatgttgcggaaaggggaaaggttctggttacggaagacgactgtctgtccgaatatccgccgattcattgccattaccaggatcccctagaactacttcggctgtattcaacaggagaaaagcttgtagaactgacccgcgaaatttttacagtctga

SEQ ID NO: 289548 - DNA, 1317 bp, Morganella morganii
atggacagtaagaataaattccaatatatcaaaaacatgagaaaacaattaggcataggtcgcaccgaatttgccaatcttctcggactcggtgccaccggagaacgtacggtccgaggatgggaagaagaggaacatgaaccgtcttccgtcaaatggcaggccattctcgatgtggaaaagaagatgactgaatatctggaaaacgcacctttccgccagaagcctgaaaatgaatgcaatttcaccttcatcgatctgtttgctggtatcggcggtattcgtcttccttatcagcagcagggagggcactgtgtattctcatccgaatgggacaagttctcccagaagacctatctaacgaatttcggcgaaatgccccaaggtgacatcaccagaattccggcatccgacattcctgatcacgatgtactacttggcggatttccatgccaagctttttcacaggccggtttgaaaaaaggtttcagcgatacccgcggaactatgttcttcgaaatccagcggatcatgacagccaagcgtccaaaggcattcatgttggaaaatgtcaagcaactgcagggacatgataagggtcgtaccctgaaaaccattctcgatattctgcggggcaacggaacccattccgttccggacgatatcccgattagtgagaatgcccgcaatgctctgtccgaaaaactcaattactgggttgattaccgtgtactgcgtgcaggtgacttcggtgccccccagaaccgtgaacgtattttcatcgttggtttcgaccgtgactattataggggtgtggatttcgacagtgtattcagatggccggtacctcctatgactccgacccgtgttggtgacattctggaagacctcgatcgtctgcctctgtcacaagacagatataccatctcggatagactgtggataggccaccagaaacggaaactggaacacaaaaagaaaggtaacggtttcggctattctcttttcaacaaggacagcgaatacactaataccatcagtgcccgttattacaaggacggctccgaaatcctgattgaccagtcacatttgggtaggaacccgcgcaagctgactccgcgcgaatgtgcgcgtctacagggattccctgacgactacatcgttgatgctgtttcacagggccagatctacaagcaatttggtaactctgtctgcatgaatgtcatccgtgcggtctcggaacagttggtcgaaactatgaaaaaagccgaaatactggctggtaagaaccagagtctggaacgaacaacaggctaa

SEQ ID NO: 289549 - DNA, 1734 bp, Morganella morganii
atgtcaaagaatagcattctaagtgatttttttaatagccttactatacaagaagaaaaaatataccctatattagaaaatgacaaatcgggcatgatttttcgctcagccataaatgaacttaatttgatgaattataaaggaattagtgaacacaacggcactttaggacaagatgagtattattacatatttaaacttggtgtatctcgtctcttaaaaataacacttgaaaaaaataaaaacttcgatcttcctgctgtaatgtttcttagagattcagtcataagtgaagaaacacattatattgtaaaaggacttggaatgattgaacacggtcgaagagttgggcagtctgttaattccggatatagtgaaattgataaagatggaaaaaactcctttagaataactttatcatctaatctaatagatgaggaaaattacgaaaatacattatcttatttatgcaaaaaaaacaaccttagaaaaagaaatatatttttgtcatcagaatatataaaaaaactaaataaagaaatgagtagtaaaatgatagaactagtatatatatataacaatcattttattggttataatagtgaccctatattagatgaatattactttgcattagcctataatgagctatctaatcaagatggattcgatacttttcacttctcagctaaaatcggcggaattacatttcaaaattataagttagccatagcctttattatgtcagttattacaaaacatgagaaattcgctgaaagcttaataataaaggagccatcaatactcattgaaaatatattaaccacatcacttgattcagaagaatttattgagcacatgtgtatagctatcaattattttggatcacaattgcaagagcattctccactagaattacgcgacgcaaagaaaatatttgaagtactttcatatagtagatctaatattaaaatattagatcgccctagtgcagaattacctatgttaattcaaagttcaaagtctaattttttttgttgcatagcagctagatatagcgcacctttacaatatcttcatgattcattaagatttaattttagtaaggaatatgacaaactacaacagtctagagaaaaaagccttcaaaatacaataaaaataattttcgataataatttcaatggattaaagtatattgacaatataaaaataaaagaaaatggaaaaataaaaacagatatagacttaattattatagaggaaaaaacaggttctgtttttttatgtcaattaaaacaccaagacctttatggttctgatatacacgcaaaacacatacgcacaacaagattaaaagaacaagctagttactggctctcaactataaatagttggttagataaaactagtaacgaaaaaataagaaaaacattgcaaataaatagaaaattaaaaaatttgaaattttataagatatttataactagacactatgcgtttagtcttaaagacatatctaaaagccatgacacttcatactttaatttactacaattatttaacaccattaaagaagctattcaagataatgaaaatacagaaaaaagcatatcaacaataattgaaaaatctaaagaattagaagctacatttggggatataaaatatatcaaagaaccaccatcaatatggaaaatagatgacctatgtttttctgttatacatggataa

SEQ ID NO: 289550 - DNA, 249 bp, Morganella morganii
atgaaaatcacatcaccggccgcactggctaatgctgtcagagatcagcgaaaaatcagcaagatgagccagactcaaacagcagagctgattggtatcaaacagacaaccgcttctgatttcaggaccaaacagggatccactaagttgagagcgctgttcaaaatccttgccgctctggatctggagcttcatgttacgaaacgcgactcagatcaggatgaaaaaaagacctggaataaggtgtga

SEQ ID NO: 289551 - DNA, 642 bp, Morganella morganii
atgcatactcaaaacgccggaagtggcagaaagaaacctgcggtttcatttcacgccaatgagatactggcaaaccgtgtcagtcacatcgtttcttctctgtttgcagaaattgatgataaatccctgatgtctgaaatcatggtactggaagacctggagttgctggtttacgtcgtcagcgcctatcttcagaaaaaaacacggatgaatgaccgtgagatggagatgttcaaagccagaattcaggctacagtccgattttaccagaaactggataaactgggcggtaccatcaaggcaaaagatgtcagtgagttactgggtgttacgcggcaaactgttaataaccatattaataaaggcaaaattatcgcggtacgccgtggcggcgattacctgttcccggtctttcagtttcagggaactgaattactccctcacctggaagcaatcctgttatgtttccctccggaaacggatgcggttgcaaaggtctcattcctgaccagtcctgtgcgcacagcggataatgacgcagtaaaaacgcctctcgatattctccggagcacgccgtcagataaagacatttcactgttaaaacgtgaagctgcacttttcggccaccagacggcatcataa

SEQ ID NO: 289552 - DNA, 648 bp, Morganella morganii
ttggaacaactgacccggctttgccatgacggaaaattaccggttctgaactttgatcttgatgtgaagcgttttcagggaaagcactatccgtcagcggagcattacgggaaaccggtgaaacaggatgctatggggcgttataacgatctctccggtaataccggcgtgtgctattttgcggagaacagcctgacagcgctggcagaaagctacgggcggatgtatcaccatggcaacgggcattttgcgatatccggcagtagcctggagattgctcagatgtatacgttacatccgctatctccgttgcggttagttgatatggcgactcttgcgtcgatgctgcatttgacggcggatcagctgaccggcgctgactacacactgacgcaaattattacaggttgtctggcaaatgacccgttacgggatttccatggtatccgttatgcaagtcgtcactatcttgcggggatgtgtctggcggtgtttgaaccgcaagaaggaaggttgtttgaaacactggcgtgtgaatcactcagcaggtatacagagcatcagtttctgccggtcggctggccttatcaggacatcacggctgaggagatgctggtgaaaatactgcactttgatgtgacgctttaa

SEQ ID NO: 289553 - DNA, 150 bp, Morganella morganii
atgtcagaaacacaatcttccgccacactgcacttcctctgcggcaaaatcgcctcagggaaatcgacactggcacaacaattagtccgcggacaacaggctgttctgctgtctgaagatacctggctggcggcgctgtatccgggataa

SEQ ID NO: 289554 - DNA, 450 bp, Morganella morganii
atggctgatagtgaggataaatcatccactgtttccgaagtattaaaatgcatggtcatcccagggtattctttttataagttgtatgatgtcctatctggcacggaagataatacaactgatgagcttaaagaaagcgcaaagagaagtgaattagaatcattcattcttcagtccagagcaaaggttgagcaagagttatccattgctagacgtattatgtgcgcggatgaagtggaaatagaggaatactatgacatcaatggtaaaggaagtgttggggtaaaaactgatgaatcatcctttacaatcggagcctctggtgaaggccggaaagtaacaaaaagagtgataaaatttaaagggtttggcgagaaatacatacaagaaataaaaaacgaattaaatgagatggaagagaactcaacggccatcacaagagataaataa

SEQ ID NO: 289555 - DNA, 579 bp, Morganella morganii
atgagcaaatcattaacttttaatggtcatcacgtcacgcctgttgacaacagcgacggaaaaacttggttcactgctgaacagcttgctgaattgctggagtacaaagacgtaaagcaagttaataagatatatcagcgtcatgccgatgagtttacagagaccatgacggccaaagtgacggtctcggggaaatcaacaggttacgataacctctcgaaagagattcgactcttctctcttcgcggggcttaccttgtgggtatattctcaagaacctcagtggctaaagaccttcgcatctggttgcttgatctggcagaaaaggaatcaaatatagatgttggctcgatagatattaataagtttgctcagcttacagggcaaacgatgcatgacctgatttcctccttcgataaggcgtcatttaaacaccgaggtcaaaaaggcagcggcctgatgacccagcgtaaacgtgatatcaaaaaggtgaaagaagctaccgcattggcgattaagcttactcagtttgctatcgcagatatgggcgattttcctgaaggtggtgagccagcatga

SEQ ID NO: 289556 - DNA, 186 bp, Morganella morganii
atgagtcaagatatgaccccgctggaaaagcggaaaatgttatttgaattaacagtatcaatgttagcagctgaaatatatgacaaaaactatactgctgaaggaagagtgaaaaaggatttcgatacagtatataaactattgaatgaaaaatgggaaagtcatctggttaaaagcaccaaataa

SEQ ID NO: 289557 - DNA, 378 bp, Morganella morganii
atggactggctgacaaaagcactggccggtatctgtgtggtgctggtcattggtctgctgcttatcctgcacctgtatggtgggctgaaagataatcaccaggcactgaaagataagcactctgcattgacggcggtaaataacatcaccctatctgctgtcgctatcaaccagcgtgtgtctctcgacaacatcaaagccaaacaggaagaggacacggagaatgtcaaagtcaagactgttatcaggacagtatttaaggacagtgaatgcgctattgctcctgttcccgctgatgctgttagtgagctgcggaaatacgcggacggaatacgtacccgcgccggtggtgccgatcccgccacaactgaccgctga

SEQ ID NO: 289558 - DNA, 486 bp, Morganella morganii
atgaataagttaccctggctaaccgaagcacgaaaagaaattggtcagcatgaaattaaaggccaggcttctaacccccggattgatcagttctggcgggacagcaaattatccgggcttgtcggcaccgatgatactgtgccgtggtgtgctgcatttgtgaatgcctgtctggaacgagctggtatccggtcagttcgctcggattcttcccgttcatatctgacgttcggtaatgcactgaaagagccgaaatacggctgtattgccgttttttcacgaaaaggaggagggcatgtcgggtttgtcgtcggcaagacggaatcaggcttattactggtattgggtggtaatcaggccgatgaggtcaatatcaaggcattcagcaccgaccgtgttatcggttatcgctggccgtcgggtgttccggtggataatcgcccgctgccggttggtaacgctgcgttgtcagtgaaagagtcgtga

SEQ ID NO: 289559 - DNA, 306 bp, Morganella morganii
atgccctataaagaccccggaaatcacagttggtttgcggcaactctgatcagcattatgaccccgcttggtacagctgcaagttgtgcctacaagatgcttaacggagaaaaaataagctgggggttcttcttccttcaggtgattgtttccatatttgccggtgcaatggtgtttcttgcgtcaagttattacaactgggagccggagttggctggtgggattgccggtctgtccggatggtcaggtgcagaactgattaagacccttgaaaaacgtcttttacggaaggtgagtgatgaataa

SEQ ID NO: 289560 - DNA, 279 bp, Morganella morganii
atggattattttttagcaccgcccgatagtgaaagcagagcggttttacacaaaaaaacatgcaagaagttacaacaggtgaaagaggctgagtacatcggatacttccttggggagtgcagagctattcggcatgcggaaattattgcgaaagatactgtcaccttatgtcccacatgcttgagtcataatgacaataaagcagatgataacttgctggttcaatttcgcagaacttctggtcaggttatatcccaactgccaaaagatatttggtag

SEQ ID NO: 289561 - DNA, 1260 bp, Morganella morganii
atggataataaaattaatgcttataagattattggtgatactcctgcgatttatgcagaggttgatgagacccggggtaaatttacgctggcattacagaaagatgataaggctatcaaagtcctgacggatattgtatgcggtcaggtttttagtattacctcaccaggtaaatatactctttctgttacttacaaagatgatatattctattccgacagtatatgtttttacgataatgactttatcagtgaaacaccctatatgaatcttttatcgggtgaaaaaataaatcttaaaacagaggagttagtatcaccggatattaaaaaattcactattgaagtgaaaatcaataaagggaaaaaatccattctggataagctcctcaaaaaaataaagacttttttgatttacagaaaaaaaatcattgatctttcaacattctctgaaaaccactcaattcacaattttgaatattataccttaaaaacaaatctgtcctctgtcaacgccattgcagaatgccataagatggaacaggacaatgatattatctatgtatctgtggttcctgatactgaatattttgtgtcttcagatattgatattacccggaattcagatgtaatgaccggtaatgctgcattgacacctgatttctctcacttacaaacatatctggatgaaccccgtggtatgaatataagaaaagcccgagcgcttggcactaccggtaaaaatgctattatccgccatattgacttcggcatctataaaaatcatgaagaatttaaaagcggaaatattacagttgtaaccagtcgtagtgaaactgaggattgtaaccatggaacagcatctgttggctgtatttctgctgctgataataattcaggcgtaaccggtatagcgcattcctctcatctttatttttatgatgtgagagagagtaataatattttaaatgatgccagacccggtgatatcatcagtttcgacgttcaatataaaattaacaaccagctacttcccggcatcgcaatcaaagccttctgggatacagtgaaaaacctgaccggtaaaggagctattgttattgcggccgccgggaatggtaagcttgatttaagcaaccgcggaggatgtcctgattatggtgattgtggcggatttttggtcggtgcaagcaacccggagacaggaaagcgcctggggttctcaaattatgctcactactcatcactcattaacgcctga

SEQ ID NO: 289562 - DNA, 570 bp, Morganella morganii
atgtctgattttttaactgtagttaaagataatgcgttggcaataacaacattggtcggtgtattcaccattataggcactggtcttggtttctggcttaattttcgcctttcaaggaaaaaactagaatcagataaaaaagcccttcgtcaacaaatgataacaaataatattgctccgatgaggcagcaatggataaatgatgttagagttaaatcagctgaattattatcagaccttcattttatattagtatgtaaaacactaaaaaataaagataatgacagaagtgaaaaattaataaaaaaaggattggatttgctaccaacaattcaatacaaattaacataccttgaaattttactcccatcatcagatgatgaaagtttaagcaatgagctttctggaataagacattgcttaaatattttaatgtcattaagttatctacctgatgaagatgtagataaaaaatatgcgtttgacacgatatctacagcaataatttgcattaggaatatcttaaaaaaagaatgggaggttacaaagtccctaaaggaaatagaataa

SEQ ID NO: 289563 - DNA, 153 bp, Morganella morganii
atgaatttaacccctgaacaacttgagacgatcattgagaaagctgtagaaaaagctataaccaagtcattcgtgaaatacctgaaagttacgatagggataccgttagcactgtttgcggtgctaatcgttgttgctttagtattgcggtag

SEQ ID NO: 289564 - DNA, 1797 bp, Morganella morganii
atgattggaattaatactatgttagttacggatttaacagtagaagataatttagaaccagcatccgcaacatcatccttagttgcgaagcgcataggaaatacattaaaagccaggttcgagcaatatattcatacccgagaatgtaaaccagaccaaaaagattatgatgtaaaaatgacctcacgctcaatcgctgcattttgtattagtcaattaggaaaggctgatgaccagcaatcaggcgaatcggtttgtgacagttctctagatggtggtattgatgctatctttgttaatcatagtgaaaaaattgttgttgctgtacaaagtaaatttaatcagtctggggcaaatacatggtcaaaagatgattttctttctttcaaaagtgcaatagagcatttactgtcaggaaattttgatagatttgatgaggttttgcagaagaaagaaaaagatttaattgctgcacttgatgactctgagtatcaatttaaatttgcgatgatccatacaggaaagaaaggtgctgcagatattattttgcaagatatgcagcactggcaaaaagagttaaatcgtgatgcattaatgcctgatgatatgccagaagaagattggtttttccaagttcatcttatctcagcagaagacattcagcagtggctgagagatggcggacaccaaaaagttgatttaattggtgttgaattaattcaatgtggaattattgaagaacctcagcaagcaatttatggcactctaactggagatcaactacatgaatggtataaccagtttggaacgaaactatttaccaaaaacataaggaacttattggggaaaactgatgttaatgagtcaataaaacaaacagttattaatgaacctcacaacttttggtttttcaataatggaatcacattgctagttaatgaaataaatcctcacagaaggaatatagtaagaaatgcggatttaaaaacctatgattttaaagatgtcagtatcataaatggtgctcaaactgtcagtactataggaacaattaataatttaactattgagcatttatctcaagttaaagttttagcacggtttataaaaataaattcagctgatgctgattcattatccaatgatataaccattgcaaacaaccatcaaaatagagtaacgggaagggattttgcagctcaacaccatgaacaacggcgtctcgctaatgaaatagcaatagaaggttgttcatacatgctactcagaacaggtgtctctccaattttttcagaaaaaaatatagatatggatgaagcactaagcgcactggcatgcctatctgcacagccacatatacttgcaacactcaaatcaaacagaggtaagttttttgaaaacttaaatggtaatttgtataaagcggtatttaatccaagtatctcagggctattattaataaattcagttacagcctatagagaaatagagaaaacaattgcagacttaatgaaatcaatatcctcacgaaaaggtaaaaatcttataacccatggaattagggtattaacttcaatatccatgtctacactaaaaagcaaaataaaaagctcagaaaaattccatataactgatacggaaatagccgaactggaaaaaaccattaactgcacttatagcctagctgataaatatataagtgagaactatccatccgcgtatcttgcaagatttttccagaatagagaaaaaatagatgaagtgatgagttatatatatagagagataaatatataa

SEQ ID NO: 289565 - DNA, 198 bp, Morganella morganii
atgagtgacgaacgagaactgatttacagtgaagtatgcagagtaacaggcagagcggctattatgttactggattcacggcagatgataacgaaaggaaatattaagcaattgctgtactcccataaagaacaagaaatagacagatttatgaatgaggtttatgaggttgctatcgacctgatgagcgataattga

SEQ ID NO: 289566 - DNA, 4671 bp, Morganella morganii
atggctttggaagcagggggttatgccgaaaaatttggcaatagatatgaagctaactgggtggcctaccaactgcttcgcctacttgaagaaaaagttcattggattacgatcgaacctattggagatgacgaggttggtgttgatgtaatcattggcacttttcaaaatcaagcagagcatcatcaatgtaaagctggcgtaggtaatagtgaacattggaccttatctcaactcaatgaatccaatatttttaacaatgccctatttcaaattgaacgtggaattaccgagtttcatcttgtttcccccttacccagtaaaaaaatgagtgatctcagtgatagtgctcttaatagcaacatgaatcctgatgattttatgaagtaccaaattaaagctagccaagaacgtgaaaaagaccttaatgccatttgcagttatttgaaattggacgtagatattccttcggatataaacagagtcattcattttcttaaaaagttcaagattaccccttatataattaatcgttatactcaatgtgaacttgaagataaagcttctgcattattttttggcaaccccataaaattactcagttttcttaaaaactatccagtcgaatttaacaaactaaggaaaaaaataaccttatcagagttattatcagatttaaaaacgagtggctttgaacaaaagattgttcccgaggaccatagaatttcaactgtgcttgatattctctctactgagtttgaagaatcaatcaaaccttttcttatttgcaatacattaatcccgaggagtgaattaaactctattactaactcaattgaagataatgcagtaaccttaattaaggcagaagcaggaagagggaaaagcgctttacttttagaattgcataaccatttaatagctaacaatattatttcagttcctgtaagattagatagaagacgacctgaacacaatacaaatgagtttggaaaatctttagggtttccttattcacctgtccatagcttaactaagtttacatcacaacaaaaaatagtgtttattcttgaccaactcgatgcaataagatggactgcctcacactcaaataatgcgttaaatatctgccgggaaatcgtcaatcaagttattaacgcaagaaaagaaggaatagatatcagtatcattttagcatcgagagattttgacttaaatgaagatattgccttatccagttggttagaaagtattagtaatgatcgtttagatatcgaattaacacttttagatgaaaacacaataaaaccattagtttcaccttatgaagcttatacttctttaacggaagaaaaaaaagagatacttaaaattcctttatggttaggcatttacttatctattgcacagcgtactcaaactgcccctcaatttaataataaattagagctagtcaaaaaattttgggaagataggctaaatcaaatcaatcagtgtggaataacagaacaagaagcgacatttcttattgatgaagttgtaacattgatgattcatcaatcacaattatcaatttctgaaaatttactatcaacaggaacgaaaaaacagctcgatgcattaatttctgttgggttactcagtaaacaaaatcaaagaattagctttcggcatcaggccttatttgattatcaagtaggagccaagttttttaaagccggaagtgaatcaccacaggccctcttggcagtaattggttcttatgaggtacagaccttaaccaaaagagaacacctaaaatatgcgctaaatatgctattagactcggggcaagctgccttttgtcactgtgttgaagccatcttattcaatgataatatcaggttccatctaaaacatttagtcttaaactcaattaaagaaattaacagtatcaaaaaaccagcaaaattgcttattgataaaatcatcacaaaccctctgctttttagcaaattcctaacaataagttgctattcaaatattgccattattcgccacttaagtgataatgaaaatattttaaaatggctacacagtaacgatgaaaatttaattaaccttactgtaaatttactccattctatagctacaattgaaccaaagttaattaccaaagaactatcgaccttcgttggtcaatcggagaagtggaatcaaagggtatactctgcattaccatggaaaattaaagatgatacggatgatatctttgaacttcgaaagagattacttaatttaggttgtaccattcattatattgattggaagtcattgagcaaaacacatccactacgtgtactctttttcattgaattaatattagaacattatagaaacgttatctgtgaatatccatactcctctaatataaaaaaaattaataagataactcatagtgacggttggactgatgatgatcttaaagagatcaaaaaattggcagcagtaataccaacacaaatgattgaacgttttcttaaatacatagacagtatttttagttcagaacaggatgaatattttattcatcaatggtttcatcgatttacgtatagcaacgatcatgatgtaagtagtattcgaaacgggctctttacacttattgaggcggctggacaacagttagaagctcatcctgacaaattgttagagcttatgacgccttatatggaaaaatcaaatgctgtgataacacatttggttgcaacactactattgaatttaccaaatcaatatgcagatttagtcataaattggctattggcttcttctgaaatccgtttagcctgtggcaatgaatatattgagccgggctggattttaccaggaaaactcataactaaattttccccttattgttctgatgaattgtttcttcaattagaaaaaacaatttacttttttcattctacaaaaaaacttgaacagataaaatggcgattggaagagagaagaagaggagtgtattatagttattggggagagttacaatattttcttttaccaacattagatcctcaacgcatattgagtgaatcaaacaatttaatttcagtacttacacgaaaatttagctcatatactgaggctgatttttgccttattaatagttatacgggaggattaattacttcgccattacctgacggaaataagctttctaataaatcatggcgcaagctaatactaacaccggggtttaaattttcgcctaataagttaactcaagtcagcgataatattgtttctaaagctgatatcaggtcgttttcttgtgatttacgatcgaacgtgataaacgaacctattcgttttgctaaatttgcaatttcgttgcctcaaactattcaccaaaaatatattgatgcttttttttatggactagctgagaaaaataataaacgagaaaaaaatagcaataaagaatctaatgaaaattgtcctatagaattaatagagaaagtaattcttcattttaataataaagattgtgagtactctctagttcgactattgagcagtagatctgctagttggtctaagcagattattgatacactaatagatctcgcaaaacattcaactaatcctgaaactgaacagttaactgtttgggaccctaaaaaaggaaaaatgacagattgcgccgatgctgaatcattacttagcacaacaattaattgcgttcgaggtgttgcttaccgagggattgctgatattttttggaacaacgaaatatttgcattagataaccttgaactagttgattgtgcaattaatgatgaacatccttcagtaaaaatcgctgctatctttcttttaactccattactaaattatcataatgattatgcccatgagaaatttattgagctatgctaccaagatttacgtatgacatgtagccatggtgcttatcatttttttaatcaaggttttgaaggaaagcatcaatcacaatatatagatttagtgctatcaatgctaacctcatcctatgatgaagtaaagaaacaagctgcaacacaaatatatgctcgctggttttttaatgatctatttgatgaacaacttaacacagtacttcaaggtgataatattctaaaacaagggtattcatctgtcgtttgtcagtttcttcaagaaaataaataccatgataagatcgataaaatagagtatgcctatcaattattaatcaatgatgacaataatgaaatactacgaaaaataggagtatgtattggacatgaaaactattggctcaaacccaacgcagataaactgtttaatctttttgttacatcaaaggttgctaatcattctttatatcaactatttaattcattagaaaaatatccaagaggtttatctaacttaagcgaacctattttacagttaataaaaaatattacgaatagttctagtgtaaatgatcaatcactaagaatggatattcaagagtcaagtctacttgccgttctgcaaaaattatatgatgaagccacagaagaccaagataaagaggctcttaatatctgtttagatatctgggatacattactgcaatctgaaatgtattcagttattaacgctataaatacactagatggaggtctacttagttaa

SEQ ID NO: 289567 - DNA, 468 bp, Morganella morganii
atgaaaatcagaaggttcagtaatggggatgaaatatcgttattcagagtttttttctcatctgtacatacgatcgcatcacactactacacacgtgaacaaattgatgcttgggccccagcagatatcgacctggagcgatgggccaatcacattaaggaattacaaccttttgttgtagagctggatggtgaaatagctggatatgcagatgttcaaccaaatggatacattgatcatttctttgtatcaggaacctattcaagacagggggtagggacactactgatgaattgcattcatgaggaagccagacagcgtggaattagtgaacttacttcaaatgtaagtaaggctgcggaagtgttctttctacgacacggctttcatatagtggagcgaggctttcctatttgccgtggagtgacattacaaaatactttgatgaggaaatgtttggcgaaataa

SEQ ID NO: 289568 - DNA, 237 bp, Morganella morganii
atgggaattggaatgcaattactgaatacagcacaagaacatgcgattgaactcaaactaacgcatatgtggcttgatgtgatggaatctgcaacagcagcgaggaatgcgtattataaatggggtttttcagagatagggcgtaaagattttcctcataaagtcaaagcagacttatctaaaatgattgtccttagtataaaacttgatgctaaaggtaatagaacatttatgtga

SEQ ID NO: 289569 - DNA, 129 bp, Morganella morganii
atgagcggcaaacgttatcccgaagagtttaaaattgaagtagtcaaacaggttgttgagcgcggtcattctgtttctaatgttgcaacacctctcgatatcacccccatagtttttacgcttggataa

SEQ ID NO: 289570 - DNA, 2715 bp, Morganella morganii
atgaaaaaacatttttttttacatcctctcgctgattataagagtcttaatataaaagttattgtatcttttacaactttctttatatcagcaatgccactttcatcatgggccgaatgtcaggttagtaacagtgatatagtctgctctggggtcagtgagaatatatatctgggtccctttgatgaaggagtaccatactctatttattttgatggaacattttcaacaacctcaccagtgcatatatctgctggtaacgaaccaggatcgataacggttaactccggagccgaaatatctgatacattaagcggcttttttactaatgaaacaaccattaatatttctggtaacgttaagagcagttacctgggtttatccaccagttatgtaggactctataacccgaactcatctcttataattaatcaatatgatggggagattagtggtaacagtaatggcgttgctgctgctattaattatggtgatggtattgcgcttaaagtaaatcagataaatggcaggataacaagtagtgatggttccggtatttatttataccatgataacatgtctggaaaaggtgtgacttcggtaaaacagcttgccggggaaatatcaggagggatgaatggcatcaatatatatcattccggtgaaggaaacgtattagtagagcaaatagctggtaagatagttggcggtgagtcaggtatttttattgacacccctagatctgatactaatgttgatgtgaatgttgcggggcaggtttatggtggaacgggcgctggtatccttatcatggatggtaatttatcagagaaaaactcctcaaaattaaatatttcagcaaattctggcgcagatatttcatcttcttccggtgttgccataataaatgcctcatcaatggattctgatatcactctttccgggggctctaagattactggcagtgtattgcttggtgcagggagtgacactttcagaattaaccatggtgctgatgtgactgctttgactaagctggatggtggagagaatcaagagggagcaatagatatacttaatattaatgagctactgaaaggttcttctgtaactacaggaagtagcggtgatgtatctattattaactgggatgtgataaatataggtaatgatatttattcgacagctccctctgttttgattttatctggtgatttaaatactggtgaggttaacatttcaccgcttgcatctattaagctggatacatcccctatcatggttagcattaacggaaatgtcaataactcaggtattattgatttaacttcaaataatgatgttagcaatattcttactattaatggtgactattctggaaataatggaaagttagtacttaatacgaaattaaatgatgataactcatccacagagcgtatgattgttaatggtaatacctccggatatacctcagttgttataaataatcttggaggtaaaggcagtgcaacagtagaggggatcgaggtagtcactgtaaatggctcctctgatggcgtctttgataaatcaggccgtattgttgctggtgcttatgattactcactggttcgtggagcggaagataaatcaggcaactggtatctaacaagtgaattaactccgacagacccggtggacccgcctgtggtgccgccagttacaccaccatcgacaggtgtcgagcatgtagtccgtccggaaggtgccagctacattgctaacctgacagccgcaaacacattgttcagcacaagtctgcatgaccgtctgggtgaaacccactatattgatacactgacaggcaaagataaagtcaccagcctgtggttacgtcagattggtcatcataatcgctggcgtgatggcagtggccagttgaaaaccagtagtaacagttatgtggcccagatgggaggcgatgtagctcagtggtctgacgatggtaaggggcgtggtcaccttggtctgatgatcggctatgccaacagtaaaaacaaaactcattcaaatcttaccggttacagctcaaaaggctccattaatggttacagtgtggggatgtacggtacttggtttgccagcgatgaagacaaagcgggtctgtatgttgattcttggatgcagtacagctggttcaataaccatgttaacggcgaaaaactcgccagcgagttctacaaatcaaaaggcctgaccgcgtcagtcgaagcaggttataccctgaagatgggggagctttcaggaagccatggtatggtaaatgagtggtttatccagcctcaggctcaggtgatctggatgggtgtgaaagcagacacatatcgtgagcataacggtacccgcattagcagtgatggtgacggtaatgtacagacccgtctgggtattcgtacctttctgaaaggtcaccatgccatagatgaaggtaaagagcgaacgtttgaaccgttcatcgaagcaaattggttacataatacccgtaacttcagcgccagaatggatgatgttcgtatcagccagagtgggactcgtaacatcggtgaagttaaagtgggtgttgaggggcagctaagccggaatctgaatgcatggggtagcgttggtatccagatgggtgacaagggttacaacgacagtgccgctatgattggtgtaaaatacgcgttctga

SEQ ID NO: 289571 - DNA, 204 bp, Morganella morganii
atgggtaaagaccgcttacatgatgatgcaatgattgaaattttacgtggcgttcccaaatttgctaaagcatatttacaccaggcttttctggatatagacgaagaaggcagacaagaaggatttttaatggttttaggtcatgttgttgaagccggaggtgaaagcacaaaaatcggaagtttcaagagaaactctttatag

SEQ ID NO: 289572 - DNA, 813 bp, Morganella morganii
atgacctcacttaagacacttttacagctaccgcgcgggtggcaaacctgccgacagattactggtgctgatggaataaccctccatctccgcgccacgcgtaaaacggcatcatgtcctgagtgcctagcgcgtagtaattctgttcataattgccggcggcggcgaatacagcatcttccatgctcaggccgggccctctggttagtcttcgccatccggcactggtactgccgtaacccatcctgttcacgtaaaatttttgctgaatcgcctgctccctttgcaggtccgcagcagcagtcttctgcattgctgaaaaatctgcagcatcagctggggcttatcgcaggtggtgaagcagggagacgagctgcagtagcttcaggaatacagatcagcgcggatactttactacgcagagtggttcaggctccggaacaaacagagaaccggaccgggcatgttggtattgacgagtgggcatggcatcagggccacaggtacggcacactgatcgtaaatcttgatacccatcgccctctggtgctgctgccaggccgggagcaacgcactctggcggcatggttcaaaaaatacccggagatacaggtcgtctcacgcgatcgtggggggatctatgcgttagctgctcgcgatggtgcaccgcaggcaatacaagtggccgatcactggcatctgttgaagaatattggtgatgcgttggagcgcatgatgtacagacacatgccattgatacgactggtggccaccgagttactgcgacgacaagtcatgagccctctggcttaa

SEQ ID NO: 289573 - DNA, 222 bp, Morganella morganii
atgaataccatcaataccaccactaccccttctccgcttgacgaaccactcgtggacatgaaattcatcaccaaatttaccggattaacagacaaatggttttacaaactgatccaggacggtcagtttccgaaaccggtaaaattcggccgcagttcccgctggctgaaaagtgaagtagaagcctggctacaggagcatattattgagtcccggggataa

SEQ ID NO: 289574 - DNA, 582 bp, Morganella morganii
gtggataatcagacgattaatactgaattaataaagattaaagttgatgtatggaaaactgtaattgatacacagaagcattttaatgatttagaaatgaaagtcagaaattttggtatattaatattatctgcttttattggtgctattggtgtaactataaactcaggttattttataaatgcttttggcattaatatttccatatcagctatattgtcacttggtgcagctgttatttggtggctgttttattttgttgacgtatattggtatcatccattattgcttggttctgtaaagcaaggtctagccatagaaaatgatttagaaagtgttcttccaataataggccttaccaaggaaataggaaagaatagccctaaggattttcttttttgcaaagaaatacatagtacaacaaaagctaaaatattttattttggaattttatttatattatgtatgacaagtatcactttatttttcatccctccggaaaaaaatattagtgctgatataacaatacattgtgaaagaaattcatcttatgttggatttgattgtaaaataaaaaaataa

SEQ ID NO: 289575 - DNA, 1362 bp, Morganella morganii
atgacagcttcaataattttcggaaagaacttttccattagaaacttaaataaaatatacacagaaagaattattggttctagcgccataggattagatagaatcaggccagatagattaagtgaaaatatattatcagaggtctctataatatcaaaaaaatacaaaaatggaacatataagtttaccgcatataaagaaaaactagtttccaaaggagctaattcaaatcctagacagatttccattcctaccgccagggatagaataacattacgtgctatttgtgatagccttgctgaattatttccaaattcaaaattaaaagtgcctcaagaggttatatcatctcttaatgacgcaattaaaagtaaaatatatagtgaatatattaagatagatcttaaaaatttctacccatcaattccgcacgaattaatcaaggaatcaataaagtataaaataagaaaaaaagaaacaagagatataattttaaaagcaatagaaactcctaccgtcaatagtcaacttggaagaaataatacggagaatttaaaaaaaggtgtgccacaaggattatctatatcaaacatacttgctgaaatatcattaaataaaattgatgatgatattttaaaaactcctgacatttggtacagaagatatgttgatgatatcttaatattaacaaaatctggtcaggcaacaaatatttgcagcacgattatagaaaaactagagtcaataggattagagccacaccctctagaagaaggctcgaaaacagtagtatctacttttgttaatgaattttcttttcttggctacagaattagtgaaaataatatcctcataaagaatgaaagcatccttagatttgaatcatctatagcaaaaatattaacggcgtataaatatgcaatatcaagaacatcattagatcaagaaagagctttagaatattgcaaatggaaattaaatttacgtataaccgggtgtatttttggtggtaagcgatttggatgggttgcttatttttctcaagtatctacaacatcacagcttagatcactaaatcatgtaatagacaaaatgttaaaaaggtttggtttgcaaaaaaaaataaaagtaaaatcattaataaaaacattctatgaattgcatcgtggtgataaaaacaagtatagatacatacctaattttgataatcttacaatcgaacagagaaaagatattttatcattatggctaggaaaagaaaaagtaaataccctaacagaagattatataataaaaatgtttgataaaaaaatatcaatctctgtaagagaattagaagaagatatctctggaatatcttaa

SEQ ID NO: 289576 - DNA, 549 bp, Morganella morganii
atggtcattggaatgaaagataacatttggtttacctacaaagctaggattcaggctcaaagtagacttgaatatttagatacacactcacagtttttattagtatggtatgcaatattgggtgctgtattagctatcatctcaatacgctaccccgttgtattgaatgaaaacactgatatatatgcagctattttatctgtagcattacttgttctttcattagtcatttccaatcgggacttccgaggaagatcaataaaaatgagagaaaattatatagctatgcataagctatatattttggctgaaaataaattaattgataacgaccaattgatagataattacttcacattattaaatgatgttgaaaatcataaagccattgatgacaaaatattcagagtaaagtcacaagcattcttgacaagcagaaagccaacctgttttgataaagtcaatgtcatcttttccatattcgtaatgtactttttgactatctttctgtatttattcccctttttatttttaatggtatacaaatga

SEQ ID NO: 289577 - DNA, 672 bp, Morganella morganii
gtgaaaaccaccatcaaaaccaagtgggatcaaatcatcacggatattaagaacctaccggccaccatgaaacaggccgcatctgacatgatagacggcgttatcaacggtattaacgaaaaatggacggagctgaaaaataagttcggcgaacttaagcagatggcaaaagatgccctcacgccggactggctgatcgacgccaaaaaagacccgaaatttgttaacgccgtggatgcctcacaaaaaaccaccatgaccggcggtatccgtaatgccaactggagcattccgccgaaaaagtacgccggagcctatgattccggcggacgtatttcgcgcggtcagtggggcattgttggtgagaacgggccggaagtcgtggacggcccggcaaatgtgaccggtaggaaaaatactgcagcactggcaatgctggcactgagcaccctgtcccagccgatagcggcggcaccggcacaaaccaccggcggttctgtcagcagttcgtattcatcacagcagaacgccgcgccggtcatcaacatctacccgacaccggcgcattccgcacaggatatcgcccgcgaggttgcccgccagttagaggcgcacacccgccgacagcaggccagccgccgcagcgggtacggtgacacagaggagttttaa

SEQ ID NO: 289578 - DNA, 321 bp, Morganella morganii
atggtggcttatgcctacggggcggatttggatcatttgggtgcaaacaacaacgtttcccggctggtgattcaggcggctaacgacacggcgatcccgccgctgccggccatttatgaatctgacgctgatttccggatgcgtattccgcaggcatttgaggggatgagtgttgccgggccgatcggcgcttatgtttttcatgcgcgcagcgcctccggacaggtcgcggatgcctcggcaatcagtccggagcctgcctgtgtgaccgtcagcgtactgtcacgcgagggcgacgtacggcaccggcagaactgctga

SEQ ID NO: 289579 - DNA, 606 bp, Morganella morganii
atggacgatctaattcaaagggagtttgagagtttaaaagctgactctaatagcactaatattttgggaaacctttatattagtagatcaaaacacgacgaaccaataatatcttctaatctaatcagttcgcaatatattaactcaactcatatttttactgggttaagattcttaggatttaacatattaaatcatgagaaaaaaactttagaagctgccgtcgaaagaaatgctcaattatggtactctcagggaccatcaggtgatgttcttgtatttgtttctccttatcaatctaacgcaggaaaaataaaagaaactgaaataataataggtaaataccaaaatccatcactaataacatcaaagcacataaaaaaacacttttctatatattttaagtattgtacatgcactgcgcaacattctgcgtctaatatgagtaattatatttatagacaatatcttgtcttcaatgattttagattcaagtcggtatacctgcataaaacaataaaaattgctgagagattgttaattcctaccctaacaggagttgctatattggtttccctctatgttggcggaaaatggcccctgtaa

SEQ ID NO: 289580 - DNA, 966 bp, Morganella morganii
atggcacaggcaaaagaacgcaatattgaaatcagaactgccattgactccaaataccttttttgtgaggtcaaaaccaacggggtaccgggatatgataaccgggcaagtgcgctgagaggagatggtgccggcaccaccagcacaaactcttatatcgccatgagcaacggagtcaatgaattaacagtggaagtgggggcgctggactggtttgccgaaaatgccgcagagcttgagaataaagagagatttaatccggcggcatattgcaaagcggtgatgacactggttgattatgataacggtcagacggtgaatcttgccacgctggatatcagaattaatgaacagggattgccggaggcgtacctcaataatgaaccggataaaatggccatttttaagaaaataacctcacacccgacagagagagtaacaaaaaacaaagcaacctccggaaatgtaaccccgcgtgcgtacccggataatatgaccctttatcagtttactaagtcctttacagtttccggtcttccggactggcagtgggtgcattcggagccgtataccggcagcccggaacaaattgccctgctgaaagaggcctacagtgagctgtggctggcattaaaaaataaagatattaaaaaagtaagaacgcttcatactccggcggcagaatcctgggcggtcacgacgcgaagtacggcagaagaaattctggattctcaggactataacaccatttatgatgaaagaaatgcagaaatgaagacgatagactgggataacttttatattattccgatgaataacggaaagatggtgcggatggtctataaggaaacgttacgattttcacctgtgggtgttagttatattagcgaaagaggaaagaaagcatcatactttttttccccgatattttcattggtgaacgggaaatatattccggttatttag

SEQ ID NO: 289581 - DNA, 459 bp, Morganella morganii
atgcggcggcagtttatctgtaccgctgtgcatccagctgtctgcggcatagacaaaacactgcgcaaccggcagttgttttttcatctccgtggcgtcctgcaccgaatccggcaggatcagcggtttctggctgtagccggttttccggccattttccgtgccgtaaaaacggctgctgatcacccgtcccagtgcatcagtctgtacctgactgatgttgtcattggtatcggtgatttcgcggacagacagaaaacgccagtcatattttgcctgagtgacaagtccggaggcatcggtatgtttagtgataacacagtgatgtttgtcgcgggtcagatgtcgttccccggtcagcggattatcgcggacggcgaccggaagccggaactgttccggtgtcccgtaagtcagatgaccggaacgcgtaatccagacctttttctctgtttctga

SEQ ID NO: 289582 - DNA, 312 bp, Morganella morganii
ttgctgggtggatcgctggagttgttcaaaccggtttttcagttgaccggcttcacgctgcgcgcgtttaagcgcttcggcctgttgccgtgtcggattgccggaggcgttcatttcgcgggcgagggcggcggcgcgttgtgttgccgcctgataggcctgctgtgtttcggtgagttgctgttttgttttacggaagccgtcaatttgtccggcctgacggttcaggtctttcagtgcatcgcgggactggcggacagcgcccgccagtcgtttgttggattcctgcgcactgcggaacggccgggttaa

SEQ ID NO: 289583 - DNA, 489 bp, Morganella morganii
atggctatggctgcactcggcctgttcgtgtttgagctgcgaaccgtgccgtttcaggggatgcaggaagaaaaacaataccggtttgcgtataacagccgggtcggaaagcgtccgtcctggcaatttttggggctgtccaatgatccgattaccctgtccggcacactctgcccggaaatcagcggcggtaagttttccatgatggcgctggaagccatggccgacagcggaaaagcctggtcgtttatcggcggcgagggaaccatttacgggatgtatgtcattgagtccatcagtaaaaataaaagtgagttttttcacgacagcgcggccagaaagattgatttcaccatcaaactcacccgcgttgatgaatcgctgtcggagatgttcggtgatatcagcgcacagcttgactcactgactgacaccatcagtggcatgggtaataaaatttctgacagcattacagggctattatcatga

SEQ ID NO: 289584 - DNA, 312 bp, Morganella morganii
atgaaaacgatgaaagaacactgggctgacattctcgacacactcaaaaacgcctggccgcagttgtccggcgtggcgatagccatttttatccgctatgcctgcctgatttatgacggcgacacccgtaaaaacaagtgggctgaatgcctgctgtgcggtgcgctgtcatgggcgattatcagcggcgcggagtttatcggtattccgaacggtgcctccggcatgattggcggcgcggtcgggtttttgggtgttgagaagatccgcgacattgcacaccgcatgattaataaacgactgggagactga

SEQ ID NO: 289585 - DNA, 465 bp, Morganella morganii
atggacttcacatcagacaaaacaacagacataccggacgaaacactcagcagcggggattttttcccggatatcagtctgcggaattatcagcagtccatgctgacggacggcaaagtgaccacagaacggttacggcacgcactggtcaacgccataacggaagtcaaccgcgagctggcaggctggaaacagtcacagattgccgccgggtttgcctcactggaggcggtaccggccgaccacatcaataacgacagtgaactgatgctgctttaccgccgggcagtatacagcggggcaaaagcgacactgactgagcgttaccgcgacactgacaccaccgacagcggcgaaaagaaagccgccgccctgagtgaaacggtggatgacctgcaccgtgatatgcagtgggctatccagcgtatcaaaggtgaatcgcacaacatctgtgaactgatatga

SEQ ID NO: 289586 - DNA, 609 bp, Morganella morganii
gtgggtcagactggacggtgtggaaaaataggtctgccgccattttttgtgcatcgccatcccggaggcaactttgcgcaactcctgaaatttcggtatccagaaatattcatccagataaagattgccgtgataactttgtgcggtccgggcgttggtaccgaggaaatagagcgttgcaccgttcggcaggacaatcgggtcgcctttcaggtcaacatcgacctcgcgggcaatctcaatgatgtactgtttgaatacatgtgcctgtgccttactggcggaaagaaaaatctgattgcggccggtcagcagcgcgtccataaaggcttcgcgggcaaaataatatgtcgcccctatctggcgggatttgaggatatcccggatgcggttctgcgccccggcgcggtaccagtttttctgatactcaaacatgttccccgtgaaaatctgttccagcttttcgatctgttcgtcactgaatacgtttttttccggggccttacgttcaccggcgttgcggttcgccagtttcgggttgagatcggtttcattgccgccgttctgatagcgccggattttggcggcacgctccagctgacggcctaa

SEQ ID NO: 289587 - DNA, 915 bp, Morganella morganii
atggataatacagataaccacttacccggtcagcagcttgaaatgagcttattcccagtaaaagaagttgaggtcgaaggcatacagatgggcgtacttaataatgggacgccatatttaacaatgagaggattgtcgcgactgtgtggtgttgactccaccgcaatattaaggctgacaactaactggctggatgaaaggctcaaacccagagggaagaaaatagatgctatcctgcaaagtaaggggttgagattaacggagctgtattggactataaacagcaacggcacagaggtgcgcgcctatccatcatctgtatgcatggctattttagaatactatgcgtttgattctgaccaaacggacagagcgatcgctgtaaaaaactatagagcactgggcgatagcgcgctacgccgcttaatctacctcagtgttgggatcgacccagagaatccgcaacgtggtgcatggcaagcatttcaggaccgtattcagttaaactcacaagtgccattcggttacttttctgtatttaccgagatggcagatctttctttaaaactaataaatgcaggctttgcatttggcccagcagctgtaccagatataagcgtagggacattttggggtaaacattgggtaagtaataaattaagtgaaaagtacggagaaagaacaaagcacccacacacctatccagactggttcccacaacatagggctgggccaatagaagcgtggatttatccagatgatgcacttggtgagttcagacgatggatgcaacagtcgtatttacctatgagatttcctgcctacattgagtcaaaatcgagagatggcagcataccaaaaataaacgcagccaccttattggcacaagtaaaaaaacccgaattaccaaattaa

SEQ ID NO: 289588 - DNA, 183 bp, Morganella morganii
atgctgtcttgccttttcggcggcgcggatgccgtccagttgcgtgtttgcctcatccagatccgcgatcagcaaatcaatccacaacggcagttcgcagtaagtcagagtccggttggcagggacggcggcaccggttttgtcagtgagtccggcagcggggtgcattgtgcgggcacgtag

SEQ ID NO: 289589 - DNA, 639 bp, Morganella morganii
atgagcgcaaacacccaaatcgcggaactcttccgcctgatcagaaatattatccgaaccggcgttgtcaccgctgttaaggtcggtcgcggctgtcgtgtgcagaccggcgatctggaaaccgactggttgccggttgtgacactgcgtgccggaactgcccgcagcagttggatgccgtctgttggtgaacaggtggtgatcctgtctgtcggcggcgaactgaccacggcggttgtactgccggggcttttttctgatgaacataacgagccgaccgcctcactgacagcaaataacgttacctatcctgacggcgcggtgatcgagtacgaaccggcgaccggcgctctgaaagcgaccggcatcaaaaccgcactgatcgacgccgccgacagtattactgccacgtcaccggttgttatcgtcaatgccagtgaaaatatccagcttatcaccccgacggttatctgctctgacaacctgacctgcgccacgctgaatgtgatgaaaggcggcgagatgtccggcagctttaaccataccggcggagcattctcctcaaacggcgtggtgattgataaacatgaccacggcggcgtagagcgcggcggaagccggacggatggtccgcaatga

SEQ ID NO: 289590 - DNA, 324 bp, Morganella morganii
atgccgtggtgtatctgtgcggactttttgcagccagccgatattgacgtcttccagcattttgtttgcggtgcggtcggatgttttggcgcggtgagtaccgttaaagccaatcataatccggtcaagtgcctggcggcggataatggcattacggatgcgcagctgaaaatctttgaacttcgcccacagatccagcttctggtaggtcagtgcagtgtcatagttggtctgctgacattcgtacttaatatctgtcatttcagacgggtcagtcgcttcgcgatcttcttttgtggtgtccgtggtaccggcaatgcttga

SEQ ID NO: 289591 - DNA, 249 bp, Morganella morganii
atgctcaccaatggtggtgcatttatctggccagacatgattgaaacatcacttccgatggttaacccgcataacggcaatgacgccgaactgagccccgaagcggccggtatcgcggtatgtctcattacctacagcctctggtcatttaaaaccgaaagtccggagatggtggagtatttttatcagttgcgggactacgccctgcagcatgaggagtgtgctgccattttccgtcttatcgattaa

SEQ ID NO: 289592 - DNA, 249 bp, Morganella morganii
atgctcaccaatggtggtgtatttatctggccagacatgattgaaacatcacttccgatggttaacccgcataacggtaataatgcggaactgagtccggaagccgcaggcattgccgtgtgtttaatgacgttcagtatctggtcattccggactgaaagcgaagtattagttgagtatttttatcagttacgggactacgccctgcagcatgacgagtgtgccgctatttttcatctgattgattaa

SEQ ID NO: 289593 - DNA, 453 bp, Morganella morganii; identical to SEQ ID NO: 281373

SEQ ID NO: 289594 - DNA, 447 bp, Morganella morganii
atgtttctgtttaaactagctatcgatattaacactcccgaaataaaagttttttatgatcgtttgatcatacttagacagaaaataagaaattttgtttctcatggctcatttggaaaagatggacaaacattggaatttcattctccggttggtgctgtaccacttttgatgccacatcgtcaaaacaaagaacattttaaatttgggaacggtgttgattttgttgcccctgaagctatggagctattacaggaatttgtaaaaaatatgtggagtggtgatttattacccgctaaaatttatattgagtcaggaaatccattaattctttcttatgcgattaacggtaagtatgctaatgcgatgtcatccgaggatgacatgaacaattttgtcgaacatttgacacgtatatttgatgatgcctctaatatggactggtga

SEQ ID NO: 289595 - DNA, 300 bp, Morganella morganii
gtgtgtgccggtggtattatcgatagtgtttgtggtggctttgccgctgacagtctgattaccgttggtgattttagtgttatccgcttcaccgctgacattctggtcaccgttacggagggggttatttttggcaacaccaccggaagagatatcctgattagcgtaatcaaaggtggagtcgatcgccaggccattattgccgacggtctgaccggtatgttttacaccggcagtaccggtaaaggttgcatcaagggatactgcttttttgccgtctttacctttgaggtgttgtga

SEQ ID NO: 289596 - DNA, 276 bp, Morganella morganii
atggttagtggctttgttagtgatggtattattttctgcaaaaccagccacaaactggctgccgtcagtaatgtcatttttaacggaggcaataccatctttttcaacacgctggtcagtgttactcagggtgttatcttccgctttaccgcgtacaacctggataccatgttcagcaccggcattatcgataacgtttttaacggcaacgccggttttttcaatgatctgagcgacatttttcagtgtgttgtcagttgcttcaccgctgactaa

SEQ ID NO: 289597 - DNA, 186 bp, Morganella morganii
atgtctgacaaatattccagccctacagcatatgcctgggggcttataacctctgcctttggcattttatctctggatcagtgggctattgttgccgggatcatctgtaccgtcggtacgttcctggttaactggtattacaaacggaaggaattccagctgaaagccggagaacatcatgaataa

SEQ ID NO: 289598 - DNA, 1053 bp, Morganella morganii
atgaatcttcaacaacgtataaataaacttccacaattatcatccagtttttcatttggaaaagatattgataatattcattcatttatctttaacgaaacttctaaagataaaattgaagatttactaagaaaatgggtgtcaggcaatcagccctgtgtatttggtaaattggcaagcaagaaaattaaagggcttgatttccatttatctattgtaaatagcccccaactatataatgatgatggtcatttgtttgattttttgcgtaatgaaagagttcgttttaaagaacgcgcaagaagaggagaggtcagtgcgcatctcatttattttattcatccacaacttgcctttgctcgtccatcagaagagttagtggacatacaaaaatatatttgttcgctgcatatgccagagtgctatccaataaaagaggatgttatttatactgaaagcgtaccatttcaggataaagatgggctaaaaatatataaggctggtgttaatgttttttactcttctgctcatagaacaagaaatcatgatagaagaataccagggggaatacttatttctgtaaatgccccggggcattttatgaggctggcgatagaaaaaggtttctataaagatcaagaacaagcgttagcggatattcgtaacatgactattcagtctgttggtaagggtgggtattcacatccggaagggatttctacaacatggcattcagaatctaatttggatcgttttggatgcccagtgcacaccggtaatagttcttattacagcggtttttatcatactgatgtattaattccaggagaattaactaaggatgaaagattgctccatgaaatagaaaatagtgatccaatgatcttcaactggaatgtattgttttatgtttcattagaagagtttcctatagatgatccttattatggagagtttattggtattcctgtagatgatgcatctatgttttttaactcctttcaaccaaggaaatttgaaaacaaacccctttatgagaaagaggatgattaa

SEQ ID NO: 289599 - DNA, 867 bp, Morganella morganii; identical to SEQ ID NO: 7185

SEQ ID NO: 289600 - DNA, 192 bp, Morganella morganii; identical to SEQ ID NO: 31981

SEQ ID NO: 289601 - DNA, 357 bp, Morganella morganii
atgggggtaatgataccgatgaaacgcgagaggatgctcacgatacgggttactgatgatgaacatgcccggttactggaacgctgtgagggtaaacaactggcggtatggatgcggcgggtctgcctgggtgagccggttgcccgttccgggaagctgccgacactggcaccgccgttactgcgtcagctggccgccatcgggaataaccttaaccagacagcgaggaaggtgaacagcgggcagtggtcttccggtgaccgggttcaggtggtggccgcactgatggccatcggggatgagctgcgccggctgcgtctggcggtcagggaacagggggcgcgggatgatagttaa

SEQ ID NO: 289602 - DNA, 531 bp, Morganella morganii
atgagcaatcttttacagacgggcgcggagttcgagaaaaagctgaaagagagagccgaatctacagagaaaatgctgaacgacgagttcaggaagctcgaagaatctgtaaacagggaactgacctcaaacgaatctttaatcaggaacgctatcaacgaccatacaacagccctgaaagaactgctggagaggtatcagaaaacgaccgtcgatacgatggacgcgcactggaaaaccgtactgaaaatgagcgtgaaacgctggctgtggctgattatcgtctcagtactgatgtttgccacgaccgggagtctgctgtggtaccagggcatgaagataaacgcgaatatgaatattctccgcgagcagaaagagagtctggagaagctgaacgcgaagacatggggcgtgcgttatcacgaggacagcaacggacgttttctggtgttgccgaaggggatgaaagccgaaacgaactggacgaaggacaacggcaaactgaacgcagtgagactggtgcaggagtga

SEQ ID NO: 289603 - DNA, 234 bp, Morganella morganii; identical to SEQ ID NO: 7183

SEQ ID NO: 289604 - DNA, 267 bp, Morganella morganii; identical to SEQ ID NO: 7253

SEQ ID NO: 289605 - DNA, 966 bp, Morganella morganii
atgtcagaagataaattcctttcggactacagcccccgtgatgcagtttgggatacccagcgcacgcttaccgattctgttgggggtatctaccagactgctgctgaattcgagcgctatgcactccgtatggcctcctgtagcggtttgttacgttttggttggtctaccatcatggaaaccggagaaacgcgcctacggcttcgtagtgcgcaattttgccgtgtccgtcattgccctgtctgccagtggagaagaaccctcatgtggcaagcccgtttttatcaggctctaccgaaaatcgttgtggattacccgtcttcccgatggttgtttctgacgttaactgtcaggaactgcgagataggtgaacttggaacagtccttacagcaatgaatgcggcgtttaagcgaatggaaaagcgaaaggagctatcacctgttcaggggtggatcagggctacggaggtgacgcgaggtaaggatggcagcgcacatccgcattttcactgtctgctgatggtgcaaccttcttggtttaaagggaagaactacgttaagcacgaacgttgggtagaactctggcgcgattgcttgcgggtgaactatgagccgaatatcgatattcgggcagtaaaaactaagacaggtgaggttgtggccaacgttgccgagcaactgcaaagcgcggttgctgaaacgctgaaatactccgttaaaccggaagatatggcaaacgatcctgagtggtttcttgagctgacgcggcagcttcacaagcgccgttttatctcgaccggtggggcgctaaaaaacgtcctccagttggatcgagaaaccaatgaggatcttgtcattgccgacgatgtaggggatggcactgatgacgggaagcggacggcgtttgtctgggattcaggtaaacggcgttacaaacgcgcccctgagaaggataaatcggattaa

SEQ ID NO: 289606 - DNA, 1017 bp, Morganella morganii
atgttttttatattaattgtttcaattgcactaccaataatattacaaaattaccttttatcacaactacctatcattcctttaatttttattttagttactacatctataagtttatttttatcgtataccagtcaattggataaaaatctaaaaaaatacaataccgtaagactattaacaacaatgctgttatttctttcatatatcagcgttttttttatttttgattcaatatccattgggaatataattataattaatatttttatatctacaatgatgattatttactatttaattcctatttcaataagaaaatatcatacagaaggtacaacacactctggatttgtaagttattccttgaagttacatggaactacactagttggtatattaataggtagttatgataaaatattgctttcaactgatgattcattaacaaacttaggcatgtatacagtcgcctttgggttctccagactaattggcatcatcccccaaaatatttcaacggtattattttctcatttagctggagaaaatgaaaataagattagcaatataactcaagatatctactcacttttatttattccaatgttccttttaactactatagcttcactattaacctacttcttatttccattgatatacggtgcatcatatattcctgcaattacacccgcaataattcttttattcgaatgtatgatttccagcctaggttggattcttgcacaacggtttaatacaacaggaaaaccagggttaatattgattagacaattaatatcactcttaccattactgctagtattttttttcacccactcagaaaatatcataatattaataagtatagctgtattacttagctcaataatgcgattaattattacgtattttatatatggtaaaatattaaaagaaaattaccctaatatatttccatcatataaaatagctttaatttttactagattattaaagagaacttttaaatga

SEQ ID NO: 289607 - DNA, 732 bp, Morganella morganii
atgtttctttaccgcataacagataaattagccacaatatctacaaatgtaagtcaagaagccgtcgatacttttattaaaaggaaagcaacaaaacctggaagaatgcttccattttataatggaattgacatatccgttttttcttataacgaaaatattagaaaagaaaagcgaaaagaaattgatatcagtgatgatacaccactaatacttgctgtcggaagattaacagaagcaaaagactatcccaacctgttatatgcattttcaaaactaagcactccaattcaaccaaaattagttattattggtgacggcgaagaaaaagagaatctcaaaatattatctaaaaagttaggtgtgtcgaatgatataatatggctaggtgttcgccatgatgttcaaaactggatgtcagcctgtgatcttttcgttctcgcatctgcttgggagggttttgggttagttgttgctgaagctatggcctgtgaaagggtagttatcggcacagattctggtggtgtaaaagaagttattggtgacgccggttttgttattcctatcaaggattctcaatgcttaaccaaatatatgaataaggctttgaacctatctttaaaagagtgccaagaattaggaaataaagcaagaaagcatattattaataatttcgcattaactacaatcagtcaacagtggcttgaactctataaaaaattatcagtatga

SEQ ID NO: 289608 - DNA, 456 bp, Morganella morganii
atgccagatatggcacatagtttacaccctctaatagatatcaatgaaataaatgattcttcaaacagttgcaaaataataaatctcgtaagacgggatattgaaaaaaataatgtagccaaccataatatggtcaaaaaatcttttgattgggacgacctgataactaataatcacaaactgtggagaaaaatatataatatatcagctaagttttcatttcttaataaaaagtcgatatatttatgggagagagtatctgatgaaatagtatttattagtgagaatcatttttacatgcacgatattgtttatactgatcgcctacatggaattattttatcaactctcctaggtaaaaaaatacacttaattgataattcttacggaaaaaactcatcatatatcagtgcctggctgaaaaaatatccttattttataaatgaaacagattga

SEQ ID NO: 289609 - DNA, 339 bp, Morganella morganii
atgtctgaagtctataaggcaataagtgccgtagccaaggaattggctgagacaggcatcaaaaaagggagccggaattcacaacaggggtttatgttcaggggtatcgacgctgtatacaacgcacttgccccagcgctggttaagcatggcctgattatccttcctcgcattatggagcgttctgtcacggagcgacagacacaaaaaggcggtaccttattttatgtcgtggtgaaggctgagtttgatttcattgccacggaagacggcagcaaacaggatgaatgtaagcgcctcaccggcatcaggatcaacgaacttaagcaggcggcataa

SEQ ID NO: 289610 - DNA, 771 bp, Morganella morganii
atggaattttattctggaaactcggataagaaagatgcattatatctgctttcttatataaatgatgttattttgcctgcttcagtcgatttttttgaaaaactagaagataataccttgcagttgcatcacgttttttcatttaatacaattcttgctcatgcgacggattatatagttcatatcgttaacaaaaaaaccagcataaaaagggggaggtttctgaaaggctttgatgaaagatactctgtagatggatgttgttttattaataataagtttgagcttttagatgctgtaaataattcttttaagcacgttgagttagaaaagaaacgatatcctgagttgataaaaagatatggcgatctttcattccattgcttaaaagaagattctggaaaagttttttttagaatgcctaactatcaatttgattattctagagtggttctaagaccaattgccataatattcgattgtggactcaaagataataatgatattgatgattttataaacggaaaaatctgtggaagttgtggttatgatgatttctcatatgactatgaaccatatgatgcaattgatagaatgatagattactgtaacccacaatgtatggactgtggtgagtatgcggataactgtgattgtcataattttaaatataataaagaaaaaggtaaatataatcctaacttagatccgaacttcgattttgatgatgtcatgtcaaatattagtggcacaagggagtggagtaagtga

SEQ ID NO: 289611 - DNA, 543 bp, Morganella morganii
atgtctgaaattaattattattttgatgaatctcatccactccacccatacttcggtgatgcttacgcaaacaaagactcctttgcccctgtcaatgcgttgcgcgtcgcacctgaatttaaggctgggtttcatccgtgcgagcgtgatggtgcatggattatgattccggatcaccgtggcacaaaagtttatgacatcaccaccgcgcaagagtcagaaattaaagaactcggtgaattgccggacggtgtgacaactattgcgccggatgtggattttccgaagtggaatggcaaaaagtgggtgacagataaagcagtaaaaaaggaaagcgatatcgccgcggcagaagcccaaaagcaatacctgattgccgaagttcagacagaaacccagatgttacaaacaaaactatccctgaagcgcatcaagcccgctgaactggaactactaaacgcctggctggattatctggagctgttggaagccgtggataccttactcgcgccgaatatcgactggccacagaaattatggtaa

SEQ ID NO: 289612 - DNA, 261 bp, Morganella morganii
gtgtggaaggatgcaccacctttaactaaagacgagctatctgctcgtgctgacacagaaaaacaactgcgggctgatgaagcgaataaccgggtaaacggtcagcaatggccttctaaactggcacttggtcgtctgtcggatgatgaaaaagcgttattcaatgaatggctggattatctggatgcggtgaatgctgtggacacttccaccgctccagagattgaatggcctacaccaccggcttctccggccagataa

SEQ ID NO: 289613 - DNA, 453 bp, Morganella morganii
atggctagcggtctggaaaagtacctcaatgatctggcagaaaggctggattcactggaagtcagggctggttttttagggggaggtacttacccggacggcaccagcattgcaaccgtggcatattccaatgaatacggcgacccggggaacaaccaacctccgagacctttctttcgtaacgccataagcgaaaagcagggtgagtggtcagatgctgtagcgagggggattaaggctggacttgatggcagggacgtactggaagcggtaggagcaaaaattaaaggggacatacaaacatctatcgctgaattttcagatcctccgcttaaagagtccactttgagggcaaggcggacccgtaaggtaatgcctaactcatcaacaaaaccacttgtagacaccagagtaatgattggtgatgtcaattatgaggtgacagatgattaa

SEQ ID NO: 289614 - DNA, 498 bp, Morganella morganii
atgagcgacaaaacagaatttacacgaatcgtcccgtcctggattcaggaaaaggcggctgattttgttatcagttccgtacaggaagatgttgaatcaatcttgtgcgagggtgaggaggatgctgcgaatagggcataccggttagctgctttcagggggcgggtaatgaacattgcaattaccgctctgcttactggcactgcaagtgagctaactaaagccccagcgtcacccgatgcacccagtatcaaaagcgaacattatgagccgggcagtaatgatataggtcggcagggtgatgaggcattgcgccgacgtgggtaccgtaaattctccgcacctaattacgcgttcaggtcaattcctcagcttcgtgaattaatgagcgacctgatagacgagtacatggataaccgcgacatagagtggttttcggagcaatcgagactgattgatgccgctacacaggtggcctactcgaaaggacgatattaa

SEQ ID NO: 289615 - DNA, 381 bp, Morganella morganii
atgaaaataggcgaatggctggtaaccgcggtaattgtcatgatgatagtcgctgggggggcatggcaggcaactcggatagataggctgaaaaaagagcgtgatgcactatctgaaaagctgtcagcacagcagacgataaacaccatcacgctttcagccgttgctatcagacaccgtgccgcactcgacaacatcgaagccaaagaaacggagggtacggagaatgtcaaagttaaaaccgttatcagaacggagtttaaagacagtgagtgcgctgttgctcctgtttcccctggtgttgttaggaagttgcagcaatacgaaagagacattcgtgcccgcgccggcggttccgatcccgccacagctgaccgctga

SEQ ID NO: 289616 - DNA, 384 bp, Morganella morganii
atgccaggacacccacacgctgaccttatggctaaggcagcagagatagcgaagactgataaagagtggtactcacaatttcagcgcctgattggcggtgagtggcagaccactatcgttgggtttgtatttcaacctgaaattaaataccgcctgaaacctcgttttatcgacattaacgggcatcaggttccggagccggtgcgggagcctctggaaggcgaccaagagtactggatagcggacattcgatatgcggtatctgtttttaattgggagaataatgacgctgacaatcgctggcttgaacgcggcatcattcatctgaccaaagaagccgcagaagcccactcagccgccatgctctctttcacgcagaagtaa

SEQ ID NO: 289617 - DNA, 585 bp, Morganella morganii
ttgaaaagaataatagtggataccaacattcttatctgtttaatgaagaaaaactcccctacagataatttacttggtgctgatggatttgctgctgtcgacaatgttgagttaaggtcgaaagcacttcttgaccacatagagaatagcggtggcactctagtactaccagcacccgtacttgctgaatatcttatcggcattgatggggagaaaaacaagcaggctcacacacaactgatactaagcatgagttgctttgagatccttccttttgatgaactggcggcgatagaatgctcatccctcccctccccaaatgagtttaagcagttcataaagagtgaaataaattctaatgctaccgcgaataaagttagatacgataggcaaataatttcaatagctaaggctaataatattgatgaaatttggagtggagacaaagaggtttcaagcaaaagcacggaatttggcatagaaataaaatcgctacttgatatgcctccaatatctttatctgaacaaataaatctgagcctattggatgagactccgccttcaagtaaaacccaattaaactaa

SEQ ID NO: 289618 - DNA, 699 bp, Morganella morganii
atgaacgatctacttagtctaaagctagtaatcaatggaaccagacccagcgaaatcccgatggatcagttggctggttacttggtagatctctctgctctttacggctcatctaaaaacgtcaggtttcagtccatagaagaaggtagcgtagagataaatgcgtacgctttagatcctctgtcgctggatgttattcgagcgaacatcctagaaaacttggaaggaagcaagctagcaaaaaggctaaccaaggataactattctgctgaaatttactctagagatgaattaattcattcaatcaagccaaatgcagaagaaaagcccattcttttaacaaaacgcaatgcaaaaatacagggcgagttatttcatatagctgaaaaaaaccaaacatccgcatctgtgcggttgaagggtgccgctggtgagacattgctatgtattgcaacaaaggcagacgctgcacgactagggcggtacatttttaaaaaaatcagggttacaggtactgctcagtacgagaagcgcgatggaatttggaagctaaaaaacctaaaaattgaaaatttctcagaacttcaggatatcagtctgtcagatgggcttaaaaaactttctgatgacccatcaaataaatgggatgcaatagaaaatcaaaatgaagtgatactgaaatacaggagtttcagttga

SEQ ID NO: 289619 - DNA, 2691 bp, Morganella morganii
atggagcaaaattttcaaattaatgacgatgtaataagtgaaagtgatgtagagcaacattatgttctccctttattaacacgtaacccccctgaaggttttggcttagataagtcagatatacttactaaacataatgtaaaggggatgttaatacagaaaagaaataacagaaagaatcactttccagattatatgattgttgttgatggcttaccattaattgtaattgaagttaaaaaacctggcgaagatattgatgaggcatttagtgaggctagattatatgcgactgaaataaactcacaatatccaacagatataaatccattatcgtggataattgcgacagatggggttaaatgggttgcaggaaattgggattcagataactttttaattaaaactgataatttagttaattttagtgagtcattcactaatcttgtaactctttttaaaaaaagtagtcttgcaaagaaatctgaagatataagaaaaaaaatatatcccgatagattttttcagcctattaggtttattggtggtgagcgttcacaaaatgaagagataggacttaactcctttggcgataagctaatttcagaatataggaatatatttaatccaaacacaacagaggataggcgatttattgcgcttcatgggtatatatcatcaattaaaaataaaagaaatcttgacccaataagtaagttaataaatgagaaaaatttaattggtaataaagatgcaactattatagatgatgtaaaaaatcctttgaatttagtaagcgacttaaaaagagggaaggagctagagggtaaaataatattaattataggtagtgttggttcagggaaaacaacattcatcgatcatcttattgctaaagtgataccgccagaaactaataaaaatatttcatgggtgagaataaatatgaataactctcctgtgaataaagatgagatctataattggattagaggaaaaataatagaagaacttgagtctgaaaactcagatatagatttttttgatcttgaaaccataaagaaaatatactcagttgaagtaaataaatttttaaggggacccggtaagcttttatcaaatgatgaagaaaggaacagagaactctatagaataattcaaaataatgaagatgatagtagtaggaaaaccatgtgttacacacgttttttaggttcagaacgtggaaaattaattataattgtattagataattgcgacaaaagaacacgtgatgaacaactattgatgtttgaaattgcacaatggttacaagatacatttagaattctagttattttacctttacgtgatgagacatatgataattacagagataaaccaccattagatactgcaataaaggatatggtttatagaatagaccctccattattccaagacgttcttagttctagagttcagctgatcttgaataaaatgattggtaagtctaacgaaaaaataaaatttgaattaacaaaaggaatatctgtcgattgcgctaaagatgaaaaatcattttacttaacatcgatggtaagatcgatatttgttcatgatcgtcaaattaggcaaattattgttggtcttgctggtaaaaatataaggaaagcattagaaattttcatggagttttgtactagtggtcatataactagtgatgaaatattaaaaataaaaatgcagggtggtaactactctcttccattacatattgtcactcgtgttttattacgaatgaaaaaaagattttataaaagtgatgattcttaccttaaaaatctattttcaatatctaacaatgataaaaatccaaattatttcacgcgatatattattcttaagtggtatagggataagcacacttatgcagggccatctggatataaggggtatttcccgattcgaattttgaatgaggatataaaaaaatatggtatagataatgatgttttaataagagaggttaattatcttattaaaggtggttgtcttgagtctgaaagatatactgatgatattgtggatgaaaatgagttattaaaaataacatctgctgggtttgtccatttagatatgatacagaacataaattatctcgcggcaatagcagaggatactaattatgatactcgtgaaatagctaaaaatatagcggatgcgttgggggagaataatacgcaatataataaggatgttgctgctagaaatgccaaaatactagtcgattatttatcggaatggcaagaaaagtatatttcattctctggtaattatcttagtgatagtaaattctctgagctatccgaatttgatttggccaaaaagtgcgtagaagatttcacacaaaaaataaagaaaccgcattgggctaaatatgaagaagaacatgaggttggcgatgttgttgatgggtgggttcgtaatattcatgattcatatggaatatttgtaaacctctctgagcatgaaaaaataactggattgatttatttaacaaaatgtccggatgactttcgtaataaatataagattggcgataaaataaaagtaagaattgatagtgagattgatagtgtaaatgagcgagttccattaagtcttattgaggatacgaatatattaatacaattagataataacgaataa

SEQ ID NO: 289620 - DNA, 816 bp, Morganella morganii
atgaataaaaccatcctcaaatgggcgggttcaaaagtcggcattatggaacagctgcgcccgtacctgccaaaaacaaaacgcctcgttgaaccgttcgccggttcctgtgctgtgatgatgaatactgactatgagcagtatttaattgcagatgtgaataacgatttaattaatttatataaaattatcaagtattccgatcctgatgtttttataggtaatgctgaaccgatcttctgtgtatcaaatgaggctaaagaatactatttggtacgagatttttttaacaaactaaataagaacataaaaagcaacacgcttacattagcagtgtggtttttatatttaaatagacatggttataacggattatgccgatatagcaagaaaacaggctttaatgttcctttcgggaattataaaagcccttatttcccggaagcggaaattcgtgcatttgcggccaaagcagaaaaagcaaatattcagtgcctgacatggcaggatgcgttatcacttgtcgatttcggtgatggcgtgtactgcgacccgccgtatatgggaaccaattttacgcagtatcacgctgacggattcacggatagcgacaatgaagcgctggcctttgccctgaaagatttgaatgatattcagggtaacccggtcacagtatcaaattcactggcagcaaaagagctgtatgcggatttaggcttcactatccacgtaatagaagcaccgcgcaccattgcggccaatggtaaccggaagaaagcacctgaaattattgctgtgctgggtggttgccaatga

SEQ ID NO: 289621 - DNA, 1269 bp, Morganella morganii
atgaaaatacatgactttataaaaaaggctatcaatactactttattcaaaaacagtttcgcattactgataataaaatttgttgacttagcccttccgcttattgtattaccgttcttatctcgcaatctgtctatcgcagactttggattatatattgtacttgtatcaatattttccatttccttcatgataacagattttggttttgggctatcaactatatgtaatatagtcaacaataggaaagataaaaaatatattcagagttatgtatcttctattattgtaataaaattgactcttgtcttattcataactttatttacattggcatatcttatttttataaaaattgatacccatttaaacattttgagctatatattgataatatttacaatactgtttcaagcactgcaaattccttggttttttcaagggattgaaaaaatgaaaacaataactataaccgttctttgtactaaattatcatttttatttgtattgttaatattatttaattttgagaaaagcataaatatatatcttgtctcatttatgctcagtacgctgttaagttctattttatatatatatttctataaaagacatggatatactttggggaggtttagtaaaaaaactttaattacagaatttaaatatagttttaccttcttcctatctagagtctcaacgagtctttcctcatctcttaattctattgtaatcgcaacttttagtggattaaatatcgctgcattctatggggcatctgaaaagctatataatgcatctgtaagtagcatatcgccaataacccaagctttgtacccttatttatctcgcacgaagaatattaagttattaatcaaaataagtattattttattttcactatcctctattacttgtgtttttatttttcattactctaataatatcattgctttaatattcgggagtgattatattgaagcatctcattacttgaatctatttttaattttaataccaattaatattttatctatattatggggatatcctgcattttctattatagatagacctggcattcctaacattaccgttattgttagttctattatatatctttttatattatcaatactatatctaagtaaatctataactgttgataatatcatttatagtataatcactatcgactgcatcacatttatatcacgaatttatttattcataagagaatataagagacacttatggctagttcactaa

SEQ ID NO: 289622 - DNA, 165 bp, Morganella morganii
atgactacagaacaactcgcagaattaaaacgcattgcactggaaaggcttgcagaggcagagagggcggtgaattcctatgcaggagagtgcgaaggatttcgtaggattgaagcttttgatgcattaaaaaaaatcaagctggcgaagcaactttgctggtag

SEQ ID NO: 289623 - DNA, 1074 bp, Morganella morganii
atgaaagagctgatccacttcggtcgcgtgtacggcggcagactggcactatttctggttgagacatctaacccgcaggaatggtatgaaaatccgtttaaccctgatggcgtgacaaaaggcatgtacaaagggattaagcagatagatccgcaatgggtcacacccgatttaacggatgccaatttacaggatccggccagccctgatttttatgaaccgacgtactgggttatcggcggccgccggtaccacaaatcgcatttcgtgaagttcgtgccgttccctgtgccggacattctcaaacccacctataactatttcggcgtatccgttcccgaacgggtgtatgagcgtgtttatgcctctgagcgtactgccaacgaagcaccgcagctggcgatgacaaaacgcctgctgaccatcggtatggctgatgttgagggcatggatacaaagactatccacgaaaatatgctcgattttatggatatgcgggacaactacggcgttcagacggtcggggtgaatgatactgttcagcagtttgatacctcgctggcggatctggatgccacgattatgacgcagtatcagcttgttgccgctgccgcaaacgttcctgcaacaaaactgctcgggacaaccccgaaagggtttaactccaccggggaatacgaggaagccaactaccgagaagaactggaaagtattcaggccaatgacctggaggagctgctgcaacggcactatgacatgttacagcgcagtgaagggctgggaacggcggcgttgtcggttacctggcggccgctggacagcccgaccgctgtcgaaaacgccgatattcagcttaagcaggcgcagaccgattccgcgtatgcggcggtcggcgctgtcgacggactggatatccgcaaaaagctggcggcggataaggaatcggcattttacggtattgacgtgaacgaggacgattatgccccggaaaatacgggtacgaacccgccgggcggttatgaagggcaaacccctgctgtatccggcagcggcccggagccgttatcagcgtga

SEQ ID NO: 289624 - DNA, 1068 bp, Morganella morganii
atgccagtcagtaaagaaaagttttatatgtccggccgcgatatccgcaagcacgggcaactgaatattaagcccgatcagaagtggacatacagcgaactggatcagattggtttcggtggtctggccgcaatggactccgcgttaaccggcccggctatgtccggcgggttcattcagcgtgagatgttacaacacgtactgccggggcttatccgtaccgccacccgcgtccgtgtactggacgaaatcaccggcgtactgaatgccggtaactggcacgatgaagaaattatcctgaatgtggcaaccccggccggtaaggcggagttgtacggcgatcacaccaatatcccgctggcatcctacgggcaggatcaggaacgtcgcggtattgtccgttttgagctgggttttcaggtcggaaagctggaggaagcccgtcagtcagcagcaggatttgagactgccgcagagaaacgtaatgccgttgccgaagcgctggagcaggggcgggaacgtatcggttattacggtttcaacagcccggacacccgtgtctttgggatgctgaatgaaccgggtttaccggcgtatgagacggctgccgcaaaatggaaaggcggcacatttgctgccatcaccagcgatattacggccatgttttcgcgtctggagatgcagtccggcggtattatcaaagatgatacggctatcactctgaccctgccgctgggctaccgttctgcgctgaatgtggcaaacccggttgcccgtggtgaaacggtgtatcagtgggtgaaagaaaactacccgaatctgcgctttgtgttctcaccggaatttgccggtgctaacggcggggcggatgtggcatatatgtttgccgaaaccgtggatgatggctcaacggccaccagtgcggttcttctccaggtggtaccggtgaaataccagttgctgggttcagagagcaaagtcaaaggctacctggaagatgccaccaacgcgaccgccggtatcatcgtcacccgtccgtgggccatcacccgcctgaccgggatttga

SEQ ID NO: 289625 - DNA, 354 bp, Morganella morganii
atgcctctgtatatctattgcaccctgtccaacgaccagaattacgccacaccggacggtccggtatttatcgccggtcaggccaatgttatgaccaaacacatgtacaccccgcgcggccgtgtgactgaaatcagtgatgagcagtatgcgcagctgaaaaataaccatgtctttaagctgcacaaagaaaacgggtttatcgcggtggaaaaccgcaaagaggatccggataaagtggcaaccgatatggaagccagcgacaaatccgccccgctgaccgaagaacagatgatcgcggaggggaatgagccgccggtcagcaacaaagacaaaaagaacagtaaaaaataa

SEQ ID NO: 289626 - DNA, 693 bp, Morganella morganii
atgaacaaaccaaacagtgaccaggcgaacgacggcagtctcgccgggcagtttatggctgcgttccgtaatctgctgatgaatattgatgacatgcttcccgccaccgttgtgagttacgacgatgcgacaaaccgggcggtaattaaacccctggtgatgatggtcaccacggaagggaagaaaatcggacgtggtgcgctgccgaatatcccggtattccggttcggcggcggcgggttctttatccggatgccggtaaagccgggggatttcggctggctgaaagcgaacgaccgggatatcagcctgatttttcagcgcggcggcctggaggatgaaccgaatacggccaggctgcatacattcagtgatgccatgtttttccctgacacgctcaaaggctgggtgatcgacggcaaaaacgcggacgcactggtggtgcagtcaacagatggttctgtgtgcttatccctgcatgccgataaagcggtgctggacacaccgttgtttgaggttaatgcgccggaaaccatttacaccgggaatgtgacaattaacggtaaccacgcggtcaacggcaacagtgattcaaacggcggcaccatgaggcataacggtaaagatatcggatctgcccacaggcattccggtgttcagggagggaacggaaattcaggagagccggtatga

SEQ ID NO: 289627 - DNA, 189 bp, Morganella morganii; identical to SEQ ID NO: 288517

SEQ ID NO: 289628 - DNA, 1017 bp, Morganella morganii
atgaaaccggattggggggtgttacagcaacagttcctcgccgagcattcagtaacgggaatatccccgaaagaatggtgtgagatacaggggctgaattacgcaactgcgcggaggcacatcaaaaagccaactgcgcagaatgcgcaaaaaactgcgcaaaagaaagtgcgcactgcgcagaaaaaagaatgcgcaaatgaaccggtgcgcaatagtgatataccggatgcgcaaggcaataaatccgacaatgcgcagaatgatgaaacagagttcgatctgcgcaaatacgggcttaacgatatgcaggcacgttttgtcactgagtatcttatcgatatggacaagacagcggcataccaaagagcgggatataaaagccagggtgaaacaggagcagctgcagccagacgcctgtatcgaaatgtatcggtgaaccgggcaatacgggatgccctcacagcacgggaacgccggactgaaatcacccaggacgcagtgttaaaaatgtggtgggacattgccaccgcagatgtatctgagctgactgaataccgccggttatgttgccgctactgctggggctttggttttaactatcagtggcgggactcgatagagtttgaggacgctgtcagtgatgctatgaggaagagtcagaggccaccaaacgacaggggcggctacggttacgacagcacacttgacccgaatcctgattgcccccgctgtaacggtgttggtattggtcgtcctcatttccacgatacacgggatttgaggggagcaagccgccggttatttgccgggataaaagagggtaagttcggtaccgaggtgatcacccgtaatcaggatgaggcgctaaaaatggttgcgcagcatttggggatgctgaaaaacaggacggaggtcaccggtgcagatggcggcccgatacaatcaacgggatttgacctcagtggactgacgacagagcagcttttgcagttacgtgaaaaagcggggaaatag

SEQ ID NO: 289629 - DNA, 450 bp, Morganella morganii
atgaactggaaagaagcggttatagccacgttgttcattgccaccgcctggtgggtatacgacacctaccaggctaaccagcagctgaaagcagataacacgaccctgagtagtcagctcgcagagcaggtcgccatcaacaaggactatcaggaacgcgcacagaaacttcatgaactggatatcaggcatacacaggagctggcaaatgcaaaaactgaaattgatcggctgcgtgttgctgctgaccgtaatcctgagcgggtgtacatcagagccatctgtccgaaaaccagcagcattaccgccaccggcatggatgatgcagtcaccgccagacctgatgataccgctgtcagaaattattggttactcagagagcgaattgcagagtcagagcagatgattaaagggttgcaggattacattaaaactcagtgtgtgaattaa

SEQ ID NO: 289630 - DNA, 369 bp, Morganella morganii; identical to SEQ ID NO: 278805

SEQ ID NO: 289631 - DNA, 495 bp, Morganella morganii
atgtcttcacactggttcgggtacagtcagtggcagttaccgaatgaagcggattaccggaaattacaggcactttttcagagggctgccgcagaacgtcagcaaaataacccgttataccgtgaacataatgatctggtcagtgagcaacatacactcaggcgtgaatatcacgaacaggcagatcagtatcagttgttacgccgttacttcacggtatcagttgatgtgccttataccgatgtgtggacattcccgccggttcagtattaccccggaaagcacccctgtgaaaaaccggccgcaatgatggagcacatcataaaggccagcagccgtgaaggtgatttggtcgctgatttctttatgggatccggagcgacactgaaagccgcactgaagcacaaccgccgcgttctgggtgtagagatggaagcagagcggtttgagcagactgcagcggaactggcgggcgctgaggtattattcaggtaa

SEQ ID NO: 289632 - DNA, 213 bp, Morganella morganii
atggaaaataacaacattttatcaaacagaagaaagtcgttcactgatgctttctttcaccatctgaaaaagaaaggtaaatcggcatcatttaaacgctctgtagatggtgtgcaatatcagattgatttagatgctgaggtactgacacaggcgctgatatcgctctatgaaaataaggcatgtaaggacgcgggttataccgtgcagtag

SEQ ID NO: 289633 - DNA, 744 bp, Morganella morganii; identical to SEQ ID NO: 278807

SEQ ID NO: 289634 - DNA, 480 bp, Morganella morganii
atgtcttcacactggttcgggtacagtcagtggcagttaccgaatgaagcagattaccggaaattacaggtactttttcagcggacagctgcagagtgtcagcgaaataatccgttataccgtgaacataatgatctggtcagtgagcaacacacactcaggcgtgaatatcacgaactggcagatcagtattcgctgttacgtcgttactttacggtatcagttgatgtgccctataccgatgtgtggacattcccgccggttcagtattaccccggaaagcacccctgtgaaaaaccagccgcaatgatggagcacatcataaaagccagcagccgtgaaggtgatttggtcgctgatttctttatggggtccggagcgacactgaaagccgcactgaagcacaatcgccgcgttctgggtgtggagatggatacggagcggtttgagcagacgaagactgaaatagcgttattgtga

SEQ ID NO: 289635 - DNA, 216 bp, Morganella morganii
atgctgcacaagctggataaggggatcccgtactggaaaactaccttcgggcgacaggctgatctgccgctgtttgaatccgcgttccgcgagcgtatgcgggaaattccgcaggtgaccgccgtggtgtcattcagagccacgctgaatgataacgaactgaactatgtggctgtcctgcagacagaatacgggagcattacgttaaatggctga

SEQ ID NO: 289636 - DNA, 183 bp, Morganella morganii
atgctgatcgtaagcctgctgcatggcttcaaaggcgtctttcagttctccggcgagtatcagatccataccgatttccaccgggttaatcacaacatggtcactgcgggtttcaccggattccacctgaaactgcgtcgccttatgctcatcccggacgttcagctgaacgggatttactga

SEQ ID NO: 289637 - DNA, 252 bp, Morganella morganii
atggtgctgtgtgaggcaaacagctatggtatttatactgtcagttcagactgtccgacaggacctgcagatattattcgtccgtatgtaaatggtgaattatatcctgtcggagataataaaaaactcgctgacattctgaataaaatcgtttccggggaaacagaaataaatcataccgtgataaaaaactccatttcaccgttttatgaagataaatatcttgcaagggtttcggatatatttaaatga

SEQ ID NO: 289638 - DNA, 285 bp, Morganella morganii
atgtcaacgttaaaactgttttcaaagacagtgaatgcgctgttgctcctgttcccgctgatgctgtcagtgagttgcgcagatacgcgaccggaattaatacccgcaccggtgatatcgattccaccacaactgaccgctgattgtgagcaggttgagataccggatgatctgacgttcggtggtgcagttgagctgctggctgatgccatgaaatatattgctaactgtaatcacgataagtggtcaatacgggagatagaagcggagaggataaaaaaatag

SEQ ID NO: 289639 - DNA, 1308 bp, Morganella morganii
atgaaaaaatcagaatacccttcctggtacaaaaaaagaaattaccttcattttgatgaagcaattaatgcaaaaaaagctacaaagattgtagtgaataaaaaagctattgcatcccatgctttttttccttttatttcatatgaatttagcactaataagctggatagagatttagtaactggacatttatatagaaaaccaaaacagcgagaggtagcttattcttctcatatagatagccatatttactcatattactcagagaaattaactgaattatacgaatgtcagttaattaaaagtgggttaagtaaatcaatacttgcttttagaaaacttgatgggaaaagtaatattcatttttctaatgatgcttttaattatattaaagggaaaggtgaatgtactgctgttgctttggatttttccaaattctttgatacattagatcatgaaatattaaaacaagagtggtctaaattattagaatcacaatcactccctagtgaccactataatgtatttaaatcgttaacaaatttttcaaaagttgatagagatatattatttaaagaattcggtatatctcaatatacgcctaaggctaatggacgaagtagaatatgctcgtctcaagaatttaggtctatagtaagatataaaaattttattagaaaaaatcctaataataaagcgggtatacctcaaggttctccgattagtgctctactttccaatatctatatgttttcatttgataaaaaaatgaaaaactatgtcgattctatcaatggtatatatttccgttattgtgatgatatgttattcattgtacctagttcagaacgagatgtggttgaaaaatatgcaatcgaggaaattaaatctcttaaggttacaataaacaataaaaagacagaaatacgtgattttagatatcaaaatggaaaactatgttcatttgactcaggaaaggctaaacctcttcagtatttaggttttttgtttgatggtaacgccgtttacttaaggtctgctgctctggctagatattcagagaaaatgaaaggcggtgtgaagttagctaaaaatacaatgaatagaaagaataaaataagaataaaaaatggtgagacagaacaaactatactatataaacgcaaactacatcggctctattcatatagaggaaaacgtaattttttgtcgtatggctatagagcagcaaaaattatgaattcaaagagtataaaaaaacaacttaaaccactatggatacgacttatggatgagattaataaataa

SEQ ID NO: 289640 - DNA, 417 bp, Morganella morganii
atgtcaaataaaaacagtaaaatagataaaatagtagcattttgcttaatgaaaggcgttcagccttgtgagttgattactgctatctttgaaaaagaatatactcacatcgaaacaattaaaaataaaaatgacgtatatctaattatctcttataacgaattagttgataatgacatttataatatcaagatgagatatacctacgatttagatagtcgactacaacgaatagagcaaaaaacaaacaagtcaggatataaaattcagtgggatagaattgataaattaaaagaaataatatgcactacacttggatataaaatcactgacaacgaaattaataatttattaattaaacttttgccagaaagtaaatataattccattaagttaattatgaaattagttgcttaa

SEQ ID NO: 289641 - DNA, 255 bp, Morganella morganii
atgtcacgaccatcaattaaaagcgctattatatttaaggctgagttaccctcagccgaggcattaagtaagcacttatcagaatgtttatttactgatattttggaatctcactatttcagttgtgggtttattccaaatatagtaacaaatgaagttgttaccccgattgaaggtggttttttattgtcatatcgcattgatgaaaaaatactgccaaaatctgttattgcgcgagaattgcacgaccgataa

SEQ ID NO: 289642 - DNA, 582 bp, Morganella morganii
atgcaaaaagatgatctattagctcatattgcttctgctggatataatgttgggtttggtgcgaagaaaaattttgctacatttgatatcgtcagcaaaattccaggctggattggcatcatatcacttgcagtctctattttaggtctttatatggacgaaatgagttctaagcatattgcggccatttttatcattttaagtattggtagcttatacatcaatttctatgatggtgataaaagtaaatatgaagaagcgggtaagaagcaaactgcaatcttcagaaagattgaaagattgtattacaatgcaaaatcagaaaataaaccagattccgttaaatatattgaacaacttaacattttgatgcagaattttgatgaaaccacaatcactaaacaaatttgtgggagcaattggtatgctcattataaattttttagtgaaatggaaaaaaggtggattgaggatcagttgtcattgactttttggaaggataaattgcctaacacattgaaattgtttgtttttgttttattttgtgttgctttatttttgatgatttataaatatatttaa

SEQ ID NO: 289643 - DNA, 666 bp, Morganella morganii
atgagtcagggtggtaacacgagtttgtctgcaaaaatagcttcgctatcaacactgcaaacaattataacccgaatggggacagtctctataagtataaaaacaatattcatcaccgtgtttggtttttttatttctggatattggttagatggtaattttcctttatggcaaaagttcgttccgttttttttcgtaacgtttttttttgctctattagactcatattatctttctgtagagaaaaaatatagacacatctacgaagctttgagtgatgaagatattgataaaaatgtgaatttttttaactggaagccatattttagaaaattcgacctcgaggccttaaagtctgtaagtatatggggcttctatattattgtgtatgtaatttatgtattggttgtgtctgttgtttatgatgtaaaaactaatctgcaaagtgaatcgaaaaatacaacatacaattctaaattatttgttctgttagaatcacaagagaaaatgcagaaggaaatactaaattatttaggtgagagatcatcttcatgcgacactcagtatagaatagagaacaatatcacaattgataatgaacgttatcagtcctctaacccttccaagaaaataactacaaagcctattgtgaaaacatgtaattaa

SEQ ID NO: 289644 - DNA, 429 bp, Morganella morganii
atggacgaaatgagttctaagcatatagcggccatttttatcattttaagtattggtagcttatacatcaatttctatgatggtgataaaagtaaatatgaagaagcgggtaagaagcaaactacaatcttcagaaagattgaaagattgtattacgatgcaaaatcagaaaatgaaccagattctgttaaatatattgaacaacttgacaatctgatgcacgattttgatgaaaccactatcactaaacaaatttgtgggagcaattggtatgctcattataaattttttagtgaaatggaaaaaaggtggattgaagatcagttgtcattgaccttctggaaggataaattccctaacacattgaaattatttgcttttgttgttttctgtattgctgtgtttttgatgacttatagatatatttaa

SEQ ID NO: 289645 - DNA, 2835 bp, Morganella morganii
atggagccggtgtttgaaaatgagctggtttaccggttcggctttaatcagctggaaatgacggcaatcggctgtacacgccagtcagaggccaaccgtaaaggccgctggggcatactcaccaataacaaagaccgggtggtgacattcaaggtgggtctggatggcaatattccgcagctgggctacatcattgcggtggcggatgaaaacctgtccgggaaagtcaccggcggccgcgtcagtgcggtgaatggccgaagtattacactcgaccgtaaaccggatgccgcggcgggtgaccggctgatgctgaacctgccgtccggtaaatcacaggcccgcaccattcagatggtcacggataatgtgatcaccgttaccacggaatacagcgaaacgccggagccggaatgtgtctgggtaacggaatcagacgagctgtacgcccagcagtaccgggtggtgagcgtgactgagaatgatgacggtacgttcacgatatcggcggccatgcatgatccggacaaatacgaccggatagacaccggcgcggtactcgatgaacggccagtcagtgttattccgccgagcaaccagttcccgccgaaagatatcactgtcagctcttattctgtcgtgaaccaggggatcagcattgaaaccatgcaggtaacctggtcaccggcagagaacgcgattgcttatgaggcgcagtggcggcgtgatgacggcaactggatcaatgtgccgcgcaatgccaccacctcgtttgacgtgccaggggtctattcaggccgctatctggtgcgggtcagggcaatcaacgcagcggaaatctccagcggctgggggtattcagaggaaacccggctgaccggcaaggtgggtgatccgccgatgccgctgaacttccgggcgtccacactggtattcgggatcaaactgaactgggagttcgggaaattcacggaagatacactgaaaactgaaattcagtacagcaaaaccaacgatggtcagaatctgttgctgctggctgatgtgccgtacccgtcccgctctcacgaactggccggtctggccgccggtaccgcgttttatttccgcgcccggctggtggacaaaagtggtaattattcagcatggaccgattatgtcagggggatctctgaatttgatgcaggagaaatactggctgatttgtcagggaagataggccatgaccaattagcacagaacctgctgaccgaaatcaacagtaaagcggacagcagtgtggtcagtgctctggacgagcgtatgtcggatattggcggggaggggactgaggcaacttctcaggtacaggcgttgtccggtaaactggacaaagtaaaggctgatttaacagagtcagttgttgttgatctggatctgtcagcattaagtgaaaatacttattacccggttattcttcctctgacgacctcccgccgctattacttcagggtatttcgtacactggggcaatacggagataacaaacccggttatgcaactcacggctccgggggctttgccatgattgttgagtggcaggtgagcggttcaggatgggggactcagtctgaaaaccgtattattgataatgttgactggcgatggacaaatcagtctcctgtcatgggccctgcgcagttgactcacagctcggtggaatatgtgtatttacgcggaggcgcaaaatatcagctgaccaggcataaaagtgtcagtcaccggattgtcactgatacttacacaggtaacgggcaatctgttacaccaaaaggttttgtcgccggtgaaataccggtgtccggtgaacagcggtttaatgccacagcaaatgcggtgaaccggcttgaaacgagtgtgacagaggtttcaggaagggtcacatcaacggctcagcaggtgacacgtctggaaagtcaggtcggggcggattcggcaaaaattgaacaaacctcaaaggttcttactgacttaaacggcaggatttctgcatcgtggacaatgaaagtccaactggacagcaaagggaataaggtcattacaggtatcggactggggtttaatgctcagggaaacagtcagtttcttgttaatgctcaaaattttgcagtgatatcgtcactgaacgggaaagtagtaaccccttttgttattcagaacggccaggcattttttaacgatgcgctaatcagccaggcaacaattgataagttactggtcggtaaccacatcagatcagtgaattatgaaacaggccggaacgggtattttctgaatgcgcagaccggaaatgcagaatttaacaatggagtgttcagagggaccctggacggtgtggacggtcgttttacggggacggtatatgcggagagactggtcggggatgttgcggttgccgcttcgtacccgcaggcatccgcacaaaatacacatggtggcgggggaggctggactacggcaacgtctgtaattacttacgcagggggaatgctttatgatatgacgttagtacttccttcgataactgccattattgaagataattccggcagcaatccgcgtccggtatcgggagaactgcggtttagtatacgtgtggatggagttggtcagcaggcaacttctcagtggtcaggacagagtgttatgggatcagctcatgcggttattcctcgtggacgaaagaatgtgaaaatagaaattgaagtgggagtcaggcataaaggcagggcacatgtggttctgagggaaggggttgtgatggccttcaaacgcagttccgcatcattcagatag

SEQ ID NO: 289646 - DNA, 441 bp, Morganella morganii
gtgctgaatgatgatgtgcgggcgctgttcaatcatgaccgcaattatatcctcggccggtctgcttccggaacgttatcgctgagtatcagcgaacagggactggcctacgatattacggtgccggatacacaaactatccgggaccttgtggttgctccgatgttacgcggggatgtcagtcagagttcgttcgcgttcagcgtggcggtgaacggcgatgactggtatcaggatgatgacggcatggttgtccgtgaaattcaccggatctcccgtctctatgatgtcagtccggtgacttatccggcctatctggccgcaaattcaaccgtgcggtcaatggaggcgtggaaagaagcacgcgacagcggcggtatagccaaagctgtcaatgaaaaactggcgcgtgagcgtcttctcactttaatgaatgtataa

SEQ ID NO: 289647 - DNA, 792 bp, Morganella morganii
atgcgccgcctggcgaaaaaggcaaaagagcagattgcggcccggcctaatttcctgaccaagcacctcaatatgtgggtgaatgccgaatctgcctggatggataccggtaagtgggacagctgccctgaaaatgcgccggatgatgagctgaaaaattacccggtctgggttggtgtggatctgtcaaacaaaatcgatgtgaccgcagccgttaaagtgtatgaggatccgcgcggacaactgcatatgaagtgcaaattctggctgccggaggacagagtagtgactgcaccgaagcatatcgctgacctgtaccggaaatggggagctgccggttatcttgaactgacggacggtgaggttgtcgatcacgacatcatcaaagccgacattctggcatggtgcgaaggtgaggatttacgtgaactcggttttgacccgtggagtgccgttcagttctcccgccgcctggcggaagaaggtattccgctggtggaggtggcgcagacggtgaaaaacctgtctgaatcgatgaaaaccgttcaggccgatgtatattccggcaaatttcaccatgaccacaacccggtaatgtcctggatgatgtctaacgtgacggtaaaaccggacagaaatgacaacattttcccgaacaaatcgacaccggaaaacaaaattgacgggccgtttgccctgtttactgccaaatcacgccagatggtgaatggtggggacagcagtgacttcctttcctctctggatcctgacgaagaaattctattcctatga

SEQ ID NO: 289648 - DNA, 438 bp, Morganella morganii
atgtcaaaaaaaatccagaaaatcattaaaggcatcaggctgatattcatagaatatccaatctaccttttcagttttattacacctagaaataaaaaaaaatgggtgtttggtagttatggtttatttaatgacaatcctagatatctattcgaatattgtattaaaaaccatagccataattgtacttttatatggttagcaaaaaataaggatgagttttttttagttaaatctaaaggctataatgttgaatataaaaatagtattattggactatatcaccaatttactgcaaaagtatttattttctgttcttatgtaactgagattaatttcactacttgtggccgagcatatttagttaatttatggcatggaataccattaaaaaaaatagaatttgatataaccacagagccgttagtgctggattaa

SEQ ID NO: 289649 - DNA, 705 bp, Morganella morganii
atgatgcgtaaaaacattcaggcagctatttttgcacacgcagagcgtgaatatccccgcgagtgctgcggagtaatagctcaaaaatcccgggtggtgaaatactttccctgccgcaatgttgcgaccacgcaggaagagcacttcgtattatcaccggaggattacgccgctgctgaggattggggtacggtgaccggtattgtgcacagtcacccggatgccaccactcagccgtcagaactggataaagcacagtgcgatgcccttggcgtgccgtggtacatcgtcagctggccggagggggatctgcggactgttcagccgcgcggtgaattaccattactcggtcggccgtttgtgctcgggtttaccgactgctgggggctggtcatgagctggttccggcaggaacgcggcattgaactgccggattaccgggtggattatccctggtgggagcagggcgaaaaccggtacacagataactggcaggaggcgggatttattcaggttgacgacccgcaacccggtgatgtgatagtgatgcaggtgcaggcaccggttgccaatcatgccggtattttattgcctgacaacatgcttctgcatcacttatacggtcacctgagccagcggataccatatggcggttactggcgtgaccgtacagtgatggtactgcgtcatgagcaactgatatga

SEQ ID NO: 289650 - DNA, 297 bp, Morganella morganii
atgtcaaagttaaaaccgttatcagaacggagtttaaagacagtgagtgcgctgttactcctgtttcccctggcattgttgggaagttgcagcaatacgaaagagacattcgtgcccgcgccggtggtgacgatcccgccacaactgacggctgattgtccgctgccggttattccggatgaactgacatacggcggcgcaatcctgttgttggccgatgcaatgaagtcgatagcgggctgtaatcacgataagcgggcaatacgggagattgaagcggagaggataaaaaaatag

SEQ ID NO: 289651 - DNA, 297 bp, Morganella morganii
atgtcaaagttaaaaccgttatcagaacggagtttaaagacagtgagtgcgctgttactcctgtttcccctggcattgttgggaagttgcagcaatacgaaagagacattcgtgcccgcgccggtggtgccgatcccgccacaactgacggctgattgtccgctgccggttattccggatgaactgacatacggcggcgcaatcctgttgttggccgatgcaatgaagtcgatagcgggctgtaatcacgataagcgggcaatacgggagattgaagcggagaggataaaaaaatag

SEQ ID NO: 289652 - DNA, 543 bp, Morganella morganii
atggatgatgatgtgactatactggaaaactcattagaaaatttattagctaatatagagcgatatcctgatattgatatgtttgtcttgaaccatacatcaaatccagaaataaaaaatgacaatattaaatataaaaatgattttttattaaataaactatcctctatgtctgtcagctctatcgatattctcttaaagagaaccactattggagatattaaatttaatgaaagttttggattaggctccagttatccatctggtgaagaatatattttctgcaacgaatacttgaattcaaagaaaaaaatattacgtttgaaaaattattattcctatcaccctgatatttcatcaggtagtgatttttattcatctcccagaaagattgaaacaaaattaagaatgtttattttgtgttttggaaaatgcataggatacatgctatttatagcctttattataaaaaaaaccaatattataactaagaataaatcttggaagcatgttcttcattgtctaaaccagatgaaaaaataa

SEQ ID NO: 289653 - DNA, 282 bp, Morganella morganii
atgacgaatacaaaaaacagcgtgaacaccaacataggtcgtaaaattaaagatgcgcgaatatctgccggaatgtccgggaatgaccttgccataaagattggtgtctcacagcaacaggtatcgcgctatgaatccggacaaacgccaatgaccataaacacggttataatgattgctcatgtgcttaatgtctctgtaaatgaattactgagtgattacctttcctcagagtacagtgacatcatgcttttaatgagcaatcgtaatacagaaaaatag

SEQ ID NO: 289654 - DNA, 1230 bp, Morganella morganii
gtggcagcctaccggaatcaggaaaagctgagtaaggaactgaaagcgggtaaaagcgcccagagtgctttcaataaagagcagaaagaagcggaacgtcaggcggagcagtatgcccgtaaaatggcggatctgagtgtggccacggaggttcagaaagtcagggccacgcagggagagaaggccgcagagctgtatgcggctgcgcatgaggccggtaccaaatggacggatgagcagcgaaaagcgatccgcgcatcctctgttgccctggcggagtggacacaaaaggccgatgaggcggtcagaaagcagcgtgaaatggatgatgcgctgaaagcgatgcgtgacggtgcccggaaattcagtgacgaagcggagcaaattgataaaacccggggaatgggcagaaaccggcgcagtctttacgatgagcgtcagcagattgatcgtgtttatgccaaatcggatcagggaaaaagtgcgaccgaagcttataacagggagattgacgcgctcaacctgaaatatcagaaaataaaggaggttcagtctgactggaccagcggggtgacccgggggatggaagactgggttgctgaggccggagattatgcggagcaaaccgcatcagcagtgcagagcgccatgggcggtatggtgaataacatcactgacatgctgaacggaaataaagccagctggcgcgactggtcaacagatgtccttaaatccatccagaaaatactggtcaacgctgccatcgtgaacagcctgaaatccatgtcagatgccggtggctggattggtgctgtcggtaacttcctgggaggagccgcggcaaatgccaaaggcggtgtatatgattctccgggattgagtgcgtacagcaatcagatagtcagcaccccgacttattttgcttttgccaaaggtgccgggctgatgggggaggccggaccggaagcgattatgccgttaacacgggcggcggatggctctctgggtgtccgggcgctcggcggaaatcagaacagcggttcagcggcaccacaggtgtttattaccattgacagtaacggcagcagccagacgcagtcgtcagctggttatgaacagtttggccgggagattgggcagtatgtagaccagcgttaccgggcgctgattaatacagatctgcggcccggtggtgccatctggtcggttgcgaaagggatccgtcaatga

SEQ ID NO: 289655 - DNA, 1362 bp, Morganella morganii
atgcaaacatcagagatgtttcaaagttttttgaacaatttgaagattccagaagaacgtatgcgggcaattgcgacgcattataaaaatgccacaagaagacttaacatcgagtttcgaggggctgcaaatggattcaacaatcgactgaaagtcggttcagcaggccgtcgaaccgctgttagcaaaacatcagacttggatatgctgtatattatgccggcgagattatgggaagattaccaatccggaattaatccacagcgacgtttgcttcgcgatgtaaaagaagcattaaagctgtcctttgcccagcaagaggttaaggttgatagattagtcgtgcagatcgtttttgaatcttttcatatagaggtgcagccagtctttgagacagatgaaggccattttaaatatcctgatactaaagctaataatggtaatggagggtggcgattaactaaaccacgaatggaaattaccgaaatgaggaatttccgtaacaataaaagtcgtaatcttcataatctttgccgcatgttgcgagcttggaaaaacagaaacaccgttgacatggggggacttcttattgacacattagcttggagatttctaaaacaaacagatgattatgatgataccggaatggttagttatgggcttatgtgtcgagacttctttgattttttgcatcaagaggatgcacatgaacattatgcagcgataggaagtgggcagagagttaaggtctataagaattttcagcggcaagcaaaacgagcctttaaattatgtacacaagcgattgaggcttatgagaatggcttgacaaagaaatgccataaacactggcgagaagttttcgggctaactttccctaaggcaactgtggaaatacaagaatctctggggctggaatcggctaaattcatcaatgaatccgatacaacagagacatggcgcgatacagaagagtttacagatgaaaagtttgatgatgttgatataagataccctctcgaagttaaatgcattgtcaaagaaaacggatatagggatcgttcgattagggcttacttgtcggatatagctcgttcttggttaccaccgaataaaactttatcattttcgattaatcaggcaagtttagatctcattccagaaccttatgatatttactggaaagtcttgaatagaggtagagaagctgaacagcttgatgaaattcgaggccaaataattttaggtgaagtaaatcatacggaacatacaaaatttagaggggctcataaggtttggtgttacatagttaagaataatatagttgttgcccaaaatgttattgacataccaatcgagtaa

SEQ ID NO: 289656 - DNA, 249 bp, Morganella morganii
atgaacatgcgctcagaaagcaaagagatttacggcgtgagtgtgttcccggtgctggccgtcctgcatcaaatccgccggtggtgggtactgcgtgacctgaaagaccactggaacagccgccataaggtaatccgcatttgccacagtcgtggctgggatgacctcattcggttccaaaatatcgagcggcagtatttcatgacccgcgccacagctaaacgctaccagagtgagggggttatctga

SEQ ID NO: 289657 - DNA, 1251 bp, Morganella morganii
atgaaatccttacataaaaatttattatccctcacatcccttcaagctataaattatttatccccatttattgttcttccatatctgagccataccctgtcgatgtctcattttggtttaataatgtatattctatctatcatatccattgccgctattattactgattttggctttcaaatatattctacaaattggatagcaaaaaataaaaataataaatccgaagtagcgaaacatattggaagtgttttattacttaagaccataatatcactcatggtaatatgtattataaatatttttatatttaatgtctcaatgtttaataacacacccattatagaaatatcaatacttttatctctaatcgtatttttacaaatttatcaatcaccttggttttttcaaggtattgaagaaatgttcaatataactatatgtgtttcaatttcaaaaataacatatcttggacttattattatactggtaaactcaactaatagtatagtcaatgttttgatttcactgctaattagtacaaccttagcatcggcagttagtatctatttaatatacaaatcaaattatgaaataaaagtgccatcagtcaacattctgtgtgatacatttaagaaaagtattccattttttatatcaaaagcttttgttatgatatatacaactgccaatacatttgtagtaggttctttctctggtacaaatcaaactgctttatatagtagctcagaaaaattgtatcaagccagccaaggcgttacatcgcctcttagccaggttttatttccatatttgtctagaacgaaagatatatctatttttatcaaatatactttattattatcaatccctgtagttatagcttgtttatttagctatatttactctatagaaattattacaactatatttggtgatgactatagtaaggcatcagacacacttaagatttttttattatgtactatcattagttattttggtgtaaactttggttatccagcattctcaatcattgatgatctaaaatatccaaatatctctgttattattggaggtataatccaattacttcaagttattgttttagtttactttaatatggtaagtggagaaaatatagcattaactatattaataactgagtcatttgttgtgacttttagattattcttttttattaaactttatagaaaaaaaaatgtcaaaaaaaatccagaaaatcattaa

SEQ ID NO: 289658 - DNA, 261 bp, Morganella morganii
atgactgaacaggaagctgaactgaatgctatccgggaaatcaccggatttttgctgatagatgataaaaaacggtacttaacacgtctcgggttggtgatgacgttcttctttaaaaatggttataccccggagaaaaaaaacgccattctgcgctgctactgccggtttcgtgagctgtatgcaggaaaatataaggaatggataacttatgacgaattggagaaagatgattcggaatggcggttttctctgggttaa

SEQ ID NO: 289659 - DNA, 273 bp, Morganella morganii
atggtatcattttcaaacatggatggtgctcactgcgattccgtagtagatcactataccttgccatcaaatagtattcagatggatgtaaaagttcctgttcaaccatcaaattttgaccctttgcagaagggggccttaatgggggcctcaacgtttatggaacaagataaaaaccattctaatcaatgcaattacaaaacaaaatccattccgagtccgggcaccactaattcagaacccgcttgtcagttaaacatgatgttaatctga

SEQ ID NO: 289660 - DNA, 603 bp, Morganella morganii
atgaaagccattactcgcaatatcgatcgtggtatatggcgggatctgatgcaacgctcgggaatgctggcgctcatggacgcacaggtccgcgacgagtggtacaacagcctggagaaagacgatattccggctatcagtgaagagaatattctcaacacattcgaacaactgcatctgaataaaggtgaggtgtttgaacgaggtgtgattaacgtgtttaaaggtctgagctggaattttaagacaaacagcccctgtaggtttggcgggaaaatcatcgtgacggggcttgtcaaatatgaccggtggggatttggtctgaactggggctggcagcgtgaccggttaacggaccttgagcgcatgctgatgctgctggatgggaaggccatccccgacaatcgcgccgacgtcacgcgccggttaagcgaccatatccatgagaacaggcatagcacccgttatgaggatgagatgtctgtgattaagtattttcagaagggaactgtccatatcacgttcaggcgatcggagctggtcgataagctgaacgacattatcgcgaaacactatccaggggcgttgcccactaaacagtaa

SEQ ID NO: 289661 - DNA, 189 bp, Morganella morganii; identical to SEQ ID NO: 151161

SEQ ID NO: 289662 - DNA, 204 bp, Morganella morganii; identical to SEQ ID NO: 151162

SEQ ID NO: 289663 - DNA, 492 bp, Morganella morganii; identical to SEQ ID NO: 151163

SEQ ID NO: 289664 - DNA, 378 bp, Morganella morganii; identical to SEQ ID NO: 151164

SEQ ID NO: 289665 - DNA, 360 bp, Morganella morganii; identical to SEQ ID NO: 151165

SEQ ID NO: 289666 - DNA, 483 bp, Morganella morganii; identical to SEQ ID NO: 151166

SEQ ID NO: 289667 - DNA, 219 bp, Morganella morganii; identical to SEQ ID NO: 151167

SEQ ID NO: 289668 - DNA, 474 bp, Morganella morganii
atgaccgacattattaaccttcacgatacccttccgttaccgccacaacctgccggttctgcgccagcgctgactgccaccctcgtacaggacgagcagcgcatcggcttttggccgcagtacttcggcagcataccgcagtggataatccttgagccgacggtcttcgcgtggatggaccgtttctgcgccgactacaacggcggtatctggaatttttatacgctcagcaacggtggtgcgtttatggccccggaagcggagaacaatgaaccgtggtcgctgttcaacactatgaacggcaacggcggtgaactcagtgccgacgctgcggggattgccgtctgtctgatgacttacagccaccatgccatgcgcaccgaatgcgatgccatgacggagcactactaccgcctgcgggattacgcgctcagtcacccggaatgcagcgccatcatgcacatcatcgactga

SEQ ID NO: 289669 - DNA, 255 bp, Morganella morganii
atgcagcacattcctgcaaatacccgtctgacggctgtctggcccgtttccctgcaaaaccagtccggctgccgttccatctccgacgatgacctctgcgcctggtgcagacatctttgctaccgtcccggcgagctcagcctgtgccgactgtctgtgtctgacagcatctggccctcacggtgcgatgaagatggctatgcgcagtcctgcccgtcactcctgctgaaccagcatccccaacccgataaataa

SEQ ID NO: 289670 - DNA, 819 bp, Morganella morganii
atgagactagccagccgctttggacggacaaaccagatccgtcgcgatcgtccgttaacccgcgaagaactgatgcaggtcgttcccagcgtattcagtgcagatcgccacggttccaggagcgaaaaatacgcttacatacccaccattactctgctcgaaaatcttcaacgcgaaggctttgaacccttcttcgcctgccagtcacgcgtacgcgaccctgaccgccgggagcacaccaaacatctgctgcgcctgcgtcgtaccggtcagataaccggccagcaggttcccgaaatcattttgcttaactcgcacgatggtagcagctcataccagatgctgccggggctgttcagagccatctgcaccaacgggctcgtctgcggacagtcgttcggtgaaattcgtgtaccgcatcgtggcgatgtggccgggaaagtgattgagggggcttatgaagtgctcggtgtctttgatcgggtggaagaaaagcgcgaggccatgcagtcacttcgactaccagcacccgcgcaacatgccctggcgaacgccgcactgacataccgctttggtgaagaatatcagccggtgaccgcagcgcagatactgacaccgcgacggtatgaggaccatcaggacgacctgtggaccgtttataaccgcattcaggaatcgttgctgaaaggcgggctgagcggacgcaccgcgcagggtaaacgtacccacactcgtgcggttaacggtatcgacggggatatcaaactcaaccgcgcgctctgggtgatggccgaagaactgcagcaggcactgagctga

SEQ ID NO: 289671 - DNA, 234 bp, Morganella morganii; identical to SEQ ID NO: 151171

SEQ ID NO: 289672 - DNA, 222 bp, Morganella morganii
atgacattcctgaaaatcgtgctcaacaccctgcgtcaggtgctgacgtggtgcgccagcagccgggcgcagcagtttgtggaagaccacttccgcgaagaaggctatgacgaagacagtatttacatcgccagacaggcggcaaccctgctcgcaggtgccttaatcacagcgctcatggaacagatactgcagcttattgccacacacttaacccactga

SEQ ID NO: 289673 - DNA, 513 bp, Morganella morganii
atgaccgacatttcgacactcagccagcgactgacgacgccaaccctgcattttgttctactcaccgtcgccacctgcggcatctggccgttactgtggctgtaccgaaaacagcagattatcagcgacaccaccggatatccggtttgcggcaatctgtttatcatctggctcgccgtctgttttgggctcggacgacagttcggcgtgatggcctcaccggacctggcgggctacgacacgggcagcgatacactgttggccttaagcggcattctgtcgctcacctgcggcgtgatgtacatcgtctgggcctttaaggccagagcagcactgcgacactatgcgctgaacaccttccggtttgacctgaagatgaatgcgttttataccgtggtgctcaacgtcttctacattacatactgcatcaacgatatgccgcaggcactggcgaagcaccgcattattcatggtcaggcccctgtgccgccggagtctccgtcaccgcagtaa

SEQ ID NO: 289674 - DNA, 471 bp, Morganella morganii; identical to SEQ ID NO: 185025

SEQ ID NO: 289675 - DNA, 312 bp, Morganella morganii; identical to SEQ ID NO: 185026

SEQ ID NO: 289676 - DNA, 267 bp, Morganella morganii
gtgaaacctgtcgcaggccctctgctgctcttcaccctgatgttgtctgccgtaaccctgagcggctgtggcgacaaaaatgaacgcgagtttatccggggatgcaaatcaggcggcggtactaccgccgtctgcggatgtatccgggatgacctcaaaacgaaatatacgcacggggagctggagaaaatgaaccagcaatacggttatgtccccccgcgcttcatggacaacatgctgagcgctgctcagcagtgcagaaaataa

SEQ ID NO: 289677 - DNA, 729 bp, Morganella morganii; identical to SEQ ID NO: 185028

SEQ ID NO: 289678 - DNA, 297 bp, Morganella morganii; identical to SEQ ID NO: 243154

SEQ ID NO: 289679 - DNA, 969 bp, Morganella morganii
atggttgtacattacgacaatggcagacaacatcttataaaaacccgtgacctgagagtctgtgctttttatgccgggtggctgggtattaataaaataattaacacccgtgacattcctcaccaggatgcagaaagttgtcgacaggcactcaacaaactgattaatcagttcataccgaatgcagaacagcgggcaagacttttttctgatatggaaacagcccgtgatgaaaacatccttccgctggaaagttttgactggctagaacaggatgaacgggcaacattctggttatgggcgtatatttgcaaggccggagactacgaacttggtattgacaaaccagcaaatgcagagttcggaaagaactggtatcagcgaatgaatctgagtgtatctccgacaagccaccaggaaagaattaatattatcatctcttttttcgacaacattattattccgaccccaccggtaaatcatctcaagcgccaggtcatggacaggctgaaagaccagtggaaaaatatttacagcaaaccagctccgctgaaatggttacctaatgaagaagacgcggtactgtgggcatggaacagcctcaaatcgcttcaggaagaaagaaatgcgcccactatcgggctctcattaaatatttcaacgccaggaatgagtacctggtttacccccctgagtcattctgaacgcaatttagccctgcgcacggcgatcgacttatgggacgatgcaccggatacaaagcgtttattccttctgaacctgaataaagcctggaaccagcaaaaattacgtcagtcccgtaccgataaaaaagcactcaatacgtacctgaagaacgaaacaaaaactcgactggactttatggcagaacgtagcggagttcgcatcagtgatatgctggaaatgctgattaatgaccattaccgaaaaacctgtggtggtgagtga

SEQ ID NO: 289680 - DNA, 570 bp, Morganella morganii; identical to SEQ ID NO: 185031

SEQ ID NO: 289681 - DNA, 240 bp, Morganella morganii; identical to SEQ ID NO: 128897

SEQ ID NO: 289682 - DNA, 420 bp, Morganella morganii; identical to SEQ ID NO: 128896

SEQ ID NO: 289683 - DNA, 417 bp, Morganella morganii; identical to SEQ ID NO: 128895

SEQ ID NO: 289684 - DNA, 567 bp, Morganella morganii; identical to SEQ ID NO: 128894

SEQ ID NO: 289685 - DNA, 606 bp, Morganella morganii; identical to SEQ ID NO: 128893

SEQ ID NO: 289686 - DNA, 177 bp, Morganella morganii; identical to SEQ ID NO: 128855

SEQ ID NO: 289687 - DNA, 453 bp, Morganella morganii; identical to SEQ ID NO: 185038

SEQ ID NO: 289688 - DNA, 1215 bp, Morganella morganii; identical to SEQ ID NO: 185041

SEQ ID NO: 289689 - DNA, 3174 bp, Morganella morganii
atgaaattcccacacttcttcatccagcggcctattttcgcgattgtgttatcggtgtttatgctgatagctggcgctctggctttctttcagcttccgctgagtgaatacccatcggtaacaccgcctaccgtgcaggtttcggcaagctaccctggtgctaaccctaaggtgattgctgacaccgttgctgctccactggaacaggcaatcaacggggtggaaggcatgttgtacatgagttcccagatgtctgccgacggtcgaatggtcttgacgatttcattccggcagggaaccgaccccgatattgcgcagattcaggtgcagaaccgggtttctcgggccttgccgcgcttgccgactgaggtgcagcagatcggtgtcgtgacggagaaaacgtcaccggatatcctcatggttgtgcatatatttgcacagggcgatcgctacgatccgctttatgtttccaactatgccatgttgaacgtgcgtgatgagctatcacgcttgccaggtattgccagcgtcacgcttgggggcgagggtgaatacgcgatgcgcgtctggctggatccgaccaaagtcgcttcccgcggtttgacggccagtgatgtgaccgcagcaattcgtgagcagaatgtccaggtcgcggccggttctgtcggtcaacagccgaacagctcctctgccttcgaagtcagtatcaatgcccaggggcgtctgaccaccgttgagcagtttggcgatatcgtgatcaaagctggcgctgacgggcaggttacccgcctgcgcgatgttgcgcgtctggaattgggatcggacaactattccctgcgcagcctgctggacgataaaaatgccgtgggtatgcacatcgttatgacgccaggcgccaatgcgctggacgtctctgcctcggttcgggcgacgatggcgaggctgcaggccaacttcccggaaggtatcgaataccgtatcgcttatgacccgacagtgtttgtcagcgcctcgttgaaatcagtggcaatgacgttgctggaggcgacggtgttggtggtactggtggtgatgctgttcctgcaaacctggcgggcttcgatcatccctctggtcgcggtacctatttcgttggtcggtactttcgccctcatgtatttgttcggcttttcgctcaacacgctgtcgttgtttggtctggtgttatcgataggtatcgttgtcgatgatgccattgtggtggttgaaaacgtcgaacggcatattgcacagggccgttctccgaaagaagcggcaagaagggccatggacgaggtgactggccctattttagccattacttccgttttggctgctgtgtttattccttctgcgttcctgtcaggattgcagggggagttctatcgccagttcgcgctgaccatcgccatttcgacgatcttgtctgcgatcaactcgttgacgttgtcgccggcgctggcatcggttctgcttagaccccatcaggatatggcgcaggccgacaggttgacgcgcatcatggatcgcgtattcggtggtttcttccgtcgctttaacgctttcttcgatagattgtcgaacaactacgttggcgcagtccgccgggccgtacgcggcagtatcatcgtgctggtgctgtatgccggtttcctgggcctgacactgttggggttccagcaggttcctaacggttttgtgcccgctcaggacaaatactatctggttgggattgctcaattgccttccggcgcctcgttggatcgcacggaagccgtagtgaaagagatgtcccgaattgcgctggcggaacctggagtggaaagcgtcgtggcgtttcctgggttgtcggtaaacggccctaacatgcctaactccgcattgatgtttaccatgctgaaacccttcagtgaacgtaaggatccttcgctgtctgccgaggctattgccggtagcctgatggggaaatttagccagatacctgacggttttgtcgggatcttcccgccaccaccggtaccggggctgggcagcatgggaggatttaaactccagatcgaagaccgggcagggcttggctttgaagagctgacccgtgttcaagggatggttatggcgaaggccatgcaggctcctgaactggcagggatgatggccagtttccagaccaacgcacctcagttgcaggttgatatcgaccgcgtcaaagccaagtctcagggcgtcgcactgaccgatatctttgatacgttgcaggtgaatctggggtcgctgtatgtaaatgactttaaccgcttcggtcgtacgtatcgggtgatcactcaggcggatgcgcaattccgtatgcagcctgaagatatcgggttgcttaaagtgcgtaatgccgcgggtgacatgatcccactgggaacgctggtgaacattacccgtacctctggaccagaccgtgttatgcgttacaacggttatccgtcggcggatattaccggtggcgcagcgcctggctactcctccggacaggcaacggcagctattgagaagatcgttagtgaaacgctgcctgagggaatgacatacgaatggaccgatctgacttaccaggagaagcagactggcaactcggcgctgtatatcttcccgttggcggtgttcctggcgttcctgatcctggccgcacaatacaacagctggtcgctgccgtttgcggtgctgttaattgccccaatggcattactttccgcgatcgccggggtttggctatcgaatggagataacaacatcttcacgcagattggttttgtggtgctggtgggactggcggcgaaaaacgcaatcctgatcgtcgagttcgctcgcgccagagagagtgaaggcgtcgatcctctggctgccgtgctggaggccgctcgcctgcgtctgcgcccgatactgatgacctcgttggcatttattgcgggggttgtgcctttggtgatcgcgagcggtgccggtgcggaaatgcgtcatgccatggggattgccgtgtttgccgggatgctgggggtgacgctgttcggactcttgttgacgccagtgttctatgtcgtggtccgtaagctggttattcgccgggaaatcaagcaggcacagcgggcaatcagtgattcacggccatga

SEQ ID NO: 289690 - DNA, 1470 bp, Morganella morganii
atgaaagcagagtatgaaatgaaccatcgtattaataaactctcggtgctggcgatggcgctggtattggccggttgtactatggcgccggactacgaacggccttctgcaccaacgagctcaagctatccttcgggagcggcttatgctcagggaacagtttcagcggctcagactgccgtggctgatatcggttggcgcgatttctatcgtgatccgttgttgcaacaattacttgaggtcgcgttggcaaacaaccgcgatctgcgcaagtcggtgctggatgttgaggccgcgcgggctcagtaccggatccgtcgtgccgatatgttgccaacactgaatgtggatgcgggcgctaccgtgcagcgtctgcccgcagatgtcagcccgagtggtacaacgcagataacgcggagttatgaggttaatggtgcggtgtcagcctgggagctggatttgtggggacgggttcgtagcctcagcgatcgggcgctggcaacgtacctggcgttggatgaaacacggattgcggcaaggctgagcctgctcgctgaggtgacaaacgcttatctgacgttgcgtgcggatcaggagttgctgcaactggctcacgatacgctgagcacgcaaaagaggacttacgcattgacccaggcgctgtttgatgcgggtaatgcaacgcaaattgatttgcggcgcgcagagattgcgttgcgtactgcggaagtcagtcaggctgcttatacgagggtggcggcgcaggatcgcaatgcactggttttgcttttagggcagccattgacggccgaactctcggccagcctggataaggcgaataccttgcccgatgacatcatcccttccgcgttgccggcgggcttgccggcagaattgctggtgcgtcgtccggatgtccgtgcggcagagcagcaactgcgtgcggccaatgccaatatcggggccgctcgcgcggcatttttcccggcaatcagtttgacaggatcggctggtacggccagttcgagtctggacgggttgttcgagccggggtcagcggcctggagttttgttccgcaaatctcgttgcctattttccggggaggcgctctgcgcgccaatctggacctagcccaggtacaaaagcgcatcgaaattgcgaattacgagaaggcgattcaggttgccttccgcgaagtggctgatggcctggcgggcagacaaaccctggacgatcaattccgttcagaacaattgttggtgcaggccagccaggctaactatgaattggcctcacagcgcttccgggccggtattgacgataatctggcggagcttgacgcgcaacgagcgctgttcagtgcacagcaaactctggttcagacccgactggcgcgaatgagcaatttggtcaatttgtataaagcgctggggggcggatggacagaaagctctccggctaagccataa

SEQ ID NO: 289691 - DNA, 192 bp, Morganella morganii; identical to SEQ ID NO: 185044

SEQ ID NO: 289692 - DNA, 279 bp, Morganella morganii
atgtactattacactttcagtggagtggattataagcgcaggataatagcatatgaggacagcattaaaattcattacactcccaaatcctttatctatattctcgctagtataaaatcatgtatagcgaaagaaaaccctagcaccttaaataagaccgcaccgacagtcttttgcgccgaggttcttctcccccccataaacaatgaccacgaaaatatcaggaaaactacgacatcacatgtcagatgggccgaatcccagcttaaccagaattga

SEQ ID NO: 289693 - DNA, 783 bp, Morganella morganii
atggcaacgtattcgtctgtaacagggtgtacagtgatcctgctggcagcgacctgcgggtccgctattgccgacagcggcaatcaggatggagtgacggtggggataatgggagaaaacgccccccgctacagtggcgcggataagcagcactggacagtgatgccttccctgcaggtccgtaaaggcgcgtttttcttcgactcaacaaaaggtatcggttatgacctgcagacggataatggcctctattttgaaaatgcgttcggatacagttttggccgtgccgatcaaaattcatcgtggcgcgatggttctgacaaactgaaaggaatgggaaacatccgtggtgcactgaacacgcaggttgctgttggctggcaggtgaacagctggtttaccccggaaatccgtgcaactctgccgctgacggattcacagggggtacagtaccaggcctcgctgacgctcgtgccctggcagaacgacacagatacggttgccctgcagggcgcggcactttttggtgacgcccggtacattaacacctggtacggcgttaatgctgcccagagccgcacaaccggtttccgggaatacaaccgtagcgcaggattttatgctacgcagactaccctgagctggcagcatcagtttaatgaacactggggcaccctactgggcgcttcatatgcctggcttgcggataaaaccagtgacagtcctgttgtgtcagcgcgagacaatatcagcggttttgctggtatcaactggacattctga

SEQ ID NO: 289694 - DNA, 696 bp, Morganella morganii
atgaacacaaaacgtattctgattatcgaggacgaccgggatgcggcgaatgtgctcgaagcctatcttcgtcgtgaaaacttcggggtcatactggcccatgatggaaaagcaggacttgaagccgcccttacccagcatcctgcacttattctgcttgatatcatgctgccgggtatgaccggaacagaaatactcagccggctgcgccgcgaatccgatgttcccgtgataatggtcaccgcaatgggcgaggccccggaccgtatcggggccttacgcttcggtgcggatgattatgtcgtcaaaccttatcatccgggtgaggtcgtggcccgggtgcaggcggtgttacggcgtggggcggcagcgcatgctagcgctgaaaattatcgccgggtgggggccgttgaactcaaccgggacaccatgtcagtcgctgttattcacgatgaaaaccgggtgcaccttgagctgacccccaccgagttttcactgctggacatgatgatgacccgcccccggagcgtctgttcccgtcagacgctgcttgaacactgcctgccggaaagtgatgcgctggagagggtggttgatacacacatctataacctacgccgcaaactggaaaaagcgggggtcagcggtgtgctgaccagcgtgagagggatcggttaccggtatctgcagccatga

SEQ ID NO: 289695 - DNA, 1167 bp, Morganella morganii; identical to SEQ ID NO: 185049

SEQ ID NO: 289696 - DNA, 1116 bp, Morganella morganii
atgccatcatattcattcatccccctgatagcgtctttgcttttctggcgacggggctcagccctggttttcgccctcgccctgcaactgaccggctgtgataatgagccggtatcccgccatgtcccaccaagaccggtgatgaccacggaggtatctgccggcaatcatggtgggcagacgctgatgaccggtgaaatattgccccatgaagagacgattatcggcttccgtaccgatggccggatggtgaaacgactcacggatgtggggcagtcagtggttgccgggcaggtactggctgaactggatgataccgatttgtgtaatcagtaccgcagtgctcaggcggtagtacaggaagccggggcaagcgtcaggcttgctgagataaacctgcgacgcatgacgctgcttgccccgcagggtgcggttgcccgggttcagcttgacgaggcccgcacaaaccgcgacacggcaacagcaaaactgcagagcgctcaggccgacctgagcagtgcagcggaccgtctggggtatgcgcgactgctctcaccggttaccggggtggtcaccaccgtcagcgccggtccgggacaggtagtgaccaccggacaggaaatcctgcgggtggcgcagtcaggggcccgtgatgcggtcttcagcgtaccgggggctctggctgacaccctgaaacagcagcagacactcaccctgcgtatggcggataacccgtcggtgtcggtaaccggaacgctgcgtgacatcagcccgcaggccgacacacagacccggacctggcgggtacgctatgaccttgagaatgcacccgcggtaatggctatgggggcgacggtcaccgggtcattacccctgggcggcagtgaagtgtttcaggtaccggcatctgccctgacgaggaaagaacagaaaccggcagtgttcgtggtggacaccggcaaaaatcgcctgcgcctgacacccgttgacattgcggcctatatgaccgattcggtgctcatccgcaaagggctgacagccggtgaacaggtggtcactgccggggtcagtcagttacgtgacggggaaaacgtgctgacggagaaccaaaaatga

SEQ ID NO: 289697 - DNA, 3060 bp, Morganella morganii
atgaaaaatgttatgcacgcttccggcggttttaatctttctgcctgggcactggcccaccgacaactggtggcttttctgatgctgatggtcacggtgacaggcgtcatgagctttctgaatctgccgcgcagcgaagatccggcgtttaccattaagaccaccgtggtgtcggcacagtggccgggcgcaacggtaaaagataccgtcagtttcgtcaccgacacgctggagaagaagctccaggaaatcccacatctggattatatcgagagttacacgcgtccgggctcgtcggtgatttttgtgaacctgcgtgatgacacaccgccgtcagaggttgcgggtatctggtatagcgtgcggaaaaagatggacgacatccgggcatccctgccggacggcaccaccaccccggccgtggatgatgaattcgatgatacatacggcacaatttatggcttcacgtcggacggcttcactccccggcagttacgcgataccgtcgatgatatccggacatctctgctggctgttccgggaacagggaaagttacgctgctgggtgacagcgaacaacaggtggtgattgcttttgatccactgaaactgtcgggaatgggactcgatcttcagcaggtgacggcggctctgcaggcacagaatgccgtcacgcccgccggacgtatccggacatcacaggaaaatatgtcggtggaagtcagtggcgccttcacatccgtggacagcctgcggcaaattgtgctgcataccggaaaccgttttatccccctcaccgatttggccacggtcacactgcagcaggcagatccgccctcaccggagtttagggttaacggtaaaccagcactcgggctggcgatttcgatggctcgcggtggaaatattgttgattttggtcgggcgctgaacgcgacgatggacaggatccgcacgcatcttccttacgggatcagtgtggagaaggtggcagaccagtcggccgtagtcagtgacgcggtgggaggattcgtccaggtgctggttgaggccgttattattgtgctggccgtttcttttgtttcgctgggcagccgggcaggtctggtggtcgccgtggccattccgctggtgctggccatgacatttaccgggatggaactggccggaatagggctacagcgaatctccctcggtgccctgatcattgcactgggactgctggttgatgatgccatgatcaccgtagaagccatggtgtcgcggcttgaggctggcgatgccctgagtgtggccgccacgcaggtatttcgtaccaccgcgttcccgatgctgacggggacactggtgatgattgccggatttataccggtgggatttgcggcatcgagcgcaggagaatactgctactccctgtttgtggtggtactgacagcgctgctgagctcatggctggttgcggttcttttctcgccgcttaccggcgtctggttactgccggaacagcattcacatcagtcacataagcacagtttctttcaccgtcattatacccgcctgctcgaccgggtgatgcagcaccggcgcaagacactcggttgtgccctggcgatactgatattgtccgggggcggagccctgctgatgcagggtgagtttttcccagcgtccgatcgcccggagctgctggtgagcctgactctgccgcagaatgtcagccaggcacagacgcaccgcgacgtcctgaagtttgaagcgaagttgcgcgataatcctgatattgaccattactcaagctacatcggttccggcgctgtgcgtttttatctgccgatggatgttctgctgcagaaagagaacattgcccagctggtcgtagtggcgaaaaatgaagcggcgagaaaccggctgcagaaacagcttgagcagatcctgtcgaaagatttcagtacgctcacaacccgggtatccacactggagctgggccctccggtgggctggccggtcagataccgggtatccgggccggataatacccgtgtacgtgaactggccacgcaactggcagggatgattgcccgcaatcccgatacccggggtgtcaatctgacgtccggtgaaccggagcgggtcatccgtctgcgggtggatcagacgcaggcgcgtgccaccggcatgacgtctcagtcactggcaggaacgcttgccacgctgttttccggaaccaccgtgaccaccctgcgcgaccgtaaccgccagattgatgtggtgctgcggggaaatgaagcctcacgacaaaacccggcgttactgaatgctctgatgctgacatcatcgaccgggaataaagttcccctgggacaggtcgccacgccagaatggacgctggatgatccggttatctggcgtcggcagcggttgccgtttatcacggttcagtcggataccgcgcccggcgttcgtgcagagaccgtgtcatcggcactctctccggtggttgccggtttccgggagagtctcccgccgggttacagtgtggaggaaggtggagtggttgtggaatcggagaaaggaaacagctcagtgtatgcggtattgcctgtcacgctgatggtgatgctgttactgctgatgattcagttacaacgcttttcgtcgatgctgctggccctgctgatggcaccgtttggtttgcctgggatagttgtggctatgctgccttttggcataccgatggggtttgtggcgctgctggggatcattgcactggccgggatgatcatccgtaatgccgtcattcttattagcgaagtggatgtggggatgaaaaatggtttcactgcggatgaggcgatcaaagtcgccgcgctgcaccgttcacgccccatcatgctgaccgcttcggcggccattctcgggatgctgccgattgcccgggatgttttctgggaaccgatggcatttgccattattggtgggctgctttcagccacactggcaacgctgacactactgccggcagcaataagtctaatctttcactggaaaccgtatccctga

SEQ ID NO: 289698 - DNA, 261 bp, Morganella morganii; identical to SEQ ID NO: 185052

SEQ ID NO: 289699 - DNA, 375 bp, Morganella morganii; identical to SEQ ID NO: 243131

SEQ ID NO: 289700 - DNA, 483 bp, Morganella morganii; identical to SEQ ID NO: 185053

SEQ ID NO: 289701 - DNA, 1287 bp, Morganella morganii; identical to SEQ ID NO: 128872

SEQ ID NO: 289702 - DNA, 429 bp, Morganella morganii
atgcaaatttaccggcatgccttgttacttgtacagaatgaaaccgatggtctgctgttgcttgagcaggcagaacgtctggcaaaagagatgggcacccgtattactgtcgggcatctcagtgctgactatagggaactggattataccagtgactcattaaccaaagaccgtcagtcccgcgaagttattgatgcaaaggcaatgcttagccgtctggtggagtccagcagtattgatatcaacgtcaggtccatcgtcagcatccatcgtttccgggacgttgaggccgttgttcagcatgaagatatcgatctggtcatgctggggcatgaaaaccgcctgttcggggttttttcctccttttctttcgaattcatcaatcacctttctgttgatgttctgattaaacatattccagccccttaa

SEQ ID NO: 289703 - DNA, 963 bp, Morganella morganii; identical to SEQ ID NO: 128874

SEQ ID NO: 289704 - DNA, 213 bp, Morganella morganii
atgaaaaatatcaaactgcttgttgctgccagtatgctctccgtagtctcattctctggcttcgcccagtcagtcagtgttactgctgacacactcagcaacgcggaagcgaaaattgccgctatcgccaaggaatccggtgcttcgtcctaccgcatcaccagtgcagaccagaacaactttgcccgcatgactgcagtcctagataagtaa

SEQ ID NO: 289705 - DNA, 351 bp, Morganella morganii
atgttatggctactgattaagtacgcgatcaccgccggaatggttgtttttatctctgaagttgccaagcgtagtgatcggcttggtggtcttgtcgccgcgcttcccctggttactgtgcttgtgctcgtgtggatgaagctggaaggacagagtcagcaaaaaatagccaatcatgcgtggtatacattctggtatgtagtgccgacactacctatgtttttactattccctgttttctgtcagcgatttggcttttggatcacgctgggtagctgctgtgtcgtaaccgtccttattttctttttgtgggccagtgcgttacgccgttttggcataaatctgatgtga

SEQ ID NO: 289706 - DNA, 300 bp, Morganella morganii; identical to SEQ ID NO: 185057

SEQ ID NO: 289707 - DNA, 855 bp, Morganella morganii
atgaagtatgtttttatcgaaaaatatcaggctgagttcaccatcaaagccatgtgccgggtgctgcgcgtggcccgtagcggctggtatgcctggtgctcccggcgtcatcagataaacacgcggcagcagttccgtctggcctgtgatgccgcggttctcagagcattcactgatgcaaaacaacggtatggtgcgccacggcttgcggatgagctcccggcctacaacatcaaaacgatagctggcagcctgcgtcgccaggggcttcgggcaaaggcagcccgcaagttcagcccggtcagttatcgtgagcatggcttgcctgtgtctgagaacctgctgaagcaggacttttacgccagcggcccgaatcagaagtggtcgggagacatcacctacttacgcaccgatgaaggctggctgtatctggcagtggtgattgacctgtggtcgcgagctgtcatcggctggtcaatggcaccgcgaatgacggcacaactgacctgcgatgcgttgcagatggcgctgtggcggcgtaaacgcccgaaaaaagtcattgttcatactgaccgtggcagccagtactgttcagcggactatcaggcgttgctgaagcggcataatctgcgcgggagcatgagcgcgaaaggctgctgttacgacaatgcgtgtgtggaaagcttcttccactcgctgaaagtggaatgcatccacggtgaacgctttatcagccgggaaatgatgagaacaactgtatttaattatattgagtgcgattacaatcgctggcgtcgccacagtgcctgtggtgggctcagtcctgaacaatttgaaaaccagaaccttgcttag

SEQ ID NO: 289708 - DNA, 243 bp, Morganella morganii
atgatgaacattaactttactagggttatcactatgaaaaatatcaaacttctcgcagcagctggttttctctctgttgtctcattctctggtatggcgcagacggtcagcgtaactgcttccactcttgacagtgcagaagcaaaaattgctgctaaagcaaaagaagcacaaacgtcatacaaaattctctctgcgtatactggtaatcgagtgcatatgaccgctaaattaggggattaa

SEQ ID NO: 289709 - DNA, 270 bp, Morganella morganii
atggtgcaggatctgctgacaacagagagtgtggaaaagcgctttggcaatacgctttacctgccacatgccgttgagtggctgaccgataatggctgttgctacatagcggactcaataagaacgttcgccacctcactcaggttcatcgtgtgtacgacgccagtgcgcagtccggagagcaatgggatggctgaatcgttcgttaaaacgttcaagcgtgactacgtgtatgttaatgacctgccggatgccatgacagtgatgtga

SEQ ID NO: 289710 - DNA, 324 bp, Morganella morganii; identical to SEQ ID NO: 151179

SEQ ID NO: 289711 - DNA, 399 bp, Morganella morganii
atgaaaactgtcgaatttttgctgtacaccctcaaacccggtactggaaaagactttcatagaataatgaaagaagtgagtgttccacttcaccgttcagtgggaatggatgttatttcttatggtatatcagcacatgacgacgatgcttactatctgatcagggcttataacagcctctctcacctgaaaactgcccaggacaccttttatgatagcgaagcatggcgtcatggtccccggcaggccattatcgatagaataagcatcagcgttaaatcggtactgactctcactgagagtgccgttgagcatttagaccctatcgctatacgtcatggtaaagccgggatagacacaccagcaagacgttactgttattcagtacatcagagatga

SEQ ID NO: 289712 - DNA, 1137 bp, Morganella morganii
atgtctaattcatttagtgcgcgaattgaacgcatgaagtctcgtcgtaaagggacattcgatcaattaaacgtagccagagagtcaatcagtaaccagaggattgatggactggaaaactatgctttgctagaaggtttcctggatttaaatgaaagttgggaaaccaggggaaaacaagattctgcaacccgctatgttataggtgccatgcaaccggttgataaccgctataccgaaatttcttttgaaactgccaagcgtattgagaaccaactggtaaagaaattagatcttaatctggagtttcgtgtccaaggctctgtaccactggatattcatattaaaagtttcagtgatgtggatctgctgattatagacactcagatgcttatttatgatagcgacggtattggccgctacacccctacgaacaaaaatgatggggatatcatccttgaactcagggatgccactagggatgccctgaaagcaactttccctgcggcagatgttgatgacaacaacgccaaatctttgagaataacgggagggtctttgcagagagaagtggatgtggtgccaagcatctggtgggataccaaagagtaccaacatactaaagatgtagatcaacgtggggtcactattatagataaaaacacacgtcaacgtatctacaacctacctttcctccacatcaaacgaattaaagacaaatgcgatcaatgtaatggaggattgcgtaagtctattcgttttcttaagacactaaaagcggatagtgaagctgagggtactaaaattgaactcagtagttatgatattgcctcgctgatgtaccacgcagatggtaacaatctccgacatagccaatactacgagctggctgtccttgtagagactcacagatggctaaattatcttgcacagaaccctaatgctgcaatgctgctctacgttccaaatggcaccagaaagataattgacaagaatgaaacttttgccgaattgcttaaactgacgggaatggtcaatagtattgtcactgaggtgctgcgtgaaataaccggccagcctactgaatattacacacccgccaaaggaattttacttataaaacaagcggtttactaa

SEQ ID NO: 289713 - DNA, 627 bp, Morganella morganii
atgaaaagtcacgagtacattgtgatttgcggttttaaccgcagtaaagtcggccgatatattgccattgttgcctcagttatatcgttcgttctgattttactagcactcacactaatcgaatggctgaaaaactttcacattaacagccacatacctgcctcagttttttcacttattagcgccggtgggatctacatggggttgtatacatggtttgataaaaatctctggcataacacctacctcgggaaatttttatgtgtgccaaatcttgcaggccgctggaatgttgaaggccatacccgatctgagggtggtaaaccctgggaaggtgagctgagaattgtccagtcatgggacaaagtcagaattcatctgaaaactcaatcatcgcattcggatagtgtgacagcctccatcattcatgacgagggaattggttaccagctgctttataactaccgcaaccaacccaagacaggtgaagaacacctgacttcacatgttggattcgcagagttcaggttcgacgacggactcaaatctgctgaaggccattattttaacggtcaaggccgggctacttacggaacaatgacaatcactaggatcgacaatgtctaa

SEQ ID NO: 289714 - DNA, 585 bp, Morganella morganii; identical to SEQ ID NO: 151154

SEQ ID NO: 289715 - DNA, 2139 bp, Morganella morganii
atggaaattgaaattaattgctgtaataacatcgataaagcaaatataactctggcagaaaaaaaactaaatattaaatttgcgcctaacggcaccggaaaaagcaccatttcccgcgcgattcagtgtacggtaaacggggatgaacagggtctcagcgacctgcttccgtttagataccgtggttctaatcccgatgcagtacagcctagggtaactggtgtcgatggcctgcaaaacgtcatgtgctttaatgaaaaatatgtcgatcaattcacttttcaaccagacgagttagtaagtaatagttttgacatcttcatcaaaagtgaagcgtatcacgagacagaacgcgaaatcgaagccatggtcgtggccatacggcagcagtttgctgataacgtcgggcttgaagaattcatcacgcacctgggggaactcagcgccgcatttaagctgagtagtaccgggattgcaaaaacgtctaccggtatgaaaggcttatccgctggcaacaagcttcagcacattcccgacggtttggaatcttataagccgtacatccaaagtaaaagcagcgtagagtggatcgagtggcagacccgggggtatgagaaattctccgcgctatccgacggctgctgtccgttctgtactggcgactcccgtgaaaaggccgagcagattagccgcgtcagcgcggagtatgataaggctgtcattaaaaacctgatcggcctgatcggcgtgctagataaactcggcgaatatttttcagagcctgcccgtgcccgcctcgctgatattacaaccctaaaaagtgggctggaaaaacagcacgaagaatatctcgtgacagtgaagaagcagacagacagcctgataaatatgctgaatacccttaagactcttaacggctttacgttcagcgcttcaaccaacgtcaaggctgcactggaagcctgtcgcctagacgtgaagtttttcccggagctgcagtcggataaaacggcccgcaccgtagccagtctcaatacctctttagacgacctgacgacgcaggccggacgcctgcagggtcaaataaataagcagcgtcagggcatgcagaagctgatcctcaagcataaaaccgatatcaatacctttctggcttacgcaggctatcgttatcaggtggatatcactggggaaggcgataaatgtcggctgaaactgcgccacgaagactttgaaggctacgtcagcggcggcagccagcatctcagctacggtgaacgcaacgcctttgccattgttctgtttatgtatgaatgcttagccaagaagccaggcctgatcattcttgacgacccgatttcatcgtttgataagaacaagaaatttgccatcctggagatgctgtttcgccgcaataccggtgagtgcctgaaaaatgaaacggtactgatgctgactcacgatgttgagcctattattgatacactgaagtccgtcaggaagctgttcagtaatctggttacggcctcacacttgcactacagcgcaggctgcatcaccgagcagctcatcggtgaaagtgatatccgcacttttgctcagatctgccagtctgtcactgactctgatagtgaagacatcatcaagttgatctatcttcgccgacattatgaaattatggacgacctcggtgatgcctatcaggtgctgtcaaaccttttccatcaccgtgaaacgcccatcgacacccgtgaacccgttgtgcagggagtgggacatcctgaaatgtccgcagaaaaagttgccttcggctgccaggcaatcgccgatcgcattcccggctttgactaccaggccactttcgttcagctcaccgacccggatcgtatacgtgcgctttatctgctctgccgtaatggctacgagaaactgcaggtgttcaggttgcttcagaccggactcgagaacgcagtaatacgtaaattcatgaatgagacctaccacattgaaaatgaatttatctgtcagctggatcctgcccggtttgatctcattcctgaatatgtcatcagggagtgcgacgcgcttatacttcctcctccaccggcaaatgacgatgcgctggaagaaattgcctga

SEQ ID NO: 289716 - DNA, 249 bp, Morganella morganii; identical to SEQ ID NO: 151156

SEQ ID NO: 289717 - DNA, 363 bp, Morganella morganii; identical to SEQ ID NO: 128808

SEQ ID NO: 289718 - DNA, 1011 bp, Morganella morganii
atgtcacaatcacatgatcacgagcatgaccatactccagcagtaaccagtgcaaacgagcgtaaagtccttatctccttcctcatgatattcacatttatggtggtcgaagctgttggagggatactttctggctcattagcattgctggcagatgcaggccacatgcttacagatgcagtagctttggcgctggcttatgcggcattccgttttggccgtcgagctgctgatagcaaacgaacctttggatatttgcgatttgaagtcatcgcgggattctttaatgccctgacactcttcgctattgtggcgtggattgcatatgaggcatgggaaaggttacaagctccaccaattatactggcaggcccaatgctgatcgttgccattgcaggattgttggtcaacatattggtattatggatcatgacccgtggtgagaccgatcatgttaatgtcaaaggtgctattttacatgtgatgggtgatctattgggttctgttggcgctattgtcgccgctattgtcatttactacacgggctggacaccgattgacccaatactttccgttcttgtcgcagcactggttttacgtagtgcctggaaattattagcaaaatcgctgcacatcctgttagaaggagcgcctgaagatgcctccccagacaaggtggaacagagactaatcagttctgttaagggcttagcagccgtaagtcatattcatgtctggcaaataacctcaggtcggacgatggcaacactggaagtaagagccaaggaagatgtggacgtaaaagacgttgtgaagcttgtaaaacaagaactttatgagcagttcaaaatagaacatgcaactgtgggaatcgactggaattacgatcaaaacgataatacatgcagcctttcaccgacaaaactgcgtaacgaacacgaacacgaacacgaacacgaacacgaacacggaaaaaagcataaccattctagtccaggccacaaacattaa

SEQ ID NO: 289719 - DNA, 2496 bp, Morganella morganii
atgagcattcaaaaaaaacagcattctaatgatggtgaaactcaagtcagcttgcccattgagggaatgacttgtgcaagctgcgttggacgagttgaagccgctctggctaaggttgaaggcgtacaaaacgtaagcgttaaccttgcaacagagcgtgcagatatccgcctaaatgcattcgttaatcgtatggcgttggttgaagcagttgaaaaggttggttatgaggttcctcaagcttctgtagagttatcagttcagggcatgacatgtgcatcatgcgtagggcgtgtcgaaaaatcgctccgagcggttaaaggtgtaaaagaagccactgttaatttagcgactgaaagagctactgtacgtggaaccgcaggagttgatgacctcataactgctatcgaaaaaatcggttatgaagccagcctggttgataaccaaagccagaataatgatagtgccgcagaaaaaaaagatgctgaaaaggttgcgttgaagaaagatttagttctggcgaccgtacttgcgttaccagtatttattctggaaatggggtcgcatgtgataccgggaatgcatcaatggataatggataccattgggctccaggaaagctggtatctccagtttgtattaacattgctggtgttggctattccggggcggcgcttttacctgaaaggtattcccgcgttattaagacttggcccagacatgaactctctcgtctccgtcgggactctcgctgcattcggttattcaatgattgcgacctttgctccaggtcttttgcctcaaggtaccgtcaatgtgtattacgaagctgctgcggtaatcgtcgctcttattcttttaggacgatttatggaggcgcgggctaaaggtcgaacgtctgaggctatcaagcgtttggttggattgcaggccaaagaggcgcatgtgctgcgtaacggcattgtcatcgatattcccattagtgatgtagcccttgatgacattatcgaagttcgaccaggtgagcggatacctgttgatggtgaggtgagtgaaggaacaagttttgtcgatgaatcgatgataacgggggagcctatccccgtcgagaaagttcccggaagcttaatggttggcgggactgttaaccagaaaggagcattgaggttgcgtgcaacagccgttggtggccagacgatgttgtcacaaataatcagaatggtagagcaagcccagggctctaaactacctatacaagccgtggtcgataaggtgacattatggtttgttcctgtggtgatgctggcagcgttgttaactttccttgcctggttaacatttgggccatcaccggccctgtctttcgcactggttaatgccgtggctgtattgatcattgcctgcccatgtgcaatgggattggctaccccaacctctatcatggtaggtactgggcgtggtgcagaaatggggatcttgttccgtaagggagaagctctgcagttgcttaaagatgccagggttgtcgctgtagacaaaacaggtactttgactgaagggcgcccagtaatgacagacctggagttggccgaagggtttgagcttgacttagtattagcaaaagttgccgctgttgaatcacgttcggaacatcctattgcccgcgctatcgttgaagctgctctaggaaaagagatatcgctgccagcgttgactgagtttgattcaattactgggatgggcgtcagggctaccgtagacggagagcgcgtagaggtcggggccgatcgatttatgcgtgagttaggcttggatatcgagtatttttcaaagactgcgatacgccttggaaacgaaggaaaatcgccactctatgttgctattgatggacgtctggctgccattatcgcagtcgctgaccctattaaatcaagtacgccgattgccataaatgcattgcaccaactggggctcaaagtcgcaatgattaccggtgacaatgccaatacagcaaatgcgattgcgagacagcttggtattgatgaagtggttgccgaagtgttgccagaagggaaagttgaagcagttcgtcggttgaaggagtcttacggtaaggtcgcttatgttggtgatggcattaatgatgccccagctttagccgtggcagatattgggcttgcaattggtacaggtaccgatatagcggtggaatctgctgatgttgtcttaatgtccggcaacctacagggtgtgcctaatgctattggattgtctaaggcaaccataggtaacatcaggcaaaatcttttttgggcgtttggttataatgccgcattgatccctgtagcagcaggcctgctgtaccctgcctatggattgctgctttcaccaatctttgctgcaggcgcgatggcgctatccagtgtatttgtcctgggcaacgcacttcgtttgcgtcggttccagcctccgctggcagaagactctgagcactaa

SEQ ID NO: 289720 - DNA, 465 bp, Morganella morganii; identical to SEQ ID NO: 185220

SEQ ID NO: 289721 - DNA, 453 bp, Morganella morganii; identical to SEQ ID NO: 185219

SEQ ID NO: 289722 - DNA, 2526 bp, Morganella morganii
atgagtggtggtgtaaaaaatagcaaaaaccctgcaggagacgaagcggctagttgctgtgaaacgttcaatttagggacaggactccgggttaagaatactggtgaatcacataaagcaaatgatcatgcacatgatcagcaggctcataatcacaagaaatgcagtgatgatcattcccatgaaggtcataaccatgaaggccataaccatgaaggccataaccatgaaggccataaccatgaaggccataatcatgatgcccatagccatggcggcgaagggcattcgcatgatgagcataatcataagggatgtaaccatgctcatgccgcgcaagagcattctcatgaaggccacgatcacggccatgagggggattgttgctccgctgctccagaacaattgagtagcctagggggctcgcaggttgtggctggtggattacggacagaaattcgcattatgcagatggattgtcctgttgaagaaaatcttatcaaaaagaaactgggtggaatgagcgctgttaaagagcttgatttcaacctgatgcagcgtgttttgactgtaacccatacaccggattcgcttgaagctatcatggctgcaattcgctcgttgggattcgcgccagaagtctctgataatactagcggcaagaaaaatacccaggagaaaaaaaagccctggtggccattagctcttgctggcgtagctgctcttgcagccgaagtgatgcactgggctgatatgcctgactggctagaagctgggttggctttgatagcagtgctttcttgtggtctgacaacctacaaaaaaggttggatttcgattcgcaatggcaacttgaatatcaatgcactaatgagtattgccgttactggggctttggtccttgggcagtggccagaagcggcgatggttatggtgttattcaccattgccgagctgatagaagccaaatcacttgatagagccagaaatgcaataggttccctgatgaacctgactcctgaaactgcaatggtccaacaagctgatggaacatggcaggaagttgacgccagtagcgtacaaccgggcagtattgtcagggtaaaaccaggtgaacgaattggtctcgacggagaaatcgtcaaaggccaaaccaccattaaccaagctccaattacaggtgaaagtatgcctgtcgataaaattgcgggcgatgctgtatttgctggaacaataaatcagtcaggctcttttgaatataaagtcactgcagctgcaaataatacaacccttgctcgcatcattcatgccgttgagcaggcgcaaggcgccaaagcagctacccaacgttttgttgaccgcttttcccagatttatacccccgtcgttatgggtattgctgttgcggttgctgtattgccaccattgtttggggcaggaacatggcaggagtggatctataaagctttagttatgcttgtcattgcgtgtccatgtgccctggttatttctacgccagtaacgattgttagtggacttactgcagctgctcgcaaagggattctcattaaaggcggtgtttatcttgagcagggacgtaagctaaaagcccttgcgctggataaaacaggaactattacctatgggaaaccagtacaaaccgacgtaatggtattcaatgggtggagcgagcgtgaagttcgtactactgcagctagtctcgctagttactctgatcaccctgtttcactggcaattgtgaatgcttctgctgatttgaaaaagcaggatgttgacagctttgaagcgattgttgggcgaggtgtgcatggcgcgattacaggtaaggatttttaccttggtaacctgcgtttgactgaagaacactttaattgtccatcagagattaaagcaacagtacaaaggctggaaagccagggtaaaacagttattttactcaatgatggtaagcaagtgcttgggttgttcgctgttgctgatactgttaaaaacagcagccgtgaagcgattgaacaacttcatgaacttggcgttaaaactattatgctgactggtgataacccacatacagctaaagcaatcgcatctcaggttggaatcgatgaggctcgagggaatcaattgccagaagataaacatcgtgcagttgaagagcattcacggattggaatcactgggatggttggtgatggtatcaatgatgcaccggctctggctgcagctgatatcggttttgctatgggcgcaatgggtactgatacggcgattgaaactgcagatgtagccttaatggatgatgacctgcgtaaaatcccagcctttgtaaaattatcccgacaaacgtacagcttactcgtgcaaaatatcagcctcgctctaggtattaaagccgtattccttgtactcacgctcatgggaatgggaactatgtggatggctgtatttgctgatgttggtgccagtcttctggttgtggcaaatggcctgaggttattacgaaaataa

SEQ ID NO: 289723 - DNA, 264 bp, Morganella morganii
atgttagttaatgaccccgtattaatttctatgatagaagaactgactgataagtataataaaatgcaggattttttaatcgatgatgaaccttgtattgatatcgtacggtcggtgtatgagttggagtgtacagttagtgaattcaaaaaaagaattatacttcaacatatttcctattgccattcagatgaatgtgatgaccctgacctgcatgtcgccttaattgacaatataaaaaacatacttgactatcttgaataa

SEQ ID NO: 289724 - DNA, 414 bp, Morganella morganii
atgatcaagcaaaaaactatcaagaatattgttgaattaaacggtattggcttgcatagcggtaaaaccgttaacatgaaaatcatgcctgctggtgccgatagtggcatacggttccgtagaacagatgtaactcctgttgttgatattcagctccgtgccgatcagattcatgacactatgctggcaacaagcattatcaaccctcagggagttcgagtttcaacaatcgagcatttcctttctgcggtgtctagcatggggcttgataacctcttggtggagctcgatgctccagaacttcccattctcgatgggagtgccagaggattcatagactcaataatgcacgctggtttgatagagcagtgtgcgctaaaaaaatatcttctgataaaaaaacggtttccgtaa

SEQ ID NO: 289725 - DNA, 477 bp, Morganella morganii
atgattgattttaagcatcccttgatttctgctgagactaatagattaaatattgaagtgtcgaaagaaaactatattagcgagattgctgatgccagaactttcggatttgttcgtgatgtagaacttctacaacaaaaaggtcttgggttaggggcaagtttgaacaatgcgatagggcttgatgaatatagcgttctgaatccggaaggtctgcgatttaataacgaacttgtgcgacataaaacactggatgcgattggagacctctttgtatcaggccataatattattggcgcctaccatgcttataagtcagggcatgcattaaataataagttgatgcttgcactgttgaatgatgtcgaatcatgggaattagtgagtgttggtgaatataaaaatgatgccactagagaaaccatcctttctaaacccaaagaagagtgttttgagtcattaagtatgtggtcataa

SEQ ID NO: 289726 - DNA, 435 bp, Morganella morganii; identical to SEQ ID NO: 190037

SEQ ID NO: 289727 - DNA, 3441 bp, Morganella morganii
atgtcagatattattcccggatattgcacactttgccgttcgcgttgcgggacgttgaatgaagtagcaaatgaccacctgatcaaggtacgggccaaccctgaacatcctaatggtaaggccatgtgtatgaagggcaaagcggcacctgagctggtggacagcgcaaatagaattctgtacccgatgaagagaacccatcctaaaggtgccgagaacccgggctggaaacgtataagttgggaagaggctatgtcaacgatagccggacaactggaaaaatttaaacgagagaacggagctgaatctgtcgctttcggttttacgagcccaagcggtacccccctcagcgatgcaattgaatggttagagcgatttgttcgtatctatggcagcccaaacaccagctatggaactgaaatatgtaactggcataaagacgttgcacatcgatggacctttggctgcggcatccctgttgctgactattcccatgccgatcttatccttctttgggggcataaccccgcgaatacttggcttgcccaggctagcgcgattggtactggtcgaaataacggtgcaaaactgatcgtcgtggatcctcgcccgacacctttagcgaaagaagcaaatgcctggcttgatgtcaatcctggaactgacggtgcattagctttggggttaagccatctcctggtagaaagaaacctgtttaatcatgagtttgttcgaaactggactaatggtcctttgttggttcgaaatgataatggttattttcttcgggaaaaagatattaacccacttgccatcagtaatcgctatacagtttgggacgaacacaaccagcaagtcacatttatcgattccgagactcgaactgaagaaacgctgacgcctacagctgcacttgagggtaatgttgaagttgcaatagctgatggtgcaaaaatttcctgccaaacggcgttttcatcttttaaagatatgttggctaattatgacccagaaaacgtaagccgtatcaccggggtatctgttgcatcaattgaagccgctgcgagtttgattgccggggccaagaaaatcgcctaccacagctggtctggagtggcacaacacactaatgccacccaaacagaacgtgcgattgcgacactgtatgctttaaccggttgtttcgatcaggaaggatgtaatcgaatctatgccagccacccggtgaatgtggttaattcaccgacactgatgccaaaatcacaatgggataaagcattaggtcttgaagaaaggcctatcgggccgccttcacaaggttgggttcattctcaggatatctggcattcagtattagaaggtacaccctataaaattcgcgggttaattggctttggtgccaacatattactttcacaaagtgatacttctctcggacaacaggcgcttgaggcacttgagttttatgcccatgtagatttgtttgaaacgcctacatcaaagtatgctgatatccttctgccagtaaacactgcctgggagcgcgaaggcctaagaaccgggtttgaaagtagtgctgctgctcaggaccacattcagttgagaaaaaaaatggtctctccgcgcggtgaaagccgttccgaccttgagattgttttcgatcttgcatgccggttaggaatgaatgaagcgttcttcgacggcaatattgaggcagcctggaattatcaactagaaccattaggtttgactgttgagatgctcagaaataagccagaaggttacgatatcccgcttgagcataaagtcagaaaatatgctttcagagacccaaatagtggatatctggcaggtttcaatacagaaacaaaacgtgcagagttttactctgagatccttcatcgctatggttacaatcctttacctgagtatgtacagccgcaagaataccagcgcaacgatcctgattatccactaatgctgacatccgttaaaagcggattcttctgtcatagccaacatcgaagcctgactagcctacgaaaaaaagcaccttatccaacggtagacatttcggcagctctggctgacgaagaaggtatcaagacgggggattgggtagaaattgaaacgagagcaggtcttgctcgatttagagcaaaagtggaagccaaactctctcatgaaactgtaattgctgagtttgggtggtggcaggcttgtcctgattttggcaaaccttcatacccggttaaaggtgagtacagtagcaattacaatagcttaatcagcggtgatagctatgatccagtcagcggtgctttacctttgcgttcattccgctgccgcattcgccgcttgaatgattttgagctgataagacgcccctgggaaggtcgtaaaacattcaaagtcattgaactgaaaaaagaagcagataatgttacgacagttaccttccaatcgaatagtgaaggctacttacctgattatgaaccgggccagcatatcactgttagctgttgtccgatgagcgattctgaagagatcgttacccgggcgtattcgctgacaggccctgcgtttgttcatgaccgtaaaacctattccatttctgtccgtcatcagaaagcgactgatgagaaaggtgaatatgtagaaggaataatgtcatcctacataaacacgcatttgcagataggcaaggatgttgaacttacgcctcctggggggaatttcattgtcccgctcaatgccgtccagcctgtcgtaatatttgctggcggtattggaattactccattcatttcctatctggagtctattaacccccaagcggaaggtccggaaatctggcttttctatgctaatcaaaatagtaggctacatgcgtttaagaaaagaattgcggagctaaatgcgtctattgacaggcttaaagtaattaatatctacaaccagcccctcgactgtgatattccaggattggattatgatagagctggttatgttggtgcgggagatgtcgaggcatatcttattgagaataatgctcgttattacatgtgtggtccgcagcctatgatggatgcgatatcccgagggcttcaggagagaggtgtacctgcatttgctattttctacgagatatttcgttctccgacaaaaataaataatgatccctcattacgtcataaagtaatttttgcaaaatcaggaagagaagagatctggaccacggataaaggtactctgctgaattttggagaaaaacttgggattaaaatgcctagtggttgtcgtgttggacaatgtgaaagctgttcaactaaggtgattgccgggaacgtgcagcatctgaatggtgtggaaccctctgatgagggtgcatgtttgacatgccagtgcattcctgccggtgatatcactattgatgcctga

SEQ ID NO: 289728 - DNA, 453 bp, Morganella morganii
atgtcattattatcagttttaaagtatccggatcccaaattgaagatcattgcaatgcccgtcgaacatatttcaccgataacccggcaatttattaaggatatgattaccactatgtacggtacatccagtgtaggtttaacagcaacccaggttggtgttcaccaaaggattgctgtaattgatgtccctgaatcgctggtgcaaccaatagtattaattaatccggtaattgctgagagtaaggaagaaaaaaatatcactgaggaaaaatgtctttctataccaggaaccagtcgttttgtataccgtgcagagaaaataaatgtcaccgctcttgatgcttttgggaatacaataaattttagtgcaagtggtactctctcgatctgtatacagcatatgatagaccatatgaacgggattctattaactaagagcctatctcaatag

SEQ ID NO: 289729 - DNA, 1368 bp, Morganella morganii
atgagaatagttacactcgtaatatctgctgtagctttgatgccgggagttacagtccctaatgcgatagccggttttattgaagacagtaaggccaatctcacactccgcaatttctatattaatacagataatcgcagtggggacgggttcagtaaacaggaagaatggggacaggggttcatcctcaattacgattcaggttatactgaagggccagtgggattcggactgagcactctggggctactgggcatcagacttgacggaggaggtaaagcaggctcaccggcgtcaggtcggcaacccggtacagtatttccgctagacaatgatggcagagcggttcatcagttcggtagcctgggggttaccggcagggcaaaaatatctgatacggaactccgttatggaacgcttcagcccaaaaatcccgtcgttatatacaacgatgcccgccttttgcccatgacatatcagggaggacaaatatcatcaacagatatcgacgatctgagtctgaccggcggcgttctcacacatacaaaaggacgtaactccacagatatgcgcggaatgtccattgccggagccaatggaagtggtcccacttcacggagcagtaatcgtttttatttcgccggtggtgactatactcttatgaaagacatgactctctcatactattacggtgagctggataatttttacagacaaaactatatcggactggcacataacctgaaaatcgtttccgggaacctgaaatcagatattcgtatattcatcagcgatgcagacggaaagaacggaagtgctgcaggacggagtgccggatatgtaagtactggttattacggaaataatcgcacaaagggagaagtggacaacaatgtttatagcggtcagttgacatggtcttctggaggtcacagtgtgagcagtggttatcagtggctgacggggaaaagtgactttccatatctgaatcgtggtgatggagaaggaacaagcacctggttaattactgatgcacaattgctaaaattcagcagggcgggggagcgaacctggctggcacggtacgcctataattttgctgatgcagggctcaaagggctgaatctaagtatcctctatctgaacgccgataatattgataccgggaatgggcgaaagggggaatgggaacgggatattgccctgagttatactatccccgagggaatacttaacggacttggcatctccgtaaaaaatgccacaatgcgcagcgctctgcctgacacaagtagaaaaggctctgctggacagcgtgaccaggatgaaacccgggttacagtcagttatacccttcctcttctctga

SEQ ID NO: 289730 - DNA, 357 bp, Morganella morganii; identical to SEQ ID NO: 128799

SEQ ID NO: 289731 - DNA, 174 bp, Morganella morganii; identical to SEQ ID NO: 186072

SEQ ID NO: 289732 - DNA, 213 bp, Morganella morganii; identical to SEQ ID NO: 186071

SEQ ID NO: 289733 - DNA, 738 bp, Morganella morganii; identical to SEQ ID NO: 186070

SEQ ID NO: 289734 - DNA, 537 bp, Morganella morganii
gtgaatatcgattatcacgtggaatatgaacagcatcactactcagtcccccatcagcacgtcggtaaaacggtggagcttcatgccttcgacaacctgcttgaagtctggtctgacgggcagatgatcgccagtcacccgcggcgtcttcatccgggcaacagtacggcagcagaacatatgccggagcgccatcgtcatcatcagcagtggacgccagagcggctgaaaagctgggcggccggtgtgggctccgacaccttcacgtgggtcagcgagcgtctggctgaaaaagcgcatccggaacaggcctatcgcctgtgtctggggctgctgagcctgacgcgtgaatatccttctgagcgcgtcaataacagctgtcggctggccaatgcagaggggttaacccggctgaagcagataaagtcgatcctgaagaataaccgcgacctggttccggcggacaaagatctgcacccgtcccgggagcttcctcaggaacatgaaaacatccgtggcccacgccacttccactga

SEQ ID NO: 289735 - DNA, 654 bp, Morganella morganii
atgccggttcgggcgtacagctactcgcagttctgctgccgctatcagacctggtgccagtcacagaaacgctccatgcgccagcagcatcttgccggtgaaaaatgctttatcgactattgtggacccacagtgtcggttatctcacctgagacgggtgaatgccggcaggcccagatcttcgtggcggtgctgggcgcatcaaactacaccttcgcggaggctacctatacgcagtcgctgtcagactggcttctcagccacgtcaggatgctggagttcttcggtggagtccccgaaatcctggttccggataacctgaaaagcggggttagcaaagccagtcgttacgatcccgaactgaatccctcctatcagcagctggctgagcattatcaggttgcggtgatacctgcccgccccagaaaacccagagacaagccgaaggcggaagttggcgttcagatcgtcgaacgctggatcctggcccggctccgtcaccaggtcttcttctcgcttgctgagctgaaccactgtatccgtacgctggtaaccgggctcaacgaacgtcccttcaaaaaactgccgggcaatcgccgtgaggccttcgaaaggctggacaaaactgtgctcaggccattaccggtgcagtag

SEQ ID NO: 289736 - DNA, 357 bp, Morganella morganii
gtggagaaaagcgccactctgtcgaaaaaatcccgtctgggcgaagcgttcgcttatgccctgaaccagtgggatgcgctgtgctactactgtgatgatggcctggcagagcctgataacaacacagccgaacgagcccttcgtgccgtctgtcttgggaaaaagaattttatcttcttcggcagcgaccacggcggtgagcgcggagccctgctgaatggtcttatcggaacatgcaggctcaatggtatcgatccggaggcctaccttcgccatatcctgagcgtactgccggaatggcccagcaacaaagtggcggaactgctgccatggaacgtggttcttaccgataaataa

SEQ ID NO: 289737 - DNA, 354 bp, Morganella morganii; identical to SEQ ID NO: 151234

SEQ ID NO: 289738 - DNA, 222 bp, Morganella morganii
ttgtatgataacgcgatggcggagagtatcaacggtctgtacaaagcggaggtcatccaccgtcaggcctggaagaagcgctcagaagtggaactggctacgctggcatgggtggactggtacaacaatcgtcggttgctggaacgacttggtcacatccctccgatagaggcagaaaaagcgtattacgcttccatcgggaacaaggttctggcagcctga

SEQ ID NO: 289739 - DNA, 1962 bp, Morganella morganii; identical to SEQ ID NO: 151232

SEQ ID NO: 289740 - DNA, 489 bp, Morganella morganii; identical to SEQ ID NO: 151231

SEQ ID NO: 289741 - DNA, 1224 bp, Morganella morganii; identical to SEQ ID NO: 169907

SEQ ID NO: 289742 - DNA, 1023 bp, Morganella morganii
atgtcaaggctgaacattattggaattgatcttgcgaaaacaaatttttatcttttcagcctttcaccggaagggaagcctggtggaaggattaagctctctcgtgaaaagttgattggctggtttacgacacagtccaggatgattgtcgccatggaggcatgtggtgcttctcatcactgggccagagaaattcaaaagacggggcatgatgttgtgatgctacccgctcagcacgtcagggcttatcagcgtcgccagaaaaacgactataacgatgctcaggccattgccgaagcctgctggcacggaacaattcgcccagttccggtaaaaacgctatctcagcaggatgaacaaacctttttaaaaatgcgacgacttgtttctgaagaaagaacgcagttaatcaaccatatcagagggttaatggcagagtatggtattgttttgcgtaaaggcgcaactgagcttcgacgtaaattacccgagttgcttgaagatgcagagaatggatttacgccccagatgcgtgaactgttacaacggcaatatcagcggctggcggctctggatgatgaactcatatggtatgacaaccgacagcgaaaaaatgccgccggggattcagtatgccagcgcctactttctattccgggttttggtccactggttagtctggcagtgaaaagctggatgggtgatggaaaacagtttaaaagaggtcgggatgcttcagcggctcttgggttggttccacgacaattcagcacaggggggcaacaggttcttctggggatcaccaaatgtggaaacagctacgtcagatcaatgctgatacatggtgcccgagctgttttgttcagatccgcaggcaaaacggatcaacttagctcatgggttaacctggtccgggagaaacgaggatttaacagggcagtcgtcgccctggcaaataagttaattcgtattgcctgggttattatcactcgtaatgaagtttaccgggtttcggtagcatga

SEQ ID NO: 289743 - DNA, 1191 bp, Morganella morganii; identical to SEQ ID NO: 151030

SEQ ID NO: 289744 - DNA, 594 bp, Morganella morganii
atgaattataccactgatgattacactcaggccatgatcggactggcaccgcagggtatggcgtgggactggcggccggggtcgaatatgcatgctgttctccgggcgctggcgcgcggttatgaggcctcggatattgacgctgttcagctgcttgagggggcatttccgaagacggccacaacgttattaccggagtgggaaaaaacgctcggcctgccggatgattgtgggatcggggagatggacactattccgaaacgacaatccgtggttctttcaaagctgctgcgtaccggcgggatgtcaaagccctattacatcagcctggcggccgagatgggttacaccatcaccgttaccgaattccggcaggcaagggcggggctgtcatcttgcggtgacgcactgaacggtgatgaatggccgttcgtatggcgtataaatgccggaaacacgcaggtgacatacgcggtcgccggcggcagttactgtggtgatccgctgcgttcgtggggtgagcattacctcgagtgccagtttaaccagatttccccctctcacacgatccttcaggtcggttacggccaatag

SEQ ID NO: 289745 - DNA, 231 bp, Morganella morganii
atgagcaggattaatcagattcgcctggttgcgtctgtctgcagggaaatcgccggacagtgccccgggatcaagatcagccaaaaacagctggctgccgtcaccgctgccgctaactctgtctgtgcggcctttaatgaaccggatatgtgtgacaactgcagtgacaagctgcgtggtggctgcctgcctacctgtgcagcttacagcaaggagaataatcatgcgtaa

SEQ ID NO: 289746 - DNA, 486 bp, Morganella morganii
atgggtaaaaaacaagtagatttgatgtaccgttttatagaaaaagaacggaatacgtcactcgataaattgccgccggttcccgtatcaggaaaacaggcctccgaatttttatggccgttaaatgcacgattcaaaaataaatatgaattaattaaaacagccacttatctgtgtaaatatgaaaaaccagcggataaggccattgagaattatgtttttcttaatgactcatgggataaactccctctgcatgtctggcgcgttctgctggagcgtcagatacaggctctgatgctgtttaccgcctctgatcttcatcaaccctctgttatgtctgttccgatagggctgactgccgatcagaatacaaagtttgcagcacttttttggcttcacggaatgaagctcccgttcccagtagaccagcaattatctgccgactttttttcaactcatccggatttaccgctgatatcacactaa

SEQ ID NO: 289747 - DNA, 450 bp, Morganella morganii
atgccggtcactattaccgccaaagttaacggattccgccgctgcggtatcgcccatccggacacggccactacgtacccggatgaccatttcaccaaagcgcagctggatgagctgcagacagaaccgatgctggttgtctctctcggtgcagccccgttaaccggggctgatacggcggcagagaaacagattgccgccctgaaagcggaagtcatttccctgaaagcggcagctgagtcactgcagcatgataacaactgtcttaaaggcgttattgagaatctcaacgggcgtacggatcatcttaccgaagaaaataccgctcttcaggctgagctggcggcactgcgtgagcagaaagacacaccgcccgctcaggttaaacaggatgatacaccgcctgctgccggtggcagtaacagcggcaaaaagtcatccgctaaataa

SEQ ID NO: 289748 - DNA, 186 bp, Morganella morganii; identical to SEQ ID NO: 289416

SEQ ID NO: 289749 - DNA, 147 bp, Morganella morganii
atgacatgccaactatgcagtaaagaactggccgacgatgaagtttatgtctgtgaccagtgcgccaatgaatgtccacatctggaagtagtcgagaagatgaaaggagatggtgatgatcaaacgcatcctgggatatctgagtaa

SEQ ID NO: 289750 - DNA, 240 bp, Morganella morganii
gtggctagaacagaccctcaatttaacttaaggatgccagccgatataaagcagcaactcactaatatagctgccactaatcgccgctccatcaacgcggaaattatcgcggccattcagctgtggatcaaaacccataaaggacagcaaataccatccacttcgcaagaactaactaaatcagaaaaagaagcgatggatattgccataaaggttttatcaaaaataagagacaactaa

SEQ ID NO: 289751 - DNA, 162 bp, Morganella morganii
atgcaaggtgcaagaaaattaccacaattcaatctgcggtggcctcagaaggatttagacttagcgcgcaaggcagcgaaaggtaatggtcgctcgatgaatgcagagatatatcttcgcgttatggaaagcctaaaaagagatggatttatcaatgaatag

SEQ ID NO: 289752 - DNA, 852 bp, Morganella morganii
atgaatagtatatcaacaatcaacgtacctttccacggagataatctgtatctggtgaactatgaaggacagccatttgttgcaatgcgtcccttcattgaaggtatgggtttagattgggcgtctcaatatacaaagataaaacaacgttttaagacctgcgttgtgaatatcacaatgcagcttccatgtgataatcagcgccgtagtgtggtgtgtttggcacttaaaaaactgaccggctggcttcatacgatcaacatcaacaaagtaaggccggaaattcgtggcaaggtagcggcttaccaagataaaagtgacgatgttctttatgagtattggactaccggtgaagttaaaagtaagcgcaagtctcaaaatgtgctgcctggtaaagttaccgctgaacaacaggaagccatcaagcaattggtaatgacgcgtggtaaagcactgccgaaagaaaaacaggcgaaagccatgatcacaatgtggtcatcgctgaaaagtcactttggctgcacatacaaagaaatcggcagtgataagttcactgaagcactttccctggctgcgcgcattccgctcgaaggtgagttcgtaccgaaagacgatccgctagaggtcacccacctctatgtaaataaggacatagacgcccacaatataaatgcgctggcgaagcactacgaagctatttataccgcatggaaagttgaattatatcctgctctgcggagtgttgactcacccattgccggtcgcctgtatgaccgatttaaagacggctatatgttcctgcgttatttacaggaaagcattaacggaaagcatcctgcgttaatcaaataa

SEQ ID NO: 289753 - DNA, 387 bp, Morganella morganii
gtgaagaaagtcctatctgtaattttggtggcaatcgtagctgtatcgttgtctggctgtggtgccactgccggtaataaaagactcgccaaggaaacacaagaaagcgtccaggctaaacttatcagcggccagacaacaaaagcagaagttaaagcggcttttggtgatccttccggcgttggcttcaccagtgacaaggaagagcaatggagctatgcgtttgctaatacaaaaattaaaggaaaaacgttcattcctttctatgggttatttgctggcggcgcaacaaccaagctcaagcagttagtgatcatctttaaaggtgacgttgtggataaatacacgatgtcagactctgagactgatgtgaaaaacggaatgtaa

SEQ ID NO: 289754 - DNA, 519 bp, Morganella morganii
atgaataaaatgttaataacagctatgatttcactgatactttctggttgtggcgaaaagaccgcgtcagatacagtgcttgaattcatgaatactgaaaacacagcattgttatctcattcaaaaatagagcgatgcactcctgatggcataaaaaatataatactggttaataaaaacagcctgccaacaacgaatgactactatcaattgagtagttatttatatggaaaatcaaagtacagcgttatttctgaaaagaaagaaggggatacatacgtggtcagagtcaaatgggcgtacccgaaagctatcgatgatgcgaggtcatttattgaagcaggcaacccaaggattagcgctgatgacaaaaaagagctggataatctcaagtcactatacgaatccggcggattgaaaaaccttgaatacacagaagacataacggactggatggtgttacctgatggaatagatcctgacctttcagttggtaatatcgaggtctgctctaagtaa

SEQ ID NO: 289755 - DNA, 2397 bp, Morganella morganii
atgttcagtcaggttgacatcgataattttggtagtttcacaaaacttagttggagaaatagccttaaagatacaggtaataatgtccagaatttcaaaaggctcaacattctctatggacgaaactactctggtaaaactacactctcgcgaattttccgtgctttggaaacaggacgcattccacacaactttgtggacccaaattttattattcgtggtgataacggagatgtgacacaggcagaccttgtcggtcatagctacgatgttcgggtctacaatcgagactttgtgagtgataacctaagctttttggtcaatcaaaccgatggcgagatcaagacgtttgctattgttggtgaaaagaataaagaaatcgaagatgctattaccgcaatccaaattaagctaggcagtgttgaatcgaaggcgggcctccggcatgaacttgaagctaaaaagaaagagcgggatcgaacgaaaggcaatcataaagctgcgcatgatgttcttgaaggcaaacttcgttatcatgccaacaataagattaaacaaaaccgcacctatggccctgctgtttacaacatagaaagcatcaaaaaagacattgacttggtcaaaaaacctagtttcataccgctaacaaccgaagaacaagctgccaaggtcaacctcttgaagcaagaggccctacctgatattaccgataccgtatcattaagcctcaacatagaatcaataagcaaggaagctgaagaactcctttcaagattgattaagccaaccctgccaattcaggaactgttgaatgaggcggctcttcaaacgtgggtaaaacaaggcataccgctacataaagataagcgagacacttgcgccttctgtcgtcagagccttccccatgacatttggcaggtattagactctcactttagtaaggaatcctcggatctggagtcgtgtatcgattcatgcctgtcttccattgccacagaaatccaagccattcctaacttcttgactttgactggtgataagttctatgcagaagaaaaaatcttatttgaagctagcaagagaaaacttgataattacctgaaagtttacatgcaggatctcaaagctctgaaggctgcattggataagagaaagaacaccatttttcagcaggttgccatacctgtctatatccacgacccgattgcaattcagcaatgcgtgggcgacatcaatgacctgatcgctagaaataacagccgtacaagttcactggaaaaagataaaaatactgcacgcgaatctcttcgacttaccgatgtagcttcctttattggagacattacctacgatgctgagttgatgcgtattgccagtctcaaaacagattctgacactgcaaacactgtatttaccgaggcagaactcgaaattatcaaacaagaggctgaagtgacccacctacagggccaacagaaggatgaacgcaagggtgcgaagcgagtgaatgacttgcttagtcacttctttggtcacgatggcatcaaacttgccgccaaggacaatattgagaataactcagttaagtttgaagtcaccagagatggtaaatcagcctacaacttgagtgaaggcgaatgcagtctgattgctttctgttacttcatagccaagctggaggagacagacaacaaaggcaaggatctgatcatttatatagatgacccaatttccagcctagacgggaatcacatcttcttcatgttcagcttgattgaaagcctgattgctaaacccattaagaatgtagatggaacaaacagctatcgctacaagcagctttttatatccacccacaacctagatttcttgaagtatctaaagaaaatatcatttcctaatgagaggaatcacggtggataccaacatttcatcgtggagagaaacggaggggcaagtcagatttccctgatgccttcatatctgcgagactacatcactgaattcaactacctatttcatcagatctacaagtgccgcaatcaaggtgcagctaatgaatctcatgaaccattctatggattcggcaacaacctccgtaagttccttgaggcatttttattctttaagttcccgcatcaagatgacaagaacgatgccttcgaacggatcaagaaattctttggcgaagaagacccgactgcaatagctcttgtgaatagacttaacaacgagttttctcatcttgaatcgattccagatcgtggattcaaacctgtggagattccagaaatttccaaggtagcaaactacgtgttggacaagatttatacggcagatccgcatcaatataatgcgctgttgaagagcataggtgaaccacctaggacaccttag

SEQ ID NO: 289756 - DNA, 1869 bp, Morganella morganii
ttgctcgatagtgaagagcaaaaacaagagaattatcaacaacaaattaattacatacatcaaattatccagcaagaaaaagagatattggcaaagtggctcaccattgcttctgaacttagatatgaacagaatgaagaaccaagcttgttacaaattgatgaactggctgacacacaaatcagatttcctctatttttgctaaccactcattattgggaaggtcgttggcttattgatgtacctaatatcgatgagcttaacaaggagaaaggaaaaaacgggcttaaaacaatagaacgtcactggcaacgtaaaatgatgttaacgccatgtgtggtaatgacttgctatatgttacctaactatatgcttttacccgcaaataaagggcaaaaaaagcatgaaagaggctatgcatataatattgctgatttactcattgtcgatgaggccggtcaagtactacctgaagttgctggagcctccttcgcatttgctaaaaaagcacttgttattggcgatactgcacaaatacctccaatatggaatatcacacgagccattgactccggaaacatgttggaagaaaaaattctgggtgaaaatacacaagaacaaatcaatgcagaatatgactcaatcaccgaactcggaaagtgttcagcttctggtagtgtaatgaaaattgcacaattgtcttcacgctaccattatgactccgatttagagagaggcatgtatctttacgagcaccgacgctgctttgataatatcatcgattactgtaatgagctttgctatcaagggaaattactacccaaaagaggtaatagtgaaaaccatttattcccagcaatgggctatctccatgttgatggaaaaggtgagcaaagaaatacgggaagccgtttcaatcgattagaagcagaaattatttcagcttggttaatagaaaatcaacaacgtattgaaaatcattatggaaaacctattcagcaaatagttggaatagtaacgccattcagtgctcaagtttcaactattaaagatgctcttagtaaacaaggaattactactggaactagtgaaggagccctcactgttggtactgttcactcacttcaaggtgcagaaagagctattgttatattttcccctgtatattcaaaacatgaagatggcggttttatcgatagtgataacagcatgctgaatgttgccgtttcacgcgctaaagatagttttctcgtttttggcgatatggatttatttgaaatccaacccccttcttcaccaaggggattacttgccaaatacttattcttagaggaaaggaatgccttacatttcgaatacaaagaaaggcaagacttacaaaaatcgaatacccaaatatacacgctccacggtgtgaaagagcacgatgactttttaaatcaaacaattattaacactgaaaaacatattaccattatatccccttggctaaatttgcaaaaacttgaacaaactggattcattgattcaatggctcaagcagcagctaagggtatccacgtaaaagtgatcaccgatagaaattacaatatccaccactctgatcctgaaaaacgtaaagaaagagaagtcaatcttcataatgccttggaacaattagattcttatggcattgctacaaagctagtgcgacgagttcatagtaaaattgttatcggagatgataatttactctgcattggctctttcaattggtttagcgcatctcgtgaagccaagtatgaacgatatgatacctctatggtttattgtggtggaagtttgaaagaagaaattcaagctatccacaacaaccttgaacgacggtaa

SEQ ID NO: 289757 - DNA, 336 bp, Morganella morganii
atgagcaatattccatctatgccgcaattagggatttatgtctcaaaaatcaatcccgctctgcgcatcactgtaaccgacgttgatgttgttgatgacgatgatgattctcctgatgatgaattgttttatttagtccgctggatcgagggggaagatgaaagtgatatgtctgcgatagaatttgagctagacccattcgaatggcaggctttcgctgagtctgagcaattagtgtttgagcgagatccgtacatggattcagtccccgaaaattcaaaccttgcgaaaattcgggatttactcatgaagactaaacagaatgaccgttcttaa

SEQ ID NO: 289758 - DNA, 1020 bp, Morganella morganii
atgggtttgaaagaagatactataaccatcaattcggaagatgatgtttttaggctggtggctcagtacgcggaaggtcatgaaattccggaaaatgtaacatttgaaggctggccgaatttaacttttaggcttacaggcaataagtttaataaaagcatcacgccatctgtaatgaagggctttattgatatgcagtcgcatatcaataaagcgtacgcagcttttaaatatggtgatcagaacaggcgtttgtctaaagaggagttagactcgatagagttggttataactatcgaggaaggctcatctataattgagatcaacattggtggttttttagaatcgcttaaaaaatcggtacttaagaaaatgacaggaaaacagatagcaataacagtgataagcgctgcgttcatctggggagcgtcttcttcttataagtattacctagatactatgcgagaaataaaactgaccgaaataagcaaagaaagtgaaaaacagacactggaatcaattagatttatgtctgaacaggagtctaagcgtatggagctccttacgggggttattgagtccatacctcagctcaagcaacaaaatgagatcgctaccgaatcaaaagctaatttattaaaaaatctgaataaagctgacaccatcgagttcgatgatgttgttttagataatgaattagccaaagaattaacatcaacgaaacgcaaaacttatgctgaaagaagagttgatggcatatataaagttgttaaggttgagccgggtgatcctgcgccatttaaggttacagtgaaaaacgtgactacgggtgagcttgttagctgcgtggttcaggatgtatttttagacgaaaaagaaaacaaagaaataattcaacaaggtgagtgggacagagagccaatcaagctgactataaacgctaaagtattgggtgatgaaataaaatcggcaatcatcattaaagctgaaaagatacccgaaaagaaacctgaagaatga

SEQ ID NO: 289759 - DNA, 513 bp, Morganella morganii
  misc_feature (500)..(509): n is a, c, g, or t
atggaattactgaatataacgaagagcccaaaaaagaagcgcggtacgcaagactctatcttctcagaagaactggagagatccttaccacggaaggatgtgttggtacttgggcatcacctagcgactgagttaggtttttccgatagttgtgacactctaggtaaatggatgtcccatcacctagctgagttgatgcaaaaggctgagcatgaagagagtccagagaaaaaagaaaaataccaacaacaagctgttgagttaatattaaagctatgggggcataggcgtaatatgagtagcaatgcttatccattagctcgttttaggaaaattattgaatcactgagtatattatctcctgaagctaacgtatgggaaaggaacaagttagggaagtatgaatccttagctgcggatacattttcgatgatagttgacttgtatagagcgctgcattttgttgagtttacttcattgaaaatacatagaagtcaccnnnnnnnnnnctga

SEQ ID NO: 289760 - DNA, 858 bp, Morganella morganii
atgaaagcagaatacttaggtgctagagcctccaataccggagatgattttcatgaatggtgggctcttcgtttagcattacaattgctaactccagatacaactttagcggctgtaacagttgaaggcgtaaatcttgatgatggaaataatccacaggaattaacggaatgggactctgttgattgtggcttattttatggtggccatacaatagagcgagctgaaaagattgtcattgagcagctaaagtattctgcatcaacacctgaaaagaattggactgtttcggaactaacaagctctaaatcaaaatcttcaaataacagcattatcaaaggtcttgctgattcatttactgcaatattaaagtccaggccagaactgattagcgctgatgcactaacaatcaagctagtcagtaatcgtcctattggtacagaccttcagaaatcactgtccgattccaaaaatgcaaagtatgaaacactaagggttgctagtggccttaacaaaacaaatttcaaaaattttattaaactcttcgacttttctgactgtggtgctggttctcgttttgagcaggaagaaagcgcaattaatgagattctagctcttacacttagtgctgaccgaggatttgtgctggatttgaaagatcgtattcataagctgatgctgccggaaggcacgggaagttatatcactagagagacagtgctgacatggatgaatgtgtctgaccctcgtgctctattcccatgccccccaagactcaaagcagtagaaaatcctgttaacagacatgcagctgttgcgatacaaactgctatggtttcattgattatttgcaagtag

SEQ ID NO: 289761 - DNA, 588 bp, Morganella morganii
atgtctagaaacacctacaacgagcattacattcagaaaataaaccacacgattcgtaaatctctcctaacacacaatcgtgttgctgctattcgagtggacttgcgctttccttcatcaaatatatttaactttaacgattccagcattattactcgattttttgaatcattaaaagctaaaatagaagctgacctaaaacgtaaaaataaagcatggaagcgtaaccattcatgctcattgttttatgtatgggttagagaattcggtgagataaagaatagaaagcactaccatgtgcttttactattgaacaaagacgtttataaaggtttaggggattttaagaaaacggaaggaacgttatacgcattaatacagcaagcatggtgctgcgctattggtattgattaccctactgatcgttattcagttcaaattccagataaagctgttacttggctagataatagtaatacctacaatgaaaactctatttttgaattaaaccagcgctgtcgttacttagccaaagagcatacaaaatattatggtgatggcgagcgttcttttggatgcagccgttaa

SEQ ID NO: 289762 - DNA, 498 bp, Morganella morganii
atggaagaatcatcttctgcccgtgaccaggaaaagcgggagaaaaagccgaaggaatgcacatcctgtcactacatgaagcctgccggtgtttacgtctgccctaaatgtgggttcaaaccgctggccggtgaagatatcgacgttgatacctcccgcaatatcaaaaaaatgggtaaatccgaaaaggtttacaccaaaaaagacaaacagagcttttactctcagctcaaatattaccagaacatccgcgccaccgaaggaaagccggtcagtgacgggtgggtctcaaatactttcagagataagttcggtgaatggccgcgcagcctgcatgccacaccgcaggaaataaccccggaggtatccaatttcatcacacacaaacgtatccagtgggttaagcgtaaacggaaaaccgaagcactgatgccgcagggaatcgcagatttaaaacagcaactgaataaaaacgcacagcagggagaattattgtga

SEQ ID NO: 289763 - DNA, 258 bp, Morganella morganii
atgaaccgccgttacgggcgctcaaaaatcctgagtgtgatggtcgacagctggcgggatgcctccgggaaactgtgggagccaaatacgctgatcccgatagatattccggtgcttggggtgacggataaattctggacgttgtcggatgtgacctacctgcgggatgccggcgggacacgtgcgacattacagctgatgccgccggaagccttcattgctgaaccgtatgaattttaccaggtaataagggtgtga

SEQ ID NO: 289764 - DNA, 720 bp, Morganella morganii
atgactaataattggtttgatgatgaacaagataatattgaatctttagaaagctggacagatatttcagatgattttcataatgaaaagccaactgtaaaactcaaggatataattaatagaattaaacagcaggatgattttgaggaagaacgcaattggaagagaaccgtcttatcaggtatgtttgagcatgattgtttttatattaaagataagctagatgagttttttccagatgttgaatgttatgacacaagtgaactttataaatatatttacattaataataactatgaagatgggggtatagaagatttttgctttcaagctgcaaacatactatgtaaaagactaggggtatctaaaggattattttttcctttagccttggaaataataatacacattattaaagatagacttgatgacgcacttaatttgtatgtgattttatcataccctaattttgccgcagggatatttgggaattttgaatcagaccttgggcgaaaaggcggaagaccgcaacatatccataaggatgaggcattaaatttaatcaatgagatacttgataaaaatccttttgaaaatattgatattttaacagcaaatgtattccaaaggctgagtgataaatatactgacgctccgagtctttcaacaattaatcggtgggtgaagcgtcttaataggccaaaaccgctattgaattaa

SEQ ID NO: 289765 - DNA, 189 bp, Morganella morganii
atgaaaaacaatgaattagcggtattactggatagccctgtgatggaaatccgcaaactggaatcattgctggttatctggctggaagctgaaagtgagggtgatgtcgccaatatgatcagcgtttcactggattacgtgaaaaatgtccgtgatgccctgtgtaacgcactaggcggtgaaaaatga

SEQ ID NO: 289766 - DNA, 168 bp, Morganella morganii
atgaatatcaagccgcatactttttacacccacaagaacggtgaaacggtcaaggtgctgtccgttcagtttaaccgagtgacgtttatccgtgacgggttcgacagtccggtcatcatgacactgagtcaattcatcaaagaatacacttacgcagggagagcataa

SEQ ID NO: 289767 - DNA, 687 bp, Morganella morganii
ttggacaaggtttcagatgaaaaagtaaatcaaatactcaatatcgtgatgtggattgcatttatattaagtgcggcttctgcttttttttaccagaatggtttattttgtattgtaatgcttgtagtgggtagttgggccagaattatccaagagaaaaaactattaatccatattgtaaccagtaaattatttttatgggtaatgggtattgttttttctgtgggttattttttagcgggaaagcttttgaatattttttttcaagtggaaaatgattatttaaatacttcaccatggatattggcaatcttcctttcatttattcttttttttattttattgcaagcgttagttattgtattttttgttattgctttgttgtttaaagagtttaacgtcacaataaaagtaacagataaaacaaaaaataataccatgggacatataacctggactttggtatgtgcgttaattggtataattccattattgatagcagtatctgaaatgcaacataatgtatttcttattagtatcaggatggatgcgtattcggtgtcggattgcggccccattcgtcaagatgccgcttatttgagaataaatgaaaggcaatgctataagtttgagccttggattagcttaaccccgccagtggtggttgaaagtaaaaaaagcggctaa

SEQ ID NO: 289768 - DNA, 300 bp, Morganella morganii
atggtaatgaccgggataaatgtgatgaaacagaaaagacagcagacggctaaagtgaccgtatcaggaaccattacaaaagcccctcagcgtgtcaggacggcgaccgggaaggcaatggcaacaatgattattcaggcagagagcgaactgcgcagcccctatccgttaacgctggttgcatttgatgacgatgcgctggcgctgatgacctgtcagaaaggaaacagggttaccgctactggttggtcccgctggtataacggctatcagcttactggggtgatggtggaggtataa

SEQ ID NO: 289769 - DNA, 1074 bp, Morganella morganii
atgggtagtaatattttaggtcatgctcaaagagaaatttctggggcaacaacatttggaaaatatgatttccaatatcattgggcattatgcaaaataattgaaaggcataagttaaattctgattatgcattgttaattgaatatcatgaggatgttgttatagctgactcaatgtatggaaacttagcaaaatttgaattctttcaagtaaagaatacgggaaaacctttcacttctgacgccttgactaagagggaaaaaggtgtcaatggatttaagaattctattttaggtaagttattaaattcgtgcatcggtactgattatgaagagcgtattacggaaataggtcttgtatcatcaagtggtttttcatttgatcaaaaagataataagctaaatctagatgttattacatcaggtgatcttagtctggattgtttgtcggggttaactaaaaagttaaaggaagagattggaatagatattctaccaaaaaatataaaatttattgtaccgaaaataaagttagagaatcaagagcaatttgttattggtaaatttgctgagttagttaatgaaatattcccaaatagccattgtaatgctgtaaatatatatagggcaatcattgatgagattcatcgcaaaggacataatacttatgattttactgtttgggaaaaaatggtagaagaaaaatctctaacatctcataaggttaaagacgtcatagctgttaatacaacaagtccacaatttgaatgttttgagagagactttgaatatttagctaaaaatgagatgaaatggagcactttaacttaccgaaaaatcaagaaaaagctgatgcagctttacttacgccgagtcgggcatgctacagcttttgacattaatataatgagaatagctcagcaagcgctcaatagtatccctgcggatgaatttgtagaaaccagtcattatattgaggcagtcatatcgaaagctaaagagctgaacattgaaaaccaaattccagaatatgatgatatagtttgcgaaataatttactgttttttaaggtga

SEQ ID NO: 289770 - DNA, 1734 bp, Morganella morganii
atgagaaacttaatatttcaacgattagttctgctatcagattcgaaaagacttgcgaatcagttcatgttcccgaagagattgaatctaattaccggaaaagataacagcattggtaaatcgactctagccaaaagcttactgtgggctctaggctgtgatcctgttatggatgaagaatggaaatcaaatgatattaaatctatcttatattttactgtaaataacaaagaatatttctcttgtcgaggaagtcattcaataattctgggtattatcggcggtgaagctaaaagatatacgagtataactggcgattattcaaaggacttagcagaacttgtttattttaaaatgaaacttcctaatcgtagtaatggaagcttagagactcctccgccagcatattattttttaccattttatatagaccagatcaaaagctggagttcgccttgggattcatttgaaaatttaagccagtatgtgaaatggaaaaacccattaatcaaatattttacaggttatttgaaaccagagcattttgatattgaagaaaatatttacgaatacagcgaggtaaaaaaagagtcggtagggaaaatagaaaaatttcaaagtgcagttgaggttatagttgataattcatctgattccacaatagccttaggcaatgaggaatttagcagaattcaggaagaaattaatactgagcttcacgaattgatcgactatcaaacgaagctttataatactcaagttacgataacatcaaatatttatgaactcgaaagtcaatacgagctagctattagctcagcaaatgaactagaggaagattataaattttcggtagaatccattcctacagataaattagagtgcccactgtgtggtacgcttcatgataattcattacctcatagagcactgcttctttcagaaaaaaattcattacttgatgaagcaaattcgatagcatctaaaatagtagaacttaaattatcattatctgaattaaatgagagtattcagtttgttaatggtgaagttgaaaggataaacagaaaataccttattgatgatggtttaaataaaaaagatattattgcacaggtaatagataccatatccagtgaaaatgtctcacgaaacattcaagttaaaattgatggtgaagatcttaaaattatcaaagccaacggttctatccaagaattaaaaaaatgtcagaaaaaacttctttcaaccaaagaaaaggaagaattgaattcatcatttatgtcaaaattgttggggaatattgaagcgctagatgcaaaaggagtgaatcttaacaaagtaaaatcaccaaccgattataaacagttgcttggtggtggtgcagctgaggctacaagaggattacttgcttatcaactctctatattacaacaaattcatggtgcgaaaacctgtatcgtgccacctttcatcattgatacacctaatcagcaagagcaggcgggacatcgttatgaaaaagtcattaaagagctaatgtgcagtgtacctcaggactatcaaataatactgtgtgcaatggaaaataatgtattaaatggattcaaacataatgctaatgttattgaactaaattcaaataggattttaatttcttcacaatatgattcactgaaaactgaatataaattaattcaagcgaaagttacgagccaaaatgagaaaaaatga

SEQ ID NO: 289771 - DNA, 369 bp, Morganella morganii
atgaacaaatatcgtgacaaatcagactttgagattaataaggctgtggctgaatataaatatggcattggctgtacagggaaaactcaagggggggatgtcatagtattcactgacagttttactgctgtttttgacccatgcaacaacccggcggacacaatgccgattgttattgagaatggaatatcacttataaattccgacggcgttcactttgcggcggctccagggtgtgggattgaaggctaccttggtggtgatacagttggatatggttcacgtaaatacagtgaaaacgaaaatatctaccgtgccgctatggaagtattcctgatgatgaaggatgcggagaatgaaaaaatatga

SEQ ID NO: 289772 - DNA, 195 bp, Morganella morganii
atggaaccaactgattttgaaaagtggtgtgcgaaagaaatggggtgtccagttgaattcgttgctgccggaagatatcagcacggataccgttatgccgaaattgataacagataccgcgcctacatggccggagtacgcagcaggctgccgtaccagacaccgccaaaaggagatgaagatgaaatggattaa

SEQ ID NO: 289773 - DNA, 405 bp, Morganella morganii
atgatcaaacgcatcctgggatatctgagtaatccgttcactctgagttgggtgatatttgttattggtctcggcatctatgaatactggtggtggttatggcgaatttacgaaaagaagcgcgaggcagagaatgccagatccgaattccgggagtgtgtaacggaaattctgaaacggtggtgctggctcattatcggatgccgggattgtgcggtaccggaattaagtcaccggacatttttggtgcatgggcgtgcagtgcatgtcatgacgaaatcgaccggcgtacgcgcctcacagacgctgagtatgcaaaacagtgtcaccttgagggcgttatccggactcaggcgcagctgctggcagaggggaaaatatcggcatgaaccaatatcaccttaa

SEQ ID NO: 289774 - DNA, 213 bp, Morganella morganii
atgaaagacattgttatcgctgtcatcaagtcaattactatgcttgtgctggcgtttattctgcttcaggcatacagcattaatgcagatcagaagaagcgtgaaattattgctgcggtagttatcagtggtaatgaccctataaaggtagtctgcgcagttgacggaagcacactggcatcccgcaagatgtgcatcgaatccgcaaggtag

SEQ ID NO: 289775 - DNA, 768 bp, Morganella morganii
atgactaatattattcctcttgagtatagcgggcatccagtgcgttttaataacgacgggtggataaacgcgaccgacatagcatctaaatttgggaagttccccaatgaatgggtgcgattacctgaaacaatggcttatattcaggcacttgagcttagatacgggaaaatcccgtatgtaaaaacaagcaaagcaaggaaagataggggcggtggtacatggctgcaccctaaattggctgttcgctttgcccgctggctatcagtagagttcgaaatctggtgcgatgagcagattgacggcctaatcagaaacaacgcgcccatttatactgatgacagaatcaatgcgatcttccttcttgataagccaacggcatgggaaaagcgttttcagcacccgttctatcaggctcttggtcgcatgaccggcttgccttattccgggcacgttggtggctgtccgtcactcttcgggatgataacggcgaagtgggtatatcaggttgtactgcctgagtcggtctatgaggaagcccgtcagatggctaaggatagcggcgataagattcatcagtatctcaagccagatgctcagaggctggttgaaaatcaaatgactgcaataacagtgctggcaaacagttgtcttgactataaggacttcggggctcgctgtatccaggcatttggtaaaacagggatgcaaatgcagatgatttatccggctgaccaaccacataaccatacagcaacactccaatag

SEQ ID NO: 289776 - DNA, 567 bp, Morganella morganii
atgaaattatttatatttctattctccgcattattatactctgttagctacgccaaaaatattcctcttgagaatattagttcgcccgggggtgagctgacctattatatcatgggtgaagaacaacgaaatgatgatgaagaatatgaagggggtaaatctattgagtccatgaatcaccgtactggcgaaaaaatagtattagtgactacaaaaatagataaagatcctgaaaaatctctgtactatttatccggaattaaattatccaaaaattcaaaaacactttactttcattctttagcatgggctacatcctacgctatacattcaatagatttagaaactaataaatctaaattcattactgatggttttttaatttgtatagtgagtggcggaaaataccaagataacttgattattaggcaacatcgatattttatacctgttggttcgcatgaccattattatctgtataataaaaatggtgaatatattggtctaattgctgattcagacctaacagaactggagatgttaaagaaatgtgaatcactcggttaa

SEQ ID NO: 289777 - DNA, 483 bp, Morganella morganii
atgaatgagagtccaaaaatgtatagagcaatgaaaaatagcacttgtgaaacccagataaaaaaaccttcatcaatgtggaaaaaaccaatacaagctaatctatgtatatttattatcatactaaatacaggcgtaactttacttgcattatttatttccggaacaccgggtttaacagggtatgtcggtgaccctaaattatccatgatgatattaataccactgatattaattcaagccattatagtatctttttatagtgagataattgttaggttcttatcaataattgcagcattattaactgcgggaattggtgtgcactatttactaaattatccaaatgaacagttatcattaagtacaaatagctatcagccattggatttcttacttgcattttttattactttatttttaggtattattccggctgtaaatatatttctcaaacccaagaaatcgtcaaggctgtcataa

SEQ ID NO: 289778 - DNA, 210 bp, Morganella morganii
atggttacgctttggggaaattatgaggggatctctcagcgttacgtctctatcccgaaccgtattccggtttatctttattatcagactgcctgggtaaacgcggagaatatcccgcaatatcgcgcggatatttaccgttacgatgacaacagcctgaaaggtattgataaattaactgacattacgcctttcctgataaaaagctga

SEQ ID NO: 289779 - DNA, 1749 bp, Morganella morganii
atggcgatagcccgcaccccggaagcactgcaccgcgtgccgttacaggcagtggatccgcacagtcagccgcgtccgccggtcgtgccggataacgcgccggactttgtcaaaaccgtcactgccatgatgctggccggacgcggcgatgccctgccggtatcggcattcccgccggacggcacctggccttccggcaccacccgctgggaaaaacgcaatatcgcagagatgatccccatctggaaaccgtctctctgtacccagtgcaactattgtgtcgcggcctgtccgcatgcggctatccgcgccaaagtggccgatcccgcggatttcagcggtgcaccggatacactgcagcgtctgccggttaaatcccgcgatatgaaagggatggattatgtccttcaggtcgccccggaggattgcaccggctgtaatctctgttatgaggtctgcccggcaaaagaccgggaggatccgtccgtccgcgccattaatatgcagccgcggctggcgcacctggcagaggaaaaagccaactttgatttcttcctgcaactgccggacactcccgcatcccggcttgagcgcattgatatccggacatcacaacttatcacgccgctgtttgaattctccggcgcctgtgcgggctgcggtgaaacgccgtatatcaaactgctgacccagctgtacggcgaacaactgctgatcgccaatgccaccggttgctcttctatttacggcggtaacctgccgaccacgccgtacaccaccaataaagagggacgcggtccggcctgggccaactcgctgtttgaggataatgccgagttcgggctggggttccgcctgacggctgaccagcacaaaaaacgggtgaaacgtctgctgatgacctttgcggcccaactgcctgatgaattacggcagcggctggcggatgagacactgtctgcggatgaaaaacgtgcggctatcacggaactgcggacattactggcggataacccggatccgcgagcccgtgagctgtcagaggatgcgcattaccttctgccgaaatccgtctggctgatcggcggtgacggctgggcttatgatatcggctttggcgggctcgaccatgtgctgagcagcggtgagaatgtcaatgtgctggtgctcgatacccagtgttactccaacaccggcggccagcaatcaaaagcgacaccgatgggagccgtcactaaattcggggaggagggtaaaggcaaatcccgcaaggatctgggcgtgtccatgatgatgtacggcaatgtgtatgtggcacagatagccatcggcgcccagatgaatcagacggtgaaagcgattcaggaagcggaatcctatcccggcccgtccctgattattgcctacagcccgtgtgaggagcatggttatgatctggcattcagttacgaccagatgaaagccctgaccgccagcgggttctggccgctgtaccggtttgatccgcgtcgtgacggaaccggcaaagcgccgctggtactggattcccgtccgccgtcacaatccctggcggaggtgatgcatcaggagcagcgttttaaccgcctcagcagcagtgatccggcgagagccgctgttctggcggaaaaagcggaacaacggacggcaaaacagtatgcactgcttgaattgctggcctcacagaaatctgaaccggccggaaccggcattgttcaggaggatgcctga

SEQ ID NO: 289780 - DNA, 885 bp, Morganella morganii
atgaatactattgtattagcaattgctctaattagtggttatgtttacgttattaatgcagtatcagaaagatataaatttaagcgttccgaaggttgggacgcttatttttatattgcgatatggggagtgtttttcactatcattgcttgggttatatgttcaattttaagtatctttgatgtgctgagattgacatataattttcttatatcaattgggcttattgacaacgaaactattaatagaatttttccattgtcacagattagtaagccagtaggttcagcgcaatcaatttctgaaatagaaaaacaagcatattatttaaaactggcagatataaaatttgcactattcggtgttgtttcaattttgttgtcttgggtgacaggtaagttagttaaattttatataaataaaaataataatcgtcgtattgaagcgttagtcagagttgttcataacgacccatttgaaagtttattaatagaagccgaagttagacggtttccggtaatcattaccctgagttcaagaaaaatatatgttggtatggtttcatgtcctcaatttgaacatggaaaaattgaatttattgagatactaccattgttaagcgggtatcgtgataaagatgaactgactgtaacgattacgacaaattacaaaagacattatatagaaagtgggattattaatggactgggtgatagtcaattaactctggatgattttcggacattgataccgaaaagtgatattgaaggaatttcattctttgatacatcaacatactcaaaatttaaagatgatgaaaaaaaagataaagaagaatgtagttctttgagacaaaatttcatgcctcaatcaaagcaagaataa

SEQ ID NO: 289781 - DNA, 222 bp, Morganella morganii
atgacaattgcatttaaagttaatatgcctatgtccggatcgaaagaaaggcttaaaaaagccctaaaagataatatcaatgatattactatatctgataacggacgggtttctatccgaagagagattctcttagacgctgtaaagcgtgagttcgataagatagataatggtggtattgcagttgacggccttaaaactaagatggtgaaggtaggctaa

SEQ ID NO: 289782 - DNA, 282 bp, Morganella morganii
atggctaacagggattctattgtacaaatttttaaaaataaatacggaagaacagggtgttacaaagagattagatccgtatcacaaaaattttatggggcagatgtattaaaggacgcactaacttattgtccagaaaggaaattaaaaggaattagtggttcagttaaaagaatagcattgatatcttcttcaagagatgtttttcatagatatataaataaaaagcatgtgaatttcttgcaggctgaattattaggtatggaggtgagctatgtatga

SEQ ID NO: 289783 - DNA, 318 bp, Morganella morganii
atgaaaataattaaaaactatgttactaaagatggtaaggatttatttagtaactactttgtaaaactacgtgacccaattgctaaagcaaagatagccatccgggtaaaccgtcttgctgaagaacatttcggcgatcatcgttcttgtcgtgatggcgtgtgggaacttcgtatcgaccaaggccccggatatcgcgtttactacagtatgataaataatgagattgtgctattgctcctggccggtgataaacgaacccaagataaagatatcgagcttgctacctgctgtttgagagactatttaaagaggtga

SEQ ID NO: 289784 - DNA, 306 bp, Morganella morganii
atgtctaaatcccgcttatacgatgatgcaatggtagagatccttaaaaaggatcccgagtttgctcttgcctatctacatcaagcatttctggacatagatgaagatggtggtcagggcgcttttttaatggcacttcgtcatgtcatcgaagccagaggaggcatggcatcagtggctcaaaaagctggcgtttcacgcgaaaccctttaccgtaccctatcagcaaaaggtaacccgacacttaaaacgttacgaaacgtggtaaatgcaaccggttttccattttcagcacttgtcagttag

SEQ ID NO: 289785 - DNA, 903 bp, Morganella morganii
atgttttattggtttgaccatgttattcccggatggggctctctattaaagtatattggtgggggatgtaataaaaatgttctaaataaatatatttcacagtattcagatgaatttggttcttatgaaccagaaagccatgatgaatattatggcttattatatgatgaaattatctgtaatgataatttgtctgaaccagtatatttaaatatgctaaatatggtgagggtgaatatttcaaagctggacttaagcttgagttttgaaaatttctctagattaattggcatgaataaaatagagttaaacgaagagttgtacaggaattatattctactacatgacatagtattatttgaaaattcagaagtgcttgttacgctgtttagtcagtataaagaaatatttatggaggatcctacattttatcttggagaaagtaatggtgaatatttctttgaaactgtgttatcaaaattaatgaatagtgaattgtttagtttgtcagaaaaagttaagttaactattatatttgataattattatcttgcgtgtgaagaaattaatttatctaaagatatattagttcaggtgttaaggttatctaacaataaggaatttaaagtaaaattatttgccaagcttatttctactggttattctgataaaaaaatgtttgttgatttttgtcagtttatagatgaagaaagtttaaagagtgtatttacacaacggacgcaagcaacaattactgctacagatgaaaataatgttatgaccattttgatacatttgaaagcagtgcatattattaaatcttatcagcaccgcgatgatggaaagttttttgtaagtataaaatcaggtctggcctcagattttgaaatggaatgtgattaa

SEQ ID NO: 289786 - DNA, 231 bp, Morganella morganii
atgccacttaaaattggaatagttaatttagcatcaaaatgctgggtagttcgtcctggtgttagatatcggtttgctagtgagtttattgagaatgagataattgctacagcacatttagataatctacagattaacgagcttacatttagtgacccaataacacaggcaaataaggctagtttacttgaaggttttaatgctataacagcaaagaatgttaagccctga

SEQ ID NO: 289787 - DNA, 2439 bp, Morganella morganii
atgcgggttatccgtataccgtcgaactatgatccggaacaacggacgtattccggtacctgggatggttcgtttaagtgggcgtggaccaataaccccgcctggatcttttacgatatcgtggtttccgatcgcttcggcctcggcgaccgcatcaaaatgcagaatatcgataaatgggaactgtaccgtgttgcaaagtactgtgaccagccggtgccggatggtaagggcggcagcggcactgaaccgcgctatatctgtgatgtgtatgtgcaggatcgcaatgaagcctataccgtactgcgtgattttgcggccatcttccgtggcatgacctactggggcggcaaccagattatcaccctggcggatatgccgcgtgacattgattacagctacaccaaagccaacgtgctcgacgggcgtttcacctattccggcagcagcagtaaggcccgttattcctccgcgctggtgtcgtactccgatccgctgaacggctatgccgatgcgatggagccggtgtttgaaaatgagttggtttaccggttcggctttaatcagctggaaatgacggcaatcggctgtacccggcagtcagaggccaatcgcaaaggccgctggggcattctcaccaataacaaagaccgggtagtgacattcggtgtggggctggacggtaatatcccgcagccgggctacatcattgctgtggcggatgaaaatctgtccgggaaagtgaccggtggccgcgtcagtgcggtgaatggccggagtatcacacttgaccgcaaaccggatgccgcgcctggtgaccggctgatgctgaatctgccatccggcaaatcacaggcccgcactattcagatggtcacagataacgtgatcactgttaccacggaatacagtgaaacgccggagccggaatgtgtctgggtaacagaatcagacgagctgtatgcccagcagtaccgggtggtgagcgtgattgaaaatgatgatggcacattcacgatatccgctgccatgcatgatccggacaaatacgaccatatagacaccggcgcggtactcgatgaacgtccggtcagtgttattccgcccggcaaccagttcccgccgaaagatatcatcattaactcttattctgtcgttaaccaggggatcagcattgaaaccatgcaggttacctggtcaccggcggagaatgccattgcctatgaggcgcagtggcggcgcgatgacggcaactggatcaatgtgccgcgcaatgccaccacttcgtttgacgtgcccggggtgtattcaggccgctatctggtgcgggtcagggcaatcaacgcagcggaaatctccagcggctgggggtattcagaggaaacccggctgaccggcaaggcgggagatccgccagtgccggtgaatttccgtgcgtccacactggtattcgggatcaaactgaactgggaattcgggaaattcaccgaagacaccctgaaaaccgaaattcagtacagcaaaaccaacgatggccagaatctgttgctattggccgatgtgccgtacccgtcccgctctcacgaactggccggtctggccgccggtaccgcgttttatttccgcgccaggctggtggataaaaccggcaaccagtctccctggactgagtttgtacgcggtgtggcccagttcgatgcatcgaccattattgatgacgtggccgccgggttgggcgactcacaaatcatcaaagacctgcagtcgcaggcggatgataattttgaggccattatcaacaacgccaacaacgcttacggtcagtggggttactggcagcgtgaaagcggcgcgatgaaagccgagattatcgaagtccgcaactacacggtcacggaaacgaaggcacttgcagagaaactggacgcggttaaggtgactgcagacgacggtttcgccatggcacaaaactccattcgcgcgcagtgggacatggccgccggtgaagcatccgttgttcacgatatgaaagtccggatccgttataacggtgaggattattccgccggtatggtgatcggggctgagctgaaaggcggtcaggtgaacacgcttatcgggtttaacgcgcagcagtttgcgttttataatccggtgaaaaaatcgatggacatgttcatgtacatgaaggacggacaggtctttatgcgtgaggcgttcattaatcaggcatggcttaacagtgtggttgtcactgacaaaatgcagtcggagaactatgtgccgggtaaacagggttttattctggatgcaaaggctaataaatttgagttctttgacggaacaacaacaaacggtaccggtattacagcgggcggtattaaagtatatgacaataaccggctgacggtcattattggtgatatatcggggtattaa

SEQ ID NO: 289788 - DNA, 234 bp, Morganella morganii; identical to SEQ ID NO: 7183

SEQ ID NO: 289789 - DNA, 531 bp, Morganella morganii; identical to SEQ ID NO: 289602

SEQ ID NO: 289790 - DNA, 357 bp, Morganella morganii; identical to SEQ ID NO: 289601

SEQ ID NO: 289791 - DNA, 915 bp, Morganella morganii
atgccaaatacaattcattaccctcatgtaataccatttatatcccaaggaaaaataaatgctataaaaagcacgtttggtaataacctgtctgatagggagtgctacgggatatatatatggagccagaaagcctcatctgccatatatccattactgcaacaactcgaagttactttgagaaactcgattgataaagaagcgacaaaactaataggccaaaaatggtgggataatgtatacaccgacacatcaaaaagcaaacacggtgacttcatacataatataaacaaagcaaaaagaagatatgagaatgaattcaagaaaaaaaacccatcaatggcaaataccaaaataattgcacctcatgatgacatcattgcacacacagatttttacacatggcaagcggttttgagcgatgcttttcatacacaatcaagatctgaagcatcaagagccttatggcccaggctcacctacagagtactgaagggattagatagaagcaaagatgaaggcacagccagaattgatttcttaaacgagctgaatgagatcagaaactacagaaataggttatcgcataatgattgcatatggataaaaatacactctaaaaatttgcaatctgcagtagaaacaataagagaaaaaataaacaaaatagaaggactgataaaaacgataaacccacaggtacacctatcattaacgaagtggggttccttttatcacgccaaaagaatatgttctcaaaaagaggccgaattgcatctaggcaaaggaataatcaatagcacaacagatgagatgaacacaattctagatcaactatacgcactaactgctgacggaaagctaacgggtgttgtaaaacgaaataccaacaatatcgcatttcacaagttttag

SEQ ID NO: 289792 - DNA, 594 bp, Morganella morganii
atgagcggtagaaaatttggcaggcttccaaactggtgggcccgaagctcatggcttgtaaacaatgttcgttcaaatgagatagggggcggcattgcatcaatgaaatgcttgttagctctatccgtcttgattgatttccattcaagaacagcctccgtatcatttaccggaatggaaagactgactggactaagccgccccatgatagtgaaaggagtagccaaacttgagaaagatggtcttataaagatagatagagagatgtttgttaactcctatgaattaacagtacagccaaatgatgataggtgggcaaaagtaccagtagatactatcaggaaaaaactaaacaccatatcgaacagggggatggccccatttgtggcattaaaactatatttaacaattataagccttcgttatcagtcaaataatactgttaaggtgacacatgaaacactgagaagctatacaggtgtccagccaaaccagattaggttcggcttagatgtactgtactgtagtcgcctgatacatctgcaaccaaaagaagatagagagtcaaacatctatgaaataatcggcctatga

SEQ ID NO: 289793 - DNA, 165 bp, Morganella morganii
atggcgcgatttatcaaaagccagagcctgacactgcttgaaaaactggatgctctggatgccgacgaacaggcagccatgtgcgaacgactgcacgaactcgcggaagaactccagaacagcatccaggttcgctttgagaccgaaagtgaaacaggaacataa

SEQ ID NO: 289794 - DNA, 192 bp, Morganella morganii; identical to SEQ ID NO: 31981

SEQ ID NO: 289795 - DNA, 915 bp, Morganella morganii; identical to SEQ ID NO: 289791

SEQ ID NO: 289796 - DNA, 594 bp, Morganella morganii; identical to SEQ ID NO: 289792

SEQ ID NO: 289797 - DNA, 165 bp, Morganella morganii; identical to SEQ ID NO: 289793

SEQ ID NO: 289798 - DNA, 867 bp, Morganella morganii; identical to SEQ ID NO: 7185

SEQ ID NO: 289799 - DNA, 1053 bp, Morganella morganii; identical to SEQ ID NO: 7184

SEQ ID NO: 289800 - DNA, 192 bp, Morganella morganii
atgcgcatgtctgacaaatattccagccctacagcatacgcctggggacttataacctctgcttttggcgttttatctctggaccagtgggctattgttgccgggatcatctgtactgtcgggacgttcctggtgaactggtattacaaacggaaagaatttcagctgaaagccggagaacatcatgaataa

SEQ ID NO: 289801 - DNA, 180 bp, Morganella morganii
atgcaactcgtcatggtgaatgcgacacagcgggatggtgaaaatgtcgtgtgcttttgtaccggtaccgccgatgccatgaccgatgatgtgatgcgggtcgtccgcctggtgaccgcacacacaacatggctggcttttcacccactgcaggtatttcagacactcccagcgctttaa

SEQ ID NO: 289802 - DNA, 321 bp, Morganella morganii; identical to SEQ ID NO: 67344

SEQ ID NO: 289803 - DNA, 246 bp, Morganella morganii
gtgaaccagtgttccggcctcaccaacttcacaggcggccaccagattgtcgcgctgggtgataacatccggcgcgtcataaacgagactgtcctgaatcaggaatccctttatggtgatccggcgattgctacgacccatatcctctatccaggactgatcgcggtacgcatattcgtgaatagcctgccggcggccgaaaacactttcaccgctgataacaccgaacggcacaccacgaaatga

SEQ ID NO: 289804 - DNA, 435 bp, Morganella morganii
atgtgccgcttctttcagccactgcccgaacgtcagttcaccggttttttcgctgccagtgatggcgaacactttcaggccggactcgatcaccaccagctcaaattcaaacaccctgccgctttctgcgttctcagacacccgcagaccgctttcagtcacgctgacggtcatttccccgagcgtcgggtgaaccagcgttccggcctcaccgacttcacaggcggccaccagattatcgcgctgggtgataacatccggcgcgtcataaacgagactgtcctgaatcagaaatccctttatggtgatccgccggttgctgcgccccatgtcctctatccaggactgatcgcggtacgcatattcgtgaatagcctgccggcggccaaaaacactttcaccgctgatcacaccgaacggcacaccacggaatga

SEQ ID NO: 289805 - DNA, 1269 bp, Morganella morganii
atgagtattcatagtgccgatacaaataaatcacccggactgaccagcggaaccatgcttgttatagcaacagtcgttggcggcggtatgttttctttgccgattgcgatggccggtgtctggttttccggtgccaccgttattttgattttagttgcaattatgatgttactgaccggtctgatgttagttgaagttaacctgcattttgaaccgggcgccagctttaataccttcaccaccgagttactgggcaaaaaatggaatattgtcgtgggtattgccttcgggtttgtactctatattctgacgtatgcctatatatccgggtcatccgctgttctgactcagacgatattaaaatataccggtgtcgccctgccgataaaagccgcggtcgtgattgtcgcctgtctggtggctgcgattgtctggtacagctcattatgggtcggacgtattaccaccattttaattttcggtaagtttatcgcgttctttgccaccttctccggactggttgcacacgtggaaattgccaatctgctggattccgcatcagtggcaatacccggaacgaaatatctgccttatgttctgatgacactgccgttctgtattatttcgtttggcttccacggtaacgtgccgagcctggtgaagttgtacggcaaaaccaaattccgctttattacccgttcaattattatcgggacaatatttgcggtactgctgtatatcttctggctgggggtcacgatgggcaacatcagccgtgccaacttctccccgattattgccaaaggcgggaacattgatgtgttcgttgaggctctcggcgggaggatgtcagggaaaaccatggatcttatcctgacattcttcggtaactttgcggtggccagttccctgctggcagcaacactcggcctgtttgactatattgccgacctgctgaactttaaaaatgacagcgccggtcgtttcaaaacagcggtagtgacgtatctgccaccggcggtggtgtgtttcttcttcccgaacggattcgtttatgccatcggttatgccggtctggcctttactatctggagtgtgattttaccgccgttcctggtaaaagcctcccgcaaacgctacagcgacagcgataccatttaccgttcgccgtgtaacagcgcggtactgaatctggtgattgtctgcggtgcgattgtgtatctgacggtcattctggatgtgttcggctggctgccggcatttaaataa

SEQ ID NO: 289806 - DNA, 1320 bp, Morganella morganii
atgatccctcgcgaagagcgtatcaaaagaatgaaagaggccgggtacaacactttcttgttgaattccaaagacgtttatgtcgatttactgaccgatagcggcaccaacgccatgtccgataaacaatgggccggcatgatgatgggtgacgaagcatacgcgggcagcgaaaacttcttccatctggaaagaactgttcaggaattattcggctttaaacacatcgttcctactcaccagggccgcggggcagagaacttactctctatattagctatcaaaccgggtcagtatgttgcaggtaacatgtatttcacaaccacccgttatcaccaggaaaaaaatggtgcgacattcatcgatatcgtccgcgatgaagctcacgatgcgggcctggatgtgaaattcaaaggcaacatcgacattaaaaaactggaaaaactgattgctgagaaaggcgcggaaaatatcgcttatatctgtctggcggtaaccgtaaacctggcaggtggtcagccggtctctatggcaaacatgcgtgaagtccgccagttatgtgacaagcacggcatcaaagtgttctacgatgcgacccgctgtgtggaaaacgcctacttcatcaaagagcaggaagaaggcttcgaagatgtctccattaaagacatcgttcacgaaatgttcagctacgctgacggttgtaccatgagtggtaagaaagactgtctggtgaacatcggtggtttcctgtgtatgaacgacgacgacatgttctctgctgcacgtgaactggttgtggtttatgaagggatgccttcttacggtggtctggccggtcgtgatatggaagcgatggctattggtttacgcgaagcgatgcagttcgaatacatcgagcaccgcgtcaagcaggttcgttacctgggcgaaaaactgaaagctgccggtgtaccgattgttgagccggtcggcggccacgcagtattcctcgatgcacgccgtttctgcccgcatctgacccaggatgagttcccggcacagagcctggcagccagcatctacatggaaaccggtgtacgttctatggagcgcggtattatctccgcaggccgtaacaaagaaaccggcgaccatcaccgtccgaagctggaaaccgttcgtctgactattcctcgtcgtgtatacacctatgcacacatggatctggttgctgacggtattatcaaactgttcaaacacaaagaagacattaaagggctgaagttcgtatacgagccgaagcagttacgtttcttcactgcacgctttgattacgtgtaa

SEQ ID NO: 289807 - DNA, 789 bp, Morganella morganii
atgagcaatctgattattgtcgatggtattaatgtgcgccgtgatatggccggtcgctattgtctgaatgatttacaccgtgcagctggtggagaggaaaggcataaaccaccttactggctgagaaatgcacagacagagcaacttattgccgagttgcaaatctgcgactcgggtacacagccggtaaatgtgctgcgtggtggcaccgaacagggcacctatgtgtgcaaagaactggtttatgcctatgcgatgtggatcagtccttcattcaatctgaaagtgatccgtacgttcgatgtggtggccggaacacagcaggcgatacagctggctgataaagttcaggccggagctatcctgctggagtctatggcgaaaacattgaacctgtcgaattcctcaaggctggctgggtatcagaagctgcaaaagatggctgatcttcctgatctggctccgtcctatgcgattgatgcaccggctggcgcggtggatggttccagcagaccgacaacgtccctgactacgttgctgaaaaatcacaatgccgcattgtctgcgaccagagcatacaaacgtcttgctgagctggggattgtggagcagaaagcccggcccggatccagaggtacacagcgcctgttctggtcgataacgacgcgtggactggcatacggtaaaaacatgacatccccggcaaatccgcgggaaacgcagccgcatttctttgagagcaaatcagcggaactgctggcactgatgatgactccggcggtggcctga

SEQ ID NO: 289808 - DNA, 381 bp, Morganella morganii
atgaccgttaaattccaggaagccatactgggcgatcagttctgctttaatgacattcggtgtgacgattgctgcccccagtgcaaagcgggtgccatcttctgccagcttcatacgcccgaatttactggtcacctgggtgcgcagatagcgggagacaaacatcagcagatacagcgtttccacctgaaggtaactgtcgtcattatcgccgtaggcatttttctggtaggtcgtgatgatattctcaatccgcacggtaccgtcatcatccacggtaaatgtggagataccactgtgcagcaggttgttgcgctcagtcagttcaaaaatctttgtgtcgtccggcggcagcacaccactgataacgagcgtctgtag

SEQ ID NO: 289809 - DNA, 258 bp, Morganella morganii
gtggcggcatggggagcgatgcataccgggttggccatgaccggcgtatccatgattttgggcggcattatccagatgctgtccccgcagccgggcgggcttgccatgaaagaccagggcgaaaacaaaccgtcctatgcgttcggcgcaccgacgaacaccgtttctcagggttatccggtaccgatcggttacggtaaacgccgcatcggcggagccgttatctcagccggtatttacgtcgaagatcagcagtaa

SEQ ID NO: 289810 - DNA, 186 bp, Morganella morganii
atggacggtgaaagcggtatcaataccacccgtccgatcctcggtgtgcgcgatgttatttttactgtgccgccggtgaaaggggatcgggtatttatctacagcatcagcaccctgtttgtggtatccgatgtgcagcctgacagccacggcgggacgcatctgatcctgaataaggtgaaataa

SEQ ID NO: 289811 - DNA, 186 bp, Morganella morganii
atggacggtgaaagtggtatcaataccacccgtccgatcctcggtgtacgcgatgttatttttactgtgcctccggcgaaaggggatcgggtatttgtctacagcgtcagcactctgtttgtggtatccgatgtgcagccggacagtcacggcgggacacacctgatcctgaataaggtgaaataa

SEQ ID NO: 289812 - DNA, 264 bp, Morganella morganii
gtggattatccctggtgggagcagggtgagaaccgttacgccgataactggcgggaagcggggtttattcaggtcgatgatccgcagcccggtgatgtcatcgtgatgcaggtgcaggcaccggtcgccaatcatgccggtattctgctggatgataatatgctgcttcatcatttgtacggacacctgagccagcggatgccgtatggcggttattggcgtgatcgtacagtgatggtactgcatcatgagcaactgatatga

SEQ ID NO: 289813 - DNA, 162 bp, Morganella morganii
atggcgcaactgctgatggatctggatatcgagtattaccaggggccggaggaattctacccggttgatgcggatccgctaaccggtatcgacatcagcgttcagatgcctgacggcagcccggaacatcacgtctccatcgacctgactaatcaggagtaa

SEQ ID NO: 289814 - DNA, 984 bp, Morganella morganii
atgagcgctttgtacggatccgcttttcagggaacagatcccatctgccgggtacagtttgacggagaaggcggttgcacgccggtggatgtcaacgccgttgccgggataaaagaaccggtgtggctgcacctggactatttatccgcggataaccagcgctggctgcgtgaaacggagctgttgccgccgcaggcgcgtgacgggctgacaaacaatgttatccgccccaggacactccgtattggtgagggtgcattaattaccctgcaaaccatcaacaataatgacggcgaccggcctgatcagctggtggcattccgtatctggatctgcggcagttatattatctccacccgccaccgtaaagtgcactccattcagaccattcaggatgatttacaaaacggtgaaggcgcaaaaaataccggagaatggctggcggaagcggcgttctgcattaccgacgaagtggcagattttattgaggacttgcacgataccctgattgatatggaagatgcgatactcgatcagcatattccggcacgcggggagctggcactgctgcgcaagcagctgattgtcctgcgccgctacatggcaccgcagcgggatgtattttcccggctggcctccgagcgttacacctggctctcagagcaggacagacatcagctgacggatgtcagtgaccgcctggggcggattattgacgatattgactcctgtatcgcgcggacatcggttatctcggatgaaatcaccaatatgatggcggatgcgatgaaccggcgtacttataccatgtcgctgctggcgatggtttttctgccgacaacctttctgaccggattgttcggggtcaacctcggcgggatcccggggggcgatttcccgtttgccttcagtttgttctgtgtgggactggcgggtgttatcggatttgttgcctggtggttacgtaagagtaactggttgtaa

SEQ ID NO: 289815 - DNA, 468 bp, Morganella morganii
atgtctagcaaatatgaaaaaacgcagggcacgaaaatcagtatttcaaaactgccggcaacagaagccaatcccgcatctgctgagtttctgccgctggcctgcgcggctaaggagatcggttataccggcgggcagaaatcggatattgatgtcaccaccctgtgttcgactgagcaggaaatgactaatggcctggcatccccgggggaggtcacaatttcaggtaactggtctcctgatgaggggcaggaagcgctgcgtactgcctatgacaatgacactattcatgcgttcaaagtggagtttccgtcaggtaatggttatgccttcctggcggaagtccgtcagaacagctggagtgtggcaaccagcggggtagtcaccgcgtctttcacgctgcgcatgaaaggtaagcctgttccgctgaaaaacgggacggtaactgagccgggaaagggggaataa

SEQ ID NO: 289816 - DNA, 789 bp, Morganella morganii
atgagcaatctgattattgtcgatggtattaatgtgcgccgggatatggccggtcgctattgcctgaatgatttgcaccgggccgctggtggagaggaaaggcataaaccaccttactggctgagaaatgctcagacagagcaacttattgccgagttgcaaatctgcgactcgggtacacagccggtaaatgtgctgcgtggtggcaccgaacagggcacctacgtgtgcaaagaattggtttatgcctatgcgatgtggatcagtccttcattcaatctgaaagtgatccgcacgttcgatgtggtggccggaacaccgcaggcggtacagctggccgataaggtacaggcaggtgctatcctgctggagtctatggcgaaaacgctgaatctgtcgaattcctcaaaactgggcgggtatcagaaactgcaaaaaatggctggtcttccggacctggctccctcctatgcgattgatgcaccggcgggtgcggtagatggctccagcagaccgacaacctctctgactacgctgctgaaaaatcacaatgccgcattgtctgcgaccagagcatataaacgtcttgctgagctggggattgtcgaacagaaagcccgtccgggttcgaagggaacacaaaaactgttctggtctgttacatcaaaggggcttctgtacggcaaaaatatcacatctccggcgaacccgagggaaacgcagccgcatttctttgagagcaaatcagcggaactgctggcactgatgatgattccggcggtggcctga

SEQ ID NO: 289817 - DNA, 1017 bp, Morganella morganii
atgaattacctgttaaccggctttgttcagaaagatacccggatcctgatgtttaatcccggtgctgagatttgcaacttccggaacggtgcccgttatgttgtcagtgcggctccccgttcaatggatggcattccgtccggccgcgttccggcagatgcacagccgctgctgacagatgagcgggtactgcgtttcctggacaatcccgccgtggtaaaagctgccggtggtttacagggatttcgtcattacgtttcatcagtaaatcattgccagattgatgacgaagcagatccgtatcatcaccatgaactgaccatgacccgccacaaagacggttttatccggacgtgctggcatcatgacaatattctcaggaagggggaatgctgccagcagcaggcggacaaaattctgttaagcaaccagcaggcatttgtggcacgcagtatctttaccgacctgcggctgcccggcggccatattctgaatccttccgatttgttcacctggtctgtgatgcatcgtgtcagtgagcatcttccggcctttatctgctcttacattctgatgcagtcaccggaagaagagataaccggcaccatgacggagcattccatcgttcaccggacacgctcacacagccggattgttcaggacatcgtagagcagataaaaccggtcgttgttcctgagatagagccggagccaccagcaagttttatgcggatcccgaagttaaagcgctgggagtgtccgaagtacctgcaatgggtgaagagtcagccgtgttgcgtatgtggtcagcaggcagatgacccgcatcacatcatcgggcacggcaccggcggtaccggcacaaaggcacacgacattttcaccatcccgctgtgccgtattcaccatgacgagttacaccgggatgtgaacgcctgggagcggaaacacggcagtcagcaggagttgttatttagatttatgaaccggtcatacgggatcggcgtttttggttaa

SEQ ID NO: 289818 - DNA, 885 bp, Morganella morganii
atgagcatgattttaactgcgcgggctttgcagataaaaaccggcaatgcgctgcgcaaactggtactggtaaagctggcggataacgccaacgaccagggcgagtcgtggccgtctgtgccgtacatcgcagagcagtgcgaaatgtcagagcgttcagtgcagaaccacattaatgccttggtagaaatggggctggttcgtatcgaatcccgtaaatcggccaacggtctgaatcagtcaaatatctatcatctgcgcctgaatgctgccgttgtgagtggtgaatctcctgcaccatatggtgcaaatcctgcaggggggagtggtgcaaatggttccgggactggtgcagcagattcaccaggtggtgcaactggttccgatagtggtgcaggagctgcacccagaatcagtcatgatccagtcatagatccagataataaaaatattaatcctgttcgcggaaaagccaaaagcaaaaccgtgatgccggaaaacttcgccccgtcaccagaacacactgaacgggcaaaaactgccggattggatgttcaggatgagtttggcaaattcagggactaccacgccagcaagggcactcaatacgctgactggaacgctgggtttaattactggctgagacaggccgaaggatttaaacgcgctgcggactcaaagaacatcgacaccaccgagtgcgatgaagtcttcagaaaaatgttctcatcctccaactggaagccagaaaaccgcgtacaggagctggtagcaaaacacaaatcccacattgggcggatgaatgaaattgccggacgggccgcattccgcgggtactggaaacaggccacagagcaggccgcaaaagaacgggaggcagcatga

SEQ ID NO: 289819 - DNA, 192 bp, Morganella morganii
atgcctaaagaaacagctgacaatctggatcggtattacaccaacagccgcgggcggaaagttcacgttgtccggtttgaccggcaaaatagtcgggtgattttcatgcgtgagggctatgaacatccgtgttttgaacctctgaaaacctttcaggagcggtatacacgtgtggatgaggtgaaaccatga

SEQ ID NO: 289820 - DNA, 999 bp, Morganella morganii
  misc_feature (305)..(314): n is a, c, g, or t
atgcttacaattatcggcggttcaggctttattggtactcgcctgtccacacaattacaaaaagacaatatcccgttcaagatcgttgatattgagaaaagtactgcatttcctgatcattgggaatttggggatgtaactaaaccagaatctctggttgagccactgacaggttcagacgttattattaatctggctgcaaagcacaaagataatgtgcatcctatcagtctttactatgatgtgaatgttgatggtgctaagcatgtatgtgatgtcgctgcccggcttggaaacaaacacannnnnnnnnntgtcgctgcccggcttggaatcaaacacatcgtctttacatcctctgtggctgtttacggttttgttgaaaaagaaaccggtgaagatggcgcatatgagccattcaatgattacggtaaatccaaattagctgccgaacatgtctatgatgcctggcaggcagaagaagaagatcgcacactggtgacaatccgcccgactgtggtatttggtgagaataaccgtggcaatgtctataatttattccgccagattgcatctggtcgtttcctgatgattggtggtggtaaaaaccaaaaatcgatggcttatgttgaaaatattgctgcattcttaaaatttgctactacctttaattcaggtcgccatgtatttaactatgtcgataagcctgattttaatatggaagaccttacagatattatctgcaaagcgatggataagcataagtctaatatccatgtaccctacagcgttggcctgcttggtggttactgctttgatatcctggcaaaagtaactggcaaggaattcccgataagcagtatccgcattaaaaaattctgtgcccgtactcagtttaaatctgattttattgctgataccggatttgttgccccggtaagcctggaacagggaattgctaatactgttcgttatgagttcaaagaaccaaaaagatga

SEQ ID NO: 289821 - DNA, 960 bp, Morganella morganii
ttgattgctgcttattgcgccacattatccgcatggagtaaaagccctgagttaacaattaatttgacattatttaatcggcatcctgtacatcctcaaataaatgaagtacttggtgattttacctcattacaattactcgattggtatacctgtgatctttggtcaaacagtatctcaatgatgcaaaaacgtttacataaagatatgcaacatcgtagtgtttcagccattaaagtaatgcgtgaaatggcaattcaacgacagatgtctcatatagagatacctgtcgtttttacctgtgcattgggctataaacatgatgaaggttttctttctcatcattcatggctaaaacctgtttggggaatatcacaaacaccacaaacatggctagatcatcaagtatatgagtcagacggtgaattatatttaaactgggattttgtcgaacaattatttgactacacaaccattttttccatgttccagcaatatgaacatatactcactaaactggctactgaaccacaatcttggcaattgccactaaataaacttataccaagatgcaataatctcgtcatcaccccagttttcaatgccaaaaataatcaaaacacacattataaacaatctactgatacacaaaaaacaggtcagacaatacaaaaactacaacaacttgttaagcaagttattggaataacgttagcacctgaaacaaattttttcgaagcaggtgccagctctttacaattggttcaacttcatgcagcactacaaaaaaatggctatagccatattacaattactgatctgttcgctagtccaaatctaagtacattagcgcaattgctttggcaaaacacttcaccaacatgtgagcaatattccgaccgagacaaacacaaaaacaagagaaagaaacggttacaactacgaactcatagtagataa

SEQ ID NO: 289822 - DNA, 468 bp, Morganella morganii
atgccgagcaaatatgaaaaaacgcagggcacgaaaatcagtatttcaaagctgcctgcaacagaagtgaaccccgcatccgcagaatttctgccgctggcctgtgcggccaaagagatcagttataccggtgggcagaagtcggatattgatgttaccaccctgtgctcaacggagcaggaaatgaccaacgggctggcctctccgggggaaatcacgatctccggtaactggtcaccggatgagggccaggaagttctgcgtactgcctatgacaaagatactattcatgcgttcaaagtggagtttccgtcaggtaatggttatgccttcctggctgaagtccgtcagaacagctggagtgcggcaaccagcgggctggtcaccgcgtctttcactctgcgtatgaaaggtaagcctgttccgctgaaaaacgggacggtaactgagccgggaaagagggaataa

SEQ ID NO: 289823 - DNA, 438 bp, Morganella morganii
atgacgactttatcaaaagcatttccaggaattaatgttgggtattcagaccacacatcaggaatagaaatcccgatagctgcagtagcactaggggcgaaagtgatcgagaagcactttactttagataaaactatggaaggtccggatcataaagccagcttagaaccaaatgaattaaaatcgatggttgatgcaatcagaaatattgaattagcattaggtgatggttggaaaaaaccaacaccagcagaactcaataatagggatattgtcagaaaaagtattgttgcaaatcaaataattcagcagggcactcgtatagaaagccacatgcttgcaattaaacgtccaggaaatggaatttctccagtaagatgggatgaaatagtcggttcaattgctaaaaagaattatagtgaaggagaacttatttaa

SEQ ID NO: 289824 - DNA, 201 bp, Morganella morganii
atgctattaggaggaggaagaacatcatcacctaatgatagcttattaacgtttaaatctaaattctcacctctaacacttccattttatattgggggactagattacttacccgatgaaaagaaaaacttaaatgaaatctgggaaagacaaaaaaaatccaatgaacatttaaatttattccaacagtatagagcgtga

SEQ ID NO: 289825 - DNA, 216 bp, Morganella morganii
gtggaattattcaaaatccagacaaacctcggcgcacatcaggggcagctttccgagttaatcaaaaagagcctggaggatgatgttctgacggaagaagaaatgacggccatctacaaaaagatgaacaaagtgttcgcatacgcccgtgggtttattgcgtcactgaatgtggtttacggggtgggaaatgattcaggtaaccagaaagggtga

SEQ ID NO: 289826 - DNA, 597 bp, Morganella morganii
atgaaaaaaatattgttgtgcctttttttaattcacacggatactgcatactcagcgaattgtgagctcgatactcaggattcggcattatgcgaggcggcaaatggtggtgacgctggtgcccaggttacaatcggatcttattactactacggtaatggtgctcccatagattataaaacggcgactgactggtatacaaaagctgcggtacaggggaatgagtacgcacaatattctctgggggagatgtattttcagggggagggagtgcaacaggattaccggcaggctattgagtgggttcataaatcaggtgagcagggaaatgcattttctcaataccagcttgcgaaaatgtattattatgggaagggaatagaacagaattaccgcgttgcagcggagtggtataagaaagcggccgatcaaaaatatgcatttgcactggcaaagttggcagagatgcatctctctggggaaggcgttgaaaaaagccaaccaaaggccgggtcattgtatgatgaagcatgttttggtgggtttcaatcggcatgtgacagccttgcgaagctgaataaaaaaaaccagcactaa

SEQ ID NO: 289827 - DNA, 438 bp, Morganella morganii; identical to SEQ ID NO: 280050

SEQ ID NO: 289828 - DNA, 240 bp, Morganella morganii
atgaacagccagactgccaataccgctttaaaacgtattggttatggaggtaaattagttgcatatgggttacgttccattaaaagcactgcaatgaatgaagcaaattttaactctgatgttatagaaacagctcttgctcattgtgataaaaatgaagttagaagagcatataaccagagtacttatctggagcagatgcaatcgatgatgggatggtgggtgtattttgtcaaataa

SEQ ID NO: 289829 - DNA, 633 bp, Morganella morganii
atgtctcagtatcatctcgaatttgaaaaaccaatcattgagctggaagaaaaaatcgccgcattgcagtcatttaaagagcgcagcagcgatttggggtttgatccggatgatgaaattgcctgcctgcggaaaaaatgcgaaaaactgactcaatcgatttatgcggatctcggtgcatgggagattgtccggctggcccgtcacccgctgcggccctataccctggattatatcagtcttatttttacggattttcaggcgcttgccggtgatcgcgcctttgcggatgataaagcaattgtcggcgggctggcacgccttgaaggccgtccggtgatggttatcggtcatcagaaagggcgggatactaaagaaaagttactgcgcaatttcggcatgccgtcaccggaaggctaccgcaaggcgctgcgtctgatgaaaatggctgaacgttttcatatgccggtgctgatgtttatcgattccgccggtgcctatcccggcgaaggctgctccggcggggcgctggggattggggtcggcgatcgtatcaatatgctgcaatacagtacctatgcggcgatttcgccggaagggtgcgcctcttattctgtggaaaagcgcggataa

SEQ ID NO: 289830 - DNA, 699 bp, Morganella morganii; identical to SEQ ID NO: 277961

SEQ ID NO: 289831 - DNA, 693 bp, Morganella morganii
atgacaccgcgtttagaatacggcgagatggtgatatccactgccgaaaatgattacctgttccgcccgtcgctggatgccatgacgcgaatcggtgagcctaaagagattgtgagtgcgtttacgcaattaaatggcgcagaggtacaacaaattatagcgtctgctgtagacgcttacggagtggttcctgaatggctgattgcactgttaaataaaccggtttacgggcgcagcattttatcgacagcaatggacgtgatgcaggcatgttgtaacgatgactgttctgaggttatcggtgaatggcgggttggcaaatccggcatggtgtaccggcgcggcgctatgcattatcgcgatatcatcctgctggcgcgcgagctaatgacccacggcattatcggtaaagctaaggtgcgcaaactccagcgcaacgaaggtaaagacgaatactccgacgagttccacgccgtcgattacatcagtgccgcccgtgtgcatttcaacatcacccgcagcgaagcggaacaactcacaatgaccgagttcgtgatgatgctgaaagcgaaatatccggatgagaaaggcttcacgaaagatgagtatgaggctatcaccaaggccgatgatgtccgtaacgatgacctgattaagggcaagcgccggttggtgagcaggaagacagtttaa

SEQ ID NO: 289832 - DNA, 477 bp, Morganella morganii
gtggaccacggatgcctgaccggatgccatatcccactgcgcgcggatggagttctgcgccagcgccagtccgtcttctgctttaacctgtaccgcgtccagtttctctgcaagtgccgttgtttccgtgaccgtatagttgcggacttcgatgatttctgctttcatcgcgccggtttcacgctgccagtaattccactggccataggcgttgttggcgttattgatgatggcctcaaaattatcatccgcctgcgactgcaggtctttgatgatttgagagtcgctcagtccggcggccacttcatcaataatgttcgatgcatcgaactcggacacaccacgcacaaagtcagtccagggggactggttaccggttttatccaccagccgggcgcggaaataaaacgcggtaccggcggccaggccggccagttcgtgagagccggacgggtacggcacatcagccagcagtaa

SEQ ID NO: 289833 - DNA, 351 bp, Morganella morganii
atgttacttatcaccgctgattccgcagagcctcagcgtattcagggagcatatatcagcgacagcgatatacataatgctgttgatttctgcaaaaaatggggggatgtcagctatcttaataccggaaaaacagttgtacggaacacctgtgatttagatcctctgtttgacagggctgttcagtttgtcacagaaacacaacaggtttcaatatccggcattcagggggaattccgcattggctacaatcgcgcagccagagtcgttgaggaaatggaagagtcgggaatcatcagcgaaccatgttcagacggaagacgggaagttttagttccgggtcttttttga

SEQ ID NO: 289834 - DNA, 570 bp, Morganella morganii
atggacgaaaaaaaactcaaagccctcgcggctgaactggccaaaggcctgaaaacagaagatgatctcaatcagctttccatgatgctcaaaaagctcaccgtcgaaaccgcactgaatgccgagctgactgaccatctcggtcatgagaaaaatgcttcaaaatcaggctctaatacccgtaacggatattcctctaaaacgatcctgacggatgacggtgagtttgaactgaccacaccccgtgaccgtgaagggacgtttgaaccacagttaatcaagaaaaatcagacacgtatcacgcgtatggacagccagatcctgtcactgtacgccaaaggcatgacaacccgtgacatcgttgccactttcaaagaaatgtatgatgcggatgtatcacccacgctgatatccaaagtgactgatgcggtcaaagagcaggtgaccgaatggcagaaccggccactggatgcggtctatcctattgtttatatggactgtattgttgtcaaagtccggcagggacggcagtgtgataaacaaagccgttttcctcgcgctgggcgttaa

SEQ ID NO: 289835 - DNA, 657 bp, Morganella morganii
gtgataaacaaagccgttttcctcgcgctgggcgttaacacagaaggccagaaagagcttcttggcatgtggctggcagaaaacgaaggcgcaaagttctggctcagcgtactgaccgagcttaaaaaccgggggcttcaggatatccttatcgcttgtgttgacggtctgaagggcttcccggacgcgataaacagcgtttatccgcagacgcacatccagctgtgcatcatccacatggtgcgtaacagcctgaaatacgtggtgtggaaggactataaagcggtgacagcgggtctgaaaacaatctaccaggctgcaaccgaagacgcagcgctgctggccctggataaattcgctggtatctgggatgaaaaatacccgcaaatcagcaaaagctggcgtgcgcactgggaaaacctgaacacgttcttcggctatccgcctgatatccgtaaggctatttacacaacaaacgcgatagaatcactgaacagcgtgatccgccaggcgataaaaaaacgcaaagtattcccaaccgacgactcggtacggaaagtgatttacctggcgatcatggacgcctccaaaaaatggagtatgccgatccgaaactggcggctggccatgacacggtttattattgagttcaggtga

SEQ ID NO: 289836 - DNA, 147 bp, Morganella morganii
atgtctttattcaccttctggcagccggaaatgctgacggagaactatcagcaccgggaagatgttaccgtactacaggaactgcgcggactatacaacaacgattttgatttttcttttccgccggtccgtatttcggaccgctga

SEQ ID NO: 289837 - DNA, 177 bp, Morganella morganii; identical to SEQ ID NO: 277426

SEQ ID NO: 289838 - DNA, 1029 bp, Morganella morganii
atgcctgtacgtaaactatccagcggtgaatgggtcgctgatttttacacggttaacagagccagtggaaaatcagggagacgtgtccgcaagaaatttgccacgaaaggcgaagcgctggcttatgaacgctatgaactggataagctggacggaaaaccctggatagaagaaaaggcagaggatgccagaaaactcactgaccttattaatgcatggtattcatcacatggcatcactctgtctgacggcaacagacgccattccactatgctgtgggctgtagatcaaatgggtgacccgctggccagtgaatttactgctcagttattttcaaaatatcgggaacttcgtctctccggaaaattattccgtagtgaacgtaaaaaagaagtagccccccggaccgttaatttagagctggcatatttccgggctatgtttaatgaactgcggcggctgggtgtatgggaaaaaccaaacccgatagaactgattagagagtttcgcacccatgaatctgaaatggcatttttgacccatgagcagattaatgaattgttagtatcatgcgatcaaagcagcgctaacgacctgacgcttattgtaaaaatagcgctatcaaccggtgcccgatggtcagaagccgaagaattgaccggatcgcaggtcaccaaaaataaaattacctttgtaaaaaccaaaggtaaaaagaacagaactgttcctattggtgatgaactttatactgaaattcccaaaaaacgcgggcgcttatttaccgggtgttactccgcattcagaacagcagtccgcagggcaaagatagaacttcccgctggccagctgtctcacgttctccggcacacttttgcgtcacactttatgatgagcgggggtaacatccttgttttacaaaaaatcttaggacacaccgacatcaaaatgactatgcgttacgcgcacttttcaccagatcatttagaagatgcggttaggttaaatccgttgaggaagcatgataaataa

SEQ ID NO: 289839 - DNA, 588 bp, Morganella morganii
atggggcaattcaaatttcaaccagctgacgacaataccggcgttctggatcggattattgaggcttatggtttttcatcaaaaatcatgctggccgaacattttgatatggctgccagcagcttgtctggcaggtatagaagaccgggattcccggctgacatggttgtgcggtgtgttgctgaaacaggggtatccctggaatggctggttaccggtgacggtaagatgtttgaaaatcagtcagcagatatactgcgaattcctaaccataaaattattgaaggcgagttatttccggcatctgacatcatgatcgacaaggttatcttcggagcaggaaccccactaccggcaaaccctatcagcgttcaggatggtaaaaactattatattgttgataaaaaacatggtgatgtttttgacggtcagtggttcatacagatagacggaaaattcagcatccggacattaacacggatgcctgcgcaaaaagttcgcgtatcaggttcaggtatggcgtttgattgtgatttatctgacctgaaaatatcaggccgtgttgttgtcagtatttcagtcaactaa

SEQ ID NO: 289840 - DNA, 222 bp, Morganella morganii
atgcgtccaaaaattacaattgcaatccctgagccgtatctcccgttggaagaatattgccgccggacaggaacaaaaatcgacactgcccgcagattgatagggtacggaaagctgcctatcaagcctaaaggtgaccagaaaaagggtctggttgaagtcaacatggccgctctcacaatcatggccctcagcggttatgacgtttcgcttgaagcgtaa

SEQ ID NO: 289841 - DNA, 498 bp, Morganella morganii
atgtttgattatcaagtatccaaacaaaaccactttgaaagtgcgtgtattgcgttttctgcaaagcacaaaggtgacctggtccggattgcggagaacatcggaatgcgtcctcagatgctgcgcaacaaactgaatccggaacagccgcacatgctgacctgtcttgagctactgaaactgaccgacgaaacagaggacgcttcaatactggacggactgctggagcagttgcagtgtcagccatcagtgccggtcaatgagctgaaggaagggaatttcagcacctatttattacaaacaacggcagcggtgggaagtctggccggtgcagcggtttcagatagtcgcattaatgctgccagtgccaacgaaatgaaaagccgggtaaatacagcaatccgctgcctgacgctgatcggtgtgactatctcagcccgtttacacggtactcctactttcgtgtccgccgtggatgcgataaccacaatgatgtga

SEQ ID NO: 289842 - DNA, 783 bp, Morganella morganii
atgtcgcaattaatgactaactggctgtgtatcgccacggaaggtgacaccgttgatggtcgggtgattgaacgcaaagagatccttgatgctgttgaactttataacccggaactttacacggcattaatctggccggaacataatcatgatgaagacccgatgggagaagtcgcggaagtgatggcttctgccgatgatagcggcgtttatcatctgtatgcacggctgattccgtttatgaatcttattgaggcgaaccggaataatgatctgattttcacctcagttgaaatgacaccggacgggaatttccggggtacagggaagtactatttggaaggtttgggcgtgacgaatgaaccggcaagtgtcggaacaacacggctcaaattctacagcaaacgaaaaaggaaccgagaaatgccattagatacaagctggcgtaaaaaatacaacattgctgaaccacaaccggctccggaaccacaaccggcaccggctgatgatgccatgttgcaggaactggcgcaggcactggccgcagcggaagacaaaattgctgaactggaaaaacagcttgctgaaactcagcaagacgtgaccgaagtacaggaagacgttgataccgtaaaagaagttgttgatacggaagaatttgcgcgtttgcgcgataacctgcctgatattacaaaaaacttcagcaagttgaatcaggttgcgtcccgcacgccgtcccgcaatccgcagggaaataaaaacgaacgttttaatttcctttaa

SEQ ID NO: 289843 - DNA, 348 bp, Morganella morganii
atgaacaaatatcgtgacaaatcagactttgagattaataaggctgtggctgttaacattaatggcgctgacgctgttgtggagaaattcgatataatatatatcaatcatactgatacgatggtgagcttcaacccctgcaacaatccatatgacgcaatgccgattattattgagcataagatatgcatggcctatgacgtattcgcggaagagcacgatggtgggagttgggtggcgcaacctgcatatggcttttctgatgagcgggtgagaagcgacaattactatcgcgcggctataatttgtttcctgatgatgaaggatgcggagaatgaaaaaagttga

SEQ ID NO: 289844 - DNA, 201 bp, Morganella morganii
atgaaaatcacagacgaagatattcaggcagcaatcttaagctcaagcgaggactttctatttcaggtgtgcgattcgcttgtgttttcccattacggattagatgaaatgccagcggacgaacaagaccgactttatgctgcactgtattcatggcttaagaaagcggccggtgaatttaagcagattcaggaggggtga

SEQ ID NO: 289845 - DNA, 204 bp, Morganella morganii
atgacagataaaaactacgacccatattacgcaaaagatggctctaatactgcggcatcattacgcgacaagttcgcaatggctgcaatgcaggggattcttgttaacacagagagaaatgaattttcattcggcagggtggatgaaatagcatccaaggcttacgagctggcagatgcaatgctcagagcaagggagaaataa

SEQ ID NO: 289846 - DNA, 267 bp, Morganella morganii
atgataatagaggtaccgatagctcttgaggctgagttaaaagaaatgcgcctctgcatcaaggtgagtgatggcttcacatgcagccttcacaatccagacggcggagagttcgcatcacatgaaggttatgtgcctgacttctttcccggtgaccattacggcgattatctgatgctcaatattgacgttgagaccggacagataaccaactggaagaagcccacctcagaagacataacgaagatgctcagcgacgacgattaa

SEQ ID NO: 289847 - DNA, 192 bp, Morganella morganii
gtggaatgccaactgtgcagtaaagaactggccgacgatgaagtttatgtctgcgaccagtgcgccagtgaatgtccgcatctggaagtagttgagaagatgcgtgattgcacgaacgcgttaatcaaagcggcaccggttatgtttgaaaatatgccatctgtagaaatgcagggcaaaaggagagagtga

SEQ ID NO: 289848 - DNA, 378 bp, Morganella morganii
atgttatttaattacaggaattattcaaaaaacgaatcaatcagcttagttattacgtcaaaacgaattgcaatgtatgataacctttatatgatgttcggggttattcctgctgccggtattattactaagatacttgagcctctctcatcgtcactccattggatgcccggtaaaatgaatgtcagtatcccgcccggatggcgggaactgaaaccaacagaactgaacttacctgacagtgccgttgacagcttcggttattataaagtaacaagcccggtaaccggtaaaatcattccgtcaatggggctgcaatcccgtattctgggaaaatttgaccatcaggataaaatacaaaatatcgcactatcctag

SEQ ID NO: 289849 - DNA, 474 bp, Morganella morganii
  misc_feature (36)..(45): n is a, c, g, or t
atggctgagttcgttccaagtaatgagtggatttcnnnnnnnnnntttgcaagagtaactaataatgtcaacatgccagttgccacaggagaacgaagctacacccgctgggggtatcgtgagttgtttgaaaaacaagctgtggcagttatccagcccgatgcatgcttagttggtggtatcacggaaacgaaaaagatttgtgattatgcaaacgtgtatcatgcaacagttcaggttcacgtttgtggtggcccagtttcaacggctgcagcactgcatattgaaaccgctattcctaacttcattattcatgaacatcatacgcttgctttgaagaaagatatcatcaatctgtgtaaatatgactatcaacctgaaaatggtttcttccaagcaccgactcttcctgggctgggtcaggaactcaatgacgatgtagtccaagaatatctggttactgttatcgaataa

SEQ ID NO: 289850 - DNA, 789 bp, Morganella morganii
atgaagattacaagtgtagaaatttttgattgtaacgttcgcaagaaagaccctgcgctgagttattttaacccagtactgatccgtgtaaatacagacgaaggtatctctggtattggtgaagcagggctggcgtatggctcaggctccaacgctgctgttggaatattgaaggatttagcaccacgaatcattggcaaagacccgatgaagatagaatctatctgggaggatttgtaccgtggtacattctgggggatgagcggtggtccggtattctatgccggtatgagcgcaattgatattgcactctgggacatcaaaggcaaaaaatatggtgcgccgatttatgaattaattggcggtaaaacaaatgataagctccggacttacgcaagccagttacaatttggctggggaaaagagcaggtagctctgtttgatcctaaagattatgctgatgcagcattaaaggctgttgaagaaggctacgactgtattaaggtcgatcctatccagttctacggtacaactaaagaagaaaactctttaagtaacccgaagcaaagttattatggtctgcttcgcagcgaagatattaaccgtgcatacaaccgtttaaaagcaatgagagatgcaattgggccggatgttgatattatcctcgaaatccactcattacttggaacgaactcagccattcaacttgcaaaagcagtagaagatttgaatattttttactacgaagaaccggttaacccaatgaataccgacgcttttgcaagttga

SEQ ID NO: 289851 - DNA, 1218 bp, Morganella morganii
atgccgctcaatgcccgtcaggtagagacttcaaagcctaaagagaaaatatacaaacttttcgatggtggtggattataccttcaaatcaaccccaatggttctaaatactggcgcatgaaatatcgattttctggtaaagaaaaaaaactctccttcggtatctatcccgatgttaccctagcagaagcacgtatccgacgagatgattccagaaagcttctcgctgatggcaaagatcccagcgaagttaaaaaaacagaactgattgctcagaagctttccttaaccaacacctttgaaaatatcgccatagagtggtatgaatcacgcgtagcctcctggtctaaaaactatgcggactatgttctccggggatttaaaaataatgttttcccttatctcggagcccgtgcagttaatgaaatcaaaccactggagctgttaaccgtccttcagcgaatcgaaaaacgtaatgctaaagagttagccagtaaagtccgccagcgttgcagtgaagtattccgttatgccattgtcacaggcagagcagaatacaaccctgcacctgaccttgccagtgcccttaatactccggagaagaatcattatccttatttggcagcagatgaactccctgaattcttacagaagctgaacagctattccggcagccctataactcgcttagctacttggttgttaatgttgaccgggcttaggacagttgaactccgcatggctaagtggaatgaaatcgattttgacaaagacatctgggaaattccaaaagaacgcatgaaaatgagacgtattcatattgttcccttgtcacgtcaggcgattgaagcactacaacaactgaaacagctaacagggagctatcagtttatctttgctggccgtaatgatgttaataagccgatgagtgaagccagcatcaatatggtgctaaaacgcatcggctatgataaacgggcgaccggtcatggctttcgtcacaccatgagtactttactgcatgagcaaaattataatactgcatggatagaaactcagttggcgcatgtagataaaaacagcattcgggggacttataaccacgctcagtatcttgaaggtcgacgggaaatgatgcagtggtacgccgactatatcgattcactgagaaatggtagcaatattcttcgtaggaattttaaccgccaaaaaacgtag

SEQ ID NO: 289852 - DNA, 792 bp, Morganella morganii
atgctggcattaaaacaaagagatgacctagatccattcaatgaaaacaaaattgctgctttcggtatagaactttgcttcagtatcgatgacccgatcgctactctgctacccgctgtgactggaggtggaggggatgccaagatagacttactatttgtaagccgggatcttggtgtgattgttgtctgtcaggcatatgaatcaacaaaatttagaaagagtgcgttaggcaacaaaggtactgatttaggtcatgctatgtcggttgtgttgtctgctgatgaggcaaagctacctgagggtgttgcaccacatatcaaggatgccagggcagcaataaaggaaggcgctatccgagcaattcatgtgtggtatgtccacaattgccctgaaagtcttcaaattcaacaggacatggaactgtgtgtcgctggcgtaaggacgatgttagaaacatacggtgaagtaagcaaaagtatagccctccagtttaaggaagtcggtttagaaactttagatagtttttacagggcatcatcacagtcgattgctgttactgatttactcgaatttggtgagccacgaagaggtttcttaatgcaagatgctgaatggaaaaccttcatcactacagtaaatggagaatggttagccgatctttatagaaaatacgaaagccgaggcttatataatcccaatgttcgtggttttatgggggccaataataaagattctgataaagtgattaatgctggaattcaatcttctgctaaagactcacccccatga

SEQ ID NO: 289853 - DNA, 1002 bp, Morganella morganii
atgctggaattcaatcttctgctaaagactcacccccatgatttctttgtgtttaataatgggataacagcactagttcatgattttgaattgattgatggttctcttattaaatccgttacaggaatcggtattgttaatggagcacaaactacaggatctttaggtgagttagactctaaagtggatttgtcaaaaatagaagttggtgtcagatttatcaagtgtgaaaataaggaaactgttaggtctattactagatttaacaacagtcaaaataaagttattcaatctgactttagagcgcatgatacaattcagagccgacttcgtgaggaatttaaggcattgcgtatagctgagtatgacggtggtttgagaggtcatgtattcgataataaaaagaataaaattgagtcacataccgcagcgcaagccctcactgcttggcatggtagtccatatgatagttatcataataagatgcaaatatgggaagatgacaagcattataaaattgccttcaatgaagtgattaccgcacagcatgttctgtttgtatactcactaaatgaagccgccaaccttcttaaatcagaacttcaagagaaacagaagcaagggcaaataacttctgatgagaaagaccttcttggttttctgaatgaacgaggaagtgctttcatgactgttcatggcttgagtgggcttttagaaacattaatagaatcaaaagtattatctccatataaaataggatttaaaaagacagttacaaaggatctggcttgccaactttggatgaatcttcttaaagtattctctaaacttgtggtgctcttaagacctggcactactggtcgtttgtcaaacagcggcgaaattcaaaaagcccaaaaggaatttattagatccgcgggaacaattgctcctttcatgaagtcaatgactggaggaaatccttttgagttctttgttaaaaagatagacaataaaatctaa

SEQ ID NO: 289854 - DNA, 234 bp, Morganella morganii
atggacgaaaaaaaactcaaagccctcgcggctgaactggccaaaggcctgaaaacggaagatgatctcaatcagctttccatgatgctcaaaaagctcaccgtcgaaaccgcactgaatgccgagctgactgaccatctcggtcatgagaaaaatgcttcaaaatgcaaaatcagttactattccggacagaaatcaaaccataaaaaaactgcgccgcattcgttgcattga

SEQ ID NO: 289855 - DNA, 1608 bp, Morganella morganii
atgtctaagaaaatgatggctcttaatatatttttagctgaaaaaaaatactcttccagggactttgattttttcctttctaaagcctgcaaagaatatactctaaatggtgtcaaaggtatcaaaggttcctgttttgtaaaagatgttaaggataacactcccaaatggaaagagttcttcgaagggtttactgggaataaaataaatgatttaattaccagatccagctcggcagtgctgttaattaaatctaaatcaagagtgtttgctgtaaccttcggatatggaagaagtttattagaacaatcttacttcgtgtcagattttggtattaaatcagcgttaaacatgctgaagcatgattcgttaagaagtgttgatacattcaccattgatgattctccggtgcaaaagaaaacacaagcttcgttaggaactgaaatatctatgtttggggtagatatttctaaagatattttaagatcagttactggtttacctttagatggagtttctttcaaaaatatttgtggaggagataattcattacaggtaagaatcgagttagagccaaaagatttagttcgttacctcgatgagtgcttgcaacgatatgaaggcaaagaatatctgaagcaattctcatgggtagataatctgaaaaaagttggtaagccaaccacgattgaggaactagacgatttattaattaaaaatataaaatcaaaaaaatatgataacgtttcgatagtagtcccagaagtaatgaatgatgaagatatagagtattttagctttactagagcaaagcatgatatctcttatagtattgataaaaaaatatattttaacactatcgactttcctggttttgatatcgaaaaattaaaacgagataagctttttgcttttaataatcaaggttccgaggttaaggcattttcagtctataaatgtcttaacttagaaataacgcataacagaaaaacatatatgttatttcttgggcaatggtttgaaattgagaaaaaattcgcagagtatgttgaaaaagaattaagcattatccctacacataaaaatacatttcctgatttgataagaactatagatcaatctactaataaagagaaactagaatctgagggggattacaatgaacgtattagcaaagctaaatcttatattcttatggataaaaaactagttaaaagcagtagaactacaacttccatagaattatgtgatttagcggatgtaaaaaataaaattttaattcatgctaaacatagaaaaggaggctcctctggtttgagccatctttttgcacaagcaagcattgcttctgaactaattctcagtgacgaagagtttagaaaagcagcacgggttgttataaaagataatcacggaaatgctgcgatgagtcttgtgccagcaaaaaaaataaagagtagcgaatttgaaattgttctattaatattaggatgtgatgataaacaactattaaaaggtttaccttttttcagtaaagttaatttgatgaatacgtattcaaacttgactcaacgaggatttaaagtctcggttgcatctgcaaaataa

SEQ ID NO: 289856 - DNA, 2754 bp, Morganella morganii
atgaactggattggttctcggtggtggaaattcgacttccataatcacactcctgcatcggacgattatggaaaaggccctaatcaggcccagtatatgcagatcactcataaagattggcttctcaactacatgcgacaaggcatcgattgtgttgctgtaacggaccataattcaggcgcctggattgatccgctcaagcaggcactcaaggaactggcatctgagagtcatgaagattatcgaccactcttcttattcccaggcgttgagcttactgttcaggggaatatccatattctggccattttcggagaagacaagacaacctctgatatcgattcattgcttggtgcggtcaggtatcgcgccaccaaaggaaagagcgacggctgctctgaatgctcggcagttgaagtgatcgacgaaattgctaggtcaggagggctggcaatacctgctcatgtagatcaggctagcggactttttacggtctgtacgggcaacacactagagcaggtgcttgacaacaaatgtgtttttgctatggaagtaacggaccttgctaaagcaaaaccgcagctctacattggcaagaatttgaattgggcagaggttcttggaaccgattcccatcatccgtccggtaccggaaatcaacgctacccgggtagccatttcacttggataaaaatgtcggagccatcttatgacggattacggctggcgctcattgatggggctctttcactgaagcggtcggacaacttcacaggtgaccccaatatccatggacaactcgccatcgaaagtatcgtggttgatgatgcgaagtacttagggcgagggcaatctttatcttgtcaattgaacccctggctcaacactatcattggtggacgaggcactgggaaatcgacttcgttggaattcctgcggattgctcttaaacggaagggagaaatccccaagagtcttgaaaaggaatttaccaaatacagtcaaacttcgaaagaccgccaagatgaagggctgttaaaagattccacgaaaattactgtaggctttcgaaaagacggtggccgttttcgaatcacctggtctaataccgacgacatatacggcatcgaggaagagaccgctcccggagtctggtgtgcttccgagggagacatagcacaacgatttcctgtcaggatttacagccagaaacagatattcgaattggcaaagcatccccaagcactcttgcagattgtcgatgatgccccggtggtcaatcatcgtgattggcagcttaagtgggatgaattggtttccaaatatctctcgcttcgcgcccaggagcgtgaagttcaggccgggcttcaggaggaatcggtaaccaaaggtcagcttgaagacgtcaaacgcaaactcaatgtttttgaaaaggcgggccacgcggacgtccttaaggcttaccaactcagactgaaccagagtaaggctatggactcctgggtaactacttgggagggttccgccgaacaggtccgagatatttctggaagcttactgccagcagaattggatttacaatatttcgacattggaaatgaggatgacaaagaactcttcaataccgtcaagggcatctgtgcgacgtttgagaagcttcagatagagatgaattcgatcgcgcagcggattgatgatgtgaagaactcatggaatcaagcacggtcagacttgggaatatcgaaaagaattacagcggcgagccaggaatacatcggcctcctcggtcaactcaacgcagcagacgcaggtgatccatctgcatatggtgttctggttaagcagcgacaagatttcgaagataagctcaagggattcgacaaaaagagagaaacgcttgcgcagcatcagaagagcgcggaagaatacttggtcaagctccatgagcatcgagcattgataaccaagcttcgtgaggactttctcaaggataccctcgtcggtaattcatacgtacagatcaatgtcattccgtttggaaacaagcttactattgaggaagaattccgtaacctgatcggccgcagtagtggcggatttgaccgcgacattggggttgttgacggggatgagggcttgctggctaatttaacgcaaaaccaatcgaaaactatggatgataaaattgaggaattaaaatcatcgctacttgcaattcatgaaaacgatactatagctgtggattcctgcaaagatcgacgttttgtatcccacattcaggggctaactccggaacagatagatcgaattcaatgctggtttccaagtgattctctggatatcagatatagccttaagaacggcgagagtttcaaacccgtagagcaaggatctccggggcaaaaaacggcggctctccttgcatttatcctttcatatggcaatgagcctcttgtacttgatcagcctgaggatgatcttgataaccatttgatctatgatctgatcgtgacgcaattgcgtgagatcaaacaaaaacggcaggttttagtggtcacgcacaacgctaacatcgtcgtgaatggtgacgcggaaaacgttattgcccttgatattcggtctggccaaaccagaattgtgacgcaaggggggcttcaagaaccttccatacgcgatgagatatgccgagtgatggaaggtggcagagaggcctttacccaaagatataaacgaatcaatgcagtaatcacatag

SEQ ID NO: 289857 - DNA, 162 bp, Morganella morganii
atgacctctgcaatccgtacctcactggtattcagcgccctgatgggtgcctcttttgtcactgccgccgccccgctgtctctggaagtgtataacccggcgaaaaaagtatcttcccggtttcctcggaaatcatcagcggcaaaaatgaggtggttctga

SEQ ID NO: 289858 - DNA, 1239 bp, Morganella morganii
atgagtgagttgagttatctgaaaaagctgctgaatggcgttgaggttgagtggaaggctctaggagaagtatgcgacttcaagaacgggttcgcgtttaagagtagcttatttaaagaagctggtttaccgataattagaattactaatgtggatgggaaaaacatatccctagacgatgttaagtattttgacccgtctgactataaggaaaatacagcttcctatgagatcagcaaaggcgatattttaattgcgatgtctggtgctactacagggaaaattggcttttacgctcacgaaagccccgcgtacctgaatcaacgagtaggtaagttcttacccaagccaaaaatccttaacaatagatacttgtatcactatcttctttcaaaggttgagcagatttatgtgattgcgggtggcggcgcacagccaaaccttagttcaaatgcactaatggccaaaattgaaatcccaatcctatacccagataacccagaaaaatcgctggcaatacaagctgaaatcgtccggattctggataccttcaccgcccttaccgctgagcttactgctgagcttaccgcacgtaagaaacaatacaattactatcgtgaccagttgctgagttttaaatatggatggatttccccatatatggaaaagctgctggatggggttgaggttgaatggctaccattagagttaattgcaaaaattaagcatggaaaagactggaaaggtttaggaaaagggattgtgccagtttatggttcaggtggtgttatgggatacgttgatacatgctcttacgatcagccttccgtattaattccacgaaaaggaagcatcaccaatattttttatgttgaagctccattttggaatgttgataccatttattacacagatatagaaacctcaaagatcataccaaaatacctttatcattttataaaaacgatagatctgatggcgttagatactggttctggaagaccaagtcttacacaagctattctaaataaattacatattcccataccttgtcctaacaacccggaaaaatccctttctattcaagctgaaattgtccgtattctggataaatttgacaaattaaccggctccatcaccgaaggcttgccccgtgaaatcgagttacgccaaaagcagtacgaatattaccgggatttactgttcagctttccgaaaccggaatcggtgaacaactga

SEQ ID NO: 289859 - DNA, 558 bp, Morganella morganii
atgaatattctatttcggcttttgctaacatttaatgcaacatcgcttttggtgataatttttattgtacaaaaaaaatacacgttatcgtactttcttgacgtagcaactaatcagttgaactggattaccttgatgccaaatatggcatcatattttatttatgctctcattccagtatttcttactggtatcagtctattactaagcaaaaaacttggtaaagatgagttaaaaaaaggtaatatagtaagtattgagtatgctaataatagttttttgcctagctatctaggttatttttttgttgcactcagtgtgggaagttgggaatctttgtggtttgtatacggaattttatttatttttacttttttatctcaggccctctattttaaccctctattcctgatctttggttatacattttataatgtaagaactataaacggaacagtaatatttttgattagccgtcataaatataagacaccgggtgatatagaaatatcatcagcctttcgaattaatgattatacatttattgagcggagctag

SEQ ID NO: 289860 - DNA, 831 bp, Morganella morganii
atggatcatatattaattaaggtaaaggggcttcgtaagaagccatatcgtaagttaatatcagattataagctttttgaagctattgatatcaacgttgattattgcgttacatatagtccggatcataatttagatgaggatacatggtttaaggttgaacaatttagtcaacaaccgtttagccttgatatatttaatcaaccatttgattctaaagactatgatgatgcgactaaagagcagttttcaaaaatatcatacctagtttcagttcaaaatcaggggttttattttcaaaaaatcacaccagcgcttttcattaggaaaaaaataatcgcatttggtgagtccgctaaaatagaacaaagcgaaagccgattaataattaacacaattcctgatgcaatttatataaaagcgtttgactctttagtttttcgtaatttagctactatctctagtatttttcctggaattgacatgctttataaagaagccacgaacgaagaagttgagaattttttatctgagccttttattgaactcagtagtgaatacgaagtagaaaaagtatcaaaacccaatcgaaaacgagtagccctagcaatggctacacttgccaccatgtcttctgaagataaagtcaatatgctgacttatattgatggatactgtgaccagcgattaaatttcgatcaggaaaataataaattcctaatttcaacagacgacgaattgaaacatcttctttacggtattgaacaacgtttttataccactccttttggacatgaaaaaagactggctaattctgtacaagttttgtaa

SEQ ID NO: 289861 - DNA, 123 bp, Morganella morganii
atgtttatcatgattagcaataaccgcagggtccagacacgcacaaataatgtaactaccaatatccttattaaccagttcttctatacttccgttacatacaatatcagcatccaggtataa

SEQ ID NO: 289862 - DNA, 729 bp, Morganella morganii
atggcaacttaccgtatcgaccctgacctcgcgtttataggtcagtgcagcaatgaggaccttggtctgctggtctccgttctgacacacgacagcaaagacggcaaaaaacgtctggcggaatctctgaccacctcaccggaatatcagctcttttaccctgaccatcagaagtactggcctgccatctgtgccgaactgcaggccttcggggccaacagtctggtcacgctgctgcgcggcaacaaaggcgtgctctaccgtgaaatcctgcacgatgtctgcgacaagctgaaagtgaaccacaacaaagaaagtccggtggaaaccactgaactgaacctgctgatgaaagtcctggaaaagagcctgcgggagatgtcacaggacgagctggtccgttttgcggacggactgaagctgaatctgtccgcgccgactccccagcttattctgctcgcggtgcaggccgccgtcaccagctccggagttgcagccctgcagtttgccactgttgccgctgtcggagtgattgaggccatgggcggtattgccacctgggggacgctctttgccgccaaccgggcgctgggggtactggccggtcccgtcgggattgcgctgagctctgcctggctgatagccgatatcgccggtcccgcttaccgggtcaccgttccggcctgcatcattgtggcgtacctgcgccagaaggccctggcggcctga

SEQ ID NO: 289863 - DNA, 435 bp, Morganella morganii
atgccaatattagaaagaaaaataaataaaattcatagaaattatcaaaaattatctggcattaaacgattaggttggttgaaagatgatgataaccagattcgatgggcttaccaatatcttaaggaaaaagatcgcgaattcagaagattttattatggagaccaagtaaatttactggagatcatcaaagtctattacgacttacatatagatgacaggggagttaaactcacctatatagaaatgaataacgcatggaaccagcatcgttacagagagtcaagaaaggataaaaaagcactcagtggatatattagtgctgatgcgaaaataaaattaactcaaatggcgaaaaaatcacgtatgccagagtatgaattattggagctcttaatccttgaacagtatgatcgggataatcaaaaaaaatag

SEQ ID NO: 289864 - DNA, 1752 bp, Morganella morganii
atgtatttaggtaagctgaaaatttcgcggtttcggtcttgtgatgatttgactgttagtctccgcccagatttgactgtattggtcggcgaaaataatggtggaaaatccaatgttgtagacgcaatccgattacttactctgccattgagcggacgccgcgaacgatacccagaagatgaggacgtacgtcgctattcaactatctcaagttttcaaattgaaggggtttttcaaggtctaagcgatactctcaaaggtctattgatatctgcagttcccgatcctaccaagagtgaggctaccttcggttatcgatatgaatcgcgttctgaacatgttccccgtggtaagactaccgtgtgggctggacgtttcgacaccaatggaccagagcttggttcttcagagttgatcagacacgtttatctccctcctttaagggacgcacaccaggtacttggtaccagcagtggcactcgagtgatggcattgctgcgtaatttcttgccaaaagagcaggaacaggattttctcgctggtgtcaggcgtgcggataatcggcctgagatattaactacaatgaatactgatatcagtgcagctctcggactactcactaatggagttcgtccgcagatagcggcattggattttggtagtgaaaccttattcgatgtagctcgtgatttgagatttcgtatggccgatacaggtttgatacccgaagatattcgatcttctggtctggggtactcaaatctactctacatggccactgttgttgttgagctgactaaagccaaagaggcagacctcacgattttccttgttgaagaacctgaagcgcatttgcacccgcaattacaggtacttgttcttgagttcctcttagaacaagcgcgtcaatcggcatcacgcatcatagagccaggaaaacctgaaggtcgcatccaaattgtagtgacaacccattcccccaacctgacggcatgggtttctccacgtcacctagtggtcatgcgttcgcgacatcgtgagcaagatggaatagccacctcagaatcagttagtgtgcctattgccgaaatagggctaaagccaaagacattagataaaattagccgatatcttgacgtgactcgttccgctttgctgtttggtaacagggctatcttggtggaagggatcgcggaagcactattgttgcccgtactagcacaaaagcttgtgctagccgatgacttagatgggtggcttaggttcaagggggctgttattgtgccgattgaaggtgtggacttccgtccatatgtagaggtgctgctacggccatatggtgatgcacgtattgctgataggctgatagtgatcactgatgctgacccaaccgtgttgggaaataggaaagttgatctggaaaatctggcggcaacgcatggagctccagatgctctgatcgtgctaaccaatcagcacacattggagcacgaaatttttggcgctggaaatgaaagtttcctgaaaagcgtgtttcttcgtttgcatcgtaattcacgtagagactgggaagcgcagatagagggcattccagaacaaggtcgccccaatgcatttcttaaattaattgaggcgaaaaaaactcgtaaaggcgatttggcacaagctatagctttgcgcattgaggcgggtgaaccgtttgttgtaccgccttatctcattgatgcaatccgtggagcttcacgtatatga

SEQ ID NO: 289865 - DNA, 1776 bp, Morganella morganii
atgactggcatccacaatctaaccccagagcaagaaacatttgctgcccacattggcggagccttcgttaatgcttgtcctggagccggaaaaacgcgcactatcattgctcggctggcgaggatcaccgctacgttgccttctcgtcagggcatagcgatactttcattcacaaactccgctgtagacgagtttcgcgaaaggtgcctagctgctgggctcgatacgcttttgcagtatcctagtttcatgggaacacttgatgctttcgtcaggcatttcgttgtactaccaagctgtgcggtatcaaaccagacacgaccaatcatccttgatagttgggatactcttggcatagaaattcgtttatcaggtcaatttgcctttcgaggtgaaccggtaagcctagatttgtttgatccagaaaccaatattattgatcctgataggatcggacatgcaggtttgcaaaatcatgtccgtcaacatcagcttcgatatcaacaagtagcagcacatcgacgaagatctttgttacaagctggctatatgagtgcaggagatgcacgtgctcaaacattgcggttgattagagataatgtaattggtggggcacttgcttgcgcattagcggcacgttttcaagaagttatggttgatgaagggcaagattgcaatccactcgatctacaaatactgacatggctaagagcacatggggtaaatgttacgttcgtttgtgatcctgaccaagcaatctacgaatttcggaatggtaatcctcaaggaatacaggtgtttaaggatacatatcctattgcgtcacataaggagttgacggggaattttcgtagtagtcccgcaatttgccagttagcagcctctttaaggcgagaaggtcaggttgatcggtcgcttggtgaaagtgcgaatgttgactatccaattttacttcttacctacggtggccggggtccaacggcaatgattggtcagatattccttgaacggattacggaactgggactggactcaaccaaggcgattattttggctcactcaggcaaagttgcgttacgggcagctggtgccacttccagcaattcaaccggaaactcgcgaattgagatgctggctcttcaagtgtcaaagttctggtcacctgccacaaccccaaaaacgaaggagaatgtagtccagtcagtcgaaatattattgctggatttaatgggtgtacgtcaaccaaatgagcatcttattaaagccatagagcgtcttggtatggaccggcgtgcccatcggcgatgcgccctaagtttcctcatcaaccttccaaaaacgtgtagagattcagatgatgagcggcttgcctggatagcctgtgttcacacggaaatggagaggctgcatctgccactccgaactggtgtaagcgtacgtcgtttctttcgacagccacctaatgcgcattggtcaaagcatcttcaagtgcctgcagctctcggttttgcatgtggcaacatacatgaagtgaaaggtcgtgagtacgatgcagtatgtgtcgtagtcccgccaaatcgagcccctgaaaacagagttgaagcacttttcgagtcatggcaagcgcgagtagatgctgaggcaaaacgcgtactctacgttggcttaacccgtgctcgtaattttgttgctcttgcgataccaaacgcctttgcagggcgctgtgtagatctgctggccacacgccaagtgccctacacaagagtggatttgtga

SEQ ID NO: 289866 - DNA, 1878 bp, Morganella morganii
atgtggcatgacaacgagacaactgtcgattatttgaattttggtgttgttgctgatgcatgtgtaagcctgctgaagcaggctaatggggaacctgtttctataggcgtctcaggtggctggggagcaggtaaatcttctctggtgaaaatgattgcatcacgcttggagggcccttcatcagaagagtcgtgtcgggaggaaaacaatcaagaaaagcattcatttgtcgtgctcacttttaatccatggctttaccaagattttgagtccgctaggagtgcattgttacaaattgtgggggacgagattgttcggcttacagatgaaaataagactatcgcagacaaagtatctgaactgtggcgaaggataaatcttctccgagtcgctcaattaagtggtgaagctgcattgactttaactactggcattcctatcggttctcttggaaaaaccgttagtaaattggctggttggtttacgtcggatgacaaatcgaacaatgaatcatcagatacagatagtctcgagctaagtgccagcggtcttctaaaaccgagtgagccattctcgatgccagcccatattcaggcattcagggatactttagagagtattctcgaagagttgaaaatcacgttagtaatatttgttgatgatttagacagatgtttgccacaaacagcaatttcaacacttgaatcaattcgtttgttgctatttatccgccgtagcgcttttgttattgctgcagataatgatttcataaaagctgcagtgaaggttcactttgatggtgctggaattacgggtgatgttgcaactaactatttcgataaattaatacaggtcccactccatgttcctcgccttggtttgaatgaggcgaaagcgtatctggtgcttttgttgcttgagcgagaaaccaacgcaggccatttcagtaaggaacggttcagtcatgctcttagcgttatccctgagaaactgcgtaatagttggaaaggtgaaacgatcaatcaagagtttttatatgaattggtagagcatgttaatgcactcaaaagtttaatggatttagcccagggtcttgcggctcttcttcatagctctttagcagtaaacgctaatccccggctaatgaaaagatttttaaatacagtttatttgcgtgatgctctttctgcgccacagggaataacgttagatatagccgcactggcaaaatggcatctccttgaaaggtgcgacgaaagccttgctgaggaacttgctagtcgtgttcattcggataatgacggtagggtacaagttttggcggatgctgaagctgctgctgcaagtcagggtagtttacctgagcctttcaagaatacgccatttacgcagcaatggctccaactcctgccagcgttgggaaccgaggatctacgcccgcttctccacctcagtcgtgattctggaactcgtgacttcggtgatgacaatatgactcctgattctagaaaattgagagacgcactgaaagttgcaactaatggtcatgaatccttagttgaacttatgaggaaaataggaccttcacagacagagttggcgatgactaaggcctggcagagtaatagtgcctcacgtacctggaagagtagcaaagaaattgtaatgctgattgagtgctgcaaagtttacacggaaattggaaataaagcagtcagtttgttggatcaggctcctctgaaacttattggcccaggtttaatcccaactcttggtgctcagctatgggctcagcaacttttagaacgatggaaagatcttaacgaattaccaaaaacaactaggaatgcaattgtgaaccttgggaggaggcgctaa

SEQ ID NO: 289867 - DNA, 810 bp, Morganella morganii
atgggaacatcaacttctagcgggggaggccgagcaggttcaccgtttgatcctgaatggttaaaacctgaaagtgactctacaacaggtgggggagattcggctgattcaccatcggaggagaacggtggaaatgtaattcctgatggtgtaatagcaccagaacgacggtttggacctgctcgttcgctacttggggggtatctgcaaaatggcagccacgataatttacgtggtgcgacaaaaagcatggtctccaaaggaatggggggcgcgcgacgagctgctgctactatgcgaggtgttgccagtggtgtcggtagtcttggtgagttcctgacgtctattagggatggaaatgaccagcgagtgattgattggcttactcatgttcgtcaagagaatctttcggcaacagatcttactcttgaaattttgaaagaggttattcccggtacaggaagcgttgatgacgaatcgctccgtaatgctggcgcggaggctatggcgcaactatatgaactttatccggacgtggacatatttaatctcacggatgcgcaaatagcggaagtcatggggttgaccattgcgaatgagatttgtaatcgaatagatctccagcttggacagacttacgaaaaattaaagtatgatcctttattaattcaggaacggcgttctgatattcgcgagtgggtaggcgctgaggttagagtggtattggaaaaacaaacaacaaaaaatacagaaccgaaaagcttggctcagtctattctcttctctgccttagaggtattttcagaatga

SEQ ID NO: 289868 - DNA, 1266 bp, Morganella morganii
atgattaaagttatgtgtgctaaagcagaactgattccagcgcaggttcctgctgatgagcgagtattctcctattttaaaggtgctaagcgtgcaggtgttggtacaattgcgaaccgatggcatggtaaattaaagcggggtggatttcgaccttcaacagagatttgggattttgtacagttttgcctcgcggtatgtagcgcggatctatcaagcccaagaagaacaagtgcggatggctggacccggaatattcagcttacgattggattgtgcaaccctgataagtggctaccgctaacatccgatcttgaagagatgctaaaagttctaactggtgattattggttattaaatttcaataatgcaggcatggaacctcctcaaggagatggcgcttttcttaccaatgattgcgtatctttattatccggagggctggatagtctaataggtggaattgatttggtggctaagggtcgaaaaccactatttgtttcccaactcgcacataaagattctgagcgacagagggcatacgcatccatgttgatgggaaatgattcacattatcaatggagtcatggcataagtttcaaaggatcgcgcgagccttcaacacgtggtcgctcattagttttttatgcatttgcattacttgcctcaacgaaaataaacttaccaaaaccaacaatatttattcccgaaaatggggtgatctccatcaatcctcctttggttccgggacgcgtatccagtttgagtactcgtacaactcatcctatgtttatctatatgttgcaaagagttctggataatttgggcatctatgtgcagcttgagttgccgtaccgtttcaaaactaagggcgaaatgatgcgggaatgccttgaccaagatcttttgcaaaaatgggctgctgattctacgagttgtggccgttttcgaacctataatcgtcagcactgtggacgttgtgttccttgcttgatccgtcgggctgcattccttgcatggaaacctgggggggatactacgtcttaccgctttgaatctgttgttggcagtgacaagtctagtgcgccagatgatcctatggctgtagcacttgccatcctcgatgtaaggaagagagggcttgacagatttcttggtggttcgttggttttttcaccgattaaagagcggccgatgtatcgtagagttttgcagcagggtataaaagagttagaaagtgtactcgttcaggataaattgctttga

SEQ ID NO: 289869 - DNA, 759 bp, Morganella morganii
ttgattgattttcactgtcacgttgatttgtatcccaaggctagagatgtttatgctggtgcgattgagcgtaatgttttcacttggttagttactacgagcccaaaggcttttcaggctacaaatcatgttttagaaaaacatgaatcggtaatgatcagtcctggacttcatcctgaaattgtcgctgatcgtttccaggaattggaaatgcttcttgatttgattcaaaacgtagctgctgtaggtgaggttggattggatggttcaaaacgatattccaccagttacgcgatgcaacgtcgagtgttttccgaggtagtcaggaagtgccacgatgttgggggacgagcaatgagccttcactcaagacaggccgttccggatgtgctggctaccttaaaagcgttcccctctcacggaattcctattttacattggttcactggaagtgttacggaattgaggaatgcttcagcgcagggatgctggttcagtattggtccggcagctttcaactctgccgctggaaaagctcttgctactaagctccctaaagacagggttgtgccagaaagcgacgggccatttgctcaatttgacaatcgaactgtgatgccatgggatttcaatattacagttcgattgctgggcaaggcgtggtcaatgcctgaaaatgatgtaaggctacaattattaagcaatacgaaaacgttgcttggacaaatggggaatgatcgaattgctctcaacttttaa

SEQ ID NO: 289870 - DNA, 1737 bp, Morganella morganii
atgggttcccacctgatgcaaaggctgaatgcctttgccgatgcattttccttttttctgttatggctgcaaaacagccctgtcatattatccctgctcgcaggtcttacattaccttttatattccaccttccccgcgaggaaagaaagaacgccccattctggttaaagtcggtggcgtgcgtgtccattttcttttttatattcggcaccatatcaccgctaactattcagggattgagctacttttttaagtcactcgacaacaacatactgttcagagttccgctatggatcatgaccataatatttacggcagcaggattaatatttcatattgcagcccgacgacttttagcaggggaaattgacaacctaaaacatcgaatgattaagaaaagcaagctggagagaaataccagaacggatgtacgcaaagtaaaagagctgttacccgacagcatagaatacaatccactcgattacattgatttaaagaaaggtgtttttattggcttaaacaaagatgaccagccgcaatacataaccataaaagaatttaaaacccaacacgcagcaatcatcggtacaacaggttccggaaaaggcgtaactgcgaccgttctactttaccaggctattcttttgggtgaggctgtttttgtagaagatccaaaagatgatgaatgggcaccacacatactcagggaagcatgtaaaaaagcaggcaagaaattcacacttataaatttaaacaagctaaatttccagcttgatttactggctgatatctctcatgaacaactggaggaattatttaacgctggctttagcctggctaagaaaggggaggcttcagatttttatcgtatctctgaccgtcgcgcagccagaaatacatcggcaatttatgaaaaaggaatgacgcttcgtgatttatttaacactgactttgttcagtcattacgtgaagatgttcccgcattttgtggtgagctggaagaaattgctttagttaactcaattaatgccaccaaaggattttcattaaaagaggtttttaatgagggtggttgttgctacattattggttcaacgcgcaatcaaaagataatttccgcacaaagaatgattctgacccggctgatacaaatagcagagaccagggacagaataaacagcaccccgcgtactgttgctattttcctcgacgagttgaaatatcatctttcacgccctgcacttgaaggacttggaacggcgcgagataaaggcgtgcatatattcatggcttttcaggcgatagacgatctgcgtgactgcccgtctgatttaaatagtgattcagttattggcgctatcattgaaaacgctaaattcaaattaatttataaaatccaaaaccccgaaacggcagagtgggcggccaaaatgacaggctctatcctggtcgatgatgaaatgaggaaagtacggactgatttgtcattaacggagaaagtggatacagaccgtatgataagacaggcagaaagttactacgttgacagcaatatgtttttaaatctccctgaaaaagttggttttgtatttacgtcaaccgaactaccaagagctacaaagatgtttcaggttcaggtcaaaaaagaaaatattgaacttctttcatttgagtataaggaagccacgctggaaaaaaatgaaagtcaggaacataagccatcaattaatctgtga

SEQ ID NO: 289871 - DNA, 753 bp, Morganella morganii
atgcttattcataacgttgcagaaaggaaagaagccgcaaacagaaaaatgcttgcattgctgacattccttaaagaagaaacatactccgattttaaaacgctgaaaaaagttgttgggttcaaaggtaaaagtcaccgcccaacgtatgcgctactgaataaagcggttgcattgggatttctgataaaacatgaatacccggtaatagccggaaaaaaatcactatgggggatcaccatgcaagggctggcgatggtggttaaacctgatgataaagtattccccagttattttgagccggggaaactcaaataccggacgctggaacaccggctcctgaatcatcgggtcagaattgcactggaagaaaaaggcgggcaaggctggcttaatggtgatcggggggagtttatagcacgttatcctggcattcgccatcgtcctgatgggattatcacgttagatagcggcgcaatcgtcgctgtcgaaacggagcgctcaatgaaaacccgcgcacgctatatcaacatcattaacagccatctggcggccagcgatgccggacgctggcactacgcaatgtatgtcatgccggatgacaaaaccaaaacatcgttaatccggctgtttgactccatcaaaacggtaatgaggaacaacgttccggtgccgttcgacgcgaagaacagcgaaatgtttcttttccgcacgatagctgaactggaacaggccccctgcagtcacaactaa

SEQ ID NO: 289872 - DNA, 315 bp, Morganella morganii
atgcagttcaccgtatacgggaataccggtaaaagcgtcgtttaccctctgctactcgatgtcacgagtgatattatcgggcaactgaaccgccggatcgtgatcccgttgctgcctgttgaaaaatatccggccagccgccgcccggatcgacttgtctctgtggtcagattaactgacggcaaggaatacgcggtaatgacccatgagcttgcgagtgtccctgtccgggtgctggggacggtgttctgtgatgcgtcgcagtaccgtactcaggtaaaggccgccattgatttcctcattgacggcatttag

SEQ ID NO: 289873 - DNA, 237 bp, Morganella morganii
atgaccgtgaaacaacgcaatacgcagagcgtgaccatgacggtggaacgcgcattgctggtccgggcgcgtgaggttggtattaacctgagtgcgaccctgaccgccgccctggatgcagaagttcgacaccatgaagcaaaaaaatggcaggaagagaacagagagaccatcgaagcattaaatcgtttccatgatgaacatggctgtttcagtgatgaataccggacattttaa

SEQ ID NO: 289874 - DNA, 945 bp, Morganella morganii
atgatcacttccttgcatactcagacaagcgcccctaacaccgcagcggcgaccagcgtatccccgctggacccgtcaggctcctcaaaaacgaaattttccaaaaccagaaccgatatttatcagatcgtcaccgaccgcatcattaccgcactggaaacaggcgttaaaccctgggtgtgtccgtggcagcgcgtaccgggcatatccggcttgccttccaactacgctactggcacagcttacagcgggatgaatatcatgttgctgtggtgcagtgcatcagaacggggattcagtgattcccgctggatgacatacaaacaggccagggcagaaggtgcacaagttcgtaagggcgagcacggcacgaccgccattttctataccaccctggagaaggaaaacggcaccggagaaattgaccatatcccgatgctgaaaacctttgtcgtgtttaatgtcgaacaaattgatggtctctcactgacggcggataccgttgctccacaagcgacgtttgacccgttgccgcaggctgaaaacctgtttcgcagcagtggcgctaacatcattgagaaaggacaaaacgcctttttcatgccattaacggatgaggttttgttacctgaacgtcgtttcttttccgatgccgccagcttttatgccacgggtctgcatgagattgttcactggagcggtggcaaaagtcgcctgaaccgcgaaatgaaaggaagatttggcagtgaaaattatgcatttgaggagttgatcgccgagctgggaagcgcgttcctgatggcggatctggggattgtcggagaggttcagcacgaaagttatattgcttcctggctgaaagcactgaaaaacgataagcgctatattttcaaagccgccagcgcagcatcgaaagcgcatcgttatctgatggataaggtctga

SEQ ID NO: 289875 - DNA, 2772 bp, Morganella morganii
atgagcactgtttttaagggactaacacgccccgcacttattcgcgggttaggcgtcccattatacccgtttttatttacttgtgttttgtgtgtgttacttggcgtttggatacatgaagcactttattttttaattattgtcgggatatttgttattcgaaaaataatgaagattgatgaacggtattttgaattaatttatcttcgttatttagtgatgggaaatcctgtttcaaatcaaaaatatcatgctgttcatgtaggtgggaatgattatgaccgtgttgatttatccgatgtggagaattttatgaaacttagtgatcaggcttcattggaaaaactcattccatactcttctcatattacggatgatttagttttaagccagaatagagatttaattgctacatttgaattatcgggggcttactttgaatgtgtcagtgaaaatgatttgtcattaatggttgatcagtttaatacactcatacgaagttatgaaggcaaacccgtaactttctatacacatcgtattagaaataaaaaacaggttaaagctgagtttaatagtcctattccttttgctaatcgcgtgatgaatgcttactacggttcattaacaaaatctgatttttatcaaaatcgtttatttttaaccgtttgttttaagcctttttcattagaagaaaaagtggctcaatttttaagttctaaaaagaaaaataaacaaaaagataaatcgattttagctgaacccattaacgaaatgaatgaaatctgtgctcgattaactaactatttatctcgttacaaagcacatcgtttaggggtttatactgagaatgaccgtgtattttcatctcaattgagtttttatcaatatctgcttagtggacagtggcagccagttagagtgacgaatagcccgttctatacgtatttaggtggtaaagatattttctttggtggtgatgcggggcaaattagtatttctgaaccgatgcgctatttccgcattatcgagatcaaagattattttcaagatacagaatctggcatttttgattcgttgatgtatatgcctgttgaatacacattgacaacctcttttacgccattagacaaacgggaagcaattcaaaaactcgatgaccagcgtgaaaaattagaaatgacggacgatgccgctaaatctcaaattaccgatttagaggttgctgttgatatggtctctagtggttatttatcgatgggtcatagccatttaacgctgtgtgtttttgctgatagtcctgatgaattggttaaaaacacgaatatggtaacgggggcgttacaagacttagggcttattttgagttattccactttatctttgggagctgcgttcttctctcaattaccagggaattatactttgcgtcctcgattatcgattttgagtagcctgaattacgctgaaatggaatgtttccataatttctttacagggaaagaaacgggaaatacatggggtaattgcttattaaccttaaaaggttctggtaatgatatctatcatttgaattatcacatgacgaccgaatatcagaatttttttggtaaaaacccgacgctagggcatagcgaaatattaggtacatcgaatgcgggtaaaacggtgttaatgatgatgcaagcctgtgccttacaacaatttgggtctgaaacttcttttccaccgaatagtaaagttaaaaaacaaacgactatcttttttgataaagaccgcgcaggggaagtcgctattcgtgcgatggggggcgattattataaagtgaaattgggtgaaccaacaggttggaatccatttgctatgcctgcgactaagcggaacctgatttttctaaaagatttaattcgtaatttatgtacgttaaatagcgaaaaagggttaaccgaatatcaaaataaactgatttcggatgcggtagaacgattaatgcagcgagaagatcgctctttcggtatcagtaagctgatcccacttatcatggaggaaagaacagaagaaacattacgagatggactcaaaatacgtttagctgcatggaaacaaggtggtgaatttggttgggtgtttgataatgccacagatgattttgatatcagcgataaaaccatttttggcattgatggcaccgaatttttagaagatgccattttatctcaggttgtgcctttttatctgatttacaaaataacgttattagcagatggacgtcgtttaacactgtattttgatgagttttggcagtggttagcaaacatgctgacagccatgatgatttataacaagctcaaaacagggcgaaaactcaatatggtcattgtttttgccactcagtctcctgatgagttattgaaatctccaatgatttcagccctgagagagcaattagcaacacatatttacttagctaacccgaatgcgaaaaagagtgaatatgttgatgggctacaagttaatgaattgtattttaataaaatcaaaaaaattgacccgctttcaagacgctttttagtggttaaaaacccacaacgaaaaggcgactctcaagatttcgcggcatttgccagtcttgaacttggggaagctgcatattacttgccgatattgagtgcatcaacagagcagttagaaatatttgatgaaatctaccaagacggtatgaaacctgatgagtggatagatatctatcttgaaagagcaaaccaagccgcttag

SEQ ID NO: 289876 - DNA, 768 bp, Morganella morganii
atgaacaaattcaaattaacattgatcagtatggtatttggggcttcatttatggcttcggctggtattcctgttgctattgacgctaaccctgaatgggcgattgaagcggggcggtggtctgaaaaattgaagcaatggtccgatacagtgaaacattataatgctcaaattcagtcctatcaggatgaattgttagctaagacgggtatccgtgatgttcagcaattaattcaagatgctcaatccatcaaaaatgatttaacggcaatttacaatcaagggaatgcgtttattgacaaatacgcgcaaaacccaacggaagcgttctcacagcaagctcaagccctgttatctaaatataacgtttcaaaaacctgtgcgaacaaaggctatgtgggggatgcaattaaagggtgtgaagcgcagtttttatcaattctttctgtgtcagagtacggtgattcattgcaaaagcaattagagcaagataatagccgtatggaaagcctgataaagcaagtccaaaatgcgaaagaccctaaagcgacggctgatgccgcaaatgcgatttcttttgaacaattaaaatttgaaaaattacagttccagtatcaaatgtaccgagacaaacagcgtgatttagctgaatataaagaacagcttaatcaagctaatttccgtgataagcagctaaaagcagtagatagtcaaccttcatatttagatgcttatcataagtctcaatttgatgaggaatttcagtaa

SEQ ID NO: 289877 - DNA, 252 bp, Morganella morganii
atgaaaacaaaattattaattggcgcagtatctattctatttctatcggcatgtggtgaagaagtgaaatcagttcaatggtggcaagaacatgcagatgaagcacagaaaaaagtaacggaatgttcttccaacggaaatgatagtgaaaattgccgaaatgcaaaagatggattattccgtcataaacaattaacagcaaaatcaccatcttttatggatgcatataagaaaacacaaaacaaagaatag

SEQ ID NO: 289878 - DNA, 1035 bp, Morganella morganii
atggaaaacgcgacagctacatccgacttttttcaaacagcatatcaagttatttgggatatgctgaataaaacagtggcaaataaggtttctgaatactctcaaattgctgcggatttggcacagtacgggatttcaatttatattttatggtttgcattcagtacgctagctttaaaaaataaaacgcctgtgcctgattttatttggaacttggcgcgttttactatcatcttgatgtttattaaaaatagcgggggctggctgagtgccagcaccgatgctatttacggattgcgcgacactttggcaggtggtgatccttggaagtggatggatcaactgtgggttaaaacatctcaggttgctgcacatataatgtcaaaggatacatcaacgtatgtgaaagttgatgggggaattggctcatttcttacttattttggagggttggctgctttacttacttgctcattcgtattttttgctgctgaaattactttattactgctgacgacaacggctcctattttcattttgtgtctgatgtttggttttttacggcaaatgttcaataactggttacaactgattttcagttctttattcattgttatgtttggttcgttagcgttacgggcgggtatgtcgtttttgaatattgttttgagcgtttcggtggctcaagctgcggaagctaatctcatgcaattaggggcaactgcggcagcggctggattatttatggtatttgtaatgattttagctaaaaactttgcaactcaactagcaggggtaggtgtagacggtgcagttcagggtatggcaatgatgggagttgcaggagctgctgtaatggcatttaaaggtatcagaaaagcaggaaataccgcgtcaaatatgggtaaaagtaatcgagataggggctggaatggggcttcagcgagtgggaatagtggttcgtctgcgcctaactcggcaaaatcgcgtcggcaagcctcgattgataatgtgagaaaacgttatggaacataa

SEQ ID NO: 289879 - DNA, 1032 bp, Morganella morganii
atgcgtgaatatcacaatcaacatctcattcacgatttaacgcaacaattttttgctgaataccttaatggcgttaagggattaacggaaattgcggtaaatgagcctaataaactctttttgaaggttaaaggacgttgggagaaacgcgaaccgaaaatatcatatgatgattgtctttcttttgcgtcaacgttagcggattatcacagtgattcaatcggtgatattaagcctgttttatccgcaacactgcctcacggtgaacgtgtacaggtggttattccccctgcgtgtgaaaaagataaagtctctattacgatccgaaaaccctcgaatgtgtttattacccatgatgatattgtgaagtcaggattttattcccgagtggggcagtcatttaaatcagaaaatgcttcatctgatttagtggatttataccacacgggtaattttgcagcgtttattcctgaatgtttacgtcaagggaaaaccatggtgttttgtggcggaacggggagcggtaaaaccacgtttagtaatgcggttatgttttatattccacatcatttacgattaatttctattgaagatactgacgaaacccgttttcgttttcatgaaaatcacgtcaaactttattatccgtcagaggggggaaataaccttatcacctcagcatcgttactccgtgcatgtttaaggatgaatcccgaccgtattttaatgacagaaattcggggtgcagaaacgtgggattttttaaaggcgtcaagttcagggcattcaggtggtgtaactacggtgcatgaagaaaaaccagaagatgccattttaggcatggtgacacggtgttatcaaaatacggagtgtaataatttaccctttaatgcattagtccgaaaagtgttaaataacatcgatgtcatcatgagcattaaataccttagtgatgatgataagcgttttgcgagtgatatttattttaaagatgtccatcaaaatgattacttagcgagactgttagggtag

SEQ ID NO: 289880 - DNA, 1185 bp, Morganella morganii
atgagtgaagatactgaaaagccattaactgccgttgaaattgagcaaaaacttaaacaagaacgtcaattgcaaattgaccaatcttccgaaaataaagaatcaacgccagaaccaaaaaaagtttcacttgggattgataaattaaaaaaatccaaaaaaggaaccgtgttgcttattcttttttttgtcttatcaattggtgcattgtctttatattatttcccttcgttattgcgtgcgtttattagcagtgatgaagcggaagaagtgccacaagaaacgatttcaaccggtggccgtgacaagttaacagggctaaataatgatgttgacccatttggtcaagcagaattaaacaatgcaggtgagttaacgacggcaaataccaatgagccagctgaaagtacaccaccaccgccaaagcgcattgaattcagtcgtggaatggacagaggggtttcgacacgctcaagcagtactagcacacctagtagtagccaaaatgcacccgtagagactgtgagcgcaacaacgacgcagcctgaaacggttgttggcagtaaaaccaaaataacgcgcttaccctatgacccgaatttgtttattcctgaaaatacggcaattccgtgttcgttagatcgtcgatttgtctcagatttagcgggtaaattgacgtgtaccgtctatgaggacgtttacagtgcaaacggcaatgtaaagctaatagataaaggcacggtagcacatttggtttataagtcggcttatgtgcctaatcaggggcaagggcatgtctttttaatggcaactaagctacgaacccgtacacagccttttattgatattccattagtagattccgaagctgcgggcgcattaggtgaaacgggggttgatggttggattgatacgcatttttgggatcgcttcggtggggcaatgatgctaggcatgatccccgatgccatgcagggattaaataatgtggcaaaagataataaagataatcagaccgattataccgcgaatagtcgtcaagccttttccgagatagcaaaacaggcatttgcgaacagcgttaacattccgcctacgctgtataaaaatcaaggcgaaattatcaccttgattacgggaagtgatttagattttagttcaatttaccaattaaggatgaaatag

SEQ ID NO: 289881 - DNA, 918 bp, Morganella morganii
atgaaaaagaaaagtcttttgttattactggctgtttttttatcacaacaaagtactgcggaaatattaccttctgcaagtcgctatgacccacgaaatcaagttgttaatttcaatccgttaaatacgaccgtgattaatagtgctattggctatattacaacggttgtgtttgatgatgatgaaaaggtgattgatgcacaaacaggctatgagcaaggttgggatatttctaaagcagataaccgcgtttatatccgtgtgttacctgtaaaacaagttgttgaagaaatggcggacaatggaaaggttgagcaaaaagaaattgcgcttgaccctgaaacagacttgtcacgctggcaaacaaatttatttgttgtgactacaaaaagaaattacagcttagaattgaatgcgaaaacatttaaagagccaaaaaaaatagcctttgtggtgaattatcgttatcccgatgaaaaaagaaaacagcaaaatgaaattgaacaacaacgtttagctgaataccaacggcaacaagaaaccgcaaaaatcaatcgggaacttgaaaatgccaaaacacctaaaaattggcaatattatcaacgagtggctaaaggtagtgaaatgattatgcctgactatgcctatgatgatggtcgatttacgtattttggatttaatccgaataaaaaaatgccgagcttattttcacaaattggggagcaagaaacgatcacaaacccaacaattgaaaaacgggggaattatacggtattagtcgcacatcaagttaatgaccgttggattttacgtttaggggatcaagttattggtattgaaaataaaggacttggtaaagtgcgtttaagtaacagtgatactgtttctgacaatgttgttaaagaggtgatccaatga

SEQ ID NO: 289882 - DNA, 546 bp, Morganella morganii
atgctgccattaaaaaatacggaagtggaaatatggacagttgacaaaaatacagggcaaacagaaaaggtgtcacgtgtgaaagatgaaaacctgacaaaagatgaagcgttaggtcgctattttgtgacgcaatacattaaagcgcgtgaagggtataactattttcgtttacagcatgattatgacatggtgatgttatggagtgcggaaaatgtcgctaatgattataccgctatttttaaaacggatgctagaccaactattgtgtataaaaaagcacaacgtaccgttgatatagaaattatctatcctgtttttattaatccatcgtctcagaaaggtgatcctgatttgttagctaccgttcgttttaaaaaaatcatcaaggatgtcacaacaaatcgcagtgttgaggaaacatgggtagcgagaatgacttaccgttttatgcctgacgttgagaaaaaagaaagtgaacgaaatgcaaatccattaggctttgttgtaaccagttgggtcgctgaaaaagaaattcgaggttaa

SEQ ID NO: 289883 - DNA, 285 bp, Morganella morganii
atgactctatattatatttcggcagttcgcatggatgcccgtaaccagcacattgagtatgtgaaaatcattaaaggtggtaaaggcgaggcagatacaacaatcaactctaggcagtttgttgcagaattgatcaacgacggagcaacaaaatttaaaaccatcaccaaaaaagatggtaagtgggttaacggggcagatgttcacgttatcgataacatttacctttcgacagatcgtaacagcaccaaacgcgataatctgggtaacttgccgaagttttaa

SEQ ID NO: 289884 - DNA, 222 bp, Morganella morganii
atgacaaatcaaaatacccctaccaccagcctgctgaatgaccagttcgttgatatgaaatttatcacacagtttaccagcttaaccgacaagtggttctacaaacagatacagagcggaaaattccccaagccgattaaattaggtagttgctcccgttggttaaaaagcgaagtggaagcctggctgctggcccgaattactgaatcacggggagaatga

SEQ ID NO: 289885 - DNA, 570 bp, Morganella morganii
atgcgtattaaatttatcgctgaattacaaaaattattacatcatcataagtccggactgtttaaacgttattccaaaattctgatgatacggagtgacttccactggtcattaaataccgaccgatatatgaagggtgatgaacatcaattcagtgctgatatgagttatctgatgttacgtctttcagactaccccggcgtgattggatatgcctgggtattggaggaggcattagatcgtggattacatgtacatgccgttatttacgtgaacggtcagcaacatcgcagtaaatggggctttaaaagtctattacaaagcctctgggaagagatcaccgacggggaagggtatgtgtataactgcgaggataaaagtgactacagagcatctgtacgctttcctgttcactttgatgatatcaggggacgtaggaatatgcgttatgtggtgaattacctggcgaaaaccgagcagaaaactgattaccctatttttcatctgtcagatttaccggatatacggtgtaaaaggagtggtcgtccccgaacgagaaaacaaaagtag

SEQ ID NO: 289886 - DNA, 930 bp, Morganella morganii
atggatacactgagccgtttactccatctttcgcagggagagctgattttagacgttttttgtagattatctggtgattttttacttcctcatcctccctcttcagaaaaagaaacgatttttcatcttgttttatccggtgaatgccaggttcagatagaaaattcagaaccgctagctttgtccgaaggagcatttttaatgcttaatcgtggtcaatcgcatacgatttggcgtggggaagatatcggctcaacagttcaactgttggataatgatgttttacctgttaaatgctccgtagcagcaacggatgggcaatctgcagacattctttgtggccggatggtttatgccgaagggagtggacaattattacttaacggtttcccagactttgttcttgcggatttatctgcgttaccaggaatcgaggttcttgaaatatttacacgattaataaaagaagaagctcttgataggaaatcaggtgcttctgcaatgctgaatggacttgttcaggtattatttatttttgcattgcgatgctatgaaagatcgggtgaattgaattatcattggttaaccttgcaggaagaccccagattatcgaaggcgcttaatgcgatgattagtgaacctcacagagattggacagtaatctcattagccaatttgtcattaatgtctcgagctacctttgctcgccgattcaaagcttgtgctggtgtgccaccaggagatgtgcttcaatctattcgtatgatgaaagcgctctcattattgaaagaaaagaaaaatacactttcctatatagctacttccgtaggatatcagtcagaagctgcattcagtcaggctttcaaacgcattttaggttgtagacccggagagtggcggaagtaccaaggaaggcataatgatatatga

SEQ ID NO: 289887 - DNA, 327 bp, Morganella morganii
atgataaattggaaagaataccgcaagaagttgtttggtcgtatcggagagctgggtaaattaactccagacacagtagctggttatcagactctctctaatgccggtaaaaaaacagctcatctggatgacaaaactcgtgaattgatctcactggcagttgcagtaacaacacgttgcgatggatgtattgctgttcatgcggaagcagctttaaaacttggtctcagtcgagaagaaattgcagaagctttaggcgttgcagttgcaatgaatgctggagccgcgatggtttattcagccagagttttagattcaattgaataa

SEQ ID NO: 289888 - DNA, 309 bp, Morganella morganii
atgtgcatccgagtggattttatttctggcttcagcaactacattcacaacgttccgtcaccacatcagataaatgatgcagtagtggtgttcccggctgaaagcaatattccaccggtttacatatatgcgggttatcccagtaagatatatctggatgaaaaagataccagggatgaacaggataaagaatttaatcaggtcaaggatgcggtgaagtttaccgctgctttttacaaagaaacattcaatgtatacggtgagaaagcagagcaatttgtatgcacttttttaattagaatgcaataa

SEQ ID NO: 289889 - DNA, 231 bp, Morganella morganii
atgatcaaactcagtaaaggcagtaaaaactactatctgacacgtgaaaacgggcagttagtttttatcaaaaacattaaggtcagaaataagaatgacgttaaagacggaaataaaacggctaaaaaacaagtgtataaaattattgttgggattgacttgcttcccgatgaagcagacagatctattttaaaaagtatgttggaacaatggaaaagtgaatatgaatga

SEQ ID NO: 289890 - DNA, 159 bp, Morganella morganii
atggaaattaaacgtgaaaatttcgatagtgttttcgatattaataaatggcttaaaaataacaaagacgtaaaaattatcaatattgagactagaaaaggcaatataactgattttacaaatagttatactgtttggttttatgtgggttcttattga

SEQ ID NO: 289891 - DNA, 558 bp, Morganella morganii
atgaaaaattttaacgagtgttatcaatctgtttttgaaattgtttgtcgttgtctcggtgataactggcgcattaacttacttgataatgatgcttatcggatcaagatcacgtctaaccgattcatgggcttttcaattcatgttagggaagaaaaaaaccgtttttcgattatgggtagttttgattctcgcattcatcgtggagaaattcatagctgtacggtgtcaaaagatcgaaatcctgtacacattgccgaggatattaaacgaaaaatcattgtatttgctcatgatgaaattaataaggcaaaagaaagtaaagtaaaagaacaggaaaaaaaagaacaagacttaattgtcaaaaatatgttatctcgtttatttacaatgcatagtagctggcagagtggggtaataggtgcattcaagtctgataatggtttagacggtatgattagaaaaacgtacagtggttataaaattgaaatagataagttatccgtagataatctgattaaactcgcaggcatgataacaacgttagaaaggggttaa

SEQ ID NO: 289892 - DNA, 516 bp, Morganella morganii
atgaatgtacaagaagcgttaaatatttttggcttatctggtgaactcaccgagcaagacatcaaaaccgcttacaaaaaagcagcgttaaaatatcatcctgaccgtaatccattaggcgcagaactgatgaaagccataaatgcagcctttgattttttaatgaataacttagagaacatcaataaatttcaaagtagcgataaaaacactcattacaattttaccgaagaactggaagaggttttattaacgttgtcgggtttgatggggattatttatgaagttattggaaactgggtttggattagtggagaaaccaaagagcacaaagacacattaaaagagattggctgtaaatgggctgcaaaaaagaaacaatggttttaccgtccagaggaacataaaagccgtagaaatcgcaaagaacacagtattgatgaaatacgtactatgtatggaacaaatggacaaagagcagcgacaggctggcagagagtagaaaacagggcataa

SEQ ID NO: 289893 - DNA, 2145 bp, Morganella morganii
atgagagtctttattgcggaaaaaccatcattagcaaaagccatttttgagggattaggtggtaatccaaacacggaaaagaaaaaagggtattttcaacacggtgacgatgttgtgacgtggtgtgttggtcacatgctcgagttgagcgacccccaagattatgatgagaaatatgcaagctggcgttttggtgacttaccgattaaaacggttttcccaccaacctataaaataaaaaaagaaacggcagcacaaacaaaaatcattttgtcattaattgaccaagcaaaaaccattgttaatgctggcgacccagacgaggaaggctgtcttctggtcaatgaaattttagattacgcaaaaaataaaaagcccgtagagcgtattttagtatcggatttaaacttagcacctgttaaaaaagccttagccgatttacaaccgaatgaaaaatttcgcggtatgtcaaacagtgcgttatcccgttctctgctcgatcagagttttggctataaccttactcgtggctgtacattaaaagggcgtgaaaaaggctatcaaggtgttttaaacgtgggacgggtgcaaagtgcagttttggggcttgtgaatatgcgaacattggcgaaccaaaaccacaatgaaagtttctattatgatatttatgctttaattgagatgaacggacatcaagttaaggcgaaatatcaaacaaccgataacgatcagattgatgataagcgtcgcttaatctcagaagcccaagccaaacacattactgaaatcgtttcagggcaagcggtaaaagtgaccattgcagcaacgaaagcggaaaacacaaaaccacctttaccgttaaatttatctacactacagcaaatttgcgctaaacgatttggctatgccccacaagaaacgctggatattatgcaaagcctgtatgaaacgcataaattattgacctatccaagaacagacaatcgttatttgtctgacgagcactattaccaagcgaatgatatcgctcaagcagttatcggtacattgccagaattggcaagcacggttgagcacatggataaagttcaaaaacacaaagcctttaacgccagcaaaattgaagcgcatcatgctattgtgccaacaacgaaagacggctctaatattcaattgaatgagaaagagaaaaatgtgtatcgattagtttcactttactttattggcttattttatcccgatagcattcgagataaaacaaaagtgcattttgatatcaaaggcaacacctttaccgccacacaaagcgtattagtccagtcaggatgggaatcattaggtaaagacagcgacgaagaagaaacagaagagccagaaaaactcgactttgatttatcaacgttaaaatttaatgataatggggtgtgtgaaacagctaacgtggataaaaagcccactcttccacctaaatattttactgcttcaacactccttgccgctatgacacgtgcggcaaaatttattgatgatcctgaacttcgaaaaatacttgaagctaaagacgaggggagcactgatcaaggcagtattggcacagaagcgactcgcgcagggatattaaaaaaactctccgaaaatacgggattaatttcgattgaaaaagaaaaaggctattcagagcttgtttggaaaacaacaaagcaagggcaagagttttgcgctgctctgcctgatgaaattaccaagcccgatatttcggctcgatgggctgaaaaacaagccttaattaaaaaaggggaactgaccgttgctgactttattaaagaaacagacagctatattaaggagttgattgccgaactcgacgctaacggaataaatatcacagctaacggtacaccttgccctgtttgtcaaaaggggtttttaatcaaacgtaaggggcaaaatggtttcttttggggttgttcatgctatcctgaatgtaagacggcatttcccgataaaaatgggcaaccagttacagaaaaacaacctaatgagggcgcagtagcacgtttaaatgtcatgtgtccgtcatgcagtaacgaaataattattcgaccaaaaggatacttctgtacaggatgtgaatttaaaatatag

SEQ ID NO: 289894 - DNA, 153 bp, Morganella morganii
atgatattacgacgtgatgaaggacgtgttttagataaagagggaatgcgtcaagatatgcaagcattaaccgaacagcttaatgaacttgaaaataaatttaattactttatcaataagtgtaaaggtagaattattgcaaatcgattgtga

SEQ ID NO: 289895 - DNA, 1164 bp, Morganella morganii
atgggattggatatcgaaaaagagtaccgagctaaacgggctagacaagagagtagtcgatcagttaaatcgattaaatcagctaaatcctcatttgtacataaagtgaaaaatggagggaaattttatgaccgaaacgctcaagaatcccgaataaaaaaaggggcgagcaaagaggttatgactaaaataacagggagcgcaaaagttaaacaaggggtaagaaatagtgttgattatattagtcgagatgattcattagaacttgttgatgagcagggtatcaaaatcaatgcggaagaagctaaacaatctttaattgatagtgatgatgcattgcagttaagtgataagagcagaagaacacctgatataactaaaaatattgttttttcaccccccatgactgcaaaggtaaaacccgaagaagcgattgaagccgttagacaaacgttaataaaaaaatatccagataatcgttttgtgatagcttatcatgatgataagaaagagcaccctcatgttcatgttatattgaaaacacgtaaagaaaatgaagataagcgaatcaaaattactaaacaggatttgcgtgatttgagatctggattttgtgatgaattgaagctcaaagggtatgatgtaaaagcaacacataaacaacaaattgggttaaagtcacagcttaaagatgattcattaactgcgcctaagcgccaaaagaatgtttatgaagtgattgattttgggcgagcaccttatcaattcaatactaaaaataaatcacaaaattatttgacagtgaaaaccttaaacaagggcgttgaagcaacgtattggggtaaagagtttggtgctttatgcaatagagaaaaaattcaaaaaggggatttaataaaattaaaaaagataggtacagaagatataaaaatccctaagctagatgataaagggcagcaaacagggtggaaaatcacacagcgtaatcaatgggagatgcaaaacttaggcgttaaaggcgttgatcgcactaaaaatattttacccgaaaattcggggattaaagagatccaacaattccaaaaacaacaaacgcaatttaaacagcaagcaatggaattgattaaaaaagaacaacaaattaaagtggggcttaaattttaa

SEQ ID NO: 289896 - DNA, 288 bp, Morganella morganii
atgatgtattcggttaaatttagaaaagatgcagaaaaggaatggaaaaaattagataaaaccattcaatctcaatttgccaaacaattaataaaacgatgtgaaaatccacatgtagcatctgcaaaactgagaaatatgccgaattgctataaaattaaacttcgtgcatcaggttttagattggtctatcaagttattgacgatatgttaattattgcagttgttgccgttggcaagcgggaaaaaagtcaggtttataatcttgccagtgaacgcttaaaatag

SEQ ID NO: 289897 - DNA, 252 bp, Morganella morganii
atgccaaatacgattttaagtgatacaacagccagcgtcagtgaactcaaaaaaaacccaatggcgacagttaacgcaggtttaggctatcccgtagccattttaaaccgtaatcaacctgctttttactgtgttcctgctgagttatatgagcaaatacttgatgcgctagacgataacgaacttgcaaagctggtcaaagaacgagaatcacaacctcttgtcgatattaatttagccgagtacctatga

SEQ ID NO: 289898 - DNA, 765 bp, Morganella morganii
atgttattcaatgaaaaaaggattaagaaacgttgcagtattattactgatcttgatgaagcgttctttgatactacaattttgccaacggataactcggcaagtataaagaaaaaagagaaagctataggctctcaagaagcaggtttggctcggaaagtaaggcttgatagcttttgtttaaacaacccttgggttttaacttactatgcagatcatacttttgaagttgactttataaagtcatccaatgggtgttatcttaagaagatcgtcagggatatttatactaaaccagctacaaaagacatagctacaacggaactatcttcttctgatatagctacttcaggatctagagcgttaacaatggctaattatcaaggtaaaggttggtttgccattacactcggtaaagtgattgactttaaagtagccattccaaagtatattttcgatgctatcaagtttgctcatggggactttaatacagcacttactttcaaaatactcaagcatcgttatgaatcaatcgttgaatatgtcaaagatggtagaaaaatcatagagaagctagacatagaaggaaatacggctctaaaacaaaaatgggaaagatacttggctccatatgaaagtggtctggcgatatttactcctaagtggaaagcttttaactcaagaaatgatgatataaatattatcaaagctgatttaattaatgacctacctatggaacaaaatgatatattattgaggatctaa

SEQ ID NO: 289899 - DNA, 357 bp, Morganella morganii
atgtgtataagagacagatcaaaaggagaaagcaaaagtcaaggtcgtggttcatctaaaagtaaatcggaaagcgaagcacgtcgtgctttagttttaccgcaggaattaggtacgctcgattttaaagaagagtttattttattaaaaggcgaaaaccctgttaaagcagaaaaagcgctttatttttctgataattattttatggacagattgttaaaggtcagtccgaaacttgaagatgaagtaaaaaaaattaataaaaaatcaacggttattggggtgaaaggattacgttatcccgataaagaaaaaatgctgtcattaggtgaattagaatctgaggtgtttttatga

SEQ ID NO: 289900 - DNA, 294 bp, Morganella morganii
  misc_feature (178)..(187): n is a, c, g, or t
atgaaaaaaggattatggcttagtgttgttttattaacggcatgttcatctccgccagaagccccgaaagtggattggggaaaaaaagaggttgcggtaaatgctaaaataatgacatggacaccaattcataccgtggtgagtagtgacgtcgttaatgatgaatggcaaaaacgannnnnnnnnntaataattttattcctgaaaatcgtctttatgatgatgcggtttattttgccattgcacattcgaataaaattattgttgaagcaaataatggcactgaatttttga

SEQ ID NO: 289901 - DNA, 549 bp, Morganella morganii
atgaaaagtaaaatcgttgcgataagtttatttttcttacccgtattatcacaagcagatgtccccgtattcacaggggatgtcaagttagcttgtgaagcggtcttgtgtctttcatcaggtacgcgcccaagtgagtgcgctcctgcattatcacgttactttggtattaataaaaagttttggtctgatactgttaatgcaagaaaaaatttcttacagctttgccctgcatcaagtgatgcaggaatgcctgagttagttaatgccattgctaatggcgcagggcgttgtgatgctacttatcttaataaatttctgtatgaagaaaagagagagcaaaagtgccgcagtcggggaaaggaagaagattgttggtatgaaacgtactatcgcataaaaaatgaacttcctaactattgccgtgcttacgttaatcatgaatggactgatttagatagtagcctgcattatcagggaaaaatggaatgggttaagaaagaatctgtggcaggttggaataattcaggtggtcgatgggttgattag

SEQ ID NO: 289902 - DNA, 282 bp, Morganella morganii
atgaaacttcaaaaacccgatttagacttaaccgactccagcactaaaactaagaactcgacaacccaattcatcaaggcgggagacaaacggccaacaacgtcaaacaaacttatcccatccacttttcgcttgccagaatccgcaattagcattctcgacaccgaagcagaaagggcagggcaaaacaaaaccgccattttaaaagccgctatattggcttacagcaaccttgatgaaaacagcaaaaacttagcattacttgagtcttttaaactttaa

SEQ ID NO: 289903 - DNA, 213 bp, Morganella morganii
atgtctgtttttaaattaatgaccaccacgcttggtgttgtaacggtggcgttagccacgtactgtgcctggcaggcggctgctgaggcggcagacaatgagaacgccaccacagctgaaaaactggcggcgggactcagtgccgcgctggcctgctcagccgtgctgggcggtacccttgaccgtctgctgggccggctcttcccacgctga

SEQ ID NO: 289904 - DNA, 213 bp, Morganella morganii
atgtctgtttttaaattaatggccaccacgatcggcgtggcaaccgtggcgttagccacgtactgtgcctggcaggctgcggctgaggcggcaggcaaagaggatgccaccgcagcggaaaagctggcggccgggctcagtgcggcgctggcctgctcagccgtgctgggcggtacccttgaccgcctgctgggtcggctctttccccgctga

SEQ ID NO: 289905 - DNA, 333 bp, Morganella morganii
atgtttgaactaatgagtggttctttatgtgaatacatcacaaataaatttaaagaatacaatgtaccttttgggattggtggtgtttcaactataggtaccgggatattaaaatctgaggttatactgagagaacatgtcaggctaggatctgaagctgttattttatcacgttcttttaaaaaagaatgtacaagcttgactaatttcaaacatgagattaataaacttaatgacactattattcaggcaaaacaaatgagcagcaatgaattgaaaaacaacaagacgattcttaaagaaagcattgctcaaatcattgaggcaagataa

SEQ ID NO: 289906 - DNA, 405 bp, Morganella morganii
atggctaaaatatatcaattccctcaagggaaagaaaaaaaagaaatacaggctaaattaaaaaaatctcgatctgtaaagataaaaaaagatattaagaaatcatccttatcccatatactttctatgctgtttttggggattcgttatttcttaggggtaacgctagatgtacttttattgatggtagtctctatcatctctgttttccgttatttgattattccactcggtatttttgcattgatattattctattacaacaatgagaaaatgtggaatgtagaaatgacggtgacaatggcgttaatggtttctagtcttatcaaccccgaagttttacaagatatacagccatttcaaacattatttggtgtaaagtcaccacaatctgaggctaagtaa

SEQ ID NO: 289907 - DNA, 609 bp, Morganella morganii
gtgaccgtcggtcagatggtcaatccgggcgatactctgctgcagatcctgccggaaaatatccgtcagtactggctggtgctctgggtgcccaatgacgcactgccttatctgaatgtcggtgatgcggtgaatatccgttatgaagccttcccggcagaaaaattcggccagtttgccgccaccattcaggtgatttccaaaacccccgcctccgcacaggaaatgatgacctatgccggcgcgccgaaagtcagtcagatgccgcaatccatcccttattacaaagtgattgtgcgccccgagaaacagatgatcgcctatgacggccgcgaactcagcctgcaaaacggcatgaaagccaataccaccctgtttctggagaaacgcaaaatctatcagtggatggtatcgccgttctatgacatgaaacagagtgcctccgggccggtggcattcaccgcagaaacgccgctgaccgacgctgccggggaaacagaaaaaccggtcacagcggctgagatcccgcagccggatcacacaaaggacaccacgccggggaggaactctctgggcgtgttcggtacaacaggagcagacacaccatga

SEQ ID NO: 289908 - DNA, 195 bp, Morganella morganii
atggaatatgccaattattatctgattaatggtaatcgccaggggaaattacaaggtgattctattggtacaaaaacagcacaactgtttgttttagatttactgtataccctacttgtccaggctcagcctgaaatggtcaaagagcaaaaactgcgtacactaaatgcattgaaaagtaccaattcagcatga

SEQ ID NO: 289909 - DNA, 183 bp, Morganella morganii
atgtcacatagtatcttccatacgcgcataaatgaagcgcaaaataatgttattgtcttgtttgctttaatttcctgcaatttgacctcgcgtcagaggttaaaaatcatcaattctattaatgtaccgattgtggtattgggcttatattctgctttttacctgaaaaggacgtcattatga

SEQ ID NO: 289910 - DNA, 411 bp, Morganella morganii
atgaacttaaaggaagttaatttggaagattggcatttagtacataaagtcactggtgagtgtatcggtattgatatacttaaaactcaagatggtggttctttcaacaaggtatttttaaatgagcttgcttcaataattggttgcacaggtaatggaagtgaaaaagttcttggatggattttaaaaaataaaaataaccaaaatgagattcacggaacgcagcgtgagatagcaaaagaagaatctgttggtgttgcgactgtagctagggtgtttaaagcacttaaggataacggctatctaaagcaaaaacgatcaggaacttacttgttaaatccgtcagttattcattatggcggagttggtaacagattaactatattaagagtttggaatgatttaatttaa

SEQ ID NO: 289911 - DNA, 516 bp, Morganella morganii
atgagcgaattaactagagaagaaaaatacaaaattacgtctgaatcactgacgggattaacagagctaagaaagtttgcaaaaacgaaaaattttgaatggttagaaaatcttgccaatcaactcaatggtattgtagaagaacagcgtgaagaattcgagttacgcaaacttgaacttgctgaactggaagaaaaacgcctaaaagcgattaaatacttagaagagttggggttagatccagaaacaatccacatttccgtttttgaaacaaccgataaaaaaggaaagaaaagaaagtctaaaaatacgcctgcgaaatatcgctttacgcatcccgaaacaggtaaaacagacacatggacgggaattggtcgtatgaagaaaggattgcaactattaattgatgcaggtcattctctcgatgaatttttgattgataaagccagcgatgctaaagatgacattaaagaagcggaaaaactctttgaaaatcacccttcttcgttgggttaa

SEQ ID NO: 289912 - DNA, 498 bp, Morganella morganii
atgttgataaagaaaataacagatagcattattgcatttatatataagacaacggataattatgtcattgatcagttaaatgatgttaatttaggtaaagttgagctatataaacccacggcggattcaaatactattttgagatgggatgagctttttaagaattatatggttaggggttttcctacagaaattaaagatataattactaatttgtgccgtatcgagaaaactatagactatttttttgattttaataaaatacaatcattaacagcatctaaaagttttggtggcattcctgatggcgctataaacggtagctggttttatgatttgtatagttgggggcgcgcaatgtatcccgacgaaagaatgaaagcggaaaatgaagatgattggaaacgaaatattgcgcacattgaatctgaggggttcagaaagtgcagacctattaatgtcatatattacgaatggttaaataggtttgttgcatga

SEQ ID NO: 289913 - DNA, 264 bp, Morganella morganii
atggaaattattcctgctcaactcgccaaaaatcaatttggtgatttactaatgaaagctcaacgtgaacctgtccagatcagcaaacatggaaagcgtgtagctgtagtcatttctccagacgaatatgaccaatttacacagttgaagttacaaaatttaaaatctattttggccgaatctattgaacaagcagaacggggagagttacatcatattgatgatgtttttgcacctttaactagcaatgaaattgaaggttaa

SEQ ID NO: 289914 - DNA, 288 bp, Morganella morganii
gtgtatgcgatttatcgttttttggattttaataatagaaaaatcaaaaaggaaaatagagtttatttcaactataccgatgatgacgctgaaaaaatactgaaaagtaaaaatgccttttatcctgatgatgaattgttttcatggattgatgaaggtgaactcgtcgttgaacaatatatgtcaaaagaccaagttggacggttagtgaaacagtacatgatagaaaccaacggaatgccactgaaaattgtttttcctgaatatgacaaaggaagcgaccaatga

SEQ ID NO: 289915 - DNA, 123 bp, Morganella morganii
atgaaatatttagatcttgatcctttcgcctatggtgataaccccgaagaagcaaacaaattaatggagttggaatttcgggagttgtttgattttatatcgaaacaactaaaagaagaatga

SEQ ID NO: 289916 - DNA, 204 bp, Morganella morganii; identical to SEQ ID NO: 286655

SEQ ID NO: 289917 - DNA, 669 bp, Morganella morganii
atgattagcttatatgaatcttgttccgaattaatttatgtcaagctaaaaaatcaagaaaaaaacaatatttttttaccggaagacatttgtgtttcagttgtcaatcgccttagaaattttaatatttcattttataaagtaaacagaaactggacaatttctgataactacattattccaccattaagaaaagacgatattttattagtatctgatttatttaatttcagaacgatagatatccatacattgccagattgtaaaatagtactggatttagctcattgctcatatgaaacgttagcattctatttagaaaaattccgtatagctaacaagaaagtattattttcatgcatttccatgggagcaggaaaatattatagatatggggggggaggcgttttttttgatatcaaaaatatagcagagttaaatgatttttcctttaatcaggttaactatacatcattaaatttagattcaaaatactgtgctttaacaaacgaatattcaacaaggcatattgtttctgcaaaaaatatctctgctattgaaattgacaaactaagaaaaaatggaatttccatatctgatggactatttagccatattagtggaaagcggtcgaatgaatattatttttggaaggatataacagaatga

SEQ ID NO: 289918 - DNA, 957 bp, Morganella morganii
atgaaaacgttaagacctaaaaaatacaaggaagaagaattttttatcgctgatgaagttgaaatttcatcttttcgggatgagttagccagtatggaacaccctttttttgctttaaaagggggggatgataaagttagagaatacagaaataataatatttctgtattagttagacccgcaactggaattggattagctactgtatttgataaagatatttggatttatgctatttctaaattgcaacaagcgatttttgaaggaaaaccgattagtcgaactatcgcttttactccttatgaattttttgttacgacgaatcgtgataaagggggaaggtcttatgatgaattaaaaaaagcccttgagcgtttagctggtactcgtattcaaaccaatattgtatattcatcagaaaaacaagaaacagaaaactttggtttaattgataaatggagaatattagaagaaaaaaaaggacgattagatattggcatggtagaagtgactttacctgattggctttatcagggcattacaaaaaataaagtattaaaaattaattctgattattttcgcataagaaaagcaatagatcgacgtatttatgaaatagcaagaaagcattgtggatatcaaaaatcattttcattatcaatagaattattgcatttaaaatctggcgctacgtcaaacaaaagagagtttaaacgttcaattaaaaaacttagtttagtaaatgatttgcctgattatgaggttttattagatgccgaaaatgattgtgtgacatttactaatcgtcattttgatgagtctctcgaaaagaaaatgaatcaattagctaaaaataaaaatatgatagaggaggttgtgagtaatggtaaattacctaaaaaacttcaaaaaaaggtagctacaattgcagataaaataagtaaagaaaaaagatag

SEQ ID NO: 289919 - DNA, 333 bp, Morganella morganii
atgaaattgtttcatgtgattttaaacgtaacaaatgatgattttgaaaaaaatattgaattgaaaaatttttatgaagttgctcaatcattaaatgaagtaaaagaaaaatttaaaatttttaaaaatgcgcgagttagtgcaattgttgtatatgatttattcttagagcctgttactgttaaatttactatgtctgcttacaatgttcacaaccaagtgattttctgtgaatcacaacctaccatagttaataatacgttagacctgataacaaaattaaataattacttcaaacaagattatttaactgtcgattggaaatatatttaa

SEQ ID NO: 289920 - DNA, 216 bp, Morganella morganii
atgaatacacctgaatataaaattattagtattttcgagtacaacggattttacacttaccacatttcaaaaaatggcgagttagatcaggttgtcgagttcgacagtgaagcgaacgtaacaaaaacatcatttaaacaaaattcagaggaggaacaggaagccgtagagtttatacggagaataagaaataaacatatttgttcagtgatttaa

SEQ ID NO: 289921 - DNA, 135 bp, Morganella morganii
atgtcggataaaatgatagcagcagccaaagattttgcaaagggaaaaagaaccacttttccaatcatgacagtcaaagaattacctttttttcttcaacaaatacgtaaagaaagtgaattgttaaaacattaa

SEQ ID NO: 289922 - DNA, 270 bp, Morganella morganii
atgaagagtgatgaaattataactttagtagagaaatgcgatatttttgatggtaaaaagttgagctttaagcaaaaggagatagctatacgttatgtgtttggtcaaacagcagaagaattagctatgcattttgataattctactcgcagtatttggttacatttggatgtggtgagaaatgaatttggtaatgtttctctttcatcattgagaacaattatttttatgaaattaatatgtcagtttataaatattaaaatacgatga

SEQ ID NO: 289923 - DNA, 183 bp, Morganella morganii
atgaaaaattcaaaaacacatattacgttagctgtgcctgatgatttaaatgcatggattaattttaaatcaaaagatcagaatcgttctaaacgtaattttcttttacatcttattgaagaagcgcgcacaaaagatttgtctaaaagacaaccgcttaatttggataacgatattttatga

SEQ ID NO: 289924 - DNA, 615 bp, Morganella morganii
atgatcaaagaaactttactttcattagcattgcaatgtgcaccgttagtgcaccctgatactgctcatgatattgctaaggttgaaagtggattcaatccttacgcaattgctgaaataaaagctaaaggtaaagtcattagccatttacccaaaactaaaaatgaagccttaaatattatttcaagattaaagacgagtaatgctcggtactcggtaggattaatgcaaatttattctggtaattttaagggttttgaagttacaccagaagaattacttgatagctgccgtaacttgaatatctttgaaaaaattttagttgattgttatcaaaggggagggagtctagccaatgcgctgagttgttattactcaggcaattttaaaacaggaaaaaagaaagaaacgcagtttgccaacaccagttatatagaacgaataggaatttcagataataaaaataattatattgttccaagtacaaaaaattataaggaagaaaatcaggaggtggcgaaagctgaatcagacgttgttattgagaaattaaaaccatcaaacaaaattgtttatcctcgttatgtaatgaggggtgtagtcaaagaaaattag

SEQ ID NO: 289925 - DNA, 138 bp, Morganella morganii
atggaacataaaatgaacaaatatctaatacttgttgtttttcttttaactgcctgtcaatcaaataaattactccccaaagtcactggtgagttgcaacccataaatacggcagaggtgatgaaaaatgaaaaataa

SEQ ID NO: 289926 - DNA, 243 bp, Morganella morganii
atgagtggcattattatcgctgtaatttttttcgtcatcggattttttgtatctgtcgtaataaatattatagtttcaggctctgaaaaagagaaaataaaaaattttattactatctataaagaatatgacgtgaaaatcacagattcctcatgtcggctttcttgtgataaaggttatatcgaagtggaaaccaaaaattatttgagttttattcaaaggggaggtagatatgaaaaataa

SEQ ID NO: 289927 - DNA, 1833 bp, Morganella morganii
atggcgcgaaaatatcccgacaaacctcaaagtatttttattgctattgttatgttaggtatcacatattacgcaggaagtgtgattgtttattttttaaatggttatgattttttatatatttataagcattatcaatctgatttattgtggcaattgattagcgaaagccgaattaaagcatctatacgggtaacggctattcctgctttgctgattggcttcgtggcatcttttattttacctgtggcggtgatttatttattaaatcaagaaaaaatgtcacttcacggagatgcaaaatttgccagtgataatgatttaaaaaaatcaaaactattaaaatgggaaaaggaaaattcaaaaggtattttagttgggaaatataaagggaaatacctttggtataccgcgcctgattttgtgtcattaggggctggaacaagggcgggtaaaggagcagctattggcattcctaatttgcttgtgtggttgcattcgctgattattctcgatcctaaacaagagtgctggaaaattaccagtaaagtccgtgaaaaactgttagggcatcgggtttatctggttgacccgtttaatagcaaaacacacgggtttaatccctttttctatatcgaattagataaagaaagtggcgcaaaagatttattaaagttagtggaaattttatttccatcctatggttcaacaggggcagaggcacactttaataacttggcaggacaatattttacgggattaacaaagttattatatttctttattcatcatgcccctgaatatttgaaaacgtttgatgttaaacctgttttttctattggcagtgtcgtggatttatacgggcgtattgatagggaattagtccttaacaacaggcaagaaattgaagccaaagcccgtgatgaaaatacactttatcatttacaagatgggctaacaaaactacaggaataccatttaaccgaagatgaacagcgttcgagtgtcgatggttcatttcgaaaaaaaatgagtctgttttatttacccacagtacgtaaatgtacagataataacgattttgatttacgtcagttacgacgcgaaaaaatcacgatttatgttgggattaatgcggaggatttaggtattgcctatgattttttaaatctcttttttaattttgtggttgaagtgacattacgtgaaaaccctgattttgacccatcattaaaacattcatgcttgttgatgttagatgaatttccgtcaatcggttatatgccgatcattaaaaagggttctggctatatcgcaggatttaacttgaaattgttaaccatttatcaaaatgttagccagttaaatgagatttacggcatcgagggagcgaaaacattgttaagcgcccatccttgtagggttatttatgctgtcagtgaacaagatgatgctgaacaaatctcggcaaaacttggttatatcacgacaaaatcaaaaggagaaagcaaaagtcaaggtcgtggttcatctaaaagtaaatcggaaagcgaagcacgtcgtgctttagttttaccgcaggaattaggtacgctcgattttaaagaagagtttattttattaaaaggcgaaaaccctgttaaagcagaaaaagcgctttatttttctgataattattttatggacagattgttaaaggtcagtccgaaacttgaagatgaagtaaaaaaaattaataaaaaatcaacggttattggggtgaaaggattacgttatcccgataaagaaaaaatgctgtcattaggtgaattagaatctgaggtgtttttatga

SEQ ID NO: 289928 - DNA, 144 bp, Morganella morganii
atgaatgcgataaaatctatttatggaaagattttatttttaccttgcatttttatttattgtttttatgtatgtttttctgtgttggcggatgtgacaaaaataagttatcagtatttaacaaaagaaattaaacgattttaa

SEQ ID NO: 289929 - DNA, 183 bp, Morganella morganii
atgaacaattgtctattcatacctattgcaaaaaaagacaaaatcattatttgcctgatgatattgatttacattacctcgttaatggaaatgtactttccaaagaagatgaagataagattattgaaaaagtatttaagtatcgaggtggggtttatgtttggaaaagcaatgcaaaaataa

SEQ ID NO: 289930 - DNA, 1680 bp, Morganella morganii
atgattaaacaaaataaaatattaacacttcatgagttatttaaattttgtgaagcgaacggtgtttttcgattagtcaaagtcgaagaaaacgactcatttgttaaaattattatctgtggcgtttatcaaattaggcttaataaaaaaacacaaaaagtcacattgcatacgtggttttttacaaacttagagtcaggcgagtggcgagttagaaaatcattacctaaccgaatcccttgtttttggaaaaatgaaaatatatataatatacaatattggttacaaagtgcagtaacccatgttattgactcaatagtgaaatcaaattactcgatcagtggtatatgttatatgtataaatcattttatggagggattgaaacgaaaatacttcttgaagatatacaaccagattttgatacgactagtgaaatgtttgaggaaaaaacctttttttatcctcattatttagcgggtatgagtatgagtaaaatgcgtcatgatatttgcataaaaattatgactagaataaatgcatttattaataatgaaacccaaaaatatgcaagcatgagtttatccaaaaatatatggaaagttattgataagggggtattttctttatacggaaaagcacattttaattccttcgtacgtaattcaatattagatgctaattttttggattattataaattctcaaaacagatacgcatcaatgataatgtcgattataaaggactttggttgatgataggttttttacggaagcaaaaaaaatctaattatcactatactttaacaggtaaaataaaagacctgtataaagagctacaactacctgaatcaatttcttacggggattttaaatatatgtatacattaaagccctcattaatcgcacagttaattgaatttataagtctacgtgacagatatcggtttggtataaatgataaaattaaaataatcatgaaattactcaggcagcctgaaattaaaaaataccctactaaggctatttttgattttttagagaccgtatggaatggtttacgcgttgaacatggttatacttcggtttaccgcattgcattaaaatggctcgattatcatcaagacctttataaaaatattggttataaatcggtaacaagacgctggaacacggaactaaatcgctttgcacatgctatagaatgggtgtttaacaccgatttttacatccaaaaaaatcagtctttagcttctatctatcgattatcagaagaatgggttgaagaactcaatcatgacgattatgactatgcagaaatttcccctcaatggaatggtattgatattgattggcaatcgtgcatttctgaaatgacggtaagtgaaattacgacactagaacaactaaaaaaagaaggtcaagaaatgcatcattgcgtttattcctacgctcatgattgcgccaatgaaacatatcgagttttcactatcataaataatgatgaaagagccactttagggatttcacaagtcgaaaaccataaaatattcaaatttgaccaagtaatgggagtatcaaactctgcggtttcaagtgaaataataaaaatgagtaaaaaagtattaaatcaagtcaacagcaaaataaataaagttaatttaattaatttaggagagtaa

SEQ ID NO: 289931 - DNA, 633 bp, Morganella morganii
atgacattaaagaagcggaaaaactctttgaaaatcacccttcttcgttgggttaatctccctctcctgctgtctcttacattgcctgttatcgggcaatgtaagcccctttttattggtgattcactgacttatgaactcgccatgagttacaaaaaaattgcccctgttgatgctaaattccttgaaagcacagggttgcaatcaaaacagattttaagttggcaagattacacacagaatatcgatttttcgctttatgacacggtgtatattgttttaggtacaaacgatctcatttctaaggcagatatccccgaataccaacaaaaggctagtgtctttatccaaaccataaaaaagcaaaataggcagattgtttggttactcccccctaccctaaaaaataaagaaaaaaataatttattatcaaatacccgaattgcaatctgtgaagcagcaagaaaaaataagataaaaacgatggatactcgagtatctttagggtatcaatactcagagtttattaatggtgttaaagtaagaaccagtgatggtattcatataacagaaaatggggctgataatgtaataaggagcttaattaatgttgataaagaaaataacagatag

SEQ ID NO: 289932 - DNA, 1467 bp, Morganella morganii
atgagtaaaaataatcattcagcagagaccgatcatctttcagtgactgccgatagacctagtaaaggtgatttaggtagtggcccagtaggaaaaggcgatggaggagatagaaatattatcagtttaagtgatccaaatgcttcgttttcatatactacgtcaacaatagaagggcttgagggattaaactttacggtgactgtacacggagcaaggattattaatcctcaaaatggtcatacgactaataatattgaagttgatggaaaaggtaatagtgttgattataaaaaaaataatgttcagaataaccaacttgaattaccgataccttataataataagttggctcgtgatcgagatttagggagattaacgtcgagaataagaaaagattattttgatttgaaaaataataaggctagagtatctatttataatgggcattatattcataccgtcacatttgatgacgctggaaacgtgcaaaatatttctgaggaatatatagagaaaacctataatcgctattctaaggggataccaaatgagaaaaaagatagattagaagaggtaaagagatttgcaatattaggttataaaactgagcctagtaatattcttgattataatgtaaaaataaaggaatatgaatttatttttacattaaataaattaggttttatagaaaaattctccaagaaaattataaaagcatcacaatatgaaagccgccagttaaatgcattctataaagatttaaatattgaacaagatgaaaaaaaagaaaatttagcgaaattaatggttgttaatgcatatcaatcgtacccacaaaataaaaaatttatccaagatgcagaaaaagaggcattgatgggagcggcagatattatcactaatactggcgaaaaaattagtaaacacttgggggaaaaatacaaaactattgctaatgagatcgctagtgatttacgtaactttcagggaaagaaattacgtagcttgtctgatgcattaaaaatgatggaaaaaatcaaccgtaatcctaatattaagataaaacaagcggatagagtggtactggctaatgcagtgcgccatgtggatacaaaaatcctgtctgaaaattttcagcgtttaggtaagtcattcggggtattgggtaaagtcttgagtgttgaaaagcttcgcgaaaaagcagctattggttttgagactggtaactggaaaccattgatgctggaagtggaagctatgataatcagtggatatgctacggggatagcgataagtatagcaataagttttatctcatcaattgcatcatttttagctataggagcattacctacaaccttagcaattatagcaactataatgttaattagttatttagcatccttaattgatgataaagttgttgataaaattaacaacttacttattccagaagctcattaa

SEQ ID NO: 289933 - DNA, 519 bp, Morganella morganii
atggataataaaaatcacccaaatgatcatttgttaattaagtggggttcaatattcatctttattagtgcaattccgatatttattattttttattttaatgatatagatatattatttgctgtgtatgaaaaaataaacaatataccatcaacttattcatcaacatatccaataattagcaagttatcatttttttactgcaaattatcaccattaatagtattgttatttttcattttttgttataagaaactgactcttgtaaaacctataccaattaataaattaataataaatgttatttttccatgtcttgtgattacgattatttctctatatgttttatatttttacaatactgatatatcagatagtggttggagtatacttaaaactatatccagtaataaacacctattatttggttactatatagctatttttttgggatattatgtttggttgtttcttttttttatttcatttatttatcttccatttaaatcaattcgttga

SEQ ID NO: 289934 - DNA, 204 bp, Morganella morganii
atgaaacaattaactgagtttgagttagaaattattcatgctgttgtcgttttgcaagaattgcatgataagccagaactttccgctagtgtattaaaagaatgtaacctatcggaaattgattgtaacgaattagatgattatgaaaaagataacttaagaataattaataaagaatatttggttaatctaaaaggattataa

SEQ ID NO: 289935 - DNA, 528 bp, Morganella morganii
  misc_feature (512)..(521): n is a, c, g, or t
atgtggcatgacaacgagacaactgtcgattatttgaattttggtgttgttgctgatgcatgtgtaagcctgctgaagcaggctaatggggaacctgtttctataggcgtctcaggtggctggggagcaggtaaatcttctctggtgaaaatgattgcatcacgcttggagggcccttcatcagaagagtcgtgtcgggaggaaaacaatcaagaaaagcattcatttgtcgtgctcacttttaatccatggctttaccaagattttgagtccgctaggagtgcattgttacaaattgtgggggacgagattgttcggcttacagatgaaaataagactatcgcagacaaagtatctgaactgtggcgaaggataaatcttctccgagtcgctcaattaagtggtgaagctgcattgactttaactactggcattcctatcggttctcttggaaaaaccgttagtaaattggctggttggtttacgtcggatgacaaatccactcttgtgtnnnnnnnnnnacaatga

SEQ ID NO: 289936 - DNA, 1245 bp, Morganella morganii
atgccttcacttaagacgcttttgcagttgccttgcgggtggcaatccagccgacaagttgttagttctgatgggataaccctccatcttcgtgccacgcgtaaaacagcactatgtcctgaatgccttaagcgcagcaaatcggttcatagttgtcggcgccgccgaatacagcatctaccttgttcaggccagacactgtggctggtatttgccgtccgccactggtactgccgtaacccatcctgttcacgcaaaatttttgccgagtcgctggctcctttcgccggttcacggcagcagtcttcgcaggcgttacaaaatttacagcgtcagctgggattaatcgccggaggtgaggctggaagacgggcggcaacggcagctggtctccgtagcagtgcagatactcttcttcgcagggtgataaataccccagagactaaaccgccaggtacgccccatgtcggtatcgacgagtgggcatggcatcggggccaccgttacggcacgttaatagtcaatcttgatactcgccgtccccttgtcctgcttcccggtcgcgatcagcgtacgctggctgcctggttcagaaaataccctgaaatacaggttgtctcgcgtgatcgcggcggtatctatgccacagcagcacgtgaaggggcacctcaagccaaacaggtggccgatcgctggcacttgctgaaaaacattggtgatgcgatcgaacggatgatgtacagacatatgcctctgatacgtcttgttggcagtgagttgtcgccaaagaaaccacctgagccagaactggtagagccagctccatatatctgtcgcccggagcgacttaagcagcagactcgtaataaacgccatcaacgctgggtggaggtaataaccttacataagaatggatgtgggttccgtcaaatatcccgcaccaccgggttatcacgcgtaacggtcaggcgctggcttcaatcaggtacattccctgaaatgtcgacccgcccccggaaaccaagccttctggatccctggcgtgggtggttggaagaacagcgtgaaagcggtaatcacaatggcagccagatatggagggaaatggtggcaaaagggttcaccggtagcgaaatcaccgtcagggatgaggttgccagatggcgtaaaggtgggagcgcacctgttactgcgccagcccgtcttccgtcagcttcgcgtgtgagccgttggttgatgccctag

SEQ ID NO: 289937 - DNA, 315 bp, Morganella morganii
atgtgtgaaaaagaaccacagctgaaaatagcacagcaactggcgttggacttctaccggatcttgaaaacgaaaaacaagccacagctaagcaggtggttcactcatgtcagcgaaagcggcccggttgagcttcaacgtgttgcagccgggatggaagctgatgcagcagcaatatgtgaagccattaccagcaaatggagtaacggtgtagtcgaggggcatgtgaatcgcctgaaaatgctgaagcggcagatgtacggacgtgccgggttcgagttactgaggcgtcgggtgatgagccctctggcttga

SEQ ID NO: 289938 - DNA, 180 bp, Morganella morganii
atgcatattatggcggccggcagtctgcggggagcgctgactgccattttagcccgttattccggtaataaaataccaccggtaacctgtgactttggtccggccggtttattgcggcaaaaaattgaatccggggtaaagtgtgacctgtttttgtctgataatgccggtagccaataa

SEQ ID NO: 289939 - DNA, 204 bp, Morganella morganii; identical to SEQ ID NO: 286655

SEQ ID NO: 289940 - DNA, 900 bp, Morganella morganii
atgaaaaaaattggtgatgtcaccagtaccgccgataaaaacggcgagtggacaaacggcaacgtggccgccggtatagcaccgaccattcttgaggctggctggcttaattccgtccaacgggaaattcttggtgtgctggttgaggctggtattgcgcaggataaaaataatgataaccaactgaaggaggcgataaaaaaaattatctccggcggtaactacgccacaaaaacagaagtaaacagcaaactcgccaaagatcagaacggcgcagacatcccaaataaagatacctttatcaaaaaccttggtttgagagatctttaccttgcactgactggcgggacgctgaaagggccattaaatatcgaatatgttggaggtcggggattaactacaggagcaacagccggaacatcaatttatcatgaactgtatctgcttggaaaactggttgcctggtggggaattataaacagtaacgaattagtgcttgaaaacagagttgctggtaaaaaattaattattggccccgatggtttcaaaattgacggtaaagacattgcaactactgagcaacttttcggtgttggtcagatctacagaaacctgacgaccagccgtcaaaataaagtctggtacaccaacaccgacagcaagccccggattgttcatgtcgaatcaaacagaaccggcacacaataccctttcagtattgatattcagattattgatacgggtggacagtgtcgcggggattaccgctggacagcggcggatgaggtggtttctctgacggctatagttccgcccggcgcaagatatagcgtcaacggagggtggggacagccgacagaatggactgttattaacttctggctggagtactcgctatga

SEQ ID NO: 289941 - DNA, 204 bp, Morganella morganii; identical to SEQ ID NO: 286655

SEQ ID NO: 289942 - DNA, 789 bp, Morganella morganii; identical to SEQ ID NO: 6025

SEQ ID NO: 289943 - DNA, 228 bp, Morganella morganii; identical to SEQ ID NO: 167500

SEQ ID NO: 289944 - DNA, 423 bp, Morganella morganii
atgcaggcgtattacagcccggggaaaaatggctttgtgctggaaatgcaaaaagcggcgtttcttgaaaagaacgatgatgacctgattaaagtcgctgacgctgtttatcaggaatttaccgcagggaaagccggaatgataatgacccctgcccccggtaaaaagcagcctatgaaatggattccgataccaccgccaacgaaagaacagttaattgaacaggctgaggctaaaaaacagacgctgattgccgaagtcaacgccgaaacccagctactgcaaacaaaactggcactcggtcgaatcaaagataatgaaaaggcgttgttaaacgcctggctggattatctggacgaactggaagcggtggacgtatccaccgccccggatattatctggccggtgaagccggaggtgtag

SEQ ID NO: 289945 - DNA, 1782 bp, Morganella morganii
atgtcaaatccatctactgccattagcaaattacttatgagtaactccgaatttattctgattggcttaacaggccgaacaggttccggatgcactacaacggctaaattattacaatctaaaaatttgtcatttcctgatactgaattggtcgaaaatatatacaatggattgaactcaattcgttatagcataataaaaaactacagtaaaattcactggaagaattttgacatcattaccattagtaatttattaacactttatgcactagattcaggaaaagataaattcattaattttatcaaatatgtaattggaaattataataatatcactcttaaggaagcaagtttagaagaaattagtaatgttttctctactgcgaaaaatgattctgaattaagagcggatttttttaaaatactaaaaccagaacaacaaggaaattgccttgaccttaaatttgatcatcatgattttttaatagtaataaaaaaatattctcttatgctcaagaatgcactaaatagcataagcaatggcctatatataaaagtatatcaagaaatagggaattccatcaggaaagtggggaaactaacagaaacctattccgatgatgattttaaaacagaaaacatatttgttattccaaatttaataaatactattgtaaagataatacgtaacaataactataatagcggtacagtttcaagaattgctattgatacattaagaaacccatatgaagtaaaattttttagagacagattttctgcattccatctagtttccatcaataccaatgatgatgacagacaatcatatttaagaaagtatagacaattttccgataaagaaataaatgaattagatagtaaagaaagtggaagaaatgtcagtaaaattgatggttatcaatattttacatcgcagaacgtaaagaaatgcattgagctatctgatattcatttttataacccaaaacacgaacctgataataacaatgctttaaaatcacaaattgcctggtatataggcctaatgctccatccaggactaattacaccaacgactatggaacgaacaatgcaagttgcatatgctgcaaagttaaattcaggctgcatatcccgtcaagttggtgctgttgtcttagatgaggaaaactctataaaatcagtcggatggaatgacgtacctaaaggtcagttaccatgttcacttcgctctcttgagggattggaaaatgattttcaaggaaaaaaatacagtccatttgaacgtagtaatgcaattttcaggaaaaaagccaaacagatcttagatatattatctgcagatgaatatgaagaagctatgcgtggtttaaataagagttattgttttaaagatatcaaaaatttttcatcccatgaaaataatcaggtccacactcgttctcttcacgcagaagagaatgcttttttacaaatatcaaagtatggtggtactggtgtgaaaaatggatctttgtataccactgcatccccctgtgaattatgtgcaaaaaaagcataccagcttggaataaaagaaattgtatttattgacccatatccaggcattgcaaaagaacatattctggaatcaggagaacatccacctaagctcactcaattcaggggagccatcggccgagcttaccataagctctatgagccggtaatgccttacaaagacgaactagtgtattctacctgtggaaaaaacaagtacgaacagactcctgactaa

SEQ ID NO: 289946 - DNA, 294 bp, Morganella morganii
atggctattacctatattgttgttttaacatatataaaaccacttaaagacgttgatgagcaaatcccggcacatatcgaatggttaaaaaaaggttatttagatggtgtttttctcgcgtcaggaagaagagtgccccgcaatgggggcgttattatagctcaatgtaatgacattcatgttttagaacaaagattaaaacaagatccattccaaaagacaggagttgcggagtcagtaattattccttttgaagccagtatgaaatcagaagcattgcagggtatattttag

SEQ ID NO: 289947 - DNA, 411 bp, Morganella morganii
ttggtaacagaaacgcggaaactcaccaaatcactgacggtacgttacgataaatttatttatctggttgacccgacagaaaaaaacgcacgcattgccggtgaaaacattatggtttatgactatccggacggtacgttagcctttaaatacggccaccgctcactgaattgtcaggcatttgacaaactggattgtattgaccagggaaaaatcgtcgataacaaacgactggggacggtactgaagctggcgcaggacaagatggatgaactggatcgtcaggataagcgcagccggagtaaatccatgcccagacgccgagcgcaggtcagagttcaggaacaactgagagccatcaatccggtgctaacaaatccggaacagttcagagccagtctgaagagttaa

SEQ ID NO: 289948 - DNA, 348 bp, Morganella morganii
ttgatattagcttttgactttgtcggtcacgagaaaatacaaaaaaacatcgcgcttatctttagcgctgcacttacattggtaagtggttggactgcaagatttgattatcagaaattatggtttagacaaaaagccaccttgttatcaatgtatcaacttaaaaataaagttaattatttgaaaatcaggtcggatataaatcaacttgatgtggatgagctttttaatgaatataaagccatctgggaaaaagacagtcaagaatggaataatattaacaaagagtatattgaaagtaaaaataatctttcagacaataaaaacaatggaactacaccgcaatga

SEQ ID NO: 289949 - DNA, 1212 bp, Morganella morganii
ttgaaattttataaaaaaggattatcattcctgataattactttattatttggcctttttatattttccaggtttctgctagagttattagacttaaatattatccctgcaaatatagcaacccgattaattggctatacattctcagaaaatactataacaacaacagtgtatatttatatactgttttcaactatattaaacacgacatatattctattggctaatataaatatcaaagagaaataccactcttatataagcgatgttaatttaaagaaaactgccattttactgttatcaatatcaactccgggtgttatatacaaactggctgttaccatatctagtataacaaataacggatatctttcattttacaatggaattcaatattctgcttttggtggagctattgaaattatcagttataaactatatatagtaggatgccttcttttttttgccagacaattgagtaaaaaagctttcttcattatctcaatatttatcttagtgccagcaatagcatttgctattgctgggaaacgcaatgaactcggacttactattctttatttaatatggtattggcattcatatataaagccaataagatttaattttattaatattatcacaagcctacttttcattattgctttatcaatgatttttcagtctattcaaaataatagaactggcacagagtatgctaaaaataaaaatgctctcgtatcctttataacaagtcaaggtgtctccggcgtagttcttccttactacattgactatgagaatatgatgaatagtaaagattacccttttttactagcacctatatttgatagagcttatagaaataagcaaaatgatgagctattaacacactccaattattttaaccataaacttacccatgctgtagattctactgcatactacaatggtgaaggtttaggaactagctatattgcagagatatttcagtatagttatatttctttaatattcggttccatattattggggttacttatatatttattcgaaatatgtaaaaataaccaagtaataaaatacttatcattctacatagtgaataccttgttctttttacccagaggggagttatttgaatatgcatatgagatagtattagcattatgtgctttttactttatattaattctttgtagaaataaggcatag

SEQ ID NO: 289950 - DNA, 1644 bp, Morganella morganii
gtgaactacgccattgataagttcaccgggacattgatattagcagctcgagcaacgaaatatgctcgatatgtttgcccagtttgtgaaaagggtgttagcctccgtaaggggaaggttgtccccccatattttgctcatttgcccggccatggtacatcagactgtgaaaattttgttcccggacattccttcattgccgaaactattaaaactatttcaaagcgatgtatggagttacgcttattgattcctgtcggaagtaatagtcgagaatggtcattagagctagtgttgccaacctgtaatttatgtagagcaaagataacgttagatgttggaggcagaagccaaacgcttgatatgaggagtatggtaaagagtcgccagattggtgctgaattatcagtgaaatcttaccgtattgtttcatatagtggtgaaccagatccaaaatttgttacagaagttgaaagagaatgccctggtttaccttctgttggggctgcagttttcaccgctttagggcgtggggcatcgaagggatttccacgagcacgagagttaagatgtactgaaacgtttgcctttctttggaggctccctgttgctcaagattttcctgatgaattagaaataaaaagtttagctagcaaactgggatggaatttagctcttgttacaattcctgaaaccctttccgtggagagtatttcatggctaaaatcttttacacaccttcctgttgtccctgctagagcatctattacagcaatttggccattcctaaaccaaaacacaagtattaatcaagtcgaatgtgttcattctgacacaatattgttgtcagcaaatatggtatcaacatcatcacaaaatgttggaccaactatgtacgcacaaggttcctctttattactttcagcggtaggtgttgaaaaatcacctgcattcttcattcttaatccaggggaaagtaagttcgtgggtgtttctagctcaattgagcaggacgtaaacttatttttttctttttatttaaaaaacgatgctcccagaaaatacccttcaatagatttggtttttactaaggaaaataaagagaagaccatagtttcactacatcaaagaaaatgtgttgaagttatgatagaagcccgaaggctcggccataaattagaatatatgtctatgccttctggtgttgaaggagtggcgagaattcaagggcaaactgagagtagtgttattaagctggtttctaatgatgacattgcagttcatgatgagagcatgcggttactctctcctgaagcattatctaaattatctgattgcttagcaaactcaaaaaatcatgtagaaatagattttttagggctgggtaaaatatttttacctagttcttctacgttgtcattggatgaaggggaatttattgaattatctcctgatcttcgctctcggatattaagttttatacttcaaatgcgtctcataacccctggttttagtttaaataatgattttttattagttaaaaaattcgtggggctgcagccggaaccacacttattaccgcattatagagcattggtaaaagaagttaagaccaatggatttgaatttaaccgcttgagataa

SEQ ID NO: 289951 - DNA, 1215 bp, Morganella morganii; identical to SEQ ID NO: 84634

SEQ ID NO: 289952 - DNA, 546 bp, Morganella morganii
atggctggagcagttgcttcaagtaatcgtgtccatcgtccagcgcttgagctgaaacgcctacctgagctactctaccgaattgattgttacacagggcgtcctctgactcggttggccgttgagctcaccttgttaatcttcattcgttccagtgaattacgctttgcgcgttggtctgaaatcgattttgaaacggcaacgtggactataccggctgaacgagaagctattgaaggggtaaagcattctcaacgtggctcgaaaatgcgtacaccccacttggtaccgctatctagccaggcgttagcaatcctcaaagaggttaacaagattagtggcgatcgtgattttgttttcgttggcgatcataaccctcgtaaaccgatgagtgaaaacacggtgaacaaggcactgcgcgtgatgggatacgacacgaagattgaggtttgcggacatggattcagtacgatggcttgtagttctctgatagagtcaggattgtggtcgagggatgctgtggagcggcagatgagccatcagtaa

SEQ ID NO: 289953 - DNA, 318 bp, Morganella morganii
atggctctgacagatatcaaagtgcgttccgcaaaaccgcaggaaaaggagtacacccttgtcgatggagatggcatgtttttgcttattcatcctaacagctcaaaatactggcggttccgctttcgttttggtggtaagcagcacctgatggcttttggggtttaccctgaaacttcactggctggtgctcgtcaaaagagagaagaggccagaaagcttgttgctgcaggtatcgatcctcgcgagcacaagcgggttataaaagaagaacaggcgaaagaggttattacctttgagtcagttgccagagagtag

SEQ ID NO: 289954 - DNA, 930 bp, Morganella morganii; identical to SEQ ID NO: 277445

SEQ ID NO: 289955 - DNA, 888 bp, Morganella morganii
atggccaataaacttacaaaattccatgaaatagctcaccatgaaaattatgaatatctttcatcctatgaagatatatctaatataatttctttaaatttacaggctgttggtttaacaaaaaattcagcagaaacattggctcgattgacattagctaccttcgtttctggacaaatcattcaatttagcggttctttggcagatattgtcgcggatgcaattgccactgctattggtgcaccacgttatcacgtatggagaattccaattggtattatttccgacatagatgctttcgattttatagagactatagctgaatcatctcgctgtctcattttgaaaggagccaatctttcagcatttgagatttatggcgcagcaattagagatatagttgttcaacggcaaatatatccaacaaattatgaccatctggcattgatagctacttggaaacaaggccctgctacattccctgatggaggaatgttggccgagttagggccagttattgatactgatacattaaaaatgcgtggtttatctgctattttaccccaattgaaacctggttgttttataaaggataaatgggcaaatattgatgggctacaacttgaaagtgttgatgattatgtagatgaattaagagaattactggacgaagctggatttgatgggggaagtttgtggaagagaatggtccatattttttatacttcccttataaggatccctaatggaaattatgtttatgatctttattctgtcttgtctttctatactcttacatgggcaaaaattaaaggtggacccgttaaaaagatagaggatattgccaatcgtgaattaaaaaatcatagtgcaaaaatatctgcttga

SEQ ID NO: 289956 - DNA, 1044 bp, Morganella morganii
atggaatggaagtcagtatcacgagacaaagcacgggatatgatatcaactgcattaaattgccgattttctgatgaagggttgagaatttcagtagtttcagaatgcttaaggagcgtattacatcaatattctatatccgaaacagaagaagctaggcaaactgtaacctcgcttcggctcactagtgcagtaaggcgaaagttggtgcctttgtggccagacattgcagatattgatgatgctatacatccaggtattatgtctatattggacagtttggccgaattgggtgacatgattaagttagaaggtggtaattggctaactgctcccccacatgcggtacgcactgaccataagatggctatttttcttggtggagagccttcctgttcattttcaacgggcgtggtagctaaatctgctggaagagttcgcttggttgagcaagaagtttgtactggcagcgttgaaatctgggatgcaaatgagtggattggtgctccagcagaaggcaatgaagaatggtcatcaaagctactatccagaacgatttccggctttatcgacgcgcctagcgatatgagtgaaacgactgcgtatgtgcggggaaaatggatccatttgtcagaacttccttttaataataagcaaatctacttatgtaggatgtccattgataatctcttttcctattatttaggagaagttgaggctggacggctatgtagaatgaattcgttagaatcgtctgatgatgtcagaagattacgtttttttcttgatacaaaagataattgcccactaaaggtccgtatcaaaatatctaatgggttagcaagactaagattaacccggagattaccaagacgagaatctaaggtactcttactaggctggagagaaactggttttgaaaatgaacattcaggaataacacaccatgtattccctgaggaaatgttacccatagtgcgtagcgcttttgaggggcttggcattatttggattaacgaatctacgcgacggaatggaatatga

SEQ ID NO: 289957 - DNA, 5511 bp, Morganella morganii
atgattaataaaaataaagcaactgaacgttcgggtatacatgagaccgtgaaaagccttagtgagaatctgagaaaatatattgaggcgcagtatcatatccgagatgaagggttgattgctgagagacgagcgcttttacagaaaaatgaaactattgctcaagctccttatatagaagcaacacctgtttatgaacctggcacgccatacagtgaattgcctattcccgaatcggcaagtaatgtgctaactcaactttcagaacttggaattggcctctatcaacgaccctatgaacaccaatcacaggcgcttgagtcattccttggcgaagacgcttctgatctggtcattgctacaggtacaggctccggtaagactgaaagctttctaatgccgattattggaaaattggcgattgaatctgccgagagacctaaatctgcatcccttccaggttgcagagcaattttattatatccgatgaatgcattagttaacgatcaacttgctcgtatcagacgtctttttggtgattctgaagcctctaaaatactgatggctggaagatccgccccagtacgcttcggtggttatacgggaagaacgccttaccctggtcgtcgtagctctaaacgagacgagctttttatcaaacctcttttcgacgagttttacaataaactcgcaaataacgcccccgtacgtgcggaacttaaccgcattggtcgctggccaagtaaagatcttgatgctttttatgggcaaggcgcatctcagactaaaacttacgtctcaggcaaaaaaacgggtaagcaatttattttgaacaattggggggagaggctaattacccagccaggggatcgtgagctaatgacccggcatgaaatgcagaatcgctgtccagaattgctgataacgaactattccatgcttgagtatatgctgatgcgacctatcgagcgtaacatttttgagcagactagggattggctcagagcggatgcgaagaatgagcttatcctagtgcttgatgaggcgcatatgtatagaggggcggggggagcagaggtagcccttttaatacgccgcctctgtgctcggttggatatacctagggaacgcatgcgctgcattcttaccagtgctagcttggggtccattgaggatggagaacgttttgcccaagatttaactggcttatcaccaacctcttcgaggaaatttcgaattattgagggtacaagggaatcgcgtcctggctcgcaaactgttaccagtaaagaagctaacgcattggctgaattcgacctaaattcatttcagtgcgtagctgaggatcttgaatctgcacatgcagcaatagaatctcttgccgaacggatgggctggcaaaagccaataataaaagatcatagtgcattacgtaattggttgtttgataatttgactggttttggtcctattgaagcgcttattgaaatagtttcaggtaaagctgttaagctaaatatcctgagtgaaaacctttttccggactctccacaagaaattgcagagcgtgcgacagatgcattactcgcattgggttgctatgctcagaggacttccgatggcagagtgctaattccgacccgcatgcatctttttcatcgaggattaccaggtctttatgcctgtatagatcccgattgtaatcaacgtttaggcaaccacagcgggccaactatacttggccgcctatatacgaaaccattggatcaatgtaaatgcgcttcaaaagggcgaatctacgaattacttacccatcgtgactgcggtgcggcttttattcgtggatacgttagttccgaaatggactttgtatggcaccaaccgaacggaccattatcagaggatggggatatcgatcttgttcccattgagatattagtcgagggaacacctcatttacatagtgattaccaggacagatggctacatatagcaacgggactcctttctaaacagtgtcaagacgagggttctggttatcgcaaagtttttatacctgaccgagttaagtctggatcagaaattacatttgatgaatgccccgtttgtacgcgaaagacaagaagtgatcagaatgaaccttctaaaatcatggatcatgtaacaaaaggggaggcaccttttacaacgttagtacgtacacagatgtctcaccagccagctagtcgtcctattgatggcaaacatcccaatggggggaaaaaagtacttattttttctgatggccgacaaaaagcagctaggttagcacgtgatattcctagagatattgagcttgatttgtttcggcagtccattgctctcgcctgttctaaactgaaagatatcaagcgggaacccaaaccaacatcaatactttaccttgctttcctatcagtcctttctgaacacgacttgattatttttgatggggaagattcccgaaaagttgtaatggcccgtgctgaatttgatcgtgattgtgatagcgatctggctcaagcttttgatgatgatttcagcccccaggagtcaccgtcacgatataaaatggcgttgcttaaacttttatgtagcaactactattctctttctggaacaactgttggttttgttgaaccatcgcagcttaaatcaaagaaaatgtgggaagctgtgcaggccaagaagctcaatattgagagtaaggatgttcatgctttagctgttgcttggattgataccttactcactgaatttgcttttgatgaatctattgattcgacactacgaaccaaagcggctggattctataaacccaactggggtagtaaaggacggtttggaaaagctcttagaaaaacactgatacttcatccagctatgggggagctttctgtggaagttttggaggatatttttcgtactcatctgacattaggaaaagatggtgtttactttcttactccaaatgcacttcgcctgaaaatcgatctcttgcatgtctggaagcaatgtaatgactgcacagcactaatgccatttgctttagagcattctacttgccttgcttgtggtagtaacaatgtcaaaactgtcgatccgtcggaaagcagctatattaatgcacgaaaaggattctggcgttcgccggtagaagaggttttggtttcaaattcgcggcttctgaaccttagtgttgaagaacataccgctcaactatcacatagagatagggccagcgttcatgctactacagaactctacgaactgagattccaagatgttcttattaacgataacgacaagcccattgatgtacttagttgtacgacgacgatggaagtgggggttgatattgggtctctggttgctgttgctttaagaaacgtccctccgcaacgagaaaattatcagcaacgtgctgggcgagcaggccgccgtggtgcatctgtttcaacggtggttacatattctcaaaatggccctcacgatagttattatttccttaatcctgaacacattgttgcaggttctcctcgtacaccggaagtgaaggtaaataatccaaaaatagccagaaggcacgttcattcttttttagttcagacttttttccacgagttaatggaacaagggatttataatcccgcagagaaaacgtccatgcttgagaaggcacttggtactacacgagagttttttcatggggcaaaagatactggcctaaatctcgatggttttgataattgggttaaaaaccgtattctatctaccagtggtgatttgagaacaagtgttgcagcatggcttccttctgttcttgaaactggaggactttctgctagcgactggtttgctaaggtagcagaggagtttttaaatacactccatgggctggctgaaattgttccacaacctctcgttctggttgatgaggaaaatgaagatgatgatcagacctctagtggaatgaaatttgaacaagaagaattgctcgaattcttgttttaccatggtttattaccaagttatgcatttcctacaagcctctgtagtttcttggtcgaaaaaatagcaaagaatactagaggttcttttgaggtacgaacagtacaacagcctcagcagtcaatttctcaggctctgagtgaatatgccccagggcgtttgattgttattgataggaaaacctatcgctcaggcggtgttttttctaatgcattgaaaggagaactaaaccgggcacgaaaacttttcaataatcctaaaaagtttattcattgcgataagtgctcttttgtccgcgatcctcataataatcagaatagcgaaaatatttgtccgatctgtggtggcattttaaaagaagaaataatgattcagcccgaagtctttggacctgaaaaggctagggaacttaatgaggacgacagagaacaagaaatcacctatgcaacagcggcacaatatccacaacctgttgatcctgaggattttaagttcaataaaggtggtgctcatattgtttttactcacgcaatagatcagaaactggtgacggtgaaccgaggaaagaatgaaggtgaatccagcggtttttcagtatgttgcgaatgtggtgcagcctccgtttatgattcctactcaccggcaaggggggcacatgaaagaccgtataaatatatatctactaaggaaacgccgcgcttatgctcgggcgaatataaacgcgtttttctcggacatgatttccgtacagatttgctcttattacgaataactgttgggtctccgcttgtaactgacacttcaaatgctatcgttctacgaatgtatgaagatgcattatattcaatagcggaagcacttagacttgcagctagtcgccataaacaactagatcttgatcctgctgagtttggctctggtttcaggattttacccactataggggaagatactcagacattagatctcttcctatatgatactttgtccggcggtgcgggttacgcggaagtagctgcagcgaatctggatgacattcttactgcaacactcgcattattagaaggttgtgagtgcgacacatcctgtacagattgtctcaatcatttccacaaccagcatatacaaagccgtctcgataggaaactaggtgcatctttacttcgttatgctctgtacggaatggttcctcattgtgcttcacctgatattcaggtggaaaaattgtctcaattaagggcaagtctggaattggatggtttccaatgcctaattaagggagctcaagaggcacctatgattgtgagcttgaatggccgttctgttgcagtgggaagttatcctggccttattgatcgaatcgactttcaacacgatgtatataaggctaagaagactaatgatcatatagcctttaatgaataccttcttcgttcaaatctgccacaagcacatcaaaatgttaggaaattattgcgctga

SEQ ID NO: 289958 - DNA, 177 bp, Morganella morganii
atgaaatcaatgacaaatggcttcagattattatatatgatcaagatattgctggactggaaaataacatatctgatagaacagctcaattcaattattctacgacctatactgaatgtatatatcttcaacgtagccttacatctcactttaattatagcgattttgttaaggtaa

SEQ ID NO: 289959 - DNA, 909 bp, Morganella morganii
atgcagcgtcttgatgataccctcgaaaattatattagctacactttggaagaattcaggttaaaatttttcccagatgcagatgttgtttcatactacggaggtattacattctggtcaaagcatgcgtttcaacccaccgttgagatgttaggcacagtagcgatgacaagggcagtaagaaaacttgttataatactccaaactacaggtggtagcgttgagtcagttgaaaaattagtcgagataaccagaaacttttatgatgaagtttattttatagtgccggattacgccatgtctgcaggtacgatatggtgcatgtctggggataaaatctatatggattatgcttcatctttaggccctattgatccacaagtacctacagcagaaaacaaatgggttcctgcattagggtatctggataaagtagaagagataataagtaaatcaaaacaaggagatgttactcaagctgaactgatgatgcttaataggttagatcttgctgaactaagaagatatgaagaagctcgagagttatcaaaagaattgttgaaaaaatggttagtagactataagtttaaggagtgggttcgaaaagagacatctggggaaccagtaacagattcagataaaatccgtagagctgaggaaattgctgttatactatcagataataagagatggcattcccatagtaggtctataggaattcgaacagttgttgacgacctcaatctgaaagtggaagactattcacgcgatgctgatttttctcttaatctaaaaggcatacataacctattgattgagttccaaatgaagtctaacagagaaatcgttgtgatagggtcacatccattccgtgatggagatgaactagaagaggtgactaatgaataa

SEQ ID NO: 289960 - DNA, 186 bp, Morganella morganii
atgaataatacaaatgtcgatagtaaattgatatcggattttacgtcattgcaagacaaacagatcagtgatgttcaggtaaaaatgattgagggattgcaatctatggggttgttagaaactcctgtatttaacttaaattgcattcctgctgcgagttttcagccaaagcaaatgatttcgtga

SEQ ID NO: 289961 - DNA, 303 bp, Morganella morganii
atgtcatcagatatcaccaaaattaccagtttgaataatgttaaatccggtgttggtattaataactatggcaatctgacaggcagtttattggttaaagcaaatcaaatcgcatttaacaataaaaaatatctggaagcattggatatatctgcagatagtgatgttcttgcctatattaatgatggcgagataatgaatgaaacagctaagttcagagcttatgaactctatcattcaggtaatggaaaaatcacatccgtgcctgtatttgaatctgagataaaaaaaccacttcagtaa

SEQ ID NO: 289962 - DNA, 564 bp, Morganella morganii
atgaacttcaattccagtgctaaagaagttatagagagaatatgtgaagcatacggattctcttcgagactccaatacgcgcagtatgtgggtataagtaacggctcacttggcaacaggattacacgtaataattttcccgcagatctgattcttagatgcgccttggaaacaaaagcttctattgaatggttatcatttggaacgggtaaaatgtttaatcatgctgagtccgatattgctcatttggatgcttttaaccttgtagatggcaagctacagatggcatcttcggtgatgtttgacaaagtaatgatgccgaatgaatatcataaaattgaaataattaattatttatcagatagttattttatagagcgtcgcttttcatcagtcgacgaagggaaatggttagtcgagttttcaggcaaatgttcttttaacgatttacagcttatccccggcaataaaatccggatggacggtggtaagtatccgatagattgcgaccctgaagatattaaagcgataggtaaagtaatcgcggtgtacgcgaggcagtag

SEQ ID NO: 289963 - DNA, 579 bp, Morganella morganii
atggatagtgaagaacttccctatgaccaacatattatttttttaactcaagccgacgttgctccaaccgaagtaaggcttttatcagccaacgagatgtacgaggcttgctacgcatttttgagcggggtttcagagcacgtaaaaaatcgctggcttccatcaagagaatgtcgaaatgagttggcgcgcctcctgttaaagaattgtccagccgattggacagaacccggattacggagagaattaatccagcgcgtaactcaaaatattgtccggtcagtgaacttttaccaagtatctgaatgggatcactgggagactcaggaagaactagagacagatattcgcaatgcgattgaagggacccggaagactgttgaactttttttgcacggtgacccgaaatacttgccaatgaagacagcgctgtttgccgttccggggaagacaaatgagtttttggcttctcttttgattggcgaggtaaggccggtatggatgacatctgtaaatagtgatcgcacaccgggtgtaaatgacgggatgtatccgaaatatcccccgagaaaatcctga

SEQ ID NO: 289964 - DNA, 294 bp, Morganella morganii
atgctgcccccaaagaaatcagaactgaaattattaagcctgtgtttactaatgtgtgcgttagtcctgagtttgtcagcatgtacaacgacaccgccgctaaaatcggacgaacagtatcaggaaagcctgttgaccaaatgccagggagaactgccggtactgacgggaacaacgggaaataacttaagccaggcattaacggattttttaaccctgtacggcaattgtgccgcacgtcacaaccagttggttgatgagataaacatcagaaggaacctgaacaatgagtaa

SEQ ID NO: 289965 - DNA, 303 bp, Morganella morganii
atgaatattaaaaagaaaacgttggcattgatggtgggtattgcttgcagtggattactctatggggttaatgccaatgcattggatggttttgtcgatgcagaaagaacactcattactcttactactgttttgcagaagaattcaacggcaccgacggatgcaaacctgtatgtggaggggaagctcacaggcttaactccagatgcaggcaactccaaaataaaagactttggtgcatacgcgaatgaagtaaaaacagctaatacaacgaatagccactgggttactaaatttaaataa

SEQ ID NO: 289966 - DNA, 696 bp, Morganella morganii
atgaaaatattactctattcagaaaaacaaaaaatgatggataagttgcacgacactctgactaacacaatcaataatcagtttgaatacaatattgtcacgctacccggattgcctttcactgacacttttcctcatatcaaagaaagcgagagtggtataatgctggcctacatgaacactcatttttccgcaaaagacctttttgattactgccgtctctttaacactcctcttctcatcattaccgaagaagttaattacagagataaaacattaagtcattacttttcggttaatattatgagctggatagaactaaaaagaagattatttttttggttggcattcaataacagaaaagagaacagaaataagattaaaaaagaccgcggtgaattatcattactgaccctggatgatgtttatgtccacataagaaatcgacttaaagtcaatctattgcaatgtgacctgacatataaagagaaacagattgcatctttattaacttatggactagattgtcatcaaatatctcattatttacacgttaatcaatccaccatttattttcacataaaaaagatgaagaagaaattacatatatatgataaaagtaatctgatgttattttttaatgagctcaatatgaagtcggcagtcgacgtcatcaagccatatggtgtggtttga

SEQ ID NO: 289967 - DNA, 444 bp, Morganella morganii
atgacatcatttccaaaacagcaacaaataaaaaacgggctatcctatggtcatactcctaaccgaactgaaatgactaaaaacgatattgcctttattattgggcagcagctaaaaaaattacgttcagagcaaggtattaatggctcgcaactgggtaagatattagatatcagccagcaacaggtttcacgttatgaaaatggcgtcaccacattgtctatcgatgctattgtcacaatatgtctttattttaatctctcactcagggagtttttagcaccgctgatggtgttaacggaaaacgaaaacaaaaacgagtcgattgaaacgctcccgctgtcatctgtgattaatttagatattgtgccggactcagcgcgttcttttatttgctggccacaagacgagagcatggtgatggataagcgaaaaagacgataa

SEQ ID NO: 289968 - DNA, 960 bp, Morganella morganii
atgcatgaccaacatcggattaacgtcaaaaatatcaccgatattccactttgccagcaaatgctgactgactatctcgcgttctatcaggtcaatgtcaccgcactcaacccgcttttcaaaggctcgatttgtattgatacctttacttctttaccttttattcaggcagttaaactggatatgtttacccataccacgcatttcattcatgcggattgcgcctcacattgccaacaacattgcgtgctcattcattcgttgtccagcttgattgtcaatgcgaaaaagaaagatatccatcttcctgcaggcagttatatgctcattcccgcttgggagcctttcacgttaaagagtctatctcatcattatgggctgatttttaatcttgatattcatgagacgggattgaaacgccagtccttgtcagaactgttttggaaagtcggcaaccatttacgttatggcaatatggtcaataatttactctgtgattattatgcccccctgagcgatacctgttacaagcaattacttaatggcataaaaacactgcttaccttacaaagtgagcaagtcgcctgtccgtgtaattttaacaaaacaaattttactcccaattttgatatttgtgctattgcccacctgatacgccagaatatgactaatccccattacagtatcaacgagttagccgactactacggtatgtcaatacgcatattgcagtacaaactggctcgctatcagctgtctttttctgaattactggcttctgctcgttgtgaattactggcgatgaccatccgaaatatgccagatgctgatttggatgttttagtcaagagttgtggattcgccaacctgcgcatggccaatcgacaatttaaaaagctacgtaatcaaacggtcatgcaatttcaggctcaggagcggggtcattttcgtaacatgtaa

SEQ ID NO: 289969 - DNA, 231 bp, Morganella morganii
atgcattcggaaatcatcaaatttaatcagcgctttagttatgaacagcttcttattggtttagaggatatcggagcatcaaacacgacttttagcaccaaagccgtggcattatattttggcatttcagtctataaagcacggtattgcctcaatttgctttgtactcaaggattggttgaacgcagtgaaaatcagcgtggaaagaaggttgagtggactttgcgctaa

SEQ ID NO: 289970 - DNA, 144 bp, Morganella morganii
atgtctaaatacatcgaatacacagaaacgaaaaatgttattcagtctcacgcgctaattaatcctgaccaattaatcctttcactccttgatgttagaatattaattaatcttgaaggtataacttattatattaatacctag

SEQ ID NO: 289971 - DNA, 756 bp, Morganella morganii
gtgaatttattacgtctaagtctcagtggtctgttaatgggtgttatgtcatgcccttcatttgctgacggaaataaccaacaacaggccggacaggtcggtggtgtcgggctgagtgccacacgtgtaatttatccgctcggtagccggagtgtgacgttgcgtgttgacaacacagctgactatccattcctggttaaatccactgtgcaggatgaaagtctgcgtgaggaggcgccttttatcgttacgccacctctattccgcctcgacagcgggcagcataacacgctgaccatcacccgaactggcgggaattatccgaatgaccgggaatccatgaactggttgtgtgtgcagtctgttccaccggaagctaactcagtatgggttgacgggaataaagctgatgccggccgggataaggtctccgcccgtatacggttattacccagcagctgtatcaagctgttggttcgtccggaggtcgttcaggggcaacctgtagatgcggcagataaagtgtcctggcatatctcgggtaaaacggtcactgccaataatccgacccccttttatatgaacatcagtcagctctcttttaacggaaaaaaaatacaaatggacaagcattatattgcgccattttctgaagagagatttcctctatccgggagtgaaacaaagggcacgattaaatggacggtgattggggattatggcgaagagctggaaaaaacagctacggtgaaatga

SEQ ID NO: 289972 - DNA, 2388 bp, Morganella morganii
gtgtccctttttaatgaagggttacagttgccgggtacctataacgtcactatcacggtgaacgaaaacaccgtagacagcaacgtgcccgtgccgtttcagctggcaggtaaacaggggagccgtcatcttcaaccctgtctggcgccggaacaactgacccgttacggtgtggatatcagcaagtattcggtggccactgatggaaatgcctgtgctgatctggatgctgttccgcaggcaactgcacattttgattttaatcagcaacaactggcgttggtatttccgccgcaggccatgttaccggagctgaaaggtattgcacctgagctgctctgggatgatggtatccccgccctgatattgggttgggatgcgagcacacagcacagtgaataccgggggccatggtcttcccgctcggattcgaattatatccgtctgcaacccggactcaacctcggaccatggcggttacgcaatgcctccacctggcagaaaaacagcagccaatccggaaagtggcagactgcttatacctatgccgagcggggtatcaacctgttaaagagccgtctgacactcggggaaagttataccaccggtaacgtattcggtagccttcccttccggggggtgatgctggcctctgacgaaagcatggtgccttacgaccaaagtgagtttgcgcccgtcgtcaggggaattgcgcgaactcaggcccgcgtcgaaatcaaacagaatgggtatacgctaaccagcaccacggtgccggcaggaccttttgagattaatgacctgccttctgcagggtcgaacggggacttacaggtcaccgtgttggagagtgatggttcgcaacaggaatttaccgtgccgtataccgtaccggcggtggcattgcgacggggttacctgaaatacagtgtggccggtgggcagtaccgaccgtcatcgaacaacgtgaaaacagcaccggtcatgtcggctgaattggcttacggtttaccgtgggacttaaccgcatacggtggtgtgcagacggctgagcattatcaggcaggctcggccgggctcggtatcatgctgggtgcctggggcgcagtgtcggttgacatgacacacgctcattctcagcggcagggacagtcgtggcaaaatggcgagcgttggcggttacgttacagcaagacattagacacgggtacgtctctgaacctgaccagtgaagagtatgcctcaaagggatacaacgacctggcagaaaccctcaatacctggacagataacggtgataccccgtattcaggttatttcaggctttggccaaagaaccgaaccagtgtgtccctgagccagtctttaggccgggttgggtatatcagtctgaacgggagccaacagacatatcatgatgaccaaagtaacagcagttcgtggggcgcgggatacggtacgtcactgtgggggcgggcttacctgagtctgaactggtcgcgtaaccagcgcaccgaccgtaatggccggacaaccaatgacagcatgaccagtttgtctctgagtctgccactgagtggctggtcatcggacagcccggtgtacgccagttaccagatgaacaaccgtgctcacggcgatacatcccatgagctgggtttgtatggtgatgtattagaccgccgtttgcactgggatgtgcgtgaacgctaccgtgacggggctggaaatgataaagccagcagcgcgttatacctgaattatcgcggggcttacggagagataaatgggaactacaactacagcgaccatcagcagatgtcgggggttgggctgaaaggccagttggtggccagcccggatggagtgacactggggcaaccacagggagacacactggcgctggttgaaacaccgggcgtgtccggggtgcctgtgggaggctggccgggaataagaacggacttccgcggatatacgacactgggttatctgtcgccgtaccagaagaacgaagtgaatctggacccttccaaactgccggatgatacggcggtatcacgaacgtctgtgtcggtggtaccgacaaaaggggcggtggttaaggcggcgttcaaaacgtcggtgggtaaacgcgtactgttgacactgacgcgtgaagacggaacaccggtgccgtttggggcggtggcttcggtggaaggacaggagagcagtacgggtattacgggtgaccgtggtcaggtgtacttgaccgggatgtcggataaagctgaagtgaccgtgcgctggggacagggccaatcgcagcactgtactgcacaaatgcaggttcagggggaggcaggtctggccgggttgtatatggcgcaagctcagtgccgttaa

SEQ ID NO: 289973 - DNA, 402 bp, Morganella morganii
atgggcacgagcctactttatcacattgattgcggtttcagtaaccgtgagggaatttattatgcacgctatatgggcgactttcttatccttacgcagacacggtggcagctacgccggtgtattgcacaactcaatgagtcgctggatgtcagtggctttgaacaacatccggacaaaaccttcattggacggattacgcgtgggtttgactggctgggtgcctggtttgaaccgggggccgccggactggctccccggtcactaagacgccatcgtgagcggtgtctgcggctttatgagcaagcctgtcgtcagggattaacacatgaaggatcaatgacacgggtgcatgactaccgtaaacgctggcttatccatgcgggaaagttactgcgatga

SEQ ID NO: 289974 - DNA, 507 bp, Morganella morganii
atgaaattcagaaaccttattccaatcttaatcaccctcgccgcatcatcagccgcatcggccgcgcacctaaaccctggcgtgttcgcaccgtggcaagctgataatgtccgaattgcgtctcaagctttcaccgtgtcggccacccgtgcacagaatgaaaatccaatcataatcacacaagaaacattcgatacagtaattccaccgactgcggcagacacttgggcgacatctgttaaaaaagcctcggtagttttttccaatgccaacccgggcgacatattttgtttaacacaagaaagagatgaacctagaggcgtgtggctcatgtggggggctaagggcgataacagtcactgggtcaaaagaacccaagctggtgaccgaacccaacaacagtgtactagcggggaatcgacttacaacgtggaggttcgtatgagtggaaaagcccccttcggaacaacaactataccaatgatatactatatcctagcaaactaa

SEQ ID NO: 289975 - DNA, 957 bp, Morganella morganii
atgaaaaaaatcatcgcactcgccgtggctgcagccgttatgagcccgctgttagcccatgcggccacaggcccggcagatgtcgggactgtggtttatcagggtaaaatccaggcaaatgacccgatgtggcaatggacggtcaatgattacccgggcggcaaactggttgtgaaagcagctgacgcagtccctcagagcggtggtggtgttattatcccgctgaaagcctcgccgttcattgcggtgagcgggtatttgccttcgagtgtgggagtgcaaaactctaacctcgctaccccatctgactcatctttcgctggtatccgagatatgacctcgctctctgaccaaaatcatgcaggcccagagaatataacctatgaacctagaggtgtggtggcattcacaatcgcagcgacaggccatgacattagtggtaaagcggttgatggaacacttaaactcaaaggtacagaggttcgaggataccggcgtgcatatatagaaaatggcaaaaaagtactcaaaaccacaggagtgttcggtaatgtaacacaaacatcatacgtcgcaaactccagttgttttatcgggggaggcagttttagtagcttaaacgaaataattaagggaaccagtacagctccgacagtcggggagcaatctcctacagcgttcacagcgtttgtaaatgcgctcacgattgctgatacccaaggtgtagcccctaaatggagcactataactggatatccgagtgaccgtattgaagtacgtgagagtggttgccccagccagtcaacttacgcgtacacagtccttcctgtgaattcaactaacgaatatatatcttccgcgcacgttctggaacttaccccagtggagttaaattttagcactccggtaagcggtgcatggagttcacaattaacggtgactgcataccaaatgtaa

SEQ ID NO: 289976 - DNA, 807 bp, Morganella morganii
atgaaaaaaatgaaaatcggcgtggtggcactggctcttgccggcacattcgccagtgttggcgcgatggcggcgaccggttcaggttcaatcagccacgatatagtgttctccggaacgattatcaaagacgcccccaaatgggtgtggacactgccgcaacaaactgtgcggcttgacttaaaagccggggatgctgtcattaaaggtgacaacacggagtgggacgttttacaacaccgtaccgatgcacattaccgtttcctggaagggtatatggagccgacggtcgtgggtttacctatggaaaacctgaacgcggacataaaatatatgcaggaaggtgctgatgtgactcccgtgatgggcaccaataatgtcacccaactgacgttaaaggcaacaggcaacagcgatgccacccccgtgacagggacgctgtcggtggaactccagccggttctgctggtcggccaggccgactccgggaaaaccacggagctgaaggcacaacaactggcgggcgtgggcgtgacccaggccgacaccaatgcaacagaagcttacaataacgcgaaagccaaactggaatcgcaaaacagcaaaatcggggtgagcacggtgaactatgataccggttcgacagcgccggaaaacagcttagcggatggcacgctggtgacacaaccaacgattgccggttatgcgtccacgctgactaaagccgtgttatcgtttccaacggctacggcgggttctgtctctctgtgggagagtgttatcactgtccaggtgcaatataaataa

SEQ ID NO: 289977 - DNA, 594 bp, Morganella morganii
atgaagtcaacacaagaacattgcctggtgagccggcagacagaccggagacaaccaccgggccggagactcagaaccggactcctgacagctctgggactttggctgctctcgcctgtcagtctggcgaaagagactcagcatctggaagccctgggcgtggtcaacggggccgttaccgcagcacgcagtactcaggtggatatcacggtttttttatcaggccagccgctgttttcggcgacagacctgacaggcccggagcccttaaacgcgataatgattgagcaggcgacgttagtctcgcaggacggcaatacattgcgggtgcagcagccgttcacgttaattcagggtgacccgggacaactccagttgccgttgcaggtttacgctgatggtaaggttattcacgtaaatgcgcaggagaccagcctgggcgtgcagttaaccctgcctgatgaagcacagacagcaaaaaccgtgacggttatacctgccggggcggcgcagttcactgtgccggcccgttaccggggggcgttacaggcccaattgcgcctgaccggtgagtatcatcctgaagctagctga

SEQ ID NO: 289978 - DNA, 744 bp, Morganella morganii
gtgagtattaaaacgttaagtgtcagtgtattaagtgcattaagtctgatgagtgcgtcatctgcatgggccgcgttatcggtcgaccagagccgctatatttttgagggggataaagaggccgtgtccattgtggtggagaatgcgtcccccaaaacctatggtggtcaaacgtggatagagaacatcaaagagacagacctgcggccgacttttgtggtaactccccccttttttaaagtggcgggtaacggtaaacaagtcttgcgggtgattaaagcgctcgaacagatgcccgaagacaaggaatccatttattgggtgagtttacaggaaattccgcctgccaataaagacggcggactttctgtggctctgcgcaccaaagtgaaattactgtatcgcccggcgaatttaatggcgggacgtaaagcggcagaggaaaatttatccaccaaagacatcaacggccaaacgcaattagtaaacaccacgccatacatttttgcgatagcggacgtattgggagacaaggatgtcagcatcacgttagataacaaacagcatgaagcgctggccatgtttacgccgggtgacacggtaaccctgcccaaaggcgcgaccgcgaaaaaggtggtgtcaattgatgatacgggtcacttaggtacgtatgaaattacagggaaaatacattcaacggacggggccggcaaaccgccggtcgcacaagtaccgaagtcatga

SEQ ID NO: 289979 - DNA, 2406 bp, Morganella morganii
atgaagcagactctacacacaaagacgaatttcttatcttcccggagctggcgtaccgccttaggcatgctgctgagcgcagcactggtgatacccgcatggtcagaagaaaccggtgacgggctgaatctggctttcttacaggggggagataacgcacaggcggcggatttcctggctgccaataaagcctattatcccggacggtattgggtggatgtgcaggttaatggtcatccggtgggaaaacgggtgttaacagtgaccccatcagagttgcatgcgctgtgtttttcaccggcttggctggcttcggtagaaacctatgtgcgccgggatttttaccaatccacttaccgggcagccgatgattgttttactttgagcgaacaacctgacagtgccgtggattttgatttatccacccaaaccctaaatttaaccttgccacaggcggggttaaccaaagcggatgacgctttatcgtgggagtttggcaataacgcgctgcgcttaaattataacgccaacgccaataagaccactcagggtgtggactattacggttcaggatctttgctggccaacgtgggaggatggctcgcccgcggcagtgccacactgactcaggaggaacaatcggtctcggtgtttactgtctcgaaagccattttaccgctgcaggcagatttagtgatgggtaaaacgtcggtcagcagtggtgaactcggcggcttatccacttatgggatgaccctcagcagcaatcagtcaatgcatcaacagacacaggggtacaaaccggtattcagtggcacggccagtagtcaggcacgggttaccctgcgtcagggtaccacggtattgtactccgaaattgtgcctcctggtccatttgaaatcaatgacgtggtggttctctctggaggagatgtggtgatgacggttaccgaaaatgatggtacctcaaccactcaggtgtttcccgtgacactgattagcgggcaaatttcaccgggtgagcatgaatattctgtctctgtcggggtcacggataacaacaatgccaaaggcacgccgaaaggagggctggcagcactgcgttacggctatggtctggaacaggtctccgtgcgtgtcggggcattgatggcctcccggtttaccgggattaccggggaagtcacgtcacaactggggatgttagggtcaatatctgttgcagagtccgccacgcagtcgcgctatgaccagggaaatcgtcagggacaaaaaaccaccctgacatttgccaagcactttgataccggaacgtcctttcgtctggggtacaaccggttaagtgaagcgtatgacacgctcggggaatataacgatgtcaattatgccgacctgcagcgccgtcaaccgttaaaagaagacataacggtgggaggcagtcaacctttgtggcgtggaactacgctctctgtcaatggctggcagcgtcagtattggcatcaggatgaaaaacaacaaggtgcgaccggcaatctttcaacccgcgtgggtaacgtaagcctttccctggcagggtcatattacaaaaccggggccgacaatcaatacagtttctctacctcggtctccattcccttctctgtgtttgagcgcgatgtctccacatttgcgtcgatgtccgggggcaaattaggcggcaacagttattccgcgggggcatcgacgagcttaacagaccgctggtcactctcggcgaacgaaagttggggaggagacggtaacctgggaagccaaaccacgttatggagtgcatatgacgggcgactggcgcagctcagcggccagatgacccacactgaccagggtactctggggtcgggctccatcagcgggtcagtcatgtatctgcctgcaaacaacagtgtgattttaggtaaaagcatttcggacaccgtcgcggtggtacaggttcccggaggagccggtacctcattattgggaggcatggataaagctgaccgtaacgggaatattctggtgccactgagcagttaccaactgaataccctgagtattgatgctggtacattaccggctgacaccgagttggcagtgaccagtcaaaaaatcaagccgacaggaagttcggtgacgtatgtcccgttcgaggggatgaaggtgaaacggtatttgttgcaagtgaagcgtccgaacggtcagttccttcctgcgggagagtgggcgtataccgagtcgggggcaccgttagggtttgtgagccataacggggtgatattaatcaattcggttgatgccttagggacgttgcggttttcggactgccgggttccgggggttcagttaacggaatccagtcgattacaagaggtggtgtgtgagtattaa

SEQ ID NO: 289980 - DNA, 630 bp, Morganella morganii
atgcagttatggggcatggtcatttgtgggacagtatttgtgagcggtctgatgatgaaagcagaagccgcaccacaaaccacaatcaccacgataacaggtacgatagtggcctcgtcgtgtgtaggtgaaatcgtaacgacatccctgacaggacagacgtcgggagcctcaggccttgtggattttggggtgattaatcccaaaacatataacgctcccccgcgcgaattttcattacgcttatccgaatcattaggcggcgaagcaggctgcagtgcttttgaaactaaagcttatagccttcaatacaacggcgcagcgaccttatcctttggcgatatcgggcgtacacaactggatgacaacggggtcattttgcgtcgtgaggatggcaatgatgccggattacgcgtccgggtctccccgaaggatgcagaaggtcagttcgctcaggccggggcgccgggatatgtgacagcgaatgacacggatatagcctatccaatagactttgcagcaaaaggattatttgattttaaggccgcactcagtccgctcggtaaatggagcgaggtgcaaccaggtcggttcggtgggtcactgaccgtcactgtgacgtaccggtaa

SEQ ID NO: 289981 - DNA, 1023 bp, Morganella morganii
atgcgtcatcagtatcaactcagcgtaaagggagcagttgatatccctgcctggcagcaatcgctggctgatcatctcggttttcataccgtgcatatttctgttcctgatgatattcccggggctgtttataaagggtcattacgtattgatacttattcagcaccgttatcggttaaaatcgcgaaaattgactccacacctcagataacccggtttatccaccgggattgctgtgaccataacaaacagcactgcattcttatccattcactgtccagtttgtctgtcagtgcaaaaaaccgggatatttacctcccgtacggcggttatatcgtcattccggcctgggagccttacaccattaaaagtctgtctcaccggtatggattaacctttgtgattaatctggttgccgcaggctttaatcctctgtcactcacccctttattctggcgggtcggtaactatttgcgttacggcaacatggtcaataacctgctgtcggattactatgcgccgttaaccgatgagtacgcagaacagttaatgagttctttaaagaatttattcctgttgcaatgcaaacacgtctgttgcccctgcaattttaataaaaccctttttaccccgaatttggatatcagtgccattacggatgttatccgccgtaatatgaccgaccccggatacagcctcagcgatttggttgattattacgggatatccgaaagagtactgcagctcaaactcgcccgttacggcttttctttcactcagctgctggcttcatcccgctgtgagctgctggcaatgactctccgtaacacgcctgacattaatcctgatgtggcgtcaagaagttgcgggtttaccagtttgcggatggctgaccggcagtttaaaaaattttacctccggtctgtcaccgggtttcagaaggatgaattaacctcatctgcggttacacgggaacctgcagcaggagaagagaaacgtatgctgaaaaggtcaggtgactga

SEQ ID NO: 289982 - DNA, 537 bp, Morganella morganii
atgacaccttttccaaaacgccggcaaataaaggaaatattatccgcaggcagaacaccttatacaaataaaatgatgaaaaaaaatatcgcttttgttaccggtcgtcagctgaaaattttacgcaaaaagcatgatattaacggtatgcaactcggaaagatgctggatatcagtcagcagcaggtttcgcgttatgaaaatggtcttacccctctgccgctcgataccattatcaccatctgtatttactttcatctctctctccgggaatttttagcaccgctgatagtattaacggaagatgaaaatgaagatgagcatactgaaatcccgcctcattttttccttgttaccccggatattgtggcggattcaacgcgttcttttatttgccggcagcaaaacgcgggcattatcagtgcaaggggaaaaaggcgggataagaggcgggcccatccggaaaaaatgatgaaaccccggaaaactgttcaggaagaggtatccgacggtatctcagttactgatgctgaataa

SEQ ID NO: 289983 - DNA, 630 bp, Morganella morganii
atgacattaggacaattaattgatgctatcgatgtatatttttctgatgctcattgtgataatgaaaaaatacaggcactgaatcaattgaaaatgtgtttacataaacactgtccgtttaacaaagagcctgtggattgtgttatatgggttaaatccgatagggtggttgcgaacgattataaccctaacgtaatggcacccgctgaaaagcgtctacttaaacactctattgagaaagatggtttcacgcagcctgttgttgtttgtcaacaaggggaaaaatatctcgttgttgatggtttccatcggcatttattagcaaaaaatcaaaccagtacaggaaagcgtttacagggatacgtacctgtcacctgcgtaaatattgacaataaagaaaaagcaggacgaattgctgcaacaatcagacacaacagagcccggggtaaacatcagatagcctctatgtctgatattgttcgcgatttatcccatttgggatgggataatccccggataagttcagagttaggtatggatgaagatgaagttttacgtttgaaacagattagcggaattaccgaacttttttgcgatgatgaatacagccgggcatggacggtaaagtaa

SEQ ID NO: 289984 - DNA, 1230 bp, Morganella morganii
atgccagtgtctcataaagtaagaaaaatcccggcgggagagaatgtttaccatgctgcgattaaacgtatagagtggatttttgatactttttcaaaagtatgtttatcgttctctggtggaaaagattctacggttttatttcatctgatggcgggtgttgcccgaaaacgaaaccggtgtttttctgtattgtttattgactgggaagcgcaatatcaatgcaccattgaacatatacaaaagatgaaagaagcttatcaggatgtcattgataccttctattgggtggcacttcccttaacaacggttaatggtacttctcagtatcagcctgaatggatatgctgggaacacggtgtttcatgggtaagaccccctccggaagatgccattacaaagagcgactattttcctttctataaatacgcaatgacctttgaggagtttgttccggaattttccctttggttttcgcagaaaaaaatggccgctatgttgattggtatcagagcggatgaatcactgaaccgttttatggcgctcacctctcgcagtaagttgaggtatgaagaggataaaccttggacaacagcatctgctgaggctttttattataccgcttaccctctttatgattggaaagctaaagatatttggatttatcactctgaaagcaaagcaatatataaccctctgtacgacctgatgtacagggcgggcgttcctgttaaagccatgcgggtttgtgagcctttcggtcctgagcagagacggggattatggttgtatcatgtgcttgaacctgatacgtgggctcgaatgtgcggaagggtttcaggtgctaacagtggtgctatctatgctaaccaaagtggggaattttatgctctcagaaagcgtatcacaaagcctgctcatcattcatggaaaagttatgcgttttttttattagattcgatgccccaaaaaacggcagaacactacagaaataaaatcgccatttatttgcgatggtatcaaacccgggattaccctgatgatattcccgatgaacaggaaaatgaccttggtaataaagacattccgtcatggcggagaatatgcaaggcattattaaaaaatgatttttggtgtagaacactgtcttttagtcctaataagtccagacattatcagcgatattgccagcgtatacgtcaaaaaagagaagaatggggaatattatga

SEQ ID NO: 289985 - DNA, 1020 bp, Morganella morganii
atgaaatatacaccggttggcgttgatatcgcaaagcatctgattcaggttcacttcatcgatgagcacacaggtgaagtggtggataagcagcttcggagcaaggattttctgacgttcttcagtaaccgggaaccttgcctgattggcatggaggcctgtggcggttctcagcactgggcacgtgagttaaaaaaactgggccatgaggtccggttgttgcaggcccggttcgttaaagcgttcgtcatgggcaacaaaaacgacgtgatggatgcacgggccatctggatggcggtacagcaacccggtaaggaaatcgctgttaagacggaagaacagcagtcggtgctggttctgcatcgttcacgcagacaactggtgaagttcagaaccgcgcagattaatgccctgcacgggacgttgctggagttcggcgaaaccatccacaaaggtcgggcagcgatggatagtgagttaccggctgccctggaacggatgaaggcgaggctgcctccgtatctcatcaccgtgccggaagaccagcataacaggctgaaggagctggactcgctgatagatggccttgaaaaacagcttaacagtgtggcgcgacagaatgaaacctgtaagcgattgatggaaatccccggcgtcggaccgttaatagccacggcagcagtcgccaccatgggaaaagcagcagcgtttaaatccggacgtgagttcgccgcttacgtaggcctggtacctaagcagacaggctctggaggaaaagtccgcctgctgggaataagcaagcgtggcgacacgtatctgcgaaccctgtttatccatggcgcacgggcagcagcactgctgacaaaagagcctggaccatggataaccgaactgaaaaagcggcgtccgactggtgtggccatcgtagcgatggcgaacaagctggcgcgaacagtgtgggtaatagcggcccacgaccgtaaatacgataaaaatcatgtcagtatcagaccttattaa

SEQ ID NO: 289986 - DNA, 459 bp, Morganella morganii
atgaggatcaggtcagcgaatctcatagtggcccgcagctctgactgcaataaagccggatacagagctgcaactacttgtcaatgtcaacataacggaagccttgcaagcggggatgcgttcatacagttaatcatgaccagaaaaaaccaaagttactctaaagagtttaaagccgaagctgtcagaaccgttcttgaaaatcagctttcgataagcgaaggcgcatcccagttgtcagtcccggaagggactttaggacaatgggttaccgccgccagaaaagggctcgttacaccgggaacccgctcggttgccgaactggagtctgaagtccttcagttacgtaaagagttgaatgaagcccggcttgaaagggatgttctaaaaaactggcaatggagtagtcccgccctggatcgcagaaactcctgggcagattctgccaggataggctga

SEQ ID NO: 289987 - DNA, 1341 bp, Morganella morganii
atgcgaaacgcttccactatgtctgttatccattaccatgctgcaggtgttgatattggcgctgagttccacgttgttgccgtttcccctgatgcagatcccgagccggtaaggacttttcagagttttaccggcgatctccagcggatggcggactggcttaaatcctgcggggttaccagcattgcgatggaatccaccggagtgtactggctacccgcgtttgaaatactcgaagccgcaggtttcgatgtaattctggttaacgcacgggatgctaaaaatgttcccggtcgtaaaaccgatgtgaatgatgctcagtggctgcaaaagttgcattcctttgggttgttgagggccagttttcgtcccgaccatgatattgcaatattgcgttcatatctgcgacagcgtgagcggctgacagagtaccgggctgcgcacatccagcatatgcagaaagccctgatgcagatgaatgtacagttacatcatgccgttgctgatattaccggtgtcacaggactgtccatcgttcgcgccatagttaatggtgaaagagatcccgcagtcctgatccagtatcgtgacgttcgctgtaaaaagcctccggaaatattgcttcgggccctgacaggtaactggcagccggaacatttgtttgcattagagcaggccgtttcactcttcgatttttatcaggaaaaaatccgggagtgcgatgttaaaattgaagaatcccttcatcaactttgccagtcttcttctgagccggagggcacattgttgccggcacgacaccgtaccaaacaacccaaccagcttgcctttgatgtcagacccttgctctggaaaatcacgggggtagacctgacacaaatacatggcttcgggccttatctggcgctgaagttcatcgctgaatgcggtacggacatgaatcgctggccggatgccagccattttacctcatggctgtgtctgtcgccgggaaataagatctcaggaggaaaggttttatcatcgaaaacgaagcgttcgtccagcagaatagcggcagcacttcgtctggccgcaacgacgattggccggagcgatactgcactgggtgccttctaccgacggttatcatcccgtatagggaaagcaaaagccgtcactgcaacagccaggaagctggcgatacttttttacaatgcgctgaaatatgggcagaaatatacagaccccggagctaattattacgaagagcaccatcgtaaccgggtgcttgatggattaaagcgaagggctaaatcaatgggatacatacttcatgaagatcccgattcatgtatctga

SEQ ID NO: 289988 - DNA, 825 bp, Morganella morganii
gtgtgcttggcgtttcccggagtggttattacgagtggttattacgactgggtacagcataaaccatcagacagaaaacaaagtgacgaacggctaaaactggagattaaagtggctcatatccgcacccgtgaaacttatggcacccgacgcctacagacggaactggcagatagcggaataatcatcggtcgtgacaggctggcgcgtcttcgtaaagagctggaactgcgttgtaagcagaaacgtaagtacaaggcgaccacgaactcaaaccacagtctgccagtcgctccgaacctgctgaaccagaccttcgaacccacaggccccaatcaggtccgggtaacggatctgacatatgttgccacacaggaaggatggctgtatctcgctggcgtcaaagatgtttatacgtgcgaaattgtcggctatgccatgggagagtgcatgacaaaagagttaacgggaaaagccctgtttatggcggtcaggaaccagcggcctccagtcgggctaatccaccactccgatcgcggttcgcagtactgtgcgcatgactaccgggccatacaggaacagttcggcatgaaaacgtcaatgtcgcgtaaaggcaactgctatgacaacgcaccgatggaaagcttctggggaacactgaagaatgaaagtctgagccactatcgttttaatacccggaatgaagccatctcagtaatacgggaatacattgagatcttctacaaccgtcagcgccgtcactcacgtctgggaaatacttccccagcagccttcaggaaaaaatattatcagatggctgcttaa

SEQ ID NO: 289989 - DNA, 1002 bp, Morganella morganii
atgcgttattctaagatacttattgtcagaatagattttttaggtgacatggtatgtaccacgccattaattgaggctgtgaaaaataaatggccagaatctgaaattcatgttctggccaataaatataatgctcccatcttagataataacccttatgtatcctgcgttcattattatgtttatagcaagcaatgtgaacgtaatattaaaccgggtaaatttaacgcactaattaaccgcatcgctctgatattacgcttaagacgattgaaatttgaactcggtattatacccaatggtggtatgcataagaacagtattcaatttcttcggcaacttaatattcctgatgttagatggcatacgggtaaaactgaatttgatgaccgtaatgaagagcatgttttaaacagacctcttgtgcatgagtgcttgtcgggttttaaattactgcctgaattaaacttaccggaaacaaataagttaaaatatactgtctacccatcatcttttttgagaaagaagtggttaaatagaataaggcgctctaatgggtatagagttggtttatttgtatctaataaatcagcagagcgaagatgggatatttccaggtggtttaatttgattgaaatcatgggtgaagatgttgatttttttatttttcatgatccaaaagataatgttaatccacttttttataatgaagagataaccattgttaaaacagaaagcattcaggatctgattgctgcgatgagctgtatggatcttgttgtttcagcagatagtgcccctgttcatttgagttctgcattaaatatccctgtagtggctttattcgaaaatcgcccggaaaaatatcttcgttggtatcccgtcggagttgaatataaattattaaaaaacaaagggattgttaatgatattgaaccctgcagggtcgccggggcaataaaatattttttaactgattttcacctgtcaggtaaaaactga

SEQ ID NO: 289990 - DNA, 1065 bp, Morganella morganii
atgcataaaaacacgatattatcattacaaaacattaacaaaagcttcgacggaaaagtaaggataagcgagaatatcagtctaaccttaaccaaaggaaaaatcctctcactactgggcccttccggctgtggaaaaaccacattgttacgacttattgccgggtttgaaaaacctgacagcggagagattaccctgtataacaggatactatcatcatcaaaaactttcgtgcatgccaaagatcgccacattggttatgtggtacaggaaggtatcttatttccacacctcagtgtgtatcaaaatgttgcttatggcttaggaaatggtaaaggccgacacccgtcagaacaaaaccgaattaacgctattcttcatttaatgaagatacctgaattagctcagtctatgccgcacgaactttccgggggacagcaacaacgggttgcactggcaagagcattagctccgtcaccagaactgatcctgtttgatgaacctttctctgcaatggacagcgtgctacgtgttaagttacgcgctgaaatcataaatattctgagggaaactggacaatcagcaattatcgtgactcatgaccgggaagaagccatgcaatgttctgactatattgcaatattacgtgaaggcaaagtagtccagattgatactccgcaaaatatctattattaccctgcagatattcccactgcctgttctgttggtgatatcaatatattagaaggtgaataccattcaggaaaagtcagaacgctactgggtgatattacagtgacacatgttgatatccatgaagggggtcagggtaaaataatattgcgtcctgaaaatatcactttggttcagattaattcagcttctttccatggaggaatgaaggttaaattagaaaaatgtcaatttaaaggtacaaccagcgacgttattattaatattaacggccaataccttaacctgaccgtcattaatacagttccgttacaggaaggccagtattattcattacgaatgcagtcaaatgggttattttatacaaattaa

SEQ ID NO: 289991 - DNA, 1017 bp, Morganella morganii
atgaaaaaaggtatgcagttgtttatttcatcactggtactcagtggtgttatgttttcagaaatcgctcaggctgacctgttaatttataacgggcaacataaggatggcggaatagaacaggttgctgcggaatttacacaaaaaacagggatcccggttaagttaaaatatggtaagtcttccgaacttgccggattactgaaggaagaacaggataaatccccggcagatatttttgttgcggaaagtacagggcctttcctgtcattaagtgctgaaaaattattagtacccattaatgccgatgcgttaaccaatgtgagttctgatactatcccttccgcatcgaaacaggattttgttcccattggcgttcgcagccgtgttttggcctataatccggataaaattaaagaaagtgacattcctgaaacatggacaaaaatggtaaatgatcctgcgtggaaaaatcgtttttcttatcacccgggatcaggagcgcttgttgatcaaatagccgtttataaaaaattacatggattagaggcaacaaaagcgtttttagctgcgatgaaagaaaatggtcaatcgatcaaagggcatatggcggcgttaaagaaaatcgatcaaggtgatttggatgttgcaatgatcaaccaatactatttataccgtctttataaagaaaaaggcggtgcagataatgttaaggcaaaaatttactacatgcgtaatggcgatgcagattcagcattaagtttttctgctgccggaatattacgttcatcacaacatcaatcagaagcacaacagtttatcactttcttgacgggcaaggcaggacaggaactgtatgtccaaaattcggcagagtggccggccaatactcaggccgtatcgccagtaagctacttagtgaaacttgatagcctgaatccgcctaaaacgtcatttacaactaaggaagaaagtgatgaggcaaaagcgttaataaaagaggctgggatccagtaa

SEQ ID NO: 289992 - DNA, 1542 bp, Morganella morganii
gtgttttctcataccagaaaaacaaaacaaccgccgttacttctggcggttgttattgtgattattacattgccgatgttgttacccatcctctatatcttacagtatggaataacattagatattcatcagacttatcatcttatttttcgtgcagaaacatttttacttttacgaaatacgttacttttgtgtttttcagtgacattggtaagtgtgttattagggggactatgtgcatttttacttgaacgttgtcaggtaagaggaaaaaacttactcagtgtattaatcagtttacctctttgtatcccgggtattgtcagcggcttcacctggtttagccttaatacacgcattttttcaggctttttgggggcgggccttgtaatgacgctcgtgtcttttccgttagcatttttacctgtatcagctgcattaaaacgcattgactcaacgtgggaggaagtgagttattcattagggcgttcccggctttatacttttcttcatgtcctgttaccgcaattaaaacccgcaataggtagtgctgttcttctgattgctttgcatttactgattgaattcggtgttattgcgattatggggtatgatactttcagtaccgctatttttgcagaatttgaagcttattataatactcagacggctgcggtactctgttttgtcctggtgcttttatgtttatgcattattggttttgaattaaaaatccggggacaggcaaatcgggttcgttcaggtaagggggttgttcacccgccaaaacttatttatttagggtatggagagtggtttgtcattggatttgtttctttaatttttatttcaggtgttgtggtacctgtcattgtgttatgtcagtggatttatgaaggaacggccattcatagtgagtatttttcctggaaaacctattttaacgtcattgccgatacgatatttatttcgttagtttctgcggcaataacattattgactgcgttccctttagtctggttttctgttcgttattcgagttttctctcccggtggctggagcgcttaccttttattttgcatgcaattccatcggttgttgttggtttggctgttgcacgatacacggtcttatatgcaggtattttctatcagacctattatgtgttaattccggcctatttgatgctttatctgccattagcccagacaacgctgcgctctgctgtggagcaacttccttaccatattgaagaagtttctgattccttagggcaaaaaagagccactttattcatgcgggttattttaccctcagtccgtcccggagtcattgccgggctggcactgtgctttttgcagatgatgaaagaattaactgcaactcttattttatcacctgcgggtatgtcaacaatcgccattgagatttggcatgctcaggaaggtttatcttattctattgttgctgtttatggtctgtctttaattttattttcaggtattccggtttatttattgaaaagacattactcaggatga

SEQ ID NO: 289993 - DNA, 942 bp, Morganella morganii
atggcacataaaaccactgaaaaaatcagtatcaatccgctgtcggatactatacccggcgcagattttgatttatccgctattactgaagcttccggtaaagaagctcaggcacagcaggagcgcgatttcttaaatcagcttctgggtcaggctaaaatggccgatgcatttgcaaaattttcggtgaccgtcaccacttccaaactggtatttataaaagaaaacaaattatatcgggcacttagcggttgtaaaagtggtgacggtcaccagtttacaggaacctgggaggaattttgttccttattaaaccgctcccgcgaacaaattgatgaagatatcagaaatttacggactttaggtgaagccgccctggaatccatgtcccgtatggggataggatatcgtgaactgcgacggttccgtaagttacccgaagattccaaaacggccctgactgaagcggcgaagcaaggtgataaagaaagcctgctggagcttgctgaagaactgatagcccgccagaaccgggaaaaggaagcactggaaaaacaactcacagataaagatgctgaccttaaagccagccgcaggcgggccgctgaactcaaagccgcccgcgatgaactggaagataagctgtgcggggaacgcttcagaccggtcagcgataacgaacttgccgaacgcacccggctagaagcaacatcaataagcagccggattgtacgtgaattgatggggtcactgcaggcggcgtttactgcgctgggaaaagatatggctgaccgtcacgttgaccacagctgctttatggcggggcttgtcagtgaaatccggggggaactggatgatttaatcacacgcttcggtattcctgacctggtcgcagagcacactccccctgcatggttaaacgaatatcatgcacaggaataa

SEQ ID NO: 289994 - DNA, 1818 bp, Morganella morganii
atgaatgccgccatgaatgcacgcctgatatattatgccaatgctgtccgtcaggccgctcacggacaaaaagaggcggtctgtcaggcagcctgtcaggagttaggtctgtcacgtgcaacagtattaaaaaaactcaggccatttcgggtcagtaaaccccgcaaaaaacgcagtgacgcaggcagctcagcactgacccgtcatgaagctttagtgatttcaggggcctggctggagtcccggcgcaacaatgacaaacgtctttacagcttaaagaatattgtcggtgctctgcggcaaaacggcatgataactgccggtcgtaccgataaagaaaccggggaattttccccgttatcagcggatgcggtcagccgtgcactgcgacgctaccgtctgcaccctgaccagctgcaaaatccggcaccgtcgctggaattaagaacaccgcaccctaatcacacgtgggaactggatgcttctgtctgcgtgctgtattacctgaaaaacccgggtaaaaaagtcaggagagacaccggattgcgcatcatggacagagatgttttttataaaaataaaccgaaaaatctggcgcgtattgtcaatgaccgggtgtggtcattcgagttaaccgaccatacgacaaactggatttatgttgagtatctgtttggcggagaaaatgcagaaaacgttctgaacgtcatgataaatgccatgcaggagcgtggtggttatgatgtgttgcacggcgtaccgtccatcctgtttactgaccccggcgctgcgctgacatcggcctgtttacttaacatgtgccgggcactgggtatccgctgcctgcaacataaagcacgtaatgcccgtgctacgggggcagtagaaaaagcccgtgatattatcgaatgtgactttgaggcaggactgcgttttgtgcgcattgaaacccttgaccagctgaatcactatgcccgcttatggcggacagatttcaacctcaaccgtattcacagccgccacaaaatgacccggacccgcgcctggaaaacaatcaccgaggaacaactggtgaaagcaccggctcctgatgtgtgccgtgaactggctgttgccgcaccggttgagcgcgttgtgaacggtaagctcagggtattattcagaggacaggagttcagtgtggaaaatgttccccatgcctgcgtcggagataagttactggtcacacgtaatccgtggcatgaggatgaggcgcgtatcctcattaccggtgaggatggctttgaaaattacgttcccgtttatgccattaaaaaagatgaatggggatatacagaaacggcgcctgtcatcggagaggtatatggtcatatgcctgtcactgacgctgaacgtcaccggctggaagctgaacagacagtgtatggcacatcaggaaaaaatgacaccgaaaaagcccgtaagacagggagactaccgtttgatggtcgctttaacccttataaaaatatggaagaggccgactatgacaaggttgctcaccttcctctgaaaggcagtcaggtacaaccttcagtgcgtgttcatcaggaagatacgggcctgacacgattaaatcacgttcaggctgcgatgagactgatggcggaattcaaagcccggggcaacgaatggagcccggcacactatcactatctggttaaccattaccctgacggtatcccggaagaccagcttgatatcctgatacaacgtctgccggtactcaatgataataacatcattaattctgtagccggtaaacaaagtgctgagtaa

SEQ ID NO: 289995 - DNA, 930 bp, Morganella morganii
atgttactcagaaaacacaccttaagccggcaggcaaaacgcgcctttaaattattacgcaatccctttgatgaatttgccgtgcaaagcagtgacgatatctttaccacacctgatatccgctatgtacgggaagtgatgtttcagacggcaacctgcgggggactgcttgctgtctggggggagtccggctcgggaaaatccaccctgcgccgtgatttgactgaccgtctgcactgtgaagacagtaacatggtgattattgaaccttacattttagccacggaagacaatgaccttacgggaaaccccctgaaagccaccggtatcgctgacgcaatactgagggccgtcgccccgggagaacgcccacggcaatcatccgaagcccgctttgcacagatgcatcaggcactcaaagccagctgtgacagttcacaatgccggcatgttctgatgattgaggaagcgcattcactgccactgacgacactgaaacacctgaaacgcttttcagaactgaagcacggcgttaaacatctgctgtccatcatcctgattggtcaacaggcgctgcgggacaagctcagcgaacgtaacccgtcggtacgtgaagtagtgcaacgctgtgagatggtgcagctttgcccgctggataatgacctggaggattttattaccttcaagtttgaccgggcagggaaaaaagcgggtgaagtcattgatgcttccggtattcagatgatacgcgaaaagatgaccgtcaaaaccgggtatcagccgtacaccgggcaggatgtgtatgccagtcatctgtatcccctggccattggtaacctgatggttgcggcaatgaataccgcggctgaaatgggtgttcccgtcattaatggtgatatcatcaaaattgtcacatcacaaacgcgctga

SEQ ID NO: 289996 - DNA, 129 bp, Morganella morganii
atgaagatcttcagtcttgtaatcagccgtaacgcaaggttttttgatttttgcattcttaaatccacggtcttcaagtacttccaggaccgcttttttgggggtgattgggttttctggcgcaagtga

SEQ ID NO: 289997 - DNA, 912 bp, Morganella morganii
gtgcttaaagataattttaatgagttacaaattttttttgctgttgcgaaggagaaaagttttaccaaagctgcggctaaactgggggtttctcaatctgcactgagtcatgcagtcagggcattggaagaccgtttaaatgttcggctcttgagacgtacaacacgtagcgtcgcggctacagaaataggggaaaagattattgcttgtcttgaaccccaactggctgatcttaatcatgagttagaggcaatcattcagcttaatggcgtggcttctggcaatatccgtctttcaacgggggagcatgcagcacgcagccttctttggcctaagctaaaaccgtttctgcgtacatatccggatattaatatcgaactggtagttgataatgggtttgttaatattgttgatggaggttttgatgcgggggtgcgtttgggagaaagcgttgataaggatatggtcgctgttagaattggccctgatatgcggttggcgattgttggttcaccgggatattttgaatctcagggcataccgcaaacgcctcatgagttacagcatcatcgttgtatcaatatgcgtcttcctaccgcaggagggttgtatcattgggagtttgaaaaagagggcaaatcgttacgggttagagtggaagggcaactcacctttaatttattgtccgagcgaattgatgcggcactgtctgggtttggtattgcttgcgtccccgaggataccatccaagaggccgccaaatcaggaaagctggtccaagttttaagtgattggtgcccggttttttcaggctattatctttattatccaaatcgaaaacagcaccctcctgcgtttgcattattgattgatgcactgcgttatagtgagaagcagaggctggtagtgtga

SEQ ID NO: 289998 - DNA, 990 bp, Morganella morganii
atggaaaaacgttttctcggtaattcaaaacttgaagtttctgcacttggattaggttgtatggggctgagtcacggttatggtcccgccacagataaacatcaggccattgaattactgcgtacagcagtagagcgtggggtaactttttttgataccgcagaagtctatgggccattcatgaatgaagaggtggtaggtgaagcgttaaaaccctttagagacagagtggttattgcgacgaaatttggtttcaactgtagtaatgaaaacaaacaacagcttttaaatagccgtccggaacatattcgtgaagccgtcgaaggttcattacgtcggcttaaaactgacgttattgatcttctatatcaacaccgtgttgaccctgatgtaccgattgaagatgttgcaggcacaataaaagatttgattgctgaaggtaaggtaaaacactttggcctttctgaagccagcgctcagacaattcgccgagcacatgctattcagcctgtcaccgcactgcaaagcgaatattcactttggtggcgcgaacctgaagatgaaatattacctgtgctcgaagaattaggtattggatttgtaccctttagcccattagggaaaggatttttaacaggtgcaattaatgctaatacaacattcaacaatgatgactttcgtagcaaagtcccacgtttcagcacagaagctttagaggcaaatgcacaactggttactttgttagcagatctcgccagccaaaaaagcgtgacttcagcacaaattgcactggcttggttattggcgcaaaaaccatggattgtccctattccgggcacaactaaactgcatcgtttagaagaaaatttaaatgctgccaatttcatacttagtaataacgatttacaaaaaatcgcacacgcgctggaaacagtgaaaattgttggagaacgctatcccgctgcgttacaagcactgattaatcgataa

SEQ ID NO: 289999 - DNA, 804 bp, Morganella morganii
atggggtatgattataaagagcatattagcaatgctaagaggctatatgaaattggggataacgcttctttaagatactgtgcattggaattgagatttgcaattgagtgtcatgtatatattcaattaagagcagggctaggaacaattccagagacggtaattaacacatggcaaccacctcaagcaataaaatccttgtgcatgtttgaggaaacagcagatcaggatttaaaagtaacgataactggtgatgactctaatgagataacagcaagctataaaaatattaagtataaggaccttaataaatggtataatacccttgggagttttttacatcaaccaaccataaaaaaacaagaatttcaagtagataaaaataaactaaattcgatattatcgaaattagctgagctgtgcgatcaacagctcataacatttcatcgaggttatgagaaaataaaatgcgaaaaatgtaaaaaggaaattatttttaccaaaaattacgtgaaaaaatataataaaatagattgccaaaatgctggctgccctaattttgttattattagacttgcctcggatggtggatatgaatcattccaatctgctggagtaccttgctttatatgtggtgaaaaaaaacacatctcattatgcgacatggaggatggagcagagttatattgcaagaagtgtaaaaataaacatgtaattaaaaaatttattttctcccaagaaagagttgctcccatacctgaatttaccttcgaaaacacattgttgattaaggacaaagagtaa

SEQ ID NO: 290000 - DNA, 1149 bp, Morganella morganii
gtgactaaaacaaataaacgcttggggattccagacaaaataaaggctcaattatgggttgtcgcagcgggaaggtgtgaattcaacggttgtaacaagcgtctagatataaatatccttacacagcaaaaaatctttgtaggacaacacgcacacatcattggtgatagtgttaatggtccgcgtggtgacgcagaactttcgaagcagctttgccaagacgtttctaatctaatgctcacttgccgcgactgtcactggactattgaccaactgccggacgactatgatgttgaattattgcgtcgtatgaaaaagcggcatgaagatcggattcaacgcttatatgaacttgatgacaccaaaaacagtgtacctatagtacttcgccattcaatcaagaaaatccatgtcccacaattcacccatatggatgtcaaatcgtcgattctgagcaattcagatttttgtcattctccaagtgaacatatgatcgatcttgattatcgttcgcgtcaagcacgagaggatgaccctgcatactggaaagaacttgcaagacaaatgcaagatgactttgacagccagatgcaccgcgtaggcgtaaatgacactcacctctcgatttttggttttgcccctatgcccttattgatgcagcttggtgcgctcatcggtaataaaacagaagtgtccaccatgcaatggaaccgagtggctgagagttggagtttccctaaagagagaacgttggaaccacaatctatattgttcgatgacgtattcacctcaaaaaatgaaaccctcgctgttcgcatctgcttaagtggtgaagtagcaattacagacatccaatctgtggtgcccagagttccaattgtccgtttcggtgtaccagcaccgacacctttgttggtagaaagccaggaagatgtaagacattttcgttcgcaatttacagcattcatggcactcgttagaaatcatggatataaacgcctgcatatcttccctgcgatgcctctttcactagcagtagagctcggtcgacaacttcttccaaaagtcgatcctgctatagaggtatgggattatcaggacggaatgttcaaaacaactctcacccttactacagccccttcttcctaa

SEQ ID NO: 290001 - DNA, 1629 bp, Morganella morganii
ttgacggacaatcaacaaatattcgtcactgaggtcaagcaaatattaaaagaccttgacgcaaaactacttgatttcaaagtaagtgatgactgtcccgtttggaccatcgaatatccctacatgggtaagatttggtcgttacgggttaagttcgatgggtggagtattgatgtattaccagaagtgtattggtgtagaccaacgccgatctggggctggcctcataccagtataagtggagaagtctgtgtcaatgatcaggaggggctagaatatgacccttgtgatgttaaaggagtattacgctggttattggagggcgcagccaacatacttgatagtaaccatcgaataagtgctaaagaaagaatctgtcgattttcagatgaattggaaggatatctactaaacgatggtgcattttcaatatcgctcccaataccacttgatgttactaaagtgacttacggtgaagtacaaacagccgtaaaaggaaaagttagcccagtaacgcctcgagtcctgaatatcaaccaaggaacatctgagcaccataattgccaacaacaacgactaggaattttagatgtatctatcggccaactagcagatatttcggctgaatgggacatgaaatggtggaatcagtttatcgctagactgagtgcgtctcaaaataagatagcaatctcaaaaaaaaatcatggtttagtgttacgagtccctaatatctatggacatgcactactactgctatacaagggaattcactcaacacataaaaatcgcacttatgtcattaaacgacaggatcacagctatttagtcaagcgaactggtagtcagcctttacataagcatgttgtcattgtgggatgtggtgcgattggtgccagagttgccgaacatctcgcactagcaggtgtggagaagcttacgctaatagatgatgacttttttagtcctgataatcttggaagacatgtattgggtaaaagtgcaatcggtaagcgtaaagttgatgaactggcaaaactcctcaaagagcgaatgcctggtatcaatgtagttcccaaatcatctctcatccaaaaaattcttgctagcagtaatgaagtgcaatcagctgatgttattgttcttgcgactggtaactctgttatcgagagatcaattatccgtagcgcctttcaacatcactggcgagcacttcttgtttctaccagtgttgaggctggcgggcttggaggacatgcaatctctatgcaaccaggcacaccaggttgtttggactgcctttattgggacccagatacgctacgtcccgccactagattgcgcacttcattgatagctcccgaccagaaagtgactcgccagctaacagggtgtggtgcatttacaccgtattctgcattggatgcgacacgaactgcaactcttgcagtggagcgggtgctcagtaatgatgtgggttacgccttatgggttggagaagctcaactggcaaagttggagggtattactgcttcccatacctacgatgcacttattcacgggagaatttcctccaacctttctcctcctatgtacacacgaccggggtgtccatgttgcggcgtctga

SEQ ID NO: 290002 - DNA, 981 bp, Morganella morganii
atggcttatgcgcaatcccaattcgaaacttttcatagaaatattctatttggatatgacagcagtcaggatttgagagatcgccgtgatacattgctgacagaccttaagaataacatcagtgatgatgcccccccctatactcatttcacccaaggcagttacgccttggatactggtattcatccacttgatagcaatccagatatggacatcgggattttatttgattgtttaccttcagattatcctgacccgttgaaacttaagaaatttgtaagtgatgccttggaaaggcataaccgcacagagaaaattcgtaaaccgtgtgtaactgtgacttattataaagatgatgcacctatacaccatgtcgatctggctgtttacagcaccgatgccataggagaaacacaacttgcgtggggacgtgatagtactcctcgagaggacagggaatggcgaacttctgaggctcaggaactgacaaagaccatcaatgggcgtttcaacggtatggataaagatcagtttcgtcgttgcattcgtgccatgaaacggtggcgcgactttaagataggacacaagaatacgcccagtattggtcttactgtcgctgcttataactggttcaatgtggattacgaccttactgatggtaaacctcatgatttagtcgcaattaaaaatcttgtgaatacgatgttaagccagtggattggctctcgtctctatgtttatcttcctgtcgctccacgaacagatctgtttgaacgaatgtcggaaacacaaatgaaagagtttaaggaaaagttagaggctttacgagatgctttggatgaagcgctagatcaacctgatacacacgaagcatgtaagatacttcgcaaacagtttggtgatgacttccctgtcccggagaagactgataccacgaagcaaacctctgcaggagtaagtgcttcagggcggtctgcttga

SEQ ID NO: 290003 - DNA, 144 bp, Morganella morganii
atgagtatgtttattaatttaggtcatcaaactgtttattttaacgggaatctgagtgatagccggtatatgaatgatgataaaaaattaatattgtcacagatgtatttccccgggacaccggtttttcatataaacaactga

SEQ ID NO: 290004 - DNA, 1011 bp, Morganella morganii
gtgaaagacttcggtgccataggggatggaaaattacatccgctaagtgagcgttacgctgcattagcagaagccaaatctgcctatcctttcgttactgatctgtctcagtcaatcgactacgccggaatccaggcggcaattaatgcagcaaaaaacggcaatatgtcagtgtatatcccagccggtggttatgttatcaactcaacgctggtagctgattatgctttgtctatgtatggcatcgggggtcaggggctgcgtgacatagaattgacacacaaatcatcacaggtgaggggggctgtaattcactccgaagttgctagcggtccggctcttagtatagacccaggaggttcattttctttcggtcttacgctgcgtgattttgctatatggggagtaactgataaatgtgatgtgggtatttacatgacgcatgtcgggtggatgggcattgtttccggagtaaatattcagtttttcccgaatcaggcgctgaaacttggttatattcaggatacctattttaataactgctcatttatatcatcaggaagtaaagataacccggctgtaacctgctttacagacgcgaattacgtgtacttctctaagtgtcactttgaacttacgccgtatatgattaagtttaataactgctggaatttctgttttgataagtgtcactttgaagtgacaagaccagttggggatgacattacagatgatgatcgctatgtgtatgaatcagcctgcgttgattttggtacggcatatcgtttccagtttacaaataatacatggatactagtggatgttggctatcttgctgacaaacttggtattggtaaatctgacgtaccatattttatgtatggaaaaggaacttacttttctttcgtaaacgatatatggcttgcccctggcggaagtgtagatgttggttggtttaatacagatcatattaatttcacaagttgtagatttattgaccttacaccttaa

SEQ ID NO: 290005 - DNA, 405 bp, Morganella morganii
atgtacaaaatagaagaaattaaaattggcatgtctgcatcctattcacaaacaataaccgatgctgacgttaaggggttcgctgcgttgtcaggagacagaaacccagcgcatatggatgatgtatatgctgcatcatctcgatacaaaaaacgcatagctcacggcatgcttagtacaagctttttttctgccatcttcggaaccaaattacccggagagggctgcgtatatgtagcacagaatacaaaattcagaaagcctgtttacatcggtgataccgttgtcgccacagttgaagttaaggatgttgatatagaaaaacgccgagtatactttaatacttattgcaaggttggtaattcaaaagttattaccggtgatgctgagatttatataccataa

SEQ ID NO: 290006 - DNA, 744 bp, Morganella morganii
atgacgataggaaaatattgcctcatttccgataaagccactatcggagaaaatgtcacaattggtgattttgtgacaattcatgacaatgtcgttattgaggacaatacaattatcgaatcttattgtgagataggtgtagctaatcagctctctggtggagaaaaattaacgattagtaagaactctcatattcgttctcatagtattttttatgagggatccacatttggtgagggtttagtaacaggtcatcgtgttactgtccgcgaaaaaactaaagctggtaaggggtttcaaatagggaccttgtcagacatacaaggccactgcgaaattggtaactatgtaagaacacatagtaatgtacatatcggacaacatagtaaaatagggaattatgtctggctattcccttatgtagtgctaaccaatgacccccacccaccaagcaacgttatgatgggtgttacaattgaagatttttcagtaatagcaacaatgtccgtaattttaccaggggttcacattgcgcaaggttgcctaattggtgctcattccagcttatcagggaaaacagaggcggacatgatctatgcaggaaatcctgctcgctgtgttggccctaccagtcggcttaagttgcgcgacggatctcgcaagcctgcctacccatggagaagacatttttccagaggataccctcaagatgtagtagaagaatggctgaaggaaattaactaa

SEQ ID NO: 290007 - DNA, 489 bp, Morganella morganii
atggatgagttagtaaaaaaaataagtagttatcatatatttaactatttgatacccggtgtaattgctgcatttttaattgattcgctatttgaatttagctttaaattcgttcaagataacttacttgttggattctttttttattactttttagggtcaattattagtcgcgttggttctttaatttcaccgtgtattgattgtatttttcgtataaaaaaaacagattataaagattatattaaagccgaaaaaaatgaccctaaaatagaagtcttagctgaaataaataatatgtataggtcgttctatgctctttttttgattttaaatatcactaatattacgtatagctttacacatgaaaaaattaacgtattaataactatttttcttgttatatcatttttcatatatgctttttcatacaaaaaacaaacgggatttattgtgggtagagttaaaaacagtatcgcgtcaaattaa

SEQ ID NO: 290008 - DNA, 960 bp, Morganella morganii
atgagtgacgaattgaaaggaatcagaacaagatttagagcttataccatgcctagcgctggctcatgcttttcttacgctactgataaagaatttgttttgattgaagctagagcaccacaagaaataagggataggatagtagaagagatggaactatttcggcatgaaactatttccttgttgcacataactagttgggatcaagatcattgtaccgcaagcgagctagagtggatattagacaatctaaaacctagaaaattagaatatcctggatacgaggcagataatgataatagtattaaatgcctaggcttaattgaaaattacaaaaatcaaagacatatcctctcctcttcggtagtaagagttaccccagagtatgtaaatagtttgaaatcaggaagtggatatagttataaaaatattatttttcatcccaaaaagtatactgaaaaagcaaatgataattcaattgttaagttttttcgttctggaatgtttaatgttttaagtctaggtgatgttgaatctgcggaaatagcaactttattaaaaaatagctctctcattgaagaggttgatgtcattattttacctcatcatggaggtcatagtgaagttcttacaaaagacttattggaaaaaatagaaccatcaatagcagtatgtagtagtaatcattctaatcaatatggtcatccaacccaagatgttagaaatttgcttgataaattagatatagaattatatacaacaaaatctcaagatataatcatagaatctacaggaagtcattatggtagatacaaggtttacgacaaaaaagtcaataaaaacaatgaagaagaagctataattgaagaccttcagcctaaaaaattcatagaactacgtaagcatgaagataatcaaagaaaaagttataaatcagcaatatataagcctaggaaataa

SEQ ID NO: 290009 - DNA, 4110 bp, Morganella morganii
atgaatattgatttcaggttaattcgaagctcatccaaaggccgtaacgatagctttgaagcgctcgccgtacagttgtttcgaaagacttgccgagtacaggaaaatacaacatttattagcctgcgaggagacggtggtgacggtggtgttgaggcatattaccggttaccagacggctctgtaataggtgtccaggccaaatactttttccaattgaattccgcagaactcaagcaaattgatagttccttaaaagcagcattaagtaaccatcctacactaactgaatactgggtttatataccattcgacctaacaggacgtgttgctgcagggaaacgtgggagaagccaggcggagcgttttgaagcatggaaaagtaaagttgaaactgaagccttagcgcaagggcaatcactttctattgtcctttgtaccgctgcggttatctgcaaccatctgctcgagatagacccttgcggtgggatccgcaagtattggtttgacgacacattgctcacaactactcaaatgcaacagatacttaatgacgcaattgcctttgcaggacctagatatacttcaacactggatgtggccactaatgcaaatgccggactggatttctttggtgggattggtgattttcgcaagtggtatgacgcatcaataacaccagtccttcaggcgttttattcactaaaaggatacggaaataaagcattagatattctcggtgaacccagtgccacatcagccagagtattaatcgaagaagtgatcacctactgcagaagtatgggagagaacagtgtcacaacaacaacggtaacaaatctttctagcaccctgacatcgttattggtacttttcaccaaggctcgtcatgcccaagaagaaatattttatgagcagcatggccaagaatatgatacagaatcattccgacagttcaacgccgagtatatgtgtgcttttccggccgaagatatggatgccgcgagaaaatgggaagagcaagcacagcaactgaaaagcctattgacatctcagatcataggtgctgcaacagcacattccttactactggttggccccgcaggtatcggcaaaacccatgcgattgtcagtgctgcattacgccggctggaacatggtggtatttccctcgtcgtctttggagacgactttggcaaatcagagccttgggaagtgctgcgcagcaaactgggactgggtaccaatgtcggtcgttcttcactgtttgaatgtttacagacctgcgctgaacattcatgtctaccctttgtcatctatatagatgccctgaacgaaagcccgcgagatgcacgttggaaggacaaacttcctgaactgctcgcccaatgcaaaccataccctgacatcaaaatttgtgtatcaacccgggatacttatcgcaacctagtggtcgattcacgttttcctggtttcgctttcgaacatattggtttttcaggtcaccagttcgaagctattcaatctttcgctacctactatgggctcgatgcagagataacaccacttttctcacccgaacttagtaatcctttatttttacaccttgcatgtaaaactctaaagagcgaaggctacaacagtctggatatatcattgccaggtttttccgcactatttcaagcacatctcatgcattgcgatattttaatccgagaacgcctcctatacacaaatcctcgcaatctaatcaaagctgcaatgatagctctcgctaacacgctgacaaatcaagtacctcaagagcgaacctgggaaaactgttgcgataccttgcgtaaaatagtgggaaatgaaatcacaccagaatccctgttgaaagcacttgaacacgaaggcctcattatactttcagctacagacgaggatacattccatatccgtttgagttaccaacgctatggcgatgtgcttcaggccatcagcctgatagagagtattgagccaggtaaaggaaaattagcagagaagctttcatcattaacggaagatgatacaggcatgcttgaagcccttgccgccttactgccagagagagttggcattgaaattacgtctgaggaagttggattaccgcctgaacaagcacacagactatttatacaagcattggtctggcgttcccgtcaaagtgtgacggatcaggtcgataaccacatctataatgcgttgcatactcctggattatgggaattagtttatgaaacgctgttttctcttagtttgattccgggccaccatctcaatgcaatgaactggctcaatcccttcttgcaacagtcatccttaactgagcgcgatacatacttatccttggctgcactgaaatcctttgataataaaggtgtcatattctcccttattcatgcagcactttttgctgacctgacacattggccgactgaaagtcgacgattggccagtttgatgctggcctggctcacctcctgtgctgatcgccgcatcagagacttagcctcaaaagggttatgtcgagtcctgacaaagtttccggaaaactgtcaacaattagccagcaatttcgcctattgtgatgatgactatgttctagagcgtatcagccttgctatctatagcgcatgcttattagttcaccgacacaaaaatgaattcatacctgcgctttctagccttttaagtattgtatctggcaaagcaaatattttgctacgtgacacggttttgttgttcgcagccttgttcaaggctgaagagctccccgaagaaataacacagcaactgcaacattttccgactaaagttgctatacccaacagatggccagtattagctgatgtaagctcactaacagcgttggagtacctaccatcaaacatgatgctttggggtgaatccatggccccggatttttggcgttatcaggtggagccgaaaatttttggttttgatttggacagcgtcaatatcagccatgaaaatattgcctgttggatcatgcaagaagcattgaatttggggtatcccggaattaactactgtgcgcttaattatgaccgttatattaattatcagtatggtgaaggccgaggacgaaaagggcacgctgaccgactcggcaaaaaatattattggattgcattacatcgtctgttgggtatactttcctctaatgttccaacctcaaaagcgctatactctgcttatcaacccacagctccccatttttggtcagttgacattcgtaaaatagacctaacggatgtacgcgatattaatccagaaattgtttatccagcacttataaaagaaacacgttacatattccctgaccggacctcagatatcaaaagttgggttcggaccgatgattttccaactcatgaagcgtgtttgatcagaactgacaaggaaggggagcagtgggtagcactttcctatagcgttagggacgacgataaaacactggatgatgatagttggaattcaccatatctggggatatacgcgtattactcaagcgtactaatcaatgaaagtatccaaacctttaaacagagagaacgcgatatttttcaatattctcagggaaaaacatgttatcgcggttatcttgccgaatatcctgacagcccagtatacaaacaactctttaatgaggaaaataatgaattagatatatttacagaaatcagattattacgcggaaacgaatgggaatatgactattcatataccgtgctgaaccggcaggatgacctaattgcaccatgccaagaaattattcggactctaaaactttcatgggatttccaaagtggctgggttgatgcttcaggaacactcgtagttttttatcagtgtggtgaaagacaaaatggactttttattcgtcgttcagcgttgaacacttatctggctactacaaatgaagaactgatatatagacgttttgctaaccgaggatattttgatcttgcaggtcgtaacagttctcaagtagacctaaaaacatggcttcattatcaaacagacatggtgccaactgtattgcaagaagaggcgctgtga

SEQ ID NO: 290010 - DNA, 363 bp, Morganella morganii
atgaaaggaccatatttactcgaatcagaaactatagataataaaataaaaaaaggcgaaataggaaattaccatcttgggtcatacaaaaatgaaatttttaacgttttgtatatcggccgttcagacacttgcttaaattcccgccttaaagaccatattgacgaagagggatttgaatcatgtactcactttaaatatataatacaaaccagtgtaacagatgcctataaaaaagaatgtcaggactttcatacttaccatggcactaaaggaaatttaaatgagtatcatcctgctcagccatccggtcttggaaaaagattattatgcccagaaagtacttgtgaaaaatcaaagtaa

SEQ ID NO: 290011 - DNA, 747 bp, Morganella morganii
atgaaacgaaaaaccattaagatagtattaatagctattccaatactacttttagcaaagtgtagtggtatcgttgatgacattttaggagagcagtttcctctaaatataaataacaatggaaatagtgtaaagattcattttaataaaattaaaaatacgaaaattattatttatgcaaaatattcaactaataagtgcagcactatgcgtctaaatgcagagtatacaaagatatcatattcccctatgagaaaaacggagaagattgaggtaaaagatggtgttgctacatcagttattccagttaatgggggcgggtggtgtaattggaagttagttaatatagatatagcaccggtgcctattgaaagttccctcagagtgtcatcatcactggtcattgatgtatcagacacaaaagttaacaatatttcatatgatatcatacttgttccattcacaagaatttatagttctaagccagatgatacatattatgttctctcgaaaaaagaaaataaatcaatatcagaagaaaaaggaggggatgtttatttcaatgctgaggtgataaatgatctagctacacatgcatttttagataaaaatattatcatttatcccgatggaacggaaatttattatgaggactcaggtaaattactatctcctgattttattgatattttagaaaatagtaacttaaagaactctatttcaaaagaaaaatacatgctatattaa

SEQ ID NO: 290012 - DNA, 1821 bp, Morganella morganii
atgggaaaggataatggttattgtgcggaatgtgaaaagcgcaaagcctggattgagattgttctggtcgatgaactgaatcagccggttgcgggaatgccgtatacattaaaagtatataatggtgaaaaaagaaccggaataacagatgccaacggctttatccgtgaggagaatctgccgcagacgggcggggggttttctgtggatgcacagtctctcgcggatgaaatggaacaaaggcccttaagagttaaccgcagcatgcgggcgtcaaaagcaatgtatgaagccgaaaagcgtcatgatttttatcgttatgtcacgattggcagattgtgtgattcaatgccgaaaattgaaaactggcaagagccggaaccgccggcatatcattttcaatctaagaatcccaaaggcatttttgttaaatttgataatcgccggttagtatttgaaatttgccctttcagggcatggtcatttttattgcatcatcaaaaagagtattccattgttaatgcctgtaatttaagtattttatctgttctggcctatgccagcctgaaagctaatgatgacaaagaaccaaatgacagtaactattcagggtcgatagaagatgtgtttctgaatcaattttttgatttatcgaagataccaactcaatttgaacaaaataatttcactccggtcgtgtatgacgttccatttagtgagcgatatacaaggattgaatttattgattcagagaaagatttagacacacaaatattttttattgctaataaaaaagaaataattatctcatggcgtggaacagctggtaaggttgatctaaaaacggattttacatttaaaccaataaaaccagatagcgccatggggatatccggatatgttcattctggtttttatcgggcatttaaagtcatggataaagagtatcgcatcaggaatggtcaacatgaatacatactagaacatatagaaacactatgtagacataaaaaagtatttataacagggcatagccttggtggttgtttagcattgcttacagccatcaaaatgaaagaatataatcctgtactgtataccataggaatgccaagagtattaactttatctgtcggaaaacagttagatgatatagttcatcatcgccatgtaaatcaggatgattttgtaccgggattaccattcgagcaaaatatgaacaatgacttgtttgtaaatgactatgattttgccggctactcttatgagataatgcaggttatgatgcgttttaatccgcaaatgactattcaggcaaaattaatgcgtagtttaaaaaataaaaatgatgtttatatccatcacggaagtcctatacatttttatgaaaaaacggttacccgctatgaatttaatttttatggagatggtataccgacgagtataacagaaaaactctatctggtagccgagttattacctgataatgagtatcaattaaaatatttcgaactttacaagataccacgaaactcagcgactaatccatttggcgtgttagatcattcatccgtaaaatatactaattttattattaaacgattggccgatttgttaagcgataataaaatgagtaattccgcgtatgagataagaatggaatttgaacgacaaaaagccagtttcaggaatacatatagtgaaaatcaatatttatttgatttggatttaatgttatctgatacattactaccaacattgttaactccagagggtattacagccttaagaaggtataagaatgaaacgaaaaaccattaa

SEQ ID NO: 290013 - DNA, 2691 bp, Morganella morganii
atgaaactcaacaaactttcctttctgatactttccgcaatggggatgacgtacgcctctgccggttatgctgtaacgcctgagccgattcccgcatttgacttcagcgatgaatcaaaacgtattgatgatattaaaaacagtggcagctatagcaatgcggatgctgatgccgtcagtaaaagtggcttcattctcggagatcagaaatttatttcggatatacacatcggcttctctgctgatcaatttattctcccgataacagaactctataacgacagctatctgctggggacacatctcggccgtatcaatatgcgtctgggggttgatcccaatagtgcgccaacagatcactccgtcgcttataatgttgtaatggaaggactcagttcctcaaaattcagcagcttacagataaatgaaggaacaaaagcatataacaccacagtggggaaattcagtacgatggaagtccgcactgcgtcacgggacgggcagcgggccgaagcttataacacccgggtgaatgaaggcggacgactgactgtcagttacaattcctatgccgagaacaacctgattgatggcggtgaactgacaattcccggcagtttccccaaaaataccgctatcgtaaaaaacaatattattcgtaacggtggtacgcaaataatctatcagggaactgccataaataactatattaccggtcagggtagttaccagatggcatccggcctggcagaaaataactatatctatgacggtggctaccaaatggtatacgccggcggggatgatgatgtcgcagcccggaatacaaccatttatcagggcggtacccaaagaataaaatcaggtattgccgaagataacctggtgtacggtacacaaataattaccagccaccagggtgactggaagaacggacaatgggtttcctcagaggatccaacagaaacacagggtgatacccctactgctcttaattcaacaataatggatagtggtgagcagattgtcagccgtatgggtaatacggaaaatacacttatcgatggcggtaaacagtatgtcgaagagtatgccggtatcagagacaccactatccgtaatggcggcagcactgttattgataatggcggctattcatttggtaaacttaatgttgaaaaaggcagtgtaaccctgaagtcaggcggcaaacattactggactgaagatttcagtaccggcgcgtatgcacaaaacatagaattgatgggtagtgaatcattactttatatcacacctgatgacaatacttcagagtctgttgccacgattagttcactgaaaaacaatggcgtgactatttttggtgatatatccggaaataaccacaaacgttatagtcaattaaacatcaaagaactcaccggtaacggcctgtttgtgatgaataccagcctcgcggatggcagcggggatttcctcagtgtctcggataatacaaacggtaagtttggtgtccgtgttatggattccggtaaagcgctggtcagtaatacctctgacccggatcgctatcatctgatccacgctgccggcagtcagaacgatacgtttaccatgaccaacaagagcgtggatctcggggcgtataaatattatctggtgcaggataaggattcagcggatgaatggtatctgtcacccaccaaagaaactgcgccggtagatccggatccaaaaccagagccaaaaccagatactgaccaggaagaagaactgcctgatctctctgagccaagtaaaaccgcaatgatgattgccaacgccctgccgcaaatctggcggagcgaactgagcacattgcgcgcccgtctcggcgagctgcgcaataatccgcaggtgaacctcggtgtctggtcaaaagtgaccggcggacgccacaatatcagtaataatgaagtcgcctaccgtcatgatatcagcgggattgtcgccggtggtgacaaaatgacagagctggaaaacggctatctctggagcggcgttgtcgccgggtattctcactcctccctgaaaatggataaaaacgacggtaccattaacagttacagcctcggcgtttacaccacctggcagcataaatccggtatttatgtggacggtgtggtgaaagccaaccatttccgcagtgattatgacgcacagtttaatgacggtaaaacctccgccaacagtaacaccagcggtatcggcttctctgttgaaaccggtaagtacttcgaaaaagataattactttatcgaaccgtacgccatggtagccgccttccgcggccagggcgcggattaccgctacagtaatgagatgagcatcaaagccgatgccgcccgctcattcagcggtgagctgggtgccaccttcgggaaaaattttgtgctggaaaacggcacgcaaatcaaaccgtatatccgcgtggccgtgaaccatgaattcctgaaaaacggcgatgtggaactgaataaacaagggaagcggaccaatgatatgtccggcaccaccgggaaatacggcattggtgtggatgcaaaactgaatgataactgggccatctacggcgaattcaactacgccaacggcagtaaacaggaaacaccgtacagcggcttcctgggtgtgaattaccggttctga

SEQ ID NO: 290014 - DNA, 672 bp, Morganella morganii
atggtaaaggttaattgggattttattgataaggtagtttatattaacctggcaaaaagattggatcgccggaaaagcattgaattccagatgaaaaaaataggtattcctgctgataaaattattcggttcgaagccattgaaaatgagaatggcgcgttaggatgtgttctctctcatattgatgtactgaagatggcagaggaaaataactggaataatgttcttattttggaagatgatatggtttttaatgatgatgatgaatcatcagacaggattaattattttttcagtagcctgatgtcctcacaatgggatgcagccttgttgtcaggtagttattttcgaatcaggcaggctcatggttgtttttatcacctctatttttcatttttaactaacagttacattgttaatcatcattattataatagattaatctataactttaaattatcatctgatgccttacgtatgggggtaaatagaaataagtgtagtttagattataactggaataggcttatgaagaatgatgcatggtatgctgtttatcccgtagtcggatatcaaatggtttgcatgagtgatattgagaatgaaataacagatagaagtcacctgttcagccgaacattagatgatatgtggccattaaaaaaaacataa

SEQ ID NO: 290015 - DNA, 1347 bp, Morganella morganii
atgaataatacaatcttcgtcagtatagccagctatcgtgatccggagctgttgccaacaataaaaaacatgatttctcatgcagaaaatcctgacaaaattgttatttcaatctgctggcaggcagaagataaagatatttctgtatttacagatattggtgctgtggagatcgaatcaggctcagatgatgctgacatattttgtcttagctatcatggtgcgatactttatatccattatgtgcatatctatgacgcacgtggtgcctgctgggcgcgttattgtgcagaactggtatttaaccatgaagattattttttacagatagattctcactgtcgtttcatcaggaactgggatagtgaaattattaactattatcttaaactcagtgaaacaattgaaaacccggtaattaccggctacccgccttcatatacaccaaaaactgaagataaagaagaagtactcggagaaggaacctgcaggattgtttttaatgaatttaatgacaccgacattccatcattccgacctattgcaattacgaatgcaaatacatatgaacgaggaagctatatagctggtggatttgctttttctgtcggtaaatttactgttgatgttcctaatgatccgaacttgtttttcctgggagaggaaatttccatgtcagccagagctttcacccggggctataatattatttatccggaaaaaatatttgtctggcattattactcacgtaaagaatgtaataaaatatggggagatctcaaccaggaatccgttgataaaaaactggtgaaaaaaggctggtgggagtgggataacgcatctaaacaacgggttcgttatctgcttggtatagaggtcagtgacgacattgacctcggaaaatactgtctcgggaatgtccgcacactggagcaatttgagtatctgaccggaattcattttcgtgaacaattaattgttccggaactgactaaagaccaaagaccctctatgttcagtgacattcctgaatcacgggaagcctggctggccggactttacagcccgttccgtcagtcaattacaattcagaaatcagaactggcaaccaatgacgataatatcgattactggtcattaggtgtatttactgaagataaccaactgattgctatgcagcggctgaccactgaagaactggctgaacaggaatccggtgataataatgaaagttataaacttgaaattaaactgaaagataaatcccatcttattcctaaaaaactcaggctggcccccttctttaccgactttggctggggagaaacggtggaaaaagtatggtaa

SEQ ID NO: 290016 - DNA, 1014 bp, Morganella morganii
atgaaaataaaattactggcggcactggccgctctgggaatgtccggtaatgcgctggcttatgttgattgcaaaccgggtattccggaaaattatcagccggagtcactatacgcaatacccacaaaaggggttatcaggttactggccggagctgaagtcagctcaacaaatgagataggctcttcagaatcaaatatggctccgattactgtaacgtatgtatgccaaagcgactctgtcgttctcagtcgccctttttccgacggtggttttgaaccctatgacggctacccggatatgtacagaacaaatattgaaggcatcggcgtaaaatttatggtcagtaatggtgtaaatagccgtccacttcctgttcctgaaagaccgggatactcggatccgggtaaaccctatatacgtgtgacacttatgccggaaaaagtgtccgcttatttttataaattagctcccaaagttgaattaaagggttccatcaacaggcaaaataccgtaatgtcaagccgaaaaatcggcgaataccgcctcgaaggtgtaacgtttctgaaatattatattaatgatgtgtatatcgtcggtattccgacatgtaaagcaaatgaacccttacctgttgatttcaacacagtcaatgctaaaaaagtaagagacggagaaataagaccattcgattttggtatcacatgcttatctgactatggaaattacactgctgtagcatctatcaaatcccagacaataacacaggataacaagtatattcaggtaactgataataaaggagataaggaatccttaattatagaaattacagatgaaaacaataacccggtaatggtagacggaacaacaaaaataaaaataaatgatgttgaaagcggaaaaaaagcaacattcaactggaaagcgaaacttaaaaaacaggatggtaaaccttacccggcgcaaggtccatttaaagccttagcgactattacattagacattgaatag

SEQ ID NO: 290017 - DNA, 594 bp, Morganella morganii
atgaacaaattaaagttagcattattagtttcaggtgctttagttgcaggtgtaagtacttctgcgctggcggctccgggcgaaacccagggtactgtaacgttcaccggtaagctgattaccgagacctgtgaaattgtcggtgataaagataaaactgtcaggcttgatcctgtttctatcaaaacattagatgcagaacataaagaaggtggatttaaagatttctctatcgccgtaatctgcccgaaagatccgaaaacatttgaaaacgttggtattcactttgaacctgttggtcagggtgaaacactgacttatgatgcgagaacaggtaacctggctaactcctggacacctgccgcgggtgggggtgatgcaggtaagatagcagccacaaacgtacagatcaagatttacaatactaatgatggtgtaaacactcatgctaaaattggtcaggtaagcaaaatattgaaaccggatgcgaatggtaacgctgtgtttacctatgctggtggttattatgcaactgccgcgactggtgcgggtgaagtttacgctaaagttcagtataccttagtttatccgtaa

SEQ ID NO: 290018 - DNA, 765 bp, Morganella morganii
atgttagttaaatctataaaagtattattaatttcttcacttttttccagccttgcgtatagcggtgttattattgagggaactcggattatttttgaaggaggaaaacaagaacaggtcgtcagaattaataacagagatgaaactcagcctgcactgatccaagtatgggccgatgacggtattaatgttgatgaaattaataattcaaaattaccatttgttatcacaccaccaattagtcgtattgagccagggaaagggcaaagtattcgtgtgatttataatggcatgactcttcctcaggacaaagaatcagtatattactttaatgttctggagattcctgcagaaacagcagaaagtaaaaaagcagaacagcgtttagatattgcatttaaaaccaggattaagcttttttaccggccggaggcattagcaaaaagttctaacgtttttgagctggataaattgaagtggagtgttgttgatttaccgggtaaaggaactgcattaaaggtagaaaatccatctccgttttatatttctattactgcaataaaaacaaagattaatggaaaagatgttgagttaagaggagagatggttgcaccgatgtcttcatcagtatatgtgcaggatgcagactctcagaaattaaatggaaatatatctgattttacatatgctgcattgaatgattatggttcaaaagttattacacaaatggttaagtcaggatcaggttttactattgttaaataa

SEQ ID NO: 290019 - DNA, 2592 bp, Morganella morganii
atgagacaacgtcaatggagattaatgctctgttcttttttattcccggctatatcattcggtaacactactccatcagcggatgatactagtgctgaaaacgataaagtagattataactccggttttattcaagggctggatattgatgtcgctgattacagttatggtaatcctgtcccggaaggaacctataccgttgaattgatgctcaacgggagtaatagaggaaagcatagtatcccctttaaaaatattactaacaacaagcgggcggatgcatgttttacactggaacagatagaggggttaggtattacacctgatagccgtcttggtgacgacgctgatatcagtcaaagtgatgtcacgaatgatggtgcctgccatccgatttcattctatgtccgctacgcaaagtcctattataatactgcggatttagtgctaaatatcacggttcctcaggccagtctctcacaacagtactcagattatattgatccttcacgctgggatgaaggggtgactgcactatttgttgattacaacctgaacagttacttgtcgaataataaatccggcaatgataaaagtacttaccataataccaacattaactggatggcaggttttaactacggaggttggcgttttagaaaccggagtaactctgtatggtcaaaagataatagtttcagcaataaaaatattcagttatatgcggagacagatattactccctggaaaagcaagctgactctgggggagaccttcaccagcggacgtatttttgattcttatggtatcagaggtgctgttctcggttcaaatacaaaaatgcagccggattccctgaatagtttcgtccctgtcattactggtattgcagatagtaatgcccgtgttttaattcgccagaatgaatacaccatctatgaaacaactgtaacgccgggcccgtttgaaattaaggattatggtgctctgggaactaacggtacgctacagttagttattattgaagctgacggacgtgaaaaaatccaggatattgttttttctgctcctcctatgatgctgcacccggggactatccagtattccatatccgcaggtgaattgagagatggttcatcgggtggttcaccggctgttatagagggggagtttttacagggtatcaataactttttaacctggtataccggttttcagttgtcagaaaactatcagtctgtagctgttggtaatgcactgaatacacctcttggggggatttccgtggatatgatgcatgcccgcagtgatctgaaagaaaaaatacaatcaggtgaatctttccgtatcagttacagccggttatttgaacaaacagatactaacgttattgtatccagttatcgctattcgaatgatggttatctgaccttccgtgatgcgacgatgctcagagagcgcggtgatgactatgaccctgaaaaacgggacgaaaatggcaggataattaacagttatctgggtcttcaggctaaaaatcagtattctcttaaccttagtcagcgtgcatggggtaatagttcaatatccgtaattggtagttactatgattactggacagacagatcaccatcatcacaatggtctgtttcttaccagcaagggctggagtatttctcttacagcctgggttatcagcgcgctaaaaccggtcagaattcatatgacaacagttatgtactgaacgtaaatattccgttctacagcaaggggtataatgatcggccgttgttcaatagtttgagcctaacaacaacgcgtaatgcggatggcaatacatcattccagacatcagctgatggcagccagggagagcaaagtgagctgagttatgctattggtgcaatgacaaactcacactctgatgtcagtgacagccttaatggttcggttagctatcgcacatctgttggtacttatggtgttaccggatcaatggataataaatcaagccgtcaggcgtctgtttcagcgaacggcagtattgttgcccataagggcggggtaacacttggcccgtcaatcggaaattcagcattcgctattattgaagcacagggcgcagaggggacaacagtattaagcggctctggtagcaaagtagatagccggggttatgccatcgttcccgctctgagttcatacagagaaaacagagtcggacttgatgccagtaaagccagcatggatgttgatctgatcgatgaccagcaggttattgttccgcgtgatggcgctgctatcgctgtgaagattaaaacaatttcaggtaaaccagttgttctgattgttaaagataagaacggtaatttcctgccgataggtaccaatatctatgacaacaatggggaatatcagaccattgtcggccaggctggtatggcgtatttgcggggctgggatggcagcaacacattgtccgttaaatcaggtaccgtgggcgagtgtgtaattaatccggagccgggtattgcacaaaaaatatctgctacagcggatacagtggtccaggtggaggttaaatgtatttaa

SEQ ID NO: 290020 - DNA, 591 bp, Morganella morganii
atgtatttaatgaatatattcggaaagcaaggggtattactattccctggtgtaatatcattatttatccttttaggaatatttacatactctaatgcggaaattatatgtgataattgtagtatggatatagaattcaaaggggtatataaggaagatacctgcgctatttcaattaatggcgcatcagcgaatgaaacagttacattaccaactattgcataccggacattatcgaaatccggcgatgaggctggggaaactaattttaaggttggtctgagtaattgtcctactgatgtggatgtatatcttttcttcaaaagtgtctctgataatttaaatccggatactcggaatttaaaaaacagaacagaagatagatttgcaaaaaatgttgagctcagattacgtgattcgatgaataatcatattgccattgatgatcctgcgtcaatgctacgctatgaaatatccaatacaaacccatcagtggttaaggatttttacgtatcttattttgccggaaataatgcagtttcacctggtgatgtagaagctaaatcagtattggaagttgtctataaataa

SEQ ID NO: 290021 - DNA, 417 bp, Morganella morganii
atgccaagatgggtaatggcaatgatatcaggtttgttttttataatgtttttggctcttagtgtgctgatgtatgactatatgacatctttattaaaaatgcggaatgaaattatattttccgcacaaaacttaatattaacacttggccttccatttgcattatacgctcttttcggaatgacagttgaactttcatttggtgataactctatattttacaaggtcattacaaaatacaaaaatataataatgaagattacatcttacttattttttattggctttattgcaagcattcctgtttcctttgcggtaaatatctaccttctcgataatggctataaaacatgtgacaaaatctcatggatgtcaccaaccacttatgtaaaagagttatcgctttgtgacagatag

SEQ ID NO: 290022 - DNA, 135 bp, Morganella morganii
atgacggataaagcaaaaatcacagacagtgaaaagcagggaagtaacttcagggtaatacctatagttacaccggtaatgccgttaccgacaccaacgttttaccctctcacaactgacagcaaagtaccgtaa

SEQ ID NO: 290023 - DNA, 234 bp, Morganella morganii
atgaatacattattcagtaaggtgttactggcagcggtaatgattttcgcaatctacgggagtgtgcttgcggagaatacaccgaaaccgccggtaactgcacaggtgaatgaggctggttttcagcatcactatacggatgtggcggggcagcggatccattatgtgacggcgggaaaaggcgaaccggtgttgctgatcccgggctggcagcacagggatatatggcgatag

SEQ ID NO: 290024 - DNA, 414 bp, Morganella morganii
atgtttacgattggtactgatgataaatataacagcggatttaattatattgagatgacggcttctgaggctaaggcattggcaatgacaaagattggttgccgttaccagaatgcattaataatatcaaaattctggcggtatgcaccaaaaaatatcgcgacgaacgaacctggtacaactgaatttatggaggatattgtactgggagaaaaattctattttattgttttttgtgttgataatcatcttttttattttttcattaatccgaaagtcagtgatgatggcaaaagttggacagtaccggataatgagcctctggcacttgccattgaggagtgtgaatataatgatattccggcaatgttgcaggttcagggacttgattttcctgggttaaatatcgcctga

SEQ ID NO: 290025 - DNA, 900 bp, Morganella morganii
atgagtgctttggcgagccagatagaaggtgcgtatgttgttggtggttgcggtcagtccagaggaattatgctggcatctgatgccgaaaccagtgtctgtaaggcaaataacacgacactggttcataccggatataatagcttaatttataatgatttccccctgactaccgcttcttatagtggtcagctcagtgattatgggccggactgggatacggacggaaaatttttgcctgcgaattccaatgtgttgattacaacagggacaggtggctccattattaccggggtcaatgattctgaccttccgacccgctttttttcattgggtgataaatccataatgcaactaagtgatacgtattcttttctggatcaaaatccggccggaaccagcgatcatatataccggtttccggtaaaagcggttattgatggatattgttcagtaatggaaagtggttatggaggggatagcagggttattccgtccaactcagtgcttatctctcttggtgaaaaaaatgaactgaataatgccggggttgacagtatagtggcttcatttggtgataattcagctatccggtgtaatagttatgctacttctgaatatatttttgcaggtggtaaaaatacagtagtcaaagctgatgaagacgacagtgttgtattcgtcgctcaaaaggcccggagtattgatatttccggtgaagcggtacttatggcaaaggaaactccggagtatttctgtgtaggggaaaatagcgcaatagctatcggctggcacgacggtattcgcgaacgtattgctgttttttatgaaggtgagaatggcgtaaaagctggtgtgaaatacacgatggacagcaatggtcagcttataccgctctga

SEQ ID NO: 290026 - DNA, 1026 bp, Morganella morganii
atgagcaataatgatgaagtgaatttcaaagttgaggtttatcaaaaagatgaccaacttattgatgtaagggtagacactgaaactcaagaaatatgggttactgaaaaagagatcgccaagctattcaatgtagccagaaacacgataacagaacacataaataatatatattctgatggagaactagacagaaattcaactagtcggtctctccgactagttcgaaatgagggtaatcgcaaggtttatagagaaataaaccactacagtatagatatgattaacttcataggatttcgcgttaatggtcgtagagccgtcgagtttaggcagtgggcctctgaattaataaaatcatatctccgtgatggcttcgtattaaacgaaaaagcattacgtgactcccctgaaaaagccaatgagcttgctgcaaaaatccgagccattcgggccaatgagcgacacgtatatgataaattaaaggattgcttaaaagaaagtgcctctgactatgatgcttccgcgccagaagttcgaagtttttatgcaaaaatgcaagacaaatttcattacgcaataacaggcatggttagcgcaaaattaatactagatagggcgaaccatgaagatgataatatggggttaagcacttttagtggtgtctcaccaaatttatcagaagccaaggttggtaagaattacctaaaggaaaatgaattatacagaatgaacttgttgtctgaacaatttttgctatatgcggagtctacagctcttcaaggaaaaaaaatgacaatgagctcactcattgagtatgtagacaaactgttggtttttaacgaatatgttcttatgcctgattattcacacggtaaaatgcttagagatgaagccaacgagcacgcggataggcagcacaagctatttaaaaagaaaagaattatagaaaaagctgggtatatatatgaccctgagctcatggcattgggagaatttaacttcctatttgaagaccaggattaa

SEQ ID NO: 290027 - DNA, 324 bp, Morganella morganii
atgcctgataatctgactgaacaattagagatgattgaaaaagagtttacgaatttttatagcaatataaaaaataatgatgaatattattcaaaaagtaagactttgaaaaataaaataatttctctgattacagaagcaaaaaagagaaacgaccaaaatgccatagacaaatcattaaaattactctttgacaacagcggaagtcatattgacctgaaaatattacaggaaattactcccccattatttacacaaggtattctcacaaatgatctttttaaggaatatctgtcgaagtcacctctgtcccgttggttatag

SEQ ID NO: 290028 - DNA, 390 bp, Morganella morganii
atgttaattccaataaatgatgcagcattgagaaattttgttgttatccaaaagaagttagttacatcttttatgcatcagtaccctaatgtaaaggattatcaatttctattggacttccctaaacatggaactatccaagttgatgataatatttggaacttttcaaaacatggaaaaggaatcaaattttatcaagatgattcatcctgtgcaaaggtagtagatattcattgcaacattaccgagcctgaaatgtttgatttatggcgtttgagccagtattttcaattagacactgatgccgaattgaaaaatttattagatgaaatggtgaggtcagaagatttattacttgtttctgataaattttatacatttacaaattag

SEQ ID NO: 290029 - DNA, 333 bp, Morganella morganii
ttgaagattcactgcatgatgttctgcctctcaggcagtctgccggcacccgggacgacgtccctgaccggcttggctatcattaatttccgccattttctggagaaatacaacgccgaagaacaaaccccggcactgtttaatgataagttgaaacaggcagaactcatgcttagtcagggtatcactatcgatgctaccattgctatagctccttgttctgtgaaaaataaatcaggccactgtgaccctgaaatggatcaggcccgtaaagggaatcagtggtattctgatatgaaagcacatatcacgttggtactgctactggtttga

SEQ ID NO: 290030 - DNA, 771 bp, Morganella morganii
atgggtataggtagcaatgcaatcttggcattttcgccatcatttgcagaaagaactatgacaccaagctttatttttatcctattctcaatatcatattctttacatgatctgttagataatgaaaaaaacaaaaaagcaataaactatgtttttttatttacaaccataatatatttagttcagtcattgtgggtaattaatacgtattactctataagcaaacaaaataaatttaggattgatattataaaccgtgaccaaggtgaagtgcttattccggagttttattttaactcactacctagtgacacatatatttttgataaatggactaattttgatgccatgcgtttattttacaataaggaaaaatttattccctatgatgtgggctttgattttcacgttattaatgacaataatgaaataattccatcgcaaagaaatatggaaacagagaatggtttaatatctgtatatacttatggagacaagttatcacttgatacatactttgtcattgaagttacacatcaagaacgtttatcaccacgaagtaataatgaaatgaactttagtgttcaggatatatttggaaatgagaaagtattcaattttgaaccaaaatatgtttatgttgataatagggtttttattatcaaacaaatacccaacactccaaaatggttaatatcaaatatatcttttggccgaaacgacttatccaatacaactatacatccttatcaaataaacattaatatttga

SEQ ID NO: 290031 - DNA, 726 bp, Morganella morganii
atgaactgtgataaagaaaaaggcatttgccaaatcggagattcacttccagaccaacctcaaattttgccacccgaaagtgcatcttcaagagtctctttttactattttggtgatccaatgtgttcttggtgctggggtggttctgaaacattttccgaactcgaaaggcaatgcaattccttgaattttaatttcaatattataactggcgggttaagggctggtggtggtgatgagtggaatgcaagtttccgtcaatttttaaaggatgagtgggatcatgttgcacaacgaacaggacagccgttcacccataaattacttgaacgtgcacattttgaatatgataccgagcccgcatgtagagcggtaaatacggctcgtcattttctaaaaagtgatgagctttacaacttttttaaagcgatacaatatcagttttatgtattaggtgacgatccaaaagaaatttcgttctatcagagtttatgcgaaaaatattctattcaattgggtgaatttgagaaagtttttaaagattcagaaacaaaatcagaaacaataaagcaatttaccctctgtcgccaatggggtatccggtcattcccaactgtctgctttgaatataatggccaattacacccatttataggggggtatattccacctgaatatgtcggtaaactaattaaagagaaagttattccgttaattagaaattaa

SEQ ID NO: 290032 - DNA, 1236 bp, Morganella morganii
atgagtacaatcagaactaaaatgagaaaagaattcagtgagttacagggcggcctatttacaaaagtgaaaaaggctgatgttggaacttctttactagatttaatgaaaaatggcgttgacatgctatgttgggccgacccattcttccccgataaagttttaccagaacacatcctgcaagccgtttcagactcattaaccaatggtagtgccagccattacacaatgccgattggtaacccggagttgaaagaaaaaatcgcgcttaaattaaaacgttgcaataacttaatcgttgaaccacaacgtaatattttgatcaccccgggctcggactctggcttattattcgccatgatgccttttattgagcaaggtgacgaagtgttgatccactccccatcttatccaagtaatttcctgaatgtcgaactcctgggcggaacgcctgtcagtgtagagcttaaagctgaaaataattttcaaatagacattgaagactttgaaaaagcgctcacagataaaaccaaaatggtgattctcaccaacccaaataacccatcaggtacggttttacgtcgcgaaagcctacaagctctggctgattttatcatcaggcatgacttagtcctggttgtggatcaggcattcgaagatgcgatttatgacgacattgaatttgtctccatagcctcactacctggtatgtgggaacgcaccgttaacgtattttcgttctctaaaggaatgggattaagtggtttccgtgtcgggtatttggtagctgatgcacaaatcattgatgttttattcggttgtactgtgaatgtgctcggagcaacaaatacttcatcacaagcaggaatgatggctgcacttgatgaccctgactttatggaaggctacacccaaattttcgagaatcgccgtaaaatcgtttatgacatgatgagtgctatccctggtgtgcatatgttaatgccagaaagtggattcctttcatggataaatatttctgctttaggcacgtcagccttcgtgtgtgactacctcatagagcatgctcaagtggtagtaaactcaggagtaccttatggcaaaggtggtgaaggatatatccggttagtacaagggtgttacaaagacgataaaaaacttatcgccattctgactcggatccaaaaagctttgactcagttagccaaagaaaaggggatttgccatgaacagtaa

SEQ ID NO: 290033 - DNA, 1455 bp, Morganella morganii
atgaacagtaaggaactcgtttttcgcggtggaaagaatatggcattactgcctatgatccttttcattatctcgtgttctctgtttttctctgtttttcatatatttgatatgacagcgctagcaatgctagcgtttctcgccattatgctgggcgctattttttcccgtaatgtcactgaatactggaaagctgttatttctgaagggattggtagtgaaatggcagtaactattgccaccatcctacttattattggtatgtatgccaaaatgattgcacaatcaggggttgctgacagttttgcgctgttagctaatcacctgaatcttcatggtggtgcatttaccttatttacctttatctctgtctgtattgtggcaacagcgacagggacgtctgtgggaacattatttactgcttttcctgtattctacccttcagggattatccttggtgctgacccggctattcttgctagtgctatcctctgtggtgctatttttggtgataatatcgcgcctatttccgatacgacagttgcttccgcctccactcaaagctataccaaacgtgaagggagtgctgaaattgccggggttgtagcgtcacgttttcggtatgcgattattagtgcggttatagcatcctgcttgttttggttctttggcggcagccaaacaccgtcagcactcactgacattagcttcaatagccaggcctcttacaaaagtttatggatgttagtgccaatgggcgtactgctcactgtcgccatgaaaactcgtagtatcttcaaagcgattccgtctggtatcttgtcggggatcattattggattaatatttggcatctttgatttttcgaatattttttccttagacaacggcaatgtcagtggtttcctctacaacggtttccacgaaatggtcagtacgattctttttgttctgtcactgtttgggattattggtattctgcgagccagtaatacgatggcgcgcatttctactgctatctgtaaaagtaaactcgctcaatcagcccaaggtgcagaatggtgtattggtacaggctcaattgttgcaactgcattagttggaggagtcaccagcgcgtctattttggctttcggacctgtcgccagtgaaatcggtgctcgtaaatcactgcacccttatcgtcgcgcagtactggttgattgctttgctatgacattggcagcgattattccgttcctaagcgcctttattttcatttccaccgctatcatcagttcattacaaaaagaatacccattcatccaagtcatcaatccgattgatatatcactttccgcctattatccactggcactgtttgtggtgatgtcattctccgtgataacaggatggggacgtcaatttgaaggtccgaatggctcacctgtaaaaaaattaaaatctggtgaataa

SEQ ID NO: 290034 - DNA, 444 bp, Morganella morganii
atggttcagaaaatcatcttaagcgatattttggatttttcggttgaagatgtctgggataagattagtgcatttgatgaatttgctgattttcatcctgcggcccttcgaagtttttatcttcaccagacaccagagagaatcggtagtgttcgccgtgttcaaatgtcaaatgggttcgtggaagaaaaattggtgggctttgatcctgtaaattaccaccttgaatacattataactcaaagttctcttcctttgagcgattaccgggccgaaataaaactgacaccaattgaaatgaatacaaaaacagaaattcaatggaaatcgacctttactgcggaatgtaaagatccagaaaaggttactgcagatatccgtgaaaatgtgtttgttttaggacttaaagggctggctcattatttaacggtaagtaaatactaa

SEQ ID NO: 290035 - DNA, 636 bp, Morganella morganii
gtgactcaagatgacatcattaattcatggaagccgatggtggaatttattgctcagacctatggtgataactgtgaagtgatcttacatgacttgcgccaattagataactcgattattgccatactgaacaatcacatatcaggccgccaggttggagggactattaccgactttgccttgaaaataattcatgaaaaagcatggaaatcaaaggattacattgcgaattacaaagccgtcattccgggtaagtcggacaatattcgcgcttcaacatttttcattaaagatgaagatgggcaagtcattgccatgctttgcatgaacgtagacttaacatcattatctgttgcacataatattataggaaaactgttacaagtagaagatacgcataaaggcgaagatgaagaggttctcggtaatacatctattactgatatgctacatgaattaattacaagtgttttaaaaagttaccaccgatccccatcacggcttcttatggatgaaaaaaaagatattgttaagaaacttgatgataaaggagtttttctacttaaaggtgcagttgctgaagttgcagtacgtctaaacatttcagaacaaacagtttaccgttacttgaaataa

SEQ ID NO: 290036 - DNA, 381 bp, Morganella morganii
atgaaatcagcaatagagacaaaaaacgcaccggcagctatcggtccatattcacaagcaatttgctttaataagacgttatttatttcagggcaaatccctctggacccggcatcaggggatattgtcggtaacgatattgaaagtcagacgcatcaagtcttaaaaaatatcgacaccatcctccaaaaagccggaacatcaaaagataatattattaaaaccacgatttttattacgaatatgaccgagttccctttagtgaatactatttatgaagattacttaaacggaacgttatttcctgcccgttcgacaatcgaagtatcagctttacctaaaggggcattagttgaaatcgaagtaatcgctgctctttag

SEQ ID NO: 290037 - DNA, 516 bp, Morganella morganii
atggtttactcgtcactgtcttttgcacttgagtatgaaagtaaaggtgtggagaaagcgtctgaacttatcaggaaaatgccgttttcagaagacagtgaaaaaccggcactgctgaaacagataaaagctgtcagggatgaaaatccgggagatatccgggtttccgcaatctatattaatgccctggtttctgagaaacagtatgataatgcactgaatgaattatcatccgtgaataacctggcggattacagtcagatgatgctgctgaaatgtatgctggaagatcgcctgaataaagagagtgcggcatgctacaacacattcatcgcgaatgctgaaagcaaaaaagagaagaatgttgattacctgatggcactgtatttatccggtaataaaaaatataaagcggaaaagaatcattttatccggaacgacaaatacagcagtgatattgatgctatcgaaacaaaaagtaaggatgaaattttacgggagtttttcccgcaataa

SEQ ID NO: 290038 - DNA, 438 bp, Morganella morganii
atgacggttaaaaatttctatttttctcagattgctgatttaatggttgaaggtgccggaatacatggcagttattcactttcactgacggttaatgaggaaaatacggatgccggaaagaaaataagggtgtcagcaaccggtaaaagcaatgctgtaaaagcaacggggtccggaaaattactgttttggtgcaagataaccaataatattaatactgaacgctatatacttgaaaaagtaaaaggggaatcatgggtgattggtattgatgatatcctggtgggcagcgtagattttaccctgaaaaaatcaccaaaagtaccggagctggttattgaatttggttacttttacgatgccgggtatataggctccgtaccaccgttcccggccagctgtaagagatcgattaagttaacggacttcagacggtga

SEQ ID NO: 290039 - DNA, 720 bp, Morganella morganii
atgaatagtagaggtatttctgaagcattagatgataagataatgggagatatagcaaccattgctgtgtgtaggtatctacgagaaatgggctttgctgcaatatgttatgaccagattagaaaagatggtttcaaaaatccagatccaggatgggatgttgtagtttccaacaataagatattactgaatcattgggctcatacgactgataaacccgaaattcttcctagctttgccctatccatatctgtaaaatcatctagattgccaaaaggtgataacatccataacgctattcgaggaagagatttcaagatttttaacttaaacaacaatcaaatatctttggatctaacttctgatattgaaactcaagtttactatgaacttgaaaatacacagttacataatctaaagatcacccacagagatgttgttgaggcaactcttgcccgtgaaaaatgcaaagttatagacgaaaaattgatgatacatcaacggtataggcaatgtatcttatcaagatggaatttttctcaagagattatcgcaaagaccaatataaggtttcaaaataatcagcgaagctcttggagttcttttgggaaaaatatgtggattgccccactattggaagggtactcttttaaaaatcttgatatcttatgctataaattaaatgaattgaatgctagattccattcatttcataaatag

SEQ ID NO: 290040 - DNA, 1836 bp, Morganella morganii
atgaaaaaaatcacattaaaagataaagaaacatctagcttgaatatcactgaaatgaatattcaattgataaagagcattttcccagaagcgttctctgaaggcacaattgattttgatgttttaagatcacttctaatagatcatggagctcaggtatacggtcaaaaagaagaacgtttcagctttacttggtcagggaaaaacagggcaaagcaaattgcacaaatagtatccaatggaactttaagaccctattttgatatttcaaacactgacttcaaggcggggaatatttttattgaaggagataacttagaagttctgaaattattgcaaaaatcttatcataaatcaattaaactcatttatatagatccaccatacaatactggaaaagatttcgtatataaagacaacttccatgacaatttgacaaattattttcagcaaacaggtcaggtggatgaatctggtagaaagttaagtactaactctgacaagtctggacgttatcattcggattggctatcaatgatgtatccgagacttaagcttgcaagaaatcttttatcagaagatggtgcaatattcatttctatagatgatggtgagcaaagtaatcttaagcaaatttgtgatgagattttcggtgaagataattttgttaacaacataatttggcagaagaaatattccccacaaaatgatgctaaatggttatcagataaccatgattttatactttgctatgcaaagaataaaagtatctggcgaccaaatttattggctcgcactgacaaacaaaatacggcctataagaatcccgataatgatcctcgtggggtttggaagtcaactgacttatcagtaaaaacttacgctcttaataacgattacgaaataacaacgccatctggtcgtgttgtaacaccacctgaatcaagatgttggagcgtaagtaaggaaaaatttcaagagcttgtttctgataacagaatttggtttggcgagtctggtaataatgttccttcattaaagaaatttataactgaggttaaagatggtgtaacacctctaacactatggacttatgaagaagttgggcataaccaaaccgccaaacaggaactaaagaaaatttttcctgattcaaaagaagtttttgatacaccaaaaccagtatctctaattaaccgaattatcgacattggctctgacaaagattcaattattttagatttctttgcagggagtggtacgactgcccatgcagttatggaaaaaaaccgcacagataacggaaacagacgattcataactgttcaattaccagaacctacaggtaaaagtgaattcaagtttatttcagactttacatttgaaagaattttaagagtaggtgaagttcttggttataaacccccaatgaaatttagacttgattctaccaatattaaaacttgggacgctgattttgacaatttggaaaaagtgcttcaacaagctgtcaaatcaattaaagatgatcgttcaagcgaagatgttttgtatgaaatcttactcaaatatggttatgacttatccactacagtagaaactgaaagagtaaatggtaaagatatttatgttgtaggagcaggtgctttgattgtttgcctcgaagatgaaatctcaactgaaactgttgaaggtatcgccaaaattaaagcagacttagatcctgaaacacctcaagtcgtattcaaagatgaaggttttgctgatgatcgggttaaaattaatgctatccagaccttaaaacaggctggcattgaagatgtgaagagtatttaa

SEQ ID NO: 290041 - DNA, 3183 bp, Morganella morganii
atgtctgaaatgaagataaagtttaatccagatcttgaccatcaaagagatgcgattaactcagttattagtgtctttgagggacaagaaacgttccaatcgaacttctctgtttcatcaaatgcgctgacaaatgagcagttgggtttatttgccataaacaatgatattggtgtagcaaatgctcttactcttctaccaaaagagctttatgaaaatacacgaaatattcagctaattaacggcttgccacaaactgaaacgtcaaaacaagttcttccaagtctcgattggactatcgaaatggaaacggggacaggcaaaacttacgtctatcttcgcagtgtgttcgagctgaataaaaaatatggactaaccaagttcatcattgttgttccctccgttgcgatcaaagagggtgtctataaatccctgcaaataacagaagatcattttagaaaagaatataagaacattcagtatgactattttatatacgactcttcaaagcgtgagcaagtaagaaacttcgcaacgaatgattatattcagattatggtcatcaacattgacgctttcagtaagtcttttactgatccagaaaaagagactactgcaaacttgatccaccgaaccgatgatcgattgaacggaatgaagccgattgagttcattcaagcgactaaccctgttgttttgattgatgaacctcaatccgtggcatctacagctaatcgtaaaaatgctatttccagcttaaacccactatgcacgttccgttattccgcaacgttgacagaaaagtttaacttactttataaacttgactcgattgatgcctattcccgtcagcttgttaaacagattgaagttgcttcactagaagttcaagataatcacaaccaagcttatatcaaattgattagtgttgataacaagaagtcaccaatcactgcaaaagttgagattgacgctcaaactaaaatgggaaaattacagccacgtaaaaccatcacggttaggagtggaacggatctatttgaagcttctggtggtcgaactgtttacgaaggttatgtgatcaacgacatctactgtgaagaaggttgcgagtatatcgactttacaagccgtagcgacattatcggactaagacaggcaatcggtgaggttgatgaagacacgtacaagcgtttacaactctctaaaaccattgaagaacatctagagaaagagcttaaatttttcaaaaaaatcaccactggcattgatcctatggatcactcaaaggtgttaagccagaagggtattaaagttctcagtttattctttatcgacaaagtggcaaattaccgaggttatacgaaagatggtgtgccaatccaaggtaaattcgcacaatggttcgaagaagaattcatacaacaactcagaaaaccaaagtatcgtgtcttatacccaaccgtatgggataaggatagctctggtaagcctgtattgaacgagcaggctctgaaggaattagcaagctcagttcacaatggctattttgctcaagataagaagaaagatgcctcaggaaaccctcttttcgccgaatccaagctagcagcaaatggtgaaggcggtaaaactgcggctgatgaatccgcttataacctgattatgaaagataaagaaaggttactttctattgatgagaagttacgctttatctttagccactcagcattaaaggaaggttgggataatcctaacgtattccagatatgtacgcttaacgaaaccaactcagtcatgaagaaacgacaagagatcggtcgcggtttgcgtttggctgtagatcaatcaggtgaacgtgttccatatggttttgaggtgaatactcttacagtaatggcgaacgagtcttatgagcagtttgtatccgaacttcaaaaagagattgaaaaagaagaaggtattaaatttggagctattgagaagcatcaatttgcaaatatccttatctctaaggagtttgataagaaagagttccttggagctaaaaaatctgaagagatctaccaacatctaaccgactatggttacatcgataaaaacggtaagatccaagattcccttaaggctgaccttgctgataacacggtaaatcttcctgaaaacgtaaaggaatattccgatgcaattttagcgattttaacgaaagtatctaaaggcttgagcattaagaaacacgaagagaagaagagagcaactctacgtgaagataatggtaagcaagttgtccttggtgatgatttcaaggctctttgggatcgtatcaagtataaaacgacttatagagtagattttagcgttgctgaattggttgaaaaatgtatcaaagaaattcacgcatcagtagccgtagcgagtgctaaatttgaatacaagaaagtcaaagttgctataacagaagcggaacttgaaacatttgatgaagagtcaaagattcaatactaccgtaatagaaacttccaattgcctgatgttgtgacttatctggagtcgaatacaaacctaacccgtaagactatagttcaaatcttgcttggtttgggcgataaacttgaagcattcaagaacaatcctcaacgattcatcgaactggctagcgaagtgatccgaaaacaaatgcgactcgcaattgtcgatgggataacttatcaccgtatcggtgatgaagattattatgcccaagagttgttccaggaggaagagctcacgggttatctcaagaatatggttgaagcgaaaaaatctgtttatgactatattatttgtgattcagacacagaggttgaattctccacaaaacttgaggcatcgaacgatgttaagctctatgcaaaacttccttcttggttcaagatcgataccccgctaggcagttataaccctgattgggcggttttaatcgaaaaagttgatggcatgggtgatcagctctactttgtagtagaaacgaaatccagtatcttctctgatgatctgagagcatctgaacaagcaaaaattaactgtggtatcgctcactttgctgcattgtcgaaagataaagatggtaatgcccttgagaatccggctaagttcgtcaaggctgattcttatagcacttttgcaacacaactggaagaataa

SEQ ID NO: 290042 - DNA, 525 bp, Morganella morganii
atgggtatcagtatgaaaggtaaattacgttatagtgcaatgtttatcacatcagctcttgctcttggtatttttttgtttctaaattacagaaatgatgatgcttacaacaagggtaagtatattttatgtactatagagtctgatggcttaatatgcgtaccatcagatcgcaatactatttcaggaatgaaggttagtcctataaaagattataatgtttatatctatgatgatagattattcaataaggaagtgatgtatactaattatgttaattcagatggttatgttagttctttgaatgaaatagagttaagtgcaaataaaccaagctctggggataataaggtaaaaataaaaaaaatagatccgagtctgggatatgaagtaatcaatgatttggatgataattatacagataaaacagtggatatagatggacgaatcatttttttatctgactcagataaacgtgattttgataatttttacagtaaagttgtcagtaaatataataattaa

SEQ ID NO: 290043 - DNA, 738 bp, Morganella morganii
atgggattatatcaggccgctggtatggccggaagacgtatcgccgacattaacctcgcaaataagcttggtgtaagccatgaagcattgataaaagccagacaaatgagccgtacttttaatgattcaggctacatagagtctattttggaaggttcatttgaagccgctgagtctctggttaccgggattggttacgcatcttatgattttttagatcagggagatgttgcctggaaacgggaagctttagacaggttactcgtaatgataattgacggacgagtaaatattaataatcttaaaaagataatacatatcatttatgctttctatttcaaattaattagtaatgaagagagaaataaattagctacaaaattgttaagtaaaaaagcaactgaaatggcattatcgatgataattgctgaaaagttcggaataaatgcattgataaaagtagaaagcttctggatgaaaatggcattaaagaaaggtgtcatgactataatggcaattccggcaattaaagcaaaatcagcatataaatcacgagaattacgtgaaaaaatccctgaattatattgggaactaaggaagaatggtgatttagatcttctttattttatgatggagccttatgtaggcatttatattgatgttatatatttatattataataacagaccgctttttaatgaaataacatcactatatattgatatgataaaggcataa

SEQ ID NO: 290044 - DNA, 552 bp, Morganella morganii
atgagttatgctgatactattcagattatgattttaattttagtatttttattattcgggttaattcagaggtgttatatggcaagtaatatttacataaaaataaccggtaaaaatcaaggggtgatttcctccggttgttctacttatgattcaataggaaataaatatcagttgaatcatgcagatgaaatattggttgtttcattatcatttgatatttcaagatctcaaaatttaagtcatcatccggtttccatcacaaaatatattgataagtcgaccccattattgatgatagcgataacaaataatgaaatcattaattgtgatatatcctacttcaggacatcaagtaatggatcccaagaaaaatatatggagattaaattgacaaatgcatctattattaattattcacaagtaaatgcaaatacaataactgagaatgaaacattacctagcgagactatactgctttcatatgaaagtataacctgtaatcatttaattgcaggtacatcaggatatagtattgccaataacttttaa

SEQ ID NO: 290045 - DNA, 513 bp, Morganella morganii
atgtctattgaagatagctctgataaaaatgtttcatctagtaaaaggcaagtattagtaaatagcactgtcacagtgattcttttttgtattccttggttctctttccctaaagagattattttcatatttccatttgcagtccatttttctttttctttttttgatttcatatataacaaatattatgaacacacagaatataaaaaagaaaaaatcaaggaaagcgaattatctaatgcaatagatggagatatagctgaaattcgaactttaatgagttcggctacatgtagtgctgaaattgactatttacagaacagaattatttcactacataaggaaaaagatcaagtaagtaaggaaaaaagagataggattagacgtgaaacacttgagtttagggaaaataaaaattcggctaaagagcgtcaaggtaacgcaaaaaacgagatggaggagagttttcatgctggtatcagtgctattaatgaccaattaaatagcaaatga

SEQ ID NO: 290046 - DNA, 411 bp, Morganella morganii
atgaataatgaactcaattacattgatctcgagacaatagataatgaaaaaatatctgaaatacttaagtctttttctatagatgtgtttattgatactgatggtgacgtaactactaatggaaaaaatgaaatatatgtaaaagcagataaggacctcggagctttgcgttttttctcgtacataagaaatatcccttcatcagagagtcttgataaattattgtccgtttttaatggtggtagttcaacagttaagtaccaacaaatgacgaattctattatgattgaatatggatttcttctatctggtgttattaattataaacttttaattagtacttatactcattttgtagcagaggttgcaattttcaaagaggctattcacgaagaaataaaagtggagtga

SEQ ID NO: 290047 - DNA, 519 bp, Morganella morganii
atgccaactccatgctatatctccatcgaaggtaaaactcagggcaatatcactgccggtgcgtttaccgctgaatccgtcggcaacatctatgtgcagggtcatgaagatgagatgctggtgcagcagtttgaccatatcgttaccgtgccgacagatccgcagtccggtcagccgtccggtcagcgtgcgcatcgtccgtttaaatttactgttgcgctgaacaaagcggttccgctgctgtacaacgccctggccgccggtgaaatgctgccgaaagtgcagctgaaatggtaccgcacctcggttgaagggaagcaggagcatttcttcaccacctcgctggaagacgcgactatcgtcaatatcgactgcaaaatgccgcactgtcaggatccggccaaatcggattacacccagctgatcgaagtatcactctcttaccgcaaaatcgactgggaacacaccgtcgcaggcacctccggtgctgacgactggcgtgcgccaatcgaagcgtaa

SEQ ID NO: 290048 - DNA, 2112 bp, Morganella morganii
atgtttgctgaatatcccaaaaagaaggcggcagatatcgccgcactgaaagattctcttgttcaacaggcgggtgatgccgcagcggaaaaagccacggcagcgttgtccgctccggcgcagaaagcggttaccgctgcgcgtcagattcagacggctgcctcgcagattcagtctgcgacatctgctgtgaacaccgcaaacctgatccccggcggcggatttaccggcggcctgaacagccctgctcccggcagtctgtccggactttccggctctgccggtgatatagcaggggcgctgctctccggccgttcaccttcgggactggtgtttacctgtaaaatcggccggttaccggagcagacctttcaggtcaccgaattctcgctcagtgaatctctttcttcgctgttttcactgaccatcagcgcggtcagccagctgccgtcgatcacatttgaggagcatttaggctctgccgcctcactgacggttacccgtgacggtgtcaaagtccgcaccgtgcaggggctgctggcctctgccgaacagggcaataccgatggcaacaaaacctggtatcactttctgatccgccctgaaatgtggatcatgaccctcaaccaggacagccgcatcttccagaaacaatctgtgccggaagttctcgcaacactgctggatgaagcgcatgtcaaaaatgagctgaaattttatcaggacgaactgcatcagaagcgggattacatcacccagaagcgcgaatccgcctatgatttctggtgccgtctggcggcagaagagggcattaacttctggttcgaagaaggcccgaaactgttttacagcgacaaccaccttggcatgaccgccggtattaacctgacctataacccgcaggcggacactgatatcagtgacagcaccgcgttttcctggcgctacgccgaacagctgtgcagcgatgttattatccagaaagattacaacccggatcgcccgtcatacccgtttcagcatgaagtcaccggcgacgtgcataaacagcacccggtgtatgaaagctatggccgctaccgcgacgatgagaccggtaaaccgttcacgcagctgcgctacgaacaatctcagaaccagcgtcagaccggtacggcaggtaccaattgctttgcgctgatgccgggcaaaatcttcaccctgaaaaatcatccgtcggacagcatgaataaagcctggcaggtgattacggtcaaccatcacggtatccagccgctggcggataacggcggcggagagggaaccaaattcagcaacaccgtgcagtttattcccggcacccgcgaatggcggccggcgtaccgtttccgtccgcaggcagacggtgatgagctggcaacggtggttggccctgagggggaagagatttacaccaacgaacagggtgcggtgaaagtctatttccactgggatcgctacggtaagccggatcacagtgcttcctgctgggtgcgggtggcgatgggctggaacggcggcggctatggtttctccgctgtaccgcgcatcggccaggaagtgatcgtctcttatcttaacggtgacattgaccgcccgattattaccggctgtacctacaacggccgtaatgtaccgccgtctgcattcccgggcagtaaaacacaaacagctttccgtacaaaaacacacaaaggcgagggattcaatgaactgcgctttgaggatgaaaacgggaagcagcaggtctttattcatgcccagcgggatatgaacacggtggtgctgaatgaccgcggcacactggtgaaagcgaatcacagtgagctgattgaaaaaaatcagagtatgacggtcaacggccaccgcaaagaagagatcggtgaaaataacagtgaaacggtcggaaaacataaatcggtgacagtgggaaataccctgtcagtgaccgccggtgatgtgatcgaattacgctgcggtgccagtgtattgcggatggacagtgccggacgggtgacgattaacggcactgaattcagctttgaagccagtggtccggtgcagatcaccggcaaagacattgatttgaactga

SEQ ID NO: 290049 - DNA, 1212 bp, Morganella morganii
atggaatttcgtaacctgacaccattttcagtgatgaattacaaaatgctggatacggatgatattgagcatcatgtcattgtgatgaaagtggggtatgaattagtgtccggcggcaataacggggactatacccctcgcctgctgacggatttggcactggtgtctgaagatcagtttacgggtaatctcaatacatcatctgttttgatcgaaagtgatctggctccgttcaagccccgttgtgatgtccttgttaacggaattgcctatgcgccggatgatgctccggcagagtcaatagttgtctcattgcttatgacagaccggcatcacagagtattaatcgaaaaatccctgcgctgtttcggggagcgtcagtttgtgctcgatgaaaactcaggtgaatggcagttaacggctccggctgcggtacgtcagttaccggttgattatcgctatgcgttcggtggggaatgcaagatttacgcaaatgatacactcagtcgtcctgtcgctgaggaggtattactttctgatattcggcgcgctgcccatccggaaaaagaatcggcgccggtagctcacagtacggaagagcataacccattggggcagggatttataacatcatggtatcagcaatccctgaatgttaccgcgtttgccgcacctcagattgaatctccggaatatcccgttaccaccgggtgggtcatgtcacaactcaatgatgagcaactgccgcacggtatcgcaggttttggtgctataggcagggcatggctgccccgccggttgctggcaggaacttatgatgaaacatggctgaatcagcgtcatccttatctgccgcatgattttgattttggttactggaactgcgcgccggaagatcagcaaatcgcctatccggcgggtgatttctctctgactctgactaatttaacgcccgggggcattgtccgtaccaccttaccgggacaccggccgtttgttttactgagaatggcggaaggacagcttatccctcttaaactcaatccggatacgatagtgattgatactgaaaaactgcaacttttcctgacttaccgcttagtttttgaagctgatttgcctgtacgcgtatgtgaagcccgttttgaaacggatcctgctgcgccgctggtccgttttgccgaacctcagaaggaattgactcatggctga

SEQ ID NO: 290050 - DNA, 357 bp, Morganella morganii
atggctgataactacctggcccgccagcagggcgaatggctggtaattagtctgacaccggatgtgtgtaaaactccggtgggatcatccacaccgccgatcccctatcctgtgattgcgaagctggaaacgtcggcttcggtggtgtcatcggtcagagctaatggtcatcccgcagtggtctttaatcagagctttattccggccaccttaggcgatgctcccggtgtggcaaatggcattaaaagcgggactgtcggcggaaagtgttatccgaaagaacattcaggcagtgtttgtgccggaaaaaaacgaatcctgcgtcacggcgataaattctggatgaacgggaaatag

SEQ ID NO: 290051 - DNA, 4602 bp, Morganella morganii
atggtacggataacgataagctccccgacatctcctgacagcttaatggtcagatataattttcagtctgctgatgatgttcaggatatcattgataatgtttcagactatgttgatgatatatttcccggcgttgaaccggaaaacagagaaattgcaacaaactcaattctgcgcggattaaatgaaacgttattactatttgaatcgggtgaatacccgaaagaaataataatttctgatactgacagtagtgctgatggaaataccatcggtgtcataactgctcaggccagagctgctgccgttcctgcacagcaggctaatcctgcagtgactgctgagacagctgctgagcaatacagactgatcgatcccacaataaccttattgtccgcggaagacgcggaaagagtacgccagtgggcggaagagagaaaagaggaattaacagcctgggcaacacaaaccggtaatgaaatttctgctgcactggattcgccttttgagggaataagcggagctataaaagatacctggaatattgtgcctgatgtgctcgatttagcgtatgccggggcacagattattgaaatcaccgcaagtaccctgggagcgaaaattgcggggctattcagtgacaaatgggcaaaaaaagctgaagaatatgcggataatgttaaaagtcagctgggttattcggcatttaattttctccggtttgaaaatctgtcagaagccgaaaaaggcggggcatgcctggcgatgataaatccgtttgttttgttaaagacaaccggacggaagctggaaaaagaaattgcagaagaagcggctgaaatcatcaggaaaaaaccgtccgccggaggtgttgtgaaaccccgtgaaattccgccggataaaacaccggatactcccgcagcaaaagtcagtgaagatacgaaaaaaacacagtctggcagtgacggtaaaggaacggataataataaccgtaatgtcggcggtgacccggtggatttggtcagcggggattttattcagtcgtggccggttatccgtattcccggtctgctgccggttgaactgacccggacatattactccgttcagtcagcccggggacttttcggtgaaaaatgggcagatgactggtcaatgtatcttgagatacatggtgacactgctgattttcaggatcccggcggaaaccggtatacctttgaaatatccggcgatgaagtccggtcacgaaatttacgtgctccgtactacctgctgtcaggcaaccggaaaacggggttacagatacaggataaccgccgtcagcgggtatatcactttgaaccggcaccggtattgcaccgccgtctgatcaaaattaccaatttacagggtgttgccttacattttcattataacgaagaccggcagctcagccacctctcccgcgatgacggatttataatccggctgcattatcagcaacatcaactgacgcatattgattatagctgtgacaaccggacacagcggcttgtttcgtgccggtatgataattccggctatctgagtgagtgtgatgcttttcagcaaaaccacctgtggcacagttatacatcagaagggtggatgaccggatggcaggattctgaccagacctcgctgacggttacttatgatgaccgggggcgtgtgatacaaacgtattctgacagcggatactggtgcgaccgttttgtttatgacgatatattacggctcaatacctatatcaacggtgaaggcgggcacttccgttactattacaatgaagataacctggtggtacgcacactggatccgtcaggccgggaaacccgtacagaatggcgtgattttcagaaaatcagtgaaaccaatgatattggtgaaatcacgcggtatgtttatcatgccgacggattaccggcacaaatttatctgccggataaccgcaagattggctgcgaatacaatgataatggacagctcacccgctatatcgcaccaacaggagatgagtggcggctgaattatgatactgccggtaacctgatctctgagattgatccgcagggccgcgttcagatgtacgaatacagtgtgcatggtgaattactgaaagctgtttcacctgacggggcgcagtggcggtatgaatatacgtctgcgcatcagttgagcagaagtattaatccgtatcttaacagcacggagtatcagtttgatgaactgggacgcctcactcatctcacggatgcactgaataataccacccgttatcactatgatccgtctcatgcgggggttaacggcagtatcagtgatattttcctgcccgacggtgtgcatcagcatattgattatgacagtgaacgccgggtggtggcggtcactgacggcgaaggcaaaataacccgttaccgttacggaccgtttgacctgctgctggcgatggttcgtcctgacggtacagaaatccgctttgaatatgacagcctgacgcggctgaaaaaagtgattaatgcggctggggatgaataccgctatgagcgggataaagccgggcagattatccgcgagaccgattttaccggccgggaaattcagtaccgttatgaccggctcggccgccgcacggccacccgttacccagatcagcatgaaatccgctggtcgtactcctcggaagggctgattacccggcaggatatctggtttgatgacggcacacgcagtgaactgaaatctgccacgcactatgaatataacgaacggatgcagcttatccgtgccgaaaatccggatgcggtcacggagtttgagtatgacgccgctgggcggcttatctgtgaaaaaatcaatggccgtgaaattcagcatgagtgggatgagcagacagaccggctcacacagacccggttcgggtctcaggcattacagtatcagtacggattacagggcgaactgacgcagtttcaggccggaaaacaccagccgctgcaactgagccgcaatgcgctcgggcaggaatacctgcgtcactgtcagtccggttttgcctcatcacgccattacacggcgaccggcatgctggcgcatcagaccgccgggcgcggctcggacagttatcttcaggcgttgcgggacaacccggtacagccgcctgccgccagtgatgtcaaccgcagctggcagtatgacaaagcctataatatcacagcgattgatgaccaccgctggcgccgtatgcagtaccgctataatcagaatgaccagattgagagtacgtccttcggcggtttataccctcagacagagcagtttgattacgacaccaacctgaatatccggcagcagacgctgataccgggtgaggcgcaaggggctctgcatcagttatcgcagcaacagcaggcggggcgggtggtccggcgtaccacggcaaccggtcattttgattatcactacgatatcaacgggcggctggaacggaaaaccgagcaccggaacggcttccggccacgtgaatggcgctatcagtgggacaccctgaaccagctcactgcctgttttacaccgcagggtgattgctggcgttacacgtatgatgctttcggacgccgtttgggcaaatatcaggtggtaaatgcacaggaacaaatccaccaacggcatctgaatctgccgccgaaaacccgtggctggcagtatctgtggtccggcaatcagatgattgaggaagtgccggtgtatgcggacggcacggtggcgtatgacgccggggttcagtggctgtatgagccgggtgcactggttccggcagcaaggtatgaaaaaggaaaactgcattaccttgtctccgatcaccagggcacgccgcgtgaaatcttcacggaaagcgggacggtcagttgggcagcacggtcggacacctggggacagatggcgttctggagcctgaaaaccagtgccaatgacccgaattataccgaatgccacttccgcttcgcgggccagtatgaagatgctgaaacaggcttgtactataaccggttccgctattatgataaggacacgggacagtacatcagccccgacccgatagggctggaaggcggctttaacccgtatgggtatgtgcaatgtccggtggggtgggttgatccgtttgggttgagtggcacttcgacattagatgaaactggccgaccattaaaaagcccaagttattctgttgcatttgaaacaaaaatagacagcaagttttatccgggtcgctctgacaaagttcattttcaagaggctaatagaaatcttcatgaagcaatgaaggcagaccctgtttttgctaagaaaatggaagatatgtacccagggatcacccaagggatacaaccggggccaagaggagcatacccgagacgttccccgctacctgaactaacttggcatcatgaagctaatcaaccgggtgttatgcaattagttccaataaaacaacatcagtctcccggaattgtgcaagattctttacaccctggagggaagggtggaatgaataattggggaggaggaagatag

SEQ ID NO: 290052 - DNA, 321 bp, Morganella morganii
atgaataatgaaacaataagaaatgttttactgaaagtattagatataccgtggaatttagcattgtacctacctaagaatacagtgaactggaatttagatacactagctatgattgaagatcctgatgatattgaatcagatgaactagatgatgatcctgaagttataaaagaagctaattataaatatgttatatcaattcaaatgttacaaagcattgtcaccaatgctaaattacaaaaagcaaatgtaactgaagaagagttacttcaatgcctcatttattattttaataatgatgcttatttaacactttag

SEQ ID NO: 290053 - DNA, 465 bp, Morganella morganii
atggcgacgacccttaaccccgatcatccgttagtttctgtttctttcaccgctgatactgatttcactgtcctggctgaccattgcgccctgtttgctgaaattttgattgagtctgccgacccggtgcagaaactggcattatgcggcaggataagcaccggtctctctttgctgaaatccaagctcgcagatcccatcgctccccatcttgttgaatgtctgaccaccgatataccccctgtctcctctcctccccgctttaatcccgacagcactgaactctgcaattattgtctggcgctgacgcaggttctggcagggcagggatttggctctcagacggcgatgaacctgagctggctgttatatgaattactggattattttaagacagatttacagtcaccgcgctggttacggacagcagaaggaacccggtttcttgatgaaaggacggcatga

SEQ ID NO: 290054 - DNA, 1119 bp, Morganella morganii
atgataaacttcttagatttaaaatcaataaatgcacaatatgaagatgaattaaaagcagcatgcagccgtgtaattgattccggatggtatattgcaggtaatgaactaacaaattttgaaaataactttgctaattattgcggaacaaagtattgccttggtgtagctaatggcctagatgcattaactcttactctgcgagcctggaaagagcttgggaaaataaaaacaggtgatgaggttattgttcaggcgaatacgtatatcgcatcaatattagcaatcactgaaaatgatttagtaccagtttttgtagaaccagatcctgatacctacaacttatcaattaagaatgtacgtagcgcattaacaaaaaaaacgaaagctatattgcctgttcatttatatggacagatttcacctatgcctgaaattatggatattgcagaggaatttaatttacttgttttagaagattctgcacaggctcatggtacagctattgcaaataaaaaagcaggtaactggggtcatgctgccggctttagcttttatcccggaaaaaacctaggagcattaggtgatgctggtgcaatcacaacaaatgatgaggagttagcaactacgctattagcattacggaactatgggtctcatcaaaagtatcttaatatttatcaaggggttaatagtcgcctagatgagattcaggctgccatgttgaatgtaaaattaaaatatttaccacatgaaacacagatccggcagtcaatagcacaacaatatcttgataagatcaagaatccactaataaagctgcctgcaaatcctgaagagtataaaaaagaaatgcgaacacatgtttggcatctatttgttatttcttgtcaacatcgggaaaaattacagagacatctttcggattctggtattcaaacattaatccattacccaacaccaccacataagcagcaagcttacccacaatataattcgctatcattacctgtaacagaaaaaattcatactgaagtattaagtattcctattggaccaactatgacaggaaaagatattcaatgtgttattgatgcttgcaatacatttttggtttaa

SEQ ID NO: 290055 - DNA, 528 bp, Morganella morganii
atgatactgatatcgaaaaatacatatcttaggctagcagaaccaagtgatgccgaatttataatttcattgcgaacaaatgaaaagtataacaagcatttatcacacactggcagtgacattactgcacaaaaaaaatggcttgaattatataaacaacgagaatataaaaaagaagagttttactttataatagaaaatgcggacggcacaccatgtggtacagtcagaatatacgatatagtaaacaattcgttttgctggggtagttggatattaaatgaaaataaaaaaactactacagccattgaaagtgctttactgatatatgattttggctttaacaaaatgcattattctcgctctcactttgatgtcagaaaagaaaatgagatggtgattttctttcataaaaaaatgaatgcacatttaatatcagaggatgaattgaatttttactttgaaatatttcctgacgacattatttcgataaaacagaaatataaaaaattacttcaacctcaataa

SEQ ID NO: 290056 - DNA, 408 bp, Morganella morganii
atgagtctgataaatttaatcgagttcaaaacacttggagatgatcgcggctccctgatttcattagaacaaaataaaaatattccttttgaaataaaacgtatctattatatttttggcacaaaagaaaatgtttcccgcggatttcatgcgcacagaaatctgcagcaagtagccgtatgtctcagtggtagttgccgttttgttttagataatggtgaaaaaagagaagagattattctgaactcacccgataaagggttatatattaataactatatgtggagagaaatgcatgatttttctcccgattgtgttttaattgtgctggcaagtgatttttacttagaatcagattatattcgaaattatgatgatttcctcaaatcaagttcaattgatagataa

SEQ ID NO: 290057 - DNA, 825 bp, Morganella morganii
atgaaacccgatatcacaataaatttcagtatattaatttcattatataacaaagaaaagccagctaatttacattcatcactgcttagcattaaaaacaacacaatacatccggatcaaatagtcattgtttttgatggccccattaataatgagctgagtgatatcgttttcagttttatgaatttattacctattgacgttgtcaaactgcctgataacgttgggttaggaaatgcattaaatattgggttaactaaatgtagccacgatattattttcagaatggatactgatgacatctgtttgccaaatcgatttgagaaacaaatcaattatattaaagaaaatcctcatatttcccttatgggtagcaacacagaagaattcagtgaagatatgaccatatcaaatggttatcgtaatgttgcatgtgaacattgtgatataattacgcttgccaaaaaacgtaatccgttcaaccatatgactgttgttttcaaaaagaatgcagttttagcggttggtgggtatcagcatcatttatatatggaagactataacctttggctacggttgattgcagcaggttacaaaactcataatttacaggatatactggttaatgtccgggcaggatcttcaatggtgtcacgccgtaaaggtttgacatatataaaaagtgagtttcagcttgcaaagcttaaaataaaattaaacattgattctcccttctctgctactgtaatattttttatgcgtagtatcccccgtattttgcccatatcaattctcaatattgtttataaaaaattaagaaaatag

SEQ ID NO: 290058 - DNA, 1536 bp, Morganella morganii
atgattaatccgcactttaaaaaatataattttatttatataatcttagcatcgataaatttactatatttcgttcttttttcaaagaaattgtttgaggggaggctgtattttgctttgtcgtgcttattcttaggggctatacttattttagggtatggttcaaaactaagacgaataactgcattactgataagtatttttggtttagtatttttattttcagaatttatgacatatagaatgtcgtcattttattttcatgaaataccaaatgaaattataaatatcatcatagataccaatgtggatgaaataagtagtaattttttcttttctaagaaagaaatacttgcagcaatactaattacagcgaattttatagctattttttttcccggaaatcataagaaatatgatttcctatattttataacgctaacaccattattcttattggtgttattttttatatttaagccaataagcatggctgcgtataaaataattgaaaatttcgatagtataaaagaaaactctgctatattagagaataaaaaacacttttactgggaaactaaatcattagctgatgataagcaaacggtagttatatttttaggagaaactcatcgaggagattatcttcattttaatggttataataaaaatacaacaccaaatttagacaaagaaaatataatatctttcaataatgctatatcacaaggcccatataccctcatttctacccctatgattttgaccagaaaaaatgtatatgacaatgggttgtatcctgaaaaatcattaataagtgcatataaagaagcgggttttgagacgtggtatgtatcatatttatcaaaaagtcacattggtgataatgagataaatttaatagctaatgaagctgaccactatatacaatcagatgttaacactgatacattaaaggaaattctcaataacgctagtagtaaaaagttaattgtctataaaactgttggcagccattatttatatcacacccgttatcctgatgaatatgatgtattcaagccatcattcacagaaaaaacatatacaacacctcaattgaaagataaagagaaattagaaaatagctatgcaaattcaattctctatactatagacaaacaagtgagtgaattcattaatgttcttaaagaagaacatgggcttgtgtatttatcgtttgtttcagatcatggtacgtctatttatgacgatggtaagtctctttatggtggaaatactaaagggaattataatttagcattattttattggtttaatgatacctattatgaaaagcatgcagatattatttccagattaaaaaataataaagctaagaaaatcactactgaatgttttcttgatacaagtctcgatatatctcttatagcaaatgataagaaaaaaggatgttcattaattgatgaaaatctgactgagaaaaagagattagtacggaatggtgatatttatgattacgatagtgacctataa

SEQ ID NO: 290059 - DNA, 2541 bp, Morganella morganii
atggaagagataagtttaaagccagaagtattcactaaaatgttaatgctggctatacacgataaagatgccgagtatctccttgaagaaattgatgattatctcataggtttaattgaaaagtcaccttcgttagacaaaattcccgagattgaagtatgcgctaaaatagcagtggagacaattaaccctgatactttaggcttctcatatgcttgggcgttacacagcttaattgcatgtgaatgtattctggggaaggcagacaacataatcatcaatcttaaaaaattgattgaccattgtgaaatcgtcggttatatgcagccctgcattagtgcgatgaataacattaagaatggtgctcttggtgatatcgcagctgacaagtacccagcattaatgagagttattatcgaatataataaaaaaaattgcagtgaaaaggaagtaactaaatgttatgtggcagttgcatattttttctcggaccaagaggcatataaagccgcgatcgatactctggatgatgctttggaatatttggtagaatgctcaaataaacagtgtatggttgaggtgctggcggtcaaacatagcacgtatatattaagtgagaaccatgaatacgcattgagagcatgggatgatttgtctgaaatttgtaatgaacttgatgtcgaaccaccttttcattctatactgaatcatgcaaccttgcttatgaggtttgaaaagtatgacaaagctattgaaatatatataaaatcactgacaagttcggattgcacgttacttagaagagcaatgatttttggtaacctctctgcttgttacagagaaaaaggtgataatgaaaacacaacgaaaagcatggattacgctcgagaaatcattgaaaaattgggtgatgatcgttttgataatgattttcttcttgaaatagaattgatcaatgctaaaaataatgtttttttaggcgattccgatggtctgaaaaaatgcttgaattcatttgtagaaaaaatgagtataacattatctcatactttcaaacttcactatagacgtggggttagaaatagatttattgcccgttttgagaacttggtggcttgccttccgagaagtggttttgcgacggatatcattcccctactttcattttcacgcattaatcaggctgctgattggttgagcatcctcaaatggaaagaggatatctcagcgaggatcacaattagtgagagagcacaattatccagcctaatagataatttatcagcctatggcgcacctcatctttatggttttagagaaaaatatgataatgccttgtatgagatgaatcatgatccttgggataaattcataacattcatcgaaattcttgatgagcgttatgatttaccctcgatttacgtatattcatctgaaaaatttttaactggtatactgaatgaaagacttcatcagcgtaacgttttgatatttgatttctcagcctcggactctaaactaattactatttacggagataaatacattattgatgatctgccaggggaagagggaagaaatttctttattgagcttaacaaatatagatttgagggtgaaaatagaaaagagtttaatcagagtctaataaattatcaagtggctatgaataagtgtttgactgacacgatttctattttagagggtaacaaccaaggcgttattttatttccttcaaaaatggactttttccctattaatcttttgctagtatcaaatgacataataaggcgtaaaatgatagctggggaattttcaattagctcctgcctatgtttacatcctagaagtgataacaataaaatagaatcttgtctaggagtagtagagtctgtcactaaccttaaatatgacagagctgaaatccaaaatttcatgaaaattactggtgttaccggggaaattttattttcaccaactcagaatgatttttttgacaagtcattagatagagacgctatcatcatttctcaacatggtatttctgctggaatttttactgatccagtttttgctaatttatctggcccgcatgcagttatgaagacactaagctatgaacacttacagtctaacacatataaaatgaggcataagctagtgatgttaaatgcttgttatagcggagcattggtgaacaagaattattacaagcaatttaggacacacgaacttcttggatatcctcaggcatttcttttaaataggcaaagcgtggtaatagctgcatcatggacgatagtagacagatataatgctcttctgatgcataatttttctcatttaattagtgagtatgatatcagcatggcatatagcatttctttagctaggacgtatgaaatggctactgatgaaatggttggtattttgaatgaaataaccgacgatcaacaaccattaccaaacaaccaagttcttgatacattaaaaacccaaccattttgcttttcaacatatcataattacacgttgctttag

SEQ ID NO: 290060 - DNA, 720 bp, Morganella morganii
atgcagttacttcgaaacttatccatccggttcgtcatgctgtcgatactcggtattttgtgtctgacactcggatgtgtcagtttttacagtgactggtcactgtcgagagtgtctgacggcaatgcgaccgatcgtcagctagtccggcagctgacggtactgaatcagggaaatgaccagtatttccgctttatttcccggctgaaccgtgaaatgcagaaaaaagcggaaggggaagaaccggatttaaaaccgtctgcggaggcgatggagaatatggggctgcacctggcggagatgaaacggatttccccgggaccgatggatgtacagatgtcagaaaaagtgattgcccgctggcaggcactctatgatgagggggttaaaatccagatgcagctggcggagcagggggatcaggcgggttaccgtaagcagtcccatgatgtcacaccgcagctgagcaaagaatttggtgctgccagcgttgagttcacgcaggtggcggagacgcggatcgaacagacccgtaccctggtggacggcctgatgaccaccacacggattgtgattatcagcggcacactgtttggtctgctgatcctgatttttgctgaccgctatctggtgaagatgatgcagcgcccgctgaacaatgtccgtcagcatttccgccgtattgcgggggggggatctcagtcagccggtggaaagtga

SEQ ID NO: 290061 - DNA, 438 bp, Morganella morganii
atgagcgattacaaatggtcaccatcacacaacaatttcttccctgagtccatgctcggtgagtatgagcaggcgggttgggatttgtcagatcttatcagcataggcgatgatacctttaataaattcagttcaaccccaccagagggaaagatccgagcctgtggggatgatggaatgccttcatggtctgatgccccgctaccgtcccatgaagaattaacgaaagaagcagaagcgaaaaagcaggcattgatcgcggaggccagccagaaaacccaactctggcagactcagcttatactgggaatcatcacggaagaagataaaaccagcctcaaagaatggatgctgtacgtacaagaagtgcaggcgatagattcatctctcggggctggtattgtatggcctacaccaccggtctcactggctggttaa

SEQ ID NO: 290062 - DNA, 237 bp, Morganella morganii
atggataactggctgtctatcttcggcggtataaaagacaaggcacggcgcgatgaggcgatttccggccttatccctcacgatttggtttctgaactacgacaaggtctgggaagctggaaaaatagtaacggtcagtatgaatacgggcggcaatggagagagaccctaggtatagaggtcgataaagatttggtggtagcttctgcgattactgagtcattaaccagaaaatga

SEQ ID NO: 290063 - DNA, 198 bp, Morganella morganii
atgcaaaaactgaaattgaccggctgcgtattgctgctgaccgtagccctgagcgggtgtacatcaaagccagttgtcctaaaaccggcagcattaccaccaccggcatggatgatgcagcctccgcccgacctgatgacaccgctatcagaaattattggttactcagagagcggattgcagaatccgagcaaatga

SEQ ID NO: 290064 - DNA, 339 bp, Morganella morganii
atggctaagtccccggcagagcgcaaagccgagcaacgagcgcggcaaaagaaaaccggtatcgtcaaacttgagttgctgctggatgaacaggaacttgaaatgctgcagcgaaattgtgcgttgcggcggccagggcgggaaccttatgagttgaatgaatatctggcaacattaatcagaactgatgaccggtcgcttaaatcacagataaaaaaactcggaaagaaaacctgtcaaaaatgtggtgagcaattgcctgtgacagagtgctgtttgagtggtgattcagcatgctggaatactgcaggatggcatgaattaaagctccgcatataa

SEQ ID NO: 290065 - DNA, 753 bp, Morganella morganii
atgaaaccggtcagcgtcgatactcatgtaaaaactattcagacaaagggatttgccacctctcccgtggtaccgcaggagcaacagagcagggaacaactaaaaaattttatctccggccagttcaacggtctgtttacgcagttgtgtgtgatatttcccggattcagggcgactgtacgcacacaggcagagtttgacgaaatgcgccgccagtgggtgctggctatgctggaaggaggaattcatacccgcgaacaaattaatgccggtctgcgtcttgccaggaggcagggcagtgattttgttccgggttgcggaaagtttgtcgcatggtgcagagatggcattcaggaagtatcagggttgcctgcagtggacgaggtgatgcgtgaatttgaccgttacagcgcgaacaggggattttatccgacagcagaagcattcccctggaaatccccgatcatgtaccagattataccggaggcacaccgccggatgaggcagtatggtcagacgaagacagaggtaaggaatgccgtcataaaggtattacggtactggttgaaacgagtgcaggacggccaaccgatacctccggttgtgccacagattgaaaatcggaatgaaagccgccaggcatctgtatcagaggtgatcgacaaagatggcagctatcgtgaaaaaggacgtgaaatgttagaagagatcagactgagaatattacataagggggcggtcaaaaacacctaa

SEQ ID NO: 290066 - DNA, 984 bp, Morganella morganii
gtgagcagtaaattgcatggcttggtctgggaagggtgtgcctttgccgggctgagcttatcccgtgttgcggttatggccagattggctgattttgccagtgatgagggcataagctggcctgcggtggaaacaatccgccgtcagatcggtgccaaaagcataaacacggtcactgcggcgataaaggaactggagcgcgataactggctgacaaagcaggaacgtaagtcagggaaccgtaatctgagcaacgtatatcgtatcaatatcgaaaagctggaacaggtttcttacgcggccagaaaacattaccggaaaacagccccgtctaaaatcacccccccaattattgagggggtaaatattggggggccaaattttgagggatcaaatattgaaaaaacagggtcgattaaccccccaatggttgaccccgatccgtcattaaaaacagatccgtcagataaaagatcttattgtccggacgctgcgctgccggacgacgacaaggtatcacccgacagtgattttatttcacgccatcctgaggctgctgtgttcagcgccggaaaacgacagtggggtaccgctgaggatttgcggtgtgcacagtggatttggcagaagattttggcgctgtacgaacaggctgctgagactgatggtgaggtttcacggcctaaagagccttcatggacacaatgggcaaatgatatccgcctgatgcgcggacaggatggacgcacacaccggcagatttgcgagatgttcggacgcgtaaatcgggatgcgttctggtgccggaacatcctgagtccgggaaaactccgggagcagtgggacaaactcagcctgaaatttactgttctgccgtcagaccggcagcagggttttggtacccgtgaaaatctggatttcagcaacacaaactggatagacggtatcgaagatgatctggtcaacgcgggggtattaccatga

SEQ ID NO: 290067 - DNA, 195 bp, Morganella morganii
atgatgaatacaggtgaaaaaattacgtactgcaacggattccgccataacggggatccggctgacattgaaaccatacggcctatattcgatgagaggcgctctgtggcgtttaatgcgtggcatgagcagactttaaatcagagtacacctcgcgatgtcaccggggcacaggaggtgcagcgtgagcagtaa

SEQ ID NO: 290068 - DNA, 342 bp, Morganella morganii
atgtctacaataggaatcaggttaaaaatagaaagggagcgattaggccttaatcaaacggacttcgcgaaacttgcggggtattctcgcagtgctcaggccagttacgaaagggatgaaaagatacccggcggcgagtaccttcaaaagattgcagaacatggctgtgatgtgttgtacatccttactggtcaattgactgaacctaaaagtatctctgaagaagaaaacaaacttatctctaattatcgcgctatgaatgaggcggcacgtttaaatatgcaggcggttagctctgcgttcgcgcaatcagagttagttgagaaaacaaaagttaaatag

SEQ ID NO: 290069 - DNA, 336 bp, Morganella morganii
atgaccagaaaagcacacatttttaaaatactgccggagtactttgaaaaagttcggacaggggaaaagaaagctgaattcagacgcgctgatgacagagtctttaatattagcgacgtagttttgttacgtgaaatagaaccatcaatcggatttagctccaacacaatgaaacctttctgtcgtgggactaaatatacgggacgtgcattaatttgtgatatcaccgatataacgatggttaattctgtttatccggaactaaaagaattgcctgatttcgtcatgctttctatttccgttacgcatttcagtgaggatacaatatcatggtag

SEQ ID NO: 290070 - DNA, 2172 bp, Morganella morganii
atggatgtaacgccggagcacaacagcgacgtatttaaatcaatgcgctgccaggcagaagaatatcaaccggggctgtcggaagatcctgctctggctgagtatgtttctccttattggaataacgaaatctccccgattgaacgcccgttcctgacctatgaggaaatacaggagcgtcaagcacgtgctgaaaagctgaaacttgcggaacaaaagctgagtgaacaatcaaaaattgttcagatgcatgtaaataagctggttgatgaagtcggcaaaacccgtggtgctgacgctgtaggcgcatttctggctaaaaactttcttgagcggattttgccacgtgtcgatttggttacggccaaatatcacctggcaaagaccgatcaggataattaccggtattttaactggttcaataagctgcccgaccttaacagtaaaagtattgaatcactgtctcaggaaattgcagcctttatttataatgaccttgctgaaatggcagaaaaaagaacggacgaaagcgatctcaaaatactctggcagctttttatgcgtgccgctgctgttacccgcgcctatcgccaagaagtgcctttgttcttcaagctgactcaacgtgaatttaacgagaaagacgcttatgcggcaatagcccgcatgacatcagataaatggtggctgaactcattacgccgtcataacaatgcatggcgggagcatttacagatcgcattaacgaacgtcagcaaacacaaaagcctttacgccagtaaagtcgctgtcagtgaatggcgggagcaaaaacgacggacacgtgaatttctcaaatctatggagctgaaagatgaggagggaaaccgcgtgagtctgattgataaattctatggtagttcagcaaatccggcgatccgcagaactgaaatgatggtgcggataagaggatttgaaaatatctgtaatgaactcggctatgtggctgagttttacacgttaacagcaccatcaaaatatcacgccacgacccggcacgggcaccgtaaccgtaaatggaacggcagcagcccggcagacacgcaaaaatacctcagcaaagtatggagcaaaatccgcgcaaaacttcaccggaatgatttacggatctttggtattcgcgttgcagaacctcaccatgacggaacgccacactggcacatgcttttctttatgcgcccggaggaagctgatgctgtacagaaaataatgcgtgattacgcctgtcaggaagacttccacgaactaaccacgcgtaaagcactgaaagcacggtttcatgccgaagtcatagatccggataaaggctctgccacaggttatgtcgccaaatacatatcaaagaacgttgacggctacgcaatggatgatgaaaaggacgacgaaagcggccagccgatgaaagaagccgccaaagctgccgcagcctggtctgcccggtggaatatccgtcagttccagtttatcggcggtgcgccggtaacggtatacagagagctgcgccggatggccgatcacgatacagcggcagggcttgatatcagctttgctgcggttcatgacgcagcagatcagggagactgggccgggtatatcaatgctcagggtggcccgtttgtgaagcgtgaccatctggttgcccgtctttggtatgaggaaacagaagaaattaatgattatggcgaggaaattatccgcatcaggggggtttttactccgatagtcggcatagatacgccgatcctgacgcggctcaaacagtggaagattgtgccgaagttagacgacgcgaatgcggagtctgctgttagtggcgcgaacgcgccacctaggagttctgtcaataactgtacggaggcacggaggacgattaacggaaaagagaaaaaaatccggtctgtgatggcagatttacggtcaaccggcagagaaatcagccaggaacaggcaggaaaattgataagtggatcaggaattgtgatagacggccgggaaattaccctgctgccggatggccagttgcggtaccgggccggtaccactgaaaaatatgatcggtaccgggagagatctgcgtcgatattggcgcgtattgataaattaaagtgccacaaagccactaaaaataattaa

SEQ ID NO: 290071 - DNA, 594 bp, Morganella morganii
atggcagactatagagcaccatgggatttttatccgcagttaacagaagagcgtttaacaattatcgcggaagaactgttacgggtattggatcatacatatgagcaattatcaacaccgttagatgataattatacaaagggaacttgtacatttggccgtcagagacagcttttaatcaaattatgtatgagtgataaatatgattggctatcattaacaaaccctggtatggacgtaacatttaacatcgatactgttcctgttcggtttttttctgatgatccggaacaacctaaaaagcaaggttattttaggaggaatcaggtagaccaattgtgggaaccagaacaaagtattccgatattacatcggtttgttattgaaaaaccagaatttgaaggggaaggtgccagagtgcatttcattggttacaatgtgttagaagaaccaatagcaaaatggacttatggcgaaggtcgcgtgcctgtacttcattctactgatagtactccaccggtccctgttactattaaacttgatcctatcagtgcatccatacctgatgaggcaaaaaaacagataaaaaaatag

SEQ ID NO: 290072 - DNA, 1125 bp, Morganella morganii
gtgtttaacggctctaatttgcgattggctcgtctgtatcacgagttatctctggaacaggttgctgagcgggttagtaaaacccgccagtatattcagcgcctggaatcaggttatgcattaccaacaaaagagcttgcccatgaactagcgtgtgttttgtgtgtattacctgaatttttcgatgactatgagcaatcgccaatcaatgaagaaattgtccatttcagaaaacgaagtgcgaccagagttgcaataaaattagcaacattagcgaaagcggaattatatcggcgtttaattaatgtttttgaagaaaacctgaatttgcctcccgttcggtttccagagataaaagttcatactcaggaagatattgaaaaggcagcagagaaatgtcgtatcgattgggggttaggtttcggccctattgataatatgacgcggcttgctgaaaaacttggtgcatttgtcacctctttcgactctgtatctgatgatgtggatgcgttatcggtgccattagaacggccatttatagtaagaaacacagcaaaaaaatcgccttgtcgacaacggtttgacattgcacatgaagttggccatctgatttttcacggtggagtttcaacaggggatagattaactgaatcccaggctaatagattcgcttcggcacttctgttaccaagatctgcaatggcaaaatattttcctaaaccaattggcggaagaatagactggaaaggcttaagtcaatttaagctgacatggaaggttagtaaagcggcgataatatatcgtgctcatcagttatctttattgacggatgctcaatataaaacagcattttttggtttaaaacgcaaaggggaagccattgacgaaaaagaagattttttaattccctctgaaaaaccagaacttttttacaatgcaatggatgtcttattgaatgatgtatatttagacatgtattcattatctaatcatttaaaaattatgccagaaatgttaatgcagcttatgagtgaagagtatttagctaagaattttgcaaaagttaaatcgaataatgattacgataatgttatttcattatcttcatatagatcagcactataa

SEQ ID NO: 290073 - DNA, 840 bp, Morganella morganii
atgacagtaaaatcaaagccggtgcgtatttgcgtggagggtgccaccactgacggccgcactgtacagcgcagctggctgaccgatatcgaaaaaaactacgacccgaacgtctacggggcgcgcattaatcttgagcacctcagctatgaatggatgccgcgttttggtgatgtcgagtccgtgcatacggctgaaatcacagagggtgcactgaaaggcaagctggccctgtacgcaaccctgcttccgactgacgaactgatccagatgaacaaaaaacgtcagaaggtgtacacctctgttgagattgccccgaaattctccgacaccggcgaagcctaccttgttggtctggccgtcactgacagccctgccagcctcggcacggaaatgttgcagttcagtcagcagtccggtaattccccgttcgctgcccgcaaacaggcgaaagaaaacgtattcaccctggcagaagaaacgctgatcgaattcgcggatgaaaaaccggaagagccgaaaggcccgtctctgttcagccgcatcaccgaaatgctgaccggcaaaggcaaacaggacgatgcccgttttcatgatgtgcatcagagtgttgagctatgcgcaaaggctattgaagccattcaggccgatgtcaccgcactgaaaaaaaatgcggttcctgccactactcaggaagaaccggcagagctggcgacactgaaaaaagaactcagtgagctgaaagcgcagctgagcaaacaggacggcaacgggcaaagacgcccggtgtcactcggcaacaacggtacgcagccggaagaactgctgacggactgctga

SEQ ID NO: 290074 - DNA, 408 bp, Morganella morganii
atgtcacgaggtatcagaaataataatccgggcaatattgactatcacccagcgaacaactggaaaggacagcttgcgcacgataaaaccattgagccgcgcttctgtcggttcagtgcgccggagtacggtatccgtgccattattgccctgttacgtaactatcagcgcaaatacggactgaataccgtcaccggactaatcagccgttgggcaccgtcgaatgaaaacaacaccgccgcctatgttcgcggtgtggcaaaagcccttgccgttgccccggacgccgtgatcgccctgtctgataaaaacaccgcgatccgcctggcgaaagccattattcagcatgagaacggcagtcagccgtattctgatgcggtttttgaaaaggcgtacgcactgttatga

SEQ ID NO: 290075 - DNA, 156 bp, Morganella morganii
atgactgataagacaaatattatttgcggtgtgattctggtattcagcattgttgttcaggtcgtatcttttgtcggcctgataaaagaatgccgggaactggaagcagagaatgtgcaactgaaacaacaagtcagttgtgaggccggtaaataa

SEQ ID NO: 290076 - DNA, 426 bp, Morganella morganii
atggacatgtacttctctgtcacaacgctggcattttatcctttcgatatgaaagacggctatatcgctgccggaacatggccggatgatatcgttaaactgacggattcagagcgtgataaatactggatgcaaccggctccggaaggtaaagagcttggcagtatcaaaggtcggccagcctgggtgaatgtcactccgccgacccatgaggaatttgtacgtcaggcggaagtcaaaaaagcatttctgatatcagaggtggaatccgaaacatcgatgctacggacaaaactcgcactcgagcgcatcaagccagacgaagaagccctgttaatcgcctggctggattatctggatgaactggaggcagtggatgtatccaccgccccggatattatctggccggtgaagccggtggtgtag

SEQ ID NO: 290077 - DNA, 210 bp, Morganella morganii
atgaaagaaaaaattataaaaatagaaactagcagtgatggcgatatggcttatttatttcttcctaaacatccgggaaaaggaattccaggagtaacatcaaaacaaatttcgttgagttcagtaatatcaaattatcaagggcctgaaatattacttgattttgataaagctggagaaataatagggatggagtttatttttgattaa

SEQ ID NO: 290078 - DNA, 312 bp, Morganella morganii
atgattctgcataatgtgcttaaaactatctacgtagataatggcgacaatgattttttgaaatatgaaatcatgggggaacacggtggtgatgtaacaatagcgatcgtgtcagcggaaattaagtcagtagttggcggagtagagtgttatctgtgggctaaagtcggagagttaacatttgagtaccttgacccgccaaagagaggggcattccagcagactgtggtaatggaatctccaccgggaagaagtataagcaccgtaatgcgggaatgcaaaaaacacagggcaacctggcaaagaccgtaa

SEQ ID NO: 290079 - DNA, 252 bp, Morganella morganii
atgttagaaactatcggatttgtgctactggtgagtacctgcggcgacgatgcctgtgaggcactgccggtcacggaagatatctataccagacatgagtgcgaactccgcctgaaatatatcgccaaacgccgtcccaacctctactttatgtgtaacgaggtgatgcgggaaaacggctccggtgatgacgacagccccggaattccggatgacccggaagacacgctcccaccggatgagcagccgtaa

SEQ ID NO: 290080 - DNA, 582 bp, Morganella morganii
atgcaagccgatattgtattgttcgatgattttgaaaccctggatgtgttcggccctgctgagattttcggccgttccccgcattacacactgaattactgctccctcagcggtggtgtgatcaccagttcacagggggcacagataataacaacggtatttgagccggagaaaaccgcactgatgctggtaccgggaggtcagggcactcggcggctggtcagtgatgagagcatgctcgcggcgttacgtacagcggcacagcatgcacaatggtgcctttctgtctgtaccggttcggcccttctggcggcagccggtatacttgacggcagacaggcgacatccaataaacgcgcctggcagtgggtaacctctttgtctgcacaggtaaactgggtgaaaaaggcacgctggtgtgcggacggccgtttttatacctcttccggtgtatcagcgggcacggatatggcgctggcatttattgctgatcgccacggtgaggccgcagcggaggagatcgcccaacacattgaataccggtggcataatgatgccggtgatgaccctttcgccgtataa

SEQ ID NO: 290081 - DNA, 555 bp, Morganella morganii
atgcgtatcgggatgagtgtggcagcagcattactgggcgtggtatcaacctctgccctggcactggaatatccgctcggacaacctgttatcaaaaacggtatggagattcagggtgtgtatctgcagccgattaccatggcagtggaaggcaaacatgaaatgcatcacctcgcggcggataagtcagacatccacctggaagcagatatccacgccgttgaggaaaacccgaacggcttcgcggaaggggactggatcccgtatctgaaagtggattacaaagtcaccaaactggatgatccgaaaaaagcccagtccggtacctttatggcgatggttgccagcgatggtccgcactacggtgaaaacctgaagctggatggctacggtaaataccgcgtcgaataccgcatctctccgccgagcatgaacgacaacgtggctttcggtcgtcatatcgataaagaaaccggtgttgccccgtggtttgagccgtttgatgtctcctgggacttcgagtatgccggtaccggccgcaaaggcagttactga

SEQ ID NO: 290082 - DNA, 336 bp, Morganella morganii
atgaaactcgttgttatggcactgtgtttatcggtgctctccctgatatcactgcccgccgcagcggcagagaaattcactgtcgaactggaaatgaataacggcgaactgacaccgcctgtactgaaggtacccgcgaaaacgccgatccgcattaaaatctccaataccggtaccgaaccggtcgaatttgaaagcacccagctgcgcaaagagaaagtgctggctccgggggcgtcttccgtagtggtgattgcaccgctcaaacccggaaaatataccttttttgatgattttcatctgtcgcatccggccggtgagatcatcgcggaataa

SEQ ID NO: 290083 - DNA, 840 bp, Morganella morganii
atgggacaggttctctttgtcgtctggcgtgaaagctttgaagctctgctggtggtcggcatcatttatgcgtggattaaacagcatccggatgctgccgcagggcgccgctatctctggggcggagtggcacttggtgttgcgctgtcactgtttctcgcactgcttatctatggtgtgtttaatgtgctggatgacagcggccagacgtactttatgatcggtatgtcgctgttcgcggcggtattgatcgtgcagatggtgtactggatgcagcagcacagtgcatcactcaaatccggtattgagcaggagatgaatgacagtgcccgtcagcactcctggtggggcgcgttgtttattgtggcgatcgcgatagcccgtgaaggcagtgaaatcgtggtgttcctctccggtattgtgatggggctgaatgcagacaccatgtggtcatttaccggggaagtcgtggccggcatcgcggtagcggcactgacgttgtggctgttcctgttcacctaccggaaaattgcctggaaatggtttttccgcatcaccggtattgtgctgttgttccttgcctgttcgctgctgcttaaaggaacagaagaaatcgtcaacctgctgaccgagcatgatatcgaactgaatgatttcctcatctatccgctgtgggataccaccaactggctggatgataccggcaccaccggcagcttcctggccagcctgttcggttaccgtgcacagcctatcggcctgagtgtcattacttttgtggtgtactggctggtgattattgcgctgttctgccgcagaggaaaaaaacatgcggattaa

SEQ ID NO: 290084 - DNA, 288 bp, Morganella morganii
atgatgatgaaacgtaatgtactttttctttctgtagttgtgttgctggtatccgggtgtgcagcaaggatgccggtgattaagggtgttgattgtgtggcatattactgcaagggcatgccgctgcatccggtgtatacacttcatctgttgaaggaaaaaaacgatagcaaaacgcaccaacgaaaaatttggcataagcaggccggcggaggaagtgtgaaatttgtcggaaggtggatatcggacaacattctggaggaagtgaaatgtcagatttcggaatga

SEQ ID NO: 290085 - DNA, 675 bp, Morganella morganii
atgtttggatttcgaataacagatgagtttaataaaggtttatttgttccgtctgctcagtgttatgtattttataaatcatacccgattattaaaggcaccactgcaaacaagctaaaaaccggaataccaggggctattccctgcgtcgttttttcaaaagaaactaaacttaaccaggactcttctttcggtgggctaaatatcggatatgcaattgcgttggttgaaaatggcgaatgggtaataaatagtagcgggtttaccggggtatattatttctttatgccttcatctgatgctgagagaattgcaggggataagccttcttggggggcgcgtttttatgatgaaaatggccgcgcttcgtttgttggatggcagaaacctctgaccgtggatggtttcgtacaaagcaaaataaacgaggcatttaacggaacgcgactgtcgaaatcgaatttagcgatcccgtgtggtggtattggtcaggcaagaatatatatgggaggaaccagtggagtttcagggtttaccgtattcaatctaacactatcaatgtatcaggaccggatatcctataaatttcttcctgttggtgaagctcccggtggaagtgggacaataataaataccggatctgtcccgttaatagacacctcaatttactcatga

SEQ ID NO: 290086 - DNA, 360 bp, Morganella morganii
atgatccgagatagtggtactgaacctgatattatctattatctggatacaccaccagacaaagatgttttgacaaaactcattgcagatatgggtattacagtaagagatcttctgcgtaaaaatgttgaaccttatgaaaaactggaacttggtagttgtcggctcacagatgcacagcttatcaagcttatgctgaagaaccctattcttattaacagaccaatagttattactccattgggtgtaaagctctgtcgtccatctgaattagtgttggatattttaccgagaaaattacagagtttatttgtgaaagaggatggagaggtaattactgtcagcacagtaaaaaagtaa

SEQ ID NO: 290087 - DNA, 531 bp, Morganella morganii
gtgctctgggtgcccaatgacgcgctgccttatctgaatgtcggtgacgcagtgaatatccgttatgaggccttcccggcagaaaaattcggccagtttgccgccactattcaggtgatctccaaaacccccgcctctgcacaggaaatgatgacctatgccggggcgccgaaagtcagtcagatgccgcagtccatcccctattacaaagtgattgtgcgccccgagaaacagatgatcgcctatgacggccgcgaactcagcctgcaaaacggcatgaaagccaataccaccctgtttctggagaaacgcaaaatctatcagtggatggtatcgccgttctatgacatgaaacagagcgcctccgggccggtggcgttcaccgcagaaataccgctgaccgacgttgccggggaaacagaaaaaccggtcaccgcggctgagatcccgcaaccggatcacacaaaggataccacgccgggagtgagctcactgggcgcgttcggcacaacaggagcagacacaccatga

SEQ ID NO: 290088 - DNA, 480 bp, Morganella morganii
atggcgcagaactctatccgcgcgcagtgggatatggccgctggtcaggcgtcagtggttcacgatatgaaagtccggatccgttatgagggtgaggactattccgccggtatggttatcggggctgagctgaaaggtggtcaggtgaacacccttatcggttttaacgctcagcagtttgcgttttataatccggtgaaaaaatcgatggacatgttcatgtacatgaaggacggacaggtctttatgcgtgaggcgttcattaatcaagcatggcttaatagtgtggttgtcactgacaaaatgcagtcagagaactacgcgccgggtaaaacaggattcctgattgatgcgaaaaccgggaaaatggaaataaatggttctgatatctccggtggcaggatggaaataaggaatgaccggatccgtgtgtgggatgaaaagggtcgtctgcgggtagaaataggaagattatcatga

SEQ ID NO: 290089 - DNA, 888 bp, Morganella morganii
atgttaggagtatgtatcaaatgtggtcagtacaaggagttgattcacagtcatgtcattagtaagtttataggtaagcgcatctacctcgggccgaaaaagagtggtgggtttaatctattcagtggttatacgatgttagaacccaatcattcatcgtatacaaaaaaatgcagctggaagtttggtcaggacctgccaaaaccatttctgatgtgcaaactgtgtgatggttcctttagtgctcaggagaggctattatcacagctcattgatacatcaaaattatttgactcacctgcattaatctacagcagtcaatgccttattccttccaaaataacgggattagaagacttccaggaataccagctaccggaaaacgaacaacgcttgttgaggcgtaacgggattattacatgctggcgagcattgcatgctaccgcgagaagtagttcatctaagggaggtattacttcgctgaattcatttttggagtccgctcgtgggactcagatgaattacgaagtaattaaatattttgattcagagtctgcacctgaaccgggccactttgccctgtttcttgcaccatcggcattaaccattgagttatcaggatctcaaggggttgctcctcatggctgggatgtcattatattttcgggaaaagaccattctgacgcttacatggtcgctgtgtggtttggttgctggatgttactgtgggcaccggaaaaaactcatcatgatcctactgtagccagtatagttgctgaaatccgcatgtcacaggtcgcaactacatggccccttaccacattaaaacccagagttgacaacgctattgatcagctagaaaagagaaacggtgcaaggctggaatag

SEQ ID NO: 290090 - DNA, 192 bp, Morganella morganii
atgagaggcggaggaaaaggaggaggaaccgttgattgggcaagaatgatgcaaaacaaccccggcgctcaacgaaaagcattagatgctgtattggatgccgcaaggaaaacggattacacacacggtacgaatattgtaggtgctatttgggataatatagcaaatggtcgattcaaggtgtatccatga

SEQ ID NO: 290091 - DNA, 438 bp, Morganella morganii
atgtcacgtgaaacggtagaaaacattaagctgctgccagaacgtaacctgttcatgaaaggtgtcctgtcatgggtcggcggtaaagttgatattgtggaatacacccgcgccgaacgctcagccggtgaatctaaatttaatggctggaaactgtggaaccttgcacttgaaggcattaccagtttctcaacttttcctctccgtatgtggacatatatcggcctgtttgttgccgcgctgtcatttgtatacggtggatggatgatcatcgataagctgatatgggataaccctgtcccaggatacccgtccctgcttgtttctattttgttccttggtggtattcagctaattggcatcggtgttcttggtgagtacataggaagaatttacactgagagtaaacaaaggccaaaataccttctaaaaaaataa

SEQ ID NO: 290092 - DNA, 456 bp, Morganella morganii
atgtcgcgtgaaacggtagaaaacattaagctgctgccagagcgtaacctgttcatgaaaggtgtcctgtcatgggtcggcggtaacgttgatattgtggaatacacccgcgccgaacgctcagccggtgaatcgaaatttaatggctggaagctgtggaacctcgcacttgaaggcatcaccagcttctccactttcccgctccgcatgtggacatatatcggcctgtttgttgccgcgctgtcatttgtgtacggaggatggatgatcgtagataaactgatatggggcaaccctgtacctgggtatccgtcactgcttgtgtctattttgttcctgggtggtatccagttaatcgggataggtgtgcttggtgagtatatcggaaggatttatactgaaagtaaaaaaagaccaaaatatttattaaagggcaatagaaatgatattaaataa

SEQ ID NO: 290093 - DNA, 234 bp, Morganella morganii
atggatgaggcgccgttacgttcattcttccggcacctgtcccgtgagtgtaaattcaccgtcacaccacaccgttttcgccataccgtcgcgacacatatgatgaaatcaccggagcgcaatctgtacgtggtaaagcgtctgcccggccatgtcagcctggtatcgacactggaatacattgatgaaagtgttgacggattacgtaacatactgggaaccgagctgatgtag

SEQ ID NO: 290094 - DNA, 318 bp, Morganella morganii
atggagaattatattttaatttcaaattatgaattaagtgaaatggagttatctattggaagagaaatacgctgtttgcgcaaaaaaaatggaatgtcgggagaaaagttaggtttgctgcttggtgtttcacaacaacagatatcacggtatgaaagcgcaaaatccaaagtgacaataaacactttatttacaatattaaatttatttaatgtttcattggtacgtttctttgagcgtgtatttaccggtatgaataaaactacggagtacggaaatgataaggaattttgtagtttatttaatatggaagaatag

SEQ ID NO: 290095 - DNA, 555 bp, Morganella morganii
atgcagaagacattgttaaaattaactcctgctgcacttttacttctggcagcagcgaattattcatatgcagcttccaacgctgaaatcacaattaccggtaatgttactgcctcaacctgtgatgtcagtttatcacgaacgaccttagatttaggtaactactcaccaagtgattttaccggtgttgccacaccaatcccggcaagccagcgtacattcaccgttggtatcaataattgccagacaccatcgactgcgggtgataccgctaaccttgttgtggaaggctcaacattaggcggaaatccgaatatttttaacaacacagggacaaatacaggggttatgttaaacctgacatccgctccgggcagttatatctcccgtggcgacaagttaacagttgccacggccggcgcaacacctgctgccagtgattttaatggtaaaacactgtcactgacagctggcttagcctctgtcagtactctgagcggcgttgatattggtgctgtcaacgcgccgattcttttcagctttaactataactaa

SEQ ID NO: 290096 - DNA, 717 bp, Morganella morganii
atgattcgttttatcccggtgtttttattgatgttttattgttctgtttttccggcgaaggccgaaaacggaggatttggtattaatgcgacgaggctgatatatatgcagggtactgacagtatcagcgttggtttgcgtaatacactcagtacgcagccttatctcgtacagatccgaatcagtgcttcccgtgatagttcagtttccgctcctttcctgatcaggccaccgttattccgcctggaacccaaaagtgtaaatcaggtaaggattttattacaaaacaactcattaccgacagacagagagtcagtcttttatttccgtgcgagtgcaatacctgccagtacagcgtctggatccgctgaacagcaaagtggtatacacggaactgcacagtttggtgtcggcaatattattaagcttttttaccggcccgtaaatctgccgtcaacgtcaaaaaatgcccaaaaaaacatgagtttctcgcggacaaacggagggattaaagccacaaattcatctccctatcatgtcagttttgccggactgtctgtaggcaacgttaaaattaagctcaatacaccggaagagttaatgattccgcctttcagcagccatgtgtaccccgtttctcaggcgggtggtgaggtgcgctggaaaacgataaatgatgaaggaggcgttgatgcgtacagttacatgctgccttaa

SEQ ID NO: 290097 - DNA, 552 bp, Morganella morganii
atgcgtacagttacatgctgccttaacacactgatactcagtatcttatttgtcgcaggaatcaatatttctgtacaggctgtgacattaaatttctcagcatatctggcatccgggacatgtacgtttaatttagataaaagttctctgaatttacgtgcttcattgcatgaatttgaacctgcaaaattagttgatacccaaccttttatgctcagtgtgacggattgcagtgatactgatattgcattaataccggttgtgaatatcaccggggaaggaagcatgcgggatggacgctggctgtttttgtcagcagaatcagaagacagcaatgtcggcattatgcttgtgaaaagcgatgttccgcccgtctacagtgcaactgaaataaagaataatgaagatattattttagcgctgcaaggaacggatccggctgatcaatcgctgcagttctatgccggaatgacttgtggtacgagtggttgttctgatatccggagtggctcgtttaatgcaagaatattattcagcctggcttatcgttaa

SEQ ID NO: 290098 - DNA, 765 bp, Morganella morganii
atgagtttaaattattttatttcacactataaatggatagttatcttaaggaagatacttttaatatttggttttatcataatgatgacaccaatatcatacggatatacagtgggtggtattaatttagatcaaaccagaattgtgtatttatcttcagataaggcacaaacgctggttgtaaataatacaagtgaccgggcctggcttatccaaagccgggttcaggaaggtgaaaataacgggaaatcaccttttatcattacgccacctttatttacgttacaacagggtaatcgccagattctcagaatcgtgaaattaaataaaatgctgccggaagatcgggaatctgtcttctatctgtcggtattagccattcctgcggcaaaaataaaagaaactgatgaatcaaataaaggtgttatctctgtaggtatgaattttacactgaaaatgttttaccggccggcagcactatctcaggatgctgaaaaaacatcctgtcatttacgcattattccgtctccggcgggtatccggattgagaatcccacaccgtattttcagacgttcgggaaatttgaattaaatggtaaccaattgaatttaaatgatatgaattctatgttagcgccgtatagcagccgggaatatcaaataaagaataaaaaaattacgcaggttcaatggcaaaccatcaatgattatggcggcttatcagaagtatgcaggcaaaacacaggggaaggaaataatgcataa

SEQ ID NO: 290099 - DNA, 864 bp, Morganella morganii
atgattatggcggcttatcagaagtatgcaggcaaaacacaggggaaggaaataatgcataaaaaggtatcggagtatctgttgcttaatatgctggcaatgctgcttattactatttcaccgcgtataacctatgcggaatccgggataaccgggcggacggaaatattacaacctgcgaaaaaagaaggtatttcattttatgtacttcgcgttatctatacggaaaaggataaaaacggggtttctttaaccgcctataactcaacatcttctgcttacttatttcaatcccggatgttacctgttgatttggcaacaggtaaccccgggataccggcagacaaaggaggacatatcccctttattgtgactccgcctttatcccgtctggaggcaaatagtgaattggttcttcgtatcagacgtaatggtgaatttttgcctgaagatcgcgaatccgttttctttatatcgatgaaagctattccttcacaacgttcccctgaagagcgtgaaccggattcgcagcaaatggttttgaccgtcgtgagtaatattaaattattttatcgtcctgaaggtcttcaccggagggcaattgttgatactgatgtggcgtcaaaattaacttttcgtaaagaaggaaacattctgattgctgaaaatccgaccccttactggctgacattttcccggcttaaagccggagagaaagaactggataaagcacaattacgattaatggttccgccaaaggggcaacaatcatactcattacctgccggagcaacaggttctgtcagctggcaattgatcgatgaggatggctgggatacgccagtccgggaatacacactttaa

SEQ ID NO: 290100 - DNA, 2595 bp, Morganella morganii
atgatgataaaaaacaggcaaccagaagccatgctgttaccgatgaccatgacagccattgccattgctttaacagtaaattatacgccggccatagctgcggattactttgatcccggtctgctgtcacttaacggtaatcaaattgcggccgcagacctgagtgatttcggcgtggccggtcaggttccgccgggaacgtatactgttgaactctttgttaatcagatagatatgggacaacagactgtaacgttcagctctgacggaaaaggcaaagtacaacctgagttaacaccggattttctgtcagaaataggggtcaacacgcccgttttaccgtcttttctgcatttgccccgtacagagccggtaaaaaacctggctgagctgataccggaatcacatataaaatttgattttgctcagttgcgtctggacttgagtattccccagattgcgatgaaaaaaaatgcgcagggccgtgttgatcctgcgctctgggattcgggcattcccgcattattactgaattataatgtgaatggcggccggaaccggcaaagtgcccggcatgaaacagacagcagcacacaaaccaatttatttggccaaatcagcggcggtgcgaactggtcagtctggcgtttacgcagcacgatgaactacatgagaaattcagacaatcgtgatcggggaggcgaaagaacacatcagcgcacggagtttactaatacctatttgcagcgggatattgttccctggcgctcagaaattatggccggggaaagcaactcgtccaatgatgtatttaatagtgtgttttttcgtggtgtcagactgaattcaagtgaaagtatgctgcctgatagtctgagaggctttgcgccggttattaacggtattgcacaaacgaatgcccgtgtcaccataagccagctcggaaacgtgatttatcagacttatgttgcgcccggcccgttccgtattgatgatctctttcagtccgggggcgggggagacctgactgtaacggttaatgaaagcgacgggtctgtacatacacaaaatgtggcatattctgccctgcctgtcatgcgccgtccgggaagtttaaaatatgaggtcattgccggacgttataatggcgggatcactgaaggatcgcaggaagcggcttttgttcaggcaacaggaatatatggcttacctcacaatgtgacgttatacggaggaagtatcgtcgctaaagattatgtttcattagctgccggcagtggtgtatctctcggggctttcggggcactgtcagctgatattacaacctcaagtgcgaaattacagggtgattcgggccggaaagccgggacgtcataccgtattcgttactctaaaagtttgctggaaaccggaacgtctgttgatttgacagcctaccgttactctacccgtaattactacagtttttctgattacaataattccggtttcaggttacgggaggatcaggttccgtgggcgatggagcggcaaaaatcgagttttcagatccggctcagccagcaattagaaaaatacggttcactctatttgtctgcatcgcgggatgactattggggaaataacaaagtgatgaatacggtatctgccggatataacggcaattaccgtggtgtcagctatggggtcgcatacagcattgaccggataaagggggatggccactggccggagaaccggcaaattatggtaaatgttcaaataccattaagtttgttcaatatcagtgccggacaaaaccagatttataccaattatcagatgacacatgacaaccggggtcaggtccggcaacaggccgggatcagcggaaatgcaatggatgaccgcctgtcttatcgtgtcatgcaaggctggtctaatggtcaggacagtaatacgggcacattaaatgcgggttatcagggatcacggggaatggtaacgatggggtattcccacagtaatgataaccgttcattaaacctgggcggaaatggctctgtcgtattacatccggaaggtgtgacattcagcagaatgctgggaagctcggttgcggtggtcagtgctccgggcgcagtcggtacgaatgtcatgaacggcaatatacaaatcgatgaaaggggctatgccgttgttccttatttatctgattatcagaccaacagtatcggtttagatccttcaacgcttcctgatgatgttgatcttacccaatcgaatatcaatgtttatccgaccaaaggcgcggttgtcatggcgaaatttgatacaaaagtcgggtatcaggcgatggtgacattattacaaaataatacccctgtgccttttggtacgctggtaacagtggatacgccttccgcgaaggaaatcaataccgggattgtgggtgatgaggggcaggtctacctcagcggactgccggaacagggcgttctgaaagtcaaatggggaaaagaagcgaatcagcaatgtctggctgatttcagcctgagtaatgtcgtaccggcagaaaataattcaatccgcacattcactgcacagtgcaggtaa

SEQ ID NO: 290101 - DNA, 1134 bp, Morganella morganii
atgaaaaaattagttaataaatccctgagttatttatatttgcaacccgcgggctggctgatactttttatggccttttcacatccgctgcgtgccgagactattacgatcgggaaaggaaccggcattttatgggaagggatgccgtatagtgcggatatgaccgatgcacttcaaagtaatgttttaggtgccaataacggattactatcaatcactaattctatctggttttgcatggattcaggcatgttaaagaacatagggggctatatggccctcccattgagggaaaaaggaacaaacaatgaggttggtgtcggattgatcccccgggctaatgtggggataacttatagttatgccagtggcgcccgtcacacgatgacgggtactattggtctaccggatactgtcgcttattcgtcgataatcagcggcaatgtcacgcctcccgcggcaaaatcctggtgcatgaatccaaagccggggaatgatagtaatttttatgcaggaactcaaccccgcactgcgacagtatcaggaacatgggtactggttgctgacggaacccagagggcaaccactgcaaccgtgccgataatgtattttgcgagctatagtgctaatgctgccggagatttaaagcaacctatattaccgactacaatcgacctgcgtatttccgctttagaatgcaccgtcagtacacaaacagccattaatttcgggccggttcgccgtaatacaacggcaaactcagaattagcggtaaaaccggttcaactggttactacctgcggacaggattctgacagaataaatgccaatattaatgtgcagtttcgtgcaatcagtggtctgtataataatatgccttcacgtttgtccttaaatcagggcgggggatatattaccggagaaattaataatggtgtcaccgggagtggtgcatgtacggctgcaacaggtgtgctttttgataatacgattgcaaaattaggggaaatttccgcttcagacagcagcgtcacgctgacaaaccagattatctggcgattatgttccggaggcacggatttaccggtcggccctgtcgatgctgctgctgagttattggtcacttttaattaa

SEQ ID NO: 290102 - DNA, 471 bp, Morganella morganii
atgaaaaaatggttgattatttcccttgtgtttttagtttcaattataattgttattatatatagtataaataaaaacaaatacatcagcgatttttcgtgtacctcggagtacaatgttgtagccgggaaaacacagttatcttcatcaatgtctattactcataaaaacaataaaggactcaccctgctggttggtgattatttaaaatctgacggaacaacaatccaaatccggatatcaaaacctttcacatatacacaatctaaaaatacatttcacagtgaatctaacagcatttcactgatcccgaaggagatatatcaggatatggatttaattcatatgttacctatctttttgacggaatctaattccgaggttgtctattccgttattccgttaaaaaacaatgactacatcattcagcagggtattacacctgttctttactgtataaacaataaataa

SEQ ID NO: 290103 - DNA, 786 bp, Morganella morganii
atgaacaaaatattaacaataaataatactgtcatatactatcccggtgaaaataagttgcaaaacatattacactcggagaaatcagttattcttaatgagccaagtgcccggtgtcttgatattcttctcgccagtgataaagagtttgtaacacataaggagttatataccggtggctggataagctccagtcaggagccctcaccgaatacactgtatcagaatatactgttaatccggcgtggattaaaagaggtttctgatggagaaataaattatattatcactgttcccagaaaagggttttactttaacaaaagtatttctgtttcagccgtaacggcggtacaagaaccgaccagtccggaaggtcatttacctgaacattataattcatctataaatcatgccgttactaaaaagatagcatacagaaagatatttatctttttgttatctgcgataatgttgagcggattagtactgtttttttattttcttacaaaaacagtcatcagagaaaaatcggatttttttgacaattatacatatataaaaagtgaaaacagctgtgatatctatattaataaaagcagtgaatccattataaatgagaaaaataaggatctgataagttatagtgtcaatgccgtttcctgcaatgaatatccatacaggtacattactatctcccgtttttcaagtgatttttattttttttcctgtaataagaaaaacgctgaaactgacggattccgttgtatttcaacttattatcagtag

SEQ ID NO: 290104 - DNA, 864 bp, Morganella morganii
atgggcacaacaacagaatctgtaccgcttaagaaagcaagtagtgtttcggggtaccttcgtcatatttttagttctgattttgaaagtgatacggaagatgtcgtcagttacagagggcagtctgattcagggtggtcgctcgtcccatcaattttgaggggttatcaggataacgctgaaagtaaagttttcagagaactaatgcttgaagcacctgatgagtttagtaatgataaattgatgtttgaccggcttgttcgcgcgcaacattatggattaccgacaaggttattagacgtctccctgaacccgctggttgcactgtattttgcatgttgtgaatataaaaataaatgtgcaggaaaggtatttataatacgatttgcgaaagaacgggtgaaattctcagatagtgatacgattagtctgattagtaatctgacaaaactttctgataacgacaagtcaacgttaagtaaaaacagaaagtcacctactgcagaattcaaaaatctaactgccgttaaccatttgattagtcatgttaaaggtgagaaaccatattttattaatgaagttaaacaaagagatttatttagatatttttttatttatccagcaaaaaacaatagcagagtaatcgcacaatcaggtgcttttatgtttgctggtttgcttaaatacgaaaaaccagagtcatctgaaggaattattatcaatgaaataattataccagcaggtgataaagaaaaaatcataaaacaactggataagctaaacattaactcaagaacattattcccggaaatagaggctgcatctaaatatattagtaataaatacaaaatttcctctgagtga

SEQ ID NO: 290105 - DNA, 471 bp, Morganella morganii; identical to SEQ ID NO: 100553

SEQ ID NO: 290106 - DNA, 459 bp, Morganella morganii; identical to SEQ ID NO: 100552

SEQ ID NO: 290107 - DNA, 708 bp, Morganella morganii; identical to SEQ ID NO: 100551

SEQ ID NO: 290108 - DNA, 1053 bp, Morganella morganii; identical to SEQ ID NO: 100549

SEQ ID NO: 290109 - DNA, 207 bp, Morganella morganii
atgactacccgcctttcacttaccgaagaccagttcgttgacatggcatttatcaccagcctactgcaaatgacagacaagtggatttacaagctcattaaggacggcgtctttcccaaacccatcaagctggggcgaagctcccgatggttaaaaagcgaagtcgaaaactggctacaggaaagaatcgaccagtcccgtaaataa

SEQ ID NO: 290110 - DNA, 594 bp, Morganella morganii
atgaaagattacaaaccgcgttacgaagaactttataaatattatcaggtctggttgaccgattttacgaaactgacggtcagatcgggtatgtgccatcagaatatctaccaccaccataccctgacggttggcagccttaagtttccgggagaggaagaggttattgctgttgttccccagtgtctgcaccggattatttatggcagagcagcagccccactgactgttaatgatgacctgagtgtcagtttatttacccaggaacacttgctggcccaccatcccatgctggaggggattttgctgtctgagtgcgtgcgtttaaaacaacgccctctggcaaataagctcatcagtttgttccgccagttcagcggtagcgagctgcgtctgaagctggtctggctgtgctggtacgatttgatgctagggaattgtcttgatgactggaccgataatctcaggttcaaaaaagacaaagagatggatatctggatcaatgaccggcaggctgaaaaccctgcgctgaccagtctgatggacgagtatgtctgctttgcatggcggacgactgccgaaccacttaattag

SEQ ID NO: 290111 - DNA, 570 bp, Morganella morganii; identical to SEQ ID NO: 100548

SEQ ID NO: 290112 - DNA, 1764 bp, Morganella morganii
atgaagacaattataaagtttgatagattgtttgttgtctctgaaagtcataatttatatttcgaccaaaagttttcaaataaaataaacataataagtgggtgtaatacctcaggtaaaagtactttaatacagagtattttatttacctttggaattaacgatgttaaagatggcttgagcgaaattattcgatacaaccctacgttcagattggatttcagcatcactaaaggaggcgtagataaaaaatatataatagtaagagagcttggtagcatatatttaaaagaggatgggggaaatgtttttagttttcatggaattgactctgatggtcgagttgaacatgtgaaacttaaggagatgttatctcaattatttgattttaacatgcttttagaacagaagggtgagctaaaaaaagcatcgatagaatgcatgttcctgccttattatatttctcaatctgtagggtgggtttatttaagagagtcattctctaatcttggtttttataaagactttaaagatacgtatcttgattattatcttggcatagaaaattcttttgataaagaatatttttataaattaacaaaagagcgggcacaacttcagtcgaagatctcctcattgaataaatatagcgccgagcctcactttgttgtttctaaattactggatgaagagtttggtgatgaggctcagaagtatatagatggttatataaaattagtagcatcattagacgaagaacgtgatgtatatactggtttgtgtaataagttatccttaactaaaaatcatgtcaagatactaagaagaactaaaagaaatattaaaaaccaaaactataacaatattgatcgttgtcctgcatgtacgcaaatacttccttattccttagaagggttatatggttattatcaaaacatcaatgatactgataaactatcggagcaaataaataataaaatacaaaaaatacagtctgacattaatagttcacttgcgaagattaaaaagttagaaattgatatatcttcaaagtattcatattttattgagaaaaaatcacaaaatttatctgttaacacatggatcgataataaagcaaacatacgtctgttaggcaatattcatgaagagatagaagaatatacaaaaaggtctgatgaaattaaaggattaattgatgggatgggagaggagcagtctctttttgtcgagcggtttaacaaagaaaaagatttcaaggaaatatttaaaaaatatcttaatgatatgcagttgttcaatgtaacagaacctagatatacagatctttataaaataaattcatttccttttcaaggggttgaacttcataaaactgtaatgtcatatcattttgcattaaattctttaataagaaaaacagacaatatacatcgacttccatttatgcttgacgcaattcttaaggaagatatcgatgacagaaattttgatctcatactgtcgtttgtgggaaaaaatcttccgactgatactcaatcatttatatcaatgtctgagtatgctgaagataacctcttgaaagatggtaaagagataagtgcattccgaagagccaaggttaaagatattaaaaatcgatacttccctgatggtacgaatttattctttattggtgatgggaagcatgagagaacatttttatcaaaacctttggatttaaacctcgatatttttgtcgatacttgtcggcttactgaatga

SEQ ID NO: 290113 - DNA, 1110 bp, Morganella morganii; identical to SEQ ID NO: 113207

SEQ ID NO: 290114 - DNA, 1695 bp, Morganella morganii
atgccggcttatcgctcaggtttggaggcttctaacagttacactgtcagcggtgtggcagtggacaggaagggaaaccgttctgaacaaagcaatattcagattattgtgcaggaacccgtggtcagtgtggaaaaaagtattttcactccagagagcagcgtacttcctgcggatgggcagagtaagcagacccttacactttcaattgtggacctttcagggaaaaaaacagatattccagtatcagatattgtacttaaatctgaaggaatagttgaagctaaagtgtccgagttgatccgtaaggatgttggtacatttgaattaactgtatattcaggacacgccacagagactgttaaactaacccctgttgtaagaaaagtaaatcttcgacctgcgacgatcaaaattagtgataccatgccagattcagacaaatcgtctctatctgctaatccagcatcaattgttgcagataatacatcactatcaacacttgaattaacgttgaaagattcagatggaacagtgctgagtgggctggcggataaaatttcattcagagctgaatatgacagtaaaaatagggatttcagtaataatttgactataagtgaaataagagaagttgcaaataataaaggacattacacgactacagtaaaagggaaaatttctggtaattatattttttatcctgagtttagtggtagcagtattgggggactcaaggtaagtatagagctacagcctgatgcaacatcatctaaaattacagagcactctattcttaaaaataatcaggtttcagacggcagaagtaaaaatattataaaatataaaattcaagatagtaatgggaatcctgtaaaagatcagcttatcaatttatcagcagataacgagcaaataatatatcaacctcagatcaggtcagataatgatggtattattgtggctgaatttacgagctctgtatctggtgactttactattatagcaagcaatgataacgggagtattcaggataaaattacgtttacagatgctgttaaatttactggtataaaagtaagtggtccgcaacttacttcaatgccaattggtgagtatccaagaacttttccatggtcagggtttaatggcgctactttcacattaaaaacaaattcagagccatcgagtttagagtggactacatctgcagattggttttctctggataatggtaaagtaaaatttttaagtgagcctactaaaacaagtcgtgacgtagagattaaagtaaagtcaagaataaatggctcagaggcagtctataagtttaagctttatttctggtttaaaaattctggagatcaacaattcactccagctgaagcaagtgattattgcgccaactttataggaaataattattatctcccgtcaaaagatgaactaacatcacagtggagaaaaatgaatgggcgaatttgggatgaatggggaacactaagtaattaccctggcgccggcttcaaaacacaaagtagtagcggtagtaacctctattatattacctctactacaacttccaatggcggatatattaaggtggaaatgttggcaggtactccttatgggacggttggtggaaataatataaaggaaaaaaattatgtggtttgtcagaaaaagttattttga

SEQ ID NO: 290115 - DNA, 1047 bp, Morganella morganii
atgagaaacctttacactctaataataaattcagatgatgaatctaaaaaagaaataacaattccttccggaaaatacagcattaataatacagccaatcacggtgacgaccggattaacctgaatataacgaatacaggcttactgcccgggccggcagaagcagagctatatgataatgattaccgcgtctcttttacaacatgtgatggtaaattggtaacacaaaaaatcagttataactctccttttgtctatcaggaaaaatgcctttttgctgttaaaaaacaatcagatatatggcgaaaaaatatcatgtcacatagcgtaaaggtcaggaaaaccggtttgcgccatctgctgacagccatgcttatattattggttataccggtaaccggatttatactttttcaatacagtaacaaagagaacggaagtccggacagaataaacagcagtgatattatcaatcagtacatcacagacaataattacattatcattgataataatattctttttttctctggtaacgaaaaaatgattgatactataaaatataaactccctgaccataatattcataaaataaataaaaccaaaataaagataaataaaaatgatattattttgacccctgacattctccacaaaaaagaaatcatatatatatatcataatgataaaaaagcaccaccaaccatatcaggcattcctgatgatttaaaaaaacacattacaatacggtatttttcattcgatgatataattaagttaataaataacagattcagccacctgttaatcagatactctgtgaaaaaatcaaataacaatattatcatttatggcgaaaaaaggagagacaaggaaacagataatattataaaggatatcaataccacgatatcttcagcaccggaaaacacattggtacagtacagggaaataccttaccgggatattcccccgggagtatacggctctgtaaattatatctacctgtctgataaccataaaaaattcacctctgataataaataa

SEQ ID NO: 290116 - DNA, 390 bp, Morganella morganii
atgaagttgaataagaaaactatatatttagccggtggtttcacatctcagtggcaactgactgctcataaaatgctaactgggtttatattaaaggatccaagtctgcataatattgatgatcctagccattatactcaatgggatctggatgctatagcttattctgatattttactagctaatatagaatcaagcaatcctggaggatatgctcttgctttggaagttggatacgccaaagctctaggaaaagagatcattcttgtcgaccaaattgaaaatgatattataaaaaaatattttgaaatggttcggcaatgcagtaaccatgtttttgataacctcgatgatgctcttttttttatattagaacagaattcattttaa

SEQ ID NO: 290117 - DNA, 696 bp, Morganella morganii
atgaaaatcgatgatgcagtagagacgctagctcgttttttcaacgattttattggtgcttgggttcctggggtagtactggctgccggttttatagttatgcatataggggatgaagcattcttaagcgttgttggtgtaatggacaaaagtgcaattgtatggtttcttgcagctatactttttgcactaggccatttgattactgcattttatcaaataattttaaaagacattcttaagatgctgaaaatatctaaaggttttgatgaaaataaagctaaggagcggcagtcttataaatttttcttagaattagtcaacaaaaaacttgtatgcagtgagagtgatagctggagttaccatgatttaaggagtgtcgcgttatctatttctcagcaagcgtcagctctaggacggcgatttatgtttatttctttattgtgcagtggtgttggaactgtattaatcatatttattatcgattttttaatgtgtttgcttttctttccggagttattgcaacattatcgagttgctcctcattggtttgttcagttagttattttatctataagcgcagtgtgtttatttaaacaagctgatctttttttgaatagagcaatgactacaccattctcagttgcattaacagaaattaatttaaaagggcttaaactagatgaagttgaataa

SEQ ID NO: 290118 - DNA, 891 bp, Morganella morganii
atggctcatttttcaggtcacgagacctttccactacgacagatgtggctcaaaaaagcctacagttgcgcaacctcagatggatacatcgataaatctgttttctctgatgacgaagctatagccaaatttggtgttggtaaaaacatggtcgcatcaatcaaacattgggctcttgcatgtgaggtcattcgagaaaaggatggaagatttaaactgactgatttcgctagaaaaatatttgatgacaatgggttagatccttactcggaacatccttcgacatcatggttgagccattggcaactgtctggaagaggatatcgctcgacgacttggtactggttttttaaccatgtagtatcccccacatttacccaagaagacctacgaaaccttttggttgaatacgcggcccaatgcagccctggccggaagctttccacaatgaccctatcacgagatatcgaaacatgcttacgtagttatgccccacggtcaattgggggaacgccagaagatttcgctgaaccaatgcttggggaactgtgccttatatcagaagaaaggaaaggatattacgcattccgcagggggcctaaaatcactctatcggacggagcatttgcatatgctttaatcgacttttgggatcgtaaagctgaaaaaagtagcacgttatcatttgaatcaatcgcttatggtgaaggctcacctggtagagtttttaagcttgatgaagattctattgcagaacgtttatttgcattggaagaactgactgagggttcttttacatggacagaatcagcagggatacgtcaagttcatcgaaaaacatcagaaacagaaaaagtaatgttgaatatgctcgggaaggcttatgactga

SEQ ID NO: 290119 - DNA, 3333 bp, Morganella morganii
atgactgaacataataaaaacctgctatcagaacaggttcatttaacaagacagtatcaacgttctattcgtattgataccgaccttggtcgtgaagatgcacttgacggctatgtatgtaatggtaccgcaaaaactctacttgataatatgtcgagtcagttacttaatagccaacaacgagcttttacatggaccggtccctacgggagtggtaaatcatctctagcaattgctttagcaagcgcattatcatccaatgagactcttcgtcgtaaagccagaaacgtattgaatgtaataccggatagtgacttcgataaagttttcaaagttaaaaaaggttggttagtattacctgtggttggtcgacgaggtagtgtaattcagcaaatcatacatactctgaataaagtatgtgcgtacgaagtagactatgctaaatcagcatcactattaattaaatatctctgttctgccgcagaaaaagaaaatgccgatggaacattgctcattcttgacgagttaggaaagtttcttgaagcatcagccttaggcaatggtgatgatatttacttttaccaagaattagctgaagctgcagcccgtagcaatggaaaagtcgttataatcggtatacttcaccagtcttttagtcaatatgctgctcgtcttggtcttgagactcgcgatgagtgggccaaaatccagggacgatatacagacatacctcttgttgccggcagtgatgagattgtagaactgataagtaaagcaattaaggttgataaaagacccaagcatgccaaaatagcagcacttacagttgctgatgcaatacgagagcgacgtcctatggttggagctcaatatgaacatgcattagagctctgctggccattacatcctgtaatggctgcattattaggtcctatatcaaaacgtcaatttggacagaatgaacgttcgacattcggttttctttcatcatctgaaccttacggattccagacgttccttaatacaacatatttcctagacgcaacttggtatttaccatcaaattattacgactatctccaagcaaatcttgagcagcttattttggcttcaactgatggacatcgctgggcacaagctaccgatgctgtggagcgagcggaagcaaaatctgatagcaaattgcatatagctctaattaaaagtattgcaatactagatcttttcaaagacggctctgggctaattgcagagatatctattcttgaatctctattcataagtgtagacaaagaaaaaatcatatcagcactcgatgatctttctaaatggcatgtgataatttttaaaaaacacacaggcgcatggtctgtttttgaaggcagtgattttaatatagaccaagcagtgtcacaagctcgttctacaatgtcaggaactgattttaacctgctcaacaagctggctaatctctatccaattatcgctaagcgacattatcatcagactggtacatttcgttggatgaatattgctatttgtggattaaatgatatagataaatatgctcgtgactttaaaccccaaaatggtgagtttgggttactgcttcttgtactacctgacaaaaatatcaataaaaaccaagctaagcgcttatgctctgaagcggcccagtccaaaccatggcctatagttgttgggttaccacataactatttacgtatcgcagatttaggtactgaacttttagcactgcaagccgtgttgactaagcgcggacacgagcttaatggtgatgcagttgccagacgagaagttcatgctcgaacaacagcaatacaggcaacattagaagagcaattagcagaagcactagcaacagctcattggtatgctgataacattgaatgggagccaaaagaaactctatcttcaattgtatctacccttgcagataatgtttattaccgagctccacggttgtggagtgaattagtgaatcgtgacaacttatcaagtaatagtgttaaagccagacgagagcttttataccgaatgcttgaaaatgagggagagcctaatcttggtatagaaggttatcctgctgcacgaggcctacatgaaactattttatatcggacagaattatatagaaaaaacgatgcaggaagctatcgttttgtcgcacctgcacgcgagataaactcatcgttttcagctatctgggataaaacgcatgaactgttacaaaacgcgaacattaaaatatcggcctccgatatacacaccttttgggcagcccccccttttggtctgaaaaaaggcattatccctataatttttatggcattttttcttgcacacaaaagtaatattgcaatttataaagatggaatttttattccaaatgttacagatgctgatattgatgaatatttgcaagatgaaagacgatttgctttgcgttggattgttattgataatgagaaacaaaatattctaaatggaataggaagaatccttgcgtctattggagcaatatccagctcagaagatcctttagaagctgccagaagcctagttggaatggttttagggttaccaaattggacgcaaagaactgcaaggctttcatctgaggccaagaaagtaagagatactttgctgaaagcaagtgatcctcacaaagtattatttatagacttagccgctgccttggacgtagaaagtggtcacaattatattgatgctttgaaagtaccaatagaagaaatttggaatgcctacgacaaattgttacgtcaaatcgtatcaagcatgttaaaagccctaaatgccgatgaaaacaatttgtcagtattaagagcacgcgcagaaagactttctggcattacgggagagcttcgccaagatgcattctctactcgactatccaaatatgacggtagcaaaattgcaatcgaaggcatactcagtcttgcagcgaacaaacctccaagagactggaatgatcgagatattgattcagcccttatggaaatcgctaattttgcattacgtttcaggcaatccgaagctttagtggcaatacaaggtcgaaaacctactagcgaagcattcgctgtggttatcggtgccggtgctgaaatgcagacatttacacatgaatttaatgtaccagaacaatttactggacaaattcaaaaaattaccgacgaattgattcatacattgtctgcaaagggattaagttcagaaatcataatggctgcactaggcaaagcctgtatacaaatcgctaagcatggcgaagaggttcttaatgactga

SEQ ID NO: 290120 - DNA, 840 bp, Morganella morganii
atgactgaaaaacatgttcttggtatctctggaggtaaagatagcgcagcactggctgtttttatgcgtcaaactagaccggacctcgatattgaatatttttttactgatactggtaaagaactgccggaagtctatgaatttctcggtaggttagaagggtttttaggtaaaccgattgctaggctaaatcccaggcgtgactttgatttctggttacgagaatataatcattacctaccatcaccacaaacacgctggtgtacacgacagttgaaactggctcctttcgagcaatgggtgcgtccaatgcttgctgcaggtgatgcagttactagctacgtggcaatcagagcggatgaggaatatcgcgaagggtatagttcgaaaaatgctaatttaacaattagcttaccttttagagattacggaatcgaccgtaaaggagtcatggacatacttgattcttcaggtgtgggcttgcctagatattacgattggcgctcaagaagtggctgtacgttttgctttttccagcaaaaaatcgaatgggtgaggttaaaagaacgccatcctgaagcatttgaagaagctaaacgttatgaaaaaaatgccattgaacatggttcacctttcacttggacaaaaggcgaaccattagacgccctcgaaaagccagaaagaattgcccaaattattactgattttgagaaacggaaagaacgagaaaaagccaaaaaaccaataaatcctttacgccccggggaatcactcatagacatagatgaactatatggtgaggatgaaggaggggggtcttgcgcaatctgccataagtag

SEQ ID NO: 290121 - DNA, 510 bp, Morganella morganii
gtgtatgaattcctcgggcgacttgaaggctatttaggtaagccaattattcggctaaatccgcgtcgagattttagattttggctgaaacaatacaaccattttctacctagtccccaaactcgatggtgtaccagacaactgaaactactgccatttgaagaatggatcagaccttggctagctgcgggtgatgatgtgacatcatatgttgcgatacgggctgatgaagaatatcgagagggctatacctcaaaatcttcaaatctacatataaagctacctttccgtgaatccgggatagataaacctagtgtcattgatatcctagaatcatcagggctaggttatccaaaatattatgaatggcgttcacgtagtgggtgtactttttgctttttccaacaaaaaatagaatgggtaaggctaaaagaaaagcatccaaaagcatttgaagcagcgaaggcacttgaaaaagattctcttgagcacggctcgccttttacatag

SEQ ID NO: 290122 - DNA, 2025 bp, Morganella morganii
atgaaaattgcagcaataattgacgatgaattaaaattaccatcattgcctgatgatatatcacgcgttttctcagatgatacatctccagaatatgaaaagctccaagcgttcttacatgcctcaacaataattagtgatgagagtgctatatctgaatttatatccacttctgattttataagtaatgtcgtacttaatgataaatttgttgaggcttttgagggggattttaaaatatctttattagcatataaaaatgatcgtactaggtcaatggaaaaattcgctttaatacaaaaagtgttgagcgataacggttttcaggtagagctattatgccaaagaccgcaaagtaatgctgatttagagcggtttgatgtcatttttatggatttttatatgggagatgataatgatgatgttgataatttgtctaattatctaggtggtataccgggtgatcctttaatatttttaatatcttccagaaccgaattaaatgatttaaaaataaagttcaggaaacaggctaaaattagttcactagcattttctatttttagcaaggacattttatctcaagataactctgaggttaaaataaatttaatgttgcgacagatgattaattcaatcgaggaggcatcatcttttaaacagttgatattatctttcgaaatggctcattcacactcccttgataaggtcaaagattgtttctggaatctggattattcttttatacaaaaattaaaatctagaacggataatgaaaataattcattttcggaacatcttttatcgttattaagtcattataataattatcatcttgaaagcaatgaatggttatgttcagcaataaatgagttagaaaatattttgaacaaaaaaaataagctggcatgcttttcaacggattcagaagccttatcacatgatctagattcatctttatttttaactggcagaaaacctaaggtaaccacatttcaagaagccgcggaagcagtggaagcaatagcagcagcgaaagcagtagcagcagcgacagaagccaaggaagcattaacagaagcagaggaagcattagaagcagctgctggcacagaagcagaagcagaaaaagcattagcggaagcagcagtagtgttaacagaagcagctgaagccgcaacaacagcgacagaatcagcagcaaaagcagtagcgaaagttatcgaatctgcagtggatagagaaactagtgaaaacaacgctagtatggatatcaatatttccgatgttttaccatttgggtcattattagttaatggtgaaaatagcgttttaatacactgtactcagcaatgtgatctatcgagaaacattaagcgagatgatattaatttaatatttatcaatgcctccatagtaacggaaagaaaaaaaataccccaatccacaacttactcaataatacctttgccatcaacaatgtttgataaaaatagtttattatgtatcaatcataaaaaaatacttgcaattccggctggggatgcattgaagtatttatcagataagcagtatgttaataaagcaatactgagagagggtgcagtcagacagtatagagagaaaatgtttgatgaaatgtctcgtatagaaacaccaataagtagtggtaattttctaaatgtttctcttaagattgatagatttaattctgactcaattgaatttaaaaatgaagataatgaaaatagagttgtactgaatgagtttgtttatgatagtaaatcaacttaccatttaatagagcaaagaaatgttgaggtcatttggtggctcaagtcgcatttagatttagatacgttaggtctaaatatatatgagttagaaacgatattgaaagatcgacttccagctcaaaataaattatgtgataattacacagatgataaaaaatttataatatgttttgataaagataaaacaccacaaggaagagatgttgtactcagaataacatcaatttaa

SEQ ID NO: 290123 - DNA, 2355 bp, Morganella morganii
atgggattcaaaattgcagcacgagcattaaggcaattaggtgctgaactgattacttcagaccatatagcattaaatgagttgataaaaaattctttggatgcaaaatcaaaaagagttgcgattaaagtggataatccatttcttttagataaaactgctttagcaaataagttagtaacgacttgtccagatagtcatattgaacaattagcattaaatatcactaataacgataaagaaatacttgaaaaatatactcattactttaatgaagggcttgttaataataaaatcgaaaagcatgagttttcttctcttgaaagtaaagtgaaaaaagtttttattatgaatttattaaactccctatataacgacttctgtaccttggatatagaggatcaagggaatggaatggattctaatattttagaaaatgcttttttagtcattggtactcctaataaatggttaataaaggatgctgatgctccattattaggagaaaaaggcgttggtagactatctatgatgagattggggcgttatgcttcagtcatttcaacagtatctggaagtgctaatcaatatgttattaattttgactgggaaaagtataatgacccaaatctatttctcgaagatattaatattgatgttgaaaccctaaaagatagtgttgaagaagataaaaaagggacaactataaaaattagaggcttatacgatttttgggatgaaaaaaaactaaaatcattcattaatgaatatttacgccgtcttcaaaatccatttaataaaaatatcaaaagatttccgattgatattatcttcaatggtaaaagattggaaattccagcgctatataaatggtttattgatacagctaatatttacgctgagattgattttgatacaaccgatgatgttactcttgttagaaaattaaggtggcgaggtgcgagttcattcgaggttagagaatggtcacaaagtgagttagtcgaaatattcggtacgacacaagagaaacttaaagatttaggtagttttaagttatgctttttatggtttaatcgcagtgatataaaaaatgatctattagattacagtatttccgaggttaaatctgaattgaatctatggtgtggtggctatgctatatatagagacaattttaggattggtttaactggaagcttagaggatgactggttaaaagcggatagtggttcactgcgttctcaaggatttagtttcaacagatatcagaccgtaggagctcttgatattactaaaaaagaaaaccctaagctagttgatgctgcgaatagagaaaagttggtcaactgtgaagagttagacttacttaaggatatattaacctatataaatactaaagacataaagtcaaatattgagttttataaagagaatgaaaaagacaaactcgcagcagagtttacggcagaggaaacattgaaaaatgcgaaaaagagattagatgatgctttaaaaaacacagcgttacttgaagcaaaatccattaataaagaagataaggaaattatatctgaaattaaaggggttcttaaatctcaatcagagaatataaggaagtatgaaagaagcctacaactagctgaagagcaaagaatggaggtcctggaattagctggattaggtatggttgttgacaaaattgtacatgaacttgcaagaatgagtcgtacaacgatatccagcttagatataattgaaaagaataaatctagcgaagacgtaagtattcaaataaaaataattaaagagcaaataaaatctatagataaaagaattagaaccgtagatactttaagcccaagtggaagacaccgtaaagaaacatttaaagtatacgatgttgttaaatccacattgttgggatttgaaggaaggtttaagaaccataatgtagtctattcaattaccattaatggtgattcgaatggagataaaaattttaaagtgactatggtgatgggattattagcgttagctctcgaaaatttaattagtaactcaatatattggcttaatcacattacgacgaaacaaaaagaaataaatattgatatagatacaacttcatttgccattttcttttctgataacggtcctggtattgatccaagatataaggatgaagtttttaaaccatattacagtaccagtcgaaatggaaaaggtttaggtttatttatttccaaggaaatagctgaatatcaccaagcatcaatttatttagatccgacaaaaaatgaaaatggtcggttaaatacctttgttcttgagttgccaagagagaaaaaataa

SEQ ID NO: 290124 - DNA, 1185 bp, Morganella morganii
atgtttttgctggttcaccccaacggctctagatactggcggttccgttttcgctttggtggtaagcagcacctgatggcttttggggtttaccctgaaacatccctcgctgatgctcgtcaaaagagggaagaggccagaaggcttgttgctgctggaatcgatcctcgcgaacacaaacgagctgtgaaagaagaacaggcgaaagaaaatattacctttgagtcagttgccagagagtggcatgccactaacaagaagtggtcagaggaacacagtcgacgggtactgaagagtctggaagacaatctgttccatgcaatcggcaaacgtagcattgaggagttgagaactcgcgacctgcttgctcctatcaaagttgtagaagctacaggctgttttgaagtcgcttctcgccttcagcagcgaaccacagcaatcatgcgctatgcggtgcaaagtggcttgattgattacaatccagcccaggaaatggcgggcgcagtagcttccagtaatcgtgtccatcgccctgcacttgaattgaaacgcctacctgaactactccaccgaattgacggttacacgggacgctctttgacccgcttggccgttaagctgaccttattgatcttcattcgttccagtgaattgcgctttgcgcgttggtctgaaatcgattttgaaacggcaatgtggacaataccggctgaacgagaagctattgaaggagtgaagcattcacagcgtggctcgaaaatgcgtacgcctcatttagtaccgctgtctcgccaggcattagaaatccttaaacaggttcacaagcttagtggtgagcgtgattttgttttcgttggcgatcataatcctcgtaaaccgatgagtgaaaacacggtgaacaaagcgttgcgtgttatggggtatgacaccaaggtggaggtttgtgggcatggattcaggaccatggcatgtagttcattgattgaatcagggttgtggtctagggatgcggtagagcgtcaaatgagccatatggagcgtaactcagtgcgggctgcttacattcataaggcagaacatcttgatgagcgtcgcctgatgttgcagtggtgggcagattaccttgatgctaatcgggagaagggggttagcccatttgattgtgctaaatcgctaaggggttga

SEQ ID NO: 290125 - DNA, 222 bp, Morganella morganii
atgaataatacggaaataaaccatcttgttgatttcatctatcaggatggcagaatcacaaacgctgaattccagatgattcgtgatgaagcggataaacgctttgatgccattcttgaatattacggtaaaaaacaacagtttatctgcatttcaaaaatctgcagatgtcactgtacaattaatgcaggaaagcttttttattctgaaaaagaaagctga

SEQ ID NO: 290126 - DNA, 213 bp, Morganella morganii
atggccccctacaagctgatttactttcagcgggactggtatctgtgcggggaatggcagtcagccctgcgggtgttccggttcagtcagctgcagaacattgccgtgtccggacgccgtttccggcaggacacggttatcgcacggacggttacacggcccgaatttatcaccgcattacctcattatcagtttatccgttcattaccttaa

SEQ ID NO: 290127 - DNA, 213 bp, Morganella morganii
atggccccctacaagctgatttactttcagcgggactggtatctgtgcggggaatggcagtctgccctgcgggtattccggttcagtcagctgcagaatattgccgtgtccggacgccgcttccggcaggacaccgttatcgcacggacggtcacccggcccgaatttatcaccgcattacctcattatcagtttatccgttcattaccttaa

SEQ ID NO: 290128 - DNA, 192 bp, Morganella morganii
atgtttatatttatattttttaaaattctcctgccatttgaagtcattaggatcaacccaaggtattacaaaatcaatattatcaatattattcatattattcacgatattttttttcagaaatatatcttattattccatgctgatatggatttgatggtggaatcaaatagttttcgccatatagaataa

SEQ ID NO: 290129 - DNA, 249 bp, Morganella morganii; identical to SEQ ID NO: 289592

SEQ ID NO: 290130 - DNA, 669 bp, Morganella morganii
atgtcagttaataaagagtaccaaattgttaatctaatgagagtgacgctatctattattttttggcttgttgttttatttctgataatgagatttctgtgggattctggaagtgattcagtggctaaattttcagcattttttacgtctatatcatcattagggattgctgccactatatgggtctacttcaggcaatcttctataaaaaaagaagatgaagaaagagaattaaactcaaacatagtaatatataaaaatgaattccatggaaacactattaacataataaaaaaaattgataaaataataaaacatgctaaaaatctctacggattaacttttgatgaagacccacatgagcttgtagggaaaatctcacaattaagtgctgaatctataaaaatagaatcaaaagcaccatctattaatggatatagtaaatctattaatttatcattaatagctaaaatgatgcctgatttattcaaacaaatagcaactgagtcatattatattgatttaatcatcaatgacattgttgaactacgatttgaaatgattaaaagcaatcaacatagcaacctaaatatctatgggtgcattcaaagtatatataattcaaacaacaaactaaggaatgcagtaaaaactaattcattcgtctag

SEQ ID NO: 290131 - DNA, 180 bp, Morganella morganii
gtgagtaaattattctatgctgtgtgcgataaggacggtgtttgcgatttgagcaatgacaaatacacatcggttaaagcaatattttgggataaagaacaagctgaactgatggtggagaataacaaggaaattgatgtatttgtagttcctatttaccttgaggatgccagacaatga

SEQ ID NO: 290132 - DNA, 201 bp, Morganella morganii
atgccaggcccgtgcatcaaaaggcacatactgcacaatttccccggtccggcggatcaggcaatgtgcggaaacccgcagtgcctgtatttccgcaaaaaaaggatgcgcatccgggtccagcgtgccctgaaaaagctggtcaatatacggaccaccgaactgtcacggcggcagactgatattgtggatcaccagtaa

SEQ ID NO: 290133 - DNA, 849 bp, Morganella morganii
atggataataacaaagctatcagcgaagatacgatagctaaaatagatgaaatttataatgatgcggtaatcctttgcttgcatctgaaaacctttaacaaagatatgctgtgcaaggcgtataaactagacagcgaaacatgcgacgagctaataagaaccctggtagttaataaagtcgtagattataaagatgattttggcgagatggaaataaataaaaattacaatcatagcgactatttattggagagagaattggctgaggatgccaagagcaaagaaatagaaacaaagaaaaacaaaaaattaaaagcaaaattcaacatgaatgtaatatttggcgctattgcaataattgtattttgcatatctgtttactttggattcagggagccaatgtcgttgctattgatagtcccgttatgcttgtttgcaggctctctttttgaaaaaattggcgcaatcccatcgtcacttattgttgttattatatgtgttttttctttgttatggattaactcaatagaaccaatatggggtgatagatatgacgataaattgagatacgaagaaataaaggaaagagccagggcggaagagcgcgaagaatcgttgaaaattataaatgcggaaaatgccgtgagtaggtcaatgaaagatccgtcatcagcaaaattcatgaatagcagattgcagaatagcggaactgtatgtgggctagttaacggaaaaaatagttttggtgcatatgctggatatcagcgatatgtttattactctggaatagcagctatagatgatgggtcgccatctttttccagtatctgggatagtaagtgtaattaa

SEQ ID NO: 290134 - DNA, 780 bp, Morganella morganii
atgagtgagtcaatttcaacaatcaacgttcctttccacggtgacagcctgtatgtcgttaattacaacggaaggccatatgtaccgatgaagccgattattgaaggcatgggaatggactgggcttcccagtttaccaaactgaaaaaacgcttcgccaaaggtattgcggaaatcacaataccttcaaaaggcggtgaacaatcaatgctctgcctggctctgcgcaaactcgctggctggctccacaccatcagcccgaacaaagttaaacctgaaatccgtgacaaagtaatccgctatcaggaagagtgtgacgacgttctgtatgagtactggactaccggcgaggtgaagaaaaaaccaaacttccgccagtccacagcgaaagaactcattccgttacgccagacagccgagcgccttattgctcacggtgtcggcaatatctacccggacatctggaaacacgttcacgctgagttcggtgtgcagcacattaacgaattgctgccggagcaaatcccgctggcgatatcgtatctggatgcgctggaaggtgagtacattccgaagcaggaaaaaataaacatctctgaaatgaatgtcagggcgctgtactcgcacatgaaatacatcgtcgccctctgtaaagagcaggtattcccatccctcattatgctcggggcaaaagtcgagacaccactgcgtgagcggatagagaccgccgcatgtctggcctttgcactgcacaatgacgtagagagaaaaacgaagtaa

SEQ ID NO: 290135 - DNA, 816 bp, Morganella morganii
atgacaagtatatcaacaatcaatgtacctttccacggtgacaatctgtatgtcgttaattacaacggtcagccgtatgtgccaatgaagccaatcgttgaaggtatggggctggactggatggggcagtatagaaagctgacacagcgctttgctaaaggtatagaggaaatgtctatacccacaaaaggcggtgaacaatcaatgctctgcctggctctacgtaaactcgctggctggctccacactatcagccctaacaaagttaaacctgaaatccgcgacaaagtgattcgctatcaggaagagtgcgacgatgttctgtatgagtactggactaccggcgaagtgaagaaaaagccaaacttccgccagtccacagcgaaagagctcatcccgttacgccagacagccgagcgtcttatcgctcacggtgttggcaatatctacccggacatctggaagcacgttcacgctgagtttggtgtgcagcacattaacgaattgctgccggagcaaataccgctggcgatatcgtatctggatgcgctcgaaggcgagtacattccgaagcaggagaaagccgaatcaaaaagcaggctggatgagcatttattgctgcgtaatctgaccactgcctaccaccacgttaaaaagatacgtgaggtatggaataacattgtcgcccctgctgtattcaaacttaatcccactgttgaggctgagatatcagggcgccttgctgacatgagcggagctacattcagtagtttgtctcacatgcagatcaaatcagaagttaaattgctaaactaa

SEQ ID NO: 290136 - DNA, 417 bp, Morganella morganii
atgaaaagtcaattactggtatcagttaaatttgataccagcaaagtagataaaaaattaaaggaaattcaatcaaagtttcctgaaggcgtctttgagtgttttggcgacgtagtctctggcttgcttagcgaggtcatcctttctgatgtttcttccgcaggaggagcacttggcgtcagtgaggtcgtctacactcttgatttcgacccccgtgcttacgacaagatcctttccgcagccagggcatttaaagttaatcttactcatcagacacaatctccggtttatgggaaaagtcccgaggagatattagaacatttcaacaaatataacttcgtggacgatcacggacaccgacttaagttctgtcaggacttcatcgacttaatccgggcggcaacaacgcctcgctag

SEQ ID NO: 290137 - DNA, 198 bp, Morganella morganii
atgactgaaaaatacgaagtcacagcaaccaaaaatgacggcacgacatatcacggattgatgacaacgaaagagccacgcattactaacggactgattggtattgccggtctggacggctcatggacatatattgcaccggatgaaatcagcgacatcagatacattccggtggctgaggaaaagagtaaggaatag

SEQ ID NO: 290138 - DNA, 291 bp, Morganella morganii
atgaacacaccggtttttcggggggattacccaatcacttcaatccatttcggtaaatcaaaaatccaaatagaccgcccagcggtcttttttatgggtgagaaaatgaaaaacacaggacgcatggtatcgaccataaaaatgaaatggtgggtgcctgcatatattgcagggcttaagttgttcgctgttacattcggcactgagcctgactacagtcggattggtgaatttattgccaatcatggtgtgtcgattaaaacgcgatttgaagaaactcccattttataa

SEQ ID NO: 290139 - DNA, 429 bp, Morganella morganii
atggtacgcaagcaggaggtacgcaggcaggtacgcagtgaaacggcgctatcggaacgcgtacttatcgaagccaccgcagaggtaataaccaacgttcgcatggagcatcgcggcgatatccggcgggcgcgtgaattggctaacgtgctgtttgacgagctgagtgcagagtgtgccgatgtggccgcgctggagaaactcggtgagctgatgattgagcctgatgacaacgggcgagacaagctgaatgagctttaccatgcggtaatctctcttcctgagcgggttaaatcagccaaagcgctgagcgaaacactgaagaaccttatcggtcttgagcgccaggcgtatggacttgatgacatgcagccgaataaaacagccagccagctatccgacctgatggacgaactatcgagcaaataa

SEQ ID NO: 290140 - DNA, 231 bp, Morganella morganii
atgaacgcatacgcagcacaggatgctcaggaagagcggcggctggagcatgcagcatggcaggatgccacggacacggaagtcagcgaactgacaacggatgcttttaataaacttcctcagcgccttctggatgaagtcagcgaggatcttcaagaggagatatggaaatcactttttgacgttattggcaatatcaggagttcgtatgcagccaggtatctacgatga

SEQ ID NO: 290141 - DNA, 486 bp, Morganella morganii
atgatcatgcgggatagtgccatggcccaccctatagccaaatggtgccttgaagctgacggaaaagccgaaagcagcatttactggaaggacaaggaaacggaaattctttgccggtgcaggccagacaaactgataggccaacacggatggattgtcgatgtgaaaagcaccgcggatatgggccgcttcgaacgcgctttttacgatatgcgatatcacgttcaggactctttttactcagacggatataaggacctgtccggagagttaccggtgttcgtatttctcgcggtcagcacaacaatcgactgcggaagatatccggtccgtgtattcattatggatgatgtggcaaaggatgccggacggtccgcatacaaacaaaatctcagaacatacgccgagtgcattaaaacggatgaatggcccggcctgagaacactatcactgccacgctacgcaaaggaattgagaaatgagtaa

SEQ ID NO: 290142 - DNA, 1338 bp, Morganella morganii
atgaagttggatgaaaaaatcataatgcaaggtgtgttctctgtggatgaaggtgatacatatgacttggctggtgctttagaaataagtgagtctggggagatttatctcgattgcatacacaagatgaacgcttctaatttagatcagaaagatatggtcaatctaacaggcgaaacatcagcattaggaaagattcttctgattgatagttttactgtttcttcagaacataaattctcaggtgatttgtctcgaacaaaattattttgcaataaaatagtttgcgttgataaaaaccatcagggatatgacataaagacctcaaaaatgacattcgagatagaggacttagaaaaatggatagccaagccaataataaacagtgaatggaaggataataaaaaaatttactcatatgacttacctgacatggaaaggatagagctaggtgatggtttatctcttaccctaagctatagcatgactatttcaacaggtaacttccatgaaaggacggaagtaagaagcaaggcgtttgcaatatttgagagcgcagaagaaaaagacttggatttcttcatagataatggtgtcaccctgtcaaacttagtttcattcgcattggactcagtgtgtacgataaaaaactcttattacggtgaaaataataacaacagagtaatttatcaaacagcaaataaaataaaaaaaagaaaagaaataaacttagtcaattattactttacgatgcgaagtgctggagacagatctgctgaaataataaaaaactggtttttgttatcgaaaaaactacgaccgacaatatctttgtatactcaattaaagtcaggaacacatcagtatacagaagctgccttcctatcacttgcacaagctgctgaagcactgcatagacgcacatgtaacgacacccccatgtcgagatcagattatcgcgcaatggttaaagatataatagaaaaggctggagaaaaacatgaaatttttttgaaagaaaaactatcttatgggtatgagtattcattcagacagagactagaactgatgctatcagtttgctggtctgacgaaaaaataaaagaaagagagaatgatattaggaaaatagttcaagccagaaatatcttcactcactacccaagcaaaggagacgaaatactcaacgagaaattatctaaagatctacacgattacactaagttgctagaaaacataatagtatccaatattttatttatcatatcttcgaacgataaagaatggactttatcaataatgcaaaggatgaataaatttagatatagagatttttaa

SEQ ID NO: 290143 - DNA, 1668 bp, Morganella morganii
atgatgtcattaaaaactattagagaacaggttctgaattttttatcacaatccagtccctcagtgatggcaattaaaggagaatggggtgtaggtaaaacttatggttgggaggatttactgcttgaggccaaaaaagaaagaatgctgtcagctaagagatattcatatgtttcgttatttggtatttcttcgctagataaattaaaatacacaatttttgaaaactcaataccaaaaagttcaattggtacagagcctagtttagaaagcctaagaactaataccttgggcgtgttagaagttctaggtcgaggttcctggaataagcttaaagaaatgccttttataaagtcagcggcacctgccgtggaagcattttcttttatgtctatctctgaagcgctgatttgcattgatgatttagaaagaaaaggtgcaaaccttgatttaaaagatgttctcggcttggtatcactattaaaagaaaaaaagaaatgtaaagtaattcttttattgaatgcggggactgagacaacggatgattacgaaacctataaagaaaaagttatagatattgaattggatttttctcctacacctgaggagagtgctgagattgcatatgataataagaagacctatcacaaagagttatcaaaattcacagtttctttaggtattaaaaatattagagtattaaaaaaaattggtatatatattgatttagctattggatgttttgaagggaccgaacccgagattaagacacaattactacagactacagctttgtttagctgggcgtattactgttcgactcataatgaggatatcccgagcttagattttatagagtcagtagaaagtatctattacgttaactccaaaaatctaagtaaaaaagaaaaactttggaaaaatattctattgggatactcatttacgcaggttgatgctttagaccgagagatcgctaagttagtgagacaaggatatatagatcgtgataagtttatagctgctatgaatgatgttaatcagcaagctatcaataacaagataaataatagctataagaatgcatgggatagcattcacaatagtttctcagatgatcaagaattagtaactcagcaactttcagatacttttattttaaatattcatcaagtcacccctggtgatttagatagcttggtgaatgtttttagaacgcttggtgaaaatgacaaagcatcaagtgtcattgatgaatttatatcgaagagacgtggggaacttgaattatttaatcctgataatttttattataaccataagttagaggatggcgaaataattgacaggttcagattgatatataatcaggagaagccaaggagaacaatcaaggatgttcttgagcggattgctggtcagaatgactggaatgatgaagacattgaaatactttctgattcgaatgaagatgatttttatatttactttaaagagcttaatggccctaatttaatatcatatgtttcaacatgtttgaaatttggtggtttcagcaatggtactgataaaatggagttaatagctttaaaagcaaaatccgctttacgtaaaattgcatctgaaagcaagcttaatgagatacggatgcgtaagtttgggatataa

SEQ ID NO: 290144 - DNA, 780 bp, Morganella morganii
atgaaattagaatcagcactgaaacagttttacccgaaatcccccgcactcagtgatgtatcacactcaacatcccccgacaggcttgaaggcatggatactgcagcagcactcggaatgacacagaaaaatgccggattcgggatgcatgcgtttttggcgaagaatgatgtcagcgcggaagataaatttaaaaccgttgaagcactgacgcagtatgcccttcgtactgtgccaaagctggtggcaaaatctgcaggaaatcgtgttgctcagtgcatgagaattctggccgtcatggcatttgaggattacgcccgttcagcgggttcggtttgtcagtgtcagaactgcggcggaaaagggctggtttatcgtcgtaaggatgtagtaaagcatccgggtataactaatatggaaggtaaggtgattgttgagccggtagtccgtaatgagctggtgggtgaactgtgtaagacctgtaatgggaaagggttgctaacccaccggtgtcagtgtagaggccggggcaaagtgcctgataagaaacagacacttttactaggcgttccggttattaaggattgtccgctttgttccgggagaggttaccggcgtgtaccatcatctgtagcatacaatgcaattaagcatctgattcctgatctgactcaatccagttggtcccgaaactggaaaccgttttatgaaaaaatggtggctaaatgttatacggaagaatgtatggctgaaaaaaaattcaatttcattacgagataa

SEQ ID NO: 290145 - DNA, 2439 bp, Morganella morganii
atgagtggtggtgatggaaacggttacaacagcggtgcccatgacaccggtggtaatattaatggtggtccgaccggtattggcgggaatggtggttcaacgagtggcgggtctggttccggcagtggttggggtatcagtaatacaccgtacggtaatatttatcattatgaccctgataaatttggcgggaagaaagataatgacgggggaaacagtggtagcccgaagaattcagtggatctaagcaaaaacccggagtccctgaataatgtcactatggccggtttccctatgtcgggatatatggtggaaggtattttaggtctcaatatagtcgccagtgcactgatggcattagacaaagacatgctgaaagccattggtgtatttattggcaggtacggtccgctggcaggcagggtgcttggctgggcatcgttgtttatgccctcgcagatagcaccggatccgccgatgaatatccacattaaaaaccttgactctatcgacaaagaaaacccgtacagttacgttatgttacctacagatgtggtgacatctgttcctgcggataaaataccgggaaataaaagtgttccggcaagtgtgctggctcaggcggtgatcgatgatattgaaaaaagccgcccggttgctattaccccggtagagtccacaccggtacctgttgtcaaagcgcagaaaaccgacgaacctaatgtgtacaccgcccaggtggttccgggtatgaaaccgatgcggattaaagtggatgacaccaaaccggtaaaaccatccccggtaccggtaaaacctgattccctgccggagccgaaacagtatcttcctgcgccgaaagaagaaaagaataattcacatcatgcaattattgatttcggcggtgaccatgcgccggtttatgtttcggtcacaaaagaagtgaaaccggaagaggcgaaaaaacaggcggaaaaagcacgggaagagtgggagaaacagtacccgctggaggcggctgagttaaattttaacgacaaaaaagcggcttatgaagctacaaagaaaacagagttcggggcggtatattcagatccagtcaaacatcccctgacgtacaagcggccatatcgaccggtggtttacggggcgtatgattacccgttatcaccggaaagtatcaccatcaatcttcccggtaatgttgcttattatgtaaaaaaaagctgggaaaccacccatccgctacctgtgccggtaaacgggctggaaaaacaacagcagcaatatttaattgaggactataactacctcagtgaacagcttacccgggccaaaaatctgaccgaaaaggcaaaagaggaattaacacaggcagagcgccggcttgaaactgaaaaagccaaagcagaaatggcggaaagagacaaggtcagagcggaaagggcaaaggttgtcagtgagcagaaacagaaaacagaaagtgcgttgtcacggccggatgtgttttctctggatgctagaactacaggggatggtcagttatccattctcggtagcggaattatatccgttccgccggtggctgaagaggcggtcagtaaattaggcggtctttcccgtatcgagaatatggtcatcagtgagttttccggtgaatttttatcagaggggcagttccgcgtcagtgcgcctgtggacgccaatatcgccctggctgtctctgtagaggatattgataccggcaaaggttacgtgagcaaagcattacgtgggaaatggacgagggaggaccacggctttactttcagtatttttattgacggcagggttgatgctcaaaatcatgtgagtgtcattgaggccacacaggataaagagactggtttgtactcagtggtacttccctcaccgttcggcacgattctgattaacccggaaaaaccgccggtgaccactattcccccgctgggtattcctgtgccggatatccgggtgccggtgcataccggaagtaatgtcgatgtcacggatattcagggggttccgggtaatcctgtaccggatgagggcgaatttaatgattttgtgctaacgtttccggatggtagcgggattaaaccgatctatatcgtgttgagcagtccccatcgtgaaattaaatttgatgacaaaatcaaaaaagatatgcgtgaccgaggttggacagaacaggatatccacgaaacagtagctaacggacctaaaggaaaatctgttgatcagcgcagaccggtaaaaaccgaagacggcttgggacgtaatgacccagcaacggtatacggtgagtcaggaaaatatgtggtagttaacgatcgaaccggggaagtaacgcaggtcagtgggaaaaatgaaccggggtgggtcgatgactcacgaattaaatgggagaataaataa

SEQ ID NO: 290146 - DNA, 330 bp, Morganella morganii
atgagtaccaatggattcacatataacgatattttcgataacagtaatgttttttttgaaaaaaatggtagctcagttatggtcctgacctccaatgctgcgattgaggtttgtcaggaagccactgcacgcaatttgtggattttaggtgtggatggaggccattggcaaaacccgggctttaagattgatggtaatacatcatggtcacgtaaaactaaattatttaatgaaaataaactttcagaaaataatcagttagctattgaaaatatagtatctgatacagctgatggctataccgcttttctggtgacgatcagtgactag

SEQ ID NO: 290147 - DNA, 192 bp, Morganella morganii
atgcgcatgtctgacaaatattccagccctacagcatatgcctgggggcttataacctctgcctttggcattttatctctggatcagtgggccattgttgccgggatcatctgtaccgtcggtacgttcctggtgaactggtattacaaacggaaggaattccagttgaaagcaggtgaacatcatgaataa

SEQ ID NO: 290148 - DNA, 123 bp, Morganella morganii
atgatcactctgttgataggaggaaggtacagcaatagagttatgtattttaactccctagtgatagctgtaatctccgagatgaattgtatcttatacgataaggttgacgcctttatctga

SEQ ID NO: 290149 - DNA, 297 bp, Morganella morganii
gtgaagcgtttaaagatactgaaaccccgcattgctgtgctgaaaacaaccacagttaagccgctggatgcggtaacaaggcgtgtgacaggttcgcaacgacagaagcggcgtttcagtatatggaaagaagatccgcactgtgcatcctgccgtcgtctggttggctaccccgatggttttgagctggatcatattatccctctgtttaaaggtggtgctgatacggcagagaactgtcaggtgttatgtatcgaatgccacaaggccaaaacaagggaagagttaaccggttaa

SEQ ID NO: 290150 - DNA, 1062 bp, Morganella morganii
atgttaaacgagcgtgaaatctcgctgataaaaaccattggtgaatcagtaagcaggaatatgtctgagcttgaaagcaggcttgagcggcagattgatgtgctgaaacgggaaaatgcatcactgtcagcacaactggagcaactgcgtgctgataatgccgcacagccggaggcggtgacagaggagaggataaaaacgatagcggaatcctgtctgagcggccgatctctgctgaataccggagatgcggactgcctgatagaagaaaaggtcaggaaagcattcagcaatatcactgtgccggaacagcaggatatcagggggataatcacggacattttgtcagaattaccggtaccgaaagacggcagggacggacgtgacggcagggatggtaaagacggtaccagtatcacagcagaagaaataaagccactggttgaatccgctgtccgatctgcggtgtcagaactgccggtaccgaaagacggcagggacgggcgtgacggcaaggatggtgaagacggtaccagtatcacagcagaagagataaagccactggttgaatccgctgtccggtctgcggtgtcagaactgccggtaccgaaagacggtaaagacgggcgtgacggtagggatgcgtttgatattgaaatccttcccggtatcgacgaatcccggagttacgcccggggcacgatagcaactcataatggcggcttgtggcgggcatatgaacaaacgcagggtatgcgcggatgggagtgtattgtccgggggcactgcagtcatctgattaccgtgaaagatatcaggacattactgattaagtcgcagatgtcagacggggagacttttgaggcagagcacacgttcccggtgatgatatacaaaaatgtgtataaaaccgggaaaacctatcagcagggggatgttgtgacctggggtggttcgctgtggcactgccacacaccgacatcagataagccgggggagcttaattcagtgggctggactctgattgtgaaacgcggacgtgacggtaaggatgcaaaatga

SEQ ID NO: 290151 - DNA, 678 bp, Morganella morganii
atggcaaagcccaaaaaccacaaagcagccccgtttttagggacaaaactgtatgttcagactggagaaggtgaggagatggcggtaacggcagtctcattatctccagctacggtaacgattgaaaacagtaaactcaggactgatgacatgattgtgctgtccggtctgggtgaacttgacgggcgctacccggtttccggtgtcacgggcaataaggtgacgttatgtgaagaggtggactggagcggaaaaacagcaccggcagactttgctgcagcgaaagcacggcgcctgatatggtccaataatttctgtgccgtgaaaagcttcagtaaagacggggccacgacagagcaggtggatgtcaccactatctgcagtgacggtaaagagtttgaaccgggcgatacagactacggcaccatcaagctgacctttttcctgcgttacggaaccagtgaggtacagcgcctgctgcgtcgttatgagaataacaaggaaaaatttgccgtcaaaatggtactgacccgtgatgagggaacgattttttattacggctccgttgaaaccggcatgaatattgagggcaccgtcgggcagatggtggattccggtgtgtcggtcaagctgtcaggccgtgattatctgaacgtaccgcagaataaagcacagtaa

SEQ ID NO: 290152 - DNA, 222 bp, Morganella morganii
atgaaaattgtaaaaaattcaaacctttctgatgagtttgaaggatgggatgaagataaggtctatgagtttgatgatggtacaaagtggaaattagcgtcttaccattacagctattcttacagctatcgtcccaaagcgaagctattaattgacggctcacggtattacctagaagttgaaggaatgggtaagcctgttgaagttgtccaagtttactga

SEQ ID NO: 290153 - DNA, 432 bp, Morganella morganii
atgaatgaagaaaacaaaatcaaaagtagaataaaagaaagcttattgagagccaagaaaatattcgaagatagagatgaggccattagaattataagttattttttttcggaaattcaagaggaaatgagcgatgaagtcgtttttgaaacacacattatttcagagggaagtcaatacgtaagttttggggtttttgctaaaaacggaacttattttgaaaaccccaaaaaattaatgttaagttatagctttggaaagcctaatgcatttcctatggaaatagaggtgcctagctatggtgcttatgcatgttcagatttaactgaagtaaataatgcattagagaatattatttcaactgatgaattggcgttaagaataatatccatagctcaagaacataatttagaacaagatattccattctag

SEQ ID NO: 290154 - DNA, 654 bp, Morganella morganii
atggctaattctgaacgatttactacattgcaggaaaggcttgaggagttaagaaaccacttacttccagcagaattttcgctcataggtgagtatgatcctgtacagctagatatggcaaaggggtatcgtctcttgactcatgcagagtttgaatcttatttggaggacgtctctgctgacactgtaaattatgctttgaggcgatggggagaaaataaaactccttctatgacaattgtttcatttcttgccgcatatcacagttgttggtcagttggggatgaacaaaataatcaagaactaatcaatttatcccaaggaagaagcaatccaaaagactcgcttagcgaaatcatgagtatagctagtaaacaattcatgaaaaaagttaagtctaaccatggaataaaggcaaaaaacttcaaactactaatgctacctactggcatagacatcgatgaactacaacctgaaatgttaccgaaattagatagttttggttctaagcgtggtgagatagcacatacttcaggaagaggaagagttagccaacaaataaatccaaaagacgagctagatgatgttaattttttacttgactgttttcgaatactggatacgaaattagttgagataaaagaaataatataa

SEQ ID NO: 290155 - DNA, 1197 bp, Morganella morganii
atgtcagaatatttttttgagtatgaagaacaagctgaaaacgaagatgatgttgagttggttgaaggaacggacttctctgctgcagtagttagcggaactgactggactacagaaactattataaatcaaattaataagagcaacattcaactcaatccagattttcaacgtcgcgatgcgtgggataaagcaaggaaaagtaattttattgagtcgttaatattgggcctgcctatcccacagctagtcttagcagaaagaaaagatcagagaggtgcatatatagttcttgatggaaagcagagactgttaagcatccgtcaatttgccgctgaaaaagatgatcaaatatactctcctttaaagttaagtggcttagaaatcagagtggatttgaaagggaaaaatctgcatgatcttaaagaggatgctaatttttataacgatgtggctgcttttgaaaaccaaccaataagaactgttgtaattaaaaactggcctagtgaagagtttctttatcacgtattcctacggcttaacactggtagcgtacaacttgcccctcaagaactaagacaagctcttcatccaggaaattttgtttcctatgttgatactgttgcaccagataacgaagcgattaaaagtatattaaaacttaataagccagattttcgtatgcgtgataatgaattacttttaagatattactcgctcaagaactttcttccagattatgcaggagatctcaaaaagttcttggataacacctgtctcatttttaatagagattgggagcgtgcagaatccatgattgtagaacagtatcaagacctaaatcttgctcataaaaccattttaagtatatttggtaacaatagttatagaaaatggtttgctaccgattatgaaaagaaattcaatagagctatttttgatattatggcactttcattttcattctctgcggttcgtggagctgttgttggcagggaaagagacgttgaagaactattcaaaagactttgtaatgaaaattatccgttccttgcatcaatcgaaacaacaacaaaaagtttgaaatctacgcatactagaatatcagtatggttcaatgaattaaatgctattttaggaactaatttaccaactctcaagctggatgatacgactaatagaataaaagtggtgtaa

SEQ ID NO: 290156 - DNA, 177 bp, Morganella morganii
atgtcgctgatgactgcaaaacaaaaacacaccaaggaacagattattgagttgctaaatcaggctgacatggatgaaaagcagattgagcagattgtgtcggagtggcgttggcgcagggagagcgccaaaacaagccgcattctccatcagtgcagaatgaggctaccggcatga

SEQ ID NO: 290157 - DNA, 261 bp, Morganella morganii
atgagtggcggagacggtaatggttataacagcggagctcatgataccggtggtaatatcaacggcggaccgaccggtatcggtggtaacggcggttcaacaagtggtggcgcaggttccggcagtggttggggaacaacacaactaccggacggaagaaatattcatcattatgacccggataaatttggtagtcgccgtgatagcaatagtgccaataatggctatacagatttgaataccccccccctgaatctctga

SEQ ID NO: 290158 - DNA, 237 bp, Morganella morganii
atgggacttcagttaattatcaaagcagaacgcgaaaagatagaaaaagcattgggatcgcggacatcagaatgtgaaatattcccggtcgctgaaggccttttcggtatttccattccggagcgaagtctctcatccgagggtgaagctgtcgttctaaaaaaacttgaaccactcacacgctttgacctgtggcagggcgcctggcaagaacccaggcgacgctggttttggtga

SEQ ID NO: 290159 - DNA, 261 bp, Morganella morganii
atgtttaccccggagttaataaatgaagaacgcggtgagtttatccttgtggccaaccacagtttggcatcattggaatcgataaaactcagtattgcatacaatattgccagaatatgctggggactatcgcagctgccaccgcacgtgcaaacttgccgggtcgtctatgacatcagagggcaatccatccctgatcaggttcaggctcaagtcaggcaagctcttgagcaggtagccattgtggagtttataagctga

SEQ ID NO: 290160 - DNA, 780 bp, Morganella morganii
atgacacaggctgcactggagaaagggctggcgataacagaaggtgaattaccggtttttcattattctcctgaaaccggggagtatttataccagagcacagaatatctgagcgttggagtggggcttccggcaaacagctgtactgatgctcctcttccggccagagagggatacagtgtttaccgtgacacaaaacagggtctctgggtctatgttgaaaaccattgtggtgagacggtctttgatacccgcaccggtcagccgataatcattgatcgccccggtgcgtatcctccggacaccacgacgctggccccccgcacatcactggacagatggaacggcacggcatgggtcattccgccagatgtgctggcacaacatctgagcgcattaaagcagagtaaatttgaggaaattaaccagtggcgggacgaacaggagctggccggtattatttttgaatggaacgggcaccgctgggatggcggtcagacgtcccatgcccggttatcaccggtattagcagtggccaaagccggggtattgcctgcagattttttctggacggatgcggacaatcaggatgttgcagtaacggcagaagaactgattgagctggaagtacaaatgctacaggcaatggtcagtcagggatttcgcattcatgagaggcagagagccatgaagaaagtggtttcttcttttgccacacctgaagaggtccaggcttatcgcattgggtgggatgaggctgaaaaggaacatgcctcataa

SEQ ID NO: 290161 - DNA, 1092 bp, Morganella morganii
atggcaacacttaatgaatccgctgtctgggaagacggtatttatcagctggaagtctcagacccggtattaggcgggccgggaggtatcgccaaccggcaggccgaacaactggccaaccggacgaattatttaaaaacactatcggaaaatcacaaaggtgaactggctgcgcatgttaaagcgtcagacccgcatacacagtatgcaccaaaacattctccggcactttcaggtataccgacggcaccgacagcggcacaaacaacccgctccacccagatagcgacaacagcatttgtgcatgcggctgtcagcgcactggtgaacagctcaccggcagcactcgatacactgaaagaactggctgacgcactgggcaatgaccctgatttttcagccaccatgacccgactgctgtctgaaaaggccccattgtcaaatccggcattcaccgggaatccgacagcaaccacgcaaccggcgacagataactcaacccggattgccacaacggcttttgttcgtcagatttttgctcagattactcaggacgggtatcttccgataggggttcccatcccgtatccgctggcccaggcacccgctaactggatgatttgcaatggtgcgggtttttcggccagcatctatccggagctggcgaaactgtaccctgatttaaaagtgcctgatttaagggggctgtttatccgcggctggagtcatggttataacccggattcagggcggacgttactgtcacggcaggagagtgcatttgctgaacacaaacacaccacctatgtctatagcggtcagcaacagccacagcaattatccctgatatcacgtgacccttcagacacgatgctgatcattacaaccaataaaggtgttaatacagcggatgggtcagacagtaataatgctcagtatatgacagggattggccatatgaattgtgtgatcgaaggcaaaaaaaataatctccggacagcggctgccatctcaacggcaaaaatgatcaacggtgtaaatgaaacacgtccggtgaatatggcatttaactatatactgagggctaaataa

SEQ ID NO: 290162 - DNA, 582 bp, Morganella morganii
atgactgatccccttcagcttccgccgccgctggaaggcgatatccgtttccggtcactgggcagactgaccgggcgcctgaaccttatcgacctgagtgccctgatggtctgtctcgtcgatatcgtcgacagttcagcgttgccatggctgggcgagcagttctcactgttcggcgatggctgggagctggctgaatctgacgatgtccgccgcacacttatcaaatccgcgattgaattacaccgttataaagggacgccatggtcaatccgggaaataatccggcgctttggctttggtgaggtggaattaatcgaaggactgggcggattacagtatgaaggacggggaacgtttaacggccattacctttacggggacaaacgtgcctgggcgatttaccgggtaatactgcagcagcccatcactaatgatcaggcgagattattacgccgggtgttgtccttttttgctccggcccgctgtcaccttatcagtctggattatcaggctgtccctgtccgctataacgcagaggcatattttgacggtaattataactacgggagtcatcagtaa

SEQ ID NO: 290163 - DNA, 1104 bp, Morganella morganii
atggcgttaactgaacccgattttattgaacgtgatgccgacaaaatcacagctgaaatgatagctcagtatgagcgtgataccggaaaaaccttatatccggctcaggcagagcgcctgctgattgatttatgggcttaccgggaaatgctgatccgggtggctattcaggaagcggccagacaaaatctggtggcttttgcccgggagccgatgattgattttctgggcgaactggtgggggtttatcgcctcgccgcacaaccggcttccacacagctccagttttccgtggataccgcactgaacagggatgtcctgatacccgcaggcacccgcgtcagtgcttccgacagcattatttttgcgacagataccgatgtggtactgaaggccggattactgctggtcaacaccccggcgacctgtacagagccggggataaccggaaacaactggcaaccggctcaaatcagtcagttgctggatgagattgaggatatcgatttacaggtgacaaacctgacagccagttccggcggttcagagcaggaggataacgaccgtctccgtgaacgtatcaaactggcgccggaatccttcaccaatgccggaagcaaaatggcttaccgtttccatgccatgcaggcacatcctaatgtagtggatgtggctgtgctttcgccggttcccggaacggtggaattatatccgttgctcagtaccggtctgccggatgacagtattctgacactggtcgaaagtttttgctccgatgaaaaagtcagacccctgactgataccgtgctggctaaaccgccggtacagcgggattatgacattgtggccaatatcacagtctatcgtgatcaggatgccgtttcggtaaaagcgcatgccaataaagccattcaaaactgggtggcttcccgccggtcagttcttgggcgcgatattgtccccagtcagattatcagtgagctgtctgttgccggtgtttatcaggtagagctgataagtccggcgttgctggtcattgctgaaaatgaatgggcgaactgtaacgctatcacccttaatatgaccggagtggccgatgactga

SEQ ID NO: 290164 - DNA, 348 bp, Morganella morganii
atgaaaacaatccctgtattctggcaaccggctctgcaggctcccggcgaaatcgtccgggggccggaggatatccggcagtccattcagattatcctgcgaacgccccggggcagtgacccgcaccgccctgagttcggtacggatctgcaccggtatatcgactggccggttgaccgggccattccccatgtggtgcgcgagtctgttgatgccatccgtcgctgggagccacgctgtcagcttgtgtcagtgaaacccctcattgacggtgagcatcttacactttgtgtgagctggaaagggaatgacggggaaactcacaggcaggagctgctatggcgttaa

SEQ ID NO: 290165 - DNA, 597 bp, Morganella morganii
atggccacagtgacccgtcaggtcggtaccgtcagtgccgtggatgccgataaggttcaggcccgtgttcgtctgcctgaatgcgataatctgcgcacgcactggctgaatgtgctgcagcgcaatacccagaataacaaggattactggttgcctgatatcggtgagcaggtggaggtgctgctggatgcaaatggtgaggacggtgttatcctggggaccgtttactccagtgtggataaaccgccattcagtgacaaaaatgtccggggcaccgtgtatgctgatggggctgaattcagctacaacagggacacacacacgctgactgtccggggcggtattgagcatatccgaattgaatgtcaggcggatgtcaccgtcaaaaccccgaaagtcaccatcgatgcaccggaaaccgaaatcaccggcaaccttctggtcggcggtaaactcacttatgaggggggcatggcaggctccggtggaaatggtgctgctgccagtattcaggggaatgtggaagttaacggtaatgtccactcaaccggcagcatgttatcggatggccctaactcgaatcatcatggtcactga

SEQ ID NO: 290166 - DNA, 1155 bp, Morganella morganii
atggctgagataaacacactgccggtcaataccggcgtcacggatgtcctgagtccggtatttacgctgtggtatcttcagaaaaatatcaccacggatattgcaccgtatgtcacgcgcgtcacttacagcgataacattaaaagtgagtcggacaccattgacgtggagctggaggattcggacggtcgctggatggataaatggtatccgggtaaaggtgacacactcacgctgaaaatgggctataaaggcgaaaccttactgtcctgcggcacattctccattgatgaaatcgaagtcagtgcaccgccctctgttgtgtccgtcaggggggtggccacgtctgtcaatcaggcgctgcggacaaagtccagccggggttttgaaaacactacactggcggccattgccggacgtattgccaaaaaacatcagctgacgctgtcggggacaatcgaaaacatcagaattgaccgggtgactcagtatgcggaaacggatgtgggatttctgcgccgcctggccggtgagtatggttatgccgtgaaagtggtcagtgaccagctgattttttctcatctgacctcactgcgcagtcaggagcctgtcagacagctgataccgcaggatatcgcccgtttttcccttcgcgataccatcaaccgggtttatcagtctgcaaaagtcaaacatcagaacagtaaagataaaaaattaattgtttatgaggctgacggaggcacccgtgagagtgataaacaactcagtaagggaaaaaccgtcagcgcagatacactgaaggtcaacagtcgcgccggtgacccggaaagcgcccggataaaagcggattcggcactggcaaaaaataacgaatatcagcaaaacggctcactgactctcgctgggacgccgcaactgaccgccggtaataaaattgaattatccggtttcgggcagttatccggggactggctgataacatcgacccggcatgtgtttgagcggaacagcggttataccaccgaactggaagtggccagaggcccggtaacccgaacccgccgccaacggggcaaacaggcaaaaacacagacgctgacggtgtataaagcggatggctccacctcaacggtgataaaggagaaaaaataa

SEQ ID NO: 290167 - DNA, 213 bp, Morganella morganii
atgtttcttgagcatatcacccgtcacggagaacgctgggatacgcttgcctggcactattatggtgacccgctgggatacccccggattattgcggcgaatccgcacattgccatcacaccggtattgccttccggcgtggtggtgctcatacctgtcattgacgccggagaggcagacactgaggaggatattgcgccatggctgagataa

SEQ ID NO: 290168 - DNA, 885 bp, Morganella morganii
atgtttgcggtactgggggatatagaatttgaactgatcacgtactgggacggcttcgaaatgacgtccggtgtcgattatgccgagcatgcccgtattgaaggcaaacccgggttgcagtttatcggtgaccggctggatgagatccagatcgccctggtttttcatcagcattattgtgtcccggataccgaactgacccggttacgtacggcaatgaaagcccatcaggcgctggcactggtcttcggcaacggggattaccggggctggtttgtcattactgatattactgctgtcagcgagcagaccgacagtaccggtaacgtgctggccatgaatgccaccgtgtcgttgcgcgaatataccggagatcctaaaaatccgctgaaaccgcccgccatacgcactcaggtacccggtgtcagcacgctttccggtgccgtaccgaaaccgtccggtatcgctcagcttgtccgggacggggtgaattatacccggcaggcgcagtccgtactgcagacaacagtcagtgccgtccggattgcacaaaaaatgaagaacaatccggctgctgcactgacccgcgttccgggactgatgagtcatttgggcaatatgtctgacgcactgggtaacagcgtaccggcgttccgttcactttcagcggccatgcccgaagccatcacattagcccgggcgggcagtgaggcggtgtcgtatgtgcagcaggcccgggcgtcactgagcagtacggacagtaaaaatattgccgctgtactggacggggtctccggtcagctggggtcggcaacaaccgtgctgacccggatatcccctgcgttaagtaaaatggccgccggaattatggtaaggagcgtgtaa

SEQ ID NO: 290169 - DNA, 2766 bp, Morganella morganii
ttggccggtaatttctctgtgggtgttgtcatcggcggcatcgttggcagcacgttccgttccgcagtgagcggaacacggcgtgcccttgactctctggggggtacgtcacgtcgtctgcaggagcgtcagaacgccttaacccgggccactgaacgttacggccagttaggtggtgcccggatgcagcagcttaaccgtgagctgttacgggtaggccgcacgatggcacagattgagcgtcagcagcgccgcctttctgccgcatctgcaaccggcgatgcactgaaagccaaccgtatggctctttatggtcagggggcagaaacctatgcgctggccagaacgctcagtgctccggtcatggcatcagttaaaaaatactcttcctttgagtcacaattacgcgatatcagtgttaccggtgatttgaatgcacaacaggaacaagcgataggtaatgcgatcagaaaggcagcccgtaacgtcaatcagctacaggactccctgattgaaggtgtggggcaactggttgctgacgggatggatccggaagttgctgcccgtttttccggcatgttaggcaaaacggccacagcgacaaaagcggatatgagcgatttggccaaaatgacctacgctttcagtgatgccttaaaaatcagtgatcctaaagagctggaggaggcttttgctattgcagccacgggggcgaaattaggctcctttgaattaaaagatatggctaaagcgttacccggtatggcgaagtcttttgccgcacggggaatttacgggaaagaagcgattacacaaattgttgccagtctggaggtagggaaaggcagtggctctgccgaagaggctgtgactaatatgtcaaactggctggcggcaatgggacgtggagacactatccagaaatatgccaaagccggtgtggattaccagggctccatgcaaaattatgttgctcagggattttcccagtatgaagcctccctgatgattgctaatcgttttattgacggaaaaggaaaagcttttcttgagcaatggcagaaagccggtgcaacaggtgatcaggaagcccagcaaaaactgatggaatccttcgggctttctgaagtctttaccgatattcagacggtaaatcatttattatcgatgcgtcagggatgggataaatatctttctaataaacagtcgatgaattcgcctgcggctatgaatacgctggatacagacgcagccaaacaaaatgagacactggaagcccgctggcgtaaaacgcaaattgcctttaatgaaatcgctatcagtgtgggggagtcactcaaaccttcactgattcagttaagtgaaacctttatcccgttactggattcagccggaaaatggctggcagcgcatcctcattttatcagtggcgcaatacagattgtgggtgccctgctggccttcaaagcctcaaccattgccctgaaactggggctgaatcttctgctctctccttttgtcagtgtctggaaaaatatcgttttactccgggcaaactggttacgtctgacactggcattcggtgagggcggaaaactgcgctggctggtaatcgggctgagcagtgtcggtaaaggtgccgccagcctgggcaaaatactggccggaggtttactcaaagggttaatgctcgccggtaaagccatcctctgggtgggaaaagccttactgatgaatcccgttggtctgattattaccggtattgcggtcgccgcgtatctgctgtaccgctactgggggccggtctccgcattttttaaacgcttatgggcgcaggttacatccgcattcagtcgtgcatggcagagtattactgccgcctggcagggcatttcaggctggttttccggtatctggacagaaattaagaccgcttttggcggcgggattgccggtgtcggccagctgattctcaactggtcgccgctgggattatttcataaggcttttgccggtgtcctgtcatggtttggtatcgatatgccgaaaagttttaccgattttggaaaaaacctgattacggggctggtcgacgggatcagtaatcagctgactgctgcaaaagaaacgattgttaatttcggcagttctgtctcttcctggtttaaagaaacgctcgggattaattcgcccagccgggtctttatgggattcggcgataacatcgtgcagggcgcggccatcggtttgcaacgcacaacgccactggcaacaaaagccagtcagcaactggcagatcagatggtaccctcattaccggtaattatccctgataacctgatcgggcaactggttaacgatgtcagtcagaaaattaccgctgttaaaaaccggctgaccgggccgggggcttcacttttcgcccggttatatgacactttcccgtcattttccgcaatgtcgtcaggtatcccgcctgtcgttcctccggtcttaccggggctgcatattgcagagtcaatgtcacccgccgcaccgcgtattccctctgacgaggtgatggatgcggggtatgccggacaacgtgccggtaagactgacacggcagcggcgattcaggtcagttttaatccgcagttttttctcaataacaaagaaacaaccgtacctgacaaactgtccggtgcgctgaatatgagtctgcatgaactggaaaaaatgctggcgcgtctgctggcccagaaacaacgccgggggtacgaataa

SEQ ID NO: 290170 - DNA, 138 bp, Morganella morganii
atgcaggcacaggggctgctggcgaggtggttccggtttcagccgggtgagattgatgcgctggatactgacgatctggaaatgtggctggcacaggcagaagcacaaatcaaaagtgagtacagcgacagacactga

SEQ ID NO: 290171 - DNA, 330 bp, Morganella morganii
atgtcacagccacaccatgatgtttttatccccgtatatccctttatgaccgcagctggttcccgtattgagcgtatcgagctgaagcgcctgaccgtcaaagacctgaagcaggtgcgaaaaacgtataaagacccggcagactgggatgagccactgattgcccgaagcaccagtcttattccggaagatctggagaatatggatctggcggattatctggaattacagaaacgatttcagaaaatcactgggctgggcaaaagcgacacaggcactgatgcaggcacaggggctgctggcgaggtggttccggtttcagccgggtga

SEQ ID NO: 290172 - DNA, 282 bp, Morganella morganii
gtgactgtcgaaattgaagacaaaggtgggaactgtgcggcgattggcatggggaatggtacctggtttaccctcctcgatattcccggagtggaaaaactgtttaatacacagaaaaccaatgatccgattgactgtacccgttcaaaggcccgtaagctggcagacctgattgaggcatgggagccacctgaacactggttcagcggcatcggcaaagacgaaggcaaagctgtcctcatttcttttctgcgtcactgcaaaggctttcgtacgcactga

SEQ ID NO: 290173 - DNA, 1428 bp, Morganella morganii
atggccgctaattatctgcatggtgttgagacccttgaggtggaaaaaggggcgcgcccggtcagcatggtcaagtctgcggtgattggtctggtggggacggcacccgcgggagacgttaacacgctggtgcagtgcctgtctgaaaaagacgctgccgcctttggttcaccgtttaccggctttaccattccgcaggcgctggatgcgatttacgaccatggtgcaggcactgttctggtcatcaatgtccttgacccagcggtacataacaccacggtggcagacgaaaaagtgatctttgacaaagcgaccgggaaagccgggctggctcatccggttgtgtctcagctggtgctgacgtcggaggatggcgctcagtcctataccgatggtcaggattacgcgctggatgcgcaaagcggaacaatcacaaacctcgggaaaggcatcgctgcgggcgccacggtgaaagccgggtatcattatgctgacccgaccaaagtcacagcggcggacatcattggtgcggtcaatgccgccggtaaccgtaccggcatgaagttactcagtgacagttttaacctgttcggctatttcgccaaaatcctgattgccccggtattctgtacccagaacagtgtgacggttgagcttaccgccatggctgaaaaactgggcgcggtaacctacatcgacgcgccggtgggaaccacctttgcgcaggcgctggcaggacgcgggcctgaaggcaccatcaactttaataccagctctgaccgtgtccgtctgtgttatccgcatgtcagagtctatgacgcagccaccaacagtgagcgtctggagccactgagccagcgtgcggcgggattacgggcgaaagtcgatctggaaaaaggctactggtggtcatcctccaatcaggagatccttggtatcaccggcgtggaacgtcagctgtccgccatgattgacgatccgcagagcgaggtgaatctgctcaacgaacagggcatcacgaccgttttcagcagctacggcagcggtctgcgcctgtggggcaaccggacggcagcctggccgacggtcacccatatgcgcaactttgaaaatgtgcgccgcaccggagacatgattaatgaatccatccgttacttcagccggcagtatatcgaccagcccatcacccaggcgctgattgatgcactgaccgagtcggtcaatgcgttcgggcgcaagctgattggtgacggtgcgctgctggggttcagctgctggtttgatcctgcccgcaacgaagagaccgaactggccgccggacatcttctgctgagttacaaatacacgccaccgccaccactggagagactgacgtttgagactgaaatcacgtcggaatacctgttaaccctgaaaggaaacagctga

SEQ ID NO: 290174 - DNA, 246 bp, Morganella morganii
atgaaagcataccgctattccggcccggccagcggcgtcacgctgtcggacggaactgaaattctgctctggccggggaaaacacatcttctgcctgagcaacatgactatgtgaaggtactggtggcgctcgggcatctgataccggtacaggaagagacactgaccgccggagcctcctccgtgtcgttaccgaaacgccgcaatgacagtgagatgaaaaaggaggacacgcatggccgctaa

SEQ ID NO: 290175 - DNA, 447 bp, Morganella morganii
atgtactgcaccccgacggatttacctgaacagataccggagcggacgctcatccagctgaccaatgaagaggtggatttcagtatcccgggggcggtgaacaccaccgtagtggacagctgtatccgttatgccgatgaacttatcgatgcgtatcttcgtggccgctataccctgccgctggcagaaatcccgacggtactgcgggatattgccattacgctggtgcgttaccggctctacgcccgccgtccggaaggggctgtcccggacacggtgaaagacgaccataaagaagcccggcgacagctggaggctatccgtgacggaaaactgacactggggttgcagaccacacaaaaagatgtgccggagtccggtgaaatccgtacccgggcacgtcgtccgacctttggcggtcaggatggcttactggagaaatactga

SEQ ID NO: 290176 - DNA, 357 bp, Morganella morganii
atggggacaactcagcaggtcattctgaccactaccgtgacagccggtgccgcactgacgcaacaacggtttgtcggtgcagataacgccccctgtcaggccggagccgccgtgctcggtgtggcagaggtggatgccgctgccggtgatgtcacgccggtcagcgtactgggtattatggccgtcgaagccggtgcggccataacccggggacaggcagtgcagtccgatgccagtgcctgtgccgttcctcagaccgccgcgactgctgacaccgcagcaggtatctcagccgggattgcactggatgacgccaccgctgccggtgaggtgatccgtatcctgcgcggggtgtga

SEQ ID NO: 290177 - DNA, 1098 bp, Morganella morganii
atgccagctattcatattttcaaagccggaacgcataccgatatgcacggcacaaaactgccgttcacgcaacgcgatcttgccgcctgcgtgaacgcctatgacccgtccgtccatgaagcccccctcgtgattggtcaccccagaacagacgacccggcatggggctgggtgaaatccctgtcactgaacggcggtgatctgttagccgaacccgctcagcttgatccgcagtttgcggaactggtggataacggacgtttcaaaaaagtgtctgcctcattttatcttccggactcctcaagtaatcccaaaccgggcacgctttacctgcgtcatgtcggttttctgggagcacagccgccttccgttaaggggctgaagccggtttcattcagtgaacaggaagacggcgtcgtggaatttgctgactggggcgataccaccaatgcctccttatgggggcgtctgcgggattttctgattgcccgcttcgggctggatgagacggaaaaagtgcttcctgcctggcaggtagacgccctgcgtgaagaggcttaccgcgacaccgggaagccggaaccggaattcagtgaaccatccctccctcctcaacaagagagcaacacaatgactgaagaagaaatcaaagcacttcaggcggaaaacgcccgtctgaaagcagaagcctccgcccgggccgagcaggatgcgaaagcgaagcaggacaaactgcacgccgataatgtggcctttgccgaaaaactaacaggggatggccgactggctcctaaagcgaagtcggttgtcgtggccatccttgacgcgatctctgcaggcgataagccggttgaatttgccgagggtgatacccgcaccccgctggctacggcgtttaagacgttgctggacagcactgagccggtactgaatttcagtgagcacgcgaccagagagcgcgtggacacggatatcagcacaacgtcagcagagttcgcggaagctgacccggaacgtctggcactgcatgagaaagcgctggcactgtcgaaaaaagaaggcatcagctacgacgctgctgtcgcccgctgcctgtga

SEQ ID NO: 290178 - DNA, 459 bp, Morganella morganii
atggcttccggcaatctggtcactatcaccattaacgatcaatccctgcgtcaggcactgaaagcactggaatctgctgcaacagacatgacacccgcgatgcgcaaaatcgccggaacgctgctgacggaaacgcagtttaactttctcggtgaagggcgtccgggatggctgccgtcactggctgccactgagcgtgacggacagacacttcaggataccgggcgtctgatggggtcagtctcaaccgaccatgacgaccggcaggcgactgtcggcacgaacgtggtttacggtgccattcaccagttcgggggaaaaacgggacgtcatgagtccgttgagcttccggcccgcccgtatttaccactgaccggcgacaatgaactgcaaccagaggcggaaaaagccgtactggatacgattgtgcggcatcttgaatcagcggcccgtcgctga

SEQ ID NO: 290179 - DNA, 336 bp, Morganella morganii
atgacattacagatcgaattctggacggtggtaggttttctcatcaccttcatgagctttgtcggcggcatggccaaatggttgttcagcaaggctgaggaacgtcaggctgcccgtttcgcctcactggagcaggcattacaccagtccgcctctgaatggggagcgctggaaaaagagttcatgcgtttcagggcggatttaccgctgaattacgtccgccgggaagattatatccggggacagacggtcatcgaggccaaactggacgcgctttataacaaactggaagtggtacagcagtaccggaataccggaggtcagagtcatggttga

SEQ ID NO: 290180 - DNA, 654 bp, Morganella morganii
gtgtggactagcctgctaaaaaatctgccgtggcgtagtctgctgctggcagtggtcataaatgcttttctgattggactttattacctgggctataaaagcgggcatgaaaacgccacgcgtgacggcgataaggcggtcagtgaattgcagtcagcattcgacacgtacaaatcggagcaggcaacgcttgagaacgctgcgctgcgggcatgggccgcccgctatcagactcaggtcgccgccgggcaacgggctgaagccggttatcttgagcagattgctcagctggagagccggaacaaacaactacaggggcaaattaacgatgtcacacagcgctggattgatgaaaaaggtaagagccatcccattgagtgtgtgtttactcgcggtttcgtgcgccagtacaacgccgcgctcggatatgacaacacatccgccgacaccggtcattcagactcagctgccgccgctggcaccggcactggcgcagcgtccgggcaacctgaaaccgctgacgccaggctacgcgactcaggtgtcacacagcaggacatccttgccaaccttatcgacaacgcaacacagtgccgcatctggcgaacccagataaatgccctgctggatgaacgggaaggattgcaacaatga

SEQ ID NO: 290181 - DNA, 723 bp, Morganella morganii
atgaactggcctcagattacattcattgttctgattgcttttggtctgggcgtgaccgccattaagcatggcgaaccacgcaacgataaatacagcttctggtggcagctcgcaggtaacctggtcattgcctggctgctctggtgtggcggcttcttcagtcaggctaacgcggctcaacctccgcgagctgccctgcagtatcgcgacgaggtgatccgtcatgcccggattgaatggggaatgtctgcaccggtggccgattttgccgcacaactgcatcaggaaagtggctggcggcccggtgccgtatcaccggcgggtgctcagggtatggcgcagttcatgcctgccaccgccgactggataagccgcaccgttcctgaactgcgctcacgcgagccgtttaatccgtcctgggctgtccgggctctggtcagttatgaccactggctgtggcagcgcgtcagtgcggctgataactgcgaacgtatggccatgacgctgtcgggttataacggaggtctgggctgggtacaacgggacaaacggctggcttcacagcaggggctggacagccagcgctggtttggtcatgtcgccaccgtcaatgccggacgcagcaccgccaactggcgcgagaaccggcactatccgcagcgcattttacgggagctggcaccacgttaccgctcctggggaggcggcagctgtgtggactag

SEQ ID NO: 290182 - DNA, 351 bp, Morganella morganii
atgaaatacctcaaatcatttttttcttcggttaaaaaacctcgtctaagcggctggctgctgacctctgtgctgttgctgggcaccatcgctctggtctcaccacagcagctgccggtggtgatttataaactgtcgctgatcaccttagcggcagtactgggttactggcttgaccgttctctgttccccaaagcccgtcccggtcagtatctgttacacgataaaaaactgatggcagaaggccgttatcctgtccagaccggacgccatctggtgttcgctgccgcattaatccgccgtgccctgattgtcgccgcagtctgtctggccgtcgcgacagggctgtaa

SEQ ID NO: 290183 - DNA, 477 bp, Morganella morganii
atgacgcatacactgaatccggtcatcactgtcaccgtgtctggtcctgtgggcagtggtaaaagttacgtactggcgcggatagaagaagtggtgaaacaggaactcggaaacagcgtcattgtcgatgctgctgacgtggagaatgagcgccgtatgagtggggatgatctgagtgtatggctgaaaccacgggcaggttcgattatccgactggaggaatacacggagcagactcccatgtcatacagtgaggggcgcatcttccggacgaatgaactgctggatgttatatgccccacaggacgaaatccctggatactgcctgatgcgctgcatgccgctattgcggcactgatgacaatttacgatcaggagttgctcatgcgggaactacgtaaactcacaggccagccaccagaatgtttttcgtccccgaagtacggcaaacaggaacacaccccggataatccttaa

SEQ ID NO: 290184 - DNA, 771 bp, Morganella morganii
atgaaagaacgcactttacccatcgtcccctggatagggggaaaacgtcgtctggctaaacatatcttaccgttatttccgccccatacctgttatgtggagcccttctgtggggcagctgcactttattttttaaaaacgcccagtaaaacagagattattaatgatattaacggtgaactgattaatctttaccgggtggttaaatatcatctggaagaatttatccgccagttcaaatgggcgctgatcagccgtcagatgtataaatggctgcagaacaccccggaagaaatactcacagatattcagcgggcggcacggttttattaccttcagaagcaggcttttggcggcaaagtcgcagagcacagcttcggaacatccaccaccagtccgccgcgttttaacctgctgcgtattgaagaagagctttctctggcgcatctgaggttatgcagaacaatcattgagcatctggactggcgtcagtgtattgaacgctatgatcggccacacacgctgttttactgtgacccgccttactggggaacggaaggttatggtgtggattttccgatcggaaactatgtccatatagctgagctggcacggagtatcaaaggcaggatgattatttcggtaaacgatataccagaaatgcggcgggcgtttcaggggctgacgattcaggtggttgatatcagctacaatctgaaggtcaccggaaaagcagcccgcaagaaggagttgattatttgcaatttctag

SEQ ID NO: 290185 - DNA, 549 bp, Morganella morganii
atgcttgcaaatccttcaaaacacgatgtgccgtttattacccgcctgactgaactggccggtgaagatattgcctgtcagctctgtcacgaatatggcgctacatcggtttatttacccttcagggtatggatgccaccccaatccgtcgaagcgatcgggaaagcatttaccggtgacaactttgccacactggccaaacaattcagtacaaacattaatgctgtttactgggctgttcagcagcaccagaaacaacagataaaacaggtgattctggcgccccgggaagacgtggaaaacgacgtgcaagtacatcaggtaatcccggtgacgcaattgggtctccctgacctgcttgaagttgtgcttcaagctgtaagaaaggccacaacacaggagattccggatcaacctcacattgcgtttttatctctgcgtgaagggcattcagtaactgctgacgctcaactgtctgaagttgtgtcagaaggaaaccaatcaggcaattcagtccgtcctgatattcagcctgatcactcagcgtag

SEQ ID NO: 290186 - DNA, 189 bp, Morganella morganii
atgactccagaacagattaaaaatcgcttccgtcaacgcgggatcacttttacccagtgggcagaagaaaatggttattcccgcaatgaggtttaccgtgttctcaacggtcagaccaaagcacgttacggcaaagctcatgaaattgccgtaaaactcggtttaaaacctgccgcaaatgcggcgtaa

SEQ ID NO: 290187 - DNA, 309 bp, Morganella morganii
atgagtaaacccaatgtctccagttctggatcccgaattctgcgggtattgaaagcattacgtggacatgcattaaacggtatttcaaacggagaactggcatcggcacttaatgaatcaccggccaacattaacagagcactgaatactcttattgaagaaggtctggccctgaaactggataacggacgcttcgcccccggtattcaattgatacagattgctatggcgcacagtaacgaaatggcacgggcacaggatcgtattaatgaaattaaccagcgtgttatttcaggtagccgttattaa

SEQ ID NO: 290188 - DNA, 909 bp, Morganella morganii
atgggacgaacaaaatcacaacatgttgaactggaaacagatgtagcgttgtccggcgatattaatgtcagcctgaatgccatgactgaacaccgcctcgaaatcatgcagcagtttggtgacggcctgccatatgaacgtgatcgcattgttcacgaagcccgcttttatatggcccagagtgctgaagccatgctggaagcaggtaaaagactgattattctgaaagaaaatgaacctcacggagaatttgttgcaattgtagaagaacaattggggttacatgttcgggctgcacaaagaatgatgaaagcatcattgaaatatctttctccgaaacttgaaccaaaagcgacaacgttgtcgcttttgggaaaagctaaattgtttgaactagtagctgaagatgatgaagaactatctgaattagcggatggaggcactgtcgctggcctgacacttgatgatgttgatcgcatgtctgtccgtgaattacggcaggctcttcgagaagcccgcgaaaccaacgctgcacaacaacgcgtactcgctgacaaaaacgaaaaaatcgactcgctttccaccagactggagaagaaatcccgcatccagccgcccaagcctgacgaagaagtgaagaagctgcgcgcggaagtgacggcattatccactgaagcggaatctgccattacagtccgcctgttcagcgccttcgagaccctgagcgcctattgcgcagaaaaccagattgatacacctaaagactttatggcggggctggtctgcgaactggagagtgctgcccgcaacctgcgctccacatttgacctgccggacgaaccgactggcaacgttgccccctcctggctgacagacccgatacctgaaattaacgggcgggaggaataa

SEQ ID NO: 290189 - DNA, 270 bp, Morganella morganii
atgaaaaacataacagcaattaaccagcagatgaataacgtcagcaatgctattacggcacttaacgccatgaatgccacagtgcagagcgtcatgattgcaggcagtaaaccgctaatccgtattgcccgcagcagtctctgcaaccgcctgctggcacagggtaaagcctcttacgtccatatcggacatgggcgttccggcagttttcgtcagggtgtttttgaattacatggctgccgggtcatctggtcagaattattgctctga

SEQ ID NO: 290190 - DNA, 522 bp, Morganella morganii
atggcaagaaatgcaaagcgaattaaagccagtgcggctgtgtggacggcacagacaaaagatgaagtcatcgccgcaatcaaacaactcggtgatttacagagggagttaatcagaacagaggcgaaaatgaatgatgctatcggggaaattaccgccggtatgtcgccgttaattgaagaactgaaagcccgtatgaaggagttacaaagcggtatacagacatggtgtgaagcacacagggatgagctgaccaacggaggcaaagtcaagtttgccaatttaaccaccggtgaagtgcaatggcgaaaccgccctccgtcagtaaatatccgtggcgctgatgccgttatggatttcctgaaacgcctgggtctgcagcgctttatccgggtaaaggaggaaataaataaagatgccatcctgaatgaaaaggatgctgtgaaaaatattcccggtattaccataaaaagtgatattgaggatttttctattattccttttgagcaggacgtccagtaa

SEQ ID NO: 290191 - DNA, 189 bp, Morganella morganii
atgtctgttaaatgtcgtcattgtcagcaaagtatcacctcactgaaactgcgtgaggccaacgttatcactaccgggaaataccacgttccggcagtgctcatcacgctggtttgcccgtattgcagccagcattactacgcaaaagtcccggttatggaatttatcccttgtgaggaaaaacaatga

SEQ ID NO: 290192 - DNA, 273 bp, Morganella morganii
atgattacaccagaagaagccagaaagcgtacccgtgaaattatcgaaggctatgtcaatgagtgcggatgcagaaacctcaccgatgttcagcacgtactggaagcattaatcagtatggctgcacaggcggtagtggcgacaaacggcaaaccagccgccattgaggtactgaaaaaaacgcttatccatacggcactgcatgaagtgccgtatcagatggaaacaacggcggatggcgacctcaatattactgtcgcccggaaacactaa

SEQ ID NO: 290193 - DNA, 210 bp, Morganella morganii
atgaaaattactgatgcacataaactggaaaaattaatcactgatatgaccaccgatttctcttattacacctgcaaaggcagttgtttcatcgggaaaaccgaggataaagctattgttatcagtgtgtataacatccgggagtttgaagacgaatttaacgaagattttcatgctatgcccgacagacatttttgtctggagccgtaa

SEQ ID NO: 290194 - DNA, 510 bp, Morganella morganii
atgcaaaacctttcgttatataaccgctcaacactttaccgtatggcactgaaaatcttcggcccggaagcacagttactgaaactgacagaagaagccgctgaactggccgcagcggcagcccgtaatatgaacggggcaggcagtgaggtggatttggccggtgagctggctgatgtggaaataatgactgaacaatgccgtctcaacggcatggggaaactcattgactttcagaagcagaaaaagctggagatactggcagaacgattaggggtgatttacacccctgaaactgaaaaggctccagccgtcttttacccgccacaattaacagcattagcgcaaaaattgccttcccgtgaactgctggaagactggtgtggtgctgtgccaaacagcgcctttatcggtgccacggacgaagaaattgcggatatggcgcgttttattctttgtgttatgcccctgcctgatattcacggaggctgtgatgactcagcaaaatga

SEQ ID NO: 290195 - DNA, 684 bp, Morganella morganii
atgactcagcaaaatgaaaaaatactggagaaattaaaaaaattactggcgctggccaaatcagataacccgcacgaagccgctgtggcattacagcgggcacaaaaactgatgcaggcttatcacattactcaggaggatattgaactcagtaatattgatgaaagtctcagcgattactgggcgaccggcagtatccatcctccccgttatatgctggggctgttatccgttatacagacggcatttggtgtgaaatccatccttcatcccggaataaagcccagaataggtttttacggtaataaagagcgggtcattcttgcatcctatacatgggaagttctggccagacagttaacggcagcccgtaaacattatattcgccagcaaaataagcggattaaaaataccacgaaaaccagccgtggcgaccagttcgcggaaggctgggtgttagccgtccacagtgaaatccggttatttgcgatgtcggatgaggagcgggaacttgctgaacgctggattgagcataaatacccttcccgcagtaccacgcagggacgggaagccggaaagacacgggatgctaatctgtccggctctctgggatatcaggccggtaaaaaggtcaggctgcaccgtcctgttaacggacaggaacagcccaaactgagaggctga

SEQ ID NO: 290196 - DNA, 228 bp, Morganella morganii
atgatcataagtatgaaaagaaagaagcctgttccctgccgaatcactgcgaaatatctttttgcccgtgcatttttcaggaacgtaaaacccggcataaaaattggcatcactgcagggcgtcgtcaggtgaacaattacatgtcaggagcatggtggaatactgatccggtgatggctgcccgccatattcacattatgtggggaggtattcagaatgagagatag

SEQ ID NO: 290197 - DNA, 429 bp, Morganella morganii
atgagagatagacaacgactgattcaactcattcacattgctaaaaataaacttcaactggatgaggatacttatcgccagatgttacaggggctaacagggaaagcgtccacaaagagcatggatgtttctgacctgaataaagtccttgatgcaatgaaaaagaaagggtttcgtatcagtccggcaaagaaagcccaatcccgtttaccactggatgaccatccgcagtccaggaaaatccgtgcgttatggcttgaaatggctgctgcaggtatcgtgcgtgaccgttccgaacaggcgctggcccggtgggtaaaacgggaaaccggcatcagtgcgttacgttggctcagtaatgagcaggcaagtggcgttattgaaaaactgaagaagtggcagcacagagccacggggaggaagccatga

SEQ ID NO: 290198 - DNA, 633 bp, Morganella morganii
atgtttgacgcatcgttactcaatttgccatgggcaacactggtgacgctgaccagtggttatatcggttattttattgcaaacgtgggtctgaaagagcatcacaaacccatcgaggtgacgttttccacgctgattttcggtctgttatcaatgatggtttatcaggctgtgatgtggctcggtctgaatgcgtggctggcaacaccaccagcacttctgtgtgcctttatctgtggtgtattgtggcgcaagtacggtcgcaaatggatgtacagattcctgtggaatcatgatatttcatggtctgacgacaccagttcagcatggcaggccatgtttgatcagagagacttcagtgtcaccgaagtcagagtgattcttcgcgatggttccggtatgatgtcacgactgcccggcaactttgaagagtggcctaacgggccatttactctgggaaataaaggcgatatggttctttacgtcacgcacagcagcccatctggtagtaatgaatgggaagagtataaaggcgtgattgataagtactggggggctctggcaacctatatccctgcagatcagattgccagagtggagatcaggcgcgttcacgcaacacacgataaatga

SEQ ID NO: 290199 - DNA, 162 bp, Morganella morganii
atggccactcaaaataataagcatgatagcctggattactcagaaaagactaaaagcaagcacgtcgtaacgtttgagcgcgattcaggcagaaaaggagaacccccttcctctgccaataaaaccaccatgccagaagctcctgctccagggaaaaaatag

SEQ ID NO: 290200 - DNA, 1530 bp, Morganella morganii
atgagaacccaaaaatcgataaagaacataagtgttgacctattaataactatattattagtagttatagcattcatatcacgcaaagttttcattgaatatatgggagccaacactacaggcttaatgctattgtttacacaattaataggagtgttaaatttagccgaactgggtgtagcaactgcaactgcaagtttattatatagagaaatttccaagggaaatactgacagagtatctataattataagtaacaccaaacgtatttacgataaaatttttatttttttcataatattaggtttctttttagggctaggtgttttttcaaccattgataatgtaagtaatatagaatactctttttggtattggatgttatttgttttaaatacatcgatttcatttaaattttctcactactctattttattaattgcaaaccaaaaatattataaatctcgttgtatacaagggtcatgcaagataataacatccattatacagatactctccatagtaattttaaaaaactttttcatatatatattaatagaaactgcatttaatataatacaatggtacttgtttagaaagtgtagtaagcgtgaatataggtatattaacttcaataataaaacgcatgacaattcaataaaagaaaaaataagtaaagtattttttcataaagtaggtggcgttctagtttttaatacagactacattataatatcaaaatttttaacacttccaattgtaactgcctatgcatcatacctgatgatattccaagcattcacaatgcttacaaatatattagtcaattcattaacggccagtgttggtgattttcttcataaaaaaacaacaacagaaaaatatgcattatggaatcaattgcgagcattatttttctatttctctaccgttatatctataacaacacttttaacaataaactcttttattagtttgtggattggagaggactacgtacaaaataaagaaaccaccctactgctaatttttaatttatatatattgctcagtcggccagcagtagatatattcaaaaatgctagtggtcatttcaatgatacattgctacctattcttgaaggaattatcaatataaccatatcattattgttagtgagccgatatgggctcaatggtgttattataggaacatgcgtatctaatatattaatcatagtaatagctaagccttattatttatttaaaaaaatattccccgcaaaaagtggagtattaatgatagtaaaccaagccaagtattttatttacacagcaattattgcattaataacaaatgagttatctagttatattaatatcagcaatttcatagaatggcttgggttctcaatattattgataatattgatctctgccgtatcattttttatatttttatttgacaatgattttagaaaaatattatccagactttattctactgtaaaaaacaaaaatgaccgtatcaataataattccaacatttaa

SEQ ID NO: 290201 - DNA, 741 bp, Morganella morganii
atgaaattaataaacagaaaaatacgaacacgtcagttcacgcatgctatttcatattcagaaaaactaaaaccacaaatagaaaaaatatttgacaaccccagaatacactatttaaatatagggcaaccacggaatgattgcctatataatccatataactcagccagagaaaaaatattatcacttatttcagataaaaaaacaaactcacaattaattttatattgcccaacatggcgcccatatgaaaagacaaaaatcttcccttttgatgattttaacctttattccctaaataaatatctttataataacaatacatacctttttgtacggggacatccattctttgaattcgatctcccacataactttgagtacactagtaatatactacctttatcatcaaaagtaattgatgatatcactggtgtactatgcggcttcgacatgttgatcactgattactctagtatttttttagattttttatccacacacaaaaaaatggcctttataccctatgacatagataaatatagtcgtattgtaggtttttcattcgactataattatatgacaccgggtcaaaaattatcatcgcaagacgaactaatcacattcattcagtccgatgacaattttttagaagagaaaaaatcactcaccaaggaaataaatctaaaaaataataattgtctagaattatcagagttattatttacatatcaaaaatag

SEQ ID NO: 290202 - DNA, 342 bp, Morganella morganii
atgaggagaggattcgtgcagggggtgagggagtgggctcaggatttttggcatgacattctgtttccgttagtgatgagcgcagggtttttgtgtgcagtcggttatttcagctggccatatctgagtcagtttctggcctggggtgaacagcatctggttgagcgggggcgttataacctgacggaatgtcagttgatggaaagaaacagagatacgggcttctggtcagggcgggaaaatattctgcaatgcagggtgacacgggaacatgtgaatgcggatgaatatgaaaaggccgtccgtgcctggcggcagaaacagacagagacagaaaaatga

SEQ ID NO: 290203 - DNA, 411 bp, Morganella morganii
atgggactcgatatttacttttatgccagtgaaaagcgtggtgcagacaaaagccggatacccgcctcacgttacgcagaagcggacagcaacggcgatattgaagtcgggtatttccgtaaggttaatgcgctgtttaagtgggtgcatgaccatatcggggcttttgacaactgtgaaaaggtgccggtgacagaggcacatctgcgggctttacagcaggacttgcaggcactgacaccggaaaactgtcagacacggttcccgaccactgagggctttttctttggttcaacggcttatgatgaggcgtactgggctgatgtggaaggcgtcagacgctggctgtcagagataacggagacgtttgactttgacgcagagtcactgttttttgtggcctggtggtaa

SEQ ID NO: 290204 - DNA, 195 bp, Morganella morganii
atgacagaactccgttcgtccttgaaattgacggagggtgataatcagactgtattatcatcaggattatttttacgcaacgtttcatataacctgcccactgacggggaaatcacccgtcatcagggaatttctccgttttttcaggagaaattcaatgagggtatctacatttccccaatcgtctttttttga

SEQ ID NO: 290205 - DNA, 987 bp, Morganella morganii
atggaatattctaaaatacttattatcagaatcgatttcttaggtgacatgatatgtacaactccttttattcaggctatcaaaaataaatggcctaattctcagattcatgtgctagctaataaatataattcaccaatattagaaaataatccaaatgtaaattatgttcatacttatgtttatagtaaggaatgtgaaagaaatatcaagccaggtaagttgaatgccttggtttctcgtcttgcattgatatttaaattgcgaaaaattaagtttgatataggtattgtgcctaatggtggaatgcataaaaacagtatcaattttctgcggcaacttaatattcctgatgttaggtggcatacacatgaaactgaatttgatgacagaaatcaaaaacatgtattaaacagagctattattcatgaatgcttatcaggttttaagttaatgcctgagttggattttcctgaagaaaaacaattaaagcttcaggtttatcccttatctgatttaagaaataaatggttaaatgatataggtaaacataatggatatagagtgggattgtttgtttctaataaatctgttgctcgtaagtgggatatttctaaatggtgtaatttgattaatgtcattgataaagatgtgactttttttgtttttcatgatccaaaagataatgtctgttctcatttttggggaagggatgatgccgtagtgattaatacggatagtattcaggatatgattgctgcaacaagttgtatggatcttgttgtttcggctgacagtgctccgattcatttaagttctgcattaaacatacccgttgttgctttatttgaaaatagaccagagaagtatcttcgttggtacccgataggtgttagatataaactactaaaaagcacaaaaattgttaatgacattgcgcctgagaaagtagccgaagcgataaattatttattggttgatggttaa

SEQ ID NO: 290206 - DNA, 1305 bp, Morganella morganii
ttgttatttaacaaagaggttgagaaaaacttagcggaatcgggctttggcaccggcggtaagtatagccgtgccatgcaggcggcaacggcagcggttcagggcgtgatgggcggagacctgaaggtggcgctggcgaatggtgcagcaccgtttatcgcaaatgaaataaaaaaacagatcctggatgaagaaaccgatgtcaacctgaaacgcactattgctcatggtatagcgaatgccgcccttgcgctggctaaaggtgagaatgttgtggcacaggcgaccggggcgatgacaggggaagcaatagggatactggcggagtctgtttatcataaaaaagcgcatgaactgacagagcaggaaaaagagaatgtcagtgcctgggcaacgctggcgtcaggtcttgccggtgctctggcaggcggagatacacagagtgtggcgaacgcagcccaggcagggaaaacaactgctgagaataattttctgggggcgacatcttctgacaaactggataaagccattgagaaaatcaggaacggcgataagacattagccactgctaatgagctgattaagctggaaaatgcagataaacgtagtgatgctctggtatccaaatttaataaagatccttcacaattaaacagcacagaacgtgccgaactggcagcttacttgcgtgtatatgcttcagaaatggaaaaggaatacggtgcagcggtagcacaggagttagttactggattactgtcaggacaggattacataaaacgtaaccctgataccgaagcaatggcaaaggctcagagcattatgaatacttggggataccataaatccaatgcaagtattggtgacgctcctttgttatttggtagcagtgttcttggtaccacaataaaagaaggtatggcgcttaatgcagcaataggtgtaggagtcaatacgagtgtccaattgagtggggatgatcctttcagttatgttgatgctattctctctggtataacggcagccgcgacaacaggtaaaagttggcagatatcagcagcaatcaatatgggaggggctgcgattgggagcgttattaagggggaagatcctacaaactctgtaataagtacaggctttggtagcgtagcgggtagtttagggggaaaagttgttgattcattatctccggtaactgatcaagtaacaaaagatgttattagtaccgttacaggttctactgcttctgaactgacggggaaagtggtaaaagatgagttagacaagcgggagaagaagcaatga

SEQ ID NO: 290207 - DNA, 336 bp, Morganella morganii
atgtcaatagtagatacaaataaagtagatatgatcggtataccaaaagagaataccggtcttgtccggctaggtataactgaccatctaagttggaatgatgataaatttgaacatttatacttactgcaagaaaagattaatagttatatccgttttattgaaagtaaagagatttatgaagtattccctgaatcgaaaggaattaataattttttgatagaaatattttttctttatgaaatacccactgagtgtattgaatttctggataaagtaaaagatgtgctgattaacattaatacatcattaagatatgaagtagatagtgaatag

SEQ ID NO: 290208 - DNA, 153 bp, Morganella morganii
atgaaaatcgtctgcccgttaccggcgttttacctgaccggaaaccgctcaatgatatatgtcttttgtgctctgccccctgccgctattcccaccgcaactgatgcggattatgatgcgttccatatcacattattaatgagtaaattatga

SEQ ID NO: 290209 - DNA, 399 bp, Morganella morganii
atgagtgataaaacaaccgtttcccggggagaacactggggtgtaaaaacggctcataaaacaaaatggctaatcaaaaaactaaaggctttcgataagaactgtgtggcaagcgccaaaagcaaaaatatgccgggttggctggggcatattccactggtatctataactctcgcagtcatcgcgttactggcttatttcagtttgtacatcttatttacctttggagcgttggtaattttattttctataatagctaacatgagttattcctcctccgaatatattgatatcgactctgatgttttttttgcaaatacaaatttcaatgatgatggatatagagagggtattgagggtacaggaacatatattgatggctatcgaatcgatgattag

SEQ ID NO: 290210 - DNA, 1683 bp, Morganella morganii
atgaaatctgtattgaagaaaagtatggttagtacctcggtatcattggtactggcggccggtatggctgcatttgccgctcatgcggcagatgatgtaaagctgaaagcaaccaaaacaaacgttgctttctcagactttacaccgactgaatacagtactaaaggaaaaccaaatattatcgtactgaccatggatgatcttggttatggacaacttccttttgataagggatcttttgacccaaaaacaatggaaaaccgggaggttgtcgatacctataaaataggtatcgacaaagccattgaggccgcgcagaaatcaacgccgacacttctttcattgatggatgaaggtgtgcgttttactaatggctatgtggcacatggtgtttcaggcccatcccgtgctgcaataatgacgggacgtgcaccggcccgctttggtgtttattccaatacggatgctcaggatgggattccgctgacagaaacgttcttacctgagttattccagaatcatggttattacacagcggctgtggggaaatggcatttgtcaaaaatcagcaatgtgccggttccggaagataaacaaacgcgtgactatcatgacaactttactacctattctgcggaagaatggcaaccccaaaaccgtggttttgattattttatgggattccatgcggcggggacagcctactataattccccttcactctttaaaaaccgtgaacgtatcccggcgaaaggttatatcagtgatcagttaacggatgaggcaattgacgttattgaccgggctaaaacgcttgatcagccttttatgctttatctggcttataatgcaccacatttgccgaatgacaatcctgcacctgagcaatatcagaagcaatttaataccggcagccaaacagctgataactactatgcctctgtttattccgttgatcagggcgtaaaacgtattctcgaacagctgaagaaaaatggccagtatgacaatacaattattctctttacttccgataatggtgccgttatcgatggtcctttaccgctgaatggtgcacaaaaaggctataagagccagacttaccctggtggtactcatacgccgatgtttatgtggtggaaaggaaaacttcagccggggaattatgacaagctgatttccgcaatggatttctatccgactgcacttgatgctgccggtatcagtattccaaaagatcttaaactggatggtgtttcattgctgccgtggttgcaggataagaaacaaggagagccacacaaaaatctgacctgggtaacctcttattctcactggtttgatgagaaaaatattccgttctgggataattatcataagtttgtccgtcatgaatcagatgattatccacataacccgaatacagaggatctcagccagttctcttatacggtgagaaataatgattactctcttgtctatacggtagaaaataaccagttgggtttatataagcttaccgatttgcagcaaaaaaataaccttgccgccgctaatccgcaggtggttaaagagatgaaaggcgtggtgcgtgagtttataaacagcagcgagccaccgctcagtcaggtaaatcaggagaagtttaacaatatcaggaaagcattaagcgaagataaataa

SEQ ID NO: 290211 - DNA, 1152 bp, Morganella morganii
atgcacgttacagccaaaccctccagttttcaatgtaatctcaaatgtgattactgtttttaccttgaaaaagagtcgcagttcacccatgaaaaatggatggatgacagtactctgaaagaattcatcaaacaatatatcgcagcatctggcaatcaggtttattttacctggcaaggcggtgaacccactctggccggcctggattttttccgtaaggttattcactatcagcaacgctatgcaggcccaaaacgtatttttaatgcattacaaacgaatggcattttattgaataatgaatggtgtgcctttctcaaagaacatgagtttctggttggcatatcgattgatggtccacaggaactgcatgactgctacagacgcagtaattccggtaacggtacttttgcaaaagtcgtcgcagccatcgagcgtctgaaatcatatcaggttgaatttaatacgttaactgtcattaatgatgttaacgtccgctaccctcttgaggtttataattttttaaaatctatcggcagtaaacatatgcagtttatcgagttgctggaaactgggataccgaatgttgatttcagtggtcatagtcaaaagactttcagtattatcgacttttctgttcctcccgtcgcttatggtaagtttatgtcagctatatttatgcaatgggttaaaaatgatgtgggggaaatatttattcgtcagtttgagagttttgtcagtcgttttctcggtaatgggcataccagctgtatttttcaggagtcatgtaaagataatctggtcattgaaagtaatggagatatctatgaatgtgaccattttgtctatccatcatacaaaattggaaacatcaataaatctgaactcaaaacgatgaacagtgtacaactgactgcacaaaaaaaacggatcccggcaaaatgccggcaatgtgtctacaaacctatttgtaatggaggttgtcctaaacatcgtattacaaaagtcaataatgaatcactttcatatttttgtgaaggatatcgaatcctttttgaaacgatggtaccttatatgaatgcaatggttgagcttgcgaaaaacagagtacctttataccacattatggatgtggctaataaactaaagtaa

SEQ ID NO: 290212 - DNA, 591 bp, Morganella morganii
atggcgactcaattagcacaggcaggaaatcatctgctgaccgagctggtgatggaaatcaaaagcgggaatctgcggcgttgtgaggcgctggggctgacagataatgaaatccggttactgaacagtttaaccatcgaagatctgcattatctttcacacagtccggtctccattattacctgtcagatccaccgggaaaatctgcgtttattactgacccgggcgaaagaagtccatcgtcagaatcagatggttgaacgctgtctgaggctgggggcctccattgatttgctgaatcggtattttggcatgacctcactggaggtgtcagcccgtcggcgtttatccggtatacgtatcggagtggggcgttcacagagtctgaatgatgagcagaaagctgaattatggtatcgctggaaagaggcgggtatgccggaaccggatgaacccggctgtcttcaggtcatggtgttgtgtgccgaagaaatggatgtctctctgaccacggtatggaatacggttcaggaatggcaccgggatggtgtactgaatgtcgcggacaggaggaaagatcatgccggataa

SEQ ID NO: 290213 - DNA, 285 bp, Morganella morganii
atgccggataacagggctatccgctacaatcagggggacaggttatttccggaatgtgtcacgcctgtaccggataatattcagcggaaggcaaacgggttattactgcgttattttgcgggtgagcgcctttgtaaaaaggtgaaatgtggcgggaaaaaaggaggtatttatccggtactgaaaattgatattggtgcattctggcgtctgctcagtacggacaatggccaaagctggaagctgatgagccatgaacgttataacaagatgattaaccggtga

SEQ ID NO: 290214 - DNA, 1278 bp, Morganella morganii
atgcaatttcctccggacagtattattcagttttcattagaaaaaatgcggcaacaactggacagccggcaacacagccagtccggcacggcattgcgcagcggattgatttatgccggcaatgttcatgatgcgatcccccgctcgttgttgctcgatccccgcctttccccgcttgataaactgacctggatgatgatacggcttcatgcgcaacaaaatgaaggtgctgtatttccgacctatgatgacttacaactccagttagccacaccccacagtgataaagcctcgcgggaaacggtcagcagggcactgttaatgctgaggctgacgggctggctcagtttatgccaccgggtcagggataaacggggacgcgtccgcggaaatatttatatgttacatgatgagccggtgaatgcgtttgatgcagagacattagatccgcgctggatggatgtgctggaaaaaagctgtcatcacaaaaataagagtgtgcggtgtgtggcccgcgctgcgctggccactctgaaaacggatccgtcaatgcggcatcagcataccagaatgcagctcattgagcagcggctgagcggtattcagacgcctgaagcgctggcaaacaggcaacgccggatactcaacggtcaggaaagccaatctcatccgggtaaacataaaaaaaatcgaactcagtgtaaaacaccgggttcgaaaatcgaactcaggacaaaaaatgatgaaaaaagaccggattcgaaaatcgaactgagtgcacaacccctgtctgattcaggggtacgaaaatcgaactgttacgtacgtaatacttttacacagagtgtaaaaaatacgtacgtagatcagggtgaacaatatttaacggatgctcaggtgcaggggctgaatcagcggattgatgagaatgaccggcagatgctggaaaaacagttacgggcattaccgacagaggctgcggtatcgattgtacagcaactggcgcaggggatgaggacagggagtgtgcgtaatccggtggggtatgccttgcagttattaaaggcagcccgtgaagggcgatataaccccgtttttcctgcggaaacagggagcgggcctttgcagaaaatgtcagatatgccggatatatcacaacacgcacagacaaaaccggaaagaagcaaggtgtctcaggggatggtgactgcccctgatatagcacgtcagtatcttcagcggtttcgtcgtactctcaccgggataacggatgagtag

SEQ ID NO: 290215 - DNA, 201 bp, Morganella morganii
atggataacagaaacaaactgaaagtctggttacagcaacatcatctgacacaaaaagacctggctcaactcattcagcagacaacaggcaggccctgttctgtcagggcggtaaaatcctggttatgcccaccggaaaaaaacagcgcccggccctgcccggactgggtgattcaggtactcagtcacatggatgaataa

SEQ ID NO: 290216 - DNA, 537 bp, Morganella morganii
atgacagtattatatttattaaaaaaaacacaaccattgatatttcatactcaaaacacagcaaacgaggaggataaattatttttcagaaaattaaaatcagcatttagcggaaaagaaatagccgccaaagataccagcacaagtcaaattctagaaatagcatatttattattaaattttaacattgctgaatgcattattaaccctgagttattttcagataagataaaaaatattattcgttctcaattagactaccaatggacattgaaagatattagcaataaattattcattagcccatcatctctaagaaaaaagcttgaatcagagaaaacaaattttatgacactattaacagacatgaggatgacgcatgcaatgcatcttttagcaacaacagatctatctataagaaagatatcagaattaataggttacaaaagcacatcttactttataaaaaaattcaaaaaatattataaaaagtcccctaaaaaaatgaaaagggaccaaaacacaggaaaaaaatag

SEQ ID NO: 290217 - DNA, 303 bp, Morganella morganii
atgactactgtggataaagttttagggcaggagatccgctttctgagaaagcatttatcgatgacaggacaggaattggcaaaagcttttggtatcagtcaacagcatctttcacgaatagagcggggggaagttcaatggagtgtatctttcctcctaaaagttagcatattttttgatgttcccatgatctattttattaaattaatagagaaagaaacatctgacttcaatttttataatgaagatttcaatgagatttatgctattacgtctattgtaaataaccaatgcaggaggtga

SEQ ID NO: 290218 - DNA, 897 bp, Morganella morganii
atgtctgttactttgaaaggggttatgtctgcacttcttactccctttgatgcagagcagcgtctggataaagagagccttcgcaggctggtgcgatttaatattgaacagggtattgacggattatatgtcgggggatcaaccggagaggcctttgttcagactgttgctgagcgtgaagcggttatggcagttgttgctgaggaggcccgtggaaaactaaaacttattgcacatgtcggctgtatcagtactgaggaaagtcagcaactggctaagatttctgcacgtctgggatatgatgctgtttctgcagtaacaccattttattatcctttttcctttgaggagcattgtgaacattatcgtgcaattattgattcttcggatggcttgccgatggttgtttacaatattccggcactgagtggtgtaaaacttactctggagcagattaatactcttgtgacgattcccggtgttagtgccctgaagcaaacttccggtgacctatatcagatggagcaaatccgcagggcacatcctaatctgattctttataatggctatgacgaaatttttgcttccggtctccttgccggtgcggatggggggattggcagcacttataatattatggggtggcgttataaagggattgttaatgcattacagagaggagatattaaattagcgcagcatctgcagactgagtgcaataaggttatcgatcttctgattcaaaccggagtattccgcggacttaaaactgttctccattatatgggcgtgattgatgttcctttatgccgtaaaccattttttggtgtgaatgaaaaataccttcctgaattaaagttacttgccaaaaatttaactgaagagaaattctcataa

SEQ ID NO: 290219 - DNA, 1479 bp, Morganella morganii
atgaatgaaataccacaaaataataccctatggtacaggcatttgaatcgaaatcagtggcgggcattttctgcagcatggctgggatatttgcttgatggttttgattttgtacttattacattggttctgacagagattcagggggattttgggctgactacgatacaggcggccagcctgatttctgcggcatttatttcccggtggtttggggggctggtactcggagcgatgggcgacagatatggccgcagattagccatggttgtcagtatcattttattttcagtcggtacattggcatgtggtctggctcagggatatatcacattgtttattgcccgtcttgttattggtatgggaatggctggggaatatggctccagtgtaacttatgttattgagagctggcctaagcacctcaggaataaagccagtggttttcttatctctggtttttcagtcggtgctgttgttgctgctcaggtatacagtttcgttgttccggtatggggatggcggtcgcttttctttatcggtattctgcctattatttttgcactctggctgcgtaaaaatattccggaagctgaggactggagagcgaagcatgagggtaaaacaccggtacggactatggtggatatactgtaccgcggggaataccgtattgctaatatcgtgatgaccctggtggctgcgattgctctttggttctgttttgccggtaatcttcagaatgcattgattattgcaggtctgggcgttctttgtgctgtgatttttatcagtttcatggttcagagcagtggtaagcgctggccgacaggggtcactctgatggtcgtcgtattgttcgcatttctttattcatggccgattcaggcgttgcttcctacatatctgaaaacagaactggcttatgagccatcaactgttgcccaggtgctgtttttcagcggattcggggctgcggcaggatgttgtgtcggtggctttttgggggactggctgggaacccgtaaagcttatgtatacagtcttctggcttcacagattttaattattcccgttttcacgataggtggttccagtgtctgggttttgggactgctactttttttccagcaaatgctgggacagggaatcgcggggattctgcctaaattaataggtggttattttgatacagatcagcgtgcggcaggattgggctttacctataacgtaggggctctgggaggggctgttgctccggttctcggcgcaattgttgcccagcggcttgatcttggaactgcattgtgttcgctctcctttggtctgacgtttgtggttattttattgatcggtctggatatgccttcacgtgtgcagcgttggttaaacccagaagcattgcgcacccatgatgctattgacggcaaaccgttcagtggtgcctgtgttcaggaaaaatcttcagataacagttaa

SEQ ID NO: 290220 - DNA, 687 bp, Morganella morganii
atgttattacaagaaatagaatcacaaatcagagttaaagggggattgatcgtttcctgtcagcctgtacccggcagtccgatggatagccctgaaatcatcgcggctatggcattggctgcggagcaggccggtgcggttgctttacgcattgaaggggctgtaaatcttgctgaagtccgcaaatctgtttccataccaataatcgggatcattaaacgggatttaacagattctccggttcgtattacgccttttctgaatgatgtggatgcgcttgcagaagcgggggctgacattattgcttttgacggaacagatcgtgtccggcctgccagtgtcgaagcacttattagacagatccataaccaccactgtattgcgatggctgactgttcttcggagcaggatggtctggagtgtcacgctcttggtgctgacataatcggaacgacattgtccggttataccggagattcggttcctgatgaacctgattttgaactcgtcagtaaactgagcctggaaggatgccgggttattgcagaaggtcgctataattcccccctgatggcagctgaggcgatgaaacggggggcatgggctgtcactgtggggtcagcgattacccgcctggagcatatttgccggtggtattgtgacgctatgctgagggttgctgtatga

SEQ ID NO: 290221 - DNA, 879 bp, Morganella morganii
atgaataatattctggcaattgatattggcggaacaaaactggctgcagcacttgtggataaccgtctgaacgtgaaggaaagacgtgaaattcccactccgggaagtaaaaatccatctgtgctggaaaatgcattgtctgatcttctacggccgctgaaaggtaaagcggactgtttcgctgcagcatcaacaggaattatctgtgatggtgtgctgactgcggtaaatccggcaaaccttggtggtctggaaaaatttccactggttgactgcctgaaaaagatgacgggattaccgggtattgcacttaatgatgctcaggctgctgcctgggcggaatatcaggcattacggaaccagattcaggatatggtgtttattactgtatcaaccggtgtgggaggcggtattgtcagtgatggtcagctgcggatcggaacgaaagggctggcagggcatctggggcatgttcttgctgatccatatggtccggtttgtggttgcggacgcagaggatgtgtggaggctgttgcttccggcagaggtattacatttgccgcaataaatgaacttgaagggtttagtgcgaaaacaatatttgttcattatgcaaacggcaatgagcaggcccggatgttaatccggcgctcagcaaattgtatttcccgtcttattgcagacatcagaatgataacggattgtcagcatgttgtcctgggggggagtgtcggacttgcacccggatatatagatttagtgaaggatgagttgtccgctgaaccttcggtttgctctgtcggattaagtccggcttattaccgtaataatgcaggaatattgggtgccgcattatgggcagaacatgtgctgacttaa

SEQ ID NO: 290222 - DNA, 717 bp, Morganella morganii
atgaaaatatctaaaatatttttgggtgtattatttatttgtttttctgttccgttaattgcggaagcagtggtattggatgtccgtggcggatatcgtagtggcagtcatgcttatgaaacccgactgaaagtcagtgaaggatggtccaatggatggtgggccagccttgaaactaacacatggaatacaatacataataaccaaaaagaaaatacagcattgaatgatgcccaggtagattttaattatgcaatcaaactggatgaccaatggtcagtacgtcccggtatgctgactcatttcagcagtaacggtacccgctacggaccttatgtgaaattatcatgggatgcgacgaacgatctgaatctcggtgttcgttaccgttatgactggaaagcatacaggcagcaggatttatccggggagatgtcccgagataatgctcatcgctgggacggatatcttacctataaaatcagtcaggattttacattcgcatggcagacaacggtatacagtaagcagaataattaccgttacggaaatcataaaaaatgggcaacagaaaatgcctttgtactgcaatatcatatgactccggatattacaccatatatagaatatgattatctcgaccgtcagggagtttataacggaaaagataatttgtcagagaacagttaccgtattggtatctcattcaagttgtaa

SEQ ID NO: 290223 - DNA, 222 bp, Morganella morganii
atggtttatctgagcaatgatatctttatttccctgtgcatcattcaaatcctcaaaataaccattaaaaatattctgattgacaccaccggtaataaatactttattattctgcacaaaagtaacgttaccagccatacccaaaggagcatgggacatcagtttcacccaggtattcgcctcgggcttatacatatggacatcattaaatacctgggttaa

SEQ ID NO: 290224 - DNA, 738 bp, Morganella morganii
atgagtcattcacaagaacgatcagtctctctttccggtggattacataaactgctgattgtgacgggtgtggttgcctgtgctctggtggccggtctcccgctgtttatccacagtaatgttatcagttcacactctgaggctttgtcacaactcggtcagcgattacaggcagttgagatgaagatggctgactctgtcacgcaggacggagtgaatgcgcaactggatacgctccgtcaggaacaggcggccctgaaacaggacgcggcatcacagcgtgagaccctcagaacggtgacagcgcagctggccgttgccgggaaaccggatgagcagctcgcagtgctgtcagacgggctggaaaaacggctggcgcagctggaaacccgtctggcgcagtgggctccggcgttacatcagttgcaggaacagcgtcagccggtgcaaaaaacggccaatcccccggttgtcaaagcaacccccgccacgcccgggacttcccgttccggggcttctgtccgtgcctcccggaccgtgccgtttcagttaaccgccattgaacagcggggcggccgtcttcttgccgctctggccccggcggatgtccgtcagctggggcaggtgcagttactgccggtgggcggacgttatcagggctgggaaatgactgacatccagacggaccgtgtgacattacgttatcaggggcgcacggtaacgttgcgcctgccataa

SEQ ID NO: 290225 - DNA, 441 bp, Morganella morganii
atgtcagataactttcgtttacagccgccattatttaatgaaatggtgaaggcatttcgttacgatctgaccgcatacaggaatcagtttttaccggagagtaacaatattgttccctggttttgtggtgataccacctggtactggaaagaacagtacccgcagcaatatgattttatttatggaaattataaaaaccatgataatgagaacattatttttgtcagttttcaggaggatggggagaggggattaacgaattttccctgtgaggatccggatgatttggtttccggatattatggttcatcttatcgaacagaagaaaactggacgacagccttaagaagcagccattttaactcagtggctcgaaggggtattattccggataaattcgcatatgcaacttttgatttttataatcatacttttaggtga

SEQ ID NO: 290226 - DNA, 516 bp, Morganella morganii
  misc_feature (479)..(488): n is a, c, g, or t
atggcaggacagtctaacgggatggcttacggtgaagggattcctttgcctcaggggattgattccccgcatccccggataaaacagcttgcccggcgctctcagatttgtccgggaggggaaccctgtaattacaatgatattattcctctggatcactgccctcatgatgttcaggatatgagcggatattctcatcccatggccaaaaagaatcagtacggtacagttggtcaggctttacatattgcaaagaaattattgccatttattcctgataatgcaggcattcttactgttccttgttgtcgtggcggttctgcattcacagcgggcgggtatggtgtgttttcagaacaaagcggggcaactcatgatgcaatgcgctggggaaaaaacacgcctttatatatggatttggtaaacagaacccgggcggcacttgaaaataaccctgagaataaatttctgggtgtatnnnnnnnnnngtgtatattggatgcagggagagtttga

SEQ ID NO: 290227 - DNA, 132 bp, Morganella morganii
atgccatttgatattgcgatcagagaaatcaatctcaaaaacagaatccgttctcagccccggttttacctcaccatttatcagatacgtttttttgccgtaattaacagcagttgcaccggctgtacctaa

SEQ ID NO: 290228 - DNA, 216 bp, Morganella morganii
atgaagaaagcacgttttaccgaatctcggattgtccgtattctaaaaccagctgattccggaatgaagattgacgagatttgccgtcagaacaatgctatatattacagctggaaatcaaaatacgacggctcacaacccgctgatattaaaagacttaatgaacttaaggatgagaatacaaacttaaaaagctatttgcagaagtcagcttag

SEQ ID NO: 290229 - DNA, 273 bp, Morganella morganii
atgaactacagtttgtactgtggtaaccgtataagaatattgaatattattgatgaaagtatccgcgaatgcctagcgattgaggtcaatatctcattaccggcagagcggattatccgtattttatcccagttaaaagaagaacgcaggttaccagaatatgccctagtgaataacggccccaaatttatatcggataagctagttcactttcgcacccaaaatggcgatactctgaatcatattcagcagggaaaactaaaacaaaactga

SEQ ID NO: 290230 - DNA, 147 bp, Morganella morganii
atgtcagataaagtcattagaatatttttcatccactggatgttaaaagtatataatacaatagatattgctaatataaaaaatagtacttttgtggagcgtacattggttatcaatggaactattagaaatagaaatgcggaatag

SEQ ID NO: 290231 - DNA, 675 bp, Morganella morganii; identical to SEQ ID NO: 278107

SEQ ID NO: 290232 - DNA, 924 bp, Morganella morganii
atgaaatctaatataaagagggttgattttgtaaacaagacccttatccctgataaaccggaggtcgtcgtggctgatctttcgaatggctacacaaaaacggcaaacgagattcaaaagttaaagccaagattgcgtatgtctggacgggaatggcagtgctttgaggcaatcatctggctgacatacggctggaacaaaaagcaagaccgcgtaacaaacaccgttatagccgatcttacgggtcttaatgatacccacgtctccaatgcaattaagtcgttagcggaaaggaaaatcatattcagtcgcaagcagggtgtgatgaaaatcgtgggggtaaatacagatttatcgacgtgggttttagataaaccgaaagcggtaactgtcttaccggaatcagtaaaaacattaccggaaacggtaaaagtgttaccgaaaacggtagccacccaatacaagaacaagaacagtattaaaaaccctacgtcagagaattctggcgaatcctcagacccgccgaaaagaaaatccgttcctgtcaggcctgatgccgcagtcagttcacccaaaggtaaccaatggggaaccgctgacgacctgaaagccgccgagtggatttacgggaaagtccaaatcgtttgcccgacagcacaggaaccaacctggcatagttgggcgaatgatatccgcctgatgagacaggtcgatggaagaactcacgaagaaatctgccggttattccagtgggcgaacaaagatacattctggtgctcgaacgtcctgtgccctgcaaagcttcgcgagaagtggccgacactggtaatccagagccagcagccgggcaggggtcaacgtggcacagcacctgagcaacctgtcgaatggaacaccgccgaatcatgggagggctttctgtga

SEQ ID NO: 290233 - DNA, 609 bp, Morganella morganii
atgacacagattgagaagtggcttcaagagacacctacaactggaatcatggaattccctgaagagtattcacctcaagggtgggtttatgttttaagtaatgagtccatgccgaatatatttaaagtcggacttaccacaacacacccaaagaaaagagccagggaattatcatcttcaactggagtccctgagaagtttgaaattgttaaggcatttatatcagaaaacccgtcgagtgatgaggctgcaattcataaagaattggctagatacagagtgaatgaggggagagagtttttcaaatgccctttaaataaaattctatctgtgtgtgagcgcattattcctgatggaagcgcagtaaatgtaaatgaccttactgacaaatataacctcatttcatttgagtcattcgataggttttcggacggcgagataatggaaatatgtggaataacttattttggtggtgaaagggaatgcttaacaaggcttgtattatttggagccgagtttgttcgccacttaacaaaaaatggaggtgctgttgtattcaataacagcacattcaccgttttattaccggagggagccgatgaaatctaa

SEQ ID NO: 290234 - DNA, 264 bp, Morganella morganii
atgcagagactggaaatatccggagggcagacatcatcacggacggtgcttggccggaaagtaacaacgcatgaagggttcgatcacattaccggaagcctgaatcagcttctcagttcgtcagcatggagcatgaacgaactggtcgaatttatgattaacaacgaatacatggacgatttcacggacgagttaatcaaggccggacacggaagttctttcttcgcacggatagcggaaaagatgcgcaaggaggtagcatga

SEQ ID NO: 290235 - DNA, 396 bp, Morganella morganii; identical to SEQ ID NO: 288264

SEQ ID NO: 290236 - DNA, 429 bp, Morganella morganii
atggtacgcaaacaggaggtacgcagtaaggtacgcagtgaaacggcgctatcggaacgcgtacttatcgaagccaccgcagaggtaataaccaatgttcgcatggagcatcgcggcgatatccggcgggcgcgtgaattggctaacgtgctgtttgatgaactgagcgcagagtgtgccgatgtggccgcacttgagaaactcggcgagctgatgattgagccagatgataatgggcgagacaagctgaacgagctttaccatgctgttatctcactgcctgaacgcgtgaagtcagctaaagcgctgagtgaaacactgaagaaccttatcggccttgagcgtcaggcgtatggacttgatgacatgcagacgaataaaacagccagccagctatccgacctgatggacgaactatcgagcaaataa

SEQ ID NO: 290237 - DNA, 222 bp, Morganella morganii
atgaataccatcaataccaccacagccccttctccacttgacgaaccactcgtggacatgaaattcatcacccaatttaccggatcaacggataagtggttttacaagcagatacaggagggcaagtttccgaaacctattaaactgggcaaccgttcccgctggctgaaaagtgaagtagaagcctggctgcaggcccgtattacggaatcccgggaatga

SEQ ID NO: 290238 - DNA, 858 bp, Morganella morganii
atgataagcgcatgcagtgccaataaagacaaaaccccaatggctgcaaccatcggggcttcgaatatgaatgcgttaaccaacgagcagaaggtaaacacaatgaatactttagcagttacgaaccaaaatgtcaccatgtcaagccgtgagatcgcaaatttgaccggtaaaaagcatgccgatatctgccgtgatattcgtgtaatgcttgcggaaatgtataacgggacggaaaaggattacattcgtaacgcagatttgctttaccttactaatcagtgcgttagttgtgtccactatgatagtaaaaacccaaacgcatgggagtacctcctggatcgttaccactctgaggttttggtaactggctatgatgtaaaacgccgagcggcagtaattaaacgctggtatgacctcgaaaccgggcaggcaaagcctgtagtcgacccgatgaccgccctgaatgatccgtcattcctgcgtagcactttgctgacttacaccgaaaaagtcattgaacttgaatctcaggttgaagaaatgaagcctgacgttgaagccttgacccgtattgccaaatctcaaggttcaatgtgtgtgacggatgcagccaaacagttgcaggttaagccgaagtctctttttggcatcatgagccagtgcaaatggatttaccgccgccttggtactccgtggattggttatcaggataaaatccagcaagggctcattgagcacaaagtaacggtgatcaccaaaccggatggtgaggataaatctatcccgcaggttcgtgtcactccgaaaggactttctaaactggcaaaactgttaactcagggggcggcggcatga

SEQ ID NO: 290239 - DNA, 351 bp, Morganella morganii
atggacgataaagcaaaagaaaatgatgcgaaattacgtaaccttttttatcaggttactgaggatcgtttgcttaagtttctcaaggctgtcggtgtcgatgaggtaaagtgcccgatatgtgggaatatacatatggcaatcccaaatgttgctgatgatgacggcaggccatacctaatacctatagatactgatgaagttgtgtcgtacaaaaacaaatactgggtcacaaactataagtatcggctcatatgcatgaattgcagccatgaaatatactttaacgcatggcctattactgattggctggcagagcaagataaggagccgggcaatgagggagagtaa

SEQ ID NO: 290240 - DNA, 282 bp, Morganella morganii
atgagggagagtaatgtcattgagcgagatgtccctcagtgggtgacgagagctgaacgccacaatcatggtggtggcggcggaggaggaaacatggaagcacgagtggcgaaacttgagtctgatgctgagtacatcaagcgggatatcaacgaaataaaagaaagcctgaaagatatccgctctgatgcaaaaacagacttccgcatgctgtttggtgcgattattgctgtcgccttggggctggctggattaatggcgaagggcttcggctggctgtga

SEQ ID NO: 290241 - DNA, 387 bp, Morganella morganii
gtgaagaaaataattgttggcgcgtttatttctattgctatcgtgatgatttcagggtgtggagaaaaagataaatatgatggaaactatacctgcgagatagaacagtcatttaataatagcgctatagataaaaatctcaaatttgtcttcaataaaggagagaagacggctaacgtatcggtaaataacaaagtaatcacgatacatgggatgcctggcggggattataaaaccgagactgcgacagagataaaagatcctaaagacggtgatatattgacgtacaaagggtctgagttggaagttgttttttaccgagaccataatgagtttagatttgccccttatgatggcgggctgcaaattttagaaaactgcaaataa

SEQ ID NO: 290242 - DNA, 1020 bp, Morganella morganii
atggtatttagtgggatattaacagcgaatctcgttattatagcaccagtaggtgggtggatgtatttaaatcaaaatattgatttatctacttatattttatttttaatgacatcccccctcgtacttgcgccgttattacgactaacatttgtgctaggagaacaagctcaacgaaaacaaaccttaaaacatatcagtatgatccttgaactttcagagcataaacaacatgataaacattttactctccctaaaaatagcgatattacttttaaagatgtctgtttggatcatggtgataaaccgatattagagaaaattagttttaatgcccaagcgggtacaacaactgcaattgtaggccacagtggtgcaggaaaatcctcattattaaaactaattccccgtttttatgattgtacttctggccaaataaaaataggtcaatatgatatcaactactggccagaaattgatttactttctcaaataagtgttgtttttcaagatgtatatctatttcatggaactattttagaaaatttactcatagcaaatcctaatgccttatttgaggatattatcaaagcaactaaagcagccaatattcatcatgttattgaaaaactcccagcaggatataatacattaattggtgaacaaggaaataaactttcaggtggagagaaacagcgattatcaattgcaagagcactattaaaaaactctccaatcctacttctcgatgaaattactgccaatgttgatgctgaaaatgaaattttgatctatcgcgcattaaagagtctatgccagaatcggactgttattatgatcactcataacctacatactattattaacgcagataaaattattgtgcttgataatggaaagattattgatacaggtacacacacccatttattaaaccaatgcccaacctatcaaaaattatggaatgattatagtcacactattcattggcaattaatccaggagaataataatgattaa

SEQ ID NO: 290243 - DNA, 135 bp, Morganella morganii; identical to SEQ ID NO: 34870

SEQ ID NO: 290244 - DNA, 162 bp, Morganella morganii
gtggaacagaaagacactgaatttgaagaactgattaagccggtgatgaagttcctggctgaaaatcaccacccgcacaccagcatcacagtgaccagtaacagcgcagagatgcttgagtcagtgcagtgcgttgctactgacgaatacctgaaagactaa

SEQ ID NO: 290245 - DNA, 441 bp, Morganella morganii; identical to SEQ ID NO: 278110

SEQ ID NO: 290246 - DNA, 441 bp, Morganella morganii
atgacgttatcagcacttccgctgcaggagcccgcagccatcaaaagcaatctggttcatccccgcggcagagatacattctggcggttttatttcggcagcgtgccggactggcagcgcctggaaggcgacatttttaagatgatggataatctgtgtgaaatgtatcacggtgcattctgggagttcagcatgctcaccaacggcggcgcatttatctggcctgacatgattgaaacgtcactcccgatggttaacccgcataacggcaatgacgcggaactgagccctgaagcggcaggtatcgcggtatgcctcatcacttacagtctctggtcatttaaaaccgaaagtccggagatggtggagtatttttatcagttgcgggactacgccctgcagcatgaggagtgtgccgctattttccgtcttatcgattaa

SEQ ID NO: 290247 - DNA, 354 bp, Morganella morganii
atgaataaatatcgtgacaaatcagactttgagattaataaagaggtcgtgaaattaataaaaactaaaggcggttattcgtgcgttgatcacgatgaaattgtgaaggtatatgtatcacaaaataccggcatatataaagagttcgacccctgcaatgacccgtatgacgcaatgccgattgttattgagaatcgcatcagtatcgaaagccgcttcaacggccattacgatgaatggtatgccagtctacagaccaacaaaatactcatagatgctaccggcacaaattattacagggtggctatggaagtattcctgatgatgaaggatgcggagaatgagaaaatatga

SEQ ID NO: 290248 - DNA, 195 bp, Morganella morganii
atgaaacttaaggttggtgataaagtaaggtatgcaaacaatatacatgattatagagggatattcagtattggcgatgaactaacaattataaaaataataaaccttaatccagacatgtacatgtgcatcaaagataaccctgaaatatacgaaggattcgatagggaagaattggagttagtcaatgaataa

SEQ ID NO: 290249 - DNA, 582 bp, Morganella morganii
atggatttatcaaaaacaattatcccgaaatcggatcagcttaatttcgaagatgtgcaaagccagccaattactgcggtaattaaatctgtccgcgagggctccaaagaccagccggtgtttattgaccttgtcggttatgatgccaggccttataagccgtccaaatcaatgcgccgagttcttatcggtggttggggaaataacggtcacgagtgggttgggaagtcgctaacgcttgttggtgacccctccgttaagttcggcggcgttgctgttggcggaataaaggttcaggccatgagtgatgttgaggctgatttttcaatgatgctgtcagtctctcgcggcaagcgcgttgagcaccgagtgaaaaaactggacgttaaatcacctgaaaaagcgcaaaaatcaaattacgaattgttgtcagattttactgccaaggtaggcgaaatggaatctgagcaattcgaaaaatcataccagtggctgaaaaataaatttactggtgacacagaaaacacggaaaagttggatgtcgtgtaccagagccataaagccgatatgcaaagccaataa

SEQ ID NO: 290250 - DNA, 825 bp, Morganella morganii
atggaaacgggaatttattgtgggcttagtaacgaggactatcacaaggatgaagcgataggttctacgtcaataaaggcgatcagcgtcagccctgcaaatctgtatttcaacccatttaaaggaagtaaatcggcgcagattggcacggcaattcacgcggcattactggagccgcatatatttgaacgtgatttcattttgctgccagacgtcaaggatcggcgctcggcagaatacaaggacgcattaaaactgacggatgctgaaaagatactggtgaacggtgaggttgaaacaatacaaaggatgattgaatcgaccagcctgaacaacgatttcactgattacatggcaacacccgggcaatctgaaatatctatgttcgccacctgccctgaaacgggactgaaattaaagtgccggtttgacaggatgtcagactcttacccttacccgcttgatgtaaaaagttgcatggatgcaacagagcgcgggttcagtcaggctttcgggaaatatcactatcatgtgcaagctgcattttatttgtacgtgctgaaattagtcacaggaagagacttaaatcagttctgctttttcgccattcagaataagccgccgtacaccaactgcatgtattacatcggcgaggactcgctggagctgggaagaaaggtaatgttcgaatctctgcgcacaataaaacagtgcattgatggcgacataccgaaaaccgaaggaatggttttgccatccagtgaaataaacgtgccctcttatcttttcgatgatgaatatcttgatgacgaggtgtatctctaa

SEQ ID NO: 290251 - DNA, 237 bp, Morganella morganii
atgaacgcatacgcagcacaggatgctcaggaagagcggcggctggaacatgcagcatggcaggatgccgtgtcatgcgaatttgatgagttcacacaggacgtgatattcgaaatcagcacagacacgctggagtacctaggtactgaaagggaaagcgaaatcagggaggcaatcggcaaagtattaagaaaacggagcaagcagcatggaaacgggaatttattgtgggcttag

SEQ ID NO: 290252 - DNA, 141 bp, Morganella morganii
atgaaagttgaattaagtgaacgcgaagcaaagttaatcaccgcgttactccgtgaatatgtgaatgaagatattaacggagacaacgaaacagcagagtccgcaatagagaagattaagacagcttcactggctgactaa

SEQ ID NO: 290253 - DNA, 504 bp, Morganella morganii
atgccgattggtaccgcatggaatatcactaaagatatcgcgaatttaggtaagcgtattttcgataaaaaagttgatgatgaagtcagaaaagaagttcaggaaatgattgataaatcatcagaattatacgacagaatcgtaatgcttgaggatgacagacaatctaacagacaggttatttctgacttgcagaaaaaaatcaagagcgccaaaaattttaatcgtgagcttaaaaagtacgaaccacaaaaacttgactctggttcttttgtttatgcttataactccggacttcatacagataagccctctcactacatatgtgcaaagtgcgtagcagactctgtaatatcgatacttcagccgaatgccaacaaaatagctagcggtggatattatctttatacctgctacaactgcggcaatgattttaagatgaataaaacgccctccattgatattaagttcccagacagtattgccggggtagttaagtattga

SEQ ID NO: 290254 - DNA, 216 bp, Morganella morganii
atgaaagataaggaattatgccctgtgtgcggtgaaggatatctgcacccaagacaggaagaagttgaaatcgaatacaagtccgagaagcacttagtcaataccaaatttcatacatgcgatgagtgtgattgtgatatcggaaccgaggaagacatgtcgtttaataagcaggctgtgattgatcttcggcgtgattgtgattctcgccggtga

SEQ ID NO: 290255 - DNA, 675 bp, Morganella morganii
atgaacaaaaaaactacagcttcgcaattgttaaaaactctctttgtggcttcttttttattttccgctggatgttcaatcattaagccacctagtgaagcagagcagtacgctaagatggcagatgataaattcaaggggcggaatggtagcgtcaacagcgtaaaaacactacagcaggatttctttaagataactaattcccaacttcctcagccatataccgaaagctgtaaactcgactctgaatgctattacaaccgatgggctaacgtatatgagtatcatttaaaggaaataaaagaagaaaaacagaagaaagcagagcaggaaaaagccgaaaaggagtggaacgcttgtttgaaagaccctgcgtgcatagggccaaagagaattgcagatgcgacccatgacctgaatatggcctaccagatattaatggctaactatcgttacgaacagggggctattgatatgctgatccgtcaatcctgcaaagttggcggcaaacaccagagaatgaaattaagcaaacagcaaacagctgactggattaactcagcagaaggaataccgccgttagccagaaaatatatgttagaggcggcagaggcgtgctgggagatgagccggtacggagtcccggacggtacggttaaaataagaaatatgtaa

SEQ ID NO: 290256 - DNA, 423 bp, Morganella morganii
atgaaatacagctattttaaagatgaagtaaataacctggtatacgcctacgatgaaaatcaaatgtcatttattgataagattaatgcgcctgattttgatggaaaagacgaaattccagccgtatatttcgagattgatgaaaaaataaaatcgatgaagccgatgtctgacaaggagtactggctgcacatcaatccgccgatgaccaaagagcagttgacagccgaggcagaagccaaaaaacaggcactaattgccgaggccaaccagaaaacccagctctggcagactcaacttatgctggatatcatcactgacgaagataaagccagcctcaaagaatggatgctgtatgcgcagaaggtacaggcggtagacgtatcctctgctcctgatatcgactggccggtgaagccttaa

SEQ ID NO: 290257 - DNA, 1635 bp, Morganella morganii
atgccagagcctattttcaatttcaaaaactatcctattatcttcattggttctggcatatcaaaaagatatattgagaattttcctgcatgggaaggtttgctagaagaatattggaaagtaataaataaaacagatgatttctatagttatcttttagacttaaagaaaaaacattctaataatggcgatgacgctgatcttaatcataaaatttatactgaagcagcatcttttatagaggaaaaatacaataatttattttcatcaggagatataaaacttgatggattgacaacaaagaaagtatttaacgataatatatccccatttaaatattctatttgccagagatttgaaaagctagttctaagagatgatattgacttaaacgaatatgaatcatttaaatcattattaaaaaaagcaaaaatgatagtcactacaaattatgattgcttcatagaaaacattctacatgaacagaatgtgaaacctagaaaatatattggtaatgaaggtttttttgatgatactgttggatggagtgagctatataaaatacacggtgacgttgagaaccctcactcgataataataaataaagatgattatgatgagtacgataaaaaatccatactgattagtgcgaaaattttatcaaacatgataaaaagtccaataatatttatggggtactcactatcagatagaaacgtaaaaaaactattatcagatttttcatctcagttaccaaaggaagatggcagagtttcgtctgaaagaatcatactagttgaatacaaaaaagatgaaaaatcagttctaaaacaacagacaacagatcagttgctccatataacttacacttctatatctactgataactacaagcaagtttatgatgacatttgcttagttgatgagggtttatccccttatgatgttttgcgctaccaaagagcgataaaaaatctcattatcaacgaaggtgaaaaaggaaacttagacaacctacttgtaaccccatcagacctagataaattagaggaaagtgtcagaaaacataaaaaccttgttgttgccctaggtgataaaaaatttgtattcacacatataaatgaagatgactacataactgattatataaaggaaaataatgagatatcaataaaaccagcaattgatttcattattgagaaaccatttccaacaagaattccattttctaaatttattaacaattgcgattttagcaagttagacctcagtaagtcatgcatagataaactaaatgagagaattaatacccatggctctttggatggagtaattaattcaatcaaactagacaagttttattctaaaatgaaattctcatccataagtgagatacaaagtaaacaacttgttaaatataaagagataatggttataacgaagaatataaaaaacttagacaaggctgagttaaaaaaattcattagatcagaggctttgcatctatttaaaacaacgactaagagcatggaaaagacagaaattagaagactgtttttagcttatgatttgttaatcaatggagaaatactcaatacaataacatacatagagaaaaaggccgctattttataa

SEQ ID NO: 290258 - DNA, 1422 bp, Morganella morganii
gtgggctcggagatgtgtataagagacaggctaatatctgaaccaaaaaacaaaaatggatatgtataccttgtcagtcttgggaaatctcatttttatcttagtaaatatattgataaagaatttggtataaatctggcaataagaatggccgatgagagtacagtacttttaaagaaaagctcatatttatcaagcacaaaaaaatcagatatatcatcatatgaaaaattcattgtagatagctatgaaccaggagaatctgtcgaccatttaaaattaaaagcgaaagataaagaaatatggggagatagaaatataattttttctgattcagtccaattaagttcagataacactcctaagaatatagattctattctatctaacatagatgatgctatatcaggaaaaagccatatatcattgcctaggtataagataataacagatagagaactagtatcttctttagataaaaagttactagaagacattaagaatggctcatctaaaataagtttagtggaatttgaaagttatggagataatatattatttataaatgaatgtaacaaacataccctatttacaagaaagggtatagaaaaacacgataataaaaatattatcaacaattatatagatattgatgaaataatagtatatataaaaaacctagatgacaacattgatttaatggatattaggatatcactatactatgatgatactgcacaacgaactgtattattaaaaaatttacttgaaacttctcttcacaaagataactcagaatattttttaagaaatggaacatggtgtacattcaatgaaacatttagtgaatatttaaaaaaatcactggaaaaaataattaccgaaaaaaaagatgatcttatagaacaagattatattttatggaaaacaaaaaaagaaatagaaataaaaaatgaaacttcaagtgataaaatcacttaccgagaatattatttcaacacattaatgtcagatatatataaatatgagctattagatagaaaaaatgtaagtatcaagtcaataacaaaaggaaacaaaaattataaaattgaaattgccgacctttataaagataaagaaataatatccgtaaaaatatccagtgataccaacgaattaatttacaacatacagcaatcaataacatcgtttgaactttatgcaaaaaaagaaattaaaaacaaaacaataaatacagtctcattatggtttgcttttccccaaaaaataaataatgaaacaaaaatcacttgtatcaattcaatacaatttctattagccatagagcattggaaaaaaagagttgaaagctatgggttacttccaaaaatatatctttcagagcataaagaaaaacctaataacgaaaaacctaattaa

SEQ ID NO: 290259 - DNA, 234 bp, Morganella morganii
atgaatttatcccgcactgctgtaataccgggtatcgtcggtctgagcatcagcttttccgctgtaacggtggcggaagagaaaggattaagtccgctggaacaatgctatcagtccacggacaaaaattgcaggctgcctgggtgcaaaactgaatgccgcaaatacccggctgaatacgattctggcacagcaaaaacaggaaattgcatcactccattcagccggaagtga

SEQ ID NO: 290260 - DNA, 255 bp, Morganella morganii
gtggaaaaactgctgcaccttaaatggattaccccgttaagcaccagactggccgcgatgccaaatgccgtaattgaccagctcaccagccgggtacaggcccttgctgataaatacgccgtcacttattcacaggttgccgctgaaataaaaaccaccgggcaggaactggcggagatgatgagtgaattaacgggcaatgagtttgatctgcagggcctgagcgaactcacccgcttattaaagggcgaataa

SEQ ID NO: 290261 - DNA, 543 bp, Morganella morganii
atgctggaaaatccccataaatatacaccatttgctttaaatattggaataaaaacagcaaatggagaatacatagcacgaatagatgcacatgctgaatacccaaaagattaccttgaggtattactgaaatattcgatagaactagatgctgacaatattggaacagtaattgaaacgttaccttgtgatacaaagagtacttcaaaaattatatcattttcactaagtcataaatttggtgttggaaattctctattcagagttgggtcaaatgatataagaaaagttgatacggtaccatttggtttttttaaaaaagtagttttcgaaaaaattggttattatgatgagtcactgctaagaaatgaagatgatgaattcaatggtagaatgattaaaaatcagctatctatatatctaattccttttataaaaataaaatattacccgagaaactcatattcaaaactatcatcaatgatgtatcaatatggtttgtataaatatttgggatcttgttttcactatttagcaacataa

SEQ ID NO: 290262 - DNA, 318 bp, Morganella morganii
atgagccgtagcgagagcagaaaaacagacgatcgaatccaggtgagatgttccacagaagtgaaagctaaactcaccgaaaaggcccatgaagcagggcttagtcttagtcaatatcttatcaaatctgggcttggaaagcgcattcaatcgaaaggtaattacaatgcacttgccgctcttgtaaagataacagcccttcaaaaacatctgtttaacgaaggtgccggggttcatagcaaggagtattcagagattctgatcgaggtcaaaaaggccgcacagaaactgcaacaggagatggatggtgatacctaa

SEQ ID NO: 290263 - DNA, 1284 bp, Morganella morganii
atgaatactgataactattttttcagagtcccggccacacgcggaatacagggcggcatagaacaatacatgctgacggttcctatggtcgtgttacgtcgtattctcgcaatggacaatgatggcgatgttatggatcgcagccagcgagaagcgaacaaaacgcgggccaaaaaaatacggaattatgttgccggcgcaacatcaaaacgagctccctatattttgccgtcaattaccggaaatattgatagtcatgttgaattccttcccagcgaactctcgccggcagtcggtattcttaaaattccgatggacgctgatttaaaattattcgatggccagcaccgtgcgctgggtatttttgaatttgtacgcgattattccaacacggaagatacgatcagcttattgcttaccgttggcctgccacttgagttacgccagcagtttttcgctgatattaataacaacgcgagcaaaccggcagcggcgatcagtatggcatataacaacaatgatccggtcaaccagctggcaatgcatctggcccgaaccgtcaccgggctggcgggcacagtggattttgaacacaacgtggtcccggcaaaaagctcacggcttatcagctttaaagcgctgaacgatgcgacgaaaaaaatgctcaacctgcgggccaacagcattccctcgccgcaacagcgtgatatggcagaaagactctggactgcctgggcgcaggcgatgcgctggaatgatattgcccaggatgatatcgccgcggagtaccgtcaggaggcgctgggactgcatggcatcatgattaatgcgatcggtatggcaacggccaggatgttacggcacagaacccctgaaagcatcgagaacctactggcctgtgcggaaaacggtgacaacggttttcattaccgggagtcgtttgtacctgagtgctgggaagggaagtgtgttgatccggagacaggcaccatcaaaaccgacaggcgggcgctcgaagcaacggctgaagcgttgcaaaagctgatagatccgttcgcagatgcgctgtggttgcgtgattacctgccagctgaggaggcgagtgatatggcattactgaaatatgcagccgacatcgagaattataagcagcgtactgccgcgccgatgatcaatatcgtggagaagctgaaggcgctgggtgacggcgaaccgcagttcagagcgtcggtgctggcttcccgtgaggggctaagccgctatctggccggagctgaaggctga

SEQ ID NO: 290264 - DNA, 249 bp, Morganella morganii; identical to SEQ ID NO: 95965

SEQ ID NO: 290265 - DNA, 462 bp, Morganella morganii; identical to SEQ ID NO: 95961

SEQ ID NO: 290266 - DNA, 477 bp, Morganella morganii; identical to SEQ ID NO: 30061

SEQ ID NO: 290267 - DNA, 705 bp, Morganella morganii; identical to SEQ ID NO: 8686

SEQ ID NO: 290268 - DNA, 681 bp, Morganella morganii; identical to SEQ ID NO: 30073

SEQ ID NO: 290269 - DNA, 633 bp, Morganella morganii; identical to SEQ ID NO: 30074

SEQ ID NO: 290270 - DNA, 903 bp, Morganella morganii; identical to SEQ ID NO: 30075

SEQ ID NO: 290271 - DNA, 762 bp, Morganella morganii; identical to SEQ ID NO: 49919

SEQ ID NO: 290272 - DNA, 861 bp, Morganella morganii; identical to SEQ ID NO: 49918

SEQ ID NO: 290273 - DNA, 705 bp, Morganella morganii; identical to SEQ ID NO: 8686

SEQ ID NO: 290274 - DNA, 585 bp, Morganella morganii; identical to SEQ ID NO: 30057

SEQ ID NO: 290275 - DNA, 159 bp, Morganella morganii; identical to SEQ ID NO: 30058

SEQ ID NO: 290276 - DNA, 345 bp, Morganella morganii; identical to SEQ ID NO: 30059

SEQ ID NO: 290277 - DNA, 639 bp, Morganella morganii
atgttatacatggctttatgcagttttatgatgatcctggcgctaagtgagatgttccgcacgatgacggcgatcggcaatggcagtttcgccggcaaccgcttcataccgctcgccttagttctgttaacgctggcgctggcatcacctttctttgccacattttatacgctgagccggcctgtttcgatggatgcactctccaggctgtccgttggtgcgcagtgggcaggtatcgccgccgccattctgctgtgcatcttgtatggctatcgtgcctggaaaaacggccgtttctggtataccggtgcggccattgcctcagtggtgattgccgttatttttgccaacagcctgcttttcgtgtccaggcccgatgccggcatcgtggccacttttgtgctgaataacgatgacagtaatgacgtgcagtgcgaccgttcggtactgctggttcattacaacaaaggaacccccacggagtggcgctgcccgaccggtatcatgttcatgtctgatgcgtcaaaaccctttcttccgtggccggattatcacggcgggcggagtcagcatctgacggcggcactggatctgctcacagacaacgccctgcgccttgacctaagccagaaaccataa

SEQ ID NO: 290278 - DNA, 321 bp, Morganella morganii
atgaataacatgcaaagtaaagccccctcgatgcggctctccggtgtgcaaaaagacgtattgtttgttctgtatggtctggcagaacgtcagctggcaggcccgttcccggcgatgcagcttttcagcatcctcaataagggacgcctccagcccgttgccgataccaattttcgtcgctcctgccatacgctgaaccgccacggcctgctcagcaaataccgggataatcagtcactgacgctcgcgtttgggctgacagaggcaggcctggagatcgccagagaggtttatcacaaacgcctgacggagatggaataa

SEQ ID NO: 290279 - DNA, 849 bp, Morganella morganii
atgaagaatgatgagctggccacacgacgcgctgaggcgatagccggcgatcggtgcttcacgaaagggcgcctgcgcgatgaattcagaatgaagccggctcccggtgctgagccggtgaaatggtacaaaagcgcctatggcggcaagtacgccgtataccgcattgcagactgtgttccgatgcgggaaaaacggccgccgactgagaagcagcagcaggccggcctgcgtctttccgtcctgtcccggcttaacagcaccagtggccggatggcacagcgggcacacgactggctgagtcaggcgccgctctttctggataccgaaacgacggggctgggtaataccgcggaagcgctggaaatcggcctgaccgatgcggccggccgggtgatatttgaaacccgcctgaagccgacggtcgccatcgaggcgcaggccgccgccgtgcatggtatcgatgagccggcactcagcggcgcaccatcctggccagatgtggcgctgcagctgcgccacgccatcggggcccggccagtgattatctttaacgccccctttgatacccgcattctgaaacagacggccgccgcacatggcgatccggccgactggctgggagaactgacagtgtattgcgcgatggagctggcagcagggtattttggggccaccaatcgctatggcaccatttcgctggccagcgcggccagtcaggcagcattgacctgggaaggggaggcacactcggcgatagccgatgcacggatgacggccggggtggtgaacgccattgccgcataccatctggcattgctgcaggagcaggaacggctgcaggcctga

SEQ ID NO: 290280 - DNA, 249 bp, Morganella morganii
atgctgtgggaggaagtagtgaacagagttactgagcgccaggaacagaagagtaacccggagttccagagagagtaccggaaccgtatccgggaaacacacgaccagttaaacctttatctccccaaagatgcaaaaagaatgttgatagagatcacaaaagttaaaaaactcactcaggctgaagttattgaatttcttgtcaaaagctattatgacggattgaaatttgacgattcggaagagtga

SEQ ID NO: 290281 - DNA, 267 bp, Morganella morganii
atggccggtaaacaggttatctgtctcggagatacgactgaccacggcggtgtggtcatctccgcgttggataattacactgtcaacggccgcccggtggcaacggagggggattcagtctcctgcccaaaatgcaaaggtgtctttcagattgcttccggttcttcccttatgacctttcagggtaaaaaaattgccctggagggcttgaaaaccacctgtggcgccacactgattgcgtcgcagtcattaatggtatcagagtaa

SEQ ID NO: 290282 - DNA, 705 bp, Morganella morganii
atgcagaacctgattgagcaattattggaatcagaaggattgacacgtaacttcaccacaaacttggccttatacgaatataatacatcgggtaagaaaaatttctggttattagtttttggtgagccgatcattacccctgaaatccaagctgagtggctgaatgagtgtaaaaaagcaacatccgatcctgcgcttgagaaaaatattaatttattgattgtatggaatactgacacctccaatgtactttctagtaaaagagttcatcatgcggaggaagatagctacttcttcaagaagcatgtgcttccatatacgactgtagaacttgaagctttatatcagcaggttgctattcaggggatttcggtagtctttcgtgaattaataacttcaccaaccatttttaccgaatataaatctcattatctacaaggtggatggcaaagtctgttgtacaggcttgcaataaaattgccttttatcgcagttaatagtttcggtaactctgatttggatagtcttgaacgaagtattgatgaaaagattcaacgtacggataaccctgctctactagttgcagtcgactcagttattgactctttagctgatcagatcgtatctcaggatgtattaccggaagagttattggatatcatgggtgagaaattatctgaggcaggctatgaaattgatcgttaa

SEQ ID NO: 290283 - DNA, 267 bp, Morganella morganii; identical to SEQ ID NO: 288899

SEQ ID NO: 290284 - DNA, 435 bp, Morganella morganii
atgcttccatatgagaaatttgatcagtcagatttcgtggatagtttttataaaaatgaacaagaccaaaatatttccgcattagagcgagtcaaacaatggtttgactctgaaaatgaacctctttttgttataagcggacatggtggtattggtaaaaccacaattgctaaacaatttcttgattttgtctatgaaacacataagagtggtgttttatttattgattctaaagaaattataaatgaattatctagaaagtttagttcaaaaaacaaaatatgtgatgtgtatgatttctatactgcattgatggattctgatgatgctgaggattcaagattcaacagagaattgctcaaactttcaatcgacaacggaagtttaataattgcattagatgggattgctggaatgatgtccgccgcagtttaa

SEQ ID NO: 290285 - DNA, 1476 bp, Morganella morganii
atgacgaacgatataaaagaaaaaaacaaactacttaagttagcaagcttattaaaattattttctaataaattttcggattattatgaaattaaaaaaggggttgtgatacgaccaaatcctagtgatgagttagaatatccaccaatactaattgccagtgtttgtgaattattagatggatacagcagcaaattggcatatttgagtgaatttgaaaaggaattggcattagaggcagatttactttcaggtattgttgatgattgtgaaattgctgggaaaatgattgatgagataattgcgaaagagactaatgatgaagactctacatataagttgataagtagcttcttgatttggttaaatactataggtttgcaaattgataattttatttcacttgatttgattgataaaaaagaacttatccctagtatcctaaagaaaaggataattttttatgaaaaattaattggtggtttagaaagcaaagttgatggtatagaatcgaaagttgagacaattaataatgcccataaagcagcgattgatttaccagtgttacttaatgatttagaagagggggataaaaagttacatgaattaaggagtaagtcagaagagaataatgactatattaataatttaaaggggaagatggaagcttatcacaacaactgtgaggaaaagaataaaattatcgaaggcaaatttcggtcgttaaatgaagatatttcagtctacttaaaaaaatataaagaagaagctgaaggttatatatctaaatgtgaggatgcgtacagaacaactacatcaagtgggttggcaaaagcctttgaagacaaagcaaataaacttaataaaagtataaataattgggtcaaaatattaatattatctttgatatttgccgcagcagttggattttttagattaactagtttggaaacaacattagcggataaagatactccgttttttactatattggtacaaatcttgttatctgcattgagtttggggataccattatggctggcatggttggcaacaaaacaaatagggcaacgatttagactggcggaggattatgaatataaatctgcagtatcaaaagcatatgagggctatcgtagagaagcagtggatctaaatgaaaaatttgaagataatttccctgcacgtttatttgataatgcattaactcggttagaagagccaccagtaagatttgtagatgatgcaatatattcatctccaattatggagtttttaaatagcgaaaaagtacgttcttttgttaaaagaaatcctgaaaaaacacaggatgctattgatgcaataagtagagcaagggatgaaggtgaaaaggacaaggagaaaaaagataataaagagaaaggtaataaagagaaagatagaaatttagatgatggtgataataaagaaaaagatgatgaagataatgaataa

SEQ ID NO: 290286 - DNA, 978 bp, Morganella morganii
atggctactcacgatagaaaagcttgtagtgcttacctcacccttgtggcttcgccaatatcaaatacaatagcagcgagtattactaaagatgataaagccactgtagaaacattgagacgtagtcatttctatatgatctgtggaagacctaaagcatatttttctgaagttacaccattaaaaaatgggttcattgcgattcaaatagcacttgattctggcaccttatcttctggatttattcatataccaaaaatgaatttttttcaaaatacaccaaataaatttgatattaaactcaagtgtaaaaataatgtcctatgtatatacttaggagacgacattgtttttgctgccacgccagatgatttgttagtgatgcgtggaagaaaagagagtgtagtggttgggtttaataattatctggaaatgatgacctttgatttactttacgtaggaatagctaaaaataatcaagatagctatagtagattgttcgaaagaggtcacaaagcacgtatggaaattttagcagcagaagcgcagcgtataccgggtgcacgagttagtgatgaaacatacctgctgttattcagaatagagccgattactataaccacttttagtgactctagtgattttgatgatgacgatataaacttttcaattgactatcatagaatagttgcagatgcagaaaaagctgttattagtacatttaagccaaaatacaataagcaactttattcaaaatatccaagtggaattgatgggttgtacaaacagggctacaatggttattcatatgcaattgctgaaggaatggcgtttaatacagcttatggaacaataaaaggtgctagggattctaaagatattcttttttcaaatgatgccgattttatttttgtagaaggtgatgaagttacccttaatatttcaggagtggattttaacattgaatccgatatctag

SEQ ID NO: 290287 - DNA, 1536 bp, Morganella morganii
atgacattagttaccaaaatggcagcagaggaagccagaagttttttcttgaaacacaacagttattgcagttttccacttcctatttactttgactttgcacctcttttgaatgctgtgagtgatgcacttgatcagaagcagagcggcattaatgatattggctacaaaaattcatgccattatgaaaacgtaaactatattttgcaaacaaacaaagacggtcattattcttggcgaccgttcgatttgattcaccctgctatttatactcatctcgttcataaaataacccaaaaagatgaatggggtcttctggttgcgagatttaatgagtttcaaataaatgaaaaaatagtgtgtgcaagtctgccaagagaatctaaaaatgatgatatctctgatactgcagagactctgtcgggatggtggcgagatgtcgaacaagaatctatcaacaacgctcttcagtttaaatatctgttcactacggatattgcaaatttctacccatcgatttatacccactctattccttgggcaattcataccaaagaaaaatcaaaggaggtaagacacgataatgcaaatattggaaaccgaatagatcataccttacgtcaaatgcgttggggtcagacaaatggtattcctcaaggttctgcacttatggacttcattgcagaaataatccttggttatgtcgatgatctgctaggacagaagcttaaaaaagagggtattgatgactatcatattattagataccgcgatgactatagaatatttacaaatagcaaggaggtcgcggaagcaatagcgagatatcttactgttattctgcaaaaattaggattacagcttaatgcatctaaaacttctctttctgaagatataattctaagctcaatgaagcctgacaagcgagaagctttaatgttcttcggaaacagtgttaatgctacgactattcaaaagacgcttttgaagcttgttattttctcccgtaaacataagaattcaggtcaactcgaaaaatatcttgctacgataaataagcgcttagaacgcatgaaaaaattgaaagaggatgttcaaccgatcgttagcattattgctgatattatgattaataatccacgcacattttcgtcttgtgcattggtactaagtaatgtactaaaattcgtagaagatgatgatgagaagctaaagttgttagaacaggttaaatctaaatttgaacctatcttaggcactgggattttagatatctggctacaacgtatctcttatcacattgacagagacatagaatataaagagattctttgctctatcgtatctggtgtgcacgataaaccacatgagcatgtttggaattcggagtggatcactgataaaaattttaaaaatagagtgatggcgaccccatttattgatgtcgaaaagctcgaaggctgcgagccaataatacctgaagatgaagttgtgctctatccttatgatagtgattatgaggaagatgacgagtag

SEQ ID NO: 290288 - DNA, 480 bp, Morganella morganii
atgactgtcaacgttaaccgcactgtcactccggctgtgcgcgataataatactttccctgcggcggtatatgccgcaaaaacaccagacgaaacattagcagaattacattctgatatgctggggctggatgaaattgatgcccttgaccgcctgatagaacatcaggaaaacgtggtggcacatgacaaagcacctcccgcgtttattcagtttatttccgcatttcataatccgtttatttatgtgttgctggcgctggccgttatcagctttatgacggattacctgatccccctgcaacagggcgaggaaacggatctcaccggtgtactgatcatcggaacgatggtttttctgagtgtggtactgcgtttctggcaggagtacagaaccaacaaagccgcagaagctctgaaaccactgccacagtactccggcgtaaaaaaggacgatctgtccgggcagaactgccggtaa

SEQ ID NO: 290289 - DNA, 519 bp, Morganella morganii
atgagtgtaccgcaaacgaaagctgaactgcttttagctattgataaaaattttagcaaattaattcgttacctcaacgcaattccacctgaatttacttcagataactcaatggatggacatgccaaaggaacggatatgagtgttcgtgacctcgtttcatatctaatcggatggaatgctcttgttgcaaaatggatcacttatgatgctaaaggtctgcctgtcgactttccggaaacaggctataaatggaatcagcttggccttcttgctcaaaaattttactcagattacagcgagttaagttataaatcgttagtagctgaacttcacactgtaaaaaatgaagttgtgaagcttattgatgagcgtactgatgatgttttgtatggaagaccatggtacacaaaatggacgatggggagaatgatctcatttaacacatcttcaccttacgccaacgctaacggaagattaagaaaatgggcaaaaaataacaatatcagtttaaagtaa

SEQ ID NO: 290290 - DNA, 600 bp, Morganella morganii
atgaaaaaattgctaattaccttaacctttatcttatttcctgtggtcagcctttcagctgaatgtgaaattgagaatctactgttgtgtcataatgccgataaaggtgacgctacagcacaaactattttggctggatactatcaggatggctatgaagttaaacaggattatcagaaggctatattttggtatcaaaaagcagcagaacaagggaatacttttgctcaggggtcattaggaagtttttattataatggttatggcgtagaaaaagattataagaaatccttttattggtttaaaaagggtgcagaacaaggagacccaaaactacaggcaaccattggcctttggtatcatgaaggacatggtgatataaaaataaactaccaaaaagcagcttactggtatcaaaaagctgctgaccaaggccacattaaatcccaattatctttggcagaaatgtatgaatcaggtacaggtgtcaaacaggataaaaaactagcaaaagagctattcaatactgtatgtaactcagaactccatttaggttgcgaggattaccaacgcttaaataatcaaagcagaactgattaa

SEQ ID NO: 290291 - DNA, 192 bp, Morganella morganii
atgcagaaaagcataaagaaacagactaaccgctactttaacggcgcaccgataaccagactgatagtcaccagtgagcagtccgtcattgacgcagtagacagccacattaaacgcggcaggtgtacgtggggcaattatgctgagttcgtcagacagacaatcattgagaagctggggcgcgaactttga

SEQ ID NO: 290292 - DNA, 261 bp, Morganella morganii
gtgataaaggattctaaagcggaggcactggaggaagcaggattatattacagagcagcgcgacggtggctggaggtgttcgaccgctgtcaggatgaacgcagccggagttatgcagtatatcagcgtgaaagatgccttactctggcaggtaatccggcagagacaagtgcacggcgcaaacgggaatacaaagccccgtcaccgcctgtagtaatagcggaggcagaccatgcagaaaagcataaagaaacagactaa

SEQ ID NO: 290293 - DNA, 189 bp, Morganella morganii
atgagtaagccccttccgttagacgccgccacctacaaagcgcagcaggccagttcgctgttttcagtcattctggaacaggcggcaaatgaatgctccagcgaattattagacctcatttctatcgtttgtgacctgaacggtgaaatctggcaatcactcagttatgtgacaggagtaaagcgatga

SEQ ID NO: 290294 - DNA, 834 bp, Morganella morganii
atggcattgcctgaacgatcttattattcactggaacaagcatcccaaaaagtaggttgtgaaattgatgatttatttcactttgcatcgaggggaatattacaattttgtgtgtttataagtatgactgcggatgaatgttggcctacatgttatactgattcagatgttagtgatgaattattggacaaattatctagcaataaagaaaactataagacattagattatgtaactgatttatgctccatttctgaagatgccacttattttctcctatctaaagaaaatgaaaatgaatgtgactctaaaattcttaattgccatggttggtttgctattaaccatactgaattattgtcgccagattttgaaaaaaaacgatctgctaatattgtttatttacatccgcctagagaatgccgcgatgggaaaagaaaaattgagatagcatgtacagatggatatgagccgggtagtatcatattttatcagtctcagttatttggtgttgatgatttttatattttagctgatgagttaaatatactattaaatggtggggagaatatattttcttttggattgaataaaaaaacgccaactatggagaaggttgggcagaaaactagtaattctcaagcgaagttaataaaatcattgctatatcttttgtataaggactttgatcttatagagaatccaagaagctatattgataatccaaaaagtgaaatttgtacagactttgaaagtttgggcttagcattgccatcaggtaaaacaatagagaaatggcttaaagatattgatattgatatacatagggaatag

SEQ ID NO: 290295 - DNA, 156 bp, Morganella morganii
atgaaggattatttgaaattgtcagatgttcagtttgatcgtcttcaacacagcacacagccgttcggccggatccgcctgaaatcacagttcgggtgtatgggattatccattgaccgggtcactttcgcactgatagccaacagtcagctctga

SEQ ID NO: 290296 - DNA, 162 bp, Morganella morganii
atgaaaaagtatgacttaattctcgcagacccaccctggcaatataacaacaaagcatccaacggcgcagcagataaccactacaacaccaccgatttttattccctcacccgcttacccatcgaaaaaacagcctcagacaactccgtactctgcatgtga

SEQ ID NO: 290297 - DNA, 396 bp, Morganella morganii
atgaacaaatatcgtgacaaatcagactttgagattaataaggctgtggctgttttaaccggagccgttcctttccctataggaactaccgaattcagaccgtcgtcagtcagtggaatggagagcgccataatagttaaatcaccgcgtaaggttggtgctttcgacccatgtaacaacccagcggacgcaatgcagattgttattgagaataaaataacggtcgcgtatgacaaattgtatgaaacctggtgtgctcatgtagggtctgtaatgggtgatggtgattgggattattctattgaaccagcaataaaccattgcgacgataattattatcgcgcggctatgatttgtttcctgctaatgaaggatgcggataatgaaaaagtatga

SEQ ID NO: 290298 - DNA, 639 bp, Morganella morganii
atgtcattggaaataacagctttaccgattgcagccttaattacatctacagtagctgtgtcattatttgtattcaaagaaggattggaaatctggaaaaaaagcaaggaaaagaaagcaaagataaatgctataagggatatagcagctagagaggcgtttaatataacaagagaaattgagttatttattcaactaaaaagcatgttaaatggctcaaaagatgttgtatttattgaatctcatggcggcgaatggatacaattttgttttaattatgaatcaggttcgcgttttgtgttcatccctaaatactcaacgatgtttaaccacttatttttggttgaatcagcaaaggcttcgcaagagttatctaatttactgcataatttaaatgtggcgatatttaatatttccatggttagggattcttgtataggatacgtaaaaaacaaggactataaagaatttaatgacgctattgattttatactagggatagaatctgatgatggtaacgatatggtcttatcgttcctaccaacaatagataagtttaaggtggaaatggaaaagtttaatgggtttaatgatatttactcaaccttgaattctcactatagaccaaaatccgaataa

SEQ ID NO: 290299 - DNA, 348 bp, Morganella morganii
atgtcacgatacatagttaagaaaaaatcctttatcaatggccgcctgctttatctgggtgaggaaattgagttcgacggcatggccggaagtaacctgtttctgattgaaaccggtgagcgtggaacggcgaatgaaggtaccaatggcggtgacgataatcacgatggcggtgccaacggtgatagcggctccggtgttcttggtggcgatgccagtgccagtactgaattaaccgcattgcaggatcagtaccagcagttgtttggtaagaagccgcatcacaatgccggtgccgaaaaactccgcgcagatattgacgcgaaacgtaaagagcttggggtttaa

SEQ ID NO: 290300 - DNA, 426 bp, Morganella morganii
atgaactacttatattccccaaaaactaattccttttatgcaaccagcctcagtgatgaatacgatagcgccgggactcttcctgatgatgcctttaccgtggacgactcaatttatatcgaatattcgcgcaagtcgcccgccggtaaagttcgtgtagcagataagaatggtttacctgtatggggagatattcccccactgacagatgaagaactcatcactgtggccgaagcggaaaagcagatgttgattattgaagttaacaccgaaacagaaatgctccgagcaaaactggctcttggccgcatcaaggatgatgaaaaggcgcggttaaacgcctggctggattatctggatgaattggaggcagtggacgtatccaccgccccggatattatcttgccggtgaagccggtggtatag

SEQ ID NO: 290301 - DNA, 642 bp, Morganella morganii
atggctatgattgccggggcgcttttccctgatgtaaaaaatgagcctcagtcctcacaggaacagcagacgggaaaggtaccggctaaaccagcagagactgtatcggtcgaatctgcacaacaggctaccaatgctcagacatctgttgatagtgatctgtgcaaatcagattacaaaactgcacttgatgcattcaccgatctcggtgattactatgctgataataattcattggaaattatcagtgaagccccacttcatatacggctttctaatttagcagtacagggcgatcaccctgatgttaaagaattgatggtaaaacgcgccgttatttatgggatatatcggtctttcattcatacaaataaggatgaagtgacagttacctcatacctcattgacatgaacaataagaaaaaattacccggctcaccagaatacagtgtgaaaataaccaaaaaacaggctctggatatcataaaaaaatatattccggtgcaggattacagcgatttaattgctaaggatggctatggttgttctttctctgaagattttaaccgggtcagatttaacgatcagaatgaaaatgagtttaacgcgttctttagtgacttatcatccgcaaacaaataa

SEQ ID NO: 290302 - DNA, 126 bp, Morganella morganii
atgtaccaagacacctacattgaatactggggcgaaatcttcgtctctgcccgcatcattgaatttggcatcacgtttgagcgctttcttaaagatccatggaagcatttgatgtcctgtggttaa

SEQ ID NO: 290303 - DNA, 888 bp, Morganella morganii
gtgcaagacaacactggacttgaagagcttagccaagcacagagagaacgactcgctcatattgatttcactttgttatttaaaggtgaagctgggcggagttatttaaccgagcgctttagcgtagcgccgtctgtggcaacacaagattttgcgcggtacaaagcgttggctcctaacaacgttatgtatgacgaaaagcgcagagtgcacttgaagacgagcacattccagccgttgtttgattatgacattgttcgaacgcttgcgacgataagccaagggttcggtgatggctttcttggcaaggttaggccacctatggcttgtgaagcaccatttcatctcaataagccgaaattggaagtggtagcggcgattagtgaagccatacataaacgcgcggtgattaatattgagtacacctcattgtcgagtggtcatgggagcaggcaaatagttcctcataccttgattgacaatggcttgagatggcatgtccgagcattcgatagaaagcatagagaatttagggattttgtgttaaccagaataagtgaagttgagttgttagaagatgaggttaacgacgaagttgagactcttcagtgggataagcaatggaaccgaatcgttgaactagagctgatacctcatccaaaactagcacatccagaagctgtattgatagactacgcaatggaaaacaataggttgcgtgtagagataagagctgcgttcgctggatatttactgcgtttatggaatatcgattgttcaaagaatagcaagagcaatgggcgagagttccatttagcacttaaaaatccagaagcactatacggcgttgacaatgctgcactcgctcctggatatagcgaatcgtga

SEQ ID NO: 290304 - DNA, 600 bp, Morganella morganii; identical to SEQ ID NO: 36618

SEQ ID NO: 290305 - DNA, 483 bp, Morganella morganii
gtgcgccgggtcgccgaaaagtttgccttactggccagcgcaggcctgttagccattcaagccaaagtactcgattggccagctcaaagtgtcgaagccgcttgtttaagcctgcttaaccaatggatactcgcccgcggtggtgtggccgccaatgaagaccaacaagccattcgccaagtacgcagttttattgagcaacatggcgaaagccgctttacgcccaaacaaaccggttacagcagccaagtactccaacgcgccgattggcttgactctacaggcctacaaaccctttacctgttttacccaaccggctggcgcgaagccaccgaaggcctaagcccagatcgcgccgccaaagcactgatggccgcaggctaccttgtccccgatggcaaccgaccacagcgcaaagtcagcctagccgacaacacccgcccacgcatgtattgtgttaaaggcagcatcttggatgactaa

SEQ ID NO: 290306 - DNA, 201 bp, Morganella morganii
atgactgataccgttctgacaattaaagaagtagctgagtatttgaaggtaaatgagagaactgtttaccgtctagcagcggcacataaaattcctgcttttaaagttggcaatgcttggcgctttaaacaatccgatcttgaagaatggatcagtacgcaagcagctcaaggaaaaggggtgttggatggtaataactga

SEQ ID NO: 290307 - DNA, 2850 bp, Morganella morganii
atggtaataactgattatcaagcaaaatactttgcgcaggaattaaccattcgccacgctgaaaatggcgttgataaattgtctcaatctctttttgatgccagtgttgatctcaatccgcaccaaattcatgcggcactttttgcgctcaacaacccgttaagcaaaggtgttgtactcgctgatgaagtgggcttagggaaaactattgaagcaggcttagtactgtcacagtattgggcagagcgtaaacgccgcatattgatcatctgcccggcgtcattgcgacgccagtgggcgcaggaattgggcgataagtttaatttaccaacgcaagtgcttgatgcaaaaacgtggcgcattagtgttaacaatggtcaaactaacccgctagctaatcactgcgtttctattatgtcctatcactatgctgcgagaatggaaacgcagctaacgctagagccatgggatattgtcgtcatcgacgaagcgcacaagctacgtaatgcacatcgtagcagcaataaaataggtcaaacgctacgccgcgcattagatggcagtaaaaagctattacttactgcaacacccttacaaaactcgctcatggaattgtatggactttcaaccattatcgacgatcaaatcttcggcgatgagcgaagcttcaaacaacactttgtcaataacgaaagtgcgctagggcatttaaagaaacgacttaccgggtttattcagcgtaccttgcgcaaagatgtactcgaatacgtccgctatacccaacgtcaaacactcaccgtaccgtttacaccctcttatgctgagatggcactttacgaaagtattagtgccttattggaaaaggacgagagctatgcactacccaagagccaacgtcatttaaccggccttatactgagaaagctattagcatctagttcgcacgcagtgctcaacacactcgaaactataaagcgccgattggttgacttgaaagtacaggctaaatcggacctcgatattatcagtgagcttgttgagagtgatgatttaggagaagagtacagcgagtatgtagaagaaacacaaagcaatacccctgagagtgatattgactttgagttactcaatgctgaaatagccgagcttgagcattatatcgagcaggctaaatccattaccaccgacagtaaaacccaagccttgctaacggcgcttaatcaagggtttgccaaaatggaggagatgggtgcgccgcgtaaagtcattatttttaccgaatcgaagcgcacgcaagaatacttagctcgtttcctcgaggcgaatggctttgctgataaattagtcacttttagtggcagcaataaccatccagaagcaaccaaagtttatcagcagtggttagctgaaaaccaaggtagtgataaggttagtggttcaccgcaaattgaccgccgtaccgccctaattgattacttccgccatcatgccgaagttatgatcgcaaccgaagcggctgcagaaggggttaacttacagttctgttcgttactgattaactatgacttaccatggaacccacaacgggtagaacaacgtattggccgttgtcaccgctatgggcagcaatttgacgtggtggtcatcaacttcctcaactctcgtaatcaggcagaccagcgtgtgctggaattgctcaccgaaaagttcaacttgttttctggcgtgtttggtgcaagcgatgaggtgctaggacgcattgaaggcggcctcgacttcgagaagcgcatcctccagatctacgacacctgccgccagcccgatcagatcgaagctgccttcaacgcgctgcaagaggagctggaggaggtcatcgttgaccgtattaaagacacgcagtccgagctactggagcacttcgacgaagacgttcgcgaccgtctcaagctgcgattggatgaggccgaagcccgactcgacaaattaggccgctggttttggggtgtcacccgctacgcattaagcgagcgggcacgtttcgacgagcattcctatgccttctctctaagcacgccgccagctggagttgccacagggcgctatcaactcatccgtggggcggcacagccggacatgctggcacacgcctaccgcctcagccacccgctgggggagtggtgtattgaagccagccttaatgcggttacgcccgtcgccaccctgaagctcgactatggtaaacacggtgcacgcgtctctgtgatcgaggaactgcgcggcaagtccggctggctgatgttggctcgactggaggtgacggccttcgagaccaccgaggcactgttgttctccggcctccttgacgatggccagatactggatcaggagacctgcgaaaagctgatggccattccagccgcaggcaaacccacgcagttgaatgttcctgtgcccgagacactgctggctaacaaccaacgtgccatccaggccaccatcgcgcaagtgttggacgccaatcagcgcctgttcaatgaagagcgtgacaagttggaacgctgggccgacgacaagctgctggccgcagaggaagccttgaagaacaccaaggcacgcatcgctcagttgaagcgcgacgcgcgtaaggcagccactctgcaggagcaggacggcatccagcgtgaactgtcagagctggaacgcaaacagcgtcgacaaagacaagaggtttttgatgttgaggacgagatcatcgccaagcgcgacgagctgatcgcctcactgcagcagcgcttgcaagaaaaaacaagcaacgagactctgttcagcgtgcgctggcaggtaatctaa

SEQ ID NO: 290308 - DNA, 2043 bp, Morganella morganii
atgacgaccaacacttcagataatactaacattggcttaggttacagccctgatgcactggcagagcgcaaggcagagttacttaacctgctaggtcaagtcgcgcctgagttactctctgataatcagttaaatctcgacaagcttaaagatctgcttgctggcgatattgctgacccccaagagcactatgagttgaactgggctggcaaagcggccgcccgccgcgaaattcaaaaaactacctccagcaccttactgcctgacccaaataatcccgcacaagcccaacacatgctaattgaaggtgaaaaccttgaagtgctgcgtgtgctgcaaaaaagctattatggcaaggtcaagatgatttatatcgacccaccgtacaatacaggtaacgatagctttgtctatcctgatgattattccgaaacccttgatgaatatcttaagcgtacgggcgagaagaacgaagacggctatctaaataagcaaagcctatggaaaaagaacagcaaagaaagtggccaatatcatagtgcctggctgtcgatgatgtatccgcgtttgtatttggcacgcaatttattgcgtgatgatggcgtaatttttatacatatagatgagaacgagtataaaaatttagagcatttgatgtgcgaaatttttggcgatgaaaataaccttggtactgtgatttgggataaaagaaatcccaagggggattcaaccaaggttgctcaacagcacgaatatttggtggtttttagtaagaattattccaattttaaagaaacctcaactatccatagagttaaagaaaatgctgagcaaatgattgctgtggttgaaaaattgatttcgaagtacgggagtgtttgcgacgaagtccgtgatgaatataaacaatggattaaagacaatgaagataaactaagtggaggggaaaaagcctattcgttgattgatgatagtggtgaaatttatcagccagtatcaatggcttggcctaataataaaacagcacccgacgattattttgttccgttaattcatcctgctacaggcaaggcttgtccagttccagaaaaaggatggcgcaatccctcagcaacaatgaaaaaacttttagatagtaatgagatagtttttggcgctgatgaaacaactcaaccgagaagaaaatatctactcaaagaaaacttatacgaaaatttgccatccttactttattttggcggtagcgatgatgcattgcacaaacagctcggcatacataattattttgagaaccctaagccaatcaaagtttctgaaaaattaatttcctcggtttgcaaggctgacgacatcattttcgacttcttcgcaggctctggcaccactgctcacgccgttatggaactcaatgcagaagacggcggcaaccgtcaatccatttctgtacaaatgcctgaattattagaggaaaaatctgaagcctataaagcaggttattgcaccattgccgatattacccgcgcccgtattgaaaaagttattgccaaattaaaagctgaaaagcctgagcaaacccaagacttagcctgtgcccatttcaagctggcaccgagcaattttaaagtctggcgcagtgacttggcggatgtggacgcagtgcgcagtcagttggagatatttcagcaagccgaaaagagtgttacgcctaacgtacataaagacgacagtgatcaacaagccatgctcaccgagctgctacttaaaaacggtctaggtgcattaggcgtgcacgccattagtaaacctaaactacttgccaacggcatgactattcatcgtgtactgatgaatgatgatcgcttgttgtggctgtgctttgatgcctaccaacagggctttaaagatgaagtgatcaccgccaatccagcccaagtcattatgctcaactcctgctttaacacggtgggtgaaaaagctgacgagtacatcagcaatctgcaattagagctgcaacattacggcattggcttgttgattatttaa

SEQ ID NO: 290309 - DNA, 2787 bp, Morganella morganii
atggcgcaagaaatgaaactgcaatttgtgcagcaagactaccaaactacggcagtgaatgcagtggtacaggtgtttgatggccagccgttggcacaaagtgatttttcgcttgccagccttcatgccagcacaagtgttgaatacgccagcgatggcagtattggcaaccgcttgttgttaagcgacgaacagttgctggctaatgtccaaaaagtgcagcaagctaataatttaacgatctctagggagctgattggctctaaggccgataaaggtaaagaaattttttgcccttataacttcagtatcgagatggaaacgggcacgggtaaaacctatacctttattaaaaccatgtacgagctgaataaacagtacggttttaaaaagtttgtggtggtggtgcccaatgtagcgattcgtgaaggcacgatgaaaaaccttgaagtgactaaagcgcattttgctgagcagtacgccaacacgcccttggtaccaattttatacgacagcagtaaactcaccgagctgcgccattttgctcagagcgatgctttgagcgtgctggtgattaacattgatagctttactaaagacaacaataaaattaaccaaaaaggcgaacgcgcctttgcgccgattgaatacattaaggccgtcaatcccattgtgatcgtcgatgaaccgcaaaactttgaaaccgatattcgacgcaaagccttagcccagcttaacccgctatgcacactacgttattctgccacccataaaaacccttataacctgctgtattcgttaaaccccgtgcaagcctacgacttgggcttggtgaaacaaatcgaggtggacggggtgctggctgatgctaaccataacgaggcttttattgaactgcttagtatcgagcaaaaagccaaaagcattactgccaaagtgcgtatcgacgtgaacgaaaaaaatgaggtgaaacgcaaagatatcaccttaaaactgggcgatgacctctatgaaaaatcaaagcagcgagagcagtatcaatcaggctatgtactcaatgaatttttaagcgatagcgaaattgagttttccggtggtcgggtgctgcggcttaatgagcagcatggcgggctggctgatgacgccatgcgctatcaaattgagcgtaccgtggccgcgcactttgccaagctggcgaagttaaaacctttgggcattaaagtgctcagcttattttttatcgataaggtggcgaattatcgcagctttgacagtaagggcaatgctgagcctggtaagtttgcgctgtggtttgaggcagcctttaacaaatatgctgccatgccgcgttatcaaggtttaattcctcatgcggtaaacgaagtgcacaacggttatttttcgggggataaaaaaacaatacacacgccttttgagacgttaaagatgcgctctaatgccaccgtagctgatgtcgagggcggtgcatatgccctaatcatgaaggagaaagagcgcttattaagcctggacgaaccattgcagtttatttttagccattcggcgctgcgtgaaggctgggacaaccccaatgtgtttcaaatttgcaccttaaatgaaacgcaaagcgcgatgaaaaaacgccaagaaataggtcgtggtttacgcctgccggtaaaccaacaaggcgagcgtgtgcaagataaacagattaacgtgcttaccgtaatacctaacgaaagttacgaagcctttgctaaagccttgcaagcagaaattgaagatgaaaccggcgtgaagtttgaaaaacgcattaaaaatgcccgagctaaagcgcgggtaagcaagcgagcattaaacagcgaagaacaagtactgtttaatgctatttggcaaaaaattaattatcaaacccgctatagagtgaggctgaatacaacagagctagtggataagtgtgtggagctattggctgataaaacgcagttcccaacagtgcaagcgcctaaaattcgctcagctaaagccaaaatattgatgaataacgaaggcgtacaaacggtacaaagtggcattagcgatgtgcaagctgctagctatcagtccaacaacgtgcccgatgtgtacggctacttacaaaaccgcctgcatttaactcgttcaacactgtttagcattctagataaaagcggtcgcttagatgaactactgattaatccgcaagccttcttagacttatgtgttagtgctattaaccgctgtttacaggaactgatggtaagcggcatcgaataccaaaaaatcaacggtgcaagctatgccatgcagttgtttgatgaagcctttgaaacctaccaaagcagtctgtaccctccagctaacgatgcgctagcggtgccacttgctaaaaccgctttgcaggcccagccgttagatagtgacatgcagccagcaggtaatacttatgcttgcgtgccaagtgacagcgacaccgaaagccagtttgccaaagattgttcattggatgagcgcgtgcgttttttctttaaactacccagtaaatttaaaatccccacgcctttgggggattacaaccccgactgggcagtggtatttgaaaatgacgagcgggtgtattttgtcgctgaaactaaatccagtaccgtagaggccgaccgtcgctctgacgaaaatctgaaaattaaatgcggcgaaaagcattttgatttagctgcgaacgatggagtcgagtacaaagtagtgaccaagttggcggagctggtatag

SEQ ID NO: 290310 - DNA, 390 bp, Morganella morganii
atggtagtcatcagttttgatcggcctcttgttcattttgagttgtcaggtgggcaagcccatgatgtgagttatgcagaaacattggttacctcttcaccggaagccgaagttgttattgcagataaaggctatgactgtgaagccttacgacagttgataaaaagccgtcggggtcagcatgtcatcccaagaaaagggaatagtaaacaagggaataaagatattgattggtgcttatatcgatatcgtcatttagttgaaaatgccttcttaaaattaaagaaataccgagcagtggcgactcggtatgacaaattagcccgaaattatgaaagtgttgttgctttagcattttcaatcatgtggctcccaatgtgggtcgattga

SEQ ID NO: 290311 - DNA, 1512 bp, Morganella morganii
  misc_feature (1498)..(1507): n is a, c, g, or t
atggtgcatgtttctcgttcccttcgtttcgaggctccagattggaaggcacaacttgctcgtttttgccttatgctggaggaagtttttcctaatttcccaccaggggtgatagtggttgcggatgaaccacatgtcgcttaccaactaaaaaataaactttgggaattaaattataaacgcgagaaagcgaatcagtggcatacacctcacgagtacattatttcaggtattccgagcacaataagtggtgatggcttgggcatggatgatacttatgaacccgagcatcctgcatcacgtgaatttatcattcatatagtagacgctgatattgcaaaagtcgcagataaactcctacatattgctagcactataccaggtggaaaaaagataggtaaacctctcattgaggcatcttcattcctttgtcgtctagccgcattaccctgtggtattcgacatatgtcggagtatctatctggttctgaaatatctgataggacgcgaattgcctttgactggcttcattatttaggtgctattaatgagtttgagcgtaatattggggttggagataaacgaccacttcttaatgattgcttggcgcgaggaactcagttatttggtaaatactatgaggctactccttttgctcgtaaactggctgatcttatctcaagtattgagacccgtaagaaaaatagagtagtcatagtatttacaaatgtattatatcggcggttggctgagcattttctttctgaatatgatgattatcctgaaggagtcacttataaatccttttatgaacgtatagatttattgtcagcagttcatctagaggaaaacctaaatggcctaaagggagccacacttatatttgcagggttaaatgaaaattgcttacgtttagtcctgaccgatgatcgaattcctcatcattcagtaatcctcttgactcagcaagctggcaagtttctacgtgctacactcaaacctattattgagcgaatgcctgagtttaaatcttacaaacccagaatggaatctatcttacgacagttacatgatttacccgaagatgcttcggttctttctactggcagttatacgttgcccacttttcgtgtcgaattgtcatcagatgtaccgattaacaaccaagaaattactcctagttcttgggctatccagctcgataacggagagagacaatatcgttatgaaacatctgaagtatatgtatatgagcctacttcaacatatgcatcggatacgggatttagagtatgccaagttcgttcgcttgaggccggagacaaagtttttatcatgtctgtcgaaatgcgtgagatggttgaacaagttttatcagacgcaggagtatcaatctactctgacaagaccttcgaatcagcgctgagaagttatcacgaacagatacaaaagcgtcttaatctgcgcttcgggcaagacaaacatacagataagattnnnnnnnnnngataa

SEQ ID NO: 290312 - DNA, 399 bp, Morganella morganii
atgcttgtgcttgctcctcaattgaaaagttatttacccagtttacaggctatgcgtcattggattgatcttgatcattcgtccgaaacacctttcgatcagcttcgtccacaagccccgatgcgtgaagacgtttttaaagcgtttgcacaagtgcttggatttacatcactggagattgcttaccagtggcagcgggttatcatacctatacgcaacactcgcaggctggatggccgccatgtaactgatatatatgcatacatgcttttacaaccagaatcagctatgtgtaacgcaaatattaaacgacaaactttggctagattgtttaatcaggcgcgcgcgaacgtagccactattgagcgtgtttaccctcttaaggaatttcagaaatga

SEQ ID NO: 290313 - DNA, 174 bp, Morganella morganii
atgggcaaaggtatcggctttattctgattgataaacagctcaccgccctgttttacggtgataccatcatccggcatctgctcattcagcgtgatatcggtattgcgcagttcaaaacggccttcctcaacattgagtttttcaaaaccgtcaattttactgctgttttgtaa

SEQ ID NO: 290314 - DNA, 531 bp, Morganella morganii
gtggctatccgtacctttcagtgtcagcatatcctgcccgccgcctgctgtcagtttaccgaacagggcatcactttgtgcttcagtaacattttgcagaatcacattattctgaccattaccgacaatcccgttcaccaattccgtgccgccgttcagcgtgatggtattattcccgtgacccgtcatcagtgtgtcagtctgagccgtatccttcatttcaatcgtgttattaccgttaccggccgacaatgttccggttttcgcgctgccgcgcatcgtcgcggtattgtcgccgtgaccggtgataagctcgctggttgtaccgctcagatcaatcctgttggtgccgttgcccagtatggattttccgctgatagtcccgctgttgccgaagctgatattgctgttctgacccgcatcaaccgcgatgccgttttttatatccgccgcaataatttcgccgctgttggcgaagctgaacgcatttttcagcgcggtcagatccaccacactgtggtcggacgctga

SEQ ID NO: 290315 - DNA, 762 bp, Morganella morganii
atgccgagacttatgttaacagatgatagctggaagttactatcaaaaatcatgcacctaaccggacgtatttataacaaaccagaacatagaatgacccttgaaggtattttattccgaataagaacaggcattccatggcgcgatttacctcgtcaatttggtgaatggaatacggtatttagacgttttaacctttggtcaaagaaaggcgtgatgatggaaattttccaatttctatctcgcttcaatgatcctcagtggctatttattgatgccagtatcgtgaaaacgcatcaagatggagccaacgttaaagatgcttcaaagcaggctataggcaaaagtcgaggcggcaactcaactaaaatacatttagcggtagatagcagtggtcttccggttcattttgagttgtcaggtgggcaagcccatgatgtgagttatgcagaaacattggttacctcttcaccggaagccgaagttgttattgcagataaaggctatgactgtgaagccttacgacagttgataaaaagccgtcggggtcagcatgtcatcccaagaaaagggaatagtaaacaagggaataaagatattgattggtgcttatatcgatatcgtcatttagttgaaaatgccttcttaaaattaaagaaataccgagcagtggcgactcggtatgacaaattagcccgaaattatgaaagtgttgttgctttagcattttcaatcatgtggctcccaatgtgggtcgattga

SEQ ID NO: 290316 - DNA, 357 bp, Morganella morganii
atgaacaaatatcgtgacaaatcagactttgagattaataaggctgtggctattgaaatgtttgggttgaatagagttatcgagaaaggtgattcaatttacatcgatgaatgtgattgcggtgccatgttcagtttcgacccatgcaacaatccggcggacgcattccctctaattatcgatgtgaaattatcaattcatcctgatttttataacgactgtgagtcatgggttgtcagaactgtgcatattccgcctgtaaaagataaaagtccgacaagggctatttgcattgcttacttaatgatgaaggatacggagaatgaaaaagtgggcggaagcgtagaaattaaatga

SEQ ID NO: 290317 - DNA, 363 bp, Morganella morganii
atgaataaatatcgtgacaaatcagactttgagattaataaagaggtcgtgaaattaataaaaactaaaggaggctattcgtgcgttgattacgatgaaattgtgaaggtatatgtatcacaaaataccggcatatataaagagttcgacccctgcaatgacccatatgacgcaatgccgattattattgagcataagatatgcatggcctatgacgtattcgcggaagagcacgatggtgggagttgggtggcgcaacctgcatatggcttttctgatgagcgggtgagaagcgacaattactatcgcgcggctataatttgtttcctgatgatgaaggatgcggagaatgaaaaaagttga

SEQ ID NO: 290318 - DNA, 540 bp, Morganella morganii
atgaaagctgactacggcgggagcacaacaccaaaggaattgcgtgatttatggcaaactcccctcccgttattctcagcactggacgctgaattcggtttttaccttgatgccgccgccgataaaaataataccctctgctctcattatctcaccgaaaaagacaacgcattaaactccgactggcaaagctacggctcaatatggtgcaacccaccgtatagcgacatacagccgtgggtacgaaaagctgccgaacagtgcgggaagcaactgcagccggtcgtgatgctggttccggcagatacatccgtgggatggtttaaatcggcactggataccgttgatgaggtcaggtttattaccggtggccggatatcgtttattaacgccggcacaaacaaaccggtgaacggaaacaacaaaggttcgatgcttttaatctggcgaccgttcgcccagccacgccggataattaccacagttaaccgtgatgacctgatggatatcggcaaccggttactggaagcacaaatctga

SEQ ID NO: 290319 - DNA, 1143 bp, Morganella morganii
atgaaatattgcatatattgtcgggaagaaaagaatgataaagagtttagcttagagcatgttattccccagtttctgggtggagcatatgctcccgactttctgaaaacgcgaaatgtgtgcaaaaactgtaacagtaaccttgggttatttgttgatgcgtctttcgagaaaaattggttggtttcaaactggctacgaatggcctcctccgcattttatgataagaataatccggtgggtgtctctctctcatgtatgggcaacaccgaactttgtcctcccgaacttccagaaggctatgtctgtgaaatgtggttagggccgcatggtgaacaggtgttttggcttcgtccacacgatgagagattgtttgcttacgtgggcggaaatcctcgcacaatgaagagcattgagacaagagcgtattttttattttccgaaaatacgccgaaagatccgtacaaaacatggctatcatttgagcaagcatttcgcggccggaaggttaaaaaggttctttgtggtgaggctattggcgttgatccggctgatattggatttgcacagcctgatgcgttggatgaagtacgtaaagagtttttcataagcaatgctataaatatgcaaagacgagaagtgcaggtcccagttaacacgagatttgatcagcgtttcatgtgcaagcttgcaatcagtatcgctttttgccttttcggacataaagtccttgattcagcctatagcaaagaattatacaaagggctttggtatcgcaaaggcgatgataatccagagattcatggttgctcgttcttcaccaaggaaagtgattcggacttcaatcgtcttgtgggatttcctaatacagtaaccctcatgctgcttgcaactccagatggtatctcactcaacctaaatataaatccacaactaaattggactattctatgtgcatccaatgaaactttaacgacagatgatattgcaaagattggtgaggggaaaatcctactacttgtgcgtgctcttcagactggcatctatcttgacctacctttttacctcgcctgtaagtgtgggaacgactccgatccaagactgaataacatactagagcggtccgagataagtaaaaaatga

SEQ ID NO: 290320 - DNA, 1461 bp, Morganella morganii
atgtttataaaatcattaactattgaaaactacaaaggctatcatggaagccatgacataaacttaaatattcctgacggaattacggaggggagtggccttaatctttttgttggtgagaacaactcaggaaaatccactatttttgaggcttttgattttataaaagacagtacaaaaaaaaatccagaatcattagttaacaaatccatacccacatccaatattaatgaattctctgttaaagtcacctacacaggaaatatatcagatgcagttaacagtcatatacaacaaaataaaatcactccatttcttaatgcaatatatactcttgatggaaatgaagccttcacagttaaacgatcgtggaataacactactcccgaagatataaaaaaaatatacttctggaatcatacagaaagaaaacactcaaacccttctggaatagatgccccatttaagaaattttatgataacaacttcatatgggctgatacaaaccctaatgatgaatctaaatttggagcatcaactatctgtggagctctattgaaagaaatagctcttagccacactagcacattagaataccaaacgtttcgagaaagttatcataatttattcaacaacccagcatctgaattaagagataaaatatcagagatagagaatatgattaatgatattttttccttacaattcggagtagccgacatatcattttcatttgaagaactacaaatagaaaattttttcaaaacagctagcattgttattgatgatggtgtatccgtacctatgaatgaaaagggacacggaatgcaacgagcagtagctttatctttgttacaagtttatgccaacttaacatctagtgcaacaaatactcctgtatcaaagcctttttatttatttatagatgagccagagatatgtcttcaccctgctggacaaaaaaaattattagatgcattgatgaccatatcaaaaacaaaacaaattttcatcacaacacactcaccttttatgctttcctctccaaatctaaaaaacaccggcctttttattttaaataaaaataataatgaaaattatatttctaaagccaatacatcaccaatgtttccatggagtccatcttggggcgaaattagctatagagcatataatttagctactgtagagttacacaatgagctctatggctatttacaagaaaaaaataatttaaaaaatattcccgccattgacaactggctaaataacaatggaatcatatctaacaaactatggactcgtgaaaaaaatggcattccatgtcaaccgtgccaaacaacattacaatccttcattagaaatcatatacatcacccagaaaatatcacaatgaaaagcaatagatataccgaaatagagctaaagcaatctattgatgaaatgctcagatttatctaa

SEQ ID NO: 290321 - DNA, 1152 bp, Morganella morganii
atggaaaacaataaagagaaaatttttaacaatattaaaaacctatctaatacattggacgtagtcactgaagaacgttttttatcgcttcttgaaaatcaattggcagattataaaaataagtttcttggaaaggaattatataaaggtataagtaaagtagttaaattagttaacagcaagagagtcattgaagtatgtaatttatcaataaatgatgaggatactattcatggagatgattttgattttattatttggtcatatatatcatttgttaaaatattaattgaatacaagtactatataccagagtcaaaagaatccgtagatattatattagagattgaaaaatttaatggattcaatgagctgtttaatggtttttataatgaaaaatattatatttattatctatcagtaaagaattattttattcatagagttataagtaatgacatttcaatattgaagtcaaataagaatagtaatatagaaaataaggtgttggagttagattcgttgtatgacaatctatcagagaaggtttacgcactttatagtgaagaagagtcatttattgaaagattcaaagaaaaactagatacagaaagcaaaatcctggaaagtgagatttttgaaaaaatcaatgatgtcaaagcattagagagctcggtgaggaacatgagtgataatttgacatttattggtcttgaaaatgcgtatggggatctaaaggaaataaaaactaaagaaaaatcaagtgcattttcatttttattgatatctatagtttgtgtttttttaccaataatgacaaaaggtttattttatttatttggtgtaaaatataatttatatggatatactcttacagcaacaacgacattgatatttatatattttttcagggttgcgttattacattataactccataaaaaccgaactaacacaaataaatctaagacgaaatttgtgtatgtttatcaatgggtatattgatttttctaaaagaaatgaaaatcatcaatcattatctaaatttgaaaacttaattttttcaaatattataccggatgataagaatgtaccatcttctcttgatggaatagagcaattggcgaatttaattaatgccttgaaacgataa

SEQ ID NO: 290322 - DNA, 504 bp, Morganella morganii
atgtcacaaaaatatcaccacggcgtgcgcgttattgagcacaataagggtacccggccaatccgcaccgtcagcacggctgttatcggcatggtctgcacctcagatgatgccgacgatgacgtatttccgcaggataaacccgttttactgacggatatccggcatgctattggtaaggccggtagtaccggaacgctggcgcattctcttcaggctattctcgatcagacaaatccgcttactgttgttgttcgtgttaacgcaggcataagtgaagcagtaacgacggcaaacattatcggcggtacctcaatcaccgggcaaaaaacagggatgcaggctctgcttaccgccaaacagcataccggcgttaaaccccgtattctcggtgccccgggtcatgataatcagtcagtcacatcaaaattggtcacggttgcacaaacattgcgtggtttatccagatattcggcggcgttgacagcccgctgcgcgatatag

SEQ ID NO: 290323 - DNA, 2130 bp, Morganella morganii
atgtccaggttgactgatttaatagctaaagcgcaagccaaagatccgcaactggccgctgatcttgatcgagaaatcaagatcctgtcgtcacgtctcccctttgggcttaattttgaacgacatagccatgaagttgttgagttgccattgcggcctattcgcaagggagataaagtccgcatcctgccaaagcgtgggtccactaagaaaagtgatcagcggctgtggcagattaaaaccatccacaaggtgaagaaggtcgctgatctcgtgttgctggatgcagctgatgtcgagactcagactgtagagctgagtaaccttgtagttatagctgaatttcgtgacacgatctggccgggtatggtcagtacgggaaaagtgcagcgcggtggtgataagcctttccactcagtcatcaatggcgaaaactatcatgtgctgaaagcgttgacctatacccatcgaggtaaggttgatgtaatttatattgaccctccgtataactcgggggcaaaggactggaaatataacaacgattacgttgaaggtgacgatctttaccggcacagcaagtggctttctatgatggaacggcgcttggaggtggccagggtattactaaaccccgctgactcggtattgatcgtgacaatcgacgagaaagaatatctgcgacttgggttattgctggagcaaattttcccagaagcaacgatccaaatgataagtagcgtgatcaatcctaaaggttctgcacggacgggcagatttagtcgagttgatgaatacatttattatgttttctttggtgacgctaaggtcgttccttggtgtactgacatgcttagagaagtaagtgagaatggacggagtgtacgttgggctggattgatgcgaaatggagaaggaagtcgaaggtctcgaattccttcgatgtttttcccaatcttcatagataaggaaacgggtgattatcattcgacaggagaaccccctccggtggatatgaaacccagtgatgtgcctgttcctgaggggactgtagcaatttttcctatcgatggaaatggccaagaactgatgtggcgtttaagcccaagctcgttcagagagtatttgagcattggacatgcaaagtttggcccgcgaaataaaaaaactgggttgcgttcggtttcttaccttcagtcaggtattcgacaaatgatcaagagcggtgagattatagccactggtcgtaatagtgagggggctcttgagttagagttcgcggattcagtcgggacaaggagcccaggaactctttggaatatggtttctcatagcgcaagtgagcatggtgctgggcttttgaagcgaatgattccaggacgacgctttccgtacccgaaatctctttatgcggttgaggattgtcttagatttgtgctctcaaaaaaagaaaacgcagtcgtggtcgatttttttagtggctccggaacaacagcccacgcagtaatgcgcttgaaccgtcaggacggtggacgtcgtcaatgcatcagcattaccaacaatgaagttggtgccgatgagcagaagaagcttagagagcagggcttacgccccggagatcccgaatgggaaaaatggggtatctgtgactacatcaccaagccgcgaatacaggcagccatcacaggtaagactcctgagagcgaaccaattaaaggcgaatacaagtttaccgacatattcccaatgtctgaagggttcgaggaaaacgccgagttcttcaccctaacctacgaagctgagaagtcggttagccataacctagcctatgcacgcattgcacccttgctgtggctacgcgcgggcgcacgcggcaatcgtattgagaaactgcctgctgaaggatgggcagtaactgatacttatggccttctatcggctgtggatcaggccacacctttcattgaagccattagccacgccagtgacgtgcgagtggcctttatcgttactgacgatgatcgccacttccaggctgtcaccagacgtctgccaaaaggtattgagccagtacgtttgtacgaatcgtacctgaccaatttcagcttcaccagtggggaattaacagaatga

SEQ ID NO: 290324 - DNA, 246 bp, Morganella morganii
atgggtgatatcggcaaagtacaggatatcgctgtctgtccggtaaggacgctgaccggcggccagccggtatccgccctgatacggctctgtgtccagaaagaccagacgctcactgaaatcacgctgcagtgtgcgggccgagacattaaactcacgggcgagctgtgccggatacagtgtttcgccgcggaacaggcggctgataatgatggccagccggaatgcaagccggtcatggcgtga

SEQ ID NO: 290325 - DNA, 246 bp, Morganella morganii
atgggtgatatcggcaaagtacaggatatcgctgtctgtccggtacgggcgctgaccggcggccagccggtatccgccctgatacggctcagtgtccagaaagaccaggcgctcactgaaatcccgctgcagtgtgcgggccgagacattaaactcacgggcgagctgtgccggatacagtgtttcgccgcggaacaggcggctgataatcatggccagccggaacgcaagccggtcatggcgtga

SEQ ID NO: 290326 - DNA, 429 bp, Morganella morganii
atgaacgtgaatccggatacgccgttggatctgtatgaccagaatgtactggctcagatgatgaatggcattatccggcaggaatcagacgcacagccgtacacttatcaggaaatgatggcttctattgacgatgcggtgaacagcccgaggtgggcggggctccggcatccggataaactggaagcacagcgtgagcggtgggccgctgaaaacgcagtcccggatataccggcaataaatcatcccgcacagccggatactcagcaaattgtggatgctttgtccaaagctatccgggaatccctgaccgccgggcaggaaagtatcccgattgaaattacctttatcaaccaggaaaccggaacccgtcagacggtgaacacgaaaccgaaaggacgggtaactacggcaatgaattatcagtaa

SEQ ID NO: 290327 - DNA, 402 bp, Morganella morganii
gtggttaaaacagcccatgttaaactactattttcatctgtatttttactttttttggctggctatggtatatacttatcaataactcattatctgaattattttttaatgaaggataagatagagttctcattcctgaccggaatgtttggttttggttcccccttgattatttactttgcatatttcggatttattttatcccatcatataaaaccaacaaaaaaaacaataaccaccgcaaaatacctggtaggaatagcgatagccggtatgatttttagtttatttttttcaggttatgtaaacgttaatctaacctcaaaaggttatctgacctgcgataaaaaatccatattctctccaaatgaatatgttatttcaaaaagtatgtgcaaataa

SEQ ID NO: 290328 - DNA, 213 bp, Morganella morganii
atgtctgtttttaaattaatggccaccacgctcggcgtggcaacggtggcgttagccacgtactgtgcctggcaggctgcggctgaggcggcagacaaagaggatgccaccgcagcggaaaagctggcggccgggctcagtgcggcgctggcctgctcagccgcgctgggcggtacccttgaccgcctgctgggtcggctctttccccgctga

SEQ ID NO: 290329 - DNA, 1203 bp, Morganella morganii
atgagtgagctgagttatctggaaaagctgctggatggggctgaggttgagtggatgacgctaggtaatgaaggcgttgttgaaattgctaatagtggacgaaagccagtaaaagcttcaatgcgtacaacaggtaaagttccctattacggtgcaaataatattcaggattatgttgatggttatactcatgatggagagttcgttctaatagcagaggacggttcggctagcctggataattattctattcagtacgtaacgggaaaattttgggcaaacaaccatgtccatgtagtgcggggtaaggggagactcaactctcgctttctataccactatctcagtattgttaattttgttccatttttatccggcggaggacgtgccaaactcaccaaaggaaagttggttgaaatcccaattccaatcccttgccccggtgaccctgaaaaatcctttgcaatccagtctgaaatcgtccggatactggatgcatttaccgaccttactgctgagcttaccgctgagcttaccgcacgtaagaaacaatacaattactatcgtgaccaattgctgagttttgatgaaggcgaggcggagtggaggacattgcttgatgcctgtgattatgtcgattatcgaggtaaaacaccgacaaaaaccccaaatggtatatttttggtgactgcgaaaaatattcgtatgggctatatcgattacgatgtatcacaagaatttatttcagaaagtgagtatatgacagtaatgaggagagggctccccagaataggcgacatactgataactacagaggctccctgcggattcgtggctcaggtcgacagagataatattgctttagcacaaagagttataaaatacagaagtaaagataaccgtttatcaaattcgtttttaaagcattatttacagagtagtgagtttcagaataagttgatgaaggcggccactggttcaacagtcaagggaataaaaggcagtaaattacatcaattaacaattcctgttccatgtgaaaaagagcaggagcgggtcgtcattattcttgataagtttgatgaattaaccaattcaatcactgaaggtctcccccgtgaaatcgagttacgccaaaagcagtacgaatattaccgtgatttactgttcagctttccgaaaccggaatctgtgaacaactga

SEQ ID NO: 290330 - DNA, 450 bp, Morganella morganii
atgcacgatcagctatcagatggccgctctgtccgtttactgaatattatcgatgattttaatcgggaggcactggccatagaagtggatttttctctgccagcaagtcgggtagtcagaacactggagcaactcattgaatggaaaggaaaaccctcggctattcggtgtgataacggaccggaatatacaggtaacatactgatatcatgggctgctcggcagaatatagtacttcgctttatacaaccaggtaaacctcagcagaatgcttatattgaacgatataaccggacagtgcgttatgactggctggggcaacacctgtttacatctctggatgaattacaaaactatgcgaccggatggcaatggttttataatcacgaacgacccaatatggcgttaaatggctacacaccaatgcaacatatacaacgtatgagttga

SEQ ID NO: 290331 - DNA, 963 bp, Morganella morganii
atggatgatattacgttcaaatacctgacggatcagtatttctacaaaaaattactgcgctcgaaaacgatagacagctatctgaaagtggtccggacatttaaggatttcacatctgttccgcccacggaagtgggtcagcatatcgtgttgggctggcgtaaccttgttctgaaagaacagaaacgtgctccgagaacctggaacaataaagtcagtcacatgcgggcgctgtttaattttggtattgcacagggatttttgccccacgagcagaatccgtttcattacacggtagtccgcgcgggtaaaaagcggaagaaaatactgacgaaaagccagatggatgtgttgtaccggcgaatagatcagtatctggatattgagaaagcacatggttgttgtgtgttgtataacgggcgcagaaatgcgatgcaccctgcgtggttctgggggacggcgatcagtgtgctgcgttataccgctatccgtatggggcagttgcttcatatccgcctgtgtgatgtgaacctggaagaacgctggatagatctgagttcagacgggtctaaaaaccatgatgagcatcgcgtaccgatagttgaagccttatatccgctgctggtacatctgctggcaagagctgaagaggaggggatggagccggagcatcagttgtttaatgtgggttggttcgacccgagacgtaaacgtaaatatccggacgttatggatgagagaccgctgagagcgttctttcggcgcttatccagggaattcaattttactatctctccgcaccgtttccggcatacggttgccacccatatgatgaagtcaccggaacgtaatctgtatgtggtgaagcgtctgctggggcacgtcagtctggtatcgacactggaatacattgatgaaagtgttgacggattgcgtaatatactggaaaccgagctgatgtag

SEQ ID NO: 290332 - DNA, 3006 bp, Morganella morganii
atgcccgttgactttctgaccactgagcagactgaaagctatggcagattcaccggtgaaccggatgagcttcagctggcacgatattttcaccttgatgaagcagacaaggaatttatcggaaaaagcagaggtgatcacaaccgtctgggcattgccctgcaaattggatgtgtccgttttctgggcaccttcctcaccgatatgaatcatattccttccggcgtccggcattttaccgccagacagctcgggattcgtgatatcaccgttcttgcagaatacggtcagagggaaaatacccgccgtgagcatgcagcgctgatacgtcagcactatcagtatcgtgaatttgcctggccctggacatttcgccttacccgtcttttatatacccggagctggataagcaacgaacgtcctggcctgcttttcgatctggcgacagggtggcttatgcaacatcgtattattctccccggagccactacgctgacccggttgatttcagaggtaagggaaaaggcgacgttgcgcctgtggaacaaactggcactgataccgtcagccgaacagcgttcacagctggagatgctgctggggccaactgattgcagccgcctgtctttactggaatcactgaaaaagggccctgtgaccatcagtggtccggcgtttaatgaagcaattgaacgctggaaaactctgaacgattttggcctgcatgctgaaaacctgagtacactcccggctgtgcgcctgaaaaatctcgcacgttatgctggtatgacttcggtgttcaatattgccaggatgtcaccgcagaaaaggatggcggttctggttgcctttgtccttgcatgggaaacgctggcgctggatgatgcattggacgttctggacgccatgctggccgttatcatccgtgacgccagaaagattgggcagaaaaaacggctccgctcgctgaaggatctggataaatctgcattggcgctcgccagcgcatgttcgtacctgctgaaagaagaaacaccggacgaatcgattcgtgctgaggtgttcagctacatcccaaggcaaaagctggctgaaatcatcacgcttgtccgtgaaattgcccggccctcagacgataattttcatgaagaaatggtggagcagtacgggcgcgttcgtcgtttcctgccccatctgctgaataccgttaaattttcatccgcacctgccggggttaccactctgaatgcctgtgactacctcagccgggagttcagctcacggcggcagttttttgacgacgcaccaacggaaattatcagtcggtcatggaaacggctggtgattaacaaggaaaaacatatcacccgcaggggatacacgctctgctttctcagtaaactgcaggatagtctgaggcggagggatgtctacgttaccggcagtaaccggtggggagatcctcgtgcaagattactacagggtgctgactggcaggcaaaccggattaaggtttatcgttctttggggcacccgacagacccgcaggaagcaataaaatctctgggccatcagcttgatagtcgttacagacaggttgctgcacgtcttggcgaaaatgaggctgtcgaactcgatgtttctggcccgaagccccggttgacaatttctcccctcgccagtcttgatgagccggacagtctgaaacgactgagcaaaatgatcagtgatctgctccctccggtggatttaacggagttgctgctcgaaattaacgcccataccggatttgctgatgagtttttccatgccagtgaagccagtgccagagttgatgatctgcccgtcagcatcagcgccgtgctgatggctgaagcctgcaatatcggtctggaaccactgatcagatcaaatgttcctgcactgacccgacaccggctgaactggacaaaagcgaactatctgcgggctgaaactatcaccagcgctaatgccagactggttgattttcaggcaacgctgccactggcacagatatggggtggaggagaagtggcatctgcagatggaatgcgctttgttacgccagtcagaacaatcaatgccggaccgaaccgcaaatactttggtaataacagagggatcacctggtacaactttgtgtccgatcagtattccggctttcatggcatcgttataccggggacgctgagggactctatctttgtgctggaaggccttctggaacaggagaccgggctgaatccaaccgaaattatgaccgatacggcaggtgccagcgatcttgtctttggccttttctggctgctgggataccagttttctccacgcctggctgatgccggtgcttcggttttctggcgaatggaccatgatgccgactatggcgtgctgaatgatattgccagagggcaatcagatccccgaaaaatagtccttcagtgggacgaaatgatccggaccgcaggctccctgaagctgggcaaagtacaggcctcagtgctggtccgttcattgctgaaaagtgaacgtccctccggactgactcaggcaatcattgaagtggggcgcatcaacaaaacgctgtatctgcttaattatattgatgatgaagattaccgccggcgcattctgacccagcttaatcggggagaaagccgtcatgcagttgccagagccatctgtcacggtcaaaaaggtgagataagaaaacgatataccgacggtcaggaagatcagttgggagctctggggctggtcactaacgccgtcgtgttatggaacactatttatatgcaggcagctctggatcatctccgggcgcagggtgaaacactgaatgatgaagatatcgcacgcctctccccgctttgccacggacatatcaatatgctcggccattattccttcacgctggcagaactggtgaccaaaggacatctgagaccattaaaagaggcgtcagaggcagaaaacgttgcttaa

SEQ ID NO: 290333 - DNA, 210 bp, Morganella morganii; identical to SEQ ID NO: 109941

SEQ ID NO: 290334 - DNA, 402 bp, Morganella morganii; identical to SEQ ID NO: 139189

SEQ ID NO: 290335 - DNA, 192 bp, Morganella morganii; identical to SEQ ID NO: 139190

SEQ ID NO: 290336 - DNA, 570 bp, Morganella morganii; identical to SEQ ID NO: 109939

SEQ ID NO: 290337 - DNA, 825 bp, Morganella morganii; identical to SEQ ID NO: 96871

SEQ ID NO: 290338 - DNA, 450 bp, Morganella morganii; identical to SEQ ID NO: 281968

SEQ ID NO: 290339 - DNA, 201 bp, Morganella morganii
atgtgtccgggcaatatcaatcacctgaacacctatttcaccgagcagttgctgctctttcacccggttctgctctttctctttatcaaatatctgattaagtgcagagtgggcgttgtccgtgtcacggctcaggtctgccacgtcctgtttctgattttccgtgtcgcggataatccattgcagggtaaatcattttga

SEQ ID NO: 290340 - DNA, 267 bp, Morganella morganii
atgagttggacagagattaaagatggtgtgccagagaaaaatgttgagtgttttgtaattcgtgagtgggctgacggatctttgcattctataaatgcagccagaaaatcaagtcaaccactgacaatagataacgatatgtcacgtaatgcctggtggcattcgctggatggcgaagtgagattctcggattcaactgtagttgcatggatggaaataaaaaaaatcgcgccagcgtacaaaggacagttagtgccttaccaataa

SEQ ID NO: 290341 - DNA, 213 bp, Morganella morganii
atgtctgtttttaaattaatggccaccacgctcggtgtggtaacggtggcgttagccacgtactgcgcctggcaggccgcggctgaggcggcagacaatgaggatgcctccgcagcggaaaagctggcggcagggctcagtgcggcgctggcctgctcagctgtgctgggcggtacccttgaccgtctgctgggccggctctttccccgctga

SEQ ID NO: 290342 - DNA, 333 bp, Morganella morganii; identical to SEQ ID NO: 280370

SEQ ID NO: 290343 - DNA, 492 bp, Morganella morganii
atgctaaaagataacaaaaaagtgcattttatttttgttggtgatggtgaaaatacatacaaatggaaaacggaagctcatgggctgaacaacattacatttactggctgggtaaataatgatgagttatcttatcttcttagcaaatcggatataggtcttatggcttataagatcaatgctccgcagagtttacccaacaagatatttgaatatctagcttatggaatgcctatagtgtcctctcttgatactgatactaaacatttacttttttctaaaaacattggcattacatatacagcaggtgaccccatagattttaaaaaaaaattactgaaaattcttaatgacgataatattctttcagagatgaaaaaaaatgctcaaatcctttttaatgaaagttactcctctgataatatttatgacaatttagtaatatacttagaagaaacacatcaattctttggtgaaaaatatgataaatga

SEQ ID NO: 290344 - DNA, 252 bp, Morganella morganii; identical to SEQ ID NO: 30842

SEQ ID NO: 290345 - DNA, 246 bp, Morganella morganii
atgcagataacttgcagaaaatttgagacagatgttggcattgacggcgctgtaatcactacccacggacgggtatttataaacggccttgattctgaggctataggaaatagcgatgccgacatacaggagttagtcggtaactggctgcggaatatggatgagcaatcagcagttgagacgctacggaaagcagggttcgacatggatgttatcgcacaacttgcaggaaggagcgcagcatga

SEQ ID NO: 290346 - DNA, 213 bp, Morganella morganii
atgattgaaacgtcactcccgatggttaacccgcataacggtaataatgcggaactgagtccggaagccgcaggcattgccgtgtgtttaatgacgttcagtatctggtcattccggactgaaagcgaagtattagttgagtatttttatcagttgcgggactacgccttacagcatgacgagtgtgctgctattttccgtcttattgattaa

SEQ ID NO: 290347 - DNA, 213 bp, Morganella morganii
atgattcaaacgtcactcccgatggttaacccgcataacggcaatgacgcggaactgagccccgaagcggccggtatcgcagtatgtctcatcacttacagtctctggtcatttaaaaccgaaagtccggagatggtggaatatttttatcagttgcgggactacgccctgcagcatgaggagtgtgctgccattttccgtcttatcgattaa

SEQ ID NO: 290348 - DNA, 702 bp, Morganella morganii; identical to SEQ ID NO: 287626

SEQ ID NO: 290349 - DNA, 2094 bp, Morganella morganii
atgtcagggttactgcgcggcggtatatggggtgggatcatatccggcatcgtgggtgcaggtaaggctgcatacgatgcggaatcagagtttaccaacttcaataaacagctgatcctgaccggtaattatgccaataaaaccgcatctcagcttaatgaaatggcacggacactgtccggcggcggcataacccgccataaaatggcagaaacattgtcagaggtagtcggcacaggcctgttccgggataacgaattaacccgcgtatcgaaagcggctgcacagatgaactatatcaccggccagtcagtggaaaccacgatcagccagttcaaacgcctgcaggacgagccgttacaggcctcactggaactggaaaaggccaatcatcacctgaccgccgcacagcttgagcagatccgcacactggaattacagggtgataaaaccgccgctgcccgcctggcggtggatgcttacgctcaggccattaatgatggcgccacggatataagtaataacctcgggtatcttgaatctgcgtgggttaccttgcgggatgcggcaggaaaggcctgggacaccatgctcgggcttggcagaaaacagacacttgatgaagaaatccgtgatattgaagattcgcttaagcggatgtcggactctccatggtcggttaacagctcggttaactcagagcaccttaaaagcaagctttcctcgctgaaagagcaaaagtttaaagaagacttagataaagctcgtgcgcaggccgacaaaaataatgaacagatagaagttaacaggatcagaataaggcaggaaaattttttaaaaaatgccacctgggaggaaaaacaaaaagctgacctggctaaactggaaaaagacagatgggcattatcggaagacgaatatgaaaatgctaagcgaatgatcgcttggcgaaatagaccaagggataaaccgcgagaaagaaaggggaaggggtaccaggtaggcgaaggtaccaaagccgaagagcaggccattaaagagcaggtagccctggagtcaaagctccgcgtcctgaaagagcacaaatcagtcactgatgtgatcagcgctgagcgtaaaaaactatgggaaatggaagcgcagatcgccattaccgaagaggccaggggtaagcggcagttaaccaaacaggaacaggcacttctggctaataaagcggcggtactggctcaacatgagaaactggctctgctgggtgatgaagttgttgcacaggaacgcctgaataaacttcaggatcaggcagataaatacgttaagcagcagactgaaaagcaaaatgcgatccgtgatgctatcggtaaatcctcgcgtgaggcacagcaggcgcttgaacggtcgcagattctatccgcacatcaggataatccgcgattgaatgacatgcttgagtctcaggcggcaacatatgcagcggaagaggaaaaacgcgctaactggctggctggggcacagactgcatggggtgattaccgtgatgccgcactggattcaaatgctcaaatccagaatgcaactatggctgcactgaacggattctcaactgagctgacatccgttctgacaaccggtaaggctaatttccgtgagttcactacatcgatactgaaaatgctgacagaaatttttgttaaaaagtcgattgtcatggggatggatgcaatgggatttaacttcacggcgaacgcaaacggcggcgtttataactctccgtcactgagcgcatacagcggacaagtggttcgtacgccaacgatgtttgcttttgcgcatggcgctggtgttatgggggaagccggaccagaaggaatcttcccgttacggcgcggtgttgacggaaaattaggcgtggtggctaaactggctggtggaggtggggaacctcttattcagaataattatttcactatcaataatgacggcagcaatggacagatgggcccgcaggcaactcagcagatcctgaagttagttgaacaaaaaaccaaacaggtattagcatcagaacgccgtccgggcggagcgatggggtaa

SEQ ID NO: 290350 - DNA, 1215 bp, Morganella morganii
atgcgccttctgatagtcgttgataagttattgactggctttgatgctccgtcagccacttacctatatatcgacaagaaaatggccgatcacaacctcttccaggcgatatgtcgcgttaaccggttggatggtgaagataaagaatacggctatattgtcgactataaagaccttttccgctcattggaaaaaacagttcaggactacactgcagaagccttcgacggctacgacaaagaagatgtagccggtttactgaaggatcgattgcaacaggcaaaaatcgatctggatggtgctctggatgccgttcgcaccctttgcgagccagttaaaatgccacgtaatcaacttgattatcagcattatttctgtggagaatcaggggcgtcaatagagcagatatctgagaaagaagctttacgtctaacattgtaccaatccgtggcgaagcttattcgcgcttttaccaatctggcaggtgaactaacagatgctggttatagcgagcagcaggcagctcaaatccgcatcgatgttgagttttacacaaaagtccgcgatgaaatcaaaatagccagtggcgatttcgtggacatgaagcaattcgagccagggatgcggcagatgctggatctttgggtggatgccgatcctagtgaaacccttatggattttgaggaactaggactgcttgagttgattattgaacgcggagaagaagcactggatggacttccagccgacatgcgtggcaaccaggaggccatggctgaagcgattgaaaataacgttcgcagaactattgttgatgaaaaccccgtcaacccgaaatactacgaaaaaatgtcggtattgcttgatgaactgatcgcacttcgtcgtcaacaggctatctcctatcaggagtatctggagcacgtacgtgaactggcgaagcaggttaaacatccgcagtcaggtagtaaaagtacttatccagcaagtattgataccctcgccaagaaagcgttgtttgacaacctcgggcaggatgaagtcttggtgacaaagatagatactgcagtccgtcacaccaaaaaggccgactggtatggggatcgttttaaagaacgcgagattagtttcgctatcgcggaagagatcaaaggttattcagtgacggtcgccgatgtaatggccctggtgaaggctcagaaggagtaccgctga

SEQ ID NO: 290351 - DNA, 2154 bp, Morganella morganii; identical to SEQ ID NO: 284261

SEQ ID NO: 290352 - DNA, 477 bp, Morganella morganii; identical to SEQ ID NO: 284264

SEQ ID NO: 290353 - DNA, 528 bp, Morganella morganii; identical to SEQ ID NO: 287629

SEQ ID NO: 290354 - DNA, 513 bp, Morganella morganii
gtgtatgccgtgctgacagataacgggaaactgagtgacggcaaagccctgttcagtgctgatcataaaaatacgctgtccggcggcatggatgtggaaaccatcagcaaaggccgcacgctgatgcgccagcagaaagagggcgaacgtacgctgaatatccgcccggcctttatgctggtaccggcggcactggaaacacacgcacttcaggttgtcggttccggcagcgtgaaaggggcggatgtgaatgccaatatcattaacccgatccgcaatattgcggaaattatcactgagccgcgtctggacgataacagtgaaaaagactggtacatggctgcttctcagggcagtgacaccattgaagttgcctacctgaacggtatcgataccccgtacatcgatcagcaggaagggttcacctccgacggcgtgaccacgaaaatccgtattgatgccggcgtggcaccgctggattatcgcggaatgatccaggtgaaaggccggtaa

SEQ ID NO: 290355 - DNA, 495 bp, Morganella morganii
gtgaatgacgaacgattcagtctttacgcagggattattaccctgtgccgtgagtatgacaggccattcaccagtcatgatgtcggtcgcgataaagaacttccggttagtgttgtctgccggtatctggcgactatggaaaaaataggatgcttggttatcagggagaagcggcgactcaagtgtaataacaaagcagctgtttatgtggttgcggatgatgctgttactaaactccggtctcactacgacagggaaaataaaaagttgctccctgtttatgccggacggaagaaaaagcagaagcctgcgccggtaagggtggaaaagcaaaagtcagtcaagaccatcaagcagccggtatcagaccttccgaaaatcggcggaaaggtggttgcaaaagcgtacattgaccagaaattcggccggtcgctcataaccagaattgacgcaatgctgcgggaggtgcgccgtggaatgccaaatatgcagtaa

SEQ ID NO: 290356 - DNA, 276 bp, Morganella morganii
atgggaaagaaaacacgggagcttaagccgtgccctttttgcggacatgcggtgaagtggtgtggcgagaatgaaccagacccagaagataatcatccgtgctcacacatcgaatgcacgaatgctgattgcgggctggatgtcacctttaaccaccacaacgagatatacccagacgataccgatgacatgacggttaatgaattacttcagattgaccgaaatcatgcagcggaacgctggaaccgcagagcaccacaatgtgagaaggagtag

SEQ ID NO: 290357 - DNA, 216 bp, Morganella morganii
atggaaccaacggattttgaaaagtggtgtgcgggtgagcttggctatggatattcacctgaatacattgcgaaacagagtagaacaaattcactcggtgaaaaagtatacattcgcaatgaaattagcatcagatatgacgcctacatggccggagttcgcagcagactgccgtaccagacaccgccaaaaggagatgaagatggaatggattaa

SEQ ID NO: 290358 - DNA, 243 bp, Morganella morganii
gtggaacataaaatatcgctattaaaaagagcaggtgaatctgcattcccggtaaaaatggctatgggagacggttccaggattgaaggtatgggcatgtcgctgcgcgattatctcgcggcaaaggctatgcagggcttattgtcagaccctaacgccggaatgcttgatgatgaaatgaatcattgggctgcgctttcctacaagatggcagacgcaatgcttagagcaagggagaaatga

SEQ ID NO: 290359 - DNA, 258 bp, Morganella morganii
atgtctaaattaacgaaagaagaaattaagtgggtaacaggggtgcaggcggcattaaataaatatccaggtgagcgcatcgggttttataccattggttataaccaggtgtacctgtacgactcatctcggtatgacgaactatgccgctatcaggacaagaacaacgtagatttttgcgtggcggtagctgcactgggcgcaggtttcggagagtgcattgttttccctgaaagtgtactgagcacatgcggctga

SEQ ID NO: 290360 - DNA, 609 bp, Morganella morganii
  misc_feature (533)..(542): n is a, c, g, or t
atgaatgcgattttaataagtgataataagattaatgcgaatcctacaaaagagttttttatagatatgttaacaagggatatagcgttagacagagctatccttgatctaattgataatagtgttgatgcatcgagacaggaaggtaaacctgactcatggattagattaacattgaaagatgataaatttgaaatctatgataattgtggtggcatagatcgccacatagcaaaaaattatgcatttagatttggtcgtgcatcagatagccctgagacacctaactcagttgggcaatttggtgtaggaatgaaaagaactctatttaagttaggaaaaaaatttgttgtagaatcaaaaaaaaataataatagttttcgcataagtattgatgttgatgaatggaaaaatagagaagaagataattggacatttgaaattgaacatattgataataccgaacttaatgatggtgaaactaaaataatcgtaactgatttatataaggaaatatctaatcaatttaactnnnnnnnnnnatttaacttaccaacgtttgcaaattcattgagtaatgaagtttcatctgctcatttaagagtataa

SEQ ID NO: 290361 - DNA, 822 bp, Morganella morganii
ttgtcgtgcagaataattattattatatggattgcattatttatagttttatcattgatttccataaatataggattgcatgctccaatatggacacttaacgagaatcaaatactatatctttgctctacatctgctcaagttctatcggggatttatgggctaaccctaatgggatttatatttttcagaggtgatattataaagagtatgtataacgatgaatctttaaaagaaatccttgatatgttatcaaaaagatatttctatttatttatctttgttacatttatgtcactagtaacgattgcaatatgcaacttaactataacggtagcgaaggatgattatacaacacttaaaataatattaatgaacacagcgcaagtttcactatttataagtttgatttcaagtgcatatttagtatttgatattatcatgccgaacagaattgaaaaggctagtgaaaaattaagaaagttacttgatatatcgaaaaaagcaggagatgttttaaaattcatagaaaactttaattttattgatgcggaattacaaaaatacggaacaaaaataaaacctaaggataataattctctatctaaatatcaaaatcggattccgaacaagaaaatactagagatcctcttgcattcgaatataattaacaatacccagttcgacagaataaaaaatctaatagaattaaggaatacaatagtacatggatttgcaccaactgtaagttttgagatggtaaagctatcaggtgagattcggagtgagttatctgaattactaaaccatcatagtacatga

SEQ ID NO: 290362 - DNA, 2595 bp, Morganella morganii
atgtcacctataggtatgattgcaaactgggctcaaagcaagcctgtttggtggaaacatgcgctaaaacttgcattaactaatggaactttggataaaagcgacctaaacgatgtactaaggattgcacttacggaacatggactggttgaacctaatgagagatttaaagaatctacaaaacccctagattttactggttatacaacagaacaatatgaagtatcaataaaatcactttatgacgttaaaggtgttggattactcgctgaaaatcaaactataacgtttccagataacgggctttttattatttacggggataatggctcaggaaaatcaagctatgccagtatattaaagaatgtatgcttaacccgtggtgttcctcctcaagtagtagggaatgtttttgctcaaaactccccctctccacaggcaaaaatttccgtatcatataataaacaagatgaaatatatttgtggaataaagataaacctagtagtgaaacactaaaatcaattagggtttttgatagtgattctgctactcactatgtgaataaagaagatgcacttgggtttaaacctgtaggtttaaatttgcttaatgagttagtaaaggcagtaaataacgttaatgcctatgtcagtgaaaataccatgccaggcaatggcttagttaaattaactgaattatcatcctctagtattactgctaaattcgtaaataatttatcggcagacaccaatgaatcagagatatctaaacatattattaccactgaaaacttacaaaaaatagaaccacttagaattgaaatatttaaatataaatctcaaactgcagagtcgataagaaataacctacaacaaaagaaattaatattagaaccattaagcatatatttagataacacattaaaattattagatgacaaagcgctcattatctataaagaattaaaattggagaaaaaaagaactgaaaaattatcagaagaattacgcaaagtaattttagatgatttgccattagatggtatagccggattaaactggcaaaatttatggcaagcggcaaagaaatttattgagcaagagtctaataaaaatagcttcccattaattagaggtgcgcattgtcctctttgtttacaagaaatcggagaggaaagtgaaaatagaatggctagattgaatgagtatttaagcaatgaggctgaaaaaaatgctaaattagcaaagaataattttgacaaatcaacaacccttatcaagtcaacttctctaaacttatcttcatatcaagcggcaataacgttattaaataaacaatatgctttatttggtgacgaactaacattattacataagaaattagaagaaagaaaggaaataatattgaatgatggagatgctccactgcctattataaccaatgacagtttagataaattaaaaaaaataattctagaaattgattccgaaataaaaaaaataggctcagatgaggaccttttagctttaattgccaaaaaagaggaaactctatctcattttgaggatatgaaatacgttttagaaaacatagagaatattaagtccaacataaaaagatataagataatcaaaagccttgagaaaattaaatcacaatgtggaactaaatcaatttcaaccctgtcgtctaaaatttatcatgatggtgttgttgaaccacttatttctgcttttaataatgaattaaaatcctttggctttgaccgttttaaaataaaagtcgattcccgtaacaaatctggcgttcagcaatttaaactgtctttggcagatgaagataataatatagttggtgcactagatgttacaagtgaaggggaacaacgctgtattgcaatcgcaagttttctggcggaaatgatcgcagactcacgaaaatcggcaattatttttgatgacccagtgaattcattaagtcacgaatggagtagccgggtagctaaccgattagttcaagagtcaaaaaatcgtcaggtaattgtattaacacataatattgttttttataaattattactcgaagttgctgaaaaaattgaggcacaacattccagcatagcgcttgaacgttcgcgtaaatttgctggattagttaaagagtccccaccttgggaaggtatgactaccaatagtagatgcaaagcattaaaagttaagttacaagagctaaaaaaattagaaagtaatgatgacaccacaattcctgaacttcgccgtgcattctatcaattttatggttatttacgagaaacttgggagagattggtggaagaaaaattactcaataaggttgtaacacgttttgaacgtggtatatcaacacaacgcttagctagacttactgatatttgccaagacgatatagataaagtcaacgatgctatgtcaaagtgtagtacatacttcagagggcacgatagtgcgccagctatcgcagatccatacccaacaattacagaaatagaacaagatttagaagcaattactagttttttagcagagcttgaagctaaaccaagaaagcggaattaa

SEQ ID NO: 290363 - DNA, 354 bp, Morganella morganii
atgctcccgaatagaatgcagctcagccgtcaaacagaagaacaattaaaaaagctcaagggatacactgggatcacacccaacgtagctgcacgtttagcattcttccgttctgtagagagtgagtttcgttattcacctgagcaagataataagaaactggatggtactttagtgctggataaaatcacatggttaggtgaaaccttacaagttacagagctagtgctgaagatgctttatccaaagatagatcagaaaatgttaataaaagcatgggctgcacatgttgaagatggaatttcaggccttagaacatataaaaatctaaatggtttactaaattcattataa

SEQ ID NO: 290364 - DNA, 156 bp, Morganella morganii
atgttgggagttattttagattccttaagtaataacgatattgtctattacaaaccacctaacggtggttttttatttgtgggaaaataccatgccacctcgcataccccgcgcttgccgcaaacgtggctgcgcaaagacaaccaccgatcgtag

SEQ ID NO: 290365 - DNA, 267 bp, Morganella morganii; identical to SEQ ID NO: 278390

SEQ ID NO: 290366 - DNA, 435 bp, Morganella morganii
atgtccagaactccctatacacgcttacgcattgagggcttccgcaaagcagaggcttccctgagacttgaaggaatggaccccagtggtacgcctctgtacgagtccgttaaggcacgtattatttcaggcgagctgacgtatgagcaggggcgttctgagatttttgcatactacacaaaatcagataccgccgggcctgtgaccgtgggagaaatgctggcagaagaattcttaaaaccgctgaacatgtctcatgatgaactggcggaagctatgggtatctgcaagcagtatattgacgatattatctgcggtttgcgtcgtcttacggatgatgagactcgggttcttgctgccgtatttggtactgatgagaatttttggagtaaccttcaaaagttgcaagatcgtaaggaaaaacgaagtaagtag

SEQ ID NO: 290367 - DNA, 1233 bp, Morganella morganii
gtgagccaagaagatgatgataagtatccagccagcgccgtatcctcatggagcggcttcgtttatcaagggaaaattgcattatatcactccctaaagattattcacgatggcgacctagactttgagcttcagctagacagtagtgacgacttcgctatttataaaaatggaaaactacacacagcccatcaagtcaaagcgaagataagtaaatatcgaagtggttacaccaaggcgctggaacagtctactttaatcgaacacgacaaaatcaaagggacaacgcgttacttccatgtatctgtcccgctaaataatacagacgatcacagaggcgctagcggagaaatagtaaaattctatcgttatggagggaactattattgcggcttgggtgaaattgaagggcttaccaaagagctcataaaaaagatatgtaacaaacagcacatcattgtcagtgataaccttataaactttaactattgtttactttctgaaaaaatcagcaccaaggcaatacacaatcataaattaaatcaggttggcggaatttcagaaaacagagccgcatatgagggccgtatcaaggccagaaatattttagaagacctgctaaccgaaaacccctatcagaatagggactactatacagttgcattaaaggctaggcttcagactcatctggaagagaggttggatcaggcgcttccaacaatgagtgacgctacttacgagagagctagatgtctgtgtgagcacattcgcgaaactcctatcaatgaattgaaaaccctatgccagatgatgaagccctccgagcgatttcaagacgttcagacgaatgacatcaggcgatataccaagctcatccaggctatttcggtggagcctatattcaaccatctcccgcactaccttgacagcgaaaatcgattctacgtacctaccgctcttgacgtggatgaaagcgaggagtgtgagtttgacatgacccgtgaaatgaaaaacaacggagatctgctgagactactttttgagtacaaccatctaatcgccagcaaagcggaagcctcattcacctttaatacaaaattcacaaactcagatgacttcgacaacaagcagaccactgaaaagctcgaaagcaacatcaccaagtcgctatgcattagcgtgataacaaaagacgatgcggagaaacgactgaatgataaagcaactcattga

SEQ ID NO: 290368 - DNA, 666 bp, Morganella morganii
atgataaagcaactcattgatgaagcacttgttgcccatggctttgttagtaaacgtgacttggacaacacaagattttatattcgcgagtctggatctgctatcaggttcgcagttttacataatcttgacgaccttcctgacccaactgaattgaataatagaatcaatcatcttgctcctgatgaatttctcagaaacccaagctttaagaaaaactgcgacttgatttgtattcatcgtcttgatgttctggccaagttcaaggattacgaagaagaaattttcgcaatagaggaagacccgcatttctataagaaatatgtcctctattacagtattgcggaagaaagtgcactcactaatttcacatacgacaaactggtatctgttattgctgacaaaaaggaatttcttgaatacaaagaaaaccctcttgtcgccacacaatacagttttgcggcgaagacctttatcaagcttccatttttagagttacctagccatcaagaaaatcttgtgtccttgagattacaggcagcagaggccgttgcacaagccagccttaacgatacgtatttgactatccagaaagtcactgacaaaaacgccgacgatattatcaaggaaatgattaaaaatgaactggcaaatatccaagattga

SEQ ID NO: 290369 - DNA, 2334 bp, Morganella morganii
atgaactggcaaatatccaagattgaagtctctagcttcaaagcattcaagcatatctacttggatcttggcaaatcgtctttgctaactctggacggccctaacggttatggcaaaacaagcatattcgacgcaatcgaactactgcttaccgggcagatcaatcggatacaaaatctgttcaagacattattaaccaagaacaagagagactatgcggacaatcttttctggaatagccgctcaggagagaacgacctttgcattaagattgaatttactaatgatgttcgcaagcttgttttagctagacattgccaagctgcaatattcaaaaaaccagtaaacaatcgtgcagacaaatacgaaaatttcaagctttatgagctgccagaattcgaatcatctgacttctctaaggtcaatctgcgcgataacaatttccttgacgaaattttcggaaaaaatttcagggaaaacttctcctttcttaactatctggagcaagggcaaaaccgactgttacatactcgggtagacgaacggaaggataaactaggaaacctatttaacatcagcgatatcgaagccgagatcgaaagctgcaacactgtatgcagtaaactcacaaggtacatcaataatcctgaacgcacggcaaaggttgcatctcttaaagaagagatatccaccctaagggacacattgctggcagaggctgggatcattgagtacaaaaagctctcgacgactgatgtccaaccaggatgggacaaggagatactgttctcaacgtattcgtcgggagaccatgctgcctaccaagaattagttcgcaagattattgcccttctgccactcaaagccacgataaaaaccagggttcacaacgagataattgatgccgacattgatcgtaacgaggaatctctgagaagtctggcgcagtttggtaaagacttgggcaagcttgatgtgcttgaagctatcaagaaggggattgatgaattagagcgttcagcaagcatcattaaacgcggtgccacgatgatcaagctcgaagaagcccgttcattacaaggctgggcggatgggcgtcttgagtggtttgagtcacaaattaatgcccgaaacagcctacaagtaaaaagcagcgccaatgcgaacgtcgtagccgaattggaacgtctaaaaaggcagttacttggggaacataagaagtcttatcccgacgagcagttgtgccctctctgtggcgctgactgggaagatcacaaatcaatggcggatgccattgaagcaagaactaaacagatctctgaatcattaggtcaggacggtaagaacttagttaaccttatcgctgctatggatgctgagctgaaactcatcgacacatttatacaagacagcttgaaactccttacgcctacatttgaatcaaatcttcatgcagggctgaccagaattaagcttcggctcccggcaataacccaggtactggagaagctacaaagcgaaaacattcaatttactgattcatttacagaaattgatgacgtagtagatgagcgacttgaaaagctcaaggaacttctaagaaataaaaaacaggttgaagttgatgccttagcgctgccggaggactggcgagaaaccacaaatagcgctttcaaagacctacaggacttctatatagtcacggttgatgacctgaaggataaagagcagtacatatcgattaaggccaacgaggctcaaagttctaggctccaaacctgtattaacgatcttaagcttatcgaaaaagaaaccctggcagcccaaaaagcacaaggtaaaattgaaaagctccgcagcacattgaaaaagaccgagcagaattatactgaccagacaatttcggctattgagttcatattccacatctatagtggtcggttgatccaaaactaccagcgtggcctaggcctgtttatcgagagtcgtgaaggtacgcaactgaggttcctaactgccgagaaatctgaacacgacgcagtcatgtccatgagttctggtcaggtatctgccctcagccttgctttcttccttgctctcaacaaggtctatgctcgggtgcctctcatcctgattgatgacccgtcgcaatcactggatgaagtaaacgttgcttccttgaccgatctactccgttgcgaactcaagcattgtcagctggtcgtctcctcccacgaggacgatatctcggcctatatgcgctaccggtttaacagagctggtttgacaacaagttcgctcaacatgcaactcctggcaaaagaagcctcgtaa

SEQ ID NO: 290370 - DNA, 1749 bp, Morganella morganii
atgaagctgtttttaaccattggggtttctgaggcatcaccgctttcgtatttgccgggagcaattacagttgctcgcgagatgggggattgggctcgaaagtccggatttgtcacggaggtgattactgatgaaaataaaactccggtcacgattgctcgtatccgtgaaacgttgctcggaatgctatcgaccaatgacgaggtggagctttttattcttcatttcgctgggcatggatttagatctggagcagaacaaaacgtatggctccctagcgattggcacaaggagatgcgcgccatatctgtggaggggctgaagaggcaactctacaggcatggaataaagagcctgtcgatcttcggtgatgcttgccgatcgttacctacggaaatcgacattgcggatattttcggtgaccccgtgcttccgagaggaccatacgatgtagtcgcccccataattgatcgcattaacgcggttggtgatggtcagcaagcgtacatgcttaaaggagatggcgttgccccgcctaggtgtgttttttccactgttttggtcgaaggactttgtggtcttaaggatgaggcgtttgacaagtataattcggattgcgtgattcccgagtcgctagcattgttctcaagggagcgattgaaggaaattagtgagatatatgatctaaaatgttctcccgattacgccaccggcatacccagggagcatgcgatttatttcaggcgcggtgagaatccggccgacctacccattcctaaatggcctgcgccgccttcctccttggttcacgcaccgaataacatcggcgaagatctgcatgcgagttcccctgatatcgaattccgagccttcaaacgacacttccgagacagcctgtcgctgcattcctatctcgatccgtggagctttaatctggctgtccgcggcgcagtaccgaagaagatatggagcacatgcgcagttgaaaacatttttatcgatgctgatgaagcaaactcaaactatcgagtacgaggctctgccgattgcgccatccaaatccttgtcgaatttgacgatggcgttttcgcatcggccgtagtatatgagaactgcaccacgctgataagtcgaggcgaaaagggtgagataaattggaccagtgttcccaaatggcctgaatctaggagggatctgcgcacttctatcaatgtgatcgcggatcttcaggcgggtaatatctctgctgaccaagtggacgatatcgcggtaaaactgcgagaagcaaaacatatcaatccaaccttaggcgctattgcgagctatttgtacgactacacgggggacatcgatagcatacgtcgcatggcgtatttttactgtcattactatcaacccatgccattcgacgtggcatttatggggctgctctcaactaaagatgtgggacggaacggctttgtggtggatgtgccgccggttccagcaaggccgcagtcgccgacaaatgataggttgccagcttgggttacgagagcgactgacgaaatgtcggggcaggttgcgggtttgtggccctggctccgccagggatggcaattcatggaagacccagcgcctcaagaaaaagcggctgcggaaggattgcgtgatgtcgccaaatttctgttgccctcgcaattctcttcattcagagaacaaggggcgagaatactgatcgatagatttaacttggaggcaagcgaatga

SEQ ID NO: 290371 - DNA, 873 bp, Morganella morganii
atgaacgttctgatgattcatggaattggtcaagaggcttcaactaaggatgaactaattaaacaatggacagagtccctccacactgttcagccaggcttgctcgatggggcatcggtcgaaatggcatattacggcactacacttgccgactggacaaatggcaaggcaaagaatgcagtcggtatgggcgctgagtccacggcggttgacattggtgatatggatgaattgagattcttcagtgccgtaatggaggagttcgccagtgaccatggtatcggcgaggcagagattgagtccgcgatagaggtggcgggaaataatgtagtaccgatggacaactttatcgcaaggcgtctagtcggcttactgcgcgtggtcgagaagatttctccagccaaaggctcactcctccttcgaatcattaagcaggggtacacctacctttcttcacccgtggcagcaaaggctgtcgatagcatcgtgcgaccattattgcaaagaagccctcaagtgttgattacccactcgctcggaaccgttattgcattcaaattgctgcgcgagatggaagagaagggcactgaagttcagattccactttttataactatgggatcgccgctgggcctggacgcgttcaaggcgaaacttggagcgccgcggcgaaaaccagtctttgtggaacagtggataaacttctatgacccatcggactttgtcacgcttgggaagccgttgaacaaagataattttgcaagcaatatcgataacgatggcaccgttgataacaagactctcaacgtccatggcattgttggctatctcccacacaagggcgtcatcgacacgcttaaaagcgttctatag

SEQ ID NO: 290372 - DNA, 1128 bp, Morganella morganii
atgaccattattacaggctatcgtttaaagaaaggagcgttcctccaagcagacattttgctcacagctcctaagactacccagatgcgcacttcgccggttccgtcatttaactccgatggtagcaatgcatccctgaacgtttacgccgtagcgggcctttgccaaaaaatcttggtagtcaacaaaaacttcgccgtggcttttgccggaagagtttctgccatccaagatgctgcacggttgattgattcgcttattgctcaatgtcctgacttaaccggcaagcgtttcgcggacgctttgctttctgacaaccaactaaaagacgctcagttgagcgctatcgcactcagtgtggagggcgatgaaatccagatcatgaaccaccgtgccacactaggaatttcgaaggagtacttcgaacttatcgtcggtggttcgggttcacaatacgccattcagcacttcgagcagttcccttctaatgcatttgatattccgtgggaggacatcgtggtgcaaggcacctgtatggctctccatcagttcgcaggtcacttgattgacgagttcgaaaacaaatttgagtccgagaccattaatgacctgtttggaggcggtttcgagttagtggcatatcatggtggccagtttcacaagatctcagacgtggtttacgtctatgcagaggcagaggtcgacgcctatggcatgcttcaggtcgaactaccaaaattcctgctcaaatccacctatcacggtgatgatctcaaaatcaggagcatggaaattctctacgacgaggaagatgataattgctcaatcaaaaatgaccggactttcaccattgcccccattacccgctaccatgaaacacacgttgaagagggctgcgaggacatcgaactttcaggggagtttctttgctttgtgatcaaagtgaagcttccagttggcagcttcactattcccttcatcagaaagtacgatggtcctaagggctttaaggcaaaagctttcatggcgattgctcataggaaccatgtgtatttcctctactcggatatattcaggagtgaattacaagatcacgtactcgagtgcatgcgcctgtacccctcctaa

SEQ ID NO: 290373 - DNA, 1926 bp, Morganella morganii
gtgtcagacgattttgcaaaaaacggccgcttagcccgtgtcattcccggttttcagccgagggaagcccaggtcactatgtcggcggcgatcagccggataattgaaacgcaggggcaactggtggcggaagccggaaccgggaccggcaaaacgtttgcctatctggtacccgcgctgcgtgccggaaagaaaactattatttccaccggctccaaagcgttgcaggatcagctctataaccgcgatctccccaccattattcaggcgctggattatgacggcagggtggcgctgctcaaagggcgctcgaactatctttgtctggagcggctggagcagcagactctcggcgatatcaatatggagccggaaacgctcacgcagatagtggcggcgcggcgctgggcaacagcgactgaactgggggatatcaccacctgtcacgatattccggaagacagcccggtctggccgttgatcaccagtaccaacgataactgcctcggcagcgactgtccgcagtataaagaatgctttgtactgaaagcccggcgcaaggcactggaagcggatgtggtggtggtcaaccatcatctgtttatggcggatcgcgtggtgaaagacaccggtttcggggagcttatccctgaggcggatgtgattatttttgatgaggcgcatcagatcccggatatcgccagtcagtatttcggtcagcagctcagcagccgtcagttatttgatctaacccgcgatatcacattagcctaccgcagcgagctgcgtgaccaggcgcagttacagaaatgtgcggatcgcctgacgatgagtgtgcaggatttccggctggcactcggtgataccggttttcgcggtaatctgcgggaactgctggcacagccgcagtttcagcgggcgctcaccttgctcgatgatgctctggaactctgttatgacgtgatgaagctctctctcggccgctctgccatgctggatgcggcgtttgaacgggcgaccctgtaccgcaaccggctcaaacggctgaaagatgtttccatccccggttacagttactggtttgaaagctatggacgtcatttcctgctggcactgacaccgctgaccgtggaagacaaattccgcgaaatgatgagtaatcagaaaatggcgtgggtatttacatccgcgacactgtcggtgaatgatgatctgcaccattttacccgccgcctcgggctggataacgccgaaaccctgatcctgccgagcccgtttaattatcaggaacagactctgctctgtgtgccgcgttttctgccgtcgccgaatcagtacggtgcggcaaaacagctggcggaacaactgcgcccgctgatcaaccataaccgtggccgctgtttctttttatgcacctcacaccagatgatgcgtgatctcgccgccgaattccgccagtcactgacactgccggtgctggtgcagggggaaaccagtaaaacacagctgctccgtgattttatctcctccggtaatgccttgctggtggccaccgccagtttctgggaaggggtggatgtgcgcggtgatgcactgacctgtgtcatcatcgacaaactgccgtttaccgcaccggatgacccgctgctgaaagcacgcatggaagattgtcaggtacgcggtggcgatccgttccgtgatgttcagatcccggatgcggtgatcagccttaaacagggggtcgggcggcttatccgtgatacggaggattacggcgtgattgtgatctgtgataaccggattgttatgcggccttacggggaaatcttcctgaaaagtctgccgccgtcgccacggacccgttcactgaccaaagctgcggaatttctggcagcacggcagtcacagcgccgcacagcggaataa

SEQ ID NO: 290374 - DNA, 216 bp, Morganella morganii
ttggaaagagtctggcttaaacactatccggaagatgtcccggcagatatcaatcctgacacctatgcctcaatggcagagatgctggagaatgcggtatcacgctttgcggaccagcccgcctttatcaatatgggcgaggtgatgacctaccggaaactggaaaagagcgaagccgcgcatttgccgcttacctgcaaaacggactgggcctga

SEQ ID NO: 290375 - DNA, 213 bp, Morganella morganii
atggaaatatcaatgcggcaggccttcctgaagaacttcatgggtcactcccctgactggtataagcttgctattattctttttttaattataaatccggttgtttacttctttattgacccttttacagccggctggctgctggtcattgagtttattttcacccttgcgataatgctatccgctgcaacccggcggcctgctggcgattga

SEQ ID NO: 290376 - DNA, 276 bp, Morganella morganii
atggagcgcagaaaggcactgaaggaatcatacgagatcaccaaaaaattaaaagtagcaataaatggcgaaccagaagcggaaacaaagcgccctgttctttccctcaaccgcaaacacatcggcagagttgataaggtggtggcggtgagcaatatcccggtgacacgcaacatcgaaccgaagatttacgactcgctcgacaattgctgccttccgcatgtgcatattttttctgttaatgataaaaagaataaaacaataacggcgaggtaa

SEQ ID NO: 290377 - DNA, 474 bp, Morganella morganii
atgttttctgagaaaattgagtacgatctgagcaactttgattgtggagaagattatctgaatgatttcctcactgaccatctgaaacgccaacataatgctaaaattttacgtggctatatgcttgtcacaaaagaagataagccacgtgtgctggggtactatactttgtctggaagttgctttgaaagagttcagcttccaagtaaaactcagcaaaggcgagtcccttacaagaacgttccaagcgtaacattggggcgcttggctatagatttaagtattcagcggcaaggttggggagatttgcttgttacccacgctttgaaagttgtttatcaagcatcaagagcagttggtattcatgggatgtttgttgaagcattaaatgataacgcaaaggcattctatcatgggttaaactttatacagttgaaggatgaccatgaaaaaagtttgttatactttcattaa

SEQ ID NO: 290378 - DNA, 270 bp, Morganella morganii
atgtccgcactgaaaaaacagcgcatcgatttgagattaaaccaagacgataaaagcatgatcgaagaagccgcggcaatgagtaatcagtctatttcacagttcatggttagcattgcttcacaacgtgcagtggaagttattgaacagcaccgccgcctgatcctcagtgaggaatcatggaatttggttcaggatgcaataagtaacccacccgtaccaaatagccggttgaaacgagcagctaagcgtctacaagatatggagtaa

SEQ ID NO: 290379 - DNA, 252 bp, Morganella morganii
atggggatccgcacggcattagatttagcaaacgccgcaccggcgactatccgtaaaacctttggtgttatcactgagcgcacgctgcgggagctgaacggggaaccctgtatcgagctggaggaagtcagaaaggtaaaacagcagatcctctgctcacggtcattcggtactaaagtgacggacattgtcaccatgagaaaggccgtgtgtggtttgccggtaagggcagcgacagcgggtacaagatga

SEQ ID NO: 290380 - DNA, 534 bp, Morganella morganii
atgtttgcacaggtggatgtaaatagcttttacaccagctgtgaaagagtattccggcctgatctgacaggtaagccggtcatcgtcctgagcaataatgatggctgcgttatcgcccagtcagcagaggcaaaagccctcggtattaaaatgggggtactgtattatgaatgccgcgccttttgccacaaaaataatgtaacagtatttagctcaaattatgcgttgtacggtgatatgagcagccgtgtgatgacgttgctctcatccttcgcacctgccacagaaatttattctatagacgaagcctttctcgattttaccggcatgaccagaacgcattcagcttggaagattacggccgtgagatacaggctgccattctgcagaaaacgtatctcccagtcggcgttggtattgcaccgacaaagacactcgcaaaacttgccaaccacgcagcaaaaacatggaaaaaaatcggcgggatggtcgacctttctgatccgctgtgtcagtgtaaattgctggctttga

SEQ ID NO: 290381 - DNA, 1512 bp, Morganella morganii
atgcggccaaaaattagcgcgtttaaatttggtgaaatttatggggaaagcgaggctcaatatctcgataactactcaaagtatttctatgatttaaataattcattggataaattaaataaaaaaaataaaatggtcgtcatagggagaaaaggcacaggcaagacattacttgttaatgttttctgtgaaaaaaaattaaaacaaaataaaatcgctgtcgttgagtcactaaaggagtttgtttttcatgagttgattcattttcaaggtcaggatatctcctctacaaaatacgttccaatttttaaatggatgatattagttaatgttgctaaaaatattgtaaaaaaccataatgggtttgataaaaataaagtgtctcatcttgagagttttttacgttcatttggtcacatcgctggggagttgaggcctgaacaaactattgaaataaccagagagttccaaaattctggagaagctggcattggatttaatatcccaatgtttcgcggagaagctaaaactaaaggtaatgaagtcgaaaaaacaaaggaaataaaaagaaattatttagaatgcattgaatcattgcaatatttccttatagatatgttaaaagagagcaataaggaagtatatatattttatgatgagttggatgataaatttgatgcaacaattgaatacaaaaatgctatgatcagttttttgaacgcagttatgtcagtcaataaaaatctaatggaaaataatgtagttgcaaaaatcggtgctgtaattagacatgacattattaataccttttcatcaccaaatatcaataaaattattgaagataactctgttacactagattggaattacagtgcagtacaggcgagtgattctgaaatatttgaaatgcttgcttttaaaattaaaaactccactaattattataataaattaacttgctctactttattcggtgatatctttgctgaaagagtttcaggtgaacatagttctatttatatcttgcatagaacgttaggccgaccaagagatgctataagaatgcttacatatattcaagaagaatttggtgaaaatgctgaaagatttgaatcgtcaatgtttacaaaaatatcaaaaaaatattcatcatatcttttgcgagaaattagatctgagctttccggccacattagcgattctgaaatagatatgtgtttttctcttatacgaaaagtaaaaaaaagaggttttactcaatcagtaattgagagtaagtatgctgaattaaatcttgggcaaaatgtgttagccttagataaaatgctaagctatttatttaaggctggtgctatttgtaatgtactgagacgatctggagcagatggtggagatgtttatttctggtcatataatgatgaagatcttgatgtggacccatcattaaattatgaaatacattgtggtttatgggatgcattagggattattaaaccaaaacacaggcaataa

SEQ ID NO: 290382 - DNA, 138 bp, Morganella morganii
gtgattgaggcagtggaagaacagagtattgcactggcgcagctactgctgattgaagatgagcagaaattaatcacgttgatcgcgatggatgatcatacactgggccacaattctctattctattatctggcttga

SEQ ID NO: 290383 - DNA, 438 bp, Morganella morganii; identical to SEQ ID NO: 277061

SEQ ID NO: 290384 - DNA, 216 bp, Morganella morganii
atgttctgcatagagaatgaacgaggagttcataaaacgcacccagttttcagatggttttttgccgtgcagcagatgcaggaaatggccgccgcaggtatcgtcatcggtttcggtatcaatgcggcgatcattaaacgcatagtgataccagtaaagcagcatggaggtcagggaagagagcaggcgatcggcgatatcacgggcaccggataa

SEQ ID NO: 290385 - DNA, 399 bp, Morganella morganii
atgcataaacattccgctatccggctgacggtggctgatgccctgcgggcacacctcggggaaactcaggtatatgacggtcgcccggtatttcttgaggagtctgaactcccggttgtcgcggtgtatctcactgacgcttcgccgacggatgatgttgtggatgaagaccagtggcaggccgttctgcatattgaggttttcctgaaagcgagtaatccggactcaaaactggacgaatggatggaagacaaaatttatcccgccatgcaatccgtaccggcactggccggacttatcgaaaccatgtcagcggcaggctacgactatcagcgcgatgatgaaatgtgcctgtggggctcagccgatctgacatatcacctgacgtattcaatgtaa

SEQ ID NO: 290386 - DNA, 1014 bp, Morganella morganii
atgacccgtgccgggcacgaagaagcacagccggataacccgtataacagcatgacactgcgtgaactggcgcgtatgtcgctgacggagcgcggtattggtatcagcaccctgaacccgatgcagatggtcgctgcggcattcacacacagcacttcggatttcggcaatatcctgatggatgtggcttataaatccctgctgacgggctgggaagaggcggaagaaacctatgataagtggacgaagaaaggtcagctcagcgactttaaaactgctcaccgtgtcggcctcggtggttttccgtcactgcgtcaggtgcgcgaaggggcagaatataaatacgtcaccacaggtgacaaggggcagaccattgcgctggcaacgtacggggaactgttcagtatcacccgtcaggccatcatcaacgatgatatgaatgcgctgaccgatatcccgaacaaactcggccgggctgcaaaagccaccattggtgacctggtgtatgccgtactgacagagaacgggaaactgagtgacggcaaagccctgttcagtgcagatcataaaaatacgctgtccggcggcatggatgtggagaccatcagcaaaggccgtactctgatgcgccagcagaaagagggtgaacgtacgctgaatatccgtccggcctttatgctggtaccggcagcactggaaacacatgcgcttcaggttgtcggctccggcagtgtgaaaggggcggatgtgaatgccaatatcatcaacccgatccgcaatattgcggaaattatcactgagccgcgtctggatgataacagtgaaaaagactggtacatggccgcttctcagggcagtgacaccattgaagttgcctacctgaacggtatcgataccccgtatatcgatcagcaggaagggttcacctcagatggtgtaaccacgaaaatccgtattgatgccggtgtggcaccgctggattatcgcggaatgatccaggtgaaaggccagtaa

SEQ ID NO: 290387 - DNA, 189 bp, Morganella morganii
atgaaagaaacagctgacaatcttgatcggtattacaccgacagccgcgggcggaaagttcacgttgtccggtttgaccggcaaaacagccgggtgattttcatgcgtgacggctatgagcatccgtgctttgaacctctgaaaacctttcaggagcggtatacacgcgtggatgaggtgaaaccatga

SEQ ID NO: 290388 - DNA, 861 bp, Morganella morganii
atgattaatgaagtcattgcattatggtctgagttattaggtcgtgaggtcaatagcacaaatgatttcttccgttctggaggagatccggcaacattacaacagatttttacctatccatgcttagccgatttttgtgctcatttagagcaggaaaagcaatcacaacgagagtactcctctttgatacctctaagcgctgtatctgctccaaaaccttaccactactttatggtgcatgcttctgatggtgatcccggtgtttacctacctcttgctgagtcgttaaataatacagtgtggggattaacagttacagatgcttcaaaactaactgatttggatacattgttatcattacatttatctagcataaaaacagcacagcagactggcccttatattcttattggttggtcatatggcgcttttattgccagttaccttgcagaacaactctcgcaacaaaatcagtccgtattattagtattaatagatcccgtctatcgacatgattttattaaattttgccatgatgactcagatagttcatcagatgaaaataagcagcttgcatgcactaaaaggcttatgtcattcctacctgaaagtgacctaccattatctgatgatatcgcctgtttatggctggaagccaccaaccacccaacagaatggacatcacctgaaaaagagtggtaccaacgattaccgccacatacccaacatcactatttttcaggggagcactggtcaatactgcaagatcgcgctaccagcacacatctggccgaaatcattgatcagtgggtgcaacaaaaactttctaataacggatatccatccgaaggaggtaattaa

SEQ ID NO: 290389 - DNA, 513 bp, Morganella morganii
atgtacttattgagatcctgctggcttttcttttctcggtcattggcctggataattttatttttattatccagatacccctgctgggatttaacggcgaaatcaagttcggccttgttctttcttaatgtttccaaactactcttacgagcggagtcggtcatccacccatcaccgttttcaagagatgcgatctgttcattcacactagccaacttttccgcttcagtaggtgccctccaaattttcgccagttcatcaccagcttcttttatgcttgttgtaaggttattccatgcccgttcaaggatacccacatcctcactcatctcaatagtgcgacggttggtaacctctgccagtttggtaatggcatattctgacgcctcacgggtttttccggatctttccaatgcagctatatgttcatactcggatgcggtcagcaggtgcatggatttatccatttccataatcgcgttgaccggatcatccttaagccgtttgaactga

SEQ ID NO: 290390 - DNA, 1188 bp, Morganella morganii
atggctgactataaatacattacctcatccggtgtgattattccggataccgcagagctgcgggcggcagttgaggatgaattcagagccgtatttggtcaggatctggatgtctccccggaaaccccgcagggggcactgatcacaatggaaacggaaaaccgtgacgcggtagtccgtaataatgcggaactggcaaaccagattaacccggacatttcaggtggtgtttttctggatgccatctgggcgctgacgggcgggcagcgctgggatgccactcagtcgatactgacgcaggttgaattcggcggcgtccccggaactatcatcccgaaaggttcactggctgaaacgcgggccggggatcagtttgccaccacaaagccgctgattatcggtaaagacgggaagataaccggcgatatgcgggcggttgaaaccgggcctgttgagtgcccggccggtaaattaaacacggtggcaagttcggttctcggctgggaaacggtatccaacccgaccagtgcggtattggggcgtgttgccgaatctgatttacagtcccgccgccgccggaaactgacactggcaaaaaacaccgtcagtgtcggtgaggcgattacctccgcgttatatgagctggaaggcgtccgttcgctggcataccgggaaaattataccaatatcccgatgacgctggaggggattacgctggtgccgcacagcgtatacgtgtgtgttgagggcggggaaagcggggaaattgcgcgtgcattgttgcgtaccaaaacgatcggggcggctttcaacggcagtgaggaggttgaagtaccggagccggtcagcggccagacctataccgtcaaatttgaccgggcaaaagagattgtcctgttctgccgcgtgactgtgaaaaaaacaccactggatgcacaaacaattattccggcggcggttgagtcatgggcacggggcgaaaccgaaggggacggcgggctggtcgtcggtcgtgaggtttccccgtttgagatagcggccggtattaatgcgtctgagccgcgcctgtttgtcacccgggtggagctgtccaccaacggtacggactggtcatccgatacttatccggtaaagctgactgaggttgccgaaatcagacgcagtgcggtacaggtggtgtttgtatga

SEQ ID NO: 290391 - DNA, 774 bp, Morganella morganii
atggtatcgctgatcgccgccggattgatcgcactggtgctgtttttcctgaccggtttcctcggacacattccgctggcgacactcggggtggtgctgatttactcctcctggtcgatgttcagcattcgtcagattttctctttccgtaaacggaataaatcggctttcacgctggcgctgtttactctggtggcggtgctggtggtggggctgatcaacggtatcgggtttgcggttctgctgggactggtacagttcctgcgcacggttttccgcccgacagaccagttactgggggtggatgagcaggggatgatccattccatcaacaacagtaacgtggatattagtcaggttgacggattattgatgtaccgttttaactcgccgctgacctatttcaacgttgcgtactttaaaaagcgggtgttacaggtggtgaataccgcaccgaaacgtcccggatgggtggcggtggatgcgaccgtcagctttatcaataatgacatgagtgtgttcagcacactgaatgagctggtgactgagctgaaaatcaaaggcgttaccctgatcctggcgggacggcgcaccgaactgacacgctgggtgtcggaaaataaaatcaaacgcaatgatgatgatttgattattgtgcctgatctctatttcgctatccggctgattcagagcaaacagcaaagccgtgtcaaagcgatagaagaggcgatggaacaggcggcagagggagcggaaaaaccgctcaccacctga

SEQ ID NO: 290392 - DNA, 1485 bp, Morganella morganii
atggctgaaaatgtagaagaaagtaatcagttagtattgttggctgatgctttcaaggagttagcagataagttttttgaaaattatgagttggataaagggtatttaattgaaccatccgttagtgatgactatgagtatccgccaatacaaatcagtagtatttatgatacgttaaattcctatagtactaaattaaaatacttaagcggttttgaaaaagaactgctacttgatgaaataacagttgcaactatgtttgatggttgtaaaacagctttgaaaatggtcgataagataattgaaaaatcagatgataatgatgaggaaatttataggataacaaatagtttcttgatttggttaaacaatgttgggttgcaaataaatgattatttttcttttgacttgattgataaaaaagaaattgtaccaagcttattaaagcgccgagttatccattatgaaaaattaataagtagccttgaaattaaagtggaagggatacaaagtaaggttgatactattaataatgcatataaggcagctattgatcttcctatcttacttaatgatttggaggagggagacaggaaattaaacgaacttagaaaaaaatcagaagaaaataatgattatattaataatattaaaggtaaagtagaaatttaccataataactgcgcagaaaaaaataatattattaatgataagtttaagtcactaaatgatgatatttcatcatatctcagtagatataaagaagaagcagaagattatatatctaaatgtgaaagtgcatatagaactacaacatcaagtggcttagctaaggcgtttgaagataaagcggttaagctgaataaaagcgttcgttggtgggttggttttttagctacatcattattggtcgctgctataataggtttttggcgactaactagtttggaagcaacattatcaaaaaatgatgcatcggcctttataattcttgtccaaatattattatcatcattaagcttaggtttgccattatggtttgcatggctggcaactaagcaaatcggacaaagatttagattggcagaagattatgaatataaatctgctgtatcaaaagcatatgagggttatcgcagagaagctgtaagcctaaacgaaaaatttgaagatgattttccggcacgtttgtttgataatgcattaactcgtttagaagaacctccagtaaggtttgtagatgatgcaatatattcatctccaattatggagtttttaaatagcgaaaaagtacgttcttttgttaaaagaaaccctgaaaagacgcaggatgctattgatgcaattagtagggcaagggatgagggtgaaaaagataaggagaagaaagataataaagaaaaaggtaataaagaaaaagatgcaaaagatatagatttagatgatggtgataataaagaaaaagatgatgaagataatgaataa

SEQ ID NO: 290393 - DNA, 615 bp, Morganella morganii
atgtcttatacaaccgatatcctgaatgcgcaatttgacgaaaacggactggcggttattccgggctggactaaaatttaccgtgctcatccatatacccgcgaatatattggtgcagcgatggataatgtcccttacggcggctccgtggtcggtgatgcttatcttgatgaacctgaaatcccattagtgcctaatatggctatcattcgctcacctgacggaaaatcatggctgcatactccggattatcgtggttctgtggcgtatgacaaagagacaaagcagcaggcagaaattacagatctgggtgaactgcctgacaacctgacgctggacgcacctaaaaccccgtttgatgaatggaacggtaaaaaatgggtgaccgataaagctgagcagcaagcgcatgaagttgctgttgctgaaagtcagaaacagtcattactggcagaagctgaacaggtaattgccatgctggagcgcaaggttcgcctcggaatggcaactgatgaagacaaggcaaaattgagtgagtgggaaatttatagcgtgaaaatgtcggatgtctatacatccactgcaccagatattgactggccggtgaagccttaa

SEQ ID NO: 290394 - DNA, 378 bp, Morganella morganii
atgggtcaatacggagaagcagcggtacaaactgccctgaattatagtaccgaaaaagatttaaaatctgagtggacaaggcaactatcagcgttaacgtcagggccggaatcgattaaaaagaactgccctcgcaatgtgtttcttgggctatgtgaagaaggcttgataaaaaatatacccgcgaagagctatggcgcagggggtatcaataaagcacgggcgctaggattactcgaaatagctaaattggatagtgaggttagtgttgcggaatgttatcgccggtacagagccaaagattcaaatcttcccgctggtgaaaacgggcgtgcagatgtagttcttagcctactaaaagcgaaccttattaaataa

SEQ ID NO: 290395 - DNA, 528 bp, Morganella morganii
atgagcaaatcacatcctaaagttatcaaaagtagagaacaatacagagaatacatgaatgaattcatgtcgttttttgggaaaaatcttgatgacaatgaggacttaaaggatcgatatgagcttttaggtgtgcttatccaagattatgaaagaaaagagtttccacctgaaaaaccatcggctcttgatgctattctttttgaaatggatcagcgtgaactgtctcaaaaagacatggtcgaatactttggctcaagatccaaggtgtcagaagttttgaatggcaagagagggcttagcaaagccatgataaaaaaacttcatattggccttgggataccattggacatacttattcagtcgccagatgacttaccagcccctgatgttgaagacatgatccgagttactggccctaataccttggaacataagatcacatcatgggatgtagaagcttccccaggaaagctgcaaaaaatagtgatgtcagtgccgccaacatgcgataagagcgtgatgtaa

SEQ ID NO: 290396 - DNA, 399 bp, Morganella morganii
atgaaaataaaaatagtctacaaagaagtgcattacttggggctaaagcaccttgacccaggagaaatagaacaggaaaatgaattaaggttcgctttggctactgaaatcttccacaaccaaagagatgcaaccttagttaagttccggtatacagcgacaactactctcaaggatgaagttgctcttgagctgatctatgacttcgcattccaggccgattgcgagttaacagaaagttttaatgagagcgactcggccacaatcatggccccgaacttagcttatccatacattaaagcctatatagaaaatattttttccatttccggatataaaaaaatcatccttccctatatcaatttcttcgatgagccattaaaaccagccgaagaataa

SEQ ID NO: 290397 - DNA, 246 bp, Morganella morganii
atgggaaaaataacatatgttgtcgaatataaaaacggcaaagaaccccagctagatataggaatggatgcgttaggcgggcgagtaatttcagcggctgcctataacttcagagataagcaattaacgcatgtagaagctagcgtaatccttgacgcaattaatcattatgaccttaaagaatcttgcgaaatgttttcaacaagttacaacaccttaatagcaagattaaaatcgttaacgtaa

SEQ ID NO: 290398 - DNA, 300 bp, Morganella morganii
atgaataacgaaattttaaataaacttcgcaaaataaaggaatcatatttagaagaagacggattgcgctctgttcttctggaggatatatcttttattgatgatgtaattaatgaacttgaacggttttatgatatgaagccggtagcgtttacaataagagatgatgcaggttatttatatctgaatagaatgacgaagctggaaggtggtgaacttaatcatcagttaaatctattgcagaaatactgccctgaaaaacagtatcaaattaccccactctaccgcttagacaaataa

SEQ ID NO: 290399 - DNA, 339 bp, Morganella morganii
atgaacaaatatcgtgacaaatcagactttgagattaataaggctgtgtttcgtgccgccagaataaaacataaatggtttagatttttaccgcatggtgtggttacttataacatcaaaggtgattgggcaatcttcgacccctgcaataacccggcggatgcaatgccgattatcattgagaatggtattgcaattcacccatataaaactgcaactccttcggcatttgataccgaaattggcgaattctacgggcacgctgtattcaataaaaatatatatcgcgccgctatggaagtattcctgatgatgaaggatgcggagaatgaaaaatag

SEQ ID NO: 290400 - DNA, 930 bp, Morganella morganii
atggctaatcagaaccttcccgccgatggtgtcatcagtaacgacgccacccacaacaccttcaacttcgacaatctccccgtccgcaccttcaacaagaacggtgaggtctggttcgctgccgccgacgtgtgcgcagcgttggagatcaacaatccccggcaggccgtaacccgactggatgatgatgaaaagggtgtcattagtagtgacacccccggcggacggcaggaaatcgtgacaatcagcgaatccggcctgtacgcgcttgtgatgaccagccgcaaggaagaggccaagcggttcaagcggtgggttacgcatgacgtgctgcccgccattcgcaccacgggcaagtacgaggccaagccgggccggggacgccgcgccgtgcggcagcagtctgcgcaggtgccgctgttgcccgcgcctcgcagcatccgcagccgcgatgatctgtccttcaccaagcgggacgccgagggccggatgctcaactggttcatgcccagccgtgagaacaactggcacgagcactacggcatcggggaaatctggttcagcgagattgtcgagctggcccggcacaacccgaaagaggcgtaccacgccatgcgctttgctggcccggagctgacgcgctactggaaccacggccacccggatggtttctttgatcgcatggctcgttgggcaatggccgccattctggcgaacccgaccgagccgcaacttcccttcgatctgccttgcctaggcattccgccgcgtgagggcatggacttccacctggcggcagccgtgcctcgccaacccctgacacctgccgagcaagacgctatcgacaagcaggcgtggcaggaggctgccgagtgccagcggcattgctatgagcaccgccgttacgacctgatggcgcgtcacgcatga

SEQ ID NO: 290401 - DNA, 1362 bp, Morganella morganii
atgaatctgcccgacaacatccttcaccctctcaaggccaagatcgtgggtttccacgaggaagagaacgagtacagcttccaggtggaataccccgatcccacggtctgccccaactgcggggtgtgcggcgaggtggttaggttcggcaagaaacaggtgaagttccgtgacctgccgctgcatgggcggtgggtcacgctctggctcattcgccgccgcttcgtgtgtcgtgcctgcaacacgacattcagccctgctttgcctgaaatggccgagaacaaccgcatgacccagcggctggccgagtacatcatcaaggccgccgtagggcgcaccaatagcgatgtgggccgcgaggtgggcgtgaatgagtcgatcatccgcgccctgttccagagccactacgaggcacagaaacaccgctacacgccatctgcgccccgtgtactgggtattgatgagctgtacctgcaacgcacctaccgctgcgtgctgaccaacatcgaggaggaaaccatcatcgacctgctggagtcgcgcacgaagccacaggtcacggcctacctgtctcgtctcaaagaccgaaaggacattgagatcgtctgcatggatatgtggaacccgtaccgcgaggtggccaaggcgctgatgccacaagccgccattgtggtggacaagttccacatccagcgcatggccaacgaggtcatggagaagatcagaagaggcatcaaggctgggctgtcgcaacatcgccgccgtgcgctcaaaggcgaccgcaagctgatgctgatgcgagagcgcgacttgacgcccatgagccaaatggtggtggagacctggacgaaccagttccccgagctgggcgcggcctaccgcctcaaggaagagttcatgaacatctggctgctgaccgacgaagtggacgccagagaggaataccagcgctggcaatccagcctgacaccggagcagcggccccaatgggcaccgcttactacggcaatgagcaactgggaggcggaaatcttcgcctacttcggtgacgggcaacgccagaccaatgccttcaccgagtcgatcaaccggcaaatgaaagacctgaacagggtcacgcggagcatgtccttcgagatgttccgagccaagatgctgttctcagtcgatcacaagatgaagcgcaaggaaaagccgcgccgggaatcgccctttgaaatcggttacggcgtccctacggaagccgaccttgcaaggctggcacccaccatgctcgacatgggggtgcccatcggcaagctgctggaacgcttcttggagtcgcccatcaacatcaccccaccaccttcggacgccgggtag

SEQ ID NO: 290402 - DNA, 171 bp, Morganella morganii
atgctgatttgctctgccaccagctgcgaatatcagccctatggctacatttatccggatgaacaaaactgcctgatggataaagaagagctgaccatgaagggaatgttatcagagtgttatctgatcgatgaagttatctcaatagatttttcacaaacaaaaagttga

SEQ ID NO: 290403 - DNA, 228 bp, Morganella morganii
atgtctgaacaagaaaaaataggtattgacgttcatattgctgtgacattaagtgatccaccggtcattagagtaaatgtccagaaaaaaatcaccgtcggtaagaatgataagtttaccgagtattttttagaacgcatcggagaatatcttgcaggtgaagaaacaacctcaaaagcaataaataaagcagcacaagatttccaaagaaagatagtcgctcattaa

SEQ ID NO: 290404 - DNA, 333 bp, Morganella morganii
atggggatgaacgtgtttgagatcatttttcacccggatgcagagaatgaaatatacgagcttgaaagttcaatgcaaggtaaggtttttgtggcactggataagctggaggcaagaggtaatcagctaagagcacctcatactgaaacaatcagggacgggctttttgagctgagagccgggaaaaaagacattacaaggacgttttttgcctttgccaaaggaaaaaaaatttatattttgagaacgtttatcaaaaagaccagaaaaactcccgagtcagaaataacattagcttttaaaagattggaggaattactcaatgacgaataa

SEQ ID NO: 290405 - DNA, 291 bp, Morganella morganii
atgacgaataaaaccaaaggtgtttcatactcagcggttaaagctaaagcattttccaatccggaggttttagctgcatacaaagaagcacagcgcgaagaagaattacaggatcttttagccacaatgcgaaaaaaggcaggcattaacagcactcaggtagccgaaaggatggggatatcccagccagctgtaagccgccttgagcgaaatgtcagtaaagccagtgtatttacactggaacgttatgccgctgcatgtggcactcagttaaaaatacagataatttaa

SEQ ID NO: 290406 - DNA, 192 bp, Morganella morganii
atgagtatacatccctttgttattggtactttaggcgtggttattaatgtctttagttttgctgttttttttgtatacttcattttgcaaggtaatttgtttaatgagcatggaaaatcaaagaaacatattttactgttattttttgttatttggatctttggtacatggttatttttattatcaagataa

SEQ ID NO: 290407 - DNA, 483 bp, Morganella morganii
atgagagatgaaacaaaagaggccatgcggttgtttatcggtggcagatgttacacagtggcgaacctcgaaagggattacctggcagaagtggccgggtacagtgacgaccactgggaagcgccgcagcgtgccgcacgtctggcggcggcggtcaaacgctacaagacctcagaaatgctgcgctttatttttgcaaccatcgcatactatcccgacccggacttaaccccgctggccgtgaagcggctgtgtaatgccctgtttggcagaacggggagccagtggctcattgttgaagtattcggtgaaaaggggcggcagcaccgcagcgccgacagtaccccggaggccgtggaaaaaatggccgccagataccgccgtgcggccggacagcactgggcggcaacgctggccgaaattgaacgagtaaagcggctttatcaggtggggattaaggcatccagaaaagaagaggactaa

SEQ ID NO: 290408 - DNA, 396 bp, Morganella morganii
atgaatgcagttaatgatttacaaaacacgttaaaaccgattattgaaatgattttagtcatcaataactatgcgctgatagttgcgataatagcgatagtgtattttgataaaaaaaggctaatctatcgtattgcattctcttattcaggtatcggattagtatattacttttttgggcatttttttgtctatgatgaagtcttaattgatataaataatacgccgccatttgcactgaccatgatgaatattggaatgctcgctgttttggtttattggctttactgggcaggttcaggggttcgatgctcaacagaactgtttcacacgctaaggcttttttgtccgataaaatcgttagtctatgccaacgctaatgtacgcatacattag

SEQ ID NO: 290409 - DNA, 459 bp, Morganella morganii
atgattaagaaactttttcggtttttaagtggtgataaattcatttttcttagagatttagataaagatgattttaatagaatttcttattttgaatcaatagattggagggttgaagttattcgaaatggcggtatttacaaaagggattggttaaaaataattaatgatgaaaagaaaggtataaaaagaaaaacgaaaatcaaaataaaaaaaataaaaatctctaaagaagattatgaaataatatctaaaataaccgatacaggttatgtaattttgaattttccagctatggataaaatagggcgattatctagggtggataggattttgttagaccatctttcagataaagttaaaggtgaattattaaaatcaaggttcagacctaatgatcttgatgaaattgaatatattgatttgttagtattcttagataacgtagtgattgactaa

SEQ ID NO: 290410 - DNA, 420 bp, Morganella morganii
gtgaaaaaagtctatatgctcgatacaaacatttgttcttttatcatgcgtgagcaacctgtttctttgctcgaaaaacttcaaaaatgcgtaatgaaccacgataccatagtcatatcagcgattacttattcagagatgcgttttggagcaatcggaaagaaagcatcacctaaacacaatagtttggttgatgctttctgtgaacgcattgacgcgattttggcatgggataaagcagcggtagacgcaactaccgtgataaaaaaatgcttatctgatgtgggatcgcccataggaaataatgatagcgcgattgctggtcatgctgtcgctgttaatgcaatattggtaacaaataatacccgtgaattttcacgagttgaaggactaaaaatagaggactggactcatgtttga

SEQ ID NO: 290411 - DNA, 234 bp, Morganella morganii
atgagaacgagaactgtagctgtatttaaaaacggaagtaaccgagccattcgtttaccaaaagatttcgattttgatggtgtcaatgaactagagatcagccgagagggggatcgtattattttgcgccctgtaaaacctaactggatttcattacaaaacgaagaaaaagccgacagtgatttcctgcttgaacgcgatgatgttattgaagaaggacgggttattctgtga

SEQ ID NO: 290412 - DNA, 615 bp, Morganella morganii
atgttaatcgggtatatgcgggtttcaaaagcagatggttcacaaacgaatgatttacaacgtgatgcattaatcagtgcaggggttgaggtgactcatatttatgaggaccgagtatcaggaaaacaggaagaacgccccggactctctgcctgtttgaaagctttacgtcctggagacacactacttgtatggaaactggatcgtcttggacgagatctgcgtcatttaatcaatattgtgcatacgctgaccggaagggggatcggattaaaggtactgacgggacatggcgcaactatcgatacgacaacacctgccggtaaacttgtatttggtatttttgcagccttggctgaatttgaacgtgaactcattgcagaacgcacagttgcaggtctggcttcagcaagagccaggggaagaaaagggggacggccttacaaaatgacacctgtgaaattacgttttgcaatggcatcaatgggtcaccctgagacaaaagtcagtacgttatgtcaggagcttggaataacccgccaaacgctgtaccgacatatttcaccggatggtcaattgcgggctgatggaataaaactactgaataatcagtga

SEQ ID NO: 290413 - DNA, 159 bp, Morganella morganii
atgtcagataagatgatagcagcagctaagacatttgcaaagagggaaaaaacgacattcccgattatgacagtaaaagagttaccgttattttttcaggcaattaaagatgaaatgttgtacaataaatcaatatcagttaagcggggaattttatga

SEQ ID NO: 290414 - DNA, 258 bp, Morganella morganii
atgagtaaaaatgttgttttttttatcaccttgtttatatcattttctataattgggtttatggtttacgttgatgtaacgacccctgagccgacagaatatcaaattaaaagaggattggacaaagtaaacaattttatcagtaaatgtgaaaacccgtacaagatcactatagctgatgataattatcgcgtttcatgtgatgcggggtatgtcacagttaaaccttacgttgttgaagcatttgaaaaaaaataa

SEQ ID NO: 290415 - DNA, 366 bp, Morganella morganii
atggagtctatcagaacaacgcttaagatccccgctaaggtagcagcaataattgagagtgttattcagcaccgtattgatagtggtgatgttgatgatgtaccgattaaccggaatggtgttgcaatagagatgatgcggatcggcgcaaatgttttaaagaaaaggattgaaagtaatgatgaaattcaaaaagcttatgcaaaggaatttgaaataattacggctcttcttgtatcgtgcgattacttctccagagtaagtgcatcaggtgcgagtgacaaggattttataaaaacagatagccctcatcttcaacaggtgagggatatgtccgaagcaaaagctaaagaacttcttgcatag

SEQ ID NO: 290416 - DNA, 324 bp, Morganella morganii
atgggaacgaaaatcatttctctgaaaaccgttctgagaaacgctttttcaaataaaaaatttatcactatgctgggtgttacttcatttgcagccgggttaatgatgatgccgagtacccatgcattagctgatgacctgtttgcaggagctaaagatcaggttaaagattcttttggaaaagactcagcgattatttatattctctatgtaattgaagtgttaatggctgtgttcacttacatcaaaactaaaaacttgatgatgatgggcggtattgctgctgtgctgatctttgtcaacgtcgcatttgggcttttctga

SEQ ID NO: 290417 - DNA, 294 bp, Morganella morganii
atgccattaccgacaatcgaagagctgaaaaggcaatgctatatcgatggtgatcatgataatgatcttttgcagcaattcttaagcgccgctgtttccgaagttgaaagggtcactaatcgcagactttatgaggaaaaaacggataaagacgatccgggggctttatttttaagtacagatatagaactcaggttaaggcagatggtcgggttctggtatgaaaaccgggaaggtcagtcattacctgattctctgtaccggcatttaagagattaccggcgcaggccgtaa

SEQ ID NO: 290418 - DNA, 189 bp, Morganella morganii
atgaaagaaacagctgacaatcttgatcggtattacaccgacaaccgcgggcggaaagttcacgttgtccggtttgaccggcagaacagccgggtgattttcatgcgtgacggctatgagtatccgtgttttgaacctctgaaaacctttcaggagcggtatacacgcgtggatgaggtgaaaccatga

SEQ ID NO: 290419 - DNA, 213 bp, Morganella morganii
atgcaagccgaaccaatcatcaccactaacaacatgtcagtagacgatgttgccgcgtggatcaccgacaaagcaaagtccatcaatgagctgcaatctctgcgggtagcccgtgaaaaggctatcagcgatcaccagcgcaaacttgaccgcctggacgaagatattgctgagtgtgaagcccgctgtgcattaacagtaaatccgcagtaa

SEQ ID NO: 290420 - DNA, 330 bp, Morganella morganii
atgacaacagcagatacaaatttgaacgcaggagctgaaacgctaccggaaacagaaagcagcaatctgtacgatttctggagaaatctgggtgatgcagcatatcggtactcaaatgctatccgggccatcaataaagtgaattcatcaccactttcggttcatgaggatgggttgaaaaaaatactgtcgttgatctactgtgatgatgtaaatgacgcaaaaaaagagagcaatattgaatcactaaggctgaatttactggcagccgaggcaaaactcagagctgccaagatcgcagaatcacttggaatttatgctagatactga

SEQ ID NO: 290421 - DNA, 225 bp, Morganella morganii
atgtcgaatgtaactttaaatagttttccagccgaaacccgcatagcaggcctggagcttttagttcaactggtactgtcttcattgccaaaaaatcaaaaggaaaagcttgttattgatgctctggaaataatgaaagttatcaaaatgtctcctgatgatgtcagaatagacggtctggaagactatttagctgacattttggagagagcaatcagtatctag

SEQ ID NO: 290422 - DNA, 1281 bp, Morganella morganii
atgacaaagcgaacctatgacaacaacggctggctcgaagtaaaagataaccccatctcaaaagttggggtttttgattatctgggggctgaaatcggcgcaccggagccggacaggatttacaaagtattccggccaccggaagagttaggtagtgaagaaaccatcaaatcattccgcctgaccccgttcattgtcgatcacgaaatgctcggtaaaaacgccacaccggcagagaaaaaaggcattcagggggttatcggtgaaaacgtgtatttcgaacacccgtacctgaggggaaatatcaaaatcttctctgatgccgccctgagtgatatcagtagcggaaagattgacctttcaccgggctaccgcagccggtatgacttcggtaaccccggcgtgtacgagggggaggcatacgaagttgttcagcgccacctgcgtggcaatcaccttgcattagtcgatgaagggcgcaccggcgctgacgtggctgtgcaggatcatcttgttgtaaccattgatacaaaggaacttattcgtatgagcgaagaagacaaagacaaaaaacagccgaccggtgacgagaacggatttacaccggagcaggttgaacaaattaaacaaatcgtcgtggccgcactggctgccggtacaccggcaacggatgaagacccggagaaaaaggaaacgactgacggcgatcctgatccggaaaagaaaaccggggatgccgaagccgaagcggaaaaagccgttgaagacgcagaggcggaagctgaaaaagcggaatccggtgacccggaagcggtagaagcggcggaagtggctattgaaaccgcagaggaagccattgccgaagcgaaagaagaacttgatcaggcaacaaccgacagtctgacgcgtcgccttaagcgtctcaaacgcagtattgcgtccatggatgaaatgtcctcaatgaaacgcaaaatcgcccgtctggaaaaagccaaaccgaccatggacaccggcgaactgttaaagcagatcggggaacgtgacgcactggcgcacaagctgacgccgtttatcggggtatttgaccacgcaccaatgacgaaacagcaggtggcggaatacggcgtggaaaaactcggtatccgctgcgataagggcacggaaagtattgccctgaacgcctggatgcaggggcgcacaccggactcacaaaaagcgcatgcgacgatggataccgccgcaggcacggactcaattatgaaaaagtggggtgaaaaataa

SEQ ID NO: 290423 - DNA, 654 bp, Morganella morganii
atggatgccagctttgccagccagaccaaaatctggctgaaccggctgaaacgcaagtgggataagatttttaacagtaaggccgcagagatggcggataagttcacctcacaggtggacatgaacgcacagcgcagtctggacgattccctgaaacagctctccggcggtatcacgataaaaaccccggccatgcccgaagccctgaaagacaaaatgattgccgcaacggcagaaaatgtatccctgattaaatccatcccgcagcagtttcattcccgtatcgagggggcggcgctccgttctgtcagtcagaccggcagcggcagtaaaaccctgctggatgaaatacgggatatcggcggggtgacagagaaacgggctaattttattgctgttgaccagacccgaaaaattaccacggcggcgaactatgagcggatgaagtctgccgggatccgcaaagcgatatggcatcactcggcaggcagtgccgaaccgcgtgaattacatctgcgtctggacggggaagtgttcgatctggataacccgccggtcattgatgaaaagaccggtgagcgcggattacccgggcagttaccgaactgcaaatgcttctggacaccggttatcgactttggtgaggaaacatga

SEQ ID NO: 290424 - DNA, 1296 bp, Morganella morganii
atggaggcaatggcgaagtcgtttggttttgccggtaactccatggaaaaaatcctgcggacggctgacaaagtgcaggggatgaaattcgataaggccaaagccacactcggtgcgctcggcgtgtcggatgataaaaccgttgaactgatgatgaaaggccgcaaagaactcgaacggatgatgggggtgcaaaaggaatattccggcatcaacagagagagcattgagcagtctgtcaaattcaacaaatcgatgcagagctttaaacagtcctccggtctgctgaaaaacagctttctggagatggtgatcccgatcctggcaaccggcctggaatgggtcagtaaatttgtcggcttctgcaaagaaaacaaaaccctgatcacgggattttttattgcagtcggtatcgcactggcaacctattacgttccgccgatgctcgcggctgcggcggccacactggcggccacatggccgattattgccattattgcggtcatagccctgctggcggcagcgtttgcgctggtgtatgacgacatcatgaatttcatcgacggtaacgattcgatgattggccggatcctggataaatatcccggactgaaagccgtcattctggcgctgtgggacgttttcaaaaaactgtttaatttcattattgatgttgccgttattgtcggcaaagcggcagctgatgctttcaatctcattattgacaccggtaaatcgttgtggaactggctgctcggctttatcaaaagtctggggaactggggaaaaagctttcagggggttttcgataacgtctccaatgctgtggttggtattttcaaatggctgtggaagcagatagaagcttaccttggctggatcaacaaagggctggataagattaaagagggctgggcggcctttaaaagctggtttggtgccggtgatgatgatattgaggttgagcagaccgttaaccgcacagttaaggaacaggggcagattgagtacgacatgccgtcagagaaaacgatcagcgaggaggatgcggccaaaatggcgcaggccatgaccgcgcagctgtacggcatgtcaaatcacccgctgaaccctgtcaccagtcaggcgatcagcaaccagtcagctgtccgtaatgaaacgaacgtcagtatcggtgagcttaaggttgaaacacaggcaacggatgcgcaggggatggcggcgggagccaaagatgcactcggctctcagttgcaggatttggggcaccagacaaatacggggctggggaaatga

SEQ ID NO: 290425 - DNA, 429 bp, Morganella morganii
gtggacccgtccaactttccgttagtgtctttcagggccatctataaagtctttactgcggtaccggatgacgagatttttatcatcgcacaggaagcactgaactacttttcgccgtgccggggtgtctgtacaaattcagcgtggatgctggttgtcgcgcatatgctcgatctgaataagcggattgcagacggggaatcaccgaccggtgtcgtgaccagtgtcacgattgataaagtcagtgtgtcctacactgcgccgcctgccggttctgactggtcgcactggttcaagatgagtacctacggccagcagtttctggcgctgataaaacggtgcagtgtaccgcgttaccacggcggcggcggggaacgcgcggcatttcgcggcgcgttcgggcgcttcacgcggggaggtcaccggtga

SEQ ID NO: 290426 - DNA, 195 bp, Morganella morganii
atggggctggacaccagtcaggtataccgccgtttgtatacatcccacgatatcagcgccattcagcgtggaacttcaccggattatctggtcttcggcggcaaacgctacgatgtgaccggcgatgccgactggtatgcacaggacggctggaagtcggttatctgcattgaggcaggcaattatgacggataa

SEQ ID NO: 290427 - DNA, 189 bp, Morganella morganii
atgtttgccgaaaccgtggatgatgattctacggccaccagtgcggttcttctccaggtggtgccggtgaaataccagttgctgggttcagaaaacaaagccaaaggctatctggaagatgccaccaacgcgaccgccggtatcatcgtcacccgtccgtgggccatcacccgcctgaccgggatttaa

SEQ ID NO: 290428 - DNA, 588 bp, Morganella morganii
atgatattcgatcttaaaccagcaaaaaaagaattagaccgagcctaccgttgctttgataacatgaggtcagctaaaaactacgatgattatgaaacaaactggcggaactaccttaaccatatcgaaaaatgcattgagaaaatagaggttgcaactattccaataagaggcgcgttctcaagcgcaatggctgatgaaataaaaatcagaaacagcgaccaattattaatttacattaaacaagccaggaacgcagacaaccattcaatacaggatttatctaaactaacccccggaggggttggcataaacccattaattggtaattcattgttcataaagaaaatgacgatagataatgatgtcattcattatgatggagaccctataacaataacattctatccaagtaaaattgaagttattgaaataactaatcgtggaaaaaaattcccgccgccaaccactcatataggggccaccgttagctctaaagacccattatttattgctgagtctggcatcaatttctatagaaattttataaaaaaaatagaacaaaagttaatgagtggcaccaaatag

SEQ ID NO: 290429 - DNA, 1344 bp, Morganella morganii
atgagccaaaaaaaaccaagtacgaaccaaaaccaaaaccaaaaccaaaaccaaaaccaaaaccaaaaccaaaaccaaaaccaaaaccaaaaccaaaaccaaacagttaaagatagtagtgacaaaaaaaacactactaaaaaaacggcaaaagaaatcttcgcccttgaggaaattttattagatgtaacttattgctttgagcgtaatataaaaaaggtggaagatgaaatagatatagccaatatagttcttgatactaacgtgttgcttcttccatattcatcaggagctaacagcctctctgaggtcacaaaaatatatgcaaaactaaaaaatgaaaacaagttattcattcctgaacaagtagcaagagagtttattaaaaataggccgcagcaactatctaatctttatagtgggatatcaaataacacgagtaaagtttgttcaataaaaaccctttcattttctattctggagcatttaaatagctttaaagaattaaataaaaccatcgctgaaatagataaattaaaaacaaaattaaacaaacaagctacaaaagtaaagaatgatattaaaaattggggattagatgatccagtaacacaagcttatcgtccaatatttacacatgatgtgatagtaccatcaaacataaaggatggagaaagagatgctgtattaacagaaatgcgaggtagatatgcttgttctattccgccaggctataaagatgcaggaaaagatgatgaaggcattggcgactttctaatttggaaaacaattttacatttgggaaaaacaaatgatagacctattatttttgtaagtggagatgaaaaagctgattggtatcatggcgtagagggcgaaggatttattccacgatacgagttgcaagctgaatacaatagcatttgcaatggaaataatttttatataataccattaagtaaattattagaacttatgaatgcagaaaaaagctcaattaatgaaatcaagaaggaagaagaaattttaagaaatgatgaaaagaaacttaaattagatattttaagtatattaaacaatagacgcgaaagattatataataaaagaaacgcaagattatcctttaccaatgaataccttaattcgttcaaatcatttagaaaaaatgaggaaaaagacaatgaaaagattcatttaatcgtaaataaattcaacactgacgatatatttattaagtgccatcactgtaaagaagatattttaaaatcgtcaattaaagaaagcactgacagtcctaatattcacacttgtcctcattgtggtgttaagacaatttacttgtaa

SEQ ID NO: 290430 - DNA, 1011 bp, Morganella morganii
atgagaacggtagacccacggtgccacgcatctgacacaattaatatcatcagtgtttccggcggcaaagacagccttgcacagtggcttgttgctattgaaagtggtgtttcacatgtagctgtgtttgcagatacagggcatgagcatccgcagacaatggagtacctggactatctggaaaacaagctgggtaaaattctgcgcgtgaaagcagatttcactaagcagattgaaggtaagcgcaaatttattgcggagaagtggccggtatcgctggttgaagaatgcggcctttcgcctgaagaagcgaaggccagagtagcgcaggcgcttgatacactgaaaccaacaggcaacccgtttcttgacctgtgcatgtggaaaggtcgtttcccttcaacaaaagcccgattctgtacttttgaactgaagcatgagccggttagatcacaggttgttgagcctgcattaactgaatatgacgatgttatcagctggcagggtgtgcgtgcccaggaatcacctgcaagggccgggcttccggtgtgggaagaagatgctgacgatacagcaggattacatgtttaccgccctatcttgcactggacgcatgatgatgtattcgcgctggccaaacgccacaacataaaaccaaatccactttatcagcagggatgcagccgcgttggttgtatgccttgcattcatgccagaaaatcagaactggctgagatattcacccgttttccggaagaaattgcccgcgttgccgagtgggagaagcttgtcgcggcatgcagtcgccggggtaattctactttcttcccggcaacacaagacccggtaaaaaaagaacagcgcattgaatgcattactgttgaatctcacgggatagagacataccgggactgggcgctgacatcacgcggtggccgtcagtttgatttactcgcggatgagaatgaacaccaggcatgtagctctgtatatgcgggggtgtgcgaatga

SEQ ID NO: 290431 - DNA, 1314 bp, Morganella morganii
atgaaagctaacaagcttggtataaccattatactctttttttttatatttgttggatttgtgatctattttaaagacaatgatattgtaaaaacacttggtgttataattgttccatctggaatgttaatttttgctgctcttacttggattaatggtattaaaaacagtcaaaaaaacacattcgatagtaagtttaatctattacttaaacagcataataaacaactggaatatgttatttcatttataaatgaaaaatttcctaatggaaaatatcataaggatttaatagatgatagtaattacatgagtcccaataattatttattcaatcactttgtttttagtccttatatgagggtgttatatcatatattgaaatcaatagagatagattatggtgctatagataaggatgttatagcacaaaaaaaatattcttccatagttaggtcattaataaggaatgatattttatatcttgtggctgttaactcattaagtgatattaatgcggattttaaaaagtaccgtgatcttttaattaaatatgatttttttgaacatttaaatatcaatacccccatgtatcaggaatatcaaggattgactttaaagggctttcatagaacagttaacgatataaaaaaagagattgaattaaaaattaaagatatagttactgtttcattaagaagtaaatctagtcttttatgcaatatgaccacttgtaaatcgatggaggagatatatggagatacattaactatagatactccaacgttatatagattggcttttttatataaagaagatgattttctcatttataataaagaattaaagaaggggttgagatgtcaaataagtaaggagtatatatacggtgtaattgattcgttaattaccaattattcgtcttgttgtaaattgtattttggtgttagggttttcactaaaaatggttgggaagcctctaaatctgacaatagagtaattaattataatgtagagctacgtaaaatcaaaaaaaatagagagggttatgatgatttcttagagagattggctaataagcataacgttaataaaggagatattttattttcgaggtttagtaactctcaaaaagtattaattgatgattatgtggaaccactccgtttttataatactgctcttggttttcattctaatacagttatacctaagtaccgtgatgaaatatatatagacgtggtcaattattttgttaattgtattaactcgtcacgaattatgaaagatcaacatgatatgtttatttattaa

SEQ ID NO: 290432 - DNA, 441 bp, Morganella morganii
atgggaattttagacatcggtattttacttaatattctaaagcttaaaaatattactgcatttgactctatgttggatgagttaattaggagtactcataacagttgtgcgcgttattttaaagctgtgcaactgcttgcatccggggatataaataacggtattcaagttatggtagaattccggaaaaataccaagaaaaaacctgctgataaaaatctgtgtgaaacatactataaacaattggattttatgcatgagtttatagatttagttttaggtgatattactaacgagatttcaccaattgaatcaattatatctagaacaagagagttttctgatattgagcgttttaagataggtaaagctgcatcaggtaattttgcagattttgatgaatgctgtaaaaaagtacatgaaatattgaataaaaaatag

SEQ ID NO: 290433 - DNA, 2577 bp, Morganella morganii
atgaaaacctgtccgggaaagtcaccggcggccgcggcgggtgaccggctgatgctgaacctgccgtccggtaaatcacaggcccgcaccattcagatggtcacggataatgtgatcaccgttaccacggaatacagcgaaacgccggagccggaatgtgtctgggtaacggaatcagacgagctgtacgcccagcagtaccgggtggtgagcgtgactgagaatgatgacggtacgttcacgatatcggcggccatgcatgatccggacaaatacgaccggatagacaccggcgcggtactcgatgaacggccagtcagtgttattccgccgggcaaccagttcccgccgaaagatatcactgtcagctcttattctgtcgtgaaccaggggatcagcattgaaaccatgcaggtaacctggtcaccggcagagaacgcgattgcttatgaggcgcagtggcggcgtgatgacggcaactggatcaatgtgccgcgcaatgccaccacctcgtttgacgtgccaggggtctattcaggccgctatctggtgcgggtcagggcaatcaacgcagcggaaatctccagcggctgggggtattcagaggaaacccggctgaccggcaaggtgggtgatccgccgatgccgctgaacttccgggcgtccacactggtattcgggatcaaactgaactgggagttcgggaaattcacggaagatacactgaaaactgaaattcagtacagcaaaaccaacgatggtcagaatctgttgctgctggctgatgtgccgtacccgtcccgctctcacgaactggccggtctggccgccggtaccgcgttttatttccgcgcccggctggtggacaaaagtggtaattattcagcatggaccgattatgtcagggggatctctgaatttgatgcaggagaaatactggctgatttgtcagggaagataggccatgaccaattagcacaggacctgctgaccgaaatcaacagtaaagcggacagcagtgtggtcagtgctctggacgagcgtatgtcggatattggcggggaggtgactgaggcaacttctcaggtacaggcgttgtccggtaaactggacaaagtaaaggctgatttaacagagtcagttgttgttgatctggatctgtcagcattaagtgaaaatacttattacccggttattcttcctctgacgacctcccgccgctattacttcagggtatttcgtacactggggcaatacggagataacaaacccggttatgcaactcacggctccgggggctttgccatgattgttgagtggcaggtgagcggttcaggatgggggactcagtctgaaaaccgtattattgataatgttgactggcgatggacaaatcagtctcctgtcatgggccctgcgcagttgactcacagctcggtggaatatgtgtatttacgcggaggcgcaaaatatcagctgaccaggcataaaagtgtcagtcaccggattgtcactgatacttacacaggtaacgggcaatctgttacaccaaaaggttttgtcgccggtgaaataccggtgtccggtgaacagcggtttaatgccacagcaaatgcggtgaaccggcttgaaacgagtgtgacagaggtttcaggaagggtcacatcaacggctcagcaggtgacacgtctggaaagtcaggtcggggcggattcggcaaaaattgaacaaacctcaaaggttcttactgacttaaacggcaggatttctgcatcgtggacaatgaaagtccaactggacagcaaagggaataaggtcattacaggtatcggactggggtttaatgctcagggaaacagtcagtttcttgttaatgctcaaaattttgcagtgatatcgtcactgaacgggaaagtagtaaccccttttgttattcagaacggccaggcattttttaacgatgcgctaatcagccaggcaacaattgataagttactggtcggtaaccacatcagatcagtgaattatgaaacaggccggaacgggtattttctgaatgcgcagaccggaaatgcagaatttaacaatggagtgttcagagggaccctggacggtgtggacggtcgttttacggggacggtatatgcggagagactggtcggggatgttgcggttgccgcttcgtacccgcaggcatccgcacaaaatacacatggtggcgggggaggctggactacggcaacgtctgtaattacttacgcagggggaatgctttatgatatgacgttagtacttccttcgataactgccattattgaagataattccggcagcaatccgcgtccggtatcgggagaactgcggtttagtatacgtgtggatggagttggtcagcaggcaacttctcagtggtcaggacagagtgttatgggatcagctcatgcggttattcctcgtggacgaaagaatgtgaaaatagaaattgaagtgggagtcaggcataaaggcagggcacatgtggttctgagggaaggggttgtgatggccttcaaacgcagttccgcatcattcagatag

SEQ ID NO: 290434 - DNA, 720 bp, Morganella morganii
atgctgagtatcggtattgactcgggctcgacggccaccaaagggattttgttcagtgatgaagacggtgaatgtgacaccaaaccgtatctgaccctcaccggctatggccgcaagctggcggactttgcggacaaacaggtcacggaaatctcctgtcacgggatcggggcacgctggctgcatccgcagacccgcacggttattgatatcggcggccaggacagcaaggtgatccggcttgatgagcaggggcatctcacggattttctgatgaacgacaaatgcgccgccgggacggggcgttttctggatgtgatcagccggacactcggcaccgatatcacggcggtggatgacaccatccgcgggattgagccgcatgctatctccagcatgtgtacggtctttgccgaatcggaagtgatcagcctgcgatctgccggggtggagccggagtcgattctgtcgggaattgtgaattcaatggcacaacgtaccgccgggtttgccaagcggctgagtaccgtgccgtcagtgctgttcagcggcggggtcagccgcagtcagacgttctgtgagcggctttcacagcacctgggagcagaggtaatcacacatccggacgggcagtttgccggtgctatcggtgcggccatttacggcatccgtcagttacagaaacaggccgtcatgacctccggggatatccgttcatga

SEQ ID NO: 290435 - DNA, 216 bp, Morganella morganii
atgcctgatattacatctaaagcaacactcatccgtttaccgacagttttgcagcgtacaggcttatgcaaagcgtggatctataaattaatggcagcggataaattcccgcagtcagtaaaaattggctcccgctctatcgcctttgttgagtcagaggttgatgcgtgggtagcgaataaaattgcggaatcccgaactggtgaggtggtgtaa

SEQ ID NO: 290436 - DNA, 759 bp, Morganella morganii
atgattgattacgataagaatagctgtagttctctagaaaaagcatattatactccggtcgaagcagctttaaggtggtgtaatttgatatctcatgaggtgctgattcttgaaaaagtcggttttgatgtgttgccatcagttggtatgtttccacagtggccttgtttaagggttaatgcagaaaaaatattagatgctatccataatggagagatgccatacggtagggatgggaaaacagttcgtgaaggcgagcaggtggcaaaacacagattaacaattagacactcagacctaaaaacgtggatgactaaaaattatccaaaccaaaagcctccttttctatttgactctgttgaacagaagctacatgcaggaataactattgaggcataccaaacaatagaagctgaaaataaacgcttaaatattagattgcaggatgcgataaaaacatttaaacaacaaaaagaacaaatttcagaattgcagggtgagcgcgattcgcttagacaaatggtcgataattataagccaaatattaaccccagagcagagactacatatttgaatattattggaggattgctcgatattattcttggtgagtcaccgtcagggaaaaaattatctgtttatgataatcaggccagcattattagtgctttgcttgcataccatgaaggcaagccgggaattagtcctagaacgctagaagataaatttgcagaggctaataaaagcttgaagcgttag

SEQ ID NO: 290437 - DNA, 801 bp, Morganella morganii
atgagtgtattaaatagctttattgaggaacaaaatcaggcaattcaatttaaaaaattattcgaagccatagcagagcaagaggggcagccgatcgatgttgttgctgcttttttttatagaaatagaacagatacttgctctgatgaggagttggataatatctcagttcctgcttataagtgttatacatattctagaatttctggtttcgatccgtatcctgaccaatggtttcaagaaagatgctgtgatttgataaaggcgattggtgaacagtatcaaatttatgatgaagagctgccgggatatgaattcggctacatggtagctccggatgaagatactggattacctaatgattaccaaggattctttcctgaattttattttaaatatgacgaaataaaatcatttttaaattcccgaaagatggaactccctaagcaatttgaaattaatgaagtcacaccatcagaggttgtagtttcaaaaaatgatgttattaaaggcagcgtagacattgaaatgcctcatgtggggacagagaaacctctagggtcaagagaaagaaataatctgcatgcaattatcggtggattattagttactattataaaagctaagggtaacaaccaaagttccgtcatttatgaattaactgatttattcaagaactcagagccattctctaaaaggaacttagaagaaaaattttctcgttctaaagaagctttaaaagataagggatttgaattcgatgaattaaaaactatctctgatgaggtaaatcatgattga

SEQ ID NO: 290438 - DNA, 351 bp, Morganella morganii
atgtcacgatataaagtgttgaagaaatcctttatcaatggccgcctgctttatccgggtgaggaaattgagtttatcggtgtggcgggaagtaacctgcagctgattgaaacagctgatcgtagaacggcgaatgaagatgccaataccggtaacgataatcacaatggtgataatggcggtggtgaaggtggtaccggatcctccggcagtgatggcggcgctgataatgaactgatcgcattgcaggatcagtaccagcagctgtttggtaagaaacctcatcacaatgccggtgccgaaaaactccgcgcagatattgacgcgaaacgtaaagagcttggggtttaa

SEQ ID NO: 290439 - DNA, 162 bp, Morganella morganii
atgaaagcacagagcccatcttcagtacgtttccctgatgagattgtgattattttgcgcaatttggcaaaaagtaatgatcggtcttacagcaaagagatattaagccgagtgaagcgcacattgaagcaggacggattactaagtgaatgtgacgcatag

SEQ ID NO: 290440 - DNA, 252 bp, Morganella morganii
atgtcagaaagaaaatacaaaaatccacaggtaaacctacgtctccctgtagagctaaaagacagggtggctgagctagcagaagctaatggccggtcagcaaaccaagagatgattgctgccattgaggcatgggttgataagaataagaatacaaaagtccttgatctggttactttatcagaaaaaatatcagaactcgaatcacgaattaatgaattaacattaaataaccataatagtaatcaataa

SEQ ID NO: 290441 - DNA, 1134 bp, Morganella morganii
atggctagagcgactacgagaatagagcacactgaaaaaactgccgaagaaaaacaggctctcgacataagtatcaagagcatggaaaaaatcacagatcatgaaattagggaattccccatcagcgtgatagtcgataaatatcaaactggcctggaagaggataaagctgagatattcataccagattatcaaagagaatttgtttggagtaaaaaccaccaatcacggtttattgaatcattgctattaaaccttcccattccgtatttgtttgttgccgatataagtgaaggcgaaaacgaaggtagaattgaaattgttgatggaagtcaaagaattagaactctacatgccttcttaaatgataatcttcaactagctaatctccaaaaattacccgcagcgaatgggtttgtgttctcagattttagtccagcaagacaactaagatttgcaagaaaaacaatacgaatgattgagttaactgaatattgtgatgaagaaacccgaagagaaattttcgacagactaaattctggcggaataaaattaacaagcatggagcagcgtcaaggaagcaatgatggcccattcctggatgcaattaatgctatttctgagactcatatattccatcaaatatgtcctatcacagctgccagacgcagccgcgctgagtaccctgaattagttttacgctatttcgcttattgtgacagatatcttgatttcgacaaaagtgttgatgatttcctcacgtcatatctaacagataaaaatgcagaatttaattcaaatactattcaaaatatggaaacgcagttttctgaaatgtgcaacttcatccacagatactttccttatggattcagaaaaacagcatcagcaactactgttccaagaatacggtttgaggctttatccgttggcgcaaccttagcccttcgcattaatccgcaattaactcctaaaaatatagagtcatggataaattcacctgaatttataaagcacacaaggtctgatgccagcaactcacgaccaaaggtgaaaggacgtatagaatatgtgagagacatgcttcttggactaccagtcgactctgatcctgacgatgattcagaggagtaa

SEQ ID NO: 290442 - DNA, 732 bp, Morganella morganii
gtgcaaatgaaaagtcgtattttatttgatgaacgtgttagcgacattgaaaaatactttaacttcattgagttgctcataaataaaaaaccaaaacttagctatactgataatggattgccccatgaagatgatgtatcaaaggacactacgcatatacttaaatcgaatgcgttccttttgttgtataacctaatagaagccaccatttcaaatgcgatagaagatattcatgatgaaatattaagcgatgcatcgattggtgcagatttgttatgtgtaaagcttaccaaaatcgcattacgtaaaatggaaatagcaaacctaggcaactttgactgcgaaagcacaaatgcatctcagataatattaaaatcatggctaacaaaccataaaatgttggtgcaaaacaataaaaaccccttattttctggcaatgtagacgcaaaaaagataagagagattgcagatgactatggtttctcttactctacaaataaagacgatacccataatggtgcatgcctcgttactataaagctatccagaaactctcttgctcatggttctgactcatttttagacaagggcagagagacagccattgaagagttgattgcatttaaaaatcagacaatctgttatcttgacggaatacttgagaatattgaagaatatatcgaatcaaagcaatatcttaggcaaccaacatcagtacaactagctatttaa

SEQ ID NO: 290443 - DNA, 1038 bp, Morganella morganii
atgaaggcgagtgttgttgatttgttttgtggtgctggcgggttaacccatgggttgattcaggctgggctaaaggttcctgctggcgtcgatattgcgtctgaatgtaaatttgcctacgagttcaataatggctctgtctttatcgataaagatgtaaagaaccttacaaaggaagaggtgctttcgctgtttggtgatgctgactgcaaaattttggctggctgcgcaccgtgtcagcctttttcgacatacactctgtcaagagataaggcaaaggatgcaaagtggcctttgttatatgagtttgccagactgataaaggaaacctcccctgatattataactatggaaaacgttcctggtgttgttaagcatcaggtgtacatagatttttataactccctcattgagcaaggttatcatttgtgggcaggggctatcgattgtactcagtatggagtgccgcaaaaaagagaaaggcatgtattgctggcatctagacttggcgagatatcatttatccctcctcaggataatatcgttagtgttcgggatgccattggtgaccttcctgcgttaaaggctgggcaatcgtgtaaaaaagatccattgcatagagcgagtaaattgtcagaaataaataaactgagaataaagcactctaaaccaggcggtacttggcgagattggccagagaatttagttgcagattgccacaaaaaagaatcaggaaagggatatgcaagcgtatacggaagaatggaatgggataaaccaagcccaactatgacgactctttgctatggatttggcaatggcagatttggacaccctgaacaacacagggctatttcattacgggaagcggcgttgttgcaatcatttccagcaaattatcagtttgccaaaagcggttctgatatctctatgaggttgacagggcgtatgattgggaatgcagttccggtactactaggcaaggcgataggtgactcaataatgaatcaccttgttaaatttgatttaaatagctag

SEQ ID NO: 290444 - DNA, 198 bp, Morganella morganii
atggaatggattaagtgctcggaaagaatgccggaagtcggacagaaaatattaacttacactccaagtgaaggtgaatacatgatgggggaatacgacgagccagacagtgtttacatctatgtcggtggcggtgttgttggtgggcactctcaatttacccactggatgccactgccacaaccaccggaggagtga

SEQ ID NO: 290445 - DNA, 306 bp, Morganella morganii
atgttagaccacggaatattaaatgtacctctgagcaagcgcgggaacattgattcagaaatagaccggtacaaaaagcagaaggcagcagaaaaagctgacgcgacagcagttcgtaactcggatttcaaatcggacaaagaacacgctaaagcactatgggcgcaggttagccgcgacctcattaaggctcacgcaaagcagcgcggcatgaggttcagcgaactccgcgacacgcttgacggatatgtgaagtggagtccgaaaaaagcgattcaggttcttccgatgtttattgaagcatga

SEQ ID NO: 290446 - DNA, 195 bp, Morganella morganii
atgaacgcatacgcagcacaggatgctcaggaagatcggcgaatcgaattcacacaggacgtgatattcgaaatcagcacggacacgctggagtacctcggcactgaaagggaaaacgaaatcagggaggcaatcgacaaagttctaagaaaacggagcaggcagcatggaaacgggaatttattgtgggcttag

SEQ ID NO: 290447 - DNA, 234 bp, Morganella morganii
gtgggaactatgaccaatagagaattagttgatgccgcaattaaattggctggcaagttttacggcatgatgggatatgtgcaaagagatggctttgaatattggaagtcaccgcacccaatggaacggcgcgtatttgatatggcatgcgtggcatttgaagatattcgcggctccgatgtaatggatgctatcattgatttggagagtgaagaaaatgaacaaatatcgtga

SEQ ID NO: 290448 - DNA, 345 bp, Morganella morganii
atgaacaaatatcgtgacaaatcagactttgagattaatttgcgtgtagctcagattattttcactgactctgaatacgacgtaattaaacaatcaatggaagttgttaaatttcagaatggaagcggcaaaggtacttgccatgctttcgacccatgcaacaaccctgcggacgcaatgccgattgtttttgaaaacgatatcagtcttatttcagactggaacgagattggcgtgtggggtgcgacctatcaaccgtgggtatcatcagaaaataaaaacccactacgcgcagccatggaagtattcctgatgatgaaagaggcggagaatgaaaaagtatga

SEQ ID NO: 290449 - DNA, 288 bp, Morganella morganii
atggagttactgaacgcggagacacggatcaatggcggcaactatacccgtgctaatgcagaggtatgcctgattgccaccagaggacggggacttgagcgccggtctgccagcgtccggcaaatagtgtattcctgcctcggtgagcacagcgagaaaccgaaggaagtacatcaccggctggaagagttatatggcgatgtcccgcgcattgagctgtttgccagggagaaatacggcgaatgggatgtgtacggggatcaggtgccgggaagtattgaattatga

SEQ ID NO: 290450 - DNA, 1011 bp, Morganella morganii
atgtatttcacaaccacccgttatcaccaggaaaaaaatggtgcaacttttgtcgatattatctgcgatgaagcacacgatgcgggcctggatgtaaaattcaaaggcaacatcgacattaaaaaactggaaaaactgattgctgagaaaggcgcggaaaatatcgcttatatctgtctggcggtaaccgtaaacctggcaggtggtcagccggtctctatggcaaacatgcgtgaagtccgccagttatgtgataaacacggcatcaaagtgttctacgatgcgacccgctgtgtggaaaacgcctacttcatcaaagagcaggaagaaggcttcgaagatgtctccattaaagacatcgttcacgaaatgttcagctacgctgacggttgtaccatgagtggtaagaaagactgtctggtgaacatcggtggtttcctgtgtatgaacgacgacgacatgttctctgctgcacgtgaactggttgtggtttatgaagggatgccttcttacggtggtctggccggtcgtgatatggaagcgatggctatcggtttacgcgaagcgatgcagttcgaatatatcgagcaccgcgtcaagcaggttcgttacctgggcgaaaaactgaaagcagccggtgtaccgattgttgagccggtcggcggccacgcagtattcctcgatgcacgccgtttctgcccgcatctgacccaggatgagttcccggcacagagcctggcagccagcatctacatggaaaccggtgtacgttctatggagcgcggtattatctccgcaggccgtaacaaagaaaccggcgaccatcaccgtccgaagctggaaaccgttcgtctgactattcctcgtcgtgtatacacctatgcacacatggatctggttgctgacggtattatcaaactgttcaaacacaaagaagacattaaagggctgaagttcgtatacgagccgaagcagttacgtttcttcactgcacgctttgattacgtgtaa

SEQ ID NO: 290451 - DNA, 648 bp, Morganella morganii
atgattgatcctatgtatttagttgtcgttggagcggttaatgctaatacggttcaatttttagggacgggtttttttatttctagtgataaaataattacctctcgtcatgtaattaacggattttcttctaatcttgtggtctctccatctgatataaatgattttaatagttatcagaatacaaatgttgatagctttaaatgtaattttgttgatgttatcgatgaggatccaataaaggatttatgtgttttaaaaataaaagatgcaagtttttcaggtccaagtcttaaattaactactattgatgatataaatgtaggtgaagatgttggtattttaggttttccccatagtaatgaaaatagaaaagttttgacattccaaacagcaagagtaggtgcaaaagtttttctttcaagtagcaatgtgaaatctaaacatgctgttataaacatccaaactaggccaggtcaatctggttcaatagtttttaatttaaaggataattcagtaataggcgtgttggttggagcttatgcaaataattctctaggatctgttttggtcggaggaattaatcctgctgaactacatcaaacaacctatgcagtttctgcagaatacattaaggatatgttatga

SEQ ID NO: 290452 - DNA, 777 bp, Morganella morganii
gtggggctatatgagaagtggtgtgagtccattaaagaaaatgacggacgcaagtactactggacgtatgtcgagaaggacggcggccgcgatgatatccgcgaggaccttgctgaaaccattcgctcgcactatgaccgacttgaacgcatcgccgatgacgtagggcgactaggatacaaggttgcagccaagatcctcagcgaggcaatgcctaatacacccaagggacgctctggcgacctcggcgaaattcttgcaactgaactagtggaggaagaaatcggtctgcgggtacccgtgcgccggctccgctacaaggatggccgtaacatggccatgcgcggcgatgacttcatcggcgcgggctaccaagacaataaactctggctgctaaaaggtgaagctaaaagtaaccagaagcttggcaaaaccacggttaccgccgcgcgcaaggtcctcgaccgcgacaatggccgctgcacgcctgactcgctgctgttcgtcgccaatcgcctgctggaaagcaacgacgctggcgataacgcactgggtcgcgaccttcgtgacgaagtgggtcttaagtctatgccagccgatcgcatcgatcacatgctcttcaccgtgtcgggtaacggccctcacgcttccctgaaagagaaccttgaagccgctggagtcaacagggaccattacgtcgtgaacattcacgtcgaagaccatcaggatttcattgcggcaatgtacctagaggcggaagatcttggagacgactga

SEQ ID NO: 290453 - DNA, 3501 bp, Morganella morganii
ttggagacgactgaagaattaagcaccttcctaacggccgctacagttgacggtattctcgggcgcctcctctatcgcggtgcagcttggtcgttgatgcgcaagaatggcgtattgccgcaaaacgctccgccgcttggcgcaaccatcgaaacagatcttgccgagcacggttttgccctgcttcgaggcgcaatggcactgcgggctcaggctggtgcttcggaactcactggcaaggcctttgagcgcgcagccaacgccttcgaagccctcgtgcgtaatggtgattcagagtcgcctgatcgcggattccgccgcaccattgctgctgcagcctaccatctagccggcttctcagccgtcgccttttcaatcttcaacgagatagaggaagaccttaacgtctcacccggcgaaatagcgatccgacacctgatactgcgcgatctcgatcaacttcgcggcttcgttcgcgactggttggatgatggggctcacggcgatgagcagatcgcggcggccctgcaaggcggagacgctgacgtcgacgaagtactgtcgacaattctcaatacgacgatctgccgtgccctggcatttttcgacttcgcgcttgagacgggcgaggttgagtcgttcgaagccgcgcgagggctccttaccaccgctgttgggcttgccgacaacgctgagaacgtcccgctgtggtggatctcgaacctctgccgtcacctgatcgacgacttgtggcaacactcactacaccagaatttgccgactgagccacccgagggtgcggaggaaaaatatcccgacctgcggcggttgtttatatcttccctttacgcccgcaagacctcagaagtggagctatggccatcgcagcgcgaagccgcccagcgctccacagacgtcacggacgatctggtcgtcgccctgccgaccagcgcgggcaaaacacgggtggcagagattgccgcgttaatgaccctatcctccgcacgccgggtgctaatcgtcacaccgctgcgcgctctttcggcccagaccgaacgatctttcaggaagaccttcgcgcccctagggtttggtgtctcttctctctacggcgccagcggcctttcggccggtgatgaagacgccctccgcacacgggagatcatcattgcgacgcccgaaaaactcgacttcgcgctgagaagcgaccagacgttgattgacgatgtcggcctgatcgtcctcgatgaaggccacatgatcggtcctagtgagcgcgaaatccgctatgagacgctcgtgcagcgtctacttcggcgcacggatgcggcagagcgccgaatagtttgcctttccgcgatcctgccaagcggcgacgaactcgacgaccttaccgcatggattcgttccgacgaacccggggagcctgtgcgttccgactggcgcccaacgcgccagagattcggcgcgcttacctggcgaggtaaggacgcgttgctacggctcgatctagacgacgatggccccttccttgacaaattcgtcgcggaaaaaccagcgctcgggaaggagaagaagccctatccacgcaagaactcgcacctcgctctgttcgcggcatgggagttcgcgagccagggcaagcgcaccttgatcttctctacccaagcaaactgggtcgagagctacggcaaacaagtcgtggacctctgcaagcgtggctatctggactcgttgctggaagacgaggctccaatcgcccgcgccctagaagtcggcaaggaatggttgggcgaggatcaccctgccgtggccagcctgaaggtgggcgttgccattcatcacggccgactgccgagcccgttcctacgcgaactggaactgcttctatccgaaggagcgctaaaggtcattgtcgcttcgccgacgctctcgcagggcctcaatctcaacgctgccgtgctgcttgtgcccgcgctatatcgcgcctcagagaagatcaaaggcgaggaattcgcgaacgtggccggccgcgccggacgtgcattcgtcgatgtcgaggggctgatcgtccatgtcatgttcgacaaaatcaaatggcgaaagaaagaatggagggaactggtcgcctctgccaaggccaggacgcttaaaagcggccttattcagatcgttgccgaaatccttgagcgtctatcacgcgagggcgtcttggatatagatgacgcctgggaatatctcgccaacgcccgcggggcttggaggtcacctgacgaagaagcagtggtagcagaacgactgacagccgcagtggaatacgacgcttccaccgacgatgaagacgagacggatgacgaggaggaaaccatcgacgaggagcccctgtctcagctcgtcgaacgcctcgacgccaccgtattcggtctgatcgaagccctagacgctgatcgcgccgatctacctaaacttctagacgaggcgctcagggggtcactctgggctcgccaaattgctcgggaggacgaggatgtcgcttccctgcaccggaaggtattcgaagcacgcgctgctctcatctggaaagctaccaccaccactacgcgacgcgggcatttcgcgatgggagtagggctcgaagctggcctcctcatcgacgctatggcggacgagttggccgaactcatcgacagggcagacagtgcagcgttgagcggcgacatcaacgaactcgccgatgctctcggcggactcggcgaacgcctgctgttcatgcggcctttcatccctgacaaggcgaacgcgctgccgccgaactggaaagctatcctacgttgttgggtgtccggggaagaagtctccaagatcggtccgcagaacatgcgggcggtcgaagatgccttcacctatcggctagtctgggcgctagaagccgtccgcacccggcgcatgtccttcggctggtcgccggatacggtggcgggcgctgctgcggctgcggtcgaaaccggtgtcccccagttcatgatggcgatgctgatccgcgcaggcctgccgtcacggcgcgcggcaatggcggccatcgaagatgctgaaccagtcttcgtcacgcccgcagaaatgcgggcctggcttgaatccgacgagattacggccaaaaccgacgcaggcgactggccaacacccgacacctccgcgttatgggcccgcttccgaaccgaagctctcagcggaggcatccagaaatggtccgtcgaacgctataagcgcctactcgataccgagtcctccccgcccgctggcctctatcgaatcctcaccgacgaaggggacgcgcggacttggctggcaacccccgactaccagaggatcgccgtcttcaagaagccagcggttgatcccaagcccagtctattctcgggacagttgccgggcaaaacccggctcgtggatgctctacgcgtcggccgcggaaagttgcgttggccgactgccgatgtctaa

SEQ ID NO: 290454 - DNA, 852 bp, Morganella morganii
ttgaccgagaggttaaagctaattgctgagaataaagaacgtccaaataatgccttggaggccctgtcgtcgttactcgtcatagaagtcaatcaggcgatacttaaacaagatactgaaaaactgagttcgctatggccgcagttctcggatgtcgtcaagcgtgcgagaggtctcggtgagttttctgctgagcgtttgactaaaatgattgaggtgttcgggctcgtcgccggtaaggacagtagttatgtccaactggttgacgaggtagcagcgtttgtttctgagcgtaccggtgaggctcagggggcgttagtgcttctcaaacgagcgcaacaactcgatttcgaagataacttcgaaatcattcgtttgttgggcaaagccgcgcggcaactcactaaaaaagaatatgccgattctctgatcgaagcgctgcaactgctcacgtttgcttatcgtagtgccggattgctctgggctgcgcgggctacatgcatttttgcaatggcttcgatgttcatcgaagccgaggaggacagtgacctttcggcttcgatcgtacccatggttatggccctcgcttggattgctgtcgaacttcggcatcttccagacgctctcgaagctgttcggttagttcgaggttgtacggcgatgcttccgctcgacgactcatcaaaagatcgtatcgcgaagcgacttacggagttagatcttatcctggcgagccaaatcctaaatttcacagcggaagaacttcaacacgttgtcgccacagtcatggcagtttattcactctcccttcgcgacaggtgcgcgcttctgttcgtcgatccaggcatatag

SEQ ID NO: 290455 - DNA, 276 bp, Morganella morganii
atggctttacagtgtcctgagtgcggcgcaatttcacatgctcgttccagcttttatgaggccccatccataaagcggacctactatcagtgcaaaaacctggagtgctcatgcacattcaccgcactggagagtgtggacacgattattgcccggcctaacaaggttgagaccaaggatgaaactgaaagcgagccatcagagaagccagcccatacgctccgaaaatatggcgcagcctccaggctatctaaccgccaacaaattcctgtctga

SEQ ID NO: 290456 - DNA, 1422 bp, Morganella morganii
  misc_feature (1091)..(1124): n is a, c, g, or t
atggagtttattaacttagaaaagaagtttgatgttttctgtagtattgatgtggccaaatgttttgatagcatttatacccatagtattacttgggcagttaaaaataaagagttttcaaagcagaatagacatgtaaagaactcgtttggaacaatatttgatcgcttaatgcaatcaattaattataatgaaactgctggtatattaatcggtccagaagttagcaggattttttcagagattctttttcaagatattgatagagaggttgaaaacttacttggggagttacaatatttaaatggtagagactatactattaggcgatatgtggatgatatatttatctttacccttaatgaaactattctaaacgatgttaaagacatagtagaagatacactgaaaaaatataagcttacagtaaacaagcaaaagacatctactactctacgccccttctctacagcgaaatcaggtactataaatcatctgaatgaaattcttaattcgctaacaagcaaattcatcgatcctgaaaatcctgagaaagtaaaaaaaatatatagtaaacgaaatacagttgtgtcgtatttaaataagataaaatcaatgttcgtactcgaacgtgaaaactacaacctagcttctggttacactatttcctcgttaactaatattgctatagatttggatcggaagtgtaaagctagtagcgattttatgaagaataatgagcgtcaaattagtgatttcttctatgtcgctacagaaataatttttcatttgtttttcatttcacctagccataattcctccgttaaaatatgcatttttatagatatagtatgtaaaaatgtagatggaatgagttctggagattcaggggttttgaaaggtttgatttttaatttgatacatagttattttgagagatgcatcgaagttgaaaagaataacaagattaaaaaaatatctcttgagaacttaaatttgttaatagcattaaagttacttggtgaggattataatttaacacggaattttttaggtaaaatctataatatagatggacgtaatgactttannnnnnnnnnnnnnnnnnnnnnnnnnnnnnnnnntttaaaaacaaagatgtttaaacatgttaaattgattttagggaatgttacggatataaaagttgactccttcaagttttatttgttacttgatataataaattgcccatttattgaggaaagaaaaaggaagtcattaacggctgaagttgtgaagtttcagcttaacagacaaccatctgctgctgagattaatatcggatgggatgcacttacgcagggctattggtttgtacaatgggataactttgatctacgcttatttttagagaaaaaagaattgcttagtgcttattga

SEQ ID NO: 290457 - DNA, 402 bp, Morganella morganii
atgtcaggacatccacatgctgacctcatggctaaggcagcagagatagcgaagacggatcagtattggcagcggcactttgaggaaaaatttcacagtacggataagtggaatcaaatgtcagatgtgttctttcaaacacacagagaataccggctgaaacccaacttcatcgacattaacgggcataaggttccggagccagtgcgtgaaatcccaagtcctgccagcgtattttatattgctgacaccaccatcggccctggattacgcaggaggctagcgtggacaggagatgaaatgaatatgaggctgctaaaaggaggtctcttacacgctacaaatgaagcggcagaagcccataaagccgccctgctctctttcacacagataacggaatga

SEQ ID NO: 290458 - DNA, 1122 bp, Morganella morganii
gtgcgcagtgagcgtacctcatttgatattgctgaagatgttgaggacatgctcaacgaagtaagcttcaaagacattagggaagccgtgttgattcgtaccaaagagtacctgcaagatgttttggcagaaaacgtgtcggctggccgcaaacgagtggatgattttatcaacaatcatgctccacgctatcgccccattgccaattatgttgcagaagagctattgatcgttgacccagaaaaatcagataaagagctggaactacacctgcatgctcagtggtatgaagtggaacgtcaattggtgaacgaaggccatgacatcatgctacctcagaataaggagcatgtagaagaatataaagaacggttaggcgactacctacgcaaagcaggggaccttaagaaatcagatcttgccaattacgtttcacaccgcaaggttattatcgatctgttacaaaaatctattgagcgactagaggacggaaagtacgcccgtgaagatatgattcacgaactaattatgcctatgcgcaaggattccgtcgaggttttcctagactcttgtaacctttggctaatcgatgagcgcttggcatttcataactatttggcttctgataaaacgctcaattcgatgccaattactggcaatgaatcaaccaaagagccagacttactcagcctaagagtattcgataatccccttcttgttaacgaccagatcagctttccacttgcagccattaccattatcgaaatcaaacgccccatgcgtaatgatatgcgagagggtgaagataaagaccctattgatcaagcactcagttatttagagcggatacgcgagggtaaagtaactacaaaatccggtcgcccaattccgggcaataatgaaataccgggctattgttatgtgctttgtgacattactgaatccatgcaccggcgctgtcgtcgagccaatctgcggattacatctgatggcatgggctatttcggttataacgaaccttcccatgcctatatcgaagtgattagttttgatcaattagtaaaagcggccagagagcgtaaccgggcattcttcgacaagcttggattgccttccgcttga

SEQ ID NO: 290459 - DNA, 471 bp, Morganella morganii
  misc_feature (6)..(15): n is a, c, g, or t
atggcnnnnnnnnnngataatggctgtggatttgatgaagccaactttaagtcatttgaaaccctagattctgaccacaaaattgacaaagggtgcaggggtgttggccgcctgatgtggctcaaagtgtttggtctggtcgaagtggaaagccactttttcgatattgatggtgagcttaaaaaacgcatattccgcttcgacgataaatcgggagtccacgatgaaaaggttgtagaagccacataccaaaaacctggcactatcataaaactgcttgattttgatgaaaactttcgaaagcaggtccctgcaaaaggccagtccatagccaatcagctgctggaacatgttctatggtattttgtacggcagggaagcgcacccaagatacttttagaagacacggacgaggtgtttgacctcgatcttttgctccaagaacatatgcatgccagcgcctttctctaa

SEQ ID NO: 290460 - DNA, 249 bp, Morganella morganii
  misc_feature (235)..(244): n is a, c, g, or t
gtgagtctacaaacaaatttaaaaggccgtttacggaatacttcattacctaagagtcacggcctaatgccagtatttgaggcggtggtaaactccattcattctattgaagagactaagaacccccttaacgggaagatcgttcttcgcatcaatcgcactactcaaggtagcctagatttagacgcaaaatcccaatcgccaatcatcggcttcactataattgataatggcnnnnnnnnnngataa

SEQ ID NO: 290461 - DNA, 1362 bp, Morganella morganii
atggctaaactattgcccgaagatttcagccctgaagagctgaatattgagattgaagaattattccctaactgcacggagatattttatcttccgagcccccatgagctagaagatgcaggaatagatacgaaagctccgagtcagcacaaaagtaagattgcaatttttagcggtcaggatggttttatctcgatctttcccatatataccttacctacccatcctcaatacttaaaaaataagtatgaaagaatacatcaaattgatattgaagttgattttcactcagcaccttacacaaaagaagaggtcgttgaatgcttgcaacttttgccggcaggttttatcaaagacattcgctatggattgggattgacaaaagaatatcgtgctataatttcagccattgaagagcatactgagtatcaatgtcttcttattaataaggaaaaaactggcggtactgattatgaatgttttaatctaaatttgtatgattatgatgaaatgcgccgcgcttgtaaccgcataacagaaagagctcggaaagttgcgcgtataacgaaggcagccgccacctacaaccatattgcttatcaattgggtgttaagcaaaaaccgttacttaccgacaatgatcacattagcaagatgcttcggttcaagataacggatactgataagcaagccgcaatgagtatggttacggaagacaaatcagtagtaaaacaaactgactcactcaccttggccaagttgaaaaatgacatcgaattggtctcattagagcgtttgattggttcttatgaagacttgctaaaccaaaagactaaagaagatacctggcagaaactcttcaatcagaacccatttatcttgagtcttgccttcggctacccggcaataaaaatatcagaccaggcaagtgttggcggcaaacgtttgactggtgatggcgaaaaaatcacggactatctaataaaaaatggtataacgaacaacttagctctcattgaaatcaaaaaaccttcttccgacctactgaacaaaaagccctacagaggctcagtttattgcgcctccacagaacttaccggatctgtaacacaagtactcgatcagtgttatcagctacagcaaaacatcgcaacgataaagaataacaatcgaatttatgacattgaatcatacgctgttcactgtattttagtaattggcacaatgccgagtgatgaagacgagaagaagtcttttgagatgtatcgacgtaattcgaagaacgtacaaatcactacatttgatgagctcttactcaagttaaagcaactgcatgattttctcgacaatagtgatgaataa

SEQ ID NO: 290462 - DNA, 1209 bp, Morganella morganii
atggagcaggttttatatcaattaccggttggttgggagtggcgcactatagatgaaatcgccctgattggcgctgaacgaggatttacgccaattccagacgaggagggaaagatcccattcgttggaatgactgacattgatcaagacacaggccaaaaaaatacttatgagttgcgtaattttgatgatgtaaaaaagggttatacaaaattccaacgcaatgctgtgttattcgcaaaaattacaccatgcacagaaaataataaaactgctttaatagataaaattgacggtgggttcgcaactactgaagtttacccaattcatgcatttgagtgtgttgaaccaaagtatctgttgcacttctttcgttcgccatctgttcgcagcttcctaataggccaaatggaaggcgcaactggtagacaacgagttcctttaaaagccctgaaaaatgttagtgttccgatgtgctggctttcagaacaaaaacgcatcgtcgaaaaactcgatgcattactcacccgtatcgacgtcgccattgagcatttacaggaaaacgcctcgcttgctgatgcgctctatgcaagcgaaatcaataatatatttagttctggtgatgataagtggccattaagaaaattaaatgaagttgctgaagtggcgcgtggaaagtctaagcataggcctcgcaatgacaaatcattgtttggtggagattatccgttcatacaaacgggtgatgtacgaaatgcacaaaaatacatcacaactttttcaaacagttataatgagaaagggtttcaacaaagtaagttgtggccaaagggcactatctgtctaacaatagcagccaatattggggatgttgcaattctaggaatggatgcgtgttttcctgatagtgttgttggtatttcgtcttcggagttagaaaccgattacctttattacttcctaacaacacttcagcagcaactggacagtaaagcgaatgccgcagcacagaaaaatatcaatctaaaaatcctatccgtaatagaaattccagttccccctcttaaagagcaaagggacattgtgcgtaagatcaatgctgtcgaccaaatggctgtaagagtgaaggctgaaatctctgaaaaaataacaatgatgcagcaactgaaagcatcaattctcgattccgcctttaaaggcgagctctaa

SEQ ID NO: 290463 - DNA, 1479 bp, Morganella morganii
atgtcactacaacaaaaaattggccgcattaccgacattctgcgccgtgacgatggtatcagcggtgccatgcattacacagaacaaacctcttgggtattgttcttgaagtttctcgatgattacgagtccgaaaaagaagaagaagcagtattgtccggcaaagactatcaacccgtactggataaggaacaccgctgggcaacctgggcttgccccaaaactatcgatggcaagctggatttggcgcgcgccaaaacaggagatgaccttaccgattatgtgaacagtcagcttttcccatacctgaaaagcttcgccaacgtaaccgtaaatggcgcagacccaaagtcgttcaactacaaaattggcgcgatatttcagtatctggataacaaagtggcctcaggtcataccctgcgcgaagtgctggatattgtggatagcctgaacttccagtctgagtccgatttattcgagctctctttggtctacgaaggcttgttgcaaaacatgggcgatgccgggggttatgcgggtgagttttatacccctcgccctgtagtgcgcgccatggtgcaggctatagaccccaagcccggtgagagtatttacgacgcggcagcaggttcatgcggttttttggtcgaagcctttgaacacttgaagagcaaaaagaatgaactctccaccaagcaatgggatttcattcagcgcgatactttcttcggctatgaaaaaacctcgctggcgtatgtcatgggtatgatgaatatgatccttcatggcatcgaatcacccaacctgttccgtggtaacaccttgacccaaaatattcgcaatattcaggaaaaagaccgttacagcattattctggccaacccgccgtttggcggaaaagaaaaatcgcagattcagcaaaacttccccatccaaagtaacgcaaccgagttgctgtttttacagcattttatgaagaccctgaaaagcgggggcaaggcggcgattgtagtgccagaaggcgtgttattccaaaccagcagcgcatttaaacaggtaaaacaagaactgctggaaaactttaacctacataccattttaagcttgcctgctggggtttttttgccgtattccggcgtgaaaaccaacgtgttgttttttgaacgcagcggcggcaccagcgatgtttggtattacgagtgcgaaccagaacaaaagctcaccaagaacaaaccgatcactgatgaccacctgaaagagtttgttgcgctgtatagcagacgggaaaccacagagaattcgtggacggtttcagccagcaagttgactgaagagtatgacttatctgccaaaaatccagccaaacagaaagacgccgaacacttagcgccaagcgatattcttaagaaaattcgcgccaaggaaaaactgatatctgatctgctggatgaaattgaaaatctgttggaggataaataa

SEQ ID NO: 290464 - DNA, 1800 bp, Morganella morganii
atggaactgaacttagccccaaacccattgcaccaaaatgcacagactctccgtattgataaaatcgcgacactaattggcgagaacggctctggtaaatccagtattttacagtctgtatttgaacaacgattagcaggaacagaccatgaaaatctcaaggtcgtgtgcttctcctccggccagaacgagaactactcagcaaagttcagtacctatctaaatagagagcggaaagccggtcgaggattgagccttgagtgtttttactatgataagtcttggtctaagttgttaatttttttagctaccgcgatcaagcgtaaaggaaaagttcgggcttttttggctgagcgcaattatgtagttgagactgagattaatgaaggaagtgatcgagaaaaagacgatctaagcacaatcttgaaatgctcttttaaggttgataaaaactacatcgcacgtgtgcaagatgcacttagccgtgaagaacgtggagaagcggacacactacgtgcaacgccatactttcgttcactggaaagctttattacaaacctgatctcccgtagctatgagttcgaagagccctttcgaaagcaaagcatcaatatcacagccaatgagttaatccaagtttctttcgactaccctaggcgagttcaggctggcgatgacgaagccggtgcgcctaacgcccaagctaccagctgggacccggaagtggccttttttactcaagccgctgataacaattactttatagataagtctcgttgcaagctggtattcaacggcaatatcgagctggatcagctcagcgatggtgaataccagctcctgttcctgtatgcgctaattgaccttttcgactctgacagcaccctgttcttattcgatgaggcagactctcatcttcactataaaaacgtcgaaaaactttgggcacttctgcacagcataagaggtcatgcaatcacaacgacacacttgctcgattccatttcggcaaaagagaatcgtattgagcacctgaaagtcgtagaaaaaggcaggatcagcgaagacaataagatcaaacagttgatcaatcgtctgagtgtactttcacgcgcaaaatccgttgagtttgaggtatgtggcaagctaccaaatatagcgttgttagacgattataacgattgggttatctttaccaaacttgcagcacgtgcaggattagatatagatcagctatctacagtgtatgctatgaaaaagtcttcaagctatacaacggcaagcgagacctttggtaaacgtaagatcgattggctacatagtctgagcaagatagagtctcctctgctcacaaccaaaatatttatgatttgcgatcgggatgaggcagtattggattggaacgcggccaatggtgtacaagtgaacggacaaatataccgtgacttgctcaatgcagttcagtggccgcaaagaatgagggtggcaccatatttacttgcgtggaagcgcagagaaatcaaaaactatttactctcatacactgctttggcgcatcacaatcttctcagtcaaattaacaatggtgatattgctcagcgcaatcatctacagccgaacaaccctaatgacaacgacgatattcgcaggctcaacgttaaagatacaattaacccgctaattaataccaccgaaggtttagatcctgaaaaactacagacctatatcgatctgattccgcctgccgaaatcagcgaagacatcactaatatgtacaattttattatcggaaaactctaa

SEQ ID NO: 290465 - DNA, 2316 bp, Morganella morganii
atggcctctgaagcagatactcgagcgaactatattgatccagctttggtttcagctggttggctatcgagcaacatcagccgggagcattacttcaccgacggtagaaagatggcaggtggtatgcgtgggcggcgttgttttgtggattatctgcttcataaagacagtcgctatttggcagtggtggaagctaaaaaagaatccgagcatcctacgaaaggcctgcaacaagccatcgactacgctaagaagctttgcgttcgtttcgtctattcaagcaacggtaagcaaacctacgaattcgatctggaaacaggcaaaggcgactatattgagttctatccaacacctgtagagctagaaaaacgctatacaagtaaaattacgggattaagtcaagaactaagaaatatcccgtttcacttggaaggagcaatgcaaccacgttattaccaggaactggcagtccattccgctacagacgcaatcggtgagggtaaatcccgaatcttgctcacactagctactggcactggtaaaacattcattgccttccaaatcgttcataaaatatttcaggctcgctggaaccgcgacaaccccagctcgcgcagaccgcgcattctgtttctggccgatcgtaatatccttgcagaccaagccattaacaccttcaacccctatgaaaaagatttgattaaaattaatggggaggaagttcgcaagcgcaatggcgtggtgcccaccaacgcacacatcttttttgcgatctatcaggcgattgcggaacgggaaaacattgatggttactataaagcctatcccaaagatttctttgacatggtattgattgatgaatgccacagaggtgctgcaaatgaagcaggttcctggcgagccattcttgatcacttcagtagcgccgtgcatttgggtttgactgccacaccaaaacgcacagacaacgtggacacctatgaatattttggccagcctgcctatgtgtattcactaaaggatggtatcaacgacggttttctcacaccataccgggtcaagcgcattaggactaatttggatgaattagttctcaccaacgatgatgtcatcgtcgaaggtgaatctagtcaagatttatatcaggtcgaagattacgaccgcaaaatcattgtagatgaacgcactgagttggttgcgaaagcaattttgcaaaacatcaacccgctggataaaactattgtcttctgtgaaaaccaaaatcatgcgctaaccatgcgcgacatgattaataaaaacaaatcagttaaagatccgcattactgtgtacgggtcaccagtgacgaaggcaagatcggtcgcgaactgctggaaaaatttcaggacaatgacaaaaacatccctaccattattacctcatcacaaatgctcactaccggcgttgatgcccgtaacgtacgcaacgtagtgctggatcgaaccatagactcaatggtggagttcaaacagattgttggtcgtggtactcgagtgttcgacggtaaagactacttcaccatcgtggattttcgtggtgcgaccaataacttctatgacgaagaatgggatggcgagccccaagcccccgagccgggtggcaccagagaacctacgccgccaccctattcgcccgagccaccagtagacggcgacaggccagaacccgaaccaggcgagatacacccacgactgaaagtaaaattaggtaagtaccgtgagctcaaggtcattgatatagaaacccgctatatcgacgagaatggtaagcctctctcgattcaggagtttgtcgaacggctaattcaacaattgccaggactattcaaaagcgtcgatgaactcagagatatctggtcagacccagacctacgcgaacaactgctggccaaactgatacaagccggctttgacaaagagcagctatccactctgcgtcgaatgttcgaggccgacgactgcgacatattcgatctactagcatttttagcgtttgaacaacccatggctacacgcagatccagagctgaggctgtacggactaataacgccttttttgatcaatacaaagaggcaaaggccaagcaattcctgcattttgtcctgaaacgctatgaacaagacggcactacagagttggcacgtgagcgcctgccagccctaattgaactatccggcctcggcaccaccaaagatgcttctatggcatttggcggcaaacctgcgcaattgctcgccgcattcaaacaactacaacaccagctttatcacgtgagctaa

SEQ ID NO: 290466 - DNA, 225 bp, Morganella morganii
atgatccgctgccacctcgccagaatgatgggcgaacacaaattgcgcattgcagacgttgccagggaaactgggctcagccgcgccacagtgaccttgctctataaagagacggcacaaaaggtagatctaaatgccattaagcagatctgcgtactgtttgattgcactgttggtgagctattggaattgataccaagccccaatgaccaaggagcgacctaa

SEQ ID NO: 290467 - DNA, 609 bp, Morganella morganii
atgaaagtcacatggattgtcacgcctgtggggtatcagcggattgcgaaacgctgcccttcatgcaacattaaacgagacttcacgccgtcaggtgcatttcgggttaattcgcaaaagaaggtgctggacgtgtggagtatctataaatgcacacactgtgattacacctggaatatctccctgttttcgcgcctgcacgtcagcaaaatcgaccgtcagctttatcatcggctaatgacaaacgatgccgccacggtacagcactttgcaagtgatatcgcgatgctgaagcggaacaatgcggagctatcgggttggcctgattttaccgttcaggagcgctggccggtaagcatcaccacccaccagcggttccgcgttagtgtcaggatcttccgttcatttcaggtcagcctgctgtcgattttgaagcatcagctcatgctgagcactggtgaaattcagagaagggtggaagcaaggcagatttacggcgttacgatgaagatgctcaaatcgagaaagctgaaggcagtggaatataactttcagctgtctgcggaaacgttatatgccaggagaaggatcgatctgacgtgtcgttaa

SEQ ID NO: 290468 - DNA, 399 bp, Morganella morganii
  misc_feature (368)..(377): n is a, c, g, or t
atggcagtcagaaaagatatcgaagaaatagctcgacgccttaatatgctacctcgggttacccgtgaatttcttgcgatacttcatgaacgagcagaatacaaagaacatcgctttaaagaacatcctagtatttactatgatatcgttttaaaaacatatactagcgctcaactggaaatcgatttattatcttcttatcatcttataattattgactttgacaaaatctctgatgagaaaagaattccggctgaaataggcttgtgcatgtatgatgatataagctcaaccttcggtgttgggtttcacaattttgttaaggaaaaagaattatcgtttcgtgatgtactaggcaaagtggattnnnnnnnnnngcaatgcactacttatttgtag

SEQ ID NO: 290469 - DNA, 627 bp, Morganella morganii
atgaccactgaatacacggattaccacgccctgaatgccatgctcaacctgtatgatgcagagggcaggatccagtttgataaagatgtcacggcggcgcaccactacttccgccagcatgtgaatcagaacaccgtgtttttccacaatctgcgggaaaagctcgattttctgattaatgaaaactattacgaagctgacgtcatcggacaatatgattttgaatttattaaaaatctgttccggctggcgtacagcaaaaaattccgctttgcgaccttcctcggtgccctgaaatattacaccggctataccctgaaaacctttgacggccagcgctatctggagcggtttgaagatcgcgtctgtatggtggcgctgacactggcgcggggagatacgcaactggcagagcatctgctggaggaaatcatcagcggacgtttccagcccgccaccccgaccttcctcaactgcggcaaaaagcagcgcggggagtttgtctcctgcttcctgctgcgtattgaagacaatatggaatccatcggacgcagtgtgaactcggccctgcaactctccaaacgcggcggcggtgtgtggggaggtgatcaatattgcactatttaa

SEQ ID NO: 290470 - DNA, 864 bp, Morganella morganii
atgagcgatatgatactgaaagccccttccgcctggcggacactgagccgcaatcttttgttgtggtttgcgctgtttgtggtggcactgctggtgctggccatgattgccgggccgtggatctccccgcatgatccggatctggtggaattatcaaaccggcttcaggaaccggacagtcagtactggctcggtaccgaccatctcgggcgtgatattttttcccgcctgattgccggagcgcggatttctctcggcactgtcgctatcacgctggtgattattatgacgctcggactggtgatcggcggcattgccgggtttaccggcggacggacggatcaaatcatcatgcggtttaccgatgtgttcctgacattcccgacactggtactggctctgtttttaatcggtatcctcggtaccgggctgacaaacgtgattatcgcgatcgcattgtcacactgggcgtggtatgcgcggattgtccgcgggatcatcctctcgctgcgccaccgggaatttctgctggccgcacgtctgagcggcgccggaaatgtgcggatctttctccggcatctgtttccggccaccatttcccagctgatcgtgctggcgaccctggatatcggccacatgatgctgcatgtctccgggctgtcattcctcgggctgggcgtggcggcacccaccgcagagtggggcgtgatgatcagcgatgcccgtcagtttgtccggacatcaccgatgctgattttctggccgggtttaattttatttttcagtgtgatggcgtttaacatcctcggggatgctctgcgtgatcgtctggatccgacactgagggccgggacatgtcattaa

SEQ ID NO: 290471 - DNA, 324 bp, Morganella morganii
atgagtacaaaaagtaaatttaagagtcccgcttttgaagctatacatagtgcagcgtcaggactgttcagtgttggtgctatcccgcaggaaacaatgcgtaattttgatcaggcatgtattagtgaattacatgatcttcaaccatccgaaattaaagaattacgtgaaaaattaaatgttagccagccggtatttgcccgctatctgaatacaagtgtttcgaccgttcaaaaatgggaaagtggtgcaaaacgtccctgcggattatccttgaagttgcttactgttgtgcaaaaacatggtctgaaagtattaatataa

SEQ ID NO: 290472 - DNA, 360 bp, Morganella morganii
atgcgggtcttcaaaaccaagtggtttacgaaagcggcaaagtctcacgggattacagatagtgagttatgtcgggtaattagttcaatctgtgaggggaaggttgttgatcttggtggtggtgtttataaaaaacgtctgaaccacaaccgggacagggctattatcctggcaaaaggagaacagcattggttttatacctttttgtattccaagcaggatcaggcaaatatagaccggcaagagatacttgaattcaaggagttagcaaaacactacggggcattaactgataatatccttgtagccctgatcaaggctaaagaattggtggagatatgtaatgagtacaaaaagtaa

SEQ ID NO: 290473 - DNA, 441 bp, Morganella morganii
atggatacacaaaaccttcagttcgatgagcagacagcaattactgcctcagtggtacctgatgagttacgcatcggcttctggccgcagcactttggctccataccacaatggataacccttgagccccaaatcttcggctggatggatcgcctgtgcgctgattacagcggcggcgtctggagcttttatacactcagtaacggcggcgcatttatggctccggagcccgacggtgagaagtggacattgttcaacagcatgaacggcaatggcgcagagcttaccagtgaagctgcagggatggtcgcctgtctgatggcttacaaccaccacgcctgtcgcaccgagtgtgacgcgatgactgagcactattatcgtctacgtgacttcgcgctgaaccatccagagtgcagcgccattatacatctcatcgactga

SEQ ID NO: 290474 - DNA, 1227 bp, Morganella morganii
atgtacgatgacaaaacaatagcttttgcgaagaagcaagagcaaaaactgattgatgcgctgggacatagccgtgagcatactgatgtcagctctgaagcccgaaacagagatgattaccagcgagactatgcacgaattctttactcatcctcattccgacggcttcaggggaaaatgcagctttttgaagtagatcctgagaaatttaaccgaaaccgcttaacccacagccttgaagtcgcacagatagcacgcagtattgcatcagatcttaaattgcaattccccgttgttgttgagctggcagcactggcccatgatattgggaaccctccattcgggcactcaggggaaaaaaagcttaacaacttatctgctgaaatcggcggatatgaaggaaatgcccaagcgcttcgtatcttgagaaaactcgagaaaaaatatgcccgctgtgcaggtttagatctcacctaccgcagcttattgtctgtcatcaagtatccaaatacaaaatccacttcagataaattcatttatgatgatgactatgccttctatacgcagttgctgaaagataaacaactagacatgaaggcgggtgaaaaaaccattgatgcacagattatggatctcgccgatgaaatcgcctatgcagcgcatgacctggaagatgcgttgagcaggaacatggtgactatcgaagatattgagtatgaatttctcaagtcaccagactacaacgttgctcttaagcacttcaatgagattgtcagtacgtccaagaaaactgcatctgaggcaacattactgaagtcatcagaagaatttgccataatttttcgaaaagagctgacgtccaatatcgttaaccgcttggtcatggatattggcgtcgttgaaagtaaaaatggttatgaagagcttgggtacaaaacgttacaggaacttgctgaaggtcttaaaaagctgctcttcagagtcatcatgcgcaaaagaaacatactgacttacgagtttgaaggaaataagatcatcagtgatttatatgcgttttataattccggtgacaactataagtttctgtcacctgagctcaagtcttcgttatctgaaacagagccgaatgagttaaaaaccaaaaaagcgcgggctgtggttgactacatttcaggcatgatggacacattcgccgtcaaggaatgggaaactcattgtaagaaataa

SEQ ID NO: 290475 - DNA, 453 bp, Morganella morganii
atgcgtactcgtccagcctctcgattgatagtcctttcacctgaaaatcacgttctgctctttagattctgccataaagatgatgctctggaaggaaaaacatactgggcaacgccagggggaggactcgagcacaacgagtcttttgagcaggcggcgttacgtgaactatttgaagaaacgggcctgacaagaagaactacaggaccacaaatagcctccagaaccttccctatggtgctaccaagtggtgagaacgttcttgctgaagaacgtttctttattataactacggataaatcagaaattgaccgctcaggttggagtaacaacgaaaaagaagtcatcagcgatcactactggtggagcttagaagagctcagacagaccaatgaaatcatcttcccactcgatttgataattaacatacttgaagacttcccgtgcacttaa

SEQ ID NO: 290476 - DNA, 333 bp, Morganella morganii
atgaaaaagataacattatctgtatcaccggcggcagtccggcagacactgctggcttacctgctgcaacagcactacggcctcactctgaacgacacggaattcagtgatgagtatgtcattgaggcctgcctcagtcgtgggatgtcgttatatgaggcactgaacgcttttgcggagaaatacgcactggtccgcactgaccggcgcaacaacagtatccctgagccgtcacacggcatcactgcggccgatattctgcgggcacggaaggcaaccggcctgataactcaccacagcagctatgccacccgcagccccgttatcgtataa

SEQ ID NO: 290477 - DNA, 594 bp, Morganella morganii
atgaattacaccgctgacgattacactcaggccatgatcggactgggaccgcagggtatggcgtgggactggcggccggggtcgaatatgcatgctgttctccgggcgctggcgcgcggttatgaggcctcggatattgacgccgttcagctgcttgagggagcatttccgaagacggccacaacgttattaccggagtgggaaaaaacactcggtctgccggatgattgtgggatcggggagatggacaccattccgaaacgacaatccgcggttctttcaaagctgctgcgtaccggcgggatgtcaaagccctattacatcagcctggcggccgagatgggttacaccatcactattaccgaattccggcaggcaagggcagggctgtcggcctgcggtgatgcactgaacggtgatgaatggccgtttgtctggcgcatcaatgccggaaacacgcaggtgacatacgcggtcgccggcggcagttactgtggtgatccgctgcgttcgtggggtgaacattacctcgagtgccagtttaaccagatttccccctctcacacgatccttcaggtcggttacggccagtaa

SEQ ID NO: 290478 - DNA, 1137 bp, Morganella morganii
atgccgtttaagcgtaaaacactgacggagctgcgggagcagaaccagaatttcctgcgcaatgaactgaaagagcctggtgcgctgctgcggtattccaatatgcgggtactggcggatatggatgccggtatggcgcacctgcattatgcctacctggattacattgcaaaacaggcaactccgtttaccgcaacggatgaaaacctggcgggatggggggcgctgaaacgggtgtaccgcaaaccaccgaacaaagccacctgtacaaaggtgcagtttgacggcgtgccgggcagtatcattccggccggtacggcgatgacccgcggagatggataccggtaccagtctgttactgaggtccatattaatgctgacgggaaaggcttcacgtctgttgaagccattctgcccggcattgacgataatatttacggcggcgcggcgggtaactcaccggccgggacaaaactgacgcttgagatagcgatatccggagtgtcttcagattgtattgctgttgctccgatcaccggcggcagtgatattgagaatgaagaggctttccggcagcgggtcctgcatgcgtaccagaaaccaccgcagggcggcagcgatacagactatgaaggctgggcgaaagaagtgccgggcatttcccgcgcctgggtaaaacgccgcctgctgggggccgggtcggtcggcatttacattatgtgtgacggcaacagcaacggcggctttccgctgggaactgacggaccggctaccaaagaaacttattcagttcatgctaccggtgaccagttgcgtgttgcagatcatatctgggatgtgcagacggtaacggcactggtgtgggtctgttcacctgttgcgaaaaagatagattttgaaattgaagggctgagccgggcaacctcggaattacatcagcagatagccaaagccattgatgatgtgttcttccgggacagtgacccgaccggcggcacaaaaatctacctttctgacctgcagtatgcgattgctgatatccccggcaccaccggctttgtcctgaaaaaaccggctgaaaatatcgttctgagtaccggcgaactggcgcagcgcggggaggtgtcatacatatga

SEQ ID NO: 290479 - DNA, 747 bp, Morganella morganii
atgggaacgtcacagtcaagcagaggacctaaaaatgggaacccccttgttccaccttgggctgatcaaacaaaaaatgggaaaaatgaaaatctaagtggatttaggacgctttttggtcgatttgctaaaaatcgagataactcttcgctgaaaagtgctcttgggcgctattctcgacaagtaacaggtggaagtgattctgcgaacgaacgacttagtaatattgttagtgctggtggtggattatttgaattactaaataatggaattataaacgatctaaacaataatcctcttattgatctaactagccttactggactttcatgtgaagatgcaattgcaagaatatctcaagccctctctgatgggagtgaggacgctgataaaattcaaaccgcaatgaatgatgcattagtagaagctttagatgggaaaaatacatttgacccacaagatattacagatgatgttcttattgaaacaatgatttgctatttagctgatagcatttttatacaagttacaatggatgcgggaaaagcttggaacaatgcacagtcagtgaaagaattacaggatgcagaaaatgatttgcatgagtatataagtgcagtagttgataatcatatggaacctaaaataagtaaaaacatcaagtctttctcaaagagagatattattaatattcaaagagaaatcattactgaagtatggaatgaatggaaggggtatagtgaatga

SEQ ID NO: 290480 - DNA, 1770 bp, Morganella morganii
atgtggtctgatgtagagtcgagcactgattacttaaattttggcgaagtttcaaatctggctgttgatatattaaagtctgaaaatatgttaccagtatccattgggatttttggaaactggggagcaggaaaatcttcattgctcaaaataatagaaaaacagataaatgaagaaggtagccacaatatattagtcgtcaattttgatgcttggctctatcagggatatgatgatgcaagagctgcgttgttagaagttattgcaaccaaacttaatgaagcagctcaaggaaatcagactctcgtagaaagaacattcagtttatttaatcgggtagataaagttagagccttaggactaactattgaagggattgctttagctcacggtattcctactggagggatggtatctagaggtttaggagccataaaaaatatcgttagtaatggtgttaatgaaaatacatataaagatacagttaactctggatctgaattaataaaaagtggtttaattaaagacaaggaagtattaacgcctccacagcaaataaatttatttagagatgagtatagtgaaatcctgaagggtctgaataaaaatttaatagttttcattgataatcttgaccgctgcctgccacacaatgctatacaaacattagaggctatacggttgtttttatttctaccaaatacagcatttgttatcgcagccgatgaagatatgataagaacatctgtatcagaatacttcaaaggtacatcggctagacaccacatagattacttagataaattaatacaagtccctattcgagttccaaggactggacttttagaaataagatcatatctttttatgcttcatgcagttaatgcagggattaaaagtaatttaattgaaaaactaagagtagcattagaaaaatctttacaagaatcatggcatgaagacccaatgagaaaagaagatgctataaaaatattagaaagtgaaggtaatcttgaattagaaagggcatatgatcaagtagaccgacttgcacctattttcgcaacatcaccaataatacatggtaatccacgaatagttaaaagattacttaatatagttaaaatgagatccaatattgctaaaagaaggcggatttcattagatgaaaacattattacaaagttagttatatttgaaagatgtgcgggagaggatgctgccaatgccttatattctttaattgattcaaatgaagactacaaaaaaatatttagtgaaatagagaataataagcttaaggaattacctaactctgtcccggatgcatggaaaaaagacgatgacataagtaaatttattttacaatggtttgagctttccccaaaactaagcgataaagatttgcgtgcatccatctatttatctcgtgaaaccatgccagcaagtcattatgtaataggtttatctccgaaagccagagatgcattaggtgtattaatatcgactacacgaaaaagttctcaggctgctacaaaagcattaaaggatatatctagagacgaatttattcctgttatggaaggattaatcgaacatctcagagctataaccgaatggagtaaacaacccgctggttttgctggagcaatcttagttgcagataatcatatcgaagctgcaaaaattcttaaaagatttataagtggtattagcgatcagccacactggatgaatgcacttataaaaaataaatcctggttcaaataa

SEQ ID NO: 290481 - DNA, 312 bp, Morganella morganii; identical to SEQ ID NO: 49033

SEQ ID NO: 290482 - DNA, 831 bp, Morganella morganii; identical to SEQ ID NO: 36219

SEQ ID NO: 290483 - DNA, 552 bp, Morganella morganii; identical to SEQ ID NO: 28363

SEQ ID NO: 290484 - DNA, 390 bp, Morganella morganii; identical to SEQ ID NO: 28364

SEQ ID NO: 290485 - DNA, 351 bp, Morganella morganii; identical to SEQ ID NO: 28365

SEQ ID NO: 290486 - DNA, 273 bp, Morganella morganii; identical to SEQ ID NO: 36220

SEQ ID NO: 290487 - DNA, 429 bp, Morganella morganii; identical to SEQ ID NO: 36221

SEQ ID NO: 290488 - DNA, 1278 bp, Morganella morganii; identical to SEQ ID NO: 52758

SEQ ID NO: 290489 - DNA, 327 bp, Morganella morganii; identical to SEQ ID NO: 52759

SEQ ID NO: 290490 - DNA, 675 bp, Morganella morganii; identical to SEQ ID NO: 52760

SEQ ID NO: 290491 - DNA, 249 bp, Morganella morganii; identical to SEQ ID NO: 36223

SEQ ID NO: 290492 - DNA, 195 bp, Morganella morganii; identical to SEQ ID NO: 36234

SEQ ID NO: 290493 - DNA, 591 bp, Morganella morganii
  misc_feature (555)..(564): n is a, c, g, or t
gtggttaggctagctacatttaatgacaatgtgcaggttgtacatattggtcatttattccgtaactcgggtcataaggagtggcgtatttttgtttggtttaatccaatgcaagaacggaaatggactcgatttactcatttgcctttattaagtcgagctaaggtggttaacagtacaacaaagcaaataaataaggcggatcgtgtgattgagtttgaagcatcggatcttcaacgagccaaaataatcgattttcctaatctctcgtcctttgcttccgtacgcaacaaggatggagcgcagagttcatttatttacgaagctgaaacaccatatagcaagactcgttatcacatcccacagttagagctagctcggtcattatttttaattaactcctatttctgtcgaagctgtttgagcagtaccgctttacagcaagagttcgacgttcagtatgaggttgagcgagatcatttagagataaggatcttacccagttcatcgtttcctaaaggggcgttagagcagtcggccgtagtgcagcttttnnnnnnnnnnggatcaagatgttatggattcgtatga

SEQ ID NO: 290494 - DNA, 477 bp, Morganella morganii
gtgttcaggggctatcgcaatcagacgggtgcgcatggcgtgatactcctcacccactttatcgatcatgtcctgccacggcagcaccagtccggattccttttcgtactccagacgggccagctcagcaaaatagtgctctttgatggccctggattcttccagcggacgaacggctatttcaccggaaatcagtccggcataaacagattctgcacgctgctgaaaatcgcctttttctttcgccggttttttctccggagtatcggattttttcaccgcattcttcgtgcgcggatctttactgtcccggtactttttcagattccggtcgctggcctccacgtcgatttcatccccggccatcacgatatattttccggcttttatccaccgagtgatcgtcttgcggttcacatccgcatgcttcgcatagtcggtaatattcatcgtggtcatgggacattttcctgctga

SEQ ID NO: 290495 - DNA, 438 bp, Morganella morganii
atgagatttattaatccgtatcaattcaaaacaaaaggacaaatggttagccaatgcaaagataaaaatatattggctcaggtcgttgattcaacagtttcatgtagccactggaaaagaaagcatcagcaatgcggatattgtgtaccttgtataataagaagagcttctctgctaagaggtggaattcaagagacaataatatatcaccaagcctcatatgctaatttacttaattttgttaaaaataaacaagatgggagagatgatattttttcagtgataatggctattgaaggtgctaaaaaaagaaatttgaaggcatgggtattaaaatctggaaaacttaatgagcatgatattgaaaaatataaaaacgtattctccgaaggattagaagaggtaaaatattttcttaaaaaggaaaatttgatttga

SEQ ID NO: 290496 - DNA, 561 bp, Morganella morganii; identical to SEQ ID NO: 280943

SEQ ID NO: 290497 - DNA, 516 bp, Morganella morganii
atgctagaggcattacgctcgggtatcccagaacgcattgctcgttattctgatctagtcgttcccgagattgataaacggttaatccaacttcagctagatatcgcagcgatacaagaacaaacaccagaagaaaaagcccttcaagagttagataccgaagatcagcgtcatttatatctgatgctgaaagaggattacgattcaagcctgttaattcccactattaaaaaagcgtttagccagaatccaacgatgacaagacaaaagttactgcctcttgttttgcagtggttgatggaaggcgaaacggtagtgtcagaactagaaaagccctccaagagtaaaaaggtttcggctataaaggtagtcaagcccagcgactgggatagcttgcctgatacggatttacgttatatctattcacaacgccaacctgaaaaaaccatgcatgaacggttaaaagggaaaggggtaatagtggatatggcgagcttatttaaacaagcaggttag

SEQ ID NO: 290498 - DNA, 201 bp, Morganella morganii
atgcgaatttttggttatgcgcgggtctcaaccagccagcagtccctcgatattcagatcagagcgctcaaagatgcaggggtaaaagctaaccgcatctttaccgacaaggcatccggcagttcaacagatcgggaagggctggatttgctgaggatgaaggtggaggaaggtgatgtcattcggcactgttgcaaatag

SEQ ID NO: 290499 - DNA, 162 bp, Morganella morganii
atggcgcaattgctgatggatctggatatcgaatattaccaggggccggaggagttttacccggttgacgcggatccgcttaccggtatcgatatcagtgttcagatgcctgacggcagtccggaacatcacgtctccatcgacctgactaatcaggagtaa

SEQ ID NO: 290500 - DNA, 2094 bp, Morganella morganii; identical to SEQ ID NO: 290349

SEQ ID NO: 290501 - DNA, 2154 bp, Morganella morganii; identical to SEQ ID NO: 284261

SEQ ID NO: 290502 - DNA, 1020 bp, Morganella morganii
ttgcgtgtctgcagcaacataggcaagaacagagtagatgttccgcttgacgacaaacaattaatcgaacagttcgagcttcggctgttaaagcagaatgacccagttaaagcagtacaggattttgtctttgcacttctcaaatgcaaatatctttttgatcagttcgtgataaaacgagagttcgccaaaggtagcgatagctggagtttgaaacgcctgcgttggtattcggaaaagagcaccagctataccaatacgtttaatgaagatgagggtaacagtaccagcatcaaccgacagattttgatgctgctttccgcattccacgtttcaacccctactctggtttataaacactggttgaatggagctttatactatctgtttaatgcccattccgctgaaaaccagatagatgcaaggaagtacctcgggtatctggagcatctcgcctcctcgtttgtctttcaaaacttcctggcagaacaagaaccaaaatcatattttgagattatctacggtaaagagctacatctccaacctgtggtactgtcggacaagattaataagaagatgcgctttgggatgatagcaaacaacctggtattcaattacctggactacttactctggtgccgtgacagacataaagctgaagtagtcaaacgtttcgaatttaccttccgaagctcggtagagcatttctatccccagcaccccatggatggctataggacattaccagatacatcgttgcataccttcggcaacctcagtctgattagccacaacaagaattcgcgattgagtaatttccagccaaaacaaaagcaagagcacttcgaagcgagtctggaacggaatgaaattgatagtctgaaactgctcgccatgatcgagctgatgaagaagaacaatcagtggggggaagaagaaatcgccactcacgaagcggaaatgctggcagtgttaaccagtgctggtggtagtgatagcgtattaagggaggtgttatga

SEQ ID NO: 290503 - DNA, 513 bp, Morganella morganii
gtgtatgccgtactgacagagaacgggaaactgagtgacggcaaagccctgttcagtgcagatcataaaaatacgctgtccggcggcatggatgtggagaccatcagcaaaggccgtactctgatgcgccagcagaaagagggtaaacgtacgctgaatatccgtccggcctttatgctggtaccggcagctctggaaacacatgcgcttcaggttgtcggctccggcagtgtgaaaggggcggatgtgaatgccaatatcatcaacccgatccgcaatattgcggaaattatcacggagccgcgtctggatgataacagtgaaaaagactggtacatggccgcttctcagggcagtgacaccatcgaagttgcctacctgaacggtatcgataccccgtatatcgatcagcaggaagggttcacctcagatggtgtaaccacgaaaatccgtattgatgccggtgtggcaccgctggattatcgcggaatgatccaggtgaaaggccagtaa

SEQ ID NO: 290504 - DNA, 513 bp, Morganella morganii; identical to SEQ ID NO: 290354

SEQ ID NO: 290505 - DNA, 915 bp, Morganella morganii
atgaatgatgcaaaaaaaaagagggtagatttaaacaataattggccaaaagagttactattcccaagcgaagtgctattaaagcaaaagatgagtgataatgatctttgccaaatattttcaccagctcaattaaaacataccaataatacagagttccataatcttcttagacactaccttgagtgtttaaatcagttgcctttaagaccagacatcgcttttgattgtatctggaaagcattggatgcagagtttttcaggcttaagaatatatccggctctcgcaatggtagattcagtgtcttttataatcatatcagcaaaagttctgacacctgcaatagttatgcttcactaactgatataattccgttgcaaacgtgcgaatttgttgctaagaggatatttgaaaacaatatttcgtataaatctaatcctagagataacaatgtcaaaagttttagaaatagagtgattggtagtttaactgaatcggtctacactgatctgctcaataagtatgagcctgactggctatctgataaagcaacaacgcaacgtaatgtaggcagattacttcaacgacttttgaagggtgatgaactaagtattgtaaatgagaagtatcaacttactactgaaaatagagccctcttcttaactgcggtcacgatgcctcagtttcgtaatgaacgttttcatggggaaactaaccctccgtttagaagtagttctgcaaaacttaaaacatatgcccatgcatattatattttccatgttgcatacattcatttgcttgaagtttttctttatcgtaatttcaatgtaattgacattgctaccacgcaaaaagccatcgatgaaaataaagaattattcttaaaagtatttagtggcgttatcaatagataa

SEQ ID NO: 290506 - DNA, 915 bp, Morganella morganii
atgcacattctcgtcaaggaattcataaggaaaagggccatttcagaaagcatggagttaaataaacctttgcacgatgggttatattatctcgaaaaactaaatgatatcattgagcgttcttgccgagaaaacttagaaaaacttgtcaacgaagttcattggccatcaatgcatgatatgtatagaagaaattatgaatattgttgtggagtatttggtgcctttttaattggtcaaattccatcatgtgaagccctttgcagaacagcaatagagggtagtgttaatttacactatataagtcttggagattcaatgaccaagcaaatttcctacttcaaaaatcacatagaaactgaacgtaaacagaataaaaactggaagcgcagcattgaagattctatatattctgatgaggctaaagctgaacacctacagagaatttctgataaagatcgcactttagatcactatgaatatgcactaaaaacatcatttgcgttaagcaacattgatttcgatatagttagtctaaaatggcccagtatttttgaacgtttcaaagaaataggacaagaagtaggatatagaaccatttatgcagccttatgttctcaggcacataatgatgcggaagactctctaaataaaataatggctagaattacagaaaatgtaagcggaatggaagaagctcaatggattgagcaatacaatttttctctatatatggctcttactgctttagattaccacacattcgcctcaataatgtacattgcaaaatttgagattgacgtaaaagaaatgatagagttaaagcatagtattaccaattcaattttatatataattgataacggtcctcgtatgatctcggagaaaataaaaatagaatcggcgaaagtttaa

SEQ ID NO: 290507 - DNA, 243 bp, Morganella morganii
atgagtgcaatgtattatattgtgctttatattttaataattgagaggttaattatgaaagaattaaatcaggaacaattattatctgtttcaggtgccgggtttgtttctgccggcacaatttttgccggtattgcatttgatatcactgcggtgattatgtctgatattaccggtggctgcgaagagattgtttttgtatcccaccgggatgcctcccgcacccgttatgaggttatgtaa

SEQ ID NO: 290508 - DNA, 456 bp, Morganella morganii
  misc_feature (25)..(34): n is a, c, g, or t
atgaatttagtaaaattaagtcatnnnnnnnnnncatttgatatcactattccttttgagtttaaatctaattatagtgttgagggacttgcatttaaaaataaaaatcaaattaatcatattaaaacactaataaaagaatcaaatagttttctgagtgttgcttatgatttttacgcggatgaaaaaacaaaaaataaaataaaagtaaaatatattataaagcaaggtcagagtgaaaatatcatatttaatgaaaagggttcaaagtattatatgttttcatttgtcgggagttggtcggagtatgttattttatctaatgttatatacacaagggaattacccagattaaatcttaaaagacgattggggtttgatattgagatgttttattcttctggtcatcataatgatgatatttgttcattatattattttataccggtgtgttaa

SEQ ID NO: 290509 - DNA, 753 bp, Morganella morganii
ttgtctttaagcagagaggttcagaagacggagaatgaaaaagagaaagtaaaaacagaaaacaaagaattacggcaagaactttttaagattatttccaacattcagcagtcacaggtcaacaatacttacaatgctccatctgatgaatggcttaaacttcttggtgttgttaaggtgaaagagtcagataaagaagagcaggaagaacaaaaagaggtgcaaagagccatagattttatggctgagcgcgagaaggctagagaagaatcaaaggcacgaatggagttgcgaagaaatgctaaatccatcggcatggataagtatgcaaaaaatctgtcaattcctgactctgagataatccaaagtgtcgaattctcacaagcatttgacgaaatcgatccaataatgaatagaagaatagtttttgctggatatattaagggtgctgggcaagagcgatttatagatgttcagcctaagggtatcatatctctaatgtactatgatcgtctttatgtgatgctgaataaaatttatttgtatcgtcaggctaaaggcatatcagctgagcttgtcctaattatactggatattgaaggtgaggaaagtgatcgtccttggggctcgggtagattttatgactatttccaatctgcgatatcaaacaaattattgaaaatcgaatctataagtatctctaaagaggaaatggcgaactacaaaccaaatggtcagctaagtttgctataa

SEQ ID NO: 290510 - DNA, 1371 bp, Morganella morganii
atgcataaactaaaagaaatatatgcatcggaagataagattaaaattttctttacgtgtcataataaagcattatctcatacactgaaagataggattccaacattttttgattttatgaaagtcgaaaaacaaattaaatggaataatcagttgtgggttgatagagcgtgggggtctaagcaagataaagactctgggttatatagttatatctgtgatttttatggcatttctttttcaaggtggagcaaaaacactagttaccatgagatcttttctaaggcattaattgaaattaataaaattgaagacttagaatatgcatttgattatattttaattgatgaaaaacaagacttccctgaagtattttttgagttatgcgaaaagattactagacacaaggtgtacgtagctggtgatatttttcaggatatttttgaaaataacatcaagaaagaagttgaaaatgtcgactatgtacttaacaaatgttaccgaacggcgcctcggattttaatgtttgcacatgctattggaatggggctttttgaggaaaacaaactcaattggttagaagatagtgagtgggaaagtagtggttatactatcaataaagcaaacaaagaagtgacactttctcgtgattctattcggaggtttgaggatttagaagagacaaaaatatcgaacatgaatatcatgaaacatataaatgagtcacaagttattgatattttaaagagtattaaaaatgataatccgacagtagaatcaaatgatattgctataatcatgttagataaagataattacatctatgattatatagatcgtttagagtttaaagttagaactgagcttaaatgggatgttaataaagcagtagagactaagaaaaaaataccaaatcaattgtttatttcaaatgttaataatgtcaaaggattggaatttccttttgttatttgtgtaacaaaggaaattaaagataattatacatataggaatagtctttatacaatgttaacccgttcatttcttcaatcttacttgttggttgaaaagtatgaaaaaatacaatgccaacttgatggtttagagataattaatacgcaagatgtaattaaaacaaaagagccaagtaggaaagaaaaagaaaaaatacagaagcgtattgttaaggttaaaagtcaatctaacgtctccttctatgattttattaatggtattttaacaagagaagggattgaaaggaaatattggagaaaattcatccagtctttacctgaaagttataaagacgattttgatgaggatgggattgttgaatttattaacgataacaaaaagtactactgcagatga

SEQ ID NO: 290511 - DNA, 864 bp, Morganella morganii
atgagcgatatgatactgaaagccccttccgcctggcggacactcagccgcaatcttctgttgtggtttgcgctggccgtggtggcgctgctggtactggccatgattgccgggccgtggatctccccgcatgatccggatctggtggagttatcaaaccggcttcaggaaccggatagtcagtactggcttggtactgaccatctcgggcgtgatattttttcccgtctgattgccggggcgcggatttctctcggcactgttgctatcacgctggtgattattatgacgctcggactggtgatcggcggcattgccgggtttaccggcggacggacggatcaaatcatcatgcggtttaccgatgtgttcctgacattcccgacactggtgctggcactgtttttaatcggcatcctcggtaccgggctgacaaacgtgattatcgcgatcgcattgtcacactgggcgtggtatgcgcggattgtccgcgggatcatcctctcgctgcgccaccgggaatttctgctggctgcacgtctgagcggagccggtaatgtgcggatctttttccggcatctgtttccggccaccatttcacagctgatcgtactggcgactctggatatcggccatatgatgctgcatgtctccgggttgtcattcctcgggctgggcgtggcggcacccaccgcagagtggggcgtgatgatcagcgatgcccgtcagtttgtctggacatcaccgatgctgattttctggccgggtttaattttatttttcagtgtgatggcgtttaacatcctcggggatgctctgcgtgatcgtctggatccgacactgagggccgggacatgtcattaa

SEQ ID NO: 290512 - DNA, 237 bp, Morganella morganii; identical to SEQ ID NO: 279080

SEQ ID NO: 290513 - DNA, 207 bp, Morganella morganii; identical to SEQ ID NO: 90085

SEQ ID NO: 290514 - DNA, 1203 bp, Morganella morganii
atgagcagtatttgtgtagattcgtttatgttggaaaatggtgagaggtattgtcatgttgtaaataaaaaaacgggtgagccattgtattatccaaatttgtatataacaacacaagtcagaaatcggtcagagtctatatcaacaatgaaagttatagccggtagcatttcattgttatatcgattctttatgagtaaagagatcaatattgatgaaagaattcagaaaaggatatttctggctcctcatgaaattgatgatttgattgagtttacttcattcaattttaaaagtggtgtagatagtgatttttgcgtttcaaatgtcaaaaaaccaactaagtattttcggattacaacaatagctaactatctggaatggctatgtaaaatacttctttctcatacatgtcagaaagatacaatcaaagagatacttgttttcattaacaatataaaaagaaagaaaccaaggaataatgataaatataatatggaaatcgaaaaaagcttagacaaagcacaactagattctttgttcagcatactttcgccagggagtaacttgaacccgtttacggaaaaagtgcaacaaagaaacaatctaatattccttctattacattgctttggtttgagagcaggtgaacttttgaatctgcgtattggcgatattgattttgcagaatcaacaatcgcaataagaaggagagcaaatgataaaacagatccacgagtttatcagccattagtgaagacgtgtgagagaaaattaattgctgacacaaaacttatatatgaaatttcagattatattttgaatgatcgtaggaaagttaaaaatgctaataagcatgattttctgtttattacctataaggaagggaagacccaatggcaacctctgtcattttcctcataccataagatagtgagtgttgttcgtcaatcatcctcacttctaagtggattaacaggtcataaattacgacacacatggaattatgagttctcaaaaacaatagacaatgcccaagatatatcctatgaaaaagaacagcaaatccgttcttatctcatgggatggcgacctagttcagatacttcaataatttataatcgcagacatatttttgagctatcgaaaaaaactgcacttgaacaacaagagcaactattcaaaggaggatttgatgaataa

SEQ ID NO: 290515 - DNA, 180 bp, Morganella morganii
  misc_feature (144)..(153): n is a, c, g, or t
atgaataatttaattaaatataactctgataaaatgtctttgcatgaacataaaatcgtcagttcgattgaaaacaatggaatcaacattagagaattgatatgtgttatgaatgaaaaattggtttgtggatttgtatatacnnnnnnnnnntgtatatacagtacaatattattttaa

SEQ ID NO: 290516 - DNA, 1110 bp, Morganella morganii
atggagagtcttatctgtaaactatctcctactcatatagatgataaggttctaattgaatatcaaaataagcaattatcaaaatccccagcatcgtttcgtgttttacgaccatttttgattaaatggtttgagtttggatatcctggaatagatgaaagtgcagtagaactgttaaagcatttggacctaaaaataaaaaaagccggtcagtctgtgttacaagatgatccaacagggggcccactaactaaagaggaacatacttccctgatcaaggctatgaatcatgcatatagaataggtgtactgtcactgtcagattatgcaatatcgctattagtgagtctgacaggcagaagacctcagcagttagttatgttgaaatataaagaccttcttcaaaagaacttagataatggtaaagtagaatatttaatttcagtaccacgagttaaacaacgaggtaaacaactacaatatcgagaactggcaatgatctcagaagttgcatcaattgttcaactgcaagctaatcaatccgtgaggtttgttgagcaaacccttggtaaaactcttgatgattataccaaaggaaaggttccagttttcttgaacgaggaaaaactgcttgatttagccataatagattctgatttccttgagtctaataaaatatttgcaaaaccaacaattgctaagacagcattaaagaatattgttattgctgagaacttaatttcaaatcgtacaggttctctactcaatgctactcctcgcaggcttcgctatacgatagcaactatgctggctagggagggacataatgccaatactatagctgaattattggatcattcttctacttcaagtactggtatttatattaaaaatcttgctgggagtgttgaaaggattgattccgctgtttcagaacaattgtcatttgtcgctgatatttttatgaatggaataaagtctaaagagaaaaaacatttcaaattttgctcttcgagaaaatgcgaaagtcagaatttaaatgtaagttttccttgtgataaatgtgctttctttatgccagttgatattgatgaggtaaatgcccaatga

SEQ ID NO: 290517 - DNA, 1875 bp, Morganella morganii
atgaacaatattattttatttaagtctaaaaaacaacttacggcagaaaacaattataatgaattcataaaattttgtcgctatcaactatctgggctaacccaaactcaggattgggaacaatatgtttggaaagggtatgtaacctttagaaagataggggttggacataaagtatttaattccaaagatgcaatgcatgaagatttcctcgattttgccaaagcatatattagatatcagcactcattgaaacccttgaaaaattatggggccataatgatggctttgagatgtctcgaacaggctcttttgcaggttctgaatagtggtctcatttataatgttacagccgttgtttttgatgaggcaatgcagatcggaagtagatattttgaaggtaatgttcttgctcaatgtgggatacagcttgaaaaattatcaaagtttatatgtgaacataaccttgtaaaatcaggatacatatcttggaaaaaccatgtgaagcagaaggtcaaaaacaactatcttcctgagattgaggactatcacagaaacgataagttaccagatgaaacagcattacttgcgattgctgatattttttctaaaaatgatgagctactgagtccaagggataaattcaccagtgcagtatttgcactcctgctttgttgtccgagcagaatttctgagattttagccttacctgctgattgtgagattacacaaaaagatgagaagggtatcgaaagatatggtctaagattctattcggttaaggggtatggccctaatatcaagtggattccacaggttatgataccagttgcgaagaaagcgattagaagattgctttccttatcacaaaatgcaagggcatttgctcaatggtgcgaaaaataccctgataaattttaccgacatgaactttgcccaaaagttgatgaaaaattaaagttgacagttttacaggtttgtcatgcacttggctaccctttacatgatcgtaaatcatgcgttctaaaaattaaaagaacgagtttggatggtgggaaaagtttcttaaactccaatgattataactattcattgagtgagctatgggaaatgattagctctggttttagcagagactttccttggtatgataaagaaaaatctataagatttagtaatgcattatgtttattgaatcctcgccaattttctttatcccaaatgagtgatatctattcattatacaaacctaccaaaggattcttttttaatgatatacaaaataaaatgcgtaatgagtctggatttaaaaatatttttgcccgatacggatattatgatattgaaggtaagccactacttatccgatcacaccaaccacggcaccttttaaacacaatagctcattatggtgaaatgtctgaactggatattgctaaatggtctggtcgtgtcaatgtgaatcagaacagagtttataaccatgtgtcggaagaagatatgttagataaaattagagctattaaattgaacatgagtaattattgtaaaatggagtcaattccctcaaatgaatcgccagttgactttgataacctttatcaaggggcaattcacttaacagagtttggttactgtgtgcataactatttggttcaaccttgttctaaaatcaatcagtttgtggaatataataatgaaacactgaacatgaaatcagtagatagaattagactgcaatctgtccgagagaaagtaatacaattgataaatataactcaaatcgcgtttgaaaatggtgactatggggctgataaatggttgcaatatcacaaaaaaaatttggaaagaattaataaacttttaaataattga

SEQ ID NO: 290518 - DNA, 426 bp, Morganella morganii
atggacaaaaaaatcatcaatctagagtttactcttgaagagcaacttatcattataattgataaatatatatcaaaacgaaatcagccgaacgataaaagtttttctcaccaattatatttggtgttcgttggttatcatttaaagtatttctatcctaaacaaaaatatactcgttctaatagaaatatagacaacattatgacgatgttcagtaccgtatacaaatgtcttacaagtaccttgttacagcgattaaacaataaggaggctgttatcagggagctaaattctctcgttaactatattgataacaatcaagaaaaagctgaagaaatctatgctactgtcagagcacaatatgaaatgaaagtaattgagggagagttaacccatgaagttcgcgtgagagccgtcaggttatag

SEQ ID NO: 290519 - DNA, 387 bp, Morganella morganii
atgaaaaaatttattgtcacctcctttttcattgcaatattttcaatttctggctgttctacatccggcaaccaaaaaatcaaaaatgaaacggcacagagcctacaatcaaaaataattaaaaacaaaacaactaaggcagagctacttgctcaacttggtgagcctgataccagaacgactcttgacgatggcaacgagcaatggagatatttcatgtataacaatcagttcaatgcctcgacttttatccctgttgtcggtttgctaactggcggttcccagactcagtctaaaactctcgaaatcgacttcaatagagaaaccgtaagcaaatggacattctctactgataataacaatacaaaatctggcattcttaattaa

SEQ ID NO: 290520 - DNA, 279 bp, Morganella morganii
atgaaaaacgaaataataaagtgtccattttgctttaaagagagccagttcggagtacgtgtctgcactggctgtcacgcaacaattaactatggtgttgtttcgccgtggcttgctttactaataggaattgtgctgttagcgattgctttcctcatattcgctatcagtcaaagttttatattaactgtcgttatctattttgcctcagcaatttttttaagattttatttacgtaagaaatttgcacacagagccgttttcacacataaaagctaa

SEQ ID NO: 290521 - DNA, 1176 bp, Morganella morganii
gtgaagggtatgcggaagatcaaaaggggtaagagcttcgctggtgtagtgcaatatgcattgaagccaggttcacgtcataaaagtgatccaatcgtcattggcgggaacatgttaggtgattcagcccttgaactgatcgctgaattcgatagcaccaagcatcttcgccaggatgtcgcaaaatcagtttggcacaactcgcttcgcttacccaacggtgaatcactaacgaatgaacagtggtctagtatcgcagatgactatatgaaacgaatgggattcagtgatacccatctccgttgctatgtcttacatgacgacgaaggccagcatatacacattatcgccagcagaatcgacatagccagtgggaagctctacttaggtaggaacgaaaatcttataagcacgcggatcatcagtgaacttgaaatcactcataacctgacagtgaccatgacagcaccaaagcaaccgaagcgaagaaaggtttcccgcaatgaacagatgctttcagaacggactggccttccctcccccaaagaagctctgcagcagatacttgataaaagtttatctgataagccggaccttctaactttcacaaaacgactggaagaagcagaagtcggctggacggcgaatgtcgcttcaaccgggaaaatgaacgggttctcattctcctaccgcgatatagctttcaaggcatctaaacttggaaaggcatactcttgggtaaatcttcaaaagcagcttaactacaaccctgaccacatagaagctctgcgaagcgacatatcgataaaagaccaatttgctgctcctgctcctgctcctgctcctgctcctgctcctgctcctgctcctgctcctgctcctgcaaaagatgttgcaacaacggatattccaagagaaagcataagtgaaaaaattgtcgaactggaactacggctcagagaagacaaacggaatgaaatcgtagaaaagattcttcaaaaaaatgccgtcaaaaggcaaaagcatctcaggctcatcggctggattccatttatcagaaggttcatagagcttctgcgaagctatggtaagagcattcttcataagacccctacaaacttctcagaagtctattcaacacatcatctaaaacctgcaagaaaaattcatttatag

SEQ ID NO: 290522 - DNA, 441 bp, Morganella morganii
atgggaaaacaaccaattattattcattctgataaacgcagaaaaaaagaaattcagcattgtaaaaaaaatgcaaaccctgttatggattcaaagaggacttactgtgttagtgtcagattaaacaaaaatgaattatcgaaacttaatatattaagaaagcattactcaaaaggagagtggcttcgtatggcttcccttcaaaacttgcctcctgttataccggcgattaataccgaagcctggaaagccttaactgtcatatcacaaaagctaaatcgaattgcgatccatatcgatggtaagagcaaagacagcaagctaactcatacagagcttttcgcagtgaagcggctactcgtagagcttcgcaataaccttctaagaactgattttgggagtagctatcgtgaagggtatgcggaagatcaaaaggggtaa

SEQ ID NO: 290523 - DNA, 477 bp, Morganella morganii
atgttttccaaagaaaaagttagcgatattttatttgcgaatggttttgagataaaaaatcaaagtaatataggtgactcatatacgtttgatttaggtaatgaatggcaagtctctgtattttgtccttttgttgggaatgtgtttgaaggaaatgtggataaattaaattatgaggcaataagtgcgtctttatttgattgtattggtacaaaatttaaatttaaaaacgtagcttcattagaagctaatattaaaagagtactcagaatactaaaagaaaactctgatgatgatgagattttaaagtgtgaaaaatgtggtgtaagatacgtgcaacctaaagaacctacatttggtaaaaaatggaagccattcctctcttgtagtggaatgataattaaaggaacaggtaaaaacaaagggattctttgtgatgggacatctaaaaaattaccggcagtagttttgctataa

SEQ ID NO: 290524 - DNA, 516 bp, Morganella morganii
atgttcgattttcttatgattaactctgagtatgtgtctattgtcggtgcggttttagcttttgtgggcacaattgtactcgctttttctatgggaaaagtattgtgggaattcatgttctcaattgacgcgatatctaccagtattgaaagtatagcagacgggggcgatatttacgtctttcaaggacttcatgaaagaatatcaaaagctatttcttcatccaaaaagcccacttggattgggataatattagtatttatatcaatgctaatgcaaggttattctttatatctaagttttgaaagtaataaaataaattcgatgaagtacgaaaatagaataaatgaagttcatgacgaaattactgaaacaaaaaatacactgaacatattaaacagtaagttgttagctaaaattgatgaaaaacagttccaaatagatgagctgaaacgtattcagagagaacaaaatgaaagtttacggagcattattaaaaaacagaaaaagaattaa

SEQ ID NO: 290525 - DNA, 237 bp, Morganella morganii
atgggtaaaaatataacatggttcacaataggaagcattctgaatatagaagtaatcagtgataataatgcagaatataataagaaaaaagcacttgtcaaagttaaacacttaggtggtcatgaacaggtatacctatatactgacgtgagcaagttaaaagcaacaaataatgatgtcatatcatttttctttgttgctggtgataatggttatgaaatgcttgaaattatgtaa

SEQ ID NO: 290526 - DNA, 354 bp, Morganella morganii
atgctagcacgatatattgttattgcaatctatggtcttgatgcattttttggaaaagacgcaatttatttggtttatgatataaagaataattgcgtttgtaattatttcgaaagcgatagtgaagctttcttatgttgtgatgaacttaataaaaaagatcttcattgtcatattcttatagaagcaatggcgacatataatgataataaggtggagattagctctccttatattaagaaaaaaaacaacattattgtagtgatttctgaataccttcaaataacaattgaaaaattgatatttgataatggcttacctaaagaacccccattaaaactgaacattacataa

SEQ ID NO: 290527 - DNA, 264 bp, Morganella morganii
atgctggcagtcacttcaatgtatcagtcggatttcctgagcgtaacaaggtggtttgaaatgacagagaaaacacagaaacttaagccgtgccctttttgcgggggtaatcgtatttttgtggcgactcatgaattcgatgaaatgccggattactacaaggttgagtgcaatgaatgtgagtctgaaacaggattcaaactcagcaagcatgccgcaatctctgcctggaaccgcagagcaccacaatgtgagaaggagtag

SEQ ID NO: 290528 - DNA, 204 bp, Morganella morganii
atgacagaggaatacgaacacgcatcaatccgtgtagaaatggcgagcgatgcgactatcagggattattttgcagcaaaggctatgcagggaattctgtccaataactcaatgattgacaccgcaacagaatcaacatttgagtgggtgacgaaaaacgcttatcagctggcagacgcaatgctcagagcaaaggagaaataa

SEQ ID NO: 290529 - DNA, 159 bp, Morganella morganii
atgaccataatcggatttgtattgctactggtgatgctcggctctgctgtgcctgttgccgatgatatttatacgctcgcagaatgtgagaaccgcgcagtgcaggtaatggctgtgcggaatgttgaattagcgtgtacggaggtggtgagaccatga

SEQ ID NO: 290530 - DNA, 1272 bp, Morganella morganii
atgaatggtatagagagtttattaaaacaacaagatttgtctgtgccattaagcaccgctcagggggttgctaatgttccttttcaaagatggttcaaatttaaagaagctttttcgccaaaattcgtccatgatacgatacagaagtccctcataaaagttgataacatacttgatccttttggtggttctggaactacagcacttacatctcaattaatgggaataaaccccacgacaatagaagttaatcctttcttagctgatttaatagaaagtaaattaactgaatataatacagaacaactaatttctgattgggtttttgtttcaaaaaatgtaggttttgaagagccgtcattagaagaaatgtttttaaatgctccaaagacgttatttgaagacaaagatgttgaacgatggatcttcaatcgtgaaattatattcagaatttctcagtacagagagattataaaaaaaattgatgattcaaaaaattcaagattattcagagtgctacttggtagcattatgattccatttagtaatgttataattaatggtaaaggacgccgatatagaaaaaactgggagattctttcattcacgaaaagtgcattcgatgaagctttcagactaaaggtagaagaagctatttttgatatagttagatattcgaatataaagtctggaaattatcatttcttcaacggggattcccgtagcatcctctgtagtttggatcgtaaacaagatttaatagtattctcgccgccatatcctaatagtttcgattatactgacatttacaatgttgaactttgggcattaggctatttaaatagtgcaagtgataacaaaattttacgaaccaatacattgcgatctcatgtccaaataaaaatggatacttctccaatgcctgaatccttaactttattatcaacattagaaaaattagatgctaaagttaaactgctttggaataaaaacatcccatcaatggtaaataactatttctatgatttgaatgttattttggaaaattcaatgcggttactcaataataatggcatggctgttgttgttattggggatagcaagtatgttgatgtaaaaattgatacagtaaaaataacttgtgaactcgctaaaaaaatcggatttactattagagagactcaagaaatcaggataatgaaggccagtgctcagcaaggatggtcaaaaagtctgagtgaaacagcaatattcttaggtaaagatatttaa

SEQ ID NO: 290531 - DNA, 2085 bp, Morganella morganii
atgatcaaacttccagtaattcgttctgtggatataaataattatcaagtttatcaaaatgaaaccaattctgggatatcccatattattcatggtggggttcatttgatcattggtgttaatggacttggcaaaacaacattattaaatgcaatttaccgtgtattagttggccctaaagatgttcccaaaaacgatacagcccttttaggtagctctgggcacacccttactggttggcgcaatagcaactattttcgttcaagggttaaagatggagctttaaatgcaactattgcctgcaaaatatcttttgggaatgattgcttagaaattacaagaaaattgtcgaatttagaagtgatttcattaaaattaaatgatgtcatcttgccttcttcccaggacgagtatgagaaagttgtagtcgatatatctggaactgctgattatgtagatttttattcaattgtaaaatatctcattttcttccttgaagaccgaactgaactcatttgggacgaaagagcacaattcgaaatgcttcgaattttattctatgatgctgaatcatctaaggcagcagttactcactatgatcgtgcgcagaaagctgatagtaaatatcgtaatattcatgcctcactaaaaactataaaagacagaatagctgagcaaagcaatcaagaagtagaaggggcaaaagcgcagtttcttattgaaaaagccaaattagcagccttagaagaaaaattagcatcaacacttgaaacgcaacaacaacaattaaacaacattgatggagctaaattagcacgagcaactatcgcccgcgaattagatgaattaaagtatgctgtcgattataaacaacatcttatttatgaacattttcttccgaaacaagactctgctatagaatatgtattaaggaatttaagttctggaaatggttgcttagcatgtggtaataaaagagcatcaagtgaatatttcgaaaaaaaattcaaggtacatcatcaatgccctatatgcaattcagaattagaacaacaagatgtcaatattatagatcttgatgttttaaatgcagacctacagattctatatcgaaaaattgaggtcctcgaaaaatcttatgcttcacaagatattttacttgagcaatttaagaatgagctttttaaaactgaaacactccttggcgatacattgatagatgtaaagtctactcaaaagcaagttagaaaaatagaaagcgatttgcctcctgatgagtttgaattacaagagttacggcggatagttgcataccgagaaattgagcttcgtcaggaagataatataagaattgagtctcataataaatatgttactattcttgagagtaataatgcctcattgcaagataagatgaaattattagaggctaaattttcatattatagcaaaaatcttttagctgaaagggttttcattaagtgtgaaaaacaaccaagaaaaataggtcaaggtatcccatcaattgaattcccttccttcaaagttttaatgacatcaggagtttttgatagagaaccttcgcgacgggacgacgcgaattctgtttcagaatcgcagaaagaattcatcgatttagcctttagattatcgttaattgatatcattactaatgaaaataactctcctgccatgattgtaatggaaacaccagaggccagcttagatagcttatttatgcataatgcaggtaggcttttccgtgagttttcacatggtcaagaacaacgcaatgtgtttcttgccagtaccaatttgaataaaagcgaaatgatacctactctattaggctctatcaccccaccaaaactgtatgataaaaatgatatagacttaatactggataaagctggtgctgaagaagatgatgtagagattggagtaataccaccagaccaacgagctaatcatataataaatttgttggagttatcagccccgaatctttcattgaaaactcacagagatgagtatcttaatatgtataacgaagctgtatatcctgaaggaggcaaaattaaatga

SEQ ID NO: 290532 - DNA, 639 bp, Morganella morganii
atgaataaacagactcgcttggcctcattagggtggttgactcttttttttgaggctgctgaacgatgtgctttatatccaatatctatggagatgttacatagattcatttatttagctaatgtgttatcaccattatctaagataaaaatgcctaatgaatatacgctgaagcatcggcgtggaccatattttccgcaagctcagtttgatattggtattcttgttgcacaaagaattattgaggctacagatatctcggtgattcaggatgaatatggattttggttaaaaggtaattatcgaataacgaagtatggtttatctatcacagatatgatcaacgaacagtcagttttagagaactattctttctttttaagagagttttttggagcattatctttacttcattatgacgaagtattgaacataaatagttacgaaatacattataaagctgttgaggatggtcagggtgttgatatttcaattcctgataataactatacaagatatgctgtttcaaaattatttccagttagtcgattacaaacaccaagagaaggcattcatcgctacatttcatatttgagcaacaccctccatgtgcaagaggataatagtcatgaagattga

SEQ ID NO: 290533 - DNA, 1080 bp, Morganella morganii
atgaagattgatgaaaataaatttgatgaaatgatgaatcccgaaggtgtggctctgactcaaaagagtatacctgactcttgcagcactctaccatcaggagctttttctgatccctacatttttgcttctaatgttaaagcctttcttaaaaaaagaattaaattcgttaatactaaagcaacaggcgattgtttatttatacttattcctaatgaaataaagagagatgttgagcatttaggaaagggagttgataggtttttttcatcgatgagcataggaataaaaggtaaagttattctttcattagatgtgcggttatcaaaagttaggattttggatgttggctgtgattcttgcactgacgaaatagaaatgcataatattttttcagcagagatagaaaaaatcctaaacttaagccctgttaatattagttattgtcagtatgctcatgattgctcaatgcttagtgcttttcctgacgcaaaaaattctgatgctgatgcagatctgtatgatctaaatgcaaaacagattacttacaactgtgctgagcttgaaaaacacacaagcgatttttatcaaaaagaacttaaatatcccagttctactatgatgatttgggataagcaaactgaattcaaacttatagcaaaggctgagactcgtatctccgcaagattgggcgataccttgcaagataagttaggcaaggagaatgtagctgctgagcctaatgtaaacagcggaaggattgatattttcattcattccaacgcgatgggtgtagatcaaggtccttgtatcattgagcttaaagtattgagacatgagaagagtgataactacaaccggcgttggctatataagggggttttacaggcaagagattatgctttagatatggatgcaaaatcaaaatatcttttttcattcgacggccgtcagaagaataatgagtttgctatcattcctatggttgccggaaaatatgatgtaaaatacataaactatagaatgtataataaaactgaccaagcacgcgatgaggaaattgaagaacaagctatttaa

SEQ ID NO: 290534 - DNA, 267 bp, Morganella morganii; identical to SEQ ID NO: 279145

SEQ ID NO: 290535 - DNA, 651 bp, Morganella morganii
atgtcgattatgcgtaacgagtgcccaaagctggagcagtcacgactgcttggtcaagctatggcggcagttttaaatgaactacgacaaggcatcaatggcctgcttgcactgttggaagaaggatcgcaagcaacggttcgcgatatactgttacacgttagagactgtgaactgctacgtcttgacaatcgttttgataatcatttacgtgatgaaccagtgaatgatggtaatgatgacttcgaaaatgttcagaactatctaagatgcaatgcccatgaactttgggcgtatagacgctacctttcagaagagtcaccttttgccactcaccatggtgtaaaaggtgcacagtttgagcgcgtattggttgttatcgatgatgaagaggctcgcttcagccaatattcgtatgggaaatattttcaatacattcccctatccgacaatgatctagccaatcttgaagagggcaaagagtcagtactcgaccgcactcgtcgccttttttatgtatgttgctcccgtgcactgaaagacttggctgttgtcatctttgttccagatgttgccgtcgctcaagcggcaatcgttgagcaaaatttattcccagtatcggcaattctagggcagcatgatctaagttag

SEQ ID NO: 290536 - DNA, 432 bp, Morganella morganii
atgaaaaccataaaaacgagtgagctttccggccgggcactggattatgccgtggcgctggcagttggcgggtatgagttaatacgggttccgcctgatgctgacggggaaaacgaaggtgtggtgttggcgccgctgaatttactatccagcgggtatattttcccgccgaagggtaagctaccgattaattttttcataagtcgatattcaggtgattgggctgaatgtggccctttgctggaaagatactgcattgagttgtttattggtgaggatttttaccgcgcaacaagaacatctactgatcctcgcgatgacactgattaccctacaggctacggaagcaactataaagatgctgtttgtcgttttgttgtgctttatcgccttggtgacacagtggaaatcccagaggaattattgtcatga

SEQ ID NO: 290537 - DNA, 624 bp, Morganella morganii
gtggtacaggaggcaaaggttgtacaactggcgacctcaccaccgaaaccgtatacggatggtacattgattgcggccatgaagaatgcgtcctcctttattaccgatccgacattaaaaaaagtcctgaaagagaatgcggggctggggacagaggcaacccgggcagggatcatcaccacgctggaaaacaggaaattgattgtcaggcagaaaaaaacactccgggcgacagacaccggttgtcagctgattgatgccctgccggcagcctgtacagatccgggaatgacggcgttatgggaacaatcactcgagcaggttgcacagggaaatctgtctctggatgtgtttatgcaaaagcaaatcagctggttggcacatctcattaaaaaaggcggggaaatgccgctggcgctggatctgccaccgatgccatcctgcccgtcgtgtcatggaaagatggtcttacgggagagcagtaaaggccgtttctggagttgtcagcgttatccggattgtaaagggagtgtaccattaccggaaaaaatgcagggggttacccgggggatgaataaaagaaagaaggccgtgaagaagagcataacaggactctttacctga

SEQ ID NO: 290538 - DNA, 480 bp, Morganella morganii
atggatcagcggattgtcacaaacgagctggcgaagcggcttcttatttccgacgtggtaaatgaagccggactcagcaccgaaaaagtcatgaatcagagagccgtgacagaggaattatctcagcggccgacaaaaaacgatgtcaataattccattactgcaattaatgatgaattagcgaaaaaagggaataaaaacacagctcttaaatcgtcccgtggctggtataaggatgagtcaaccggaatgataatgcagtggggggattggtctgtcggtgaaggtggcggcggagaggttaccgttaattttgcgataccgtttcctttcagcggcgtggtatcagcaatatcagtcaatgatgcagcggcacaaatggtgggatacagccttattggcaaaaccagcatgaaagttatcaagggttctaatgacgaccgtggtcgttctggtcagtatattgtgtgggggtggtga

SEQ ID NO: 290539 - DNA, 435 bp, Morganella morganii
atgaactattacagagacagaaagaacggtgatgtttatgcttacgatgatgaccagatggctgtcatccgcagaataaatgcaccggattttgacagtgaaaaagagcacatccccgacatcttctttgacatcgataaaaaaattaaaggtatggacaaaatgacagcaaaagaggttgatgcacatatcaatccacctgtgacaaaagagcagcagattgcagaggctgtggctaaaaaacaggtgctgattgccgaagcaaccgctgccattgcaccattacaggatgctgtcgatttgggtatggtgacaccggaagaagaatcagccctgaaggagtggaggaaatatcgcgtactgctgaaccgcgtcgatacctctcccggggctgatgtggtatggcctacaccaccggcttcaccggccagataa

SEQ ID NO: 290540 - DNA, 579 bp, Morganella morganii
atggaatccggcgtggtgccggtcagcagattatcaggattaagccacgaatccggggattcaaagacagctgtcatgtcgcagtacggcgttaaagaatatgccgccccgaaaagtgtttattctctttcttctgacaattcagcaagcatcaaaacaccgtccgggagagagtttaatgtgtcctacaacggcttttccggcgtgaaaaatgagaaaggcacaccggtatgggaatttaacccggaaggtgttttatctgtggggaaaattcccgcatcaaacgtcaccgggttacaacaaattggtgtcggccagtcatggcgtaatgtgcagtcacagagaagcatcggcacactgtatacaaactccaccggtcgcccgatttttgtgtcggtctcaattattgtgcagaccacaaaatcatcacgcctgtacgtcgatggtgtgactgtggcatctgccgcaacacagaccggcgatggagtccgaatcaacatgtcagttattgttccggctggttcaacgtatcgtgtggacgatggtgaatctattcagtcatgggcggagttatcttaa

SEQ ID NO: 290541 - DNA, 435 bp, Morganella morganii
atgctgaccctcggccgtggtggtccggtggtgtggctgagtgaggacgatgcccgctcgctgggcattgaggataacgactggatcgaagctttcaacagcaacggcgcactgactgcccgtgcgattgtcagccagcgtatcccggacggcatgatctttatgtatcacgcccaggagcgtcagataaacctgccgggctcggaagtgaccggtatgcgcggcggtattcataactccgtcacccgtgtctgcccgaaaccgactcatatgatcggcggttacagccacctggcatacagctttaactattacggcactgtcggctccaaccgcgatgagtttgtggtggtccgcaaaatgaaaaatgtggactggctcgacggtgagcaggatggttatcaacagaccctgagcgggcaggagaaagcataa

SEQ ID NO: 290542 - DNA, 165 bp, Morganella morganii
atgagaatcagtgacattccgggaaatcaggcctttgttaatatacctctgccaaaaatcgacggaagaaccataaatccgcttcagtttgaccggatggcggaaaggataaattatatacaaaacaccacaatggaattcagactgaataaaaagtgttcgtga

SEQ ID NO: 290543 - DNA, 4041 bp, Morganella morganii
atgaattcaaccttctatcttgaacgtaattttacacatgatgacagaacatacacagagacagaattgctggctgcatcaacacacattgtggtgttagcagaacccggcggtggaaaaacggagctgatgaaaaatctcgctctgaaactgaacacttctgtctcaaatgccagcgtatttgctcatgtgggagcagataaagaaaatagcccactgataattgacgccgttgatgaagtcgccagaatcgatcaatcaggcatccataaaatccttgcgctcgccagaacatcaaagccaaatcgcgttatcatgtcgagcaggtcaagcgaatgggggctggcttccacccgtatttttgaaaaatttcttggtgtctcgcctgtgattgtgagactgagagaattcgatcaagacgaacaacacgccatctttaagcaccatgcgccaacagaagacttctttgcatttcagaccgaagtcacgcggtttaacttagacatgttgttaccaaacccacagtttctgaaaatgttcaccgacgcctatttagaaagtgacaggcgatttgctgacaaacgttcaatctttgccttagcagtcgaacgactgaccaaggaagtcaacccggatatcccgaaagcctctgtatctctttcagttacacagaaaattgcattttctgctgaggtttatgccaaacttttgttgtcgggcgcggagggcgtcagcaccatcgacacgagcgcaaaccggatgtatcccatgcttccagcgttgtttagcggcagtactgcctgttacgacatattgtcaacacagcttttcaaacccggagataatgaagaccagcaccgcccggtccacaagatcgtcgctgaatactgcgcggcggattatcttattaaacgaatagccgatcctgcggatgccctcactttaacaaaatgcttatctgttattgcaccgaacggcgctaccagagatgaattgagaggtctgctcggatggatggcggcattaggtaacaggtcagtacaaggatccattattgaacttgatgcctatgctgtactcgcaaacggcgatccatcgcagcttgaacgctcatcaaaacggcagcttcttcatcgacttaaagagattgaagccgcagatccttactttcgtcggagcgatttctggcgccggttcagtgcggcggatttcttcacgctggacgttgttgaagaaataaaatctcttctagccgcgagtaatgaaggccatttacgggctttaattttagaacttctggccgattccccggttaacagtcagttgacgcctgaattgagcctgattattttaaaccccaacgagtctgaacatattcgtaccttagcaagcagatgcttactcaatgtaaaagagtacgatttcattgacactttagccgttttaatttttgaagccagtaatattgcactcaatattgcagccaaagttatcgaagttactggaccagaaaaatttgaccacaaatatctctctggattcttacgcgtctgtgcgaacctctatcccgatcacaaagaacaatttgaaagagtcgtcggctctcgttattttattaaaaagcttatttcctgtttttcacagcatactcttgaacttcttcttgacgaattaacccataatcttcattgccattgtgggaaaaaatcctatgagtgtgattgtcgcaatggaataagcaagatcgtcggtttaatggtcgatcgctattttgaattcgctcaaacaccgtttgatcctgtgaggacctggcaatggacaggtaatctcaattttcatcatcaatgccagtcagatcaaagcaaatcggtacaagtgcttcgggaaaatgacacgcttcgtcaggggatcattgctcatgtatttgggccattaactgatcgtaaagaaatattcaacataagagtagagaaattcgacgggtacctgcactcacattcaggccttcatttatggcggaaggactataaatttctcctcgagctagcgtttaaaatagataacgttgacctgtgggcgagttttcttgtcagccatcagcgttacaaaaacagagaagaacaaggccctgatgacttgcggacacaaatgcgtcagcacgccctttccaaccccgcatttatgcgcgaatgggccagatacaacaatgcaatgaaattatccgaactgaaggatcaggtctggagattcagacatagccgaagcagaaaacgtcatgacagaaaacagcgggagatccgtgccagaaatatagaattcgttaatgaaaacagagaaattgtagagcaaggccgtcactggaactgtttggtccgttttgccgcactggtgctcatgaatccgaaaagaattgaatcagaatttggtgatgagacgctggttcgggctgcgttgaaaaattgtctggattttatcactcccgttgttcccaccctccccgaactggcgattctacaatgcgaatctaaattcaggcattctgagacggttttatatgcagcctgtctagagattctacgtgcagagggtcatctcgaatgcgtcaatatcgagttacttacagcattaagaaccaacatttacatgggatacaactcagtttctacggaagaacgtgatgcgctacaggcagaggttgaccgcctcatttttcctgatagtgaaagtgctgaaaaatatctccgacagtatgttgaaccccaactcgctcagccatgccctcaccctgaaatctggctgttgagtaaagaggaggtctttagtcagtcacgcgctaaactttccattgaatggcttcgccgctttactgatttatcccttgactcagtggacgcaatttttgaaattgccgctcagtacggcgatcgtgagggtttaaaaaaaattattgcagagcgttgctcagagataatgtcaggctggcccaatctgacagaagatgaggattttgaacgcaagcgaatattctggttagtacgggagttctactttctggagaatatcacagcgacttactggacatggttaaaatctgataaaaataatttactgtgcttttatggacgatccgagcgcatgagccgaagcgagcatcgagcttggcctgaactgatctcaatcaaaattgaagccattttagatgctttcattgaacaatggtcgcacgttgacctacctgatcattgggacagtgatagtccagaagaggaaaaagcctaccgctttttgactgatttagtttggtcaattgaatcagatattcccgacaatgcaatacctgtgctggatcgccttcttaaggctcctcatttcactactctgcataaggaattacaaagcatacatgccgctcagatcagaaaaaaagcgctcagggattttgagccaccgacgccagacgagatagttcaacatctagattgtgattcagtggttactgttgaaggcctgcgtcagttagttcttcaggagcttcatgatttccagaaagcgattgatggcggggaatttaactcggcagatcgcttctatgaaaaaaatgaacgccttgatgaggtaaagtccacggaaatcattgctgagcgcctcaatttaagactagaacctcagggcatatctataacacccgagcatcagttaaaaggccaaaacaggagtgacttcacggcatctaagttgattggcggaaaaagacgactactggttacagaagtcaaaggccagtggcacagagaattatattctgccgcttcagcccaactctatgaccgttattctatccacccagatgccgagcaacagggcatctttcttgtcatatggtttggagaaggtgaggccgttgcaggccgtaagcgccacggcatcaaaaccgctcaggaacttaaaatcagtattgaagccgtgttaccggctgacctctatggtttaattgatgttttcgttttagatatttcacgacagagtcattatcagcgttaa

SEQ ID NO: 290544 - DNA, 636 bp, Morganella morganii
atgtttgataatgtatggaaattagcaacgtatgcatatattttaggcgcaatagttacatttactccggtattgatacctattctgcagaaaataaatttacacgcgggtggtgatagttttgataaatctgagtattttgatgaaaaagaaaaggaaatgttaaaatctcactatagtcgaatattaggaacacttgcattttggaaaaatcaagcgttgaaatttaaaagatttcattactatgtattgtgttggacaataccatcagcagtcttagttcctgttattattcaatctattagtatatcaaatatcaatgaagcaaagttgtttttaacgatcgtttctacatttacagcgatactactttcatttcataaaggattgaaagtagaggataattttaaagcgtataggcatggtgaatctgagttttttgatacttacaggcgactgcttgataggccgaattcatttggaagtgataagcagtcacagatatctgaatatacttctcaagttgaatcaattagacgaacagtgagaaatgcagaaacagataatttagctatgcttgatgatggaaaaagtagtaataaaattatacagagtaatatgaaaaataatatctaa

SEQ ID NO: 290545 - DNA, 132 bp, Morganella morganii
atgagactgaccaagggaaagaaagagatactggctctgtttgaggaaggcagcctggagttggtaactacagaggttggcgcaccgccccagtattacttacatgctccacagatcaaagtcattcagtaa

SEQ ID NO: 290546 - DNA, 1419 bp, Morganella morganii
atgctccggagtatttgggcgacatacagcgagcgtaatgcccgtattcttttactgctcggtttcgcatccggattaccgctggcactgaccagcggcacactccaggcctggatcaccgtcgaaaacgtggatatcagaaccatcgggtttttcacccttgtcagccaggcctatgtgtttaaattcctgtgggcaccgtttatggatcgctaccagctgccgttcctcggacgccgccgcggctggatgatcaccacacagcttctgctggttgtcagtatcgccggtatggggatgctgaaacccacggaacacctctggtggctggctgctgccgccgcgattgttgctttctgctctgcctcacaggacatcatttttgatgcctataaaacggatttgctgtccgcgaaagatcgcggcaccggggctgcgatatcaacattaggttaccggctggccatgctgctctccggcgggctggcgctgtttatcgcccaccgttataccggctggcagaatatgtacctgctgatggcggcgatgatgctgattggtgtgtttgccacactgcgcgcaaaagagccggaaaccgatgccccgccgccgcgcacactgcgtgaggctgtccgggagccgctggcggagtttttctcccgtaacaacacctggctgctgttactgctgatcgtcctttataagatgggggacgccttcgccctgacgctgagcacgccgtttctgatccgcggagccgggttcggtccggacgaagtggggcttatcaacaaaaccctggggctggccgccacgattgtcggggcactgtacggcggttatctgatgcagcgctggagcctgtttaaatccctgatgttcttcgggatcctgcagggattttccaacctcggctactgggtactgtctgtcacaccacaaaatatctatatgatgggcggcgtggtatttatcgagaatatctgcggcgggatgggcacagccgcctttgtcgccctgctgatgacactctgtaaccggtcattctccgccacacagtttgccctcctgtcagcactgtctgccgtcggccgcgtctataccggcccgtttgccggctggatggtggaagcttacggctggagctggttctatctgttcaccgtgtttgccgcaattccgggattgctgctgctgatgttgtgccgcaaaacgctgctatacacccagaaaacggagcagtttctgccgaggcggcacttccgcaacggctaccggacggcgatgtcactgctcggtatcaccgcagtactgttcgccgccagcctgatcctgctgccggaacatattcacgtttacagcctcgtcaaacaaaaagaggaacaaaatgcccccttcagttctcatttgtctcgctga

SEQ ID NO: 290547 - DNA, 1905 bp, Morganella morganii
atgaagcttaaaataattaggctatcaggatttcaatcttttggtcaggagccaacagaattgaatttggaagacattacttatttgattggtccaaatggatcaggaaaaactgcggtgcttcaggcattatgccgtctttttgcgtttgatcctggattacgtagagttcaacgttcagacttctatattccatttgatgaggaagaaactcctcgtgaacgccagttatggatagaagctgactttatttttcccgaacttgcaagagatgaggataatagtactgtagcgcctcattttggtcatatgcgattagatgagctagacggtgtaccacgtgtacgttttcgtctctcggcaacaatgggattggatggagatatcgatgaaagcttagtttatgttctggatataaatgaagatggctctcctgataatacatctaaggttccacgggcagaacgtaataacatccaagttcactatttacccgctcgacgagatccagctgatcatattacttatggtacaaacgctttactagggcgtttacttcgtgccgtacgctgggatgctgaacgtaatacaattaaggaattaaccgatcaaatcagcggtagccttgcagcaaacccttccgtaaatgcatttagtgaaactttaaaaacgacttgggcttcgttacataaaggaacatttttcgctgatccaaaagtaacatttgttgcatcggaaattgaggctttattacggcatttatcgatttctttcactcctagtcacgacgggtcacttgttgacttctcacggttgagcgatggacaaaagtcaatgctttatctttctcttgtattatcgtctcaagcaatcggcagagctgtacttgcggaagatgatatatcttttgatcctgataaattacgtccccctgtctttacattgatagctcttgaggagccagaaaatagcctctctcctcactatttaggtcgtattgtaagtgttttgaatgagatgacaaaaaatgaagatgctcaagcacttatagctacgcatgctcctactatgttgcgtcgagtttctcctgagttaatacgttatttacggttaacggaatcacgcaaaacacggatcacttgcatcgagttaccagcaaaaactgatgatgcgcacaagtttgtccgagaggccgttcaggcatttcctgagatctatttctctcgtctggtagtgttgggtgaaggtgatagtgaagagattgtattacctcgtttgtttcaggctaaaggagcgcctattgatgaatcagcaattacaattgcgccgttgggaggtagacatgtgaatcatttttggcgattactttcagcgttacaaatcccttattttacattgctcgatcttgatataggccgctatgccgcaggatggggacgtataaaatatgtcaatgaccaattttctctacatgaaccacataaaaaactacccgatggttacggtattccaatatggaatagcacaaagcataaaattaggaactataaccattatttagaaaagctcgaagaacgtggtgtttttttttcttacccaatggatttggatttttcaatgctgcaggcttaccctgaagcttatgatgttgaagacaaggaacctgatgactcgacaattaaggctgtacttggacaaaactattacgattcatgtcaatatagagaagatgaattagaattatttagtacctatcagcagcgttttaaacttggtagtaaaccagccgcacatattgaggcgttagctcagttaacggatactgaactacttgcaagaatgccagcatcattaagtcgattagctgatgcagttattatcaaattggcggagttacctgaatga

SEQ ID NO: 290548 - DNA, 1668 bp, Morganella morganii
atgattactgttgaagaatggcaaccagcagatgagttgattcttgagccaaatgcgttacgtgcagcaaaggaacatgagtattgtctggcattgaccgccggaccaggtgccggtaagacagaaatgctagcacaacgagctgactttcttttgcgtacaggaacatgccgataccctaagagaattctagcgatttcttttaaggttgatgcctgcaaaaacttgaaagagcgagtagaacgacgatgtagcttcgatcttgcgtcgcgttttgatagctatacctttcatgcatttgctaaacgtattattgatcgttttagacctgtacttgtaaatgagtataccttggattttggttattctattgttgataaaaaaaatggtccttctcgaacagaaatagagtttggtgatttagttccgtttgctattcaaatactgcaaagctcagaaattgcccgtaatgcaattcgacaaacttacagtgatatttttttggatgagtttcaagattgcactaatttgcaatatgaattggtcaaacttgctttccaaggaactaggctccgtctcaccgcagtaggtgatacaaaacaaaaaattatggcatgggctggagcactggatggtattttccaaacatttgttaatgattttaatgcagtgccacttaacatgtatcgcaatttccgttctaaacccagattattacgtgttcagaatgaaattattcgtacgttagatcctgcttctgttatgtctgatgaacaattaaggggagatgagggggaagtttatgttcatagttttgaagatagtcggcaagaagctatttatttagttgatttgattgataagtggatacatatagaacaaataccgccagcggaaatatctgttttggtttctaaacaattagatctttatgctaaccaccttatggttgagttggaaaatcgtggtattccatatcgtaatgagcaacaaatgcaggatattacggtggaacctgtagcacgcttgatcgtggactatttgtcttgtctttatagcgaacgtgaacctaaggcttggattcgattgatgaatcagcttattccttttgctgatgaaggaattcagtctagtgcacgtaaggagcttgatcagctgattagaaaacaaagaaaaattgtatttaatgcaaggagtacagagctgccattttcagactggtggcaattagcgatagattttttaaagtacactagcatcgaaactttggtggctttatcccctgaatacgaaaatcgtaagcgtttaaaggaagttattcgagaaacttctattcggattcaagacttactaaggttggaaccagatttgcttaaagcattgggacgctttactgatgatcaagctgtaagaattctgactattcataaaagcaagggattagagtttgattccgttataatcatggcggttgaaaatgagattttttttggcagtaaaaatgaaaatcgttgtgcattttttgtcggtgtttctagagctaaacgaaggttagtattaacccatgcacaacaacgagagcgcccattagatgctaaacgatgggatgtaaagagaagtgcccaagaagaatatttcaactacgtaaaaccatttgtaaatggttag

SEQ ID NO: 290549 - DNA, 399 bp, Morganella morganii
atgtatgaactacgagatgatgccttagaaaatggtgacgatatgtcatttaaattgtataccgaagaaaaaaacagaagagagaaaaaccacaaagaaggcagaacgactgaaatcattgccttcggaactatttttgttttctctatagaatggtatttatctttatcagacggttccagtaagatgtttattgactggctatgggaacaatctaaacatagcgatccaacgacatcgcattttctcattggcctgttagtttcatctgcattacttttctacgcagtagtagtttgttggcctacagatcatgaccgtaaaatatattatcctaagcttgctaaaaaactgagaaaaaaggaagatgaactgaagaaaaaaatgaacgatatgtaa

SEQ ID NO: 290550 - DNA, 228 bp, Morganella morganii
atgtcatccagtaatagcaatagtagttcaacattttcagtattaagctttgtagatggattatgggatttagcgaaagttgcaaaagtaatttattttactatttgctttgatgttctttttttctgtttaaaagggaatggcctctttggtattaaactgggtaaagagttcgacctctcgttagcagatctggctgaagaggatctaccaaaaatcatctactga

SEQ ID NO: 290551 - DNA, 1278 bp, Morganella morganii
atgccacttactgatactaaagtaaaaaacgccaagccccttgataaagaatacaagcttacagatggctttggtatgttccttcgcgttatccctaagagttccaaatactggcaaatggcttaccgcttcgatgggaaacaaaaaatcttctccataggtgtctaccctgctgtttcacttgctgatgcaagacagcgccgtgatgaagctaaaagacttcttgctcagggaattgatcctaatgcaaagaaacaggccgaagttaaagagcttaaagcaaagcgtgataacacccgaacattcaaagccgtgaccaaggcgtggttttctaccaaaaagaaatggtctgaagattaccagaacactgtctggacccgccttgacaactacatatttccggacattggcaacagagacgttaccgggcttaccactggcgatcttttagtccccctcaaaaaagtggaagcccttggttatctggaagttgccacacgggttaagcaatatgtcacctctatcctgcgctatgccgtccaacagcagcttatccgctataacccggcttacgatctggaaggctccatacagaagccagaaacggaacatcgtccggcgctggagcttgaagagatcccattgctacttgaacgtattgatacctacaaaggccgcaaactgaccacgctagcgattcagcttaacctgctggtatttgttcgttccagtgaactacgcttcgccagatggtcagagatcgatttcaggagcaagctgtgggttatccccgaacagcgggaagtcatcgacggcgtgaaatattcaggccgtggcaccaagatgaagcgtaagcacttcatccctctctgtcgtcaggcaattgtgttgctgaaagaaattaaacagcttacctatgaagaagatggcaatgatgatgggtttatctttactggcagctacgacagcttcaagccaatgagtgaaaacaccataaacaaggcacttcgcaagatgggatacgatacccgtcaggacatttgtggtcacggcttccgcacgctggcctgtagtgccctaattgagtcaggtttgtggtcagaagacgctgtagagcttcagatgagccacaaggaaagcaatagcgtccgtgctgcttatactcataaggccaagcaccttgaccagcgccgcctgatgctccagtggtgggcagattatcttgatgcgaacagcaacagtatggtcaggccgtttgagtttgctcatcacaagtaa

SEQ ID NO: 290552 - DNA, 540 bp, Morganella morganii
atgcacaaagcatttcatcaggggcaacatgttattcaatcgatcgcttctttttctccgatttttttactgaatggctacactgcaatggtgtataggaataatagtgatgcgctaaacaatctctggataacggtggagcaacttacggagcatatatggaatgagcaatatctgaagaaaaaggacagctttcctgaaaaagttgcaaaagcccacttgaaggcggagaggcagaaaaaacttggctccatttacacaaagcatgaacttctgtgcctgtctgatatttttagtaacgattgttacagagaacttgaccgtgcgcggcgaaaacgaaatattcttgtgcatacaggtgcagtacctgattctggtcttgtagagcagttgtggaatgtaatgcctgaattaattgaagtggcttctggttcagaggctttggggttgaggcgactaagtggcggagtagtggagaattgggatatgccagtaaggactgactttagtgagtgggaaaaccttgcgaagactctttaa

SEQ ID NO: 290553 - DNA, 1863 bp, Morganella morganii
atgaaactttcttcttttaaattaaaaaattatcgccgtttatcggatattacactaactcttgatgataaaactacaattctagtcggtgcaaataatagtggaaaaacatcttgtattaaggcgctatacacttttttgagtcgacgtggcaacatgcacatcaaagacatacctaaatgtaattggaaagaaattagaaggttaggtcagctaattgaggaagattttccatctaataatgatgaagaaaatgagtttttaacaaatttgacacatttcctcccattactggatattgaaattaatgccgatgcaaaagaatcctataaagttagagatattttaccagatctggaatggagaggtggttctctttttatccgtataaagtatgaacctaagaatatcacggaattgtgtcaagaattcagcgaagcaagaaaattggtttcaggacatagtaaaacctcgctttggcctaaggatctctgtgattttctggaaaaaggtaataattttgaacgttatattgaaaaaaaatattatatcctgagcgatgactttttacagccactatcatcaacggttttggaaacattaatccgagtagatgttatttctgaacagcgcgggctgggtcaagatgataatgaaataagtaaagggccatacacagaaaagcatagccttaataaattattgcgtaattattatgatagcattttaaaccctgaaacatttcccgatccaaaagatatcactgtactggggcaacatcaaaaactagaagaagatttttcaaatagattgaactcccaatttacagaacctatgaacgaattaaaaacaatgggttatactgctattggtggtaaccctagcgttcaaatagctgcaaaaattagcggtatggatgcgctacaaagagcatcgtctatacgttatcacttcgatgataaagatgttgaatatatcccggaacattatttaggacttggatatcagaatctaatctatctgacttttaggcttcttgaatttcgtgataaatggatgcgcgttggaaaatcggcaattgcccaaaatttaacagaaacgaagtcagagttagcacaaattgagccaatccatttagtcttgattgaagagccggaagttaatttacatgctcaagttcaacgggtttttgtttcaaatgcatataatgtattacgaaatcaccctgaattaagaaataaagataagaaggataatcaagaatactatacacaattagtcattagcacacattccagccatattattaatgacgttgattttaaagagttacgatattttaaacgaatgagtgcaacttcactgttaccgatgaatcatacgataattgcaaatatgtctgagttatttgcatccccaaaagatgaactaaagtttgtaagaaaacatttaaaattaactcactgtgatatcttttttgctgatggtgttatttttgttgaagggcaagctgaacgtattttaattcctcagtttattgcagaatattttcctgagctaacaagtcgatatctctcaattattgaagttagtggtgcacatacacataagtataaagatttaattgaaaatctcggaatgaaagccttagttattacagacattgattcagtcaataaagaaaacaaaaaatgttacccaaaaataaaatcatcacaaaaaacaagtaatacaacacttaaaaaatggcatcctcaaaaagagaatttagatgaactaataaaactatcaagtaaaaatcatgtcattacttctaaaaattcagatgtttacaatagcatatcaaaaagcaacggagcttga

SEQ ID NO: 290554 - DNA, 393 bp, Morganella morganii
atgtcattacttctaaaaattcagatgtttacaatagcatatcaaaaagcaacggagcttgaaggaaaaaagatactgtctagaacttttgaagatgctttgattctggctaatattaaaaatagcttttttaataaaattgaaaaaataacaaatgcaaggaatgaattctcactaaatcaagatgtcgatgcattatgtgaatcacttttcaactacgtacaagagctaaaaaaaggggacttcgcttttgactgcctattttatctttctgaaattgaaaaccataaagaacttctggacaaagaaaaagagagtttttctcctccgaaatacataaaagatggacttgattggctaaataaagagttaacaccaaagaagggaaaatag

SEQ ID NO: 290555 - DNA, 1941 bp, Morganella morganii
atgtcaacagacttttttcttgcggagacacgttcggcaaatcatgatgatagtgtcgatgatatcattaaaaaatgtatacattctaagtcaaaacaaagttttattacttttgcaggagccggttcaggtaaaacatattctttaaaacaagcattgatttacctcaaagataaacattcgattgacttttctcgcaaaggaaaacaagttgccattattacttatacaaataatgctgctgatgaaatatctaatagaattgataaacatcccatgtttactatttcaacaattcatagtttttgctggacctcgattaaaggatttaacgaagatattcggctctggtatttaaatgccattcctaaagaaattgcaagaattgaagaattagagcgtaaaggacgttcaggtaaagcttccgatactaggaaaaaaacacttattcgcttaaatgctaagttagaatggttgagtgaacctcaaaaatttgtatatgatcctaatggtatcaactcctctaaaaatgccttatcacacacggatgtcctgaacattttttctgattttcttacaaagaaacctgtgatgaaagaattacttgcaagcaagtatcctttcatatttattgatgaaagccaggatacagacaaaactgttattaattcgttttttaatttacagcaaagcaaacaagaccaaatagtcataggtctttttggtgatactatgcaacgtatcttcggtgctggagatgaggaattaggtctgaaatcaccgccagtacctggctgggaagtgattaataaagaaatgaatcaccgctctgcacgtcgaattgttggattgggcaatcaaatcagaagcactgttgataatcgcaaacaatacgcaagagaaggggcgccagaaggatatatcaggtattacttactgccccaaaatgtagaaaataaagctgaaatagaaacaaatattcgtagagaaatggcaaatctgacaggagatctagactggaatgatattgcaggaaaaaatactgctgttttactcttagagcacaaaatggctgctaggcgccttggatttcatctgttatgggaaaaattagaacaagtaagcaacctaaaaaatagtatgagtgatggcagcaatactgaattgaatttttttgcaaatattattttgccacttgcagatgcaagtctcaatggtaaacatgctgagttgatgtcaatacttcggaaatataattcacctcttttagagccagagatctttgaagccaacaaagacgacccgttattttccgctcgtacagctgaatatgaattcaaggctaccattacaaataatgatgttagctttcaaagtgtcctggatattctagctcgatacaatttgatgaaaattccatctaaattgcaatcatttttgacactgaatgaggctcaaagcatcagtatgacaacagaaaatagcgcctcatctatcgatactaatgaatttgaagcatgggctgacgcactcaaaacacgtttttttcaaatcagggattataaaaagtatatttccgatgaatcaaaataccgaacccaccaaggggtaaagggaaatgaatttgaacatgttatggttattatggatgataatgaagccggaggatttatgttttcttatgaaaaatattttggggtcaaaggcctatccacttctagctcaaagaaacaaaatactgaagagcaaaaattaaaagggctagagcgcactggtaggctattctacgtaacctctacaagagcaaagttcagccttgtccatgtcatctatacatcagatgttcaggcgttaaaaaataaacttattgacaaaaaactagctcgagcagatgaaataatagaaccgcaaaccacagaaacgaatattgttagattctaa

SEQ ID NO: 290556 - DNA, 1401 bp, Morganella morganii
atgagtgcagaaagctcaggacgattcacgttgaaagaattaaatcgcattaaggttctacaagatgtcattgatcgtaaaatgactccaggtcgtgcggccgtggtactcggcattacaccacgccattgtagccgactgataaaacgctaccgtgagcatggccctttaggtatgaataacattgctcgaggtaatccgagtaaccgtttattgccaaaatcattcactgaccaaattgtggatatcgtgaagaaaaattaccctgattttggccctacattagcgcgtgaaaaactagaagaaatacatgggctgactattggtaaagaaacacttcgtaggttgatgatccgtgcaggtttatggatcccgagaaaaatgcgagccccaaaaattcaccaaccacggtatcgacgcccttgtacaggtgaattgatccaaattgatggctgtgaccatgattggttcgaaggacgtggtccaaaatgcacagcattagtctatgttgatgatgcgacgagtaaaatcatggaactcctttttgtccaggctgaatccacatttacatactttaatgccactcggcgttatattgaaagacatggaaaaccattggcattttacagcgataaagctggcatatttagaattaataacaaaaatgctataggtggcgatggtcatactcagtttggccgagcaatgaatgagttaaatattcagaccatttgtgcagaaaccagtcaagcaaaaggccgagttgaacgtgcgcatagtacacttcaagatcgcttggttaaagagtttcgccttaagcatatcagctcaatcgaggctgcaaatgcattcactgacgagtttatggatgattataatcatcgctttggtaagcttccgcgccatgaatatgatgtccatagacttctagaacaagatgagaatttggataccattcttacaatcagagagtataggaaagtttctaaaaaccttactgttcaatatgataagattgtttatctaattgaagatactgaatatagtcggcgagctattggtaaatacatcgatgtttatcactatccagacgaacgtaaagaactacggttgaatggcatcccccttccctttatcacatatgatcggctgtctgatgttgaccaaggtgctattgtggacaacaaacggcttggccgaacactcgaacttataaaaacagttgttgatgataagagagataaccgccgctcacaatctgtgccagctggaaatgggccatcgcgtcgcaaagaaaaagcgccaggcaaaaaatcccagcgctctatcaatcaaaatgatatgttagaagccctcgttaaacttcaagggcgttcaaaggaaatttttggtaagaattag

SEQ ID NO: 290557 - DNA, 555 bp, Morganella morganii
atggcagatttgttaaatgaatttgttagcgctgaagactcattgaattacccgaactcattttggtatgtttggaatagatttaaaggccacatcattgattcaataagaaatcaaggttggaaatatggtaaagaacgcataatcgaatcctttttatttgcaagagtcccttggaaggatgaagcaaagacatggcatacattttcaccagagaataacgcattttttagtgatctaagcggtaagataggtggtgaatcatcttttatgtatagcatctgtaaactcctttgtggtataggaagtgagtttttggatgatggtatttattggctcagtcacgctataaagacctttgatatcgacttgtcgcaagataaatcaggaaatacgttattctacttagaaagatatatgagaagatatttattcaaaaatcatgacaaagtgaggcgcacgcaaaacctaaaagcacaatcaatggttgtactggattttttagtcaaacaatattccattactggttacctccttagagaagacatagcctag

SEQ ID NO: 290558 - DNA, 1140 bp, Morganella morganii
atgttagatggatggttaaattcaatctgggcgatatcaatgatattgatgtcaggcgcaatttttagcgctaagtgcttttcatttgtagatactgacacgaaagcaggaaggaatacgaatatagatggtttgcgatttttgcttgcttcatttgtagccatgcatcactttgttttcagctataacttcacaaccgtgaatagatggtaccttcaagtatcagagtatccgttagagttattttttggtggttttggtgtttctattttctttatgatatctgggtatctttttattgatacctgtgaaaaaaacactaattgggcaaagttgtacataaacaggtttttcagaatagtcccaatgacatttgtttcgtcattgttatgtattcttatagcactaatgatacaaaggaatgaatcataccaattcatcataaatgatataatttattggtttgacgctggagtcataaacaatcggccagatttatttggcatgaatgaaacaaaggtaataatgggtggtgttacatggacgctaaagtgggagtggattctatatttctcccttccttttttggcatatataaatagaaaagaaaaaacaacagcattgttattatctattttgtttataatgtattacattgtttgtgagttcaactataacgttgcattatattcatcaatgttcgccatgggtgctatctgcaaaaaagcatcaggttacaatttcaataacagaagtttattgaattcattatcaatattgctactcatatcatgctttgttttttcatatgaatcagatggcgttaaaatgtcgcaatcaatattgtattggttattttttattaccatttgcgtcggtgcaaacttatacggattattaaatataagcggattcaaaaggcttggcgacgctagttttagtatatacatactacactcaaccgtatggtttgtaatgaataagatagctattaataccggcactatatataacaaaccactatactacacaatatcatcaatagcatggttttctatatgcatgatatctatattgtcatttcattttgtagagaaaaaattcatatccataggaaggaaagtaagttcttacgtttga

SEQ ID NO: 290559 - DNA, 555 bp, Morganella morganii
gtgaagaaggtattgattgcggttattgcaatattggccttggtgagttgtaaggaaaaaagtgagttttccactgatgctccatttggatttgaatggggagaatcttacaatgatatcaaatcaaaaaatcttaaagattttgaatatgttggcaatgatgacggaatcgttattgctaaaacacacgaagcacccaaagaagtcacaatagtacaaacatattatctgtactttgaaacatcggtaggccttggtctcataaatgccagaaccagagaaatttctctttctgaagataaaagccatgattcaatagtgaatgcatataaggctgtgatggagcatgttgaaaatagtcttaatgagccaactcgcagcaagtcacaatatgacgaattaatatcagattgtatcaataagaacgattgctcaccccttgatgctgaatataaaacaaaagatgccactattaagatttcattagttgtatctaaaacaggaaatagatccgcttgggtttccttaaattactataggaatcttgctggatag

SEQ ID NO: 290560 - DNA, 468 bp, Morganella morganii
atggcatactcagctgtagctgttgcaaacgccttcattcagagggcgctgaatggggatattcccgacttaaccccgatgaaattgcagaaacttatgttttatgctcagtcatggtcgctcaaaatttatgatgcgccaatttttgatgatttctttgctaagtggcgatatgggccagtaattccgtctctctatcacaaggtgaaaatgtatggtgccaacaatatcactagcatgatagttgattttaaagtggaaagcggaaatttgttttctattcaaccgactgtgccggattctgacatcaaaattaacgctcttgtggacaagataatagaggtttatggggagttgcgaggaacccaactatccttccttacccatcagccaggaaccgcttggtacagaacagagaaagatagttctgttatcacaaatgaactattaaaagaatgtatagagtaa

SEQ ID NO: 290561 - DNA, 753 bp, Morganella morganii
atgtccgattgcccagaagataaaggcaacctgcttggcgaccacggtattcttcgcgttgcgcgcggatgtccatcacaggcaccagatcaatcagcgtttcttcgcttcggcgcggtgacaagcaaaggcgtggattacggtgtggaaacggtgagttctaaagccgatgatacgccgggccttacggaatccatggttaccggcggcggaatgacgattaaagttgacggtgagatgcgtgcagctccgattgccgggtcaacgtcagccatggattttgccaaagaaatccttgaagaaattaaagcacgccgccagacagggtactggattcaactggatatgcgcggtgacgggaaagaagtccttcaggggtacttcaacgttacttcgtggtctatggaattcccgacccgggaactggcgacatactccggtgagtttaaggttcacaccgccaccacggttgaatggctgaccgaggaagtcgctgtacaaggggtgtccacggaaccagctacgctgacggtaaaagtcggtgaaaccaaaaccttcatggtgaaattcagccctgctgacgcaaccaacaaaaactataccgcgaccagcgcaaaaacggctactgctacggtgagccagttggcaacgatggtcagtgtagtcggtgctgctgtcggaacaacagatgtcacggtgaagacagaggaaggcaacttcaccggcaagtgtgcaatcactgtcatcgaataa

SEQ ID NO: 290562 - DNA, 345 bp, Morganella morganii
atgagcattaacgagctgaaaagaatcaacgatgctcacaacgaaagaaagcgcatcgaggcggttgtcaagagagctgacaatagagccaaagcctttactgccgccaaagaaatattagcaatggctgcaagtggccgttacgtcaggcatggcgatgattacattgatgtgcttcttcatcccgccgacacggacgcattccgctacctgctcgagtcccctgggttgtttaagtggaaagggggcgacatctatcagcacaaattatgcaaaaagctatttatgcataaaaaattcagtgtgatgggcggagtggacttcgctcgaataattttcaactaa

SEQ ID NO: 290563 - DNA, 216 bp, Morganella morganii
atggaatggattaatcgtaacgagaaaacaccaacccgcgatggtaaatacctcatttgcggttctcatggaataactaccgggttctggatatcagagatcggaaaatttcaggatgcggaatcgaatgataacgaaggaatgaccggctggatgggcgttaaatgcacagttagtcattggatggagctgccagaatgcccgagggatttatga

SEQ ID NO: 290564 - DNA, 300 bp, Morganella morganii
atgggatttaaaggtacgccggggccatggaggcttgcaacgatggggccgaatgggtgtccaattgttggcgacagaacaacaatggttgctatgctagctcataccgtaaatgaagaaaatcaggtgttagaggcaatgtcaaatgcttacttaatatctgccgcgcctgagctcctagagtcattgataactcttgtcgctcagattgagttgttttatagcaaggaaaaggacgactaccttcctgaatacaaggtcgcaaaattagcaatcaacaaagcacttggccgcgaatag

SEQ ID NO: 290565 - DNA, 354 bp, Morganella morganii
atgaacaaatatcgtgacaaatcagactctgagattaataaggctgtggctgtcaatattaatggcactgacgctgtcgtagagaagttcggtagaatatatatcaatgatgaagatagaagcgcgatggtgagcttcgacccctgcaacaatccatatgacgcaatgccgattattattgagaataagatatgtatggcatatgacgtattcgcagaagaacgggatggtggtaattgggtagcgcaacctgcatatggtttttctgatgaacgggtgagaagcgacgattattatcgcgcggctatgatttgcttcctgatgatgaaggatgcggagaatgaaaaagtatga

SEQ ID NO: 290566 - DNA, 600 bp, Morganella morganii
atgaaaaagtatgacttaattctcgcagacccaccctggcaatataataacaaatcctccaatggcgcagcagataaccactacaacaccaccgatttttattccctcacccgcttacacatcgaagatatagcctccgataactccgtactctgcatgtggtacacgggcaactttgtccgtgaggcttacgaactggctgaagcttggggatttaaagtgcgtaccggcttcgggttcgtgtgggtgaagctgaacaaaaacgcaggggatcggatagacaaacatccgccggaggatttctttgatttcatggacatactgacctctgagacgcggatcaacggcggcaactatacccgtgccaatgcagaggtatgcctgattgctaccaggggtcgtggacttgaacgccagtcggccagcgtcaggcagatagtgtattcctgcctcggtgagcacagcgagaaaccgaaggaagtacatcaccggctggaagagttatatggcgatgtcccgcgcattgaactgtttgctagggagaaatacggcgaatgggatgtgtacggggatcaggtgccgggaagcattgaattatga

SEQ ID NO: 290567 - DNA, 456 bp, Morganella morganii
atgtcaggaaaaactatcgaacttgaattttacggttactgggtaggtgatggtaaatctaacataccaaaaacctctggtatctactgtgtctatgtcggcacttatgatgaatcaaaagacacatgcactctgcttaaaataatttacattggcgaatcctgcaatgtgaatacacgtatagccagccacaacaaactcgattcatggaataacaaacgagggcaaggtgaagtccttatttacagtttcgctcccgttccaactggtgagcaggatcgacagcgtgctgaagcaaccctaatcaatcactgttataaaaaccttaagctaattaatagtgaatttgctacagaatacgactcacaagataaatttccattcccgacaacaacagtaaaaaccacaggaaagaactacctactaccaagtgagtgcactgttgtaaaaatgtaa

SEQ ID NO: 290568 - DNA, 1860 bp, Morganella morganii
gtgagtttccctttggaattaacagcacaaattgatggttacagtgaaaacatcaatcgcaatgtcacattaaacagaggccttacagttctactcggcccaaatggctcgggaaaaacgcatcttttgagaggactcaaacaaagcctaagtgaacatacgaatggaaagtatgtgcgctttctctctgccggacgaatggggatgttggagaagtttagatcagactatgacgggtatagaggctcaccagaatacgatcaagcaacttatggcagcaaaagtgatgcaagtcgcagacatcagatggaaactataaatggtgatttccaaacccttgctcaacgggctgatattctaattaaaatccaggagaggcttagaaaattatttaagcgtgacattcttattgaatgggatggtgggtcattaaaaatattattttcaagattagatataaatgctaaatcatactcttccggccgagaagcatcaggactgatgcatttagttggcatcttagccgctctttatgatgatgatgtaggagcacttcttttagatgaaccagaagtttccttgcatcctcagttacaggcatttcttcttcatgaaatccttagcgtctcaggtcatccctctgatggaggtaataaaaaaattgtcatcatcgccactcattcaactgaaatgctccaaattcataaaccagaagacttactgtctctcgtcttctgctatgacctgatgagtgaaccagtgcaaattcaagctgacgcaggtgaactcaagaataaaaaagtacaaaatctaatcgctcgtcttggacaagaacataagttatcgctgttttctaagcggcctttattagttgaaggaccatctgacgtaattatctgcagtgcgcttgcaaataagcttgatatgcatcttgaagctgctggatcacagttattacctgtgatcggtaaaggacagatgcctactgttgcaaaattgctacgactactcggcaaaaaaccagtcgcgttggctgatgctgatggtatcgctgatgggcttgaacttgtcaactcataccttaatgaaaatcctaccgcagaaatgcgtgcaaatatgttaggtttttcatcctctagccaaatggttagtgccatattcgtggatttttgcaaattagtagattgtcgatggaatgaaatttctgcaactgccgaatcgcatccgtattgggtgaacaaaaaaaccgaggaagagacacaagcaaagcgtcgctctgctttctgtacacttttcattatcgatgacaatgaattatcaaatttagctgatgatgatgcgtggagtagtataaaaacacgtttaactgtactgcttgatttgctggaacagtgtggcctatttattttacgtaaaggatctatagagtcttactatcaaagttcagacccattcacttcgattgggaagccaagtgcagccgtagatgaaatcgatcatatcaatcagttatttcatcatgatgttcataccgaatattctgatttgattcgctgcgtccagcacgcctcaaacactgaagtaatatgtgaagctgatgcaatgagagaccttttactttcgatagtagcacctgcgcacgccagactaaagagtggaaaatcctcagaaaatttcaataccttagctcgttcaatattgggggagcgctcaaaaatatttggtttggctgttgaaagtgaaaaacttattatctcaatcaagagtaatattctcaaccttacaggttttcctgtggctattggaaaggatgacgacgtactaaaatgtatcaatgcagcccttactgctagtctttga

SEQ ID NO: 290569 - DNA, 153 bp, Morganella morganii
atggttaacagccataaaaaaactgcaccggacagaggtcgggtgcagttctgttataccactgaattatcagaaagtataagtcacgccagtccacaggatagaggtgtgttttttgtccaccatcgggctgtctttggcctcacttggtaa

SEQ ID NO: 290570 - DNA, 690 bp, Morganella morganii
atgacaacaataatatcaaaagaaactgttttttctgcagcggatgagcgctggacagatcaatttgatcagcctgccaaacctccctttaaaaaattctatgtctttaatgacagcatcctgtttttttccggtgatattaatccgatattagcgacgctggcctcatatctgacatccgctctcggtgtagatgaagaatacgcagaacgaatggccgaaatatctgaaattgataacgatgaatgtgagatcatagaggtagatcgcactgacggacgggttgtctactcacagaatgcatccgtcaatgaagaaaacggccacattttttacggcgcaggctccggttctgccagtgccatacaatcatttattaccggtatccgggtaattaatgagtcaggtaatcactatcagtttataaaacatgggctgcatcttcttacacgaagtatgaaatatgcctttaaaacagacaaatgctccggcggaaatattgcaaaaataatatggtacggagatggtattattgataaccaacttaactggataaaaccatcagaaattaataattaccatgatcgtataataaaaaagatcgctgagagatttgaaaataaaaaagcattaactgaactgataaccatccgccaaaggaagataccgcatgaatcagacagccaataa

SEQ ID NO: 290571 - DNA, 1014 bp, Morganella morganii
atgaaaataaaattactggcggcactggccgcactgggaatgtccggtaatgcgctggctgtaatatgtacaccggtaaccccccccgaccatcaggccgaacaattagatgcttcatctgacataatcagattaagggcagatgccggtgtcggcccggataagaacattgggacagccatttccacatcgctgagttcaacactcagatattcctgcccgggatttgaagcctatggtgaacgtcctttagtttccacgcttgaaccttatcccgggtatagtggaatgtatagaacaaagatagaaggtattggtgtaaaatttacaacatcagcacctgacggaggtggtgccggggatttgccaaggcctcgttatcgcctgaaacaagatccagatcccaatgctcaaatagtctacgttaatattccaatcggacgctttaacgctacgttttataaattaagtgatgacctcaatttgagcactcgttatcctgacagtaacttattattcagtcatggtataattggctacaataaacttgaagatactaatatctctatctactcaatgaacgatatatatattgtcagtactcctgtatgcacagttgataaaccacttccggtcgactttaataccgtcaatgctgccgatatccgtagaggagtggtaagaccgcttcaattcggtatagtatgtaaaacagactatggtaattatgatgtcactgcaagaatcaaaggaactaaaattactgatgatgggaaatatataaaagtcgatgatagcaaagacaatgatgagtccttaattattgaaatcactgatggtaaagataaccctattatggttgataactcaactgtattaagtattgacaatgtaaaaagtggacaaaaagccagcttcgggtggactgcaaaactcaaaaaacaagatggaaaaccatatcctgcgcagggagcattcaaagcatccgctattataactctggaaattaaataa

SEQ ID NO: 290572 - DNA, 1347 bp, Morganella morganii
atgaagaatacgatctttgtcagtatagccagttaccgggatgcagaattaatcccgacattaaaggatatggtcgcaagttccgcctgccctgaaaaattatttatttctgtttgctggcaggatgaaaaacgtgatttttctgtttttactgatattggtgcaacagaaagagaatattctgaaagcaatccggacgttatgcacctgaattatcagggagcaacactatatattcattttgttcaatactatcaggctaaaggtgcctgctgggccaggcactgttgtgaacagtactatactgatgaggattacttccttcagatagattctcattgccggtttattgaaaactgggacaatgaacttattgattattatcttcttttaaaaaaggattttaaaaaaccgattatctccggctatccgccgggctataccccggcaacagaagaaaaagaagagatccgtaataagacagttgcacggatggtatttaaccattttaatgatggtgatattccttcatttaatccggttgctctccttgatgacaagcaacatacccggggatgttttttagccggtggttttactttttcaaccgggcagtttgcgcttgatgttcctaatgatcctcagatatttttcctgggggaagaaatatctatgtccgcaagagcatttactcatggctacgatgttatctatcccaataaaatatttctttaccatttttactgtcgtgaaggttgcgacagaatctggggagaccatactcaggaaaaaaaagaaaaaaaagttgttgaaaaaagctgggttgaacgggacaaaatatcaaaaaaccgggttcgtcaggtattaggtattcagcaatcagatgatattgaccttggaaaatattgcttaggtacagagcggacactggaagagtatgaatatttaaccggaatacttttcagtgagcaactgattgccaaagaacttctcagcaatactaagcctacatattttgataatatccctgactcaagagaggaatggatatcaaaactatacagtgattattaccggacaattaaaattaataagtcggaattaacggctaataacgacaatattgattattggtcactaggtgtattcactgaagataatcagcttattgcgatgcagcgtctgacaaccgaagaattcgcaaaacaggaatccggagcggatactaatatctaccagtttgaaataaaactgaaggataaatcccatcttgttcctcaaaaactccggttagcccccttctttacagactgcggctggggagaaacggtggagaaagtatggtaa

SEQ ID NO: 290573 - DNA, 654 bp, Morganella morganii
atggttaagattaattggggctttgttgataaaattgtctatattaacctggcaaaaagaaccgatcgccgggagagtatcgaatttcagttaaaaaaagcaggagtaccacaggataaaattatacgctttgatgctgtggaaaacgggaacggtgcattaggatgtacactttctcatattggtgtcatggcaatggcagtggaaaaaaactgggaaaatgttctcgttctggaagatgatatgatttttaatgatgatgatgaatcatcggacagaataaactattttttcagtagcctgatatgctcatcatgggatgcgggattattatcaggcagttacttccggcttacacaggtacacggttgtttttaccggctttatttttcatatttaacgaacagttatattgttaatcagcattattatcagagattgaaggatgtatttcttcagtcagcagaagaactgagcagtggagttcccatgcataaatgttgtctggatcttcactggaatgcattaatgaaaaaagataactggtatgctatttatccgtgtgtgggttatcaactggtcgataagagtgatattgaaaatacaataacagatcggacaacggcttttgccaggacactggatgaaatgtag

SEQ ID NO: 290574 - DNA, 918 bp, Morganella morganii
atgatcactaaatatgtttccgttccggatttttccgcagataaatcctctgtcattaattatgttattgcttttctgtttattctgttgatggccggcgctgcggttatctttgaggataatgaaattatcctgccggaaattgcggcgatggcggtggcactatgggtttataaatccccggaatgggtcgcgcaggcagataaaatatttattgttccgtctgtgactgcgattgccggtttcgggataaatatgctgtccatttcatatacggcaaaaataggcctggtattattagttatggcactgatgatgagtgccatgaaatttgtttttccgcctgcactggcaaccggttttttaccggtagttacgaatgcacatgagtggtcttttattatttcagtcgtggtgacaacggcattattgatggccggtgttaaattacgcaggattgataaatcatccggtcgtaaacctgaatttaatagaacggcactctgggtatatgttttggtcacgctgatctggataggattgacaatgattctgaatatcagtcagttcgccgttattccgccattgaccgttgtattatacgaatctctgaaaatgaagcagtattctattcatatggtaatcaggcagctcattgtactgaatttatctgtttcaatttctgtcctgctctggctttttatcagtaacctgcttttgctctctctcatatttattattctgatgtattttttgcaggctattttttccgtaaaaattccggcagtttatgcttttccgtttcttgtatttgtttttccggcagagagtgtcatttatttgccggcaggtagcctcctggtatccgttttttcattgggtattgcttttttaattaagaaaaaactaacaatctga

SEQ ID NO: 290575 - DNA, 1011 bp, Morganella morganii
atgacatttaataattcagtgctgattgcactgttttccgcttctttcagcgcttatgccacggaaccaccaccaccttatcagtcagaagttgaagtccctgatattaataccattctcagcagtgccactgatggctggccgaccgcaaaagataagtgggataataaatatcagtcaattatcaccggtaaccaatatattaatggtcagacattaaccagaacctggttcccggaacaatttctttatgttgagaataattcttacagcctgaataacaccattgattccttccagaccacattccggagcggcagtgtcgctatcggaaatatagtcaaaggcggaattaccaatccgtccgatccttccaaagtctatcgcggctttatgtcgatgatggatgattcggtcgcgtataacaccattgttgaagataacggcagtatcagtctgggaaatgatgccaaagcgtataacaccacagtaaatgccggcggcagaatggttgtcggcacacggggctatgcacaggcaattttgatcgacggcggttatctggagcaatccgttgccagtacctcgaataccaaagatgtgattgtcgtgaatggtggacagcatattatctacggcggtacggcaaccaacagccatatcggcagcggcagctatcagatgagcagcggcaacacgatagataccgtgctgtatgacggtgcagtccagcagatttatgccgggaaagatggtgtgactgaccgcaataccatcgttaaccacggtgcattacagtttgtgacccacggtaatacagaagatacccgtgtttacggtacccagattattaccggtgttgacggggaatgggaaaacggcgagtggacatccgacgattctttccggattgatgagcagacagccaaaatgccaccatttatgccggcggtgtgcagcgtattcagaccggcgaagccattgacactcaggtttacgggcagcagatag

SEQ ID NO: 290576 - DNA, 273 bp, Morganella morganii
atgaatgataaaaccaagggttataatatgattgatgaattctacgtaatgtatatgtatagaaaaatccaagctgaagcggctacaactgatttaaaaaccttgaatcaactgttgaagaagcttcgcaaggtagtagcggagcgccgtgaagaatactatctggagattggtgagaaaagggcacaagagctaaggtgcgagaggctacaaaaaatatgggagaaaatgaaacgtgacagagttttaccagaagatcttattgacaggtaa

SEQ ID NO: 290577 - DNA, 351 bp, Morganella morganii
atgaaagagattgtattgaacagttatgataaaacaaaaaaccatcttattgataacattttacaagggttttgtgatgagatatataatatttatgaaagtgatcctgaaacagcaatctatattatgagttggggtgaactttcagaagttatttatgatgtagtgatagctcgtgaggtaatgaaatactctattaaaaataatgtggctggtataaataaaaatgatttaaaggatgaaatattacattggcatcttgatcatatcattgaacttgtttcaagaaatataaatcaggatggaaatgaagatcctgtttattggaagctgaaaatgacagttgtttga

SEQ ID NO: 290578 - DNA, 264 bp, Morganella morganii
atggtaaacaacaacgaacaaagttctatgacaaataaaatatctgtagttgtaagcgtgttgtgtgatggaactccagaagtaatgaatactattcaagagcgttttgaaatatttgttgccattactggatattcagtagaagaaatcatggatgataagaatatacttgatgagttaaatcgatttattaatagcgagctagtagatgatttggagctggagtatgactatgtcgtcatcaatatcggttataacaactaa

SEQ ID NO: 290579 - DNA, 297 bp, Morganella morganii
atgtctaaagaaaaggtatgtattaataaatcaaccgaactgttctatgaccttgcatgcagatcgttttccgcaagctggaatatgtttatggaagttaatggtgatggtgacgccaatgattatttggatgacccggattttatgagtccatttattatccatgtgattaattatattcagaacaactttgaaaggttcattgcccaagaaggaaacagcggtgatattaatcaagtaaactttgaaaaagtcgctgctatgttagttgggtattcggacaactttagaaagtaa

SEQ ID NO: 290580 - DNA, 315 bp, Morganella morganii
atgaataatcaagaaatggaaagtatcaaagagttatccacaaaaacattttttgctatggcaaagtatctttatgtggctggaatgctgatatataaaaagcaaggagatcatgagttagtcgcatctattatgttagataataatagaacggaatcgtatctttcacatgttaaagattatctggctaagcgttttgatgggcatatggaagaagctggtaaaagagaaagactgatttatgttgatatggataaagttatattggagatgaaaagtgtccatataaaggcattgctttttggcatgagttaa

SEQ ID NO: 290581 - DNA, 864 bp, Morganella morganii
atgactacacaaaaagaaatagaagaaatcaggactgcgctatcttggtttgatgtacgccgatatgatggcctgaaagacctcaccctagaacagatctatgcagagcttgaaagacggatgttggcttacaaaacaagacaacaatgggaaacagcaggcaaagataatcaaatgcaagctatataccatgatgccaaaatccgatgtggtgatgtgatacttcaatcggactggatttcagacaatcacagactgtcacatagctatgctgtaaaaccaatgaccagagttcaattgttcaactatgggcgggctatgtatcggctggagacttcagagcaaacagaccctgttgcagtgagttcggactacatctctgagtatctcaaacaaggaggcatgaaccctgctaacaagatgctgattgaaattgacttggaagaagccagcagtgacgatctcgcagaacacctgaaagtactgattgctttatggcaaaagcaactaaaaacgcctaaacccccgaagcgaaagtttaggtttggtcataagacctttgaaagaatacttgattacaaagttatccctttgatggatttgatctcatgggaacagctctataacgaaggtaagaatatacctttcacaattttagctgatatcctgcatggtaataatgggatcagaagtagtgagaacatcaaagatactgattatcattacgcaaaaagttatcttgataacgatgagcacttcaaagttttaaatgatttttatattaaaaacaatgtgttaaaggattggggtgtcgttgacgtgataacacttaacgataaatactcggataaaaacaaaaagtaa

SEQ ID NO: 290582 - DNA, 483 bp, Morganella morganii
atgttgttaacaccagataatcgccaaaaaccaatgaagaaagtatactcactttcagaagagctaagagaagatccggaatatgttgctttaactagatcagttacgcttgatgagttaaagccaaatataggactgaacggaacttttggcctgtttgacacaaaagaatggtgggataatatcaaacagagaaaaatgccactgctatttttgaatggagtaatcaaaagaagttatgttgcagggcaagattcgtcgaaggtcaataatgctattgatttattgctagatgatggttcaataaaaatgattagcatatatgttaataaagagtcagatgctgacttatttagagttgggcatgaagtgagtattgtttacgctttagatgaattgaagccagcagccgctaatctttttggtcaaaagtataatcaaatagcacttgaaatggcagtttctcttgaaccagtaatttaa

SEQ ID NO: 290583 - DNA, 903 bp, Morganella morganii
atgcaggctgccaccgcagcggtacagggtctgatgaacggtgacctgaatgcggcactggccaacggcgcggcaccgtttattgccagtgaagtcaaaaacctgattccgggagagggcacagattcgcaactggcccgggtagtggcgcacggaatcaccaacgcagcgctggcactggccaaaggggataacgccgctgcacaggccaccggcgccatgaccggcgaagcggttggtattctggccgaatacatctacaaaaaacagccgggcgaactgaccgaacaggaaaaagagaatatcagcgcctgggccaccctggcatcgggtcttgccggcggactggttggtggtgatacgcagagtgcggctaattcggcgcaggcagggaagattgtggttgagaataacaatttgagtcctgaaagtacaaaagtaagaagtgaaggatttgctaattgtcatagtaatgaatgcattgcgggtgttcgtaaaaatatcaggaagaatttgataaagttcaaaaccgctcatggaaatgaaattgtttatagaacaatgtcatcaaagcaatatgaacgatttttgaatacaggtgtaatgcctgcaactactgaaacattggtatcatctgttttaagttattcgtctaagtatgaggggattacgatgaaaatagccgttaagccgggtacatttgctgagttagaaaaaataggtattgcggcaaatcaggttacgtcaaaagagtttcctaatatgtcgattcaaacaggtaaatggatggatacaaatacgcgattcaaagtgaaggataggcaaatgacaacccagcctgaacaagggcaaggaatggaaatgtttaacaaaaatattgttcactttgaaaaggttcaataa

SEQ ID NO: 290584 - DNA, 306 bp, Morganella morganii
atgtccatagatttgagatgctatacgacattatctgtcggtgaattacagaaaaaactggatatttttctggctaattaccctgaaatctttccaaaacactatattttatataaagccagagatctggagcggtttgataaagaaatttcaaacgagtttggcctagatcctaaatcctatttttacattagtgcatctaataagttgcttgagatatgtacaaataaaatcactggtttagtgaaagatgaattaggaaaagataatgtgatcgttctacataatggcgaagatttaatataa

SEQ ID NO: 290585 - DNA, 1188 bp, Morganella morganii
atgagtaacctggaaatccgtgagtttgaaactattcaggatgaaatcaatgcgctggaacagatcatcagcggtgagcagccgttacgccgtgccctgcagattctgcgggataacaccagcctgccggccgtggacagcaatctgacggagaaagaaaaacaggcctttatggcgcagagtcagtaccggttactcagccgcatcaaccgcgaattctcaccacagacagaaattctggtcagtaataacggcgagaacctgcaaaacgtcaaccagaaactgaatgaactgcaccgttacctgctcagtatcgaaaatgcgccggtgccgggcaaagccgctctgaaagccgttttcctgcggctggaagaaaataaccgcgatgccatttttgaagtcagccagatggcgaaaaccatgccggaaccgctgggccgctggattggcgaactggccgaccaggcgtggatcgtggtgcagaaagaggctatccgctatctcgaagtggaatggaatgaatcggtggtcaaacagtacaacagctatatcgcaggccgttatccgtttgatccgaaatcaaaccgcgatgtgccgctgagtgagtttgaacgcttcttcaaaccgggcggaacgctggatgccttctggcagcagaatctgcggccgtttgctgaaaacaacctgctggtcaatgaggatggtcagtcgctgatccgtccggatgtgctggagcagattgaaaccgccaaccgcatccgcaacaccttctttacgccgcagggcaacctcgaagcccagtttgccattgagccggtacagttatccggcagcaaacggcgtagcgtgctgaacctcgacgggcagatcctcgactatgcacacggacgcagtaataccgctcatatgatctggccgaactccatgcgctccggcggggaaagcaagctgacgctggtttccggcaccaccggcaaatcaccgcgtgcaattgtccgtaacggcccgtgggcacagatccggctgattcagtccggaaaactgaccaacgtgaacaccaacagtttcgatgtccgctttgcggtggatgacggggaaatgacttaccgcatctatattgatgagtcggataatccgttctccggcaatctgttctcccgtttcagcctgcctgaaacactgtattaa

SEQ ID NO: 290586 - DNA, 771 bp, Morganella morganii
atggataaagcagaagttctggagaaaaatggttgggttgcaaccaacatcgatgattttgcacaaagagtgaagggaattccacgggatagttaccctccattacgttgcctcgcttgtgaaaagccagtgcatgatagtggattggtaacccctaatcctgattatcgccccaggttctcgcattcagtatctccggagaatggagagctttgcccactaagtgcagagacacgccgtttcagcgggttagccggaaatgacagtactgcaacaacggagctagccagaacacggcgtgcgcagtttatggtcttcgatagtctatgtagggcctatattgtctgccgctcactacggggaggaaagggtaagcttgaccaaaagtcgtttattcgattggtcaggatagctgatagctttgggatctggcgttatagctatctccctgaatggggtatccctcttcttttaatgctgatggacaatcatccaacaccgaatggtaagtctgcatttttctattcacttaagaaagacagagccccccgggggggtgagtggcaaaatcttaacgtacggctggaagcgcattgggttagcagtagtgaacttattgtaccaaattctgagaagccagcttcgttcctgctggagatccccttcaagaaggatgttgttaatgacatcttggggaaagaggacctatcgtggtgtacaagggatgtgctgagaaacttgagtgcctttagcatcagcgaattacggtaa

SEQ ID NO: 290587 - DNA, 366 bp, Morganella morganii
atgcaactattcagacctattgaacacgcgattaccgatgatggagagtgggtcacaatccgtgaactacccgttgattacatgaggcgactgaagtgcgatagctgccatgccagcgtggtggttatcgagaataaatcgggtgaggaggaatttgttcacttacgccacaatctgcaggaaatcaccagaactcgcagctgccggtatgcgctcgccgggtacagggatggcgataagcagacccgtaacaacagtcactcagatagcccccataccaccattaggcccaagaatactacgaataaaaacaacgcagagaaaatggcactgtgtctggtgcggccaccagtattacggaactaa

SEQ ID NO: 290588 - DNA, 798 bp, Morganella morganii
atgccgataactgagtaccatgcaaaatattttgctcacgaactgagtaaacgaggttcacccacttctatagaaaaactggcgggaacgttgatggatgcaagggtcgatctcaaccctcatcaagtagaggcagcgctatttgcttttaaatcaccgttgtccaatggtgcgattttggctgatgaggtaggtctagggaagaccattgaggtaggtcttgttctgtcgcaaaagtgggcagaaggcaagaagcgcatgttaatagtcgtacccgctagcttgcgcaagcaatggagccaagaactggcagagaagttctttcttccatcacaaattttggaagcaaaatcattcaatgcagccatcaaagctggcaacttaaacccgttcgaagcaaacgaaattctaatttgttcttacccttttgcagccagacatgcaggaaagctcatattggtgcgcagggacttggtagttctcgatgaagcccaccgcctgcgcaatgtctacaagacgcagaataagactgcgcgggccttgcgcacggcattgaccaatgtacccaaagtattattgacagctaccccgttacaaaacagcctgatggagctttatggtcttgttagctttatcgatgaatatgcttttggtgatgaaaaatccttccgcagccaatattctcggatgacgtctccggaacaattcggtgagctgaaaggtcgattatcgaacagaagctgcaaacgaacaaaactgaacaacatgtgttcatgtataagatggagcttgatctaa

SEQ ID NO: 290589 - DNA, 2040 bp, Morganella morganii
atgacacataagcctgaagtgatgagtggagaaagtctagatattgccgctcagcgtcgtgatgaactaaaacaactcttccccagtgtgtttaccgaaacgagagacgctgacggcaatgtcgtgtcatccattgactttgaacgccttaaggccgaattagggaccttctctgatatctacgagggaagacgcgagcgttatggtatggaatggccgggaaagcgcgactgcatgaaagtgattcaggagccaagccgagcaaccttaaagccctgcccggacgagtctgtggattgggataccaccaagaacctgtttatcgaaggtgacaaccttgaagtactaaagctattgcaaaagagctattacggcaaggtgaaaatgatctatatcgacccaccatacaataccgggaatgaatttatctaccctgataattatcaggaaaccttagatacctatttagcttatgctggcctgctagatgatgaagggaaaaagtttacaactaatactacttctgaaggacgcttccactcaaagtggatgaacatgatttacccgcgtttatttttagcaagaaacttactgcaagacgatggtgtgatatgtatttctattaacgacagggaactatataaccttaagcaacttactgatcaaatatttggtgaagaaaactttatatccacattagtttgggaaaaaggcagaaaaaatgatgccaaaagagtttccgttgggcatgaatatatggttttgtatgctaaaaatttagcatttattgaagaaataactcaaccatggcgtgagcccaaagaaggtattcaagagataattaacgtatacaataaagcaaaaagcatttacttcgaacaatttgaaaaaataagtgaagagttgatctctttttataaatccttggattcagaccatccatcgaagaaatatgcacgaagcaggtttgtagatcagcgtggaatttggcgagataataatatttcttggccgggcggtggtggtccaaaatatgatttactccacccaatcacaggacagccgtgtaaagtacctgatgatgggtggaggtttgtagaatcaaccatgaagcaaaaaattcatgaaggttatattcacttcagagatgaccattcacagcctccaatactaaaatcatatttatatatcgatcctgagtcagctacttcggatgaggatgctggcggtaaaaagcaagttatgggtagtgttttctaccgacattctcagccgtctaacgacgtaattaaggatctcttcggcgaaaaagtatttgaaaacccgaaagatcacgaaatactcgcaaggctttttgactactgtactagtaatgatgacattatattagatttctttgcaggttctggctcttctgctcatgccgtattcgaacttaacaggaaaaatagatcaaatcgaaaatttattgcagttcaacttccagaaccaacacctgatccttcattagctcgtgcacaggggttatttacaatctctgatttatcaaaagctaggattcgcaaagcatctgagaaaataaaaaatgaaggtaatgaatcaaaaggaatcgacttaggtttcaaagtttttaaattggcaccatctacattcatgcaatggattcctagtaatgtttcaaatgagtctgaattgcaacaagctttagagctgtatgttgataattccaaagatagtagtattgaagatacgttatttgaattactgctgaaagctgggtttcaattagatacagtaattaaagtaataaacataagcggtaagacagtcttttcgattgcaaataatgcattgcttatttgtctggaagatcagcttacagatgaactcatcgaagaaataatagccctagagccaatgcaatttatctgtttggataaaggtttccaaggtaatgaccagctaaaagccaatgctgctcaggcgtttaaagcccgctcgcaaaacagcgatgccgaaatggttttcaaagttgtttaa

SEQ ID NO: 290590 - DNA, 684 bp, Morganella morganii
atgggggtgttctttctttttgagcttcataccctcaacgatgaaaggctgtttgctctcattaaacatgataatgaggatgtggtgcgctacgtgctggatgcagagggaaacgagtttcaggtcccctggctcgaacgtttccgcgaaagtttcgtcaagaaagcggaggccatgcagaaaattgccctagtccacctgacggcagatgctcaaagtgggcaggtggtcgtacgagagcgcagcaaacgaaccaatatctccgtttattttgagcgttttctgcaggtacagcgagtcaacagtacagccgacctcagcgaaaaactggttgtcgcgctcaaggatgtctttaaacagcaccgcgacctgcagccggacgacatcaaacgcagcggtgttaacaagatttatgaaacgttacatcacggtgcgcaaaattttaacaccgatgagcccctttccctactaaaccagatttttaggccaatggaagaagatcatctgctggtcaaatcctttacccgcaaaataaaggacctaggtatttcaggtgaatctttccagatagtcccagagaacatccctaagccacggaaaagaaaactggaaactctggaggatgttaacgtcggccatcgtgctcattttggccatgatattgctcacagcaacagtaggtga

SEQ ID NO: 290591 - DNA, 144 bp, Morganella morganii
atgagctttttaacggacgaagaaattaatgcactgataataaaacgaatgattttccatgtcgttggcggggagctggagatccccgtgctgctcagcgaaatatcaccgcctgaacacgtcgatttttctagagcgtattaa

SEQ ID NO: 290592 - DNA, 258 bp, Morganella morganii
atgtcatccgcaaagaaaaacgttgtgattggtgttctcggcacggtgctcgaccggcgcggcaagaaagccaaccgctggcataaatggcggccgagtatcgggctgtgtcagcagccggatctgcatattgaccgctttgagctggtttatcagccgggtgatatgcagaccgcaggccgggtaaaagaggatatagagcaggcctccccgcagactgaagtgatgctgcgcgaagtggatattgccgacccgtag

SEQ ID NO: 290593 - DNA, 1005 bp, Morganella morganii
atgctgcggatggcaaaaataatagtgtatgttttatttatcgctgttgtcttgcctggttatgcagtgataactaattcagatgaagaaaatatagtactgattaataaagcgaatgctttgatataccttcagtttggtattatttatgatgaaggtctgggtgtttctgaaaattatcaggctgctcgtcactggtttgaaaaatctgcagagcagaataatgcagatgctttattttatcttggcgaattttatatggatggtaccggggtcttacaagatgtgaagaaagggaaacaattgtatcaaaaagcagcgaaactggggtcttcacatgcaatgaataacctgggattactggcaaaacaggcaggtagaacggaagaagctatttctctttatcaacaggctatttcagccggttcggatgtatctctcttgaatctggggcggctttaccaggaaattggcgaatatactaaatcagaagaaatactgactatagcattgggtaaaaatagagcaatcagagcagaggcgctaaataaactaggaacgctttataccagaattaatttcaaaggctatgatataaaaaaagcagaaggatattatttagaatcggttaaattaggaagtgatgtgtcactaaataatcttggtatgctgtattttcataatgatgaatataacaaagcttttgattatattaaaatggcagcagataaaaacttaccggatgctattaataatcttggtgcattatatcagcacggatatggtgtaaaacaggattatgcaaaagcaattttattgtatgcaaagtcagcaagaatgggtagccccggcgcttattttaacttaggtgggatgtatgagcatggggaaggtgtaacacaagacgatacaaaagcactggaatattatgaacaggcattagccgcagggcattatccggcacagaaaaaaattgatttgctgaaagcgaaacagaaaaaatag

SEQ ID NO: 290594 - DNA, 1068 bp, Morganella morganii
atgttagcatatcaattcaggagacggttaagtttagttattttctcagttttcctggctgtcacaggccatagttatgcaaatggaattattacatcagatactgtcagttctgaaattaaaaaatcaaatgtagaaaaaaatatttctgcagcattaagtgctaatgcacagatccagtttcagatgggcctgttgtatgaagaaggtattggttttccgcaaaattatatgtttgcccgttactggtttgaaaaatcagcagagcaaaataatgcagatgcgttattttatctgggttcttactatatgcatggttcaggtattgaaaaaaacaatgagaaaggtttgttactatataaaaaagcatctgaattaggttcttctcgtgcaacaaataatttggctcttcaggaagaaaaagaggggcgaattgaagaggctattcttctctataaaaaggcaattgattcaggttcaaatgccgcaatattgaacttaggtgagatttataaagatattggcgagtatgataaagcagaaagaattctcacccaggggttacataaagaaaatgttattaaatcagaagcattaaggaagttggggtatttatattctgatgttaattttcccgggaatgacagaagaaaatctaaaacatattacttagagtcagtatcactcggtgataaatgggcgttaaatgaccttggaatgctttattttcatgataaaaattataaagaggcattcaattatataaaaatggcagcggatgaaaatattccgggagggattaataatcttggtgcattatatcagcatggatatggtgtaaaacaagattatgcaaaagcaatttcattgtatgaaaagtcagcgaaaatgggcagctcaggcggttattttaacttaggcagcctgtatgagcatggggatggcgtaaaacaagactataataaagctattgagtattacgaaaaagcattagccgcagggcattatccttcacaggaacggattaattatctgaaaaataaacagaaaaataagatggagaaataa

SEQ ID NO: 290595 - DNA, 1011 bp, Morganella morganii
atggcttattgtaacgattttgaccctatggatcagttttattgtcgtgatggtgaaattgcggatatttcagaggaagcaaaagagcggatttattttatcagacggataatgcgttttctgaagaaattactgtctgaaagaaaaacagaaacagcatgtaaaccgtataccggactgggtgaatcaatttattaccaatgtgcggacagtgaaccttctgttgaaacggcaatgagccgtattccggatgcactgataaaagatattgcggtgaccagctaccacggcgctgaacggacgataaatacactggctgatttcccttttccggttatcgatattccgatgagttttttgcgtcacaaacgcctgtccggcggatatcagatcctgaaagagaacactgaagcgatttaccttctccgttttctggctgatccctatgaaaatttcaaagaagcgattgagattatcgtgtcagcggttttagaggatataccggcatcaagaagaagaaagcttgacagttttttccagacagacattctggagttaaaaagagaaggtgttaaaaaacaattggagttaattaccaatgacttttttgacagcaaaacagctcactatacccctatcgtaataggtaattccgtattaaggcgatatatcgtcactgcaatatctgccggtgttattgccgctgttgcctataaatttcctgctcttttcagtaagaaagagctgatcatcaaacgggcggtggttattgcaacgcttctgtacagttacgggactatcgaaaaaatggctcgagcggcacaacggctgaaagagagaaactacgcggtttatcaggcattagatcgtgcacagctatcattgatctactattttctggaagaagaactgaaaacgtttgtggtactggctgcgaagccggaaggttcgtctgcggatgatgcttttgttcaggaggttcgcagccttatcgtacgttatcgtcagtaa

SEQ ID NO: 290596 - DNA, 1344 bp, Morganella morganii
atgtatcaaatacaaattagaatttggttcaacttcatatcaaaaaataagcatcatatgttagggataatgtctaattcatatgatttttttctttcaatgagtgaaattacttttgctttagacccaaaatatgaattcgataaagatataggatgtgtgttgtcgttaataaaaaacaccaaagagcttaaatttagaattaaccaatacattaataaatataaaaacaaatctccaaatctgaaccgattaaacacttttattaacacccttgaggaaaatgaaaatttttatctattaccagtgataaaaaatgttaatcagaccaaattaattaaattacaaacatctctttcattagtccatcttgataaattaagtaaagatgcatatattgaaagttttaattctaattttagtgactttatagatcaatattctatgaatgggattgatccgaaggaattaaaaggaaagaaaaagattggcgaaggattcaaagctgacagagtatgtcgattttgtaataataaaaacgagaagcccacaacattttcaaaagaagctcatgcaatttcagagtctcttggcaataaaaaaataattctcaatgaagagtgtgatctttgcaatgaatatttcgaccagaacattgaaagagatatagatacatacttaaaattatactcatcattttttagagtgaaaaacaaagacaacaaggtttctaaaataaaagggaaaaacttttcctttgaatatattaatagagctattgatgggcttgaccgccatgttgatttcgttttggcacatacaccaaccaatccagaaaattgtaattctgattcagaaccacctaaaaatttagatttatgtttccatcaaaaaattcgcaaacaaaatatttataaatcactcgtgaagttttctttaagtgtcattcatgacaggaaagacttaagtgaattcaataaaactatagaatggataaaatcacctactaaattttatgaaaaacttcctaaaatagccatattaaaaaattaccaattttattgcacagaaccagccttaattgtttatatttctaaaaacaaaaaacaaggtcttccttatgccgtaggggaatttcattatacatttctaacttatatcttcataatacctttatttaaaagcgatgaagttgaatttagtcaacaaaaaagttttgatgacttcattaagttcttcccacaattcaaaagaatggacgagtggagttttgaagactttagtgattacgaagaaaaagagtttgtactaaatatgatattatctcagcgaaatgaggattaa

SEQ ID NO: 290597 - DNA, 381 bp, Morganella morganii
atgacggttgcgctcaatatctgcactgtactgacggcatttctgggtgtgtatctgagtttctctgagtccgtcaaagggctggtgatgaatattcttacccgctttatgaaagaggacaaaattaatcagacactgctgaatatcctgatcccggttgtgattattctggcattaaccgtctgggtatcatcgggcttctccctgattgtatttgtgcagctcggcagtccgctgtacggcattgtgatgtgtctgattccggttctgctggtattcaatgttaagaaactgcacaaattcaaaagctttcaggtgtatttcattctgttgttcggtattttgctggtggtctcaccgttcttaaaatatatcgaataa

SEQ ID NO: 290598 - DNA, 411 bp, Morganella morganii
atggatctgaatgatatccgccgtcccggggattcatcgttgttacaagtgccgatgagcgtacagttccgtcattccccgctgatgaatggcctgaaacagttttatgataagttacgcggcaaaaaacgctcgccgtccgtgaactggctgaggccgaaaggcgggaacctggcacagatgcagcaggtggtggatgcctgtctggcgcagggaaactctcacattgaatttatgctgcattcatccgaatttatgccgggcggcagcccgacattcagggatgaggcggcaattgatgcactgtatgatgatctggagcagctgtttgcgtatatcgcccagcgggcggaggggatgacactggcggaattttatcagcgcaaactcgcacagcgtcacgcatcataa

SEQ ID NO: 290599 - DNA, 744 bp, Morganella morganii
atgaaaatatccataatcactgcaacatataatagcgaaaaaacgataatagatacaattaaatcgcttgattctcaaacatatgataatattgaatatattatcattgatggagagtcaagggataacaccttagatctgataaaaaataactcaagacgagtctctaagataatttctgagcctgactctgggatttatgatgctctaaacaaaggtataatgtgttcaacaggtgatatcgtcggctttttacactcagatgatgtacttgcctatcctgatgctatttcggatttagttaataagctaagcctcgacaatacagatgcaatctatgcagatcttgactatatatcaaaagaagatgagaataaaaccgtcagacattggagatctggattttataaaaaagaaaatatgattcgtggttggatgcctcctcacccaaccttttttatgaaacgaaatttatacattgaatacggtctatttgatttgcagtttaaaatatccgctgattatgattccttgctaagatatatatacgtgaataatatttccttatcctatttatctaaagtaacaacaaaaatgcgtgttggtggtgaaagtaatcgctcaataaaaaatatcatgaagaaaacaaaagaagatattttagctcttaaaaaaaacaaattaccatggatgaaagcaattattttaaagaacctttctaagatccctcaatttattaaataa

SEQ ID NO: 290600 - DNA, 660 bp, Morganella morganii
atgcttttacctattattatggcaggaggctctggtagtcgcctatggccattatcacggacactatatcctaaacagtttttatctctgacgtcatcaaataccatgttacaagagacaatctatagactaaatgatatagaacatacagcaccacttctgatatgtaatgaagagcatcgatttattgttgcagagcaactcagaaatgcatcaatcaaaagcagtggaattattcttgaaccagtaggccgtaatacagctccagcacttactttagctgccttaacggcaataaatttagaacaagatccactccttcttattcttccggctgatcatgttattcaaaataatgagatttttatacgaaaaataaatgatgctattcagctggcaaaagaaaataaattagtaacctttggtataacccccaactatcctgaaactggttatggctatattaaagtaggaaaaaaaattgatgataatgcttatattgttgataaattttttgaaaagccatcatctcaggtagctcaagattatattgatacaaaagaatattattggaatagtggaatgtttctatttaaggcatcaatttatctgtctgaaatagaaaaatattcacctgatattctggctacctgcaaataa

SEQ ID NO: 290601 - DNA, 1437 bp, Morganella morganii
atggaagctccaaaattatttatctcttatagttggtcaagtcaggctcacgagcaatgggttataaatttagcgacagaattaacggaatctggggttcatgtcattttagataagtgggatcttaaagaaggaaatgactcagttgctttcatggaaaggatggttacagatccaaaaataaccaaggttgccatcatttgtgatgagatttatgcctcaaaagcggatggacgcaatggaggtgttggtactgaaacacaaattatttcgcgtgaggtatatgaaaatcaagatcaaggtaaatttgtagcagtaatcgcagaaaaagacacacaaggaaaggcgtatctaccaacgtattataaatcaagaatatatatagatctaagtgaaccagataaatttactgaaaactttgaacagttattacgatggatatatgataagcctcttcatgaaagacctgcattgggaaatcgcccgtcatttttagatgaatcgaatagaatttctctcggaacaactgctgtatataaaagagcactgtccgctattagagaaaataaagtgtttgtgtcaggtgttttagatgaatatttttctttattctcaaataacatggaaagattcagaattacaaggaatgatactgagtttgatgatttattaatggataatatagaatcatttattccttatagaaatgaaatgatatcactgattataaatttagttcagtattctccaagtagtgaaaatataattaaattacacagattttttgaatctctgataccttacatggatattcctgaaaatgttagaagttggagagagactgattttgataattttaaatttatcattcatgagctttttttatatacaattgccattttggttaaatatgaaaggtttattgaggttaatacactattgactgagcaatattatattgttaaaagcagaagaagtggtgcatctaaaatggttgattattctgtgtttagagagtatttgaaatcactagatgatagaaatcaaagacttggtttaagacgattgtgccttcactctgatctgcttgaaaatagaagcaaaaactcaggattggattttagatatttaatgcaagcggatttcattttgtttttacggcgagatatacatagtgatgatttttatagtaggtggtatccatatacattattatatttagggaatttccctggagtattcgaagtttttgcaagggcatcatcaaagtcattttttgaaaagatgaaaataatgttagggataaataagaaatcagatctagatacactgatggaaaattataaaaataattctataactgtacccagatgggagtttaatagctttaatccagcaacattagtaggattcgaacaattatatacaaaagaataa

SEQ ID NO: 290602 - DNA, 633 bp, Morganella morganii
atgacacagtacggactaaaagcggtggataataatggcaattcgttattcatggcaacgaatgagtcatatgtatttctaaaatcggtaaagataaatggtagcggagtaattgtaacaggaataagtacatcggaatcaccgcctatggttttctccagagtcagttcatttgactacaatgacagccaaaacataatcatcaccaacggtgacggagaatataaaatacaatgtaatatgccgcaaagtataacatcagagcactttatatttgtaacatcatcaaagcataatcaaatacacccaagaaagtggggagttaaaatatttgatgatcaaggtcgtttgtcccacgcatcaagcatgaccccgttatcaattaatcgcgcagtgggatattccaacaactcaaatataaatgttggaattccgtgtgcatgcctggtccgcattcaaggcttttttgttgttcagaatccacaaaataatggcttcatgacttatcgctcaatggcattgggagtaggaaatacaatcaggtcagggaatcagatgataggtgctggtgcaagcccgcagggtggaatagaccctgttgtgcattacatagatacacgaaactataaataa

SEQ ID NO: 290603 - DNA, 255 bp, Morganella morganii
atgcaatggggattagctgtgtttgatgatttgaataaaaacatcgcaacaatgcaaagctcttttattgtcggaatgataacaacaaaaacaaacggctcgcagacatacccggtaccagcaggaatgcacctctcagctcaggcatatagcacaggtgcatacgtcggcataggaattagtgaaaacaccattacgtggacaatacctaccggaacggagagggatataacaatactggtggtgatatcatga

SEQ ID NO: 290604 - DNA, 258 bp, Morganella morganii
atgaaattaaagtgcattattttatctttgtcagtgctcgttaccgcatgtactactactgatttaaaaaaaacagaatgtattggtgtttataaaacaaaaacattcccatatcagcatgtgaaaattttgatgcataaagcaaaagaaaagaataatggggaggtattgtacaaggtaaaaccaaagctgggattcagagtcagcggccttatttcagataatgaactggagagcgtgcaatgcaatggggattag

SEQ ID NO: 290605 - DNA, 279 bp, Morganella morganii
atggaggtttgtctccatgcacaaccggttatttacggcactggcggcaaagcgccgggagatgaaacagagctgcggggtgatggcatgagcaaactgattaaaaagacacagaaactaaagccgtgcccgttttgcggcggtgatgcttcgtatctgtataagcagtcatcaacaacgtggtatgtgttttgcggagaatgcgaatcaagcggggcggaaagctactccgaaactgaagcaatcgccgcctggaaccggaggggggatgatatttga

SEQ ID NO: 290606 - DNA, 324 bp, Morganella morganii
atgacaattgaaaatgaaaaaagcagccaggtagtcgttgacccagctgatatgacaggcattgagttatatggccacctgtcaaagcagttttacccattcgttcatttctgccagatggccggctttgttaactttgatgttgaaaaacttgcgaactcggtaggcaaggcacttgatgcggctactcttgctttagatactgccaaccagtacccagagtccaaccttcaaagggatctatctcaaaataatcagaagctactggctctaagagagtttttaagtaactttgagccgcttccggaagtggaatctcgctga

SEQ ID NO: 290607 - DNA, 441 bp, Morganella morganii
atgtctaaatattcaaatttatggcaagtgcttggagaaaaattatgcaagcaccatggtttaggtcattctcgttttattgaaggctatgaaactgagtccactattcgtaaaaaagcacatttcttgtttatccttgaagttgcgttatttgaataccaaaaaaacgaaattagtatctggtttaaacaatctccgaaagatacactgcatgcattcatttattcaaaaacaggtatacttcctgatcaatttgattcattaagcgataaagcgaagttaacagttttactgaagctactcagcgagattccacttccggaagcggctcaaagttacttaaaaactctcttagagccagtagcttctgattattttgagatagatccctttgaaggttggactctgggtactggttggcagtatctaaagcaagagtag

SEQ ID NO: 290608 - DNA, 228 bp, Morganella morganii
atgtctgaacaagaaaagacaagaattaatattaatgttgtcgtgacattaggtgagcaacacaccattaatatcgatgtgcaaagggaatttcatatcaaagaagatcaacctctcacaaaatacttcttagaaagagttggtgaatatatctccggaagtgaagcaactgctgacgcaataaaaaaagccgcacaagataccctgataaaaagagacgcgcactaa

SEQ ID NO: 290609 - DNA, 480 bp, Morganella morganii
atgaaaaagatgattgaacgcattaaattagcatccgatctccgagaagtattggaaaagacccatactaaacttgatagtatggggtttcctttcttttttgattttcctgtaaattgttgccaaggaagttctatcctccttggattagaagcatcacaaaattttccctcatccaaaattgaagttgtattaggaagtactagaaaacggaacatacaccattattgggttgaaatagatagcaaaatatatgacctaacaattgaccaattttcatcttggatagataaaaaatatcaatgccccaccagccctgtgtatgcatctgaaaaacatccactgagaaattactttttctataaagaacgctatacacctattgaagcatacgtaatattttgtagtaagcatgctaacttaagagatgttattaaagtacaaagattagtaacaaaggaattagtacatttggggtga

SEQ ID NO: 290610 - DNA, 1206 bp, Morganella morganii
atgagtgtcggaattattgaatttcaggctgaacgattagcccaagtactggcagctcgtcgattgtctcaaactcagctagctacgatggttggtgtctctccagctacaattagtaaatggaaatcaggacaacaagcaccagagagagatgcgctagaacgcttggctactgttgtaaatgttactcctgaatggtttacccgccctgttagcaatactctctcgaaacccttgttcagaagtaatgcttcggcattagctactgcacgggccatgttagaaaaacgtatggaatgggctaatgatttaatatgcacgctagaggaatacgttgacttccccgagcttaacattcctgaaagaaactttactaacatagaccaaatttcagattcagatatagaagaagctgctattgaatgtcgtaagatttggaatcttggttcaaaaatgatccctgatcttgccttagctgccgaaagtaacggaatcattttaattagagaagaaacaggggtagctcaaatagaagggttatctgcttggaataagaatactaatcgtccaattattttacttgcagcggataaaggtaatgcctttagaagccgtttcgatctagctcatgaaattggtcatctaatacttcataaaaataccaaggatgaattaaagccagaaagatataaattaaaggaaagccaggcgcataaatttgctggggcgttactcttacccgctgaaagctttgctaatgaaataagattaccaccgactcttgatagcttattactaattaagcagcgttttattatttctgttgcagcaacaataatgcgtggaaacgcattaggttttataagtgatgaagaaaagcaaaatttatataagagattatctagccgttggggcgttaaggcagaaccaggggatgatatcagaatccctgaacagccaagactattaaagagaacattagaactacttgtttcagctggtattgttacattgtctggattatcagattttattggattatctaatactgatattgaaatgcttacctatctcccagaggggtatttatctggtgaaaaagccgatgttgtccatctggcgagactaaagaatgacacgtcaacacctagagatattatagtaaagcacgataccgacaatgtagttaatctttttagcaaataa

SEQ ID NO: 290611 - DNA, 654 bp, Morganella morganii
atgacgaatgctaaagatgaaataattgagttgctagttaataatttaccaaaacaactagtcatcggtattagggatggtatttacgttgcctctactcgtgcctatgagaaatccaaagacaatcatgaaggtcatcgaccttacgcacttggcttacaaaggcatatagagttgaatgaggtacttcatgaaatatttgaagctaatggttgctctccattgaaattatgcagtaataaaattgttgaagcacaaagtggtatacttacaatcgctaaagaaacctatagtgggtcaaagtggcaaaaagcattcaatagtgtacgaaaacaaaaattaattgcagaaaataagcatattgagactaaagttcagccagatttattttcctcctcctctgtaattcctaaagcaacggtatttgtcgtatgtcaatactcaggctcattaactcaaagtcctgatgcaccgattaaaattgagttagtcgtgcctagtgcaagcgcaaatggtaagagctggattttccatgaggaaatcaacactttcttagcccattatgaacctaaagtacatcaaattgataaagctatgtctaaactgaaaaaaggaattatcaagaaagatggttccgaggacagtgtgaaatga

SEQ ID NO: 290612 - DNA, 357 bp, Morganella morganii
atgaaaaactggttactgataatgctcctgtctgtgttgagctgtgcaaaggataccgctgcgttggaagcaaattatgatgaaggtctggtcaattttgtagggaaagtcgttgatatttcttgtgatatttcagttaacgatcaaggtagtgatgcgaatatttatctagctcccatttcattatttgaaattcataatagtgaaggcggggcttatatgaagtctaaaatgtttaccattaaactatcacagtgccaatcgattagtcataatggtgaagtcgttgatgctgatttaaataaaattagtgtagcctggtcaaatggttacttggtacctaaaactaatttttaa

SEQ ID NO: 290613 - DNA, 555 bp, Morganella morganii
atgcgtatcgggatgagtgtggcagcagcattactgggcgtggtatcaacctctgccctggcactggaatatccgctcggacaacctgttatcaaaaacggtatggagattcagggtgtgtatctgcagccgattaccatggcagtggaaggcaaacatgaaatgcatcacctcgcggcggataagtcagacatccacctggaagctgatatccacgccgttgaggaaaacccgaacggcttcgcggaaggggactggatcccgtatctgaaagtggattacaaagtcaccaaactggatgatccgaaaaaagcccagtccggtacctttatggcgatggttgccagcgatggtccgcactacggtgaaaacctgaagctggatggctacggtaaataccgcgtcgaataccgcatctctccgccgagtatgaatgacaatgtggctttcggtcgccatatcgataaagaaacctgtgttgccccgtggtttgaaccgtttgatgtctcctgggacttcgagtatgtcggtaccggccgcaaaggcagttactga

SEQ ID NO: 290614 - DNA, 387 bp, Morganella morganii
atgccttttctcgatgtcagtgacattttgtcagatccggattttgcggatccctccctgatgtgccgccggaataaacaagctactgatgatgacggattcagcacaaatacccatgaagatatcgggttctccggggtcgtgacagtagaccgttcactggaagccagacgcatggaggcagggcaaacaatcggcggggccatccttattgtgacacgcttccggctcactcagggaactgaggggcacgacgcggatgtggttacctatcaggggcggaaataccgggtcacgtttgttgatccgtacacggcctatggtgccggatttgttcaggctcactgtgagctggtgaattttaacggaggacaacccgttgagtaa

SEQ ID NO: 290615 - DNA, 276 bp, Morganella morganii
atgttaggcgcagataagaaagggcatccggtatggcttgatattccccctctgccgaaagagcaattaatcaaacaggccgaagcacagaaacaatacctgatagccgaagtccacaccgaaacagaaatgctgcggacgaagctggcactcgggcgcatcaaagaagatgaaaaggcgctgttaaacgcctggctggattatctggatgagctggaggcagtggatgtatccaccgccccggatattatctggctagtgaagccggaggtgtag

SEQ ID NO: 290616 - DNA, 708 bp, Morganella morganii
atggcatacatatcatttttagcatggattataatactaattttttctctttatatttgtgttcgttctggcggtttatctcgtgttatcgcgatattctcaacactgtcaatagctggcatttactcatcatccataataggcgatcaagttccacaccaaagattttatcttaacatcacgccgatggtagttattctattgtgtatatcagcaagcaaggtgaaaaacaaactaacaatcatcccactattggttatgctaataatgtccattatcacgtatactaatcatgacattacaataaaaacaaaaaacaacccagttaatgattacatgatgtttctttataagaacaatttaacatatggctacggtagtttttggggaatgtccatgggagttaactggttttctgatggaaggatccacataactccagtttattttaacaacaaaactggtgaagtaaactttaaagatgtcagggtgcaaaccatgaaatactggcataccgctaagtttattgaaaacaaaccactaagacaatttatcgctataagtaaaggagattccggggatacatgttcggatgtcagtttatgcgtaaatgcagtaaaatctcaaataggaaatcctgacgaaattcttgactatggcgatataacaatattgattttcaaccatccaataccaacaggactttaa

SEQ ID NO: 290617 - DNA, 795 bp, Morganella morganii
atgctttcagaacatgatctaaatattgagatacaaaatggaagagtatttgatccagagtctgtagcaaaaaatgcttataaagttcagtcttcgagcattgatctttcggtaaagaaaattcatataccggactgtaaaaatagtaataaaactagaaagagtcacttgcttcaacctggtgaaacagtaattttagagttaaatgaaaattttgaacttactaatgagttaggtgggattgtctttccaagaaataccctttctaagaatggagtagtaatgactaatccaggacatattgatccaggctataaaggaataatatctgtttatttagtcaatatgtctaaagaacctttccccattagtgagaattctgctgttgcaaaactacttcttttcaagacaagtacattaactaatgggtaccaaggaaaagcagtaacaacattagatgaagaacaattggatagaatgggaaaagactttgctgggttagattctagaataccttcagaaataacaaagatattgaggaagtggacattcgggttactcacaattgctgccattatgatttcaatgatcagtattgctatccctattttatttcagatagtatcaaataattttgataaaacaaaagatttacaattaattatttctcaacaagaagaagaaataaataaattaaaaatcgtaactacaatgtttaataatcaactttcccgacttcctgatgcaaatgatacaattcaacaaaaccagaacctgcaggggaataaacagtga

SEQ ID NO: 290618 - DNA, 615 bp, Morganella morganii
atgtcgtttggcgaaaataagcaatcaccaagagataccagccaatatatattaaatttaatatcccaggggcatgaaagtgtattagaacaccttaactggacatttttgataactggagtttcaagagcatttactcatcagctagttagacatagggtaggattttcatatagtcaactatcacagcaatatcatgatgagtcagaagctgaatttgttgtccccattgaagtaaaaaatgactctgctttatttaagtcatggtgtgagcatattgaaaacagtttggaattttataaacaatcgcttaaatctataaaggaaagcgagctatatgatagtaaaaaagagaagacacgtgctctcagaagtgcatctcgctcgattttaccaaatgcgacagagacaaaaataattattacagctaatgctcgagcactacggcatttctttgaaatgcgaggtgcaatagaaggcgattatgaaatgaggagagtatctgaaaaattatatagtattgttagtaatgatgctccatcacttttccaagattttgaaatagtttcacgagaaaccgatcatgttaaaatcatgaagaaaaataagctatga

SEQ ID NO: 290619 - DNA, 327 bp, Morganella morganii
atgatccagttaatatcattttcagaaatgaacagtacatatgcatacaggattcaactaactaatgccagcaatggcatagattgggcgcttttttttgttgagaatggtatatcagtcccgctccaaaatatgagcacctcatcattacaacaggcattcaacgatgcatttaatgccctttccattttggccagcacaagcaacataaaaattatccctgataaagtccaatacatggtatctaacggtatgctggacagtagagacatagcgtcaattttatcgggagttggctttacaccgaaaacaataagctgttactaa

SEQ ID NO: 290620 - DNA, 1011 bp, Morganella morganii
atgctcgttgtcttgttccatttcagaactgaaataaacaaaacattcccgggaattggtgatgctttgttcataaatggttctatgggtgtagatattttctttttgatcagtggattcatagttttttacgttgccaatgatgcaaactcaggtattaattcatccattgagttcttgattaagcgcctgtgcagaataatccccccttattatctgataacgctatgcgttgccggcagctccatcgattcatggtatgaaacaatccgatccatgttgtttattcctcttggtggcgatagccaaggaccagtctatggctatgcgcgattaaatgttggatggactttaaactatgagtttctgttttacattcttagtacaatagccattctgtttaaaagatttaaatggatagtccttggtgctcttatattatcattaactttactgcctgctttattctttggttggaataattttgatccccgcataggttataattttagcaacgtctacttacgattaatgacaaacccattaataacagaattttttgtgggaataattataggctggctttacactaaagatttaagattaaacaatcatttgttttggtttctattactaacctcatcaattttattcttcttctatatattttttacaggtgcattgtggggaaatagcccgaaagcctttatggtgccatcagcttttgttttattcaccattactcaatacgaaaaacggtttaaaataaactggtggcaatggcctcttaaccttggtgcaatttcattctcaatttatttaatacatgtgcaaatgttgtcatttattaaaaaaattgcaggcaaagtggatttaatatttccagatgcaattattgctttgatagctgtcatagcaaccttgttttttgcaaaaatctcttacaattatatagaaactaaactatcaatgatgataagaaactggttcttaaaaaaagctcaacattaa

SEQ ID NO: 290621 - DNA, 1263 bp, Morganella morganii
atgaaggggcagagttttgataaatattcattatcaagggtaataaaaaaaagtgatttctataaatatgatcagcttagtgataatgcatacttagaaaaagaaatttcggatgcttatgatgttgcccataaattattatctccggaaattagtgaaacagtttctaatggtaaggctgtttattatgtaaacgatttaccttggaagttagtgttgaggcggttgcattcaaatgtttgtaataacattgaaattgagaaatgtcatcgaacggaaattgttcgaaatcttatttcctatgtgcaggaaggtgttaaaaataaaatatttttaatagatattaaatctttttatgaatcaattgacatagatgtgcttttaaaaaaaatagatcatgatcattcactttcctgtcattcaaaaaaccttgttagacttcttttaaatgagcatatacaaaatgggaatagtggattaccaagaggtattgaattaagttcaattttatcagatatctacatgcaagaattcgacataataataagagaaatgaatgaagtctttttatataagaggtttgtggacgatatattaattataacagattataaaatagatgaagttagtatgttaaataaagttaaagatagttttcctgccggattgattactaatgatgctaagactcaagtaattaatataaacaaaagaactcattctccacaagatataaatggctttattgcagccaagtttgattatctgggatataaaattacggtcattgacacgcatattcccccgaattcagatgggtcatcatcagctggtaaggcaaactctatataccgaaaaataaaaattgatataagtgataagaaaataaaaaaaataaagagcagaatttgtaaatcattctataactttactaaaaatggcgattttaatattctatttgatagaataacttttttatctaccaacagatcattaataaataaagataaaaacaggaaaataccaacaggcattttttataactacgctctagttaacaataatgattcgttaaaatgtgtagataattacctaagaggacttctacttggttctggaggtagactatcaaaggttctgactttaacaaaagagcaaaaaaaaatcttattaggaataagttttgaaaaaagcttttatgcaaaaacacataaaaaatatagcctaaaccgaatgagaactataacaaggatctggcagtga

SEQ ID NO: 290622 - DNA, 207 bp, Morganella morganii
atggaatgcttcttcaggagcctgaaaaatgagtgggtaccggtgaccggctacatcagcttcagtgacgctgctcatgcaataacggattatatcgtcgggtattacagcgaactcaggccgaatgaatataacggtggattaccaccaaacgaatcggaaaaccgataccgggaaaactctaaaaccgtggccagttctagttga

SEQ ID NO: 290623 - DNA, 426 bp, Morganella morganii
atgaataacacaactgaatccactattgcaatgacactcgtccccgatgagcaacgccttgatttttggctcaatcacttcggaagcgtgaaaggctggaccacctttgaagtggtgatttttactaccatgggccagttttgtgaggactactacggcgggtattgggaatattgcactttatccaatggtagcgcctttatttatcccgatttaaatcaagaggagcttacgctattcaacccacataacggcaatgaagccatcgtgagcccagaagcggcagggattgtagtgtgtctgatcctgtacagcatttggtcattccaaacagaaagcgaagtgatgtgcgaccgcttttatcagttgcgtgactacgcgttacaacattctgaatctgctgtcattttccacttaattgattaa

SEQ ID NO: 290624 - DNA, 273 bp, Morganella morganii
atgactgtcattggccaggccggagtcggtatagcgccatgcactgccgctgacttccgcttcaccgattctgacaccatcacggtaaaccaccagaatttcattgtccgccagaactttatcgatctgaccgcgcagttccggtgttgtatcattagtcacaccattattgccgacaatccctgttcccggcgcaacatcatcatagataccatccagcgtcaccgtgtgatcaggcgcggtggtatcaatatgaatggtatagccttttga

SEQ ID NO: 290625 - DNA, 765 bp, Morganella morganii
atgaatgaaatagaagttgatttagatttaggcttaaatcctttttgctttgatactgaactaaagattgaaacaagaaagagaaacctgactgtttcaagaggaacagaactcattgaaaggaaggataccagtaaaacttatttttccaatatcgtacatacacaagaggtcgataaagaagagttcattaagctctacacctcccagataaaagcgtactttgacttaacaaaaacagcgtacaaagtgtttttcatatttctacgtatctatcaggatgcgataggaaaagatcacttttacctgagttgtaaaaaggcgatgtcgcttgcggaaaagatagatcactttgctttgtctgagtctatcttttaccgggggataaaagaacttatagaaaaacgtattatttctaaaactaatgaaaaaaactggtatttcataaacccagctattgtcttcaatggtgatcgtgctcgttttgtttcagagattataaaaaagaaagaaataatggaagaacaacccgaaagcgttgtcagcactgaccgaagaaataaaaatattaaagaagaagatagaacaattgagtcagtcatagaagacgtaaatagccaagaagatatagatttgttaatcgcaagattacaggctaaaaagcaccaaggagcgatgatgagtaaaagcatgggaggatgtatcgctgtcgaggcagcaactcttttaccaccagaagaaccgttagattgggataatatttaa

SEQ ID NO: 290626 - DNA, 681 bp, Morganella morganii
atgaataatattaaaatcattacgctctttaacgccaatgaaaacataccatttatgacctgcatagttaaagatgttgaagagaatgaacacgggataaaacttactctcgaaaacggaaataatatttatttcaaagattgcgactattacttcttatcagaatctgcaaatgattgtgatagggaacgaatggtaaatgtttatgggagattaatatctgaactcagccaagtcagcgaagaaacaataagatcactgatgtcagaaacccaaacctacaacagtcagcatcccaacacgcctgttagtgttctggatgattactattactgtggcagggtgaaagtcaatgcaccagatgaagccgcattgatgaatgcgcttggcctgctagatctgcgtaaggccatagccgaagataactccttatccgaagtggaagcccttggcggtatcgtacttcacgctgacatgggctatccagtagctgaatacaaaggtacagacatcagaatagctatagaaccgataaaccttacacatatgagagatctgaccaatggctatgtggtaatgttcaggaatggtgagtatgagcaggagatgaaaggagacctccatgaggcgttatctcttgctgttgataggcttaaaatcacgcttgcgatacatgagtga

SEQ ID NO: 290627 - DNA, 189 bp, Morganella morganii
atgaggcgttatctcttgctgttgataggcttaaaatcacgcttgcgatacatgagtgatcgtaactatctgtttttgatgttttttaaatcactcttgttggtaatttgtttttactactacttgcccagcattgagtttttcatagcgaagtatcatggtaaaattctgtcatctatttataaatag

SEQ ID NO: 290628 - DNA, 801 bp, Morganella morganii
ttggacattcagattactcctgtcttgattacgttagtttatgaggctcttttgagatcattttggcgaaaacctgcgttgaaaaaatttttgttatcttgccatatctcagaaagttttatatcaacatggcgtgaggatgaatcaaagcggaattttttagaccgcttattcccaaaattgcaaagtaatcctaaagggaatagtgttatttttacaatggcaattaatttgtctgagcaaatatcatttcctgatttaagggggtgggaggactctcagcaaatgatattatcggcaaataaatcagttcaagagttaagagtatatatctcaaaacagaaagagaaagctcaaaatgagagagaaaaaaaagaatatagagaccggtcgaaaaaagaaagggaagaagtaaaacgttctgatgcatttgaagaatggttttttaggcttgctgatttctgtgagataattagcagaaaaccatacaaaactaatggtaggcaggtggatggtgcgttaactattgagggaaccacatatatagttgagttgaagttccaaaaatcacagtctgatgctatagatattgacactttgaaagcaaaagttaacaaaatggcagacaatactatggcaataatgatatcgatttctggatattcatcagttgctataaaagaatcatctggtagtcgcaccccacttatattgctagattatagccatttgtatttgttcttatctggtggtatgaaatttgacgatataatttcacgagtaagaagacattcatcataa

SEQ ID NO: 290629 - DNA, 330 bp, Morganella morganii
atgtcctcaatgaaacgcaaaattgcccgtctggaaaaagccaaaccgaccatggacaccggcgaactgttaaagcagatcggggaacgtgacgcactggcgcacaagctgacgccgtttatcggggtatttgatcacgcaccaatgacgaaacagcaggtggcggaatacggcgtggaaaaactcggtatccgctgcgataagggcacggaaagtattgccctgaacgcctggatgcaggggcgcacaccggattcacaaaaagcgcatgcgacgatggataccgccgcaggcacggactcaattatgaaaaagtggggtgaaaaataa

SEQ ID NO: 290630 - DNA, 1068 bp, Morganella morganii
atgccagtcagtaaagaaaaattttatatgtccggccgcgatatccgcaaacacgggcaactgaatattaagcccgatcagaagtggacatacagcgaactggatcagattggtttcggtggtctggccgcaatggactccgcgttaaccggcccggctatgtccggcgggttcattcagcgtgagatgttacaacacgtactgccggggcttatccgtaccgccacccgcgtccgtgtactggacgaaatcaccggcgtactgaatgccggtaactggcacgatgaagaaattatcctgaatgtggcaaccccggccggtaaggcggagttgtacggcgatcacaccaatatcccgctggcatcctacgggcaggatcaggaacgtcgcggtattgtccgttttgagctgggttttcaggtcggaaagctggaggaagcccgtcagtcagcagcagggtttgagactgccgcagagaaacgtaatgccgttgccgaagcgctggagcaggggcgggaacgtatcggttattacggtttcaacagcccggacacccgtgtcttcgggatgctgaatgaaccgggtttaccggcgtatgagacgactgccgcaaaatggaaaggcggcacatttgctgccatcaccggcgatattacggccatgttttcgcgtctggagatgcagtccggcggtattatcaaagatgatacggctatcactctgaccctgccgctgggctaccgctctgcgctgaatgtggcaaacccggttgcccgtggtgaaacggtgtatcagtgggtgaaagagaactacccgaatctgcgctttgtgttctcaccggaatttgccggtgctaacggcggggcggatgtggcatatatgtttgccgaaaccgtggatgatggctcaacggccaccagtgcggttcttctccaggtggtgccggtgaaataccagctgctgggttcagagagcaaagtcaaaggctacctggaagatgccaccaacgcgaccgccggtatcatcgtcacccgtccgtgggccatcacccgcctgaccgggatttga

SEQ ID NO: 290631 - DNA, 510 bp, Morganella morganii
atgaaaaataatcataataatattgagatcaatgatgctactttagtacagaatagtgccatgggggctttttttatatggtatttttgtttccagtaccaaagatataaacaagaatcaccgtccataatcttagcctttttggttctcccacttattctgcataaatccacagtaaaaataatttgtacaacaaacaaatcatcaggaattcatttattagcagggaaattggggaagcaaagagaaatattactatcgattcataccagagcctttcaacttcgttcccttactttagagtctatagggatagctgaactttctggattattaaaaattgagatagaaacaactagcctaatcgcacaaaacaaaaagaacaaactttctttacctttactatctgatgatttaaataagcttaaaacctgttgtgataaattagcatattggttttctgaagaatcagaacaacaaataatgagaacattaatggtggatttctaa

SEQ ID NO: 290632 - DNA, 1179 bp, Morganella morganii
atgcatgaaggaaaaacatcccaatcaaaatcaagtgccgcaggccaatatttagggtttgctctccagccagttcggttatgctactacttactgagtgctcctgatgatgcacgtgtttcactcgaatactacgatgatgtagcagtacactatgcaaacaatgacgtactactagagcaaacgaaaagcgccttagcgcataaccctttaaccgattggtcggaagatttttggaaaacagtatctaactggctcgatatactcatagagcatgatatttgccacaatggagcgaccttccgctactacgtaactcctttcaaacaaattggtacaatatgtacattatttaatgaagctaaaaaccaaattgacacagcagcgctaattgtcaaattaaaagaaagcctggagaaattgaagtcacctcccagatgtatgagttatatcaatcgttttctcaatgctactcagcaagaacaagaagcgatagcaacaaaaatgactattatcaataaagcagagcctataggcttaatccgtgagctcttaaaaccagcaattcctgataatctaattgaattaactatccaattcgccatcggaatggcaaaagaaaaagcagataacctgattcgaagcaaacgaaatgctatgatctctgttagagaattcagaaatgaatttttaacatttgtacaaaaaaataatattcctggttatcttccaagattaaactcacacattagtaaatcagatgctgaggaagttcttcagcaaaggcccgtatttataaaacagctacagttagttgattctcgtgaaagtcaacaactacatgcaatcagtgaccttctaaggacaaactctaatcttacaatttgggctgagcatgggttaatatttgagcaaaatatttatgattggcatgattcattaataagacattatgatgcaacatgtgatgaagtagatgtatgtttcagtgatacccctagcattgataaaggtaaaattatatacagccgttgttccacaaaaaatatatcccttgaccattacattatacctgattacttcacgaatggagggttcaatattttagctgatgaacttaaattaggctggcatccagattacattgagctcattgggaaaataaataatgaaaaataa

SEQ ID NO: 290633 - DNA, 588 bp, Morganella morganii
atgtctagttatacctacaatgaggactatcttcgtaagatagatagcactatccgtaaatcactcctcaccaataatcgtgtcacagctattcgcgtcgatttacgcttcccatcatcgacaacttattaccatgaggactcaacagtcataactcgcttcattgaatccctgaaagccaaaatagatgctgatctaaaacgcaaaaataaagtatgggatcgtaattattcatgccccttatcttatgtttgggtcagagagtttggtgagatcagttgtcggaaacattatcacttgttgctactagtcaataaggacgtctattggagtttaggtgattacactagaacggaaggaacgctttatgcattagtacaacaagcatggtgtagtgcaattggtgttaactaccctacggagcgttatttagttcatatcccagacaatgcagttacttggctagataacaataatgccaacaatgaaagtacgatattcgaattaaaccaacgctgtcgttacttagccaaagaacatacaaaatattatggtgatggtgagcgttctttcggatgcagccgttaa

SEQ ID NO: 290634 - DNA, 132 bp, Morganella morganii
atgaatgatgtctcagcaaccggccttgcactggtggtacaggccagcaaaacattcccttccgggatttttatcacacagtttgcggacgatgcggatccgctggatttaccggcagtggatatcgcgtag

SEQ ID NO: 290635 - DNA, 639 bp, Morganella morganii
atggcctgcgccattttggccgcatcctcctcgctgatcgttttctctggcggcatgtcatattcaatctgcccctgttcattcactgtgcggttaacggtctgctcaacctcaatatcatccccggcaccgaaccagcttttaaaagccgcccagccttctttaatcttatccagccctttgttgatccagccaaggtatgcttctatctgtttccacagccatttaaaaataccaaccacggtatctgaaactgcactgaacacttttccgaagtctttaccccaggccattacccccttaatactgcctgtcagccagccgataaagtcattcagcgctttattcatggtgttgtacgcatccaccacaatatccgccacaactttcacgaccgctttaataaaatcaaacaggactttaaaagcctcccacaaggcaaggatgaccgttttcagcgcggggtatttatccaggatccggccaatcatcgaatcgttgccgtcgatgaaattcatgatgtcgtcatacaccaacgcaaacgctgccgccagcagggctatgaccgcaataatggcaataatcggccatgttgccgccagtgtggccgccgcagccgcgagcatcggcggaacgtaa

SEQ ID NO: 290636 - DNA, 1050 bp, Morganella morganii
atgcctagtctcgtgggctcggagatgtgtataagagacagacattatggtgatcttaccgactcatccaatttaataagattggtaaaagaaattcaacctgatgaagtatataatctgggagcaatgtcacacgttgccgtatcattcgaatctcctgaatatgccgcagacgtcgatgcgttaggaactattcgtttgttagaagcgatacgaattaatggattagaaaataaaactcgcttttatcaagcctcaacatctgagttgtatggggaagttcaggaaattccacagacagaaaaaacaccatttcatccgcgctccccatacgcggttgcaaaaatgtatgcgtattggattactgtgaattatagggaatcttatggcatgtatgcatgtaatggtattttattcaaccacgaatcaccacgacgtggagaaacatttgttacccgaaaaataacccggggattagcaaatattgctcttggcttagaatcatgcttattccttggaaacctgagtgcactgcgtgactggggacatgcaaaagactatgtccgtatgcagtggatgatgttacaacaagagcaggctgatgattttgttattgcaacgggaaaacaaatttcggtacgtgactttgtattaatgtcagcaaaagaagcaggtatttcattagagtttacaggaaacgatttaaatgaaattgctacagtaatctcggtagataaaagtaaagcgcctaatgttaatgttggcgatattattgtaagggtcagtccaaaatatttccgcccagccgaagttgagacattattaggtaatcctgaaaaagcaagaataaagttgggttgggttccagagatcacagtaaatgaactatgtacagagatggtccgatgtgacctggaaaaagcaaaacaactatctttacttcaagagcatgggtttaatatctcaatctctgtagaggattcctcatctttctcgaaagaagttgatgatttattaatccgtactcacgaattaaaaggagataaataa

SEQ ID NO: 290637 - DNA, 459 bp, Morganella morganii
gtgacaaaactggcacaactgaaagccgtgtatgacgagttggcaaagaagcagcttaaggttggtttttttgcgcattcaaaatacccggacggcacacctgtcgcgtatgtggcggcgattcaggaactcggttatccggccggggggatcccgccgcgtccgtttatgcgcccggccatgacagaacacaaaccggaatacagcaacctgattgtccgggctgtgaaagccgcagtgaaaggcaatatcgccatcactgacggactgacgcaagtcggcgcaaaagcagcaggtgatgtgaagatggtaattaaatctgtcaccacaccgccgcttaaggataccacggtagccgcccgtgcccgtcggcacagcaaagggaaagccatcagtaagccgctggttgactccggtctgatgctgcaatccgtcacttttgccgtggaggataaataa

SEQ ID NO: 290638 - DNA, 531 bp, Morganella morganii
atgattacggaagtgaagatatttgatacggaatccttcactacgctgtttgagtcagtaaatcccgttcagctgaacgtccgggatgagcataaggcgacgcagtttcaggtggaatccggtgaaacccgcagtgaccatgttgtgattaacccagtggaaatcggtatggatctgatactcaccggcgaactgaaagatgcttttgaagccatgcagcaggcttacgatcagcatcagcttgtcggtattcagaccagggtaaaaacctatcagccgatgctgatagtcaatttttaccacgatgaaatcccggatatggcggacgcggtgaaactctccctgcgctttaccgaatggcggacggttgagccggaatacggtgaactgccaccgcgtaaagtcgcgaagaaagagcagagcagcacggtaaaccgggggaaagtccagacaaaagaggcggacactgccacgaagaaaaaagggtctgttgcaacccgtatcgcagatggtgactggagtctttcatga

SEQ ID NO: 290639 - DNA, 693 bp, Morganella morganii
ttgagatattatcaggaaaacaaagtcgcaagctactttgaattcaaagagtctttgtggccaagagttattacaaaacggtcaccacaacgagaacgattctttatacatcttgcggaagaaagagctaattccggaagatttttcgtcattccagacgctagctactcaaatgaagcagtagaaaaatcgttggtttccgatgaaataattagctatgagtccgctcgtggatattttattacccatgatatttatgaagaatgggcgctcgataaattcgtcgaaagcaaatttttatcctcagaaagtgcagaaatattttttgatagaatacaacaatctttgcccataagaagagttttcaggcggtggctatcagaaaagcttagcgcagccaatgaagaagttagccatcttattgtagaaaccctgtcatctcataaaatatctaatttgtggaaagatgaagttctcgtttccatgcttctatctgactattccgattacttttttaacgttaataaagattcactattggaagatgatttgcggcttcttcgacgaatatgcttgttgataagaatagggtgcaaggaaatagacaatagctttttttataggtttggcgtgatcgcgccagatattttatcagttgaacatgtaataaccctgtctcttatacacatctga

SEQ ID NO: 290640 - DNA, 855 bp, Morganella morganii
atgccccggaaaatacgggtacgaaccaaacgggcacggtgggcggcatcccgtcaggcggttatgaagggcaaaccgctgcaatattcggcagcagcccaaagccgttaccagcgtgacatgtcacaactgattaaaggcatgattgcagattacgaaaagacgttcagcagtctgcatgaggattttgacggcgcgaccatggatgccagctttgccagccagaccaaaatctggctgaaccggctgaaacgcaagtgggataaaatttttaacagtaaggccgcagatatggcggataagttcacctcacaggtggacatgaacgcacagcgcagtctggacgattcactgaaacaactctccggcggtattacgataaaaaccccggccatgcccgaagccctgaaagacaaaatgattgccgcaacggcagaaaacatatccctgatcaaatccatcccgcagcagtttcattcccgtatcgagggcgcagcgttgcgttcggtcagtcagaccggcagcggcagtaaaaccctgctggatgaaatacgggatatcggcggggtgacagagaaacgggcggcattcattgccgttgaccagacccgaaaaattaccacggcggcgaactatgagcggatgaagtctgccgggatccgtaaagcgatatggcatcactcggcaggcagtgcggaaccgcgtgaattacatctgcgtctggacggggaagtgtttgacctggataacccgccggtcattgatgaaaagaccggtgagcgcggattacccgggcagttaccgaactgcaaatgcttctggacaccggttatcgactttggtgaggagacatga

SEQ ID NO: 290641 - DNA, 693 bp, Morganella morganii
atgaacaaaccaaacagtgatcaggcgaatgacggcagtctcgccgggcagtttatggctgcgttccgtaatctgctgatgaatattgatgacatgcttcccgccaccgttgtgagttacgacgatgcgacaaaccgggcggtaattaaaccgctggtgatgatggttaccacggaagggaagaaaatcggacgtggtgcgctgccgaatatcccggtattccggtttggcggcggcggattctttatccggatgccggtaaaaccgggggatttcggctggctgaaagcgaacgaccgggatatcagcctgatttttcagcgcggcggcctggaggatgaaccgaatacggccaggctgcatacattcagtgatgccatgtttttccctgacacgctcaaaggctgggtgatcgacggcaaaaacgcggacgcactggtggtgcagtcaacagacggttctgtgtgcttatccctgcatgccgataaagcggtgctggatacaccgttgtttgaggttaatgcgccggaaaccatttacaccgggaatgtgacgattaacggtaaccacgcggtcaacggcaacagtgattcaaacggcggcactatgaggcataacggcaaagatatcggttcaacgcacaaacacagcggtatccggcggggtaatgaggattcaggagagccggtatga

SEQ ID NO: 290642 - DNA, 315 bp, Morganella morganii
gtgatccatcaccagctgtgtgccgaccggcataatcaggccgatagcctcaatcaccacggaaaacgcaaagattttcagcagcgcttttttcagcccgtgaatattgccgatcagcttacgcagactgagttttttcaccacctcctgcctggtgaaggtgctgccgggccaggcttccagcgccacgccggtaaaattgcgcgacatctcctcaataccgaccacacggcggccatacgccgggtcatgcaggataaatttgttaccgctgatttttaccagcaccagaaagtgattgaaatcccagtgtaa

SEQ ID NO: 290643 - DNA, 441 bp, Morganella morganii
atgcagcctggccgtattcggttcatcctccaggccgccgcgctgaaaaatcaggctgatatcccggtcgttcgctttcagccagccgaaatcccccggctttaccggcatccggataaagaacccgccgccgccaaaccggaataccgggatattcggcagcgcaccacgtccgattttcttcccttccgtggtgaccatcatcaccaggggtttaattaccgcccggtttgtcgcatcgtcgtaactcacgacaacagcaggcaacatgtcatcaatattcatcagcagattacggaacgcagccataaactgcccggcgagactgccgtcattcgcctgatcactgtttggtttgttcattgttttgcccgtgtcaggcccgtttgcaggttgcctgataaaagaaaggatcgtcgtgagacgcaatatcgaatttga

SEQ ID NO: 290644 - DNA, 342 bp, Morganella morganii
atgtattttctagagggcgatgaaattataatcccagagaaatctcccaagaaaaacacaaatgcatcttatgttaaaacagttcttgatcgtttatcaggattatcaaacttagcttttgaagcttcaactactgataattttcgtagccgcccagcatttcgtgatttaatggcttttttattccagcctcagaatattatagctaatcctgatgttttatttttcaaggcagatacaacagaacaccgggaaaagttaaaaacaatatttccttatatattaggtgctatcagtcctttggttctactcgaaagttacaccgtaaagaaactgaattaa

SEQ ID NO: 290645 - DNA, 207 bp, Morganella morganii
atgaaaaaattgtttatcgcggcactgatgatcctgccccttaccgcttgcacgacttatggcaataaatccctgaaagacgaatcccaacaaaccgtaaaaaccaaaatcgttaaagggaaaactacccagcaagatattattaacgcatttggggaaccacaaacgcgagctaccaatgacggcattccgtatataaatatttaa

SEQ ID NO: 290646 - DNA, 201 bp, Morganella morganii
atggtgacaaataatgttgatataagtatggatataatggctctatttattattttttgctttaatattaccctcctgaaacagatgatatttacaagactcagtaatactgcaataaagtactggccggcgtcaggcatcgcacctcctctggagaaaaagacactcatccggatgatatgggtttatcagaatacatga

SEQ ID NO: 290647 - DNA, 381 bp, Morganella morganii
atgaatataacaacagagaaagaattagctcaggcattaaaaaacaatgaagattcaattacgattgaaggtgatctcgcccgaaaaaccgtaagaataaaagcgacaggtagtattgcatggataatagctattggtgccattggtgttgcagttgcggcagtattagcaactgccggtacaggtggtgtggccactcccatatctggtgcggtgggctttagtgcagcgggcgcggctgtgggggttctcggaacctcagctacttatagcgccatagctatagcagtcgcagctggaggaatcggagttttaaataaattacggcgctataaaatagtcgataaatcaaacgatattgttgttttacggcgtaaataa

SEQ ID NO: 290648 - DNA, 210 bp, Morganella morganii
gtgccaattattatcggacttattgttgccgttttagttctgtttgcagttggacctatgattcttaaagctcttggtcatttgattggtaatgttattggattggtcattattttagctgtgatagctttaggagttgctattcctccactaggtgcagtgatgctttccggggtgattatttatgcctttctgggtaaaaaaagttag

SEQ ID NO: 290649 - DNA, 207 bp, Morganella morganii
atggatgctttacagtttaatgtctctgctcgagctgcgattttaattggaagggaaaacatcgctaactctgagggcgcaataatagaattggtcaaaaatagttatgatgctgattccgatttttctattatccttatagataacaagtttacaacactccccgaaataatcttattggatgattataattcaataaaaatatag

SEQ ID NO: 290650 - DNA, 723 bp, Morganella morganii
atgaatgccaaattgaacaagttcatgcaagtggcgtttaataactccagcgccaatgaagccgcgcaggcattaaaaatgctggccggtgcgatgcaagagcagggcgtaaacccagccagcctactgcaaataaagagcgactccgccagcagcgagttgctagcagagttacgtcgtgagctttccattctcaaaatagattacaacggtatggtagaccgctataactcggttgtacgcgctcataaggctcgcggcgagaagattgcagccctagagctgttattatccgaaaatagtattgcagcggcgcggagagacgcagagccacagcaggaagaatctgctgtatcgaacgggtctattgctgatcaaatccgcaaaatgaaaagtggcactgcggatctggttcaccacccgaaagcaaaggccactcgacgcctgtctgatgatttggctgcacagaatgagcagtttaaagggcactggaactaccaagagcccacccagagcagcaagtatggcgatgcacattatagctataactacggtgataccctgcatatgtggatcagtaaatcggaaaccagcgatgggttttcagtaagtctcgctacgtttggcccgcgtggaggcagaaaggacagtaattataaatcttttagcgacgaggcttcattgatggactggttactcaaagcatggggggtgttgaagtga

SEQ ID NO: 290651 - DNA, 522 bp, Morganella morganii
atgaaaaataaactaaaaagtgcttatcgcaaatcattctcacacacaccatactctatttgcgacatagatatgttgtcagatgaatcatatagaaataagaagtacaactttcactttatatcatccgcgtcgttatcattaatatcatctactttttttataggattactaggtgcagatattaaatcaatcagttcactggcaaatatagagatactaattgcaatgctatcctttgccatatcactttcagtaaattcattttcattattcatgttactcatatcatctaataatgagattgataaaattgaaacacttataacattgcaatataaattttttgctaaaatcaaagtaatgtcatttatatcaccagttattggtatgatgtttcttatctcatacttcaatgaatatatagcaatagctgcatttatcatttttatgcttttgttttattacaatggaaaagcaacaaaaagagcaaaaagaaaagcaattaaaatattgaaataa

SEQ ID NO: 290652 - DNA, 471 bp, Morganella morganii
atgccgggaccaccgaaaaccccgtcacacttgcgtttggtcaggggtaacccatcaaaacgcccgatcaataaaaaagaaccaaaaccgccgtcaggggtacccccaacaccgaaacattttaccaggcaggggaaatactggtttaagcggataggtgaagaactcaatgtgatgggcgtgatgagttcgatggatgccaaagcgctggagctgctgatcgaggcatacaccgaataccggcaacactgcgatacgctggacgaagaaggttacacctacacaacacagagtgatggcggtccactgataaaagcgcaccccgtggcggcaatgaaagctgatgcatggaaacggatccgcgcgatgctctccgagttcggtatgaccccggcagcccgccagaaggtaacgattaacacaccagccgaagaagaccctttcgaggcatttctgaaacaaagaaaatga

SEQ ID NO: 290653 - DNA, 468 bp, Morganella morganii
atgaatgataacgtgtcgggaaaaatttatagcgacactaaatcgctagtaaaaaagacaataaagataatagcaatacttacggtcattttaattgctacgtttgcgatattttttgcttacaatgagtacaagataaataaaaaagaaaatttaatactagaaaaagccataccatttacacaacagtccaagccacttgaatttattagaagtgattttggttcgtcatcgtctctgtatctgtggtttatcccagacactgaccgtcacgtggtcattcgtattggtgaaaagtattccgtattttcctcggggagagtgtcaaatagttctttaacattacatcgacgggcaggagatgcgtgcgattattattcaagtatcgctttggatgaaaaaggcaatatcatctctgtcgcatgtgataacacagagtattatgatggcccatggcgttatcactaa

SEQ ID NO: 290654 - DNA, 1107 bp, Morganella morganii
atgtttgatgtaagtaaacaggaacaactacccatgcctaagtcaatttgtttttttaatcataaggggggcgtcagcaaaacaaccacagcttttaacattggctggggtttagctagcgcagggaagaaagtaatgctggttgacttggattctcagtgcaacctaaccggcatggttttagggtacacaactgttagtgaaagtttggatggcttttatagcagtagatacaatttaacgatggagtccattgttgatacattaatgaatggctcctctgtcgaggatcttgtaaacaatgattcagcaaagctatttgaatgccagaatgaaaacttatatctacttcctgggcatcttagtgtttcgatgcttgactcacaaatcagtgttgcgctcaaaatcgcttcaggtgttccattaacgcgaaatttaccgggcaaccttccaaaagcgataaatctaatcgctgaaaagaataaaattgactatatagtatatgatttaagcccaagcgttggtggtttaaatgaagttgcattaatgtcaagcgactattttatagtcccggcaacgcctgatttcttctgctggcaagccataaattcactatctgaaacaattaccgcatggcatgcagaattagaatttttcaagaaaacatcacgctctaactcagcagctaatatcacaaacaaaccaaaattcatcggggccatacaccagagatacagacctcgcaacggtatgccggtaaaatcatttgagcactgggttaatcagatccatagtgccgtgaacactgttttagcaccttctctccatagtattggctgctcagcaacagaagaggaaatccagcattccctggatgcaacagacacatcacacctgaaagcctacgaccttgcacagatatcagactttaattccttaatagcaataagccaaaaactttcaaaaccagtttttgctatcaccaatgaggatttgaggagtgatggaaaagctggcaacgtatttgataccatgagtaaaaatagagacctatttctacagcaatttgagcgactttgtgaccgagttttaatgttaacagaataa

SEQ ID NO: 290655 - DNA, 600 bp, Morganella morganii; identical to SEQ ID NO: 91854

SEQ ID NO: 290656 - DNA, 1269 bp, Morganella morganii
atggcgacggacaccccacggattccagaacaaggcgtggccactctgcctgatgaggcttgggagcgtgcgcgccgtcgtgcggagatcatcagtccgttggcgcagtcggagacggtcgggcacgaagcggccgatatggcggctcaggcgctgggcttgtctcggcgccaggtatacgttctgatccggcgtgcccggcaaggcagcggcctcgtgacggatctggtgcccggccagtccggtggaggtaaaggtaaggggcgcttgccggaaccggtcgagcgcgtcatccacgagctactgcaaaagcggttcctgaccaagcagaagcgcagcctagcggcctttcaccgcgaagtcactcaggtgtgcaaggctcaaaaactgcgagtgccggcgcgcaataccgtggccttacggatcgctagccttgacccgcgcaaggtcatccgccggcgggaaggccaggatgccgctcgtgacctacaaggtgtgggcggcgagcctcctgccgtgaccgcgccgctggagcaggtgcagatagaccatacggtcatcgacctgatcgtggtcgatgaccgcgaccggcaacctattggccgcccgtacctgaccctcgccatcgacgtgttcacccgctgcgtgctcggcatggtcgtcacgctggaagcgccgtctgccgtttcggttggcctgtgcctcgtgcatgtcgcctgcgacaagcgcccttggctggaaggactgaacgtggaaatggattggcagatgagcggcaagcccttgctgctctacctagacaacgcggccgagttcaagagcgaggccctgcgccggggttgcgagcagcatggcatccggctggactatcgcccgctgggacagccgcactatggcggcatcgtggaacggatcatcggcacggcgatgcagatgattcacgacgaactgccgggaacgaccttctccaaccctgaccagcgcggcgactacgattccgaaaacaaggccgccctgacgctgcgcgagctagagcgctggctcacattggcggtcgacacctaccacggttcggtgcacaacggcctgctccaaccgccggccgcgcgctgggccgaggccgtggcgcgtgtcggcgtaccggccgtcgtcacacgcgctacttcgttcctggtcgattttctgccgatcctccggcgcacgctgacccgcaccggctttgtcatcgaccacatccactactacgccgatgggcactgttgcaaatag

SEQ ID NO: 290657 - DNA, 294 bp, Morganella morganii
gtggaaaataaatgtgtagttattgagattggtgctggtgacaaagtattttcaaccattgattataaagataaacaatgtgttggattatcaatatccgaacgaaaagataacaatcgtgatatcggaaataaattcacctacccagaaggcacgacaattagcgaccttgagccaatcattgttgttgtaacgcagaatatcaactctctgatagctttgcgtgaccaggttgatgatgtgattgcgttgttaaaatcaaaatgtgaggctgacaatgaacaaatatcgtga

SEQ ID NO: 290658 - DNA, 324 bp, Morganella morganii; identical to SEQ ID NO: 278079

SEQ ID NO: 290659 - DNA, 624 bp, Morganella morganii
atgctatcagaaaataaaaaaaataatgcagccgcaaataataatttctacaaaattataaattggaatatacatgttaagctctttaggctttactttaaaaatatctgtgagcaagctaaaaaagatggattttttgaagctctttatgtttcacaagatgataataatagacaaatacaattattctcaggacaacatccaataagaacacacacaaaaactcataatacccctggtcaaaaaataaacatagaacatggggctgctttagttctatcacaatcagatcttggtgatgtagcaattatactctatccttatacttctgagaatttaactcgtatccaaccaaatattatttggagtatatattcagatccaaccaagattacagattcagtccttaaagctgcaactcaagatttctttcgttatattcgagtatctagtgctattttttcagaaagtaaactagaccaatatcgtatacaatacttagagctaaagagtaaaaaatacacagaaaacaaaagcctagctaaattcatatattctgattggttatggaaattgcttggcggaattagctcaattataaccatatatgcaatatttaagtaa

SEQ ID NO: 290660 - DNA, 660 bp, Morganella morganii
atgaacattatttatgtagatgaagaagtagagcaacatcgtcaatttaaatcaaggttaaaagaccttataagaacaaaagaaatttctgtatgctgcatatttcctaaaaatagcattgaggaaactattgatgaaatattatcaaatttacctgacatattagtttgtgactggcaattaaatgctattaaagaagatgttaattatcctgtaccatatacaggtgcgaaattaattgaagaatttcttaaagttaagccaaagtttccggtatatcttaatactgcattagtttcagatggtattagtgatgattataccaaagatgtaaatattgtatttcccaagtcaatgagtatgacagaaccagaaggttatgacctatcaatcataaaaaaaatggagatacaaatcaataagtacaggaaccaaattaaggaatgggaagatgagcttatcgctcttataaataaaaaagacagtggtgaattaataacagctatggaagaggaaagaattatttatttggatgataaactcgagagttcatctaatatgaaaagtaaaacaccagtaatgttaaaggatgataaaaatatagaactattgatgagtttaataaaaaagaccgatgaaatattaagtaaggtaaaataa

SEQ ID NO: 290661 - DNA, 1071 bp, Morganella morganii
atggcacaggttatcaatactaacgttctgtctctggttactcagaacaacttaaaccgttcacagggcgtattaggcactgcaattgagcgtctgtcttcaggtgcccgcatcaacagcgcaaaagatgacgctgcaggccaggcaatcgccaaccgtttcaccgctaacgtaaaaggcctggcacaggcttcccgtaacgctaacgacggtatctctatcgcacagactgctgaaggtgctgttaacgaaatcaacgacaacatccagcgtatccgtgaactgaccgttcaggcgaaaaacggtactaactccaagagcgatatcggttctatccaggaagaagtgaacgagcgcctgtcagaaatcaaacgtatttctgaacaaactcagttcaacggtattaaagtgctggagcagggcactaaaatgaacttccaggttggtgcaaacgacggtgaagtcattgaactggatatgcagaaaattgatctggctaaactgggtctgaaagatttcgaactgccgacttatactgctctgaaatcagataataagcttgatgcaacagcagaaaaagcagaggctgctaaagtagatgcaacatttacgactgttgatctgaaaggccacgaactgtttgaaacagcaaccggtactatcgttgctaagaaaggtgcggattattttgaagtgaaaaccttcgaaaaagacggaactacagcgacacaaggtaacctggtcgttggtgataaactgactgatatcaagtccaaagcagatgctgacaaagtcaacgatgcaaccaccaaaaaactggacgaagcactgaaaactgttgactcataccgttcaaaactgggtgcattccagaaccgtatgcagtctaccatcaacaacctgaacaactctgttaacaacctgagcgcagcacgcagccgtatccaggacgctgacttcgcaacagaagtgtctaacatgagccgtggtcagatcctgcagcaggcgggtaccgctgttctggcacaggcaaaccaggttcctcagggtgttctgagcctgttacgttaa

SEQ ID NO: 290662 - DNA, 324 bp, Morganella morganii; identical to SEQ ID NO: 278079

SEQ ID NO: 290663 - DNA, 519 bp, Morganella morganii
atgaaaaaaaggtacttatacatatttatcatgatgttatctaccggatgctcaaattcatcatcaatgaatgattacattgaccacgaagatggatgggtgaaaatttatagcaccacggatatgcgtgcggcacaagataaagcggaagctctatgtggtaaaaaagcgtattatttggaaaaacaacatgttattcaggttggcttggaaaaaaagtctttgtatccgatacctgtatatattccttttcagtgtgaaatgtacgctgctgccagagcgggaaatacggaagcgcgagaacaggtaaagattgaaaacgaaaaaggattagagcggttgaaagaggctaaaatgcgccagtatgaggcacataaagcctatgctaaaaaatatgggagtgattcttatagtctggttaatcctgatggcagtattgaagcttatagctttgatacagatggtaatgtatgtggcggcacggcagatcagaacggttcacatacgtactgtgattaa

SEQ ID NO: 290664 - DNA, 939 bp, Morganella morganii
atgagtttactaatttttatcattatttctttatgtattggttgttgggtatggaaacaacgaaatcgttttatattaaattcagatagtttacataaacagtggctatttagattagccattgccttccctttagtttccagcatttactttatagtatggttaggtgcgccatatccatttagatttgattcttatggatacaatgcgttcttggagataaataaattcccattgggaatattagctttatctccaatactaggtgtttttgttgtatattcacatcgttcattacaaactgaaaagcaaataaaaacagcggaaaagcagttagaagaagcgcaaaagaaaaataaagttgatatttatttctcacaaagaaaatatataatagaacaactagagaacattcagataccacattatggaaaaattgaaaatgcaaattacgtttatgatagatttagaaaatttgataattacaatgacaaaaaaaacacagaatcatttgattttgtaaattcacaactaaatgaattacacgaatcatttatttatataaaaaattacgttaacaactttagctataatgattacattcctactaagctaaacaccacattagcaaaaatacaaaagagtattacattaataatacgtaccagtggaattaaaaacaatgagttagaaataaagaatataataagcagcttcaatgatgaatgcaatatatatatagccaataaagtcaatcgccttaataattataactctgactttaaaacagaacttgattttttattacaggatattataattgagttatcagcactatattactccctccaaaaattatttacgataatattactagatgaagatatttcaaagtttatcccaaatctagagaaatttaattcatttcagttcccataa

SEQ ID NO: 290665 - DNA, 933 bp, Morganella morganii
atgattattagcgtcagcagaagaactgatattcctgcattttatacaccttggcttttaaatagattaaaagcaggatttgtgctaataaaaaatccattcaatagaaaagtatctcgagtctctttattaccggaagatgtcgatgcatttgttttttggactagaaatgcatctatgctaatgaaaaatctagatgcattgaaagattataattattattttcaatacactataacaggttatccaaaagcaatagaaaaaaatgtcaaaagcccatataaaacaatagaaaattttgttgaactaagcaatataattggcaaagaaaaaataatatggcgttatgaccctattttaatatctaataccttgactttaaatgaacacaaaagactattcactaaaattgcagacaacttagttggaaaaactaacaaagttgttattagctttgctgatttctataaaaagaccataaaaaacctcagcttaattgaaaatttcaagtatattgatattttgaatgaagaagcaatcatgaatgaattagtaaaattcatggtcaaaatagcaaatgatagaggaatgatgatagaaacctgtgctgaatctatcgatttaagctacttaggtgttcagcatggaaaatgtattgatgatagactattgaaaaaagtatttaacattaatttttcttctaaaaaagatattggccaacgagaagcatgtggttgtataaaaagtattgatataggtgaatataatacttgtttacataactgtacttattgttatgctacatacgatttagactccgtcaaaaataacaaactaaaacactcttctgatagtccctttcttataggggacgcaaaggatgtagatcctgaattattaattccagcaataaagcagggatcattattctaa

SEQ ID NO: 290666 - DNA, 876 bp, Morganella morganii
atgaaatataccgattttattataagtaaagaaattatagacataacaattaaaaaaaacgaagaatatcttaacaacaatcaggtacactggtgtaatcattcatcaacgcagccctcatcagcaaattataatgactctatataccaaagtatctatacaataagatattttcctgcatattatgcagaatattgcatgttatctcattgtttttatatgtatataacaagtcgtgaagttaaatcattaaactttatttctttaggttgtggtgctgcaacagattattatgcattaaaagacaacttgcatgatataacttttaattacaaagggttagactttaccagatggaatgattcattatttccagataaagggaataatttctctcatataaaaaaatcaatatcagaagttaattcatatgatataaatgatattgatgctattatttttccaaagtcaatatctaatctagatattgataacgctttaactaatcttgctaatctattaagttcaacctctaaaaaatcatattacgtacttacatctagagagaattatcgttatcctacgtcatatgagaaatttcataacaaaatgatagaaaatggtttttccatattaactatctttcaaccaaaagacgacattattaaaccacaaacacatatgacaacatggtattatacaggtgataatttttatgaagcttctaataactttaatgttaaagctatacaatgctcaattaaaacattcaaacccaaaaaacaatgtgaagattgcaaggttatttatcaccccataacaaaaattaataatgacatgatgggatttaatttttttatttatagaaaggattaa

SEQ ID NO: 290667 - DNA, 597 bp, Morganella morganii
atgagttacaaagaaaacaatgattttaatgataaaaacatgccgcgtggttttaaacgaaatgaaataacacgatttaaagatagacttagacaggccatgaatggcgaatcaggcaatagcctagctaaaagatgtggcatatccgaagctgcaataaggacgtacctctcaggaaagacatacccaccattagacaaattagcgatcctcgcagaaaaatgcgaagtcccgattgagtggctggcaaatggtgtgaatacgtctgagtctataggtatcaaagaacagcctaagcacgtaacggaagcccaagagaaagtttggctggagttccttcatcgaatgaccccagaagaaagggacaccatcattgatagcgttgtcaggagagggcttagtgcattactacagtctgctcacattgatagcagacaagaacaatcaattaatgatctgtcagctgaaggcatgctgattgctcggatgtatgcatcattaacacccgaaaataaaaagagttttttggaatctttcattgaagaagggaacaaccaagctgaccgcagtatgagcggtaaaaccaaagccagctaa

SEQ ID NO: 290668 - DNA, 177 bp, Morganella morganii
atgacagaactgcatttaaaacccgttcccgggctgactgtccgtgatcctgaaaccctgcagccactggctgataaaggggaacgcaagccccgcaacgcttactggctgcgccgtcttaaagacggtgatgtgactgaagttcaggcaccgccgaaaaaaggaacccaatcatga

SEQ ID NO: 290669 - DNA, 1020 bp, Morganella morganii
atgttcggactcgacaataaatccggcattaacgtaatgccgccaatcgcaccggctgacagtcagaccccgctgtggttcactgaaggtggtgccggactatccgcaacctatccgggacaggactggtttaatcagattcaggctgagctgcttaatgtcctgaaagctgctgatattgcacctcagaaaggcaacctcagtcagttgtcctcagcgatttctaaactggcaagtgcttatgcggtgctaatcgttcacacgacgggagactcactgaccagtgtgatgagtcagaaatcggtaacagaccttactgataagaagtttaatatctctgatatcgtatcagaaatcggttacagcaatgacaaagtcatggatcagcggattgtcacaaataaactgaatgaaaaaatagataagtcatccatagtccatgatctggggaacagggaggacgctgttgtcagtcagtacggggtgaaaaaagccattgctgcaataattcctgttggtatgttcagtcagtttccgcacagagccacacatctcccgtctggctggtactcaacaaacggtgacaggttcgctgttacatccgccccgggtattgtactgaaatcacttcccgctgaactgaaatcagactggggtattgttgaatcaggcgggatgattaatatcccgaatatcaggcaggctgacgggaggacacctttcctgcgtccgacaaacggaactgacagattacccggttctgtagttagtgactatatccgtgatatacagggaatttttgaatcagaagatccgtgggcactggcatggttcgggggcttaacagcgaatggtgtgttcactgttggcagtacctcccgccgccgggcatttactgaagataaaattcagcaatctccttcatcaataagttttattgcttccaaagtcgttcctaccgggccggaaaacaaaccactggatatcggcgtgaccctggctatgtatttaggagtataa

SEQ ID NO: 290670 - DNA, 543 bp, Morganella morganii
atgacagttattaattactattttaacgatgatcatccgttacgcccgtttaccggtgctgattatgcgaataaagattcctttgttccgcgcaacgccctgcgtatccctccggaagaaaagccgggattctggccttgtgagcaaaacggtgcatggggccttattccggatcaccgtggcacaaaagtttataacacagtaaccgcgcaagagtcagaaattaaagagctgggtgatatgcctgatgatgtcacgacaatgaaaccggatgttccgtttccgaagtggaacggcaaaaaatgggtgactgatggtaagataaaaaaagaaagcgatgtggcagacgcagaggccaaaaagcaacgtctgattgccgaagtcaacaccgaaacccagatgctgcaaacaaaactggcacttggacgaatcaaagaggatgaaaagacgcggttaatcgcctggctggattatctggatctgctggaatccgtggatacctcccttgcaccggatatcgactggccgcaaaagcccagttag

SEQ ID NO: 290671 - DNA, 1110 bp, Morganella morganii
atggcatcttatcatctttgcgtcaaaaccggcgggaaaggaaaagccgcttcccatgccgattatattgcgcgtgatggaaaatatgcccgtgaaaaagacaacgaccttgaacatacagaatcaggcaatatgcccgcatgggcagcgcataaaccgtccgagttctggaaagccgctgacacgtttgaacgcgccaacggctgtacctaccgcgaaattgaaattgccctgccgcgtgaactgacaccggcacagcgccttgaacttgttcgcgattttgttcaacaggaaattggcgaccggcacgcctatcaattcgcaattcataacccgaaagccgcgattgagggcggtgagcagccgcacgcgcatattatgttttctgaacggcttaatgacggtatcgagcgtgacccgcagcagtattttaaacgggcgaacagtaaagcccctgagcgcggcggcgcgaaaaaggtgcggtttggcgaaacaccgaccgaacgcaaggaataccttatcgcacagcgggaacgctgggctggcctacagaataagcatcttgaacggtatcagcatatcgaccgtgtggatgcgcgttccctgaaagctcagggactcgagcgtgagccggaacggcattttggcgcgggacaggtcaggcagtttgaacctgcgcagttacatgcagtgattgctcgcagagaagcggagcgacaggctcagcactgccgtgatgaatgcgacagcgtgattgatgtcactacgacattacgagaagccctcgcagagcgcgataacgtcactgaaacacctaaacgagatgtgacgcaagatgcggctcagggtagaaattttgattttgaaaaagcgcctgaaaaactgacggttttggtcaatgatgcactgagtgagatgcaagacgagattgaccttcaatccctgattaatgactcgatggctgagtttcagggcattcataaggacatggttaaacagcaggagcgtgagtattgggctgagcaacagcgtcagcaggaaaaagaacggcagcgactcgctgagcagaaacgacaaaagcccgataaaggctggtcattttctcgatag

SEQ ID NO: 290672 - DNA, 585 bp, Morganella morganii
atgaacgatgagattaaaaaaattgctgcgctgattggtcatcaacaagcgcaggaaaagcgcgttgcggcgttgattgatgaatttcaggcggaatcagccaaattgacctgccaaacagcgcaattggtgcaggtgattaatgaactggacagtgcctcaggtaagatgaccgacacggtcaggcaagcggtgaatgccgccttaactcaggttgaaaaagaactcaaacaaatcggattggaacagcagaaacccgccgtcaatgcgcttaatcaggtggttacagcggctaatgaatccatgagtgcaatgcgacgtgagatgtcccgttacacatggaaatctgcgatttatatcattctgacgatgcttgcggttatggggagctgcctctggggaatggtttactttatcgacagcggttatgaccggattaccgaaatgcagcgcatggaagcggtctggcagaagaaagccccgctggctgatatctccacgtgtgacgggaaaccctgtgtgaaagtggatacaagtcagtcatatggtgataaaaagaatacgtatatgattatcaaaaaatag

SEQ ID NO: 290673 - DNA, 1164 bp, Morganella morganii
atgatgaattctcttgatatttcaaattttaaaggttttaaaaagctaacaataccaaaattaggtaggttgaatcttattgtaggtaaaaataactcaggtaaaagctcgatactagaagcattgatgatttatgcctctggcggaagtgaatcgatcttaagagaaatatctattaaccatgatgaaaaatatagaaatagaagttcttataatgaatatggattcgatagcgttaatgatttagaactagatttagatagggacttggattttagtttaaatgaaatttatccgtatgagcatcttttctatggaagaaaatttaacaaaaattccataagtattggtgagattgaacaagatagtcagttaagtatatcctttaataaaaggaaaaaaaatagcaccagcaatcaaagagagttgttagacttactaagaaaatttgatttgaatttacatgaacaacaaattcaaagtgcaaatgtattagaggtaaaaaaaggcaaatttaaacacttaatatcacttgatgagccatttagactttctaatatgattgaatccgatgaaaagtctagaatgaaatttaattacgtaaaaactagctttgaatctatggataaattgggttttttgtgggataaaataacattaacagattacgaaaaaataaccattaaagccttgaagttaattgagcctgatattaccgatttaagatttataaataaagataatcgtaggagcagacgaactgctattatgagactcaatgatggtagcatttttccggtaaggagtatgggggatggtattgttagggttatggagttgattttgaatttatactcagcaagagatgggtattttttagttgatgaatttgataatggtttgcattttagtgttcagaaagcattgtgggaaattatatttgatctatcaaaaaaattaaatatacaagtgtttgcaacaactcatagttgggattgtattcaaagttttactgaggttgcaattgaaaataaagatattgatggggttctcttaaaaataggaaaaagtaagttatctaaaaataaaggacaatctatagtaactatctttgatgaaaataaacttaatgcagtaactcaaaaaatggttgaagtaagatga

SEQ ID NO: 290674 - DNA, 693 bp, Morganella morganii
atgaataaaaacataccaaacctaattattgttgaaggatataacgataaatctttttttgagagagtttgtaaacgatataaaataaatagcaatattactattggtactccagttgattacataccatctagtcaaggtggttttaattcaaaacaaggagttattaatagtttggatttgtttttacctatgctagaagatgaagattcaagtataaaaaaaatagccattattatagattctgatatagaaggtgaaaataatggaggttttaaaagtacaattgaacttataaaaaataaaacgcaggaatatgaatattcaggaaagcatgaatataaaaatggaggtatagaaatacctcactctgatcgtagaatgaatccactaaaaatatggattatgccaaataataaagatgatggcacagtggagaactggattaaaaataaaataatagattcagaaaaggatattttttcacatgcatgcaaggtagtagctgcgttgaaagataaaaaattcagtcaacatgctgttgttaaagcagaaatagctacatggttagcatggcaaaatcagcctggaagaacagttggatataccttaaaagaaggtaatgagttaatagatgttaataactcagaatttaaaggttttattaattggctgaaagattttgctaaatag

SEQ ID NO: 290675 - DNA, 432 bp, Morganella morganii
atgctcatgcttgaaaaaaactaccctttatacgcagaattgaatcgctggatcctaaagcctgtaagtaaagatttgaatacctacagcaacatgaagttagcaatagaaaagcgaggtcgtcctgctgataccctgatatttcaggttgaactggataagcaaattgaccttgtgactgagctggaaaaagatccatcatcaaaaaaagaagataaggcaatctgtttaacgcctgaaaatcgtctgcacgaggggttaaaaacaacattgcatgatgctttaactgcaaaaattcagctaactagttttgaagcaaaattcctgagcgatatgcaaagcaagtacgatcttaatggctcattttcgtggctcacagataaacaacgaaccacgctagagaaaattttggctaaatatgggcggatctga

SEQ ID NO: 290676 - DNA, 531 bp, Morganella morganii; identical to SEQ ID NO: 83405

SEQ ID NO: 290677 - DNA, 936 bp, Morganella morganii; identical to SEQ ID NO: 83406

SEQ ID NO: 290678 - DNA, 387 bp, Morganella morganii; identical to SEQ ID NO: 83407

SEQ ID NO: 290679 - DNA, 267 bp, Morganella morganii
atgccgttaaaaatagaatgccaaaaagttgatacatggaaaaagaaaattattcgtgacgatcttaaggggcatacttatttttgtcagcaaggtggtgctgtttttgttacagcctcaattgatcaccagtctatatgtgaatatgtgctaggaccaaaatggagatggcatgatactggtaaatccaaaagctataaacgatgggacgatgtgagatctatagacctagttgaacttttgttcgctcttgataattatcgctga

SEQ ID NO: 290680 - DNA, 744 bp, Morganella morganii
  misc_feature (677)..(686): n is a, c, g, or t
atgaatcatgcatatagaaaaggtgaactgtcactgccacattatgcaatatcactattgatcagtcttacaggtagaagacctcagcagttagttatgttgaaatataaagaccttcttcaaaagaacttagataatggcaaagtagaatatgtaatttcagtgccacgagtaaaacaacggggtaaagaactacgatatcgagaacttgcaataatatcagaggttgcatcaattgttcaattgcaagctaatcaatcagtgaaactcgttgagcaagctcttggaaaaactcttgatgattattctaaacgagaagttcctattttcttaaatgaggaaaaactctcagatttatccataacaggttcaattcttctggaatataataaattatatgcgaagcctataattgctaatgtagcattgaaaggtattgttaataatgggaatataatatccaaccgtaccggttcgatactaaatattacgcctcgtaggcttcgttatacaatagcaactatgctggctaagaatgggcataatgttaatactatagctgagttattggatcattcctctacttcaagtgcgggtatttatattaaaaatcatgctgacagtgttgaaaggattgattccgctgtttcagaacaattgtcatttgtcgctgatannnnnnnnnnttatgaacggaatcaaatcgaaaaagagttgtcatttcaaatttttttcttcaagtag

SEQ ID NO: 290681 - DNA, 192 bp, Morganella morganii; identical to SEQ ID NO: 278613

SEQ ID NO: 290682 - DNA, 459 bp, Morganella morganii
atgtctgaactggatatagctaaatggtctggtcgtatcaatgcgaatcagaacagagtttataaccatgtgtcagaagaagatatgttagataaaatcaaagctattaaattgaataggagtaattactgtcaaagggagtcaatacccacaaatgaattgacaattgattttgataaccttaatcaaggtgcaatacacttaactgaatttggttactgtgtacataactatttaatcaagccttgtacaaaaattaatcatcttattgaatgtgataatgaaacaccggacattaactcagtagatagaattagactgcaatctgtccgagagaaagtaatgcaattaaagagaataactcagatcgcttatgaaaatggtgattatggtgcagacaaatggttgcaacaccatgaaaaaaatttggaaagaattaataagcttttgaataattaa

SEQ ID NO: 290683 - DNA, 147 bp, Morganella morganii; identical to SEQ ID NO: 157315

SEQ ID NO: 290684 - DNA, 174 bp, Morganella morganii
atggccggggtttttatcgtgataccgccggagagctgtttcagggaatcgttcaggctgcgctgtgcgttcatgtccacctgtgaggtgaacttatccgccatctctgcggccttactgttaaaaatcttatcccacttacgtttcagccggttcagccagattctggtctga

SEQ ID NO: 290685 - DNA, 1632 bp, Morganella morganii
atgagtgaggatgtgggtatccttgaaagatcatggaataacctgacgaagggtataaaagaagccggtgacgaactgtcaaaaatctggcgaccgcagactgaagcagaaaaactggttaatgttcgtgaaaatattgtatctcttgaaaatgaatggaagaccgaatctgcccgtcagagtggtttgaaaacattaagagcaaacgaatccgagcttgaatttattgttaaatcccagcaggggtatctggataataaaaataaaatcatccaagccaatgagtgggagaaaaaaactcagcaggatctcaataagtacattgaagcagggctgtctcaggcagaaaaaagaacgcgggagcacgaaaagttaaaccgtgaaattgctgccaatgcaaaggctgcaaaagataccgcctctgcatctgacagtgaaaaaatcaggctatggacgcaagatgaaatagcgaaagccagagccggtattgataaaaaatatgccgatcctaaagcgccaaataaacgggattatcgtattgatgaaggcacaaaggcagaagaaacagcattaaaagagcaaattgcgctcgagtcaaaattacgcgtactcaaggagcataaatctgttacggatgtaatcagtgctgaacgcaaaaagctgtgggaaaccgaggcacagattgctatcactgaagaggccagaggcaagcgccagttaaccaaacaggagcaggcgttgctggcaaataaagcggcagtactggctcagcatgagaaactggcgctgctgggtgatgaggttgttgcccaggaacgcctgaataagcttcaggaccaggctgacaaatatattaaacagcagattgaaaaaagaaacgctatccgtgacagtatcggcaaatcctccagggaggtacagaaatcactggaaattgcccagctcaattcggcatatgaaggaacattagatcacggaagggtattggctgacctcgagaaaaactatgcagcagaggaagaaaagcgggctgactggcttggtggtgcacagactgcgtggggggattaccgtgatgccgcactggattcaaatgcgcagatccagaatgccaccatggctgcactgaacggattttcaactgaactgacctctgtgctgacaaccggtaaagctaatttccgtgagttcaccacgtcgatactgaaaatgctgacagaaatttttgttaaaaaatcgattgttatgggaatggatgcgatggggtttaattttaccccaaatgccaaagggggcgtttatagctctccgtcactgagtgcgtacagtggccaggtggtacataccccgacaatgtttgcctttgcaaaaggtgctggtgttatgggggaagccggaccagaggggatttttccgcttcgtcgtggtcttgatggtaaacttggggtagtggctaaaatggctggtggaggtggtgaacctcttattcaaaataattatttcactattaataatgatggtagtaacgggcagatggggccgcaggcgacacagacgatcctgaaactggttgagcaaaaaacaaagcaggttcttgcatctgagcgtcgtcccggcggggcaatggggtaa

SEQ ID NO: 290686 - DNA, 399 bp, Morganella morganii
atgcataaacattccgctatccggctgacggtggctgatgccctgcgggcacacctcgggggaactcaggtatatgacggtcgcccggtatttcttgaggagtctgaactcccggttgtcgcggtgtatctcactgacgcttcgccgacggatgatgttgtggatgaagaccagtggcaggccgttctgcatattgaggttttcctgaaagcgagtaatccggactcaaaactggacgaatggatggaagacaaaatttatcctgccatgcagtccgtaccggcactggccggacttatcgaaaccatgtcagcggcaggctacgactatcagcgcgatgatgaaatgtgcctgtggggctcagccgatctgacatatcacctgacgtattcaatgtaa

SEQ ID NO: 290687 - DNA, 516 bp, Morganella morganii; identical to SEQ ID NO: 277731

SEQ ID NO: 290688 - DNA, 402 bp, Morganella morganii; identical to SEQ ID NO: 277730

SEQ ID NO: 290689 - DNA, 255 bp, Morganella morganii; identical to SEQ ID NO: 277729

SEQ ID NO: 290690 - DNA, 1023 bp, Morganella morganii; identical to SEQ ID NO: 282120

SEQ ID NO: 290691 - DNA, 516 bp, Morganella morganii
atgacggataacgatgttgagattgctgtccggaaacagcttctggcgcagctggcgcaggcgggtatcaatatcccggtcagagcagggtttcagtcagcaaaacaggggcgggaagataatttcgttatgttctttcctgcaggggaaaatccgcagggctggcagaagcgcagttataacccgcagggcagtgatgccggtcacctggaagcacagcagtatgaaacaacattccaggtacaggcatttatcaccgaattcagcggttataccgcgaaagatattacggctgtcgtccggatgatcgttaattcgttaccgtttgttgaagcactgcgcaaacaggggatcggggtgcagcgggcgaccgccatccgtctcccgtattttgttaacgaccgcggtgattacgaacaaaacccgtcttttgattttaatgtgacttatacccgcacactccgtccggaaacggctgctgttaccgcactgtacccggatattcaccgcatataa

SEQ ID NO: 290692 - DNA, 369 bp, Morganella morganii; identical to SEQ ID NO: 278805

SEQ ID NO: 290693 - DNA, 516 bp, Morganella morganii; identical to SEQ ID NO: 288972

SEQ ID NO: 290694 - DNA, 582 bp, Morganella morganii
atgaaaaaatcgataaccttgaatggtgtatataaacttgctttaaatttattcagatttaccttaccagcattgataataccttatgtatatagaacattatcacctgataacatcggttctgttaattatgctgaaagtatatactcatattttaatgcactcgccgttctcggattatcattctatgccataagagaactaggtaaagtaagaagcaacagattaaaatcttcttttttattttctaatatctttactatcaatatacttttagttaccttttcgttatttctatatttattactaatcttctttgtaattaaagatccaaaagtacaaatcatatcattggttcttgctttaaagttatttttgcttgcatttgatattgagtgggtcaatgagtcacatgaagattataaatttatttcaataaaaacaatgttatgccgcagtgtatcattgattttaatgtttttccttattacatcatctgacaattatcttatctatgtctggctgaatgttttctttgacctaataaatgctcttttttctttctattatattgttagttag

SEQ ID NO: 290695 - DNA, 429 bp, Morganella morganii
gtggacccgtccgattttccgttagagtctttccgtgccatctataaggcttttgccgcagtgcctgatgatgaaatttttatcattgcactggaagcactgaactacttttccccctgccgtggtgtctgcacaaattcagcgtggatgctggttgtcgcgcatatgctcgatctgaataagcggattgcagacggggaatcaccgaccggtgtcgtgaccagtgtcacgattgataaagtcagtgtgtcctacactgcgccgcctgccggttctgactggtcgcactggttcaagatgagtacctacggccagcagtttctggcgctgataaaacggtgcagtgtaccgcgttaccacggcggcggcggggaacgcgcggcatttcgcggcgcgttcgggcgcttcacgcggggaggccaccggtga

SEQ ID NO: 290696 - DNA, 393 bp, Morganella morganii
gtgataactgaagatatgaagaagattgagattttagaaaaatttaaggattacagtgtaaaaaataatatagatcctagagttttaaaacgtcttgaaaaattatttgagacgacaaaaataaggccttcaggtaaaacgaatctgtttaaatcaataatgcatgagatggttttctattttgatgtcaacgtgcctcagtttgaccaatacttaggaataagtagagtgcatatggtggataagaaaaaggctatagaactcaggaaagtatatttttctatgtttcacccagacttacatcttaacagtgatgatgaagagataaattataaagaagttatggcaaatataaggaattactttaatagagtttgtggaggtttaaaatga

SEQ ID NO: 290697 - DNA, 750 bp, Morganella morganii
atgacgactaatttcccctccactcatttttatactcttagcgatcttgatgtgaacttaaaaaatcaacttattgattttaataataaggttttgagcaatcttaatactgccactctttcaactatcagaaatgcattttttcgtgcaatgcgtgtatatcctaatggggcatcctttgtacatgttacagaattggcgaatttattaagaacagggaatggagctcataatattctttggcaacacggattggcgggatatgcatctccatctcagcaatataatataggtgacgatatatatatatcaggtcctgatttttgttctctattagatgccagattgatggtaacttcagggacgcaaaatctttatctgaaatatgttcgtagcatctatcaagcaataacatcttcctcacaaataacaaacttaagaactatatttgtagaaaacatgatttcccgtaggtcagctctcaaacatgaaagaatatctaaatatttaataacaaagtgtgagtttagtggtgagcccattctcaattccgacaaggttgtttttgcacatatagatagtgtagcaactgctccgttacgtgcacttgatattagaaacggagtgattatattaaaaaaaattcatgataggctaactaatttgcagatacatgattttgctggaatgtacgatttttgcatctctaataattttgataccacatgggcctataattgtgaaccctag

SEQ ID NO: 290698 - DNA, 897 bp, Morganella morganii
atgtggaattttgataaaggaagaaaagcctgggtaacaaatatcaatgggttagatagctataatgcatttgtaatagtgaaaaaggggtcacatgctgctttccacaacagattaaccggtgtggtgtctcactggacagaaagaatctggcttgatggcaataccctctgcgtggatgcctccacaggtgacagttcagcatggaacagtgatccatatgggggctttttccaatacgaggtatttggaacgccaaaaaggactgaatcagactcagattatggtatcaggttggccggtatgaatggcgttacaaccataacagacatgtcaaaactcgggtattgcgtatgggcgggagatttatattcaccgggctggggcggggtgagcgtccccggatttaatatagaggatgaagcccggtatacgttgtacgtcaggccaaaaaatggcgaagctattatgatgaaatataaaaacaccgtaaaaacgaaagacagtacaacattacaggtcattttgtttgatcataagccagaccttaacagtaagccaaaatatggcgttgaaataagaaataaaaacggcgctgtaacgtataccagcaagtacgcacctatgatgggaggtcagattttaacaagcaggagtggtagtactcagtattcgagaccttttttcaatcttggaaattatggcacctatgtttcagctatcaagaataaatattacgaccttgctgccatgggtctatacgtttcaggcaattactatgatgtcagacatatgactaatgtggatatgggctggatgggggacatgtggacaaataacggtaatgtacaggggatttataatacccactgtatcgacggcgatttatatttataa

SEQ ID NO: 290699 - DNA, 1131 bp, Morganella morganii
atgagaaataaaattgactttattccatctggcgacgaattaaaaaatcttgttggacaaatgagttgtacagccacaataattaataacatattgcgggagagaggggttttctgctcttcttcagaaaagaccataacggttcccaatctaataacttcttttttgagtcctgaagagtcctatgaattactccaaagcattaaaacaaaagaaaaattagataaagttaattttcgtaattttgagattgataatgacgctgaacttttagaagaacttagtggatgtatcgatgttgatgatttaataagtaatgaatatactaacattgaaatttctgattttaacgattttacatcattagatggtaaatcaaataattctataataatggagttcgagttatgtcgtaaagatatattagatgattggtatatcaccgagaaatttttcagaggttctgtagaaattaagaaagattatgatggcgaacgtgctcaactattaatgaatgttaaattgaatcatacatcgccagaaacaaaagaaatatctgaacgaattgtgtcgttagttgaaagtaaactccttaaagatcaaatcatcaaagactcccctcatggcgggaaagtactctttaacgattttgaaaatgaatatcgtgtatcatttttaagcgaacttgctaaacagcacattgggtatgaattttactataaaaaaattgatgatgttcatttcaatccagataaagatgcagattactctacacaacctcaattagtaaccaatttccttgaaaaagatattgagcaatatcgggttaaaggggatcttgataaaatcatatcaataaaatggaaacatattcacccatacgttaaagtaactaaagtattagctagttatacaattgcacatgggaaatatgagggcgattgtaaagtctcatatgaatttagcgattacgggcgtaaaaactctctcaatccagaattatgcattactgttgtaaacataaaaatgaaaggggcctctcaagagaggttgaatgaaatacaagaattaataatgcgacaaatcgagacaagaaaagctgaattactccgtaagtacaaaaaatcataa

SEQ ID NO: 290700 - DNA, 921 bp, Morganella morganii
atgggtgaattttcaaaatacgttggtgaagtaggcgaagatattgtcaatgattttctaactctatttggttggcgaaacatgtgcaataataaaaaagtagattgctgtgtttcaacacatgaaaaaataacacatggtgtcgatgctttatacgtatatgattctctacttcaaaaacagacattagttagtgttgttgtttctgctaaatattctgcatcatcttacaccagtgtcaaatcaacctttagagatcattttaaagatattgccaacacaattgaatgctacaataaatcacaactaaagaggaacattacaaaaaactttaaaggcagttctcgaaaagaagatattggtgtattattttatttaaacaatgatgagaatgaagaaaaagataacattaaaggtaccatagcaaataccagaatagatagcacattaaaatttaatacaattcatgtcattgataatgcaagagctaaattcttatttgaatcattaaacttcattagaaaaaaatataaagattgtgattttttttgcaataatacgacattaaatatagcatcttcaaaaacacacacaaaaatcatgccagtagaatatatcacatcaccaataatccctatatctgttgcatctgaaaatggtcgaagatttattttactttgcgatttcgattttagtaaagagtccctaattcttgttttcaatttagctagaaaattatgttctgatttttcaagtcattatgaaatatacttcaaacaatataacgcgctcactgatgatcctataatagatgaagttaaaatgtcacaaataaatgaagatgatgacatcatagagagcatagatgtacaaatctcatcttataattctaacttcaggaatatcaaaaatgagaaataa

SEQ ID NO: 290701 - DNA, 369 bp, Morganella morganii
atgttcagaacagaagacatcatcgatgagataactcaatggattgattcaaacttacataaaccgctgaggatagaggatgttgctgcgcgggcaggatactccaggtggcatcttcagcggatttttgtgcaggtaaaagaagttagccttgggaagtacataagagatacgaaacttagacttgcagcaaaagatcttattgatactaatgaatcaattatggagatcgcttataagtatggattcgattcccaacagacatttacgagggtcttttccaaaacttataaatccccacccatgatgtatcggaaaatcaataaattgaccattactaaagataggtccaaatctttacctctataa

SEQ ID NO: 290702 - DNA, 252 bp, Morganella morganii
atgaaagcactacttattactgcattggtcatggggttcatttcagtgaatgctgcatctgcagctcaggaaattaagcatgcagatgggaaagaaaagatcggtgtcgtctcggcaagcaatgcctatacacttgatgagttatcggatgcgctctctcgtaaggctgatgagcaaggagcaacgtcgttcaaaactctgtcaaccacgggaaataaccggctgcacggggttgctgaaatctataagtaa

SEQ ID NO: 290703 - DNA, 966 bp, Morganella morganii
atgagtaagtggctattagacaggctatttgaagccggtgatcaggcagagccccggtttgcgtttcaggggactgtaaattggatgagggcccttgccgaagtcgttaacggtggcgcttgtggcgatgataaactaaatgatttatatgctcgggtacaacgtagacctgtcaatcgtgaagctgatacgcttgtgtttgagaacacaatgatggccttacataatctgtcatctttgaaaagtatgaataaagatgtcgaagataaatatgacatatgtcgttcagctattatttcttggtattacagtatctatttttccgctagcgcgatggttgcagcatcttctggttctattcaagagacacatacagccacagcaaaagtttggcagtcagatatcgcggaaaaagaacttatcccatatccatttaatcttcttctaactagtttagtttcaaacactgctgatgccgagattgctgcatatagaggtgctaaccgtttcgacctgaatgatagagcttatgataatgaaactgctcatggtgcactggtttcctatctaaaggggactcatggctacaaaaagtgggaaacagaagagagggtgagaacttctcgtgatttcaaagctcttggtgttgacaactttcgcacgaaagctgctcgcgaagttcgcgatcacgcactagaaaaaggacaagttaatttccttattcaggcatttagataccgtggtaaagcgaactatcgtgactctatatttttatcctacggtgacaacaacgaagctattatagaagaatttatccaagatttgtatgacgtcgctattggcttcattagggctacttcgcattattgcagtcgaagagtcgagagaggtacgtgggctgagtttgtcgaggatatttctgataactcaaggttgtctattgactctgtcgtgcttgaaatataa

SEQ ID NO: 290704 - DNA, 1161 bp, Morganella morganii
atgaaacgaagaacgcgcatttactacacgccagagcagaaagcgattatctgggacagatataagcaaggtgattccctgcatgatatcgccagaatgttcgatagatatcattcttctattatgcccactatccaccagactggtggatatcgtccccctgtccgaaagcggcatccgttagctctttcacttgatgaaagagaggaaatatccagagcgctggtagcaaaaatcagcatcagagcgatcgcaaacaagctatcgagagcaccttcaacgattagccgcgagataaagaggcacggtggtgcaaaacaataccgtgcatcaaaagcggatactgctgcgtgggaaaatgctctgagaccaaaaccctgcaagctaattgaaaaacccacattgtgtaaaatcatcgcagagaagatgcatcaggactggtcgccggaacaaatcgccggttggctgaaacgctgttatccggataatcaggaaatgcatgtgtcacacgaaacgatatataaaacactttttatacaaacccgaggagcattaaaaaaagaactgcagcaatgcctcagaagcggaagagttgtgcgtagatccagaacatcatcgcttaaagggaaaggattagggtcaatcccggatacgatctctatcagcgaaagaccacctgaagcggctgacagagctatacccggtcactgggaaggtgacctgatacagggctctaaaaactcctatatcgtcacccttgtagaacgtcattcccgttttgttatgctggccaaagtcagggacaacaagaccataacggttatatcagcactcatcaaacaagcccgggaattacctgctgagctttataaaacattaacatgggaccggggcgctgaaatgaccagccacacccggtttactgtagccacagatattcaggtttacttctgcgatcctcaatccccctggcaacgcggctccaatgaaaatacgaacagattgctcaggcagtattttccaaaaggaactgacttatcagttcacagccagcaaagactaaacagtgttgccaggcagctcaacgataggccaagaaaaacgctagactatgaatcacccgcagagcgttttaaccaatgtgttgcgtccatcagttga

SEQ ID NO: 290705 - DNA, 582 bp, Morganella morganii
atgcaaagatattatccacatttaaagaaagtcatccctaatgacttcctgctgaatttgattaatcaccatcttaatcagatcctggcatgtcactccaaagtactggcctttcgaatggattttaattaccagcgaggcactaaccgatttattcgtaactcttccatcgaaatacaggatgaccttagagaactgacgcaggcaatgatcactcttcccggagttatcggcgttttttgggtactggaatggacatcagaaggggcagttcatgctcatgctattttttatcttaatggtcagaaacatcagaaatcatttccgttcattttacaggcaggggaactgtggcatcagattacttatggcgaaggtaaatgccagcgatgtaagccaaaggaatatcatcaggacaacattaacaatgttgttgaatatcgcaacaatgaagccataaacagcctgagacgtataatcagttatctaacaaaagaagaccaaaaatatggttatctaatttggggatgtaatgaggttcctacccctgcacgacagggcagaccaagaacagccaaataa

SEQ ID NO: 290706 - DNA, 930 bp, Morganella morganii
atgagttcaggaaagcgagtggccagtctctggacgaaaagagtaaatttatggctttactggaatatctttcgctcagcattaatgcatgctgatgagtctcgtgaattagtggaaagaataggtgataccactcttttcaaagagtcttgcattaaatatatgaataaaaaagaaatggttaagtattggagtgcggaagatttctttgaaaagaataggcgagaggttgaaggtaagttaataccttttagtgaacttgagtggattgattgtgagcgttcgttgtcatttgttgctaattatattcatgccgaatataagttatatacaaataataataccccctctcttcttgatatcaccttacctgaatggagccttggttctgataagggtggcgtaaattatgatggggtaattcttttgatagactatcaatgtcgtgtatcaagccttaataatatccgttccaccttagaacgtttgaagaggtcatggctccgtatccagaaaaaatttggcaatccgttttggttctcatcagccagatatgatgctaaatatttggcagattatcagtgggtgatgtcttacttcgataagaataaaatgattaatggtaatgtggatttttggtttgaaaaaaatttgaatctgaaagttcattcaatctttgatcaatgggttgagcataaatccgatgctgaaggtgaattgtttattataaaaacaaaaaaagcatggggtcagaaaaaattcagagatagtgttgcaaacaaaaaagttctcaatacctatattagcaaagatagtaagagacaacttgattatctggcaagccaaaatgaaatgaaaatcaatgaattgattgagatgctgatcaatgatgcatacgcaaaagctaaactgaaaagttgggaaaattaa

SEQ ID NO: 290707 - DNA, 864 bp, Morganella morganii
atgaaacaatttgacggtctgcagtcactgcagcaaccgctttccggcctgccccagtgggtctctgaacgcattctgcagcagataaatcagttaacccactacgagcctgtaataggcattatggggaaaaccggagcaggcaagagcagcctgtgtaatgccctgtttgctggggatatatcaccggtcagtgatgtggcggcatgtactcgaaaaccactgcagtttcgcctacagctcggcaaacgctttatgacaattatggacctacccggtgtaggagagtccgaactccgggatgctgaatatgctgcactctaccgtgaacaacttccccggctcgacctggtgctgtggttgattaaggccgatgatcgagcactagcggtggatgaacatttttaccggcaggtgattggtgaagcataccggcataaggtgttgtttgtcatcagtcagtccgacaaggttgaacccaccagcggtggtgaaaagctgtcttcagagcagaaacaaaatatcagccgcaaaatctgtctactgcatgagttgttccaacctgcaaaccctgtctgtgcggtgtcggtacgtttgcaatgggggctgcgggtaatggctgaacggatgattcattgcctgccgcgggaggccagtagtccggtggcggtacagcttagtgatccacttcgtaccgatgccattaataaaaaagcccttgacgattttggtgaaacggtcggctcggtgttggacacagtaagttccatgcccctgataccgtccccggttcggactgtcatccagtctgtacgcgacatcgtggtatcggtcgctcgtgcagtctggaacttcttcttctga

SEQ ID NO: 290708 - DNA, 237 bp, Morganella morganii
atgtctgaatctcatatgctgccaccgggacctttcacccgacagctagctgaagctgttacccgccggtatcgcaacatcagcattgaagacgaccagggtagccacttccgcctggtggttcgtgattctgaaggtcgaatggtctggcggacgtggagctttgaacctgatgccggtgaagggcttaaccgttatatcagcaagtcaggcatcctcagtgcatccacctcctga

SEQ ID NO: 290709 - DNA, 222 bp, Morganella morganii
atgaaaattatcagtaaacgccgggcgatgacgatttaccgccagtatccggcctcccgcatttttcgatactgcaccggcagataccagtggcacggcagtgtctgtcattacaccggtctggccgttcctgacattcccggcgtgctggctgtatacgccgaaagctgccaggaccgcgacggaccttatgcctgtctgatgagtatcaccctgaactga

SEQ ID NO: 290710 - DNA, 318 bp, Morganella morganii
atgagcaacaccacatggggcctgcagcgggatattacaccgcgcataggggctcgtctggtgcaggagggcaaccggctgcactatctggctgaccgggccagtatcaccagtaagtttagtgatgccgaatgccagaagttggatatcgcatttccgcattttatcagtcagatggaatcgatgctgaccactggtgaaatgaatcctcggcatgcccattgcgtcaccctgtaccacaacggttttacctgcgaagccgatactcttggcagttgcggctacgtatacatcgctgtttatcccactcaacgctaa

SEQ ID NO: 290711 - DNA, 2160 bp, Morganella morganii
atgagccagtggtaccaagaagctaagactaaattgaataatccaatgttctcacaatgggatgattttttattatctttagtaaacgaattcaacggacatgttaatgagtcattagttcaggatattgttattagggccatggaacgtaaaagtgaaatgaccaatggtttcattttggaccatatcctcggtgaattagggcttttcccttacattgataataatagtacatcgaaagatgaatttaggaaggctattttcactactccgcaggatgaaacaaaggttttccacattcgccaagctgaagtttttcacagaatcatgactggtgaaaatgtaatattgagtgcgccaacaagttttggtaaaagcctcattattgaagctttgattgctagcaacgaattcaacaatgtagtaatagttgttccaacaattgctttgatagatgagttaaagaaaaaaatctataagtataaagataattacaagatcatcactcaagtgtcacaacaaccgagtgagcgaaatgtttttattcttacacaagaaagagttttagaatatagcataagttcagtcgacttctttattatcgatgaattttacaagcttgcaccatcaagtaaaaatgacgaacgttgtgatcgactcaatcttgcatttaaggagctatattcaaagtgcaagagattttacatgctaggaccacgaataaatggtcttttttcaggaatcgagcaggaattaagatgtatttttctaaggtttgattcgtataccacagtagcaactaatgagttttaccataagttaaaaaccactggtgctgatgcaaaggttgatgttgaaagagatgaaatcctaaaagatattttatcaaatgtcggtaggaatgaacaaacagttatttattgtaaatcacccaaaagagttagttcgctaatgtgccgattgcttgcggctaatatactttcttctgataatataaataatgatcttgctagttggctttctgtaaatttccatgataagtggtcattgattgacggagtacggcatgggattgcataccatcatgcacagctcccaagggcagtaggttcattaattgtggatttgtttaatgaatcaaaaataaacattctaatttgcacatcgactttaatagaaggtgtaaacactaatgccaaaaatattattatctacgatgactgtatcactagaagaaccaagttggatatgtttacgttcaataacatatctggtcgttctggacgaatgtttgagcattatgttgggaatgtttttatttttggtgaaaaaccacaaattgaacttccatatatagatattcctgtagtaactcagagtaaaaatgcgtcagagtcattactactacatttaggtcaagatgttaatgatgagaataaaaatagagtaagaaagttttatgagcaagatgtgctccctatgcaaatattacttaaacaccaaggcattgatccaaacaaacttataagttttgcggaaaaattaatcgaaaaatgtaatgcgtggaatccattgatgcgctgggatagcatttatcctacatctaatgaattgctgcatctctcaaacatattatttgataactttaatgtgtcttcgatggggggaggtacagttagaagtgcttcgcagcttcataaaaaactttgtgatgttataaataaagtggacgataaaacactgattctcgaggattttaatttctggggaggaagggataaaacctataccatagatgatgctgtgcaatctgtattcaattttaagaaaagtcttgttaattataatttgcctataataatttacgctgttagtgatattcaggaggtaatattcaagaggtttgggtatacatatggggattacaaaccttttgcatctacattagagaatttttattaccctgcagcagttaactctctcgaggagttcggtgtgccaaatcaaatcgcaaaaaaaataatcaacaacagtcactttgataatgccgatgatatcgactcagttattaatgctctgattttaaaagataaagactcttatacatacttaactgattttgagattggttttataagaaaagctctgtcttacatgtag

SEQ ID NO: 290712 - DNA, 1449 bp, Morganella morganii
atgacaaatggaatattagaagagtttaatcttgaatgtatatatatactcaatgccttgttacccaataattcaacaatgcgaggaacatgcttttctatagcaaacgatctgttgttaacggcgaatcatgttgtaaatggcgcttcatcaataaaaatatttctctcaagtgatttattttttcttggacaagggattgatgctgaatgcatatatagcaatgaaagtttagatatggctatattaacagtacctgaagggacgataaataccgcaataccgctttattcaaccgctgttaatttggatagtgatgttaaatcttgcggctatcctgtagagaaagagcattaccatgcacctatcaaggttaaagtaacaaacacattttcacatatgagtagtcgtgaatatagttttgaagtttcccaatctaatacagttactaaatacagtggcatgtccggttcaccgataatgcatgagaaatattgcatagggattttgctagttcaacaagggggaaatacactatatgcattatctgtaaaagattttcttattgatgctggtatgcaagatatagtgaaaaaatacgatgtaaagataacagtgcaagatggagttgaatacaaatcacctgattacccttcctcaccatttaagtattgtataaattgcaatgcggatcatccaaatatcaaagggattgatataggttttacaatgaaacaatggaatatcagcgagttcacagaatctgtatatgattggatcatagattattctttgtcacataaagaaaaaaccaattttaatggaagtgataggagtctattcaaatatgctagatctcattatcctgttgatgatttaaatgctttaggtgacctttgtttacatatagcgatccgagagtcttactcgacaatcccaataatgaataaagtcttcgatgtgaacaataaaacattctcatgtactcatgccgtgcttaattttgatgggattgaactttggattggcgcgtccgcggttactcaaagtattgaggaagcaactttgtctgcgattgaaagtattaaatatatattagatgttaagtcgataaaaaatagattaattatgctcacgtcggaaatagatgattcatggcctcatagagaaaaattaaaacgactagcagattctaatttggaattagaagaaagattcgataagataataattccagtattcataatgcatgatagtgagttaattaaaaattataacaaagatgatttcttgctcctgttcaatgaaaaggttgctagttgcagagaactattacaaaaagatacagagggaagtatcattaacttaattgatcttcgggttttttatttcccagtttcggatattaatgaagttaatagtgctttgcagaaggaactaaactcatga

SEQ ID NO: 290713 - DNA, 1134 bp, Morganella morganii
atgctcaaaatcagaatgctcaaagctggcaacggggactgtatttttatacagacagattgtgagtttatcttgatcgatggaggaaccgcgcagtctttcaatgactggaaagactgcattattggacatgtagcaaaaattgattcaattatcgttacacatattgataatgatcatatcaatggaataataaaattgctcgaccatccagattgcccaactatcggccaggtatatttcaatggtgcagagcagctgtttggtaaactgaatgaattttctcaagcagagcgtaatgttgagatgaaactacgtgctctctctgaagagtgttctgctattgaagataaagagctaattggatattccgaaggatcatcactttcttatatattatccagtaaaggcatcgagtgtaatccggttgtctctggtggtgctgtttatcggggtgtatgcgagtttttcgaaattggttctgttaaatttactctgattaatccaatccaagattctctttacgaacttcaaaagttttggcaatgcaaattatcagagcgaaggataaagcctcgcgtcattagtaaaagttattatgatgctttcgaaaaatacatcggaggattaagagggaaattgaatgataatcatagagtttcctttatcaaccaatgctctatagaagcgctagcaaatacgaaatttgaggatgatacttcaccaacgaataggagtagtttttcattcttaattgagtttgatggaaaaagaattctttatttaggggattgtaatgcgactgttgttactgattggttagagctgcaaagtgagaagattttaaatgttgatattgtcaagatctctcaccatggaagcaaaaataatacgagcctagagcttctaaggcgaataaatagcccgaaatacttcattagcaccaatggtaattcgcatggacacccagacctagaaactttagcaagaattgcttttgttaatagcaataaagaaatcgagatatattttaattatgctcttgatgtaataccggactggttcgtcgctgacattgcaaaaaactatccaatgataaagtttttaatgaattcttgtgaggtggaactatga

SEQ ID NO: 290714 - DNA, 492 bp, Morganella morganii
atgaatcagactcgccggtctatactgggaattattacagctatttcattgagttcgttatcctttttgagccatggtgaagaaatcggctctgtggacactgtgttcaaaattctggggccggaccacaagattgtggtggaagcctttgatgatccggatgtggaaaatatcacctgttacctgagccgggcaaaaaccggcgggatttcgggcgggctgggtctggcggaggatacgtctgatgccgcgatttcctgtcagcaggtcgggccggtcacggtcagtgataaagtgaaaaaaggccgcaaagataaaggccaggtggtgttccagaaacggacatctatggtattcaagaagttacaggtggttcgtttctatgatgaaaagcgtcacgcgctgatttatctgacctattcggataaagtggtcgacggctcgccgaagaatgcgctgagcgcggtgccgattatgccgtggaacaaataa

SEQ ID NO: 290715 - DNA, 1719 bp, Morganella morganii
atgataactgactctcagcgcgatccgcggtcggaagcgaaaagcctgtactggcaggcgtacagtatttcacagatagcgtcacacctcggtgtgagcgccaacacgctctattcgtggcgcagacgggataaatgggatgaaacacacccggttcagcgcgtcagtgatgagattcatgtccgcattctgcggatcctcaataaaaaagacctgaccgcccacgattttaaagtgatggattttctcggccgtcagatggcacggctgaacaaagaaagcgacaagcaggagaaagagaagaagccgaaaacgccgaagaaccactttaccgaagagcagatcgaacaactccggcagctggctctggaaccgctgtttgaacatcagaagaagtggtttaagcagaaaaaccgccgtaaccgcatgattttaaaatcacggcaaatcggcgcgacctggtattttgcccgtgaggcactgctgcacgcactggaaaccggcaataaccaaatattcctgtcagccagccgggcacaggcgcatcagttcaaaggtttcattatcgccctggcgcgactcgtcggcgtggagctgaaaggcggggataaaattgttttatccaccggaacaacattctattttctcggtaccgctgcggcatccgcgcagtcttataccggggatctctattttgatgagttcttttgggtggctaacttcgccgaactgcgcaaagtggcggcggctatggcctcacaggtcggattacgccggacttatttctctaccccatcatctgaagagcatgaggcttatccgttctggacaggggactttttcaatgaatcccggcctgaatccaaaaaaatcagcattgataccacacacaaaaccctgaaaaacggtgtgttgtgcggggacaatatctggcggcagattgtcactatccatgatgcgattaacagcgggtttgacctgatatcactggcggatatcgaaagcgagaacaccccggacgatctcgaaaacctctataactgtaagtttgttaaagccggtgaacgggcattcgactataacgcccttatttaccgtggtgttgatggttataaccgtgatgtctggccggactggaagccttacgccgacaggccgctcggtaataaaccggtgcgcatcggtgccgacccgaccggcaccggcggcaatggcgacggcctcggccttgctgttctcgccccgcctgccgttcccggcggaaaatggcgggtcgtcgaagcgctgcgcttccgtggcatggcttttgaaaaacaggccgacgaaatcaaaaaactgacactgcgctacaacgtgctggggatcaacattgatattaccggcggtaccggcgaggccgtgtatgagctggtgaaaaaattctacccggcagtacagggcattcgttataccccgcaggttaaacggatgatggtgcttaaagcgcagatgcttatccgcaacggacgcattgaatatgatgccggagcatcacagatcccgtcgtctttcatgactatcaaaaaagttatcacacagggcggcattgtcacctatgcgtcagaccgcacacgcggtgttgatcacggggatattgcctggtctgttatgaacgttttatacgctgaacctatcggcagtgaatccgcagacagcggatcctgcgtatcggagttttaa

SEQ ID NO: 290716 - DNA, 1878 bp, Morganella morganii
atggataaattaaaaatgcacagccccgacatgacgcagcaaaacatagagaaaattcaggcgttgtttccgaactgcgtgacggaatcaaaaggggctaacggagaactaaagctagccattgattttgaccaacttaaacaagaactatcaaattcaatcgttgaaggcccgcaagagcgctatcagctgaactggcccggtaagcgagaagcactactaacagcaaatgcacctattgccaaaaccttaagaccttgtcgagaagaaagtgtcaattttgacaccactaaaaacctctttattgaaggcgataaccttgatgcgctaaagatgttgcaagaaacatatttaggcaaggttaagatgatctatattgaccccccttataatactggaaaagactttatttatgcagatgactttgcagaaaatacagaggattacttaaaaagctctggacaaaaagatagtgttggcaatcgcatgatcgcaaatagtgaaaacaacggtcgatttcactcagattggctatcaatggcgtattcaagattaaggttggctagaaatcttctaagagaagacggtgttatttttataagtattgatgatggtgagcaagcaaattgtaagaaaatatgtgatgagatctttggagagtctaattttctcgcaaatattatctggaaaaaaagaggtggtgcacccaatgatagagttattggtgcaacgcatgaatacattttattgtattgtaaagacagttttcaggttgatttgcactggaaagaaagatcggatgaacaacttaaacgatataaaaatccagataatcatcctaaagggcgttgggcagctgataatctaatggcaaatgtcaaaggcggtcgttacgtgcccagtttgtactacccaatagtgaatccaaagacaggagccgaacattacccaggcaacaatggtaattggagatataataaatctaagattgatgagctgttggagaatgatgaaatatactttggagaagacaataatggcaggccaaaattaaaaagatttttatgtgatgtaaaggatggagtgtcaaggcctactatttgggattgggttggatataacaattcaggatcaaagattattcaagaaatattgggtaatctaaatgtttttgatacccctaagtcacttgaattactaaaagaagcagtttctttttctacttcaggtacagatattgttttagatttttttgctggctcagcaacaaccgctcatgctgtaacacagattaattcagaagatggcggaaatcgaaaatttatcatggttcagctgcctgaagagtgtgataaaaaatcagaagcctttaaagctggctacaaaactattgctgagatatcaaaagaacgcatccgccgcgctggcgcaaaaatattagaaggcgagtgccacaaagactggaataaagacgttggattccgagttctcaaagtggatacctccaatatggcagatgtttactactcgccagatcaggtttctcagggttcgttagacttattggtagataatattaaatcagaccgcactgatgaagatttactctttcaagtattacttgattggggcgtcgatttgaccttaccaatcagaaaagaaacgattcaaggcaagacagttttctttgttgatgatgatgcgttggtggcctgttttgatctgcgtataaatgaagctttgattaaagagttagccataaaagaaccacttcgcgtagtgttccgtgatgacggctttgagtctgatgcagtaaaaatcaatgctgagcagattttcaagcaagtgtcgccacatactgaagttaaagcgatataa

SEQ ID NO: 290717 - DNA, 687 bp, Morganella morganii
atgaactcaccttggatatttcctgacaacgcaaagttcggtcgagtcgtgcctaagaacaaaatatatgagcacagcgcggcaagcactgggttgaagtcactttttgtagagcaagtagatcaaattctttgggcttacaagctatcgcctagcacgctgaatattcctcaaaccagtgaggtcagtgaaatacaggttttcagtgtgaagcttaaaggtgactcaatagacgacagcgtactaaaagcgattgatttggccataccttttcccattatatttgaggtatgggggcctagtggtgaacaaggctactatgcagcttgccataagcgcaaggcagaaaatgatcagtcaaaatgggtctgtagccgctatttgttctcagaaatgttctatttaggtaatgcatcaacagtaacttctgaagttttgggtttgcctaccgcaatcgatatggcggagctgtatcaaaagcttcttacacgcttgttacccatatccaaacgaactgccgagagtattgaagaggtcattgaacgcttgacagcaattcaggcattggaaaagcaaatctcgcaatataagaagaaggttcatgctgagaaacagtttaaccgaaaggttgagctcaataagcagttaaagaatttaaggtgcgagcttgaagagttactcgcataa

SEQ ID NO: 290718 - DNA, 2589 bp, Morganella morganii
  misc_feature (1876)..(1885): n is a, c, g, or t
ttgatttggaacaagttatttaactaccaaaaagatgccgcgactgggattatcaataagttagagacctataacggctgcattctggctgatagtgttggtcttggtaaaacatttacagcgttagccgtcatcaagtattacgagctcagaaacaaatctgtgctgcttctatgtccgaaaaagttagcggataactggctcaactttaatcgaaacttaaagacaaatatctttgctaaagaccgttttagttacgatgttttgtgtcacacagatttgagcagaacctctggcgaatccttcggtactccgttgaatagaataaattggggtaactatgacttggtcgtcattgatgagtcgcataactttagaaataacgatgcagtgaaagatcgagaaactcgatatcagaaactgatgaataaagttattcgggctggcgtgaaaaccaaagttctgatgctatcagcgacaccagtgaataatagatttactgacctaagaaaccagctcgcgttagcttatgaaggcgagtcgagcaatctcacaaagcatcttaaaaccacaaaaagcgtagaacagatattcaaccaagcacaagccgcatttaacgcttggtccaaactagaccctgagacgcgaacagctaaagccattctcgatgccttggattttgacttttttgaactgcttgatagcgtcactatcgctcgctcacgaaagcacatcataacattctacgatacgacagatattggccattttcctgaacgtaacaagccaatctcgtttcattgtccgcttactactcgttcggatgtagtaagcctgaatgagatctttgaacagcttaagctactcaagctatctgtctatgcgccagtgagttatatcctcccgagtagattgaaaaaatacgaagagatgtatgatacgcaagttgaaggcggaaaaggtaagttaaaacaaagcgaccgtgaaaaaagcttggttgcattgatgacaacgaatctgctgaagcgtcttgagagttctgtatactcgttcagaactaccttgcaatcccttcatgataaccatgttcgtgttcttgcaattatcgacgagttttataagcgagacgggcaaaccgaagtgagcagtctggttgaagcgcttgagtctattgaagcagatgaagacgatatgccttcttatcacgatatggaaatcggcaacaaaatcaaaattaagctaatggatatggaccttccatcctggcagcaggatttagatggtgatttggaactgatcaaagggctactagattctgttcgcaaaattaagccagaagaagatgctaagttgcagcatctaaaatcacatattgctgcaaaaataaataatccgataaatcctggaaataagaaaattatcgtgttcactgcgtttgctgacaccgctcaatatctgtacgagcagttgtcacctgtgatgttaagtgaacatagaatccatactgcgatgataactggtggtgccagtttacctaagactaccttaaaaaccagacgaaagggttacaacacacaagaagtgctcaccctgttttctccagtttccaaatcgaaagccagtgtattacctgatgaacccactgaaatcgatttgttgattgctacagactgtatctctgaagggcagaacttacaggactgtgattacttaattaactttgatattcactggaatccagttcggattgttcagcgctttgggcgagttgaccgtattggctcgccgaataaatgcattcagttagttaactactggcctgatatatcgctggatgagtacatcaacttaaaagaacgtgttgaaagtcgaatgnnnnnnnnnnttgttgacgtgacagcgaccggtgatgataacgtcttaagtagtcaagctaacgatgtgtcgtatcgtaaagagcagttaaagaagctgcaagaagaagtcattgaacttgaagatttaaaaacgggggtttctatcaccgatctaggtctaaatgaatttcggatggacctacttaatttaatgaaactctacggcgaaccaagaaatgcaccaagtggcatgcatgcggtggttgaagctaagcctgaattagggttattgcctggcgtggtgtttgcgctgaaaaacgtcaataacagtatcgatagagatctgcaaaacaggctccacccttattaccttgtctatgtatcgaatgaggggcacatcgtcgctaatcattttgaggtaaagagactattagatttaatccgcagtagctgtaaagggcaaacagagccgctcagtgagatttgtgcgttatttaatcgcctaacacaagacggtcgagatatgcagcgttactctcaccttctaacaaatgccataaaaagcatggttgaagttaaggaagaaaaagatattgatagtttgttcagtggtggcgctacctcagctttagtgaatacatttgccgggcttgatgactttgaattgctggcatttattgtgatccagcaaaagcatctgatggaaaacagtgctcaggatgaggttagctag

SEQ ID NO: 290719 - DNA, 261 bp, Morganella morganii
atgtacatgaaggacggacaggtctttatgcgtgaggcgttcattaatcaggcatggctcaacagtgtggttgtcactgacaaaatgcagtcggagaactatgtgccgggtaaacagggttttattctggatgcaaaggctaataaatttgagttcgttgacggaacaacaacaaacggtaccggtattacagcgggcggtattaaagtgtatgacaataaccggctgacggtcattattggtgatatatcggggtattaa

SEQ ID NO: 290720 - DNA, 375 bp, Morganella morganii; identical to SEQ ID NO: 280886

SEQ ID NO: 290721 - DNA, 717 bp, Morganella morganii
atggctaggccggactggagcgagctacaaaaacagttcctgtctgaccatgccgctacagggatatcaccgaaagagtggtgtgagtctcaggagttgaattacgcaaccgctcgcaggcatatcaaaaaaccaactgcgcagaaaggtgcacaaagtgcgcaaaccgaaacccgaccagtgcgcaatgcgcaaaagcgcaaagtaacaaattaccctccgtttgcaccaggtaacagagccgcagttaaacactctggatattcaaagtacatgcctgactctgacgagttatttgaggatgccgccggactggatttaattcaggagttgctttttatccgtgcgaggacgctttcagtaacaaaggttcttggcaaattgcgaactgactttgagtcggctgaagatgccgaagtgcgcagtgaaatagcgaggcaactggttaatactgagcaggcattagaccggaatattgcccggatagagtcactggaacggaccatatcaacgcttggtctggataaagaaagcctgcttaaaattattgcagataccaactatcgcaaagcagcaacgaacaaaattaatcttgaatcagacaagcttggccgagaactggctgaggatgatgaaaacgatacaccgacaccggttgcaataaacatcaatgtgatagatgcgagggtcagagaagatgatagcgccgacccttaa

SEQ ID NO: 290722 - DNA, 525 bp, Morganella morganii
atgaaaagggtaatcacggtattacttaacggatgggtgtgggctgtcgtgtttttcggcttgtggatgttcagcctactgtccgcagaacaaacagagggccagcacaaagacaatgtgatcaccgaaaagcaaaaggtgattgataacgcttacacgagcatcgatatctttgaccgtgtggctacggcgaacgcgaaccgaaatatgcgcaccgaggcgcaatcacaggagaagcagattgaataccgtaccattatccggaaagagcctacctgcaatctgtatatccctcagcctgtttctgatgggctgctcagccacgtctacgccatccgccaatcagcaatgcgtttcgattccggcatcactgacccagccggtactggcaccgttgccacccgccgactgacatattgccaggcggttgagtggatagagccgttactgacagcgttggataaggcgaacggacagctgatggatgtacgtaaagcggatgcagaacgaaacaggaagccttaa

SEQ ID NO: 290723 - DNA, 381 bp, Morganella morganii
atggcaggacaccaacatgctgaccttatggctaaggcagcagagatagcgaaaacagacgaagagtggtatcggcactttcaggtgtttttaaatgacaaatggagcaaccccagcagtgaatttcaattttattcaggtggggaatatcgtctaaagcccaactttatcgacattaacgggcatcaggttccggagccggtgcgggttccgctggagtgcgggacggattactgtgttgtgggtctcgatggtattgattatcaacgctggtgcgatgatgaagacgatgaaaatctacttaaacaaggacttatccacctaaccaaggaagcagcagatatccacatagccgccctgctctctttcacacagaagtaa

SEQ ID NO: 290724 - DNA, 753 bp, Morganella morganii
atgaaagttgataatgcagtgcttaatgtgctgagtgcgtcacggtgtgatggcaacagtttattcctctcagggcagcttgaccgcaatctttatacgaaaacaaacaaagtgcttgaagctgccgggggaaaatggaacagaaaggctaaagctcatatttttgatggcagcgcgtcagaccgcgtcgagcaaataattctgactggcgatgtgcttgtgccaaaagatgattttgaattcttccctaccccgtcagaagttgtcaggcacgtaattaattttgcagacatccgtgatggcatgatggttcttgaaccaagcgccggaaaaggcgctatcgccaaggccgctcacgatgcagcggcggatgtaacggttgatatgtatgagctaatgcccgctaacaatgctgagcttcatgctttaaatcttcgtctttctgctgtgggtgagcctgtcgatttccttactgttcaacccaaccctgtttatgaccgcgttgtgatgaatcctccgttcggtcgccaggcagacattaaacacgtcacacacgcacttaaatttctgaagcctggcgggctgctggtgtcggttatgtcttactctgtaacattcagagagaataaattgaccagtgatttccgtgagttggttaattctcgccgtggtcacatagaacaacttcctgatggttcgtttaaaaaatccggaactatggtcagcacggttatcgctgtgataccagggtaa

SEQ ID NO: 290725 - DNA, 321 bp, Morganella morganii
atgaacaaatatcgtgacaaatcagactttgagattaataaggctgtggctgttaatgttaatggcactgacgctgttttagaaaagttcggtagcatatatatcagtgatggagatagaggtgcgatggtgagcttctccccctgcaacaacccagctgacgcaatgccgattattattgagaatggcatatcaatgattaaaagctcaggggggtggatatgctgtcatggtgcagccggtgtaattgagcatgaaaacttatatcgcgccgctatggaagtattcctgatgatgaaggatgaggagaatgaaaaatag

SEQ ID NO: 290726 - DNA, 873 bp, Morganella morganii
atgaatcaacatattgaactggagaaggctctcgcagcctttcctttttcatttaaaacatcattttttaaccaactcaatcagctcatcaattactcccccaccataggtttgatgggtaaaacgggagcgggaaaatccagtcttatcaacgcactattccaatcgtcattatcacctgtgagtgatgtttcaggctgcacacgccaagcccagcgcttcagcatgacgatgaacaaccatactctcacttttgtagatttacccggcgtgggggaaagtatcgaacgggataaagagtaccactcgctataccgtaacgtattgccagaactggatttaatcatctgggtactcaaagccgatgacagagcttggtcttcagatgaacagtgttatcgctttctcatgaagaaatgcggttaccaacctaatcaatttctatttgtcttgaaccaagccgataaaatagagccttgtcgccagtgggatgaacataaccagcagccatcctcagagcaaactgctaacttggaattgaaacaacaagccgtagtaacagcttttaagccgtaccaccctgtgatggttgtatctgcaatcgaaaactatcaactgactgaattagcagagcagctcatacaggcgttaccagtgcaagccagtagcggagtagctaggcaactgaacagcccttaccggacgccatcggtggagaacgccgcacgtaacgattttggtcaatgtgtcagtgatattgtggataccttaatcaatatcattcccttgccgccattgataagaagtacggttagcaccgttaaaaacagtatcgtatccgtcgctaaatccctgtggagcctgttcttttaa

SEQ ID NO: 290727 - DNA, 348 bp, Morganella morganii
atgtctaaaaaaactgaagtaaaatacagagtaatattgacttttgatgttgacgtaaaaggtgatacaggggtttataaggaaatatctgaattactcgaagagaagggtcttgaacagcaacttgatggaaaatgtctcccttctaacatttatacaggagtaaggggagctaaggttgaatatgaaggagaatctctgactcctggtgatatagaaaagagtggagatacaataggctcagcgtactggaatatggtcaacgagtttttcgaaaaaaagaaattaaaacattcaatttttgttgcaacagctaggtcggctacaacgtcgataaaacataaataa

SEQ ID NO: 290728 - DNA, 438 bp, Morganella morganii
atggcgaacaaaacaaaacgtgtgattcatgcgggcggtatctttcctaacccgctgttaaatcgtgaaggcgaggcgttagcagacattaagcccggcacggtaggctttttcgatggcggcaagttcaaagcctcagtagatggtaaagagtcggcaattctgtacgtggcaaacatggattatctgcgctgcaaaggtgtagatgacgacctgaaggccggtgattgggtggttgcaatccagccattgcagggattattcctgaacgtccgcgctgctgccggcacgtacaaaaaaggccagccggtgattgttgccaacggacagatcacagcggccaccgctgcggaaggtgaagttgtattcgcctatgtcgaagaagattcagcactgaccgctaaggcgggtgagctggttcgcgttgtgttcaagtaa

SEQ ID NO: 290729 - DNA, 1077 bp, Morganella morganii; identical to SEQ ID NO: 278000

SEQ ID NO: 290730 - DNA, 399 bp, Morganella morganii
atgagcagaatagccccttacccactgcgtatgccgccagagatgcgagaaaggttagagatgcaagcagaaaacaatcacagaagcttgcaacaggaaattatttatcagttagataccatgcatcatatagatgcagtgctagatagtgcctcgctcaagggtgatagctacagtagggtgatgatcttattaagagaatataaactcgcctctcaccttgcgggcgaggttgaaagactgaaacaccaactgtctttacttagcaatagcgtaacaacgccggaatctgacaagttcatagaaattgagacccaagctaacataattaaagaatctgtagataagatactaaaacagatacctttcagggtgtctggaatttcgaaaaagaaataa

SEQ ID NO: 290731 - DNA, 183 bp, Morganella morganii
atgatagttgatgatgatcatcagcaccttatagcgttcacgcctaacgtcatttctgaacatgtggccttagaggaagttatttattataaaatgagctgcaataagtgtggtattgagtacaacattaatgctaaaaacatgaatgatattattaaggcggggcgtgataatggggagtaa

SEQ ID NO: 290732 - DNA, 183 bp, Morganella morganii
atgatttacggtatgtacatcatggacggtcttaacgaaggacgggcggagttcttttcagacggcaaagccaaacggatagagttcagtatttccctggtgaaagccagcgaggatctgcgcgaacggctggctgagatggagttcagcgatttgatggatatgttgccggtgaagctgtga

SEQ ID NO: 290733 - DNA, 237 bp, Morganella morganii
atgccgtggaaacagaaggtgtcatcaggctttggcgatcaagactgcgtctttgccggtcatcctattgataagacgaatgcgcagcaagcgattgctgatgctaaagcagctggcgcaagttttgaagattttgagaaagaaatggtttggcatatttataagaaagttacctcagctgaaatgcttaagggccacatagataaacagcttgccactgctaaaaatatgtggtga

SEQ ID NO: 290734 - DNA, 1026 bp, Morganella morganii
atggtcgattttatggataagcgatatcaggtttttgttagttccacatttacagatttacaagaagaacgtcaaaatgtcatgcagacattaatggaaatggattgtataccagctggtatggaactcttccctgccgctgatgaagaacaatgggagtttataaaaaaaataatcaatgactgtgattattacttacttattattggtggtcgctatggctctttaactaatgacggtattagttatacagaaaaagagttcgattatgctgtttcacaaggaataaaagtcgttgctctaattcacgaggatcctgaaaaccttgttgtcagtaaatctgaaatcgacccgataaaaatagaaaaattaaataaatttaaagaaaaagtaaaaacgggtcggatggtgaaattttggaaaacaacttcagaattatcaggcatgatggccttaagcctgaataaaactatgacaatgtatcctggcattgggtgggtcagagcaaatcaggtcgcaagcaatgaattactaacagagattaatcaactcagaaaagaaaatgaaaaattaaaagatgagcttcagaaacaaagtaatgaaataattaatacaatagataacattgccagtcttgatgataaattcattcttcatggcacttatgattatgatttgatcgaccctcacgttggctatattgaaacacaaacaaaaaaatttaaatatgaaatatcgtggcgtgagattttcactatcatttccgcttacatattaactgaacaatatagcagcaatgtgaataatgagatagcaaagcgaatagttacatcaatagaagaagaatcaaaatttgaacaaataaatgattatgatttcgaaagcataactgttcagtttttggcttatgaattaattcaaataacctctgatgaaaatggcttatcaaaatggcatttatctgacaagggtaaatcattgatgctgcaattacgaacgcagaaaagtattagtaatgaatcttaa

SEQ ID NO: 290735 - DNA, 282 bp, Morganella morganii
atgctggaagggatactgctcagtgaatgtgtgcgtcttaaccagcactcctttgcgaacaaattaatcagtttatttcaacaatttaatgatccggaaattcgcccgaaattggtctggttatgttggtatgatttgctgttaggggcaccgttagacgattggaaccatacacttaaattgaaatccaaagagcaacttgtggaatggttgattgataggcaagccgaaaattggggattaacagctattatggatgaatatgtattgttcagccgataa

SEQ ID NO: 290736 - DNA, 273 bp, Morganella morganii
  misc_feature (261)..(270): n is a, c, g, or t
atgaaaaagctgcccgctcgttatgaagagttattgagttattatcaacattggttaaatgggtatacgaagttgtccatttgccaggggatgtgtcattcactcattcaaaacagtcactatttgatgatgtcgtacattcgtttttcgagtcatgaagcctgccaggtggcggttattccagcttgtctctatcgactggtctatggcaaagcctaccctgataagctcaccatcaccataatattttgtatgttcttnnnnnnnnnntaa

SEQ ID NO: 290737 - DNA, 210 bp, Morganella morganii
atgactactcaagctattcccttactagatgaccaattcgttgatatgaaatttataactcgcctaaccggcttgacggataaatggttttacaaattaatccaagagggggagtttcccaaacccatcaaactggggcgtagctctcgctggttaaagagtgaagtagagcaatggctgcaagcgcgtcttgtggcttctcggggttaa

SEQ ID NO: 290738 - DNA, 588 bp, Morganella morganii
atgtctagttacacctacaatgagcattacattcaaaagataaaccacactatccgtaaagcacttttaattcacaatcgtgttactgctattcgggttgacttgcgtttcccatctgaaaatatatttcactttaacgattcgagggtcatcactcgattctttgaatcgttaaaagccaaaataaatgctgacctaaaacgtaagaataaaatatgggagcgtaaccacatatgcccgttgtcttatgtctgggtcagagagttcggtcagataaataataaaaaacactatcatgttcttttgctattaaataaagatgtttattgggggttgggtgactttgttaaaactgaagggacgctctatgcattaatacagcaagcatggtgtagtgctattggtgtgaactaccctgcggagcgttatttaattcatattccagataacgccataacgtggctagataataataaacccaatattgaaagcacgatattcgaattaaaccagcgctgtcgttacttagccaaagaacatacaaaatattatggtgatggtgagcgttcttttggatgtagtcgctaa

SEQ ID NO: 290739 - DNA, 135 bp, Morganella morganii
atgatgctggttatctttattaaaataatactataccaacacgataaagcctttctttatcttatcatcaatgcccgtgacagcgcgtttttgaaccacaatgagcagcttctttttgaggagagtcaactctga

SEQ ID NO: 290740 - DNA, 834 bp, Morganella morganii
atgataaatataaatgtcaatgataattatttggagtgcagacaatattatgctgttctgttctatatgttttcagaaaaaacactgtcgcctaatgagctttataaaatgatatctgaggcaaagaataagaatgtgtgtacattacttagtgagttaaatcagcatgtcgggaatagatttaaaaatgttgattattatctcagaacgatagagaaaaagattatcccaatagaacaattatcttttttaacggatgaaagaatatcatttgttatcttaaactttctcatgaagtcgtataataaacaccttatagaaaatgattacccatcaattatgactggcgtgtataattactctcccttgaacttgaaccctatcatgggcaggaatatcccttttcattatattgtttgttttttggactttttagttttgtttataaaccctaaagattttaatgagacagtcttttatatgaaagataaagcttcctctgtttctaaagaataccccgatccttttttatttttacccagaaagaatgaagcattaaaatggatagccgagaggatgatccgcgcaaatattgctgttgatgatgatgttaatgttcttattcaaaatgaaaaatggaaattgattatttcctgttttgattattgggctattatttcaagcgtagaagcggtcaagctttttctatctcaaacaagaaaagcttggagccaaaaaaaatatcgtgatggtgttaaagataaggctgtactgaatacgtatatttccaaatcatcaatggtaaaattaaaaaaggatcggggtattctttag

SEQ ID NO: 290741 - DNA, 429 bp, Morganella morganii
  misc_feature (413)..(422): n is a, c, g, or t
atgaaaataatcgataaccttaacaacctattaggtgacgagcttcaacagacgctgacaccgaatacaaagttaaagattgctgcgtcttgcttttctatttatgcgtatgaggctctcaaaaaggagttagcgaagatagactcacttgagttcatcttcacatcacctacttttgtcgcagatgaagttaccgataaattcaaaaaagaaaaacgagagttctttatccccaaagctgggcgtgaacgcagcctttacggaactgactttgaaatacagttaaagaataagctcactcaaaaagcgatcgctaaagagtgtgcaaactggatcagaaagaaagcgacattcaaatcaaacaaaactgattctccaatgcagtcgtttgttgtgacggaagcatctagacnnnnnnnnnncatctag

SEQ ID NO: 290742 - DNA, 936 bp, Morganella morganii
atgacaaatgatgggctgaaacaaacggtaggggcgaagtcagataggctttcggagatagcacagttgccacaagcaatccgggatcgcattgctcacatcgatttcaccttattgtttaagggagaagcggtacgggcagatttagtcgatcgcttcagcatagctgctgcacaagcaacgaaagacttcactctatacagagtgcttgcaccaggtaacattgagtatgaccaaaagctcaagctgcataagcgaggtgaagcatttgagcccttgttcgactatgatgtcgtgagaacattggcgacgattagccaagggtacggcgatggctttactggaaaggtaaaaccaccgctggcttgtgaagcgccttatcaccttaacaaaccgaatctatcgatagtggcgaaagtcaccgaagccatacacaaaggcaaagccttgcgtatcacctatgtatcgttatcgagtggtgaaacaacgcgtgaaattgtaccgcatacgctggtggacaatggcctgcgttggcatgttcgtggttttgaccgcaagcatagtgagttccgtgactttgtgctgacccgcattaaagcagcggttgtgattgaggattcgacgttgtctgaaacggagctcaaaacccaagaccggcaatggaatcgctttgtagagctagagttagtgccgcatcctcgaatcgagcacagcgaagcgatagagttggactatggcatgaaaggtggcgttttaaagattgagattagagcggcaacggcaggttatttactcagacaatggaatgtggattgttctcccaacgccacactaaaagatggtggagctcaattgcatttaaagaacagagcaacactttatggagttaaaaacatcatgctagctccagggattgaaaaagaacttggtaactaa

SEQ ID NO: 290743 - DNA, 1446 bp, Morganella morganii
atggaagtaaacagagacaggttgtcattggcggtgaataacgctatcagcgcggtagcaagagccagaatgacatacgcaaccggcggtatagaaaccggaaacacaaagcgcccgcgcatctggcgtgagttcggttatccggaagtgctgacgtttaatgacttttacgccgcctatgaccgtaacgctttgggcggtgcagcggtagaccggtatatctccggctgctggattgatgttcctgaaatattcgaaggtgacgaagaagcagaccaggatgggtctactgattgggataacaagctgaacaagttgcttaaatcgcactgggagcaaatcaaagaggcagacaagcgcaatctggttggccggtattcaggtctgattattcagttgcgtgatggtcgaaaatgggatgaaccggtagacagagccgtagtttcccgcctgaaagacaaggccatcattcgcatgatccccgcgtgggaagagcagcttgatgtgaggcgctggaacgaagaccaaaccagcgaggactacggctatccggcactgtactcatttacagagttgcatgtcggtaaggaatcggatggctttcccggacggattattgatatccaccctgatcgcgtaatcatccttgctgaaggggcggcagacgggaaattaacatccggaaccccgttactgcggaaaggctacaacaaactccttgatgcggaaaaggtatcaggcggcagcgctgagggattcctgaaaaacgccagtcgtcagctcaactatgcgttcagcaaagaaaccgacttccagcgcctggctgaggcattaggcaccaatatggacggccttgccgatgcacttgatgagcaggttcgcagactaaacgagagcattgacgcatcagtgatgatgcaggaaggaacggcaagtgtgctttccgttgcaccggctgaccctgaaccgacatggcgtaccgcactggctgaattcgccgcctcaatcaatatgccggttaaggtgctgattggtcagattaccggtgaacgggcatcaacagaggacatgaaggattgggcgaaaacgtgcatgtcacggcgcacaggatttctgaaatcagtgattgagtccgtggtatcacgattctgggcgctcggcattatcgagccaagagaggaaatcaccgtcagttggtctgatttactggcaccgagtaaggctgagaaaatcgactcgatgaacaaagctgccgatgtcgctgttaaaacacagcaggcattcggtcattcggtattccaggagaacgaaatcagggcgttgggggaatatccgaccctgaccgagtttgaaagtattgaaccaccggaaaccgtacccaaaggagacccgttaactgatgataaagaaccagagaacagggtcgccgataataccgggaaataa

SEQ ID NO: 290744 - DNA, 789 bp, Morganella morganii
gtgaaagcggtgcgcgataaaccggaactgacaacactgtacggtctggtgcaggcttcaacgttcgacaatgaaaagaatctgccggcggattacattccgtcactgatggactcttatccgcctgagttaatcaaagcatatctgcgcggacaattcacaaacctgaccagcggcaccatctatcacacctttgaccgcaagctgaataacagcgaggaagaagagcagccaggcgaaccgctgtatatcggaatggactttaacgttggcaaaatggcaggtgtggttcatgtactgcgccttggattgcctcacgcagtaacagaaatcatcaacgcctacgatacgccggatatgatccgcattatcaaagagcggttctggctgtatgcagatggtgattatcaaaaggtacgtgaaatttacatctaccctgatgcgtccggggaatccagaaaatccaataacgccagtgcaacagatctggcacagcttcggcaagccggatttaacgtggtcgtcaatgcgtcaaacccaccggttaaagacagaattaactcaatgaatgccatgttctgtaatgcaaatggcgaccggcggtacaaggtgaatgttaaacgttgtccggtctacacagagtctcttgagcaacaggtatgggctccgaatggagagcctgataaatctgctgataacgatcaccccaacgatgcaggcggttattacatagtgaagcagttcccgatagccatcagaaatactggcatgctggttcgtaaacgttaa

SEQ ID NO: 290745 - DNA, 393 bp, Morganella morganii
atgacgacagacgaatttacagacaggatgatcggggtgccgtgggttaaccgggcatgttcgtttactgcgtgtgactgctgggggctggtaacgctctattaccggcacgttgttggtgctgaaattcatcacgacagcggttatgaatctgacagtgattttatgacctgttatcaaaatgaggtgaatttctggaagccggaagaacatccggtaagtggcgggatatttgtggcctatgacggttcggtgccggttcatgtcggcgttgtgctcggcggaatggttctgcacagccgtggtgataacggacacgtccgtctggacagattgctgaccattcagcggatttacagcaaagtggagtttatgacttatgccggtaattga

SEQ ID NO: 290746 - DNA, 393 bp, Morganella morganii
atgacgacagacgaatttacagacaggatgatcgggataccgtgggttaaccgggcgtgttcatttactgcgtgtgactgctggggcctggtaacgctctattaccggtacgttgtcggtgctgaaattcatcacgacagcggttatgaatcagacagtgattttatgacctgttatcaaaatgaggtaaatttctggaagccggaagagcatccggtaagtggcgggatatttgtggcctacgacggttcggtaccggttcatgtcggcattgtgcttggcgggatggttctgcacagccgcggcgataacgggcatgtccgcctggacagattgctgaccattcagcggatatacagcaaagtggagtttatgacttatgccggtaattga

SEQ ID NO: 290747 - DNA, 471 bp, Morganella morganii
atgccgacattgcgtgagttccgcgcacaacgaccaaaccgaatcctgtacgaaacactccaactatcacacccatcgttcggcgacatttacctgatcactcaccagattttcccgaaggcactcggcggtattgaatacctgccgtgtaactttgagatgtctgagagtcagcaaagtaaaacgccgatcatcgacgcaagcgtaaaattcagccgtgtagcgcatgagtttaagcagaagctgaaagcatggcggtcgtattcacggatggtgccggtcgaggtgacttaccggctgtttgatgaagcggacaaaggtacggcaatcgtgcgctggaagctgtttgcaaaggatgtatcactggacgcggaagcggtttcaatgacactttcgatgaccaatccgctgaacaagaatgtcggccgcatttatgagccgcaggagtggccggggctggaggccgtatga

SEQ ID NO: 290748 - DNA, 237 bp, Morganella morganii
atgaaaatagacatcggcggcagcggattacaggagcaggaattacatttcttgccatatcctgtgcagaccagcgttaacggcgcgtcagtcacatggaccggtcaggttatctgtaaaaatcttcataacgatgatgatgaattcggtgatgtgattattgagttcccgccgccgttcggcagctggctggatgtcattgtcactgaaacactgccacggtgtaaggagggataa

SEQ ID NO: 290749 - DNA, 366 bp, Morganella morganii
gtggaacatacgattaaagtttataaaaactcaccggaacatggtgattacctcaaagcacgttttccagacggctcacgcagtaacagtacgtttgaatatgcgggtcaccggtggggttatcggtacacatcatttgacgataaaggtgattatgacctgctctatcgctttgatgatgagacagaagtgcaatccttgacagttaatgatgcaacgctgcgggattattttgcagcaaaggctatgcgggggctgctttcaaacgaccaatgtaagccctttggtatgagcgctagcgcaactgatattgccaagaaatcataccttatggcagatgaaatgctcagagcaagggagaaatag

SEQ ID NO: 290750 - DNA, 624 bp, Morganella morganii
ttgttttcacagctggatgccgaattatcacggctgctgtcaacgacaagcccggcataccgccgccggttgtcggcaaaactggcaaaagctatccgggcagaccagcagaaacggatccgcagtcagcaaaatgcggacggctcaccttaccaggcaagaaaaacccgggtactgcggtcaaagcagggtgttgaatttctgtataagggcgaagtccgccgtctgcggggctggcgtaacaccaaagggcgcaacggccggatgattaccggctatgacgaagagcgcggcgcggtacggtcattcatgcggaaagatattgaacgctttctgtccatcgacctgtcagaaacccgccgcagcacaaagcgcggtgatccgatgtttaagcggctgcgcactgcccggtttttacgggcacaggcttttccggatgccgctgttgtcgggtttcagggtaaagccgccgccattgcccggcagcatcagtacggcctcaccggtgccgttaacgagctggcgcagacacagtacccgaaacgcgaattactcggcctgtcgcagtacgaacgcgccgggctgctggaacttatttatcaggatttggtgaactcacgatga

SEQ ID NO: 290751 - DNA, 630 bp, Morganella morganii
atgacactgaatgaactggaacgccttatttccaacctgttacgcgttggtgtggttgaagccgtggacactgaaaaaatggtctgccgggtcagaaccggggacattctcactgactggatccgctggggcactgaccgtgccggagcggggctgtcatggtgggcgccggttgccggtgagcaggtcattatcggcgctgtgaatggtgaattaaccacggcctttgtgctgtgttcgttgtacagcgacaaaaacagcgcaccgagccacagtgtgcaggctatgcacaaaacattcagtgacggtgctgtgatcgaatacgagccggaaaccggtgaattaacggtgaccggcattcagaaagccacagtgaacgccgcgcaaaaaattgatgccaccgccccggaagtgacagtgacggccagcacgcagattaattttaataccccgaaagtggtgtgctcagacaacctgacgtgcgcgaccctgaatgtggaaaaaggcggtgaaatgaccggtaactttaatcataccggcggcagtattaactctaacggtgtcacgctgcatacccataaacacggcggggtagagcggggcaacagcaatacgggcacaccggcatga

SEQ ID NO: 290752 - DNA, 786 bp, Morganella morganii
atgagagaactactttcacatccaacaaaaaatgagtttacacaaggcagtatttttgaaggtttaactgttaattcttactccttatatactaacggaattattattacagcacggtgtgatatcgcaaatggtaaggctagaaatatactttgcttaccaatttataaagcaagtgattggctcaatagtcaaggtaatgaaataatctatagaagagttgaaagtaaacttttacagaaaatagaaattgaattgaaaaagtttcaactttcatcagaactcatacctacgtaccctattgagagcataatagcaataatagataaggataataaagtacatcataaagaagatataaaaaaaatgttgtatatgtataaaaataagaattgcgatcataaactagattttgtcagtaacgaaagaaaaaatcttgtaagtgaaataataagaaatacggaagcatcgacttattttattgaacaaattgattttgataatgttctagaaccgtatatcatcgatttaactgaaccaatttcgataccttttgaagtagcgaagcgacttttaagtggaataaaaaaagaaagaaatagagatgactcggttaaccaatatcttactttatataaagacgaaatatcatatatttctttgttgaaatctccatatattgaacatgttcttcaaaagttttccagttattatagtcgaattgggacagatgatatcagtaaagaagccgcacttatcataaaggaacagttaaatgaaatgtga

SEQ ID NO: 290753 - DNA, 192 bp, Morganella morganii
atggttaacccgcataacggcaatgacgcggaactgagccctgaagcggccggtatagcggtatgcctcatcacttacagtctctggtcatttaaaaccgaaagtccggagatggtggagtatttttatcagttacgggactacgccctgcagcatgaggagtgtaccgctattttccgtcttatcgattaa

SEQ ID NO: 290754 - DNA, 183 bp, Morganella morganii
atgaacatttcggaagccatcaaccaatctgagctaatactcaagcatgagattttatacgaaatttgcgatataatttgtggctgtaaagcaattatcacagccatattttttgatcgtttcttaatcaaaattcaatctgggggcattaatgggggcattgtcatttatcaaacgcaataa

SEQ ID NO: 290755 - DNA, 330 bp, Morganella morganii
atgcgtcactacaaacgcgcggaaaccgtggataaaacccgcgatatcagtgcgctggaagaagtgggtctgacagaagcccaggcacaggaaatgtaccgctatctggctatcgccaactatgaagatcgctttgtgatcccgtcatcacaccgtgaactggcccgcgaggcattccctgagcgcaacggctgcggattcagcttcggtgacggctgccacggcagcgataccaaatttaacctgtttaacagccgccgtatcgatgccattgatatcacgcagaaaacaccggcagatgcgccaatctcagagaggcattcatcatga

SEQ ID NO: 290756 - DNA, 357 bp, Morganella morganii
atgaaaacttttgaatttttacataatggcgatagcaaggttattgagatatataaagatgctcacaaaatgtgggataaagtatttaagaaagaatgggacataactagtttatctaacgatcttgctccacttcaattaaaatttgaacaagctctatcatcttacggtcttgacagatgggaaggccaagaaatattcgttatttcagggttaactttttttgaaaatgaaattaattcaaaaaacaataaatcttacaaaatcagccaagcatttgagttaagttggtgcagtttagaagttaaaggattgtctcagagattttcaaaagctttgtatatagggagttactga

SEQ ID NO: 290757 - DNA, 780 bp, Morganella morganii
atgagctatcctaacccttacgattttcaacagtatgttgcatggcatcagcagcatattgaaccaggtattgatctaattgatacaatcacctcgacgttagacacatttaaacaaggcaaagatagactaagcaaacttgcagaattattaaatattctcaacacgcttttactacgcgcaaaacaaaccacaggtgaagatatatcattatacaaatacgatatcctcttaagctctcaattgtctccagatagatataatgaaatattcaaatcaataccatctatagttgacaaactgtggcgaaaaaacaaagacaccaccgagtacattacaactgataatttaaccagcaaaattaaagaccttgctagaagttcggttatagtaagcactcatagctatgcaaatgactttagtcggatattacaagactggagaaacaaactccaaataaatggcttcgattcaaataactatcaagatatagaagaaatattagtggagcaggaagcaaaaatggcaagtggctattttgcgtatcatgtggatgtaatttacatcgacgggtttcatgttgagattcaaatttactcacagttaaatgaaatatggagaaatttatctcataagctatatgaaaagactcgattacagcagagcgtagaacatggacacggaacaagtgcttcgagactcgtctcactaggacatcttcttcatttggctgaatgtgaggccgagcgacttcaagcagacttaggtggggacaattga

SEQ ID NO: 290758 - DNA, 249 bp, Morganella morganii
atgggtgatgacgctaaagatgaaaaattatccaagcgaatcaccatgctattctcgaagggtaaaataactgaggacatgaaagactgggctcatattgtgaggattgattccaacggcgctgtccattctgatgaagaattcacaaaagaagaagctgaacaaatattagggtttaccgaagtatttctaatgtactcattcaccctgccagcgatgattgaaaaacgccgatctgactctgaataa

SEQ ID NO: 290759 - DNA, 1068 bp, Morganella morganii
gtgtataaagagacattacgtcaactagaaaaattcaaattatatatcaatgaatcaaagaatacaaaatacacagtcccattcattacgggtgtaactatcgcaaaacaagaatatagaaaattaatagaaagtttattttcaaaatttggatatattgatgataatgaaataaagaaagggataaaatcccctatgcatagatttcatcaattagccaatcaattaataacagatatcaaatgcatcgtatataaaaacaaaatatcatattcagctataacaggatattattttacacttgctagaaataaggtatgcgaaatccacgagcatattgacgactataaagatgaccctatccaatctgaaaaaataactaattttctaattataataattgaattatcattttttattcactctatggattttagagtgcgaagtacttatttaatatcacagataattatactaataaataaaatatcagaaaacctaggtgttcaaagttctgaattcatcaaaaaaaagatatacgatgaagcttacttatcaatacgaactgccatacaaaaaaacaacataagagatatcgaatgtttaaatttaattatttcaattcgagatatagatattaattatcagctaaaccaagaaaccatagaaaaaataatagggttagacagagacaactttgcccctaattattttagtttaatgacgtgtttgttttatatacaaaacaaaaaagaatacttatctactagaacaaaaatagttaatcacatttgtaccaaactaagtgataattacttaagtatttataacgactccgaacttgcacatattttttttgattctataagatgtccttacattacaagaaaaatgaaaacagatattgtacaaatagctttaaaaaacactatacgtggtaccgaagtcgcttcaactatagaatttatagaatctcaaaactggttcatagactgggattgttcaacagctgactcaatcgagcggttattaatgaaaaaggagttgaaagcgccatacgataattga

SEQ ID NO: 290760 - DNA, 1560 bp, Morganella morganii
atgaatttcattgaaaaaataaaaataaaaaacttcaaaaggtttgaagagcttgaagttatctttgataaagatatgaatttaataataggtgataatgaatcaggtaaaagtacaattcttcaagcaatagatttagtctgtaatggcagcaaaaacaagatagaaacattaggtttagataatttatttaacaaaaatataatagataaatttttacatggaagcaaagaaatagcatcacttccaaatatgcaaatagaattatacctttcagagcaatcagatcctgacttatgcggaaaaaacaattcagaaaaaagagattgctgtggattatcgttaatatgccaacccaatgaggatttaattaatttaataacattggtcttagacaacgatgataatttcccttttgaattttatgacataagatttagaacatttgctgactctgcatataacaattataaaaagtacatacgacacttatttattgatagctcacaaataaataatgatagcgctacaagacattatataaaaaccatatatgaatcaactgtaagtacggaacatagactatcacacaggaatgaatatagaaattacaaaataaagttcagagaatcaatattaaaaaacatcaacgaaaaactggaaaactataaatttgatatacgctcagattcaaggtcaaactttgacacagatataacaataacagaggataacattccaattgaacatagaggtaagggacgacaaagtattataaagactgagtttgcattaagtaaatatgaaagtggtgatgctttagatattttattattagaggagcctgaaaatcatctcagccatctgaacatgaagaatttaattgaaaaaataaaatcatcatcaaataaacaaatgttcattgctacacatagcagcctaataagtactagattaaacttaagtaaatcaatattgctaaacagcacgtcaaaaaaaacattatccttaaaagaattacccaagctaacagcgagtttttttataaaagctccagataacaacatattggaattcatattatccagcagagtcattttagttgagggtgatgctgaatttattcttatagattcactttatagaaatagtactggtaagactttagaggataatcacatacatattatttccgttggtggactgagttttaaaagataccttgacattgcaaaaatattaaatatcaaagttgctgtgataagagataatgataaggactatcaaaaaaactgtattgataattatgtcgactataagaataaaaatataaaggtattctctgataacgacaatgaaaactatacatttgaagtatgcatatacaatgaaaacaaaaaattatgtgatgatatttgcgctaaatccagaagtaaaaaagacaccttaaattacatgctggataacaaagctgaattcgcattccaactaattattgctgaaaaagatttaaccacaccaaaatatataaaggaagcattcgaatggataagcaagtag

SEQ ID NO: 290761 - DNA, 1050 bp, Morganella morganii
atggataagcaagtagtttttgctgtggccggttcagggaaaacccaaatgatcacagacaaaattgatttagactcaaagtatttaattttaacatacactatccctaatgctaaaaacatacaaaataggataataaaaaaactaaaaatgatacctaaaggtgtaagaatatacacatactttagcttcctatattcattttgttataaaccattagttcaatgcgaacaatcattaaaaggtattaattggagcaataacgtaagtcaactaactagaggtaaaaaaaaggatagcttagattattatgtagataaacatcaaaaagtctatgcaaatagattctcgaaactattaatagaagctaaattcattcctgacatagcatctagaatagagaagtattttgatttattatttatagatgaagtgcaagactttgctgccaatgatttcaatttcatttgtgaactttctaaaaaattaatgatagaacaaaggtatgttggtgacttctatcagcacacatatgacacaagcagtgatggaaatactaacaaaacactccatgacgactatcaaaaatataaaaataaatttataaaagccggactaaaaattgatacaacttcattaatagcaagctggcgatgcagtaaatctatttgcagatttgtaacagaaaatctaaaaattaacatagaatcacatagagaggatgaaactgaaataaaattcatagatgaaatagaacaagctattgagatatacaaaaatcagagcattgtaaaactattctacaacaacagcataaaatttaaaggaaacacagaaaattggggaaaatctaagggattagaccattacatggacgtatgtgttgttttaaaccctaatacactaaaacattatttggctaaaaatttgcatgaactaccagctgaaacaagaaacaaattatatgttgcctgcaccagagccaaaggaaatctctatttcatagacaataagctattactgaaagcatataattcattgtatagatag

SEQ ID NO: 290762 - DNA, 873 bp, Morganella morganii
atgaaaaaaaacacaggaaaagaatatgaggagtttgtcggggctatccagcaaagtttgataaatgcggaagggatgtcacatttaaaaaatataaaggtggaagttaacaagaaaataaaagacagaaatggaattgaaagacagtttgatgtctattgggagtttaatttaggtggttataattacaggactgtgattgaatgcaaagactactcatcgacagtgactattgacaaaattgatgcttttattggtaaaacacaagatataccagggcttaggctaatttatgctacaaaaacaggctaccaaagcggaacacaaaaaaaagcagaacagcataaaatagatctccttattataagagaaggagttgatgaggactggactgcgcctgatgggacaccattaataaaaatcatcaatttaaatatcgttgctatatcaccaccaagaattacttcattttctcctattatcgaatcatcttggttagaatctcaaccggggcttaccaccgaagaaataagcaataaattcagtagattacttaataatgaagttttcatatcaaatgaagtgtctggtattagattttcactttttgatttagctaactcactgactgataaagtacctgacataaagtatggcaatggtacatatagtgaggaactaaatgattcatatctagaatccgctaataaaaaactcagaataaagcttaaagggtacaagttaagctatgaatactgcgagccagaaggagtgacatcagtaatagattattccgaagagcttttaggtatcgttcagaactactcctcaggagctaaacaaatgattttcaaagatggacgcgttaagtga

SEQ ID NO: 290763 - DNA, 2814 bp, Morganella morganii
atgagcagaaacctccgtttacaggtcgtgttaaatgccgtcgataaattaacccggccgttccgcagtgcgcaggaatccaacaaacgactggcgggcgctgttcgccagtcccgcgatgcactgaaagacctgaaccgtcaggccggacaaattgacggcttccgtaaaacaaaacagcaactcaccgaaacacagcaggcttatcaggcggctacacaacgcgccgccgccctcgcccgcgaaatgaacgcttccggcaatccgacccggcagcaggccgaagcactgaaacgcgcgcagcgtgaagccggtcaactgaaaaaccggtttgaacaactccagcgatccacccagcaacagcgcacggccttgcaggccagcggcatctcgacaacccaactcggacaggcacagcgccgcctgaacagcgacatagcccgcaccacccagcaactgcaacggcaggaacagcagttgcgccgcagcgccgaacaggaacgccggatggcagcggccaaaggcagctatcagaaaacaatggatgtccggaataaaatggccggaaccggcgcggcagcgatggcgaccggcggtgcggcgttatatgccgggaagaaatttatggcgccgggctatgagtttgaggtcgggatgtcaaaggtgcaggcgctgacccggcttgataagaactcagaagagtataaagcactgcgcgaacaggcgcggcagctgggggcgaccactgcatttacagcaaacgaagttgcgcaggggcaatcgttctatgctatggccggatttaaaccggaacagatacagaacgccatgaaaggcaccctgtcgatgtcccttgctggtgatatcgacctcgccactacagccgatatcggatccaatatcctgaccgggttcaaactgaactctgacgaaatgaaccgcgtcagtgatacgctcgttgccacctttacccggtcaaacaccaacctgaatatgctgggcgacacgatgaaatatgtcgcgccggtcgcgtccggtctgggcgttgatctggaaaccgccgccgttgccgccggtaagctgggtgatgccggtattcagggcagcatggccgggaccagtctgcgatctattctcggccgtctggcggaaccgccgaaacaggccgctgatgcactggaagaactcggcatcaaaacccgggacgctaaaggcaacctgcgggaattgccggaaatcctcaccgaactggataaaaaaacaaagaaaatgggtactgcgcagcgtgcggggtacttcaagcacatcgccggagaagaggcgttctccgccctgtcggtactgacagaacaggccggtaaaggcgaactgcaaaagatgatcgccgaagttaaagcggccaaaggtgaggcgcagaaagtggccgataccatgaccgataaccttgacggcgatttaaaaaacctgacctcagcatgggaagatgtcggtatccagatattcggcggtgttgacagcccgctgcgggatatcgcgaaatccatcactgatattatcagtaaggtcggggactgggcgaaacgcaatccggagctggcgaacacgctgacaaaaattgccctggcgctgggcgtgatcctcgccgtgggcggcgcgattgttctgatgctggccgcgatgctcggcccggtcgcaatgctgaaactgagcctgtcagtgctgggtatcaagggggccggtgcttttggcctgctggcgaaaggattaaaagctgtcggactggccttattcggtatcggaaaagccctgctgacgaacccgttatttcttgcggcagcggcgattgccgccatagcctacgcaatatacaaaaactgggacactattgtcgctttctttaaaaaagtatgggcggaagtggttcgtatcttttcctctgcgtgggactcaatatccgcttattacagcggtatgtggacaagcatcagtaacgcctgttctgccgcatggaactggatcaccaatattgtcaccggggcatgggcggcgattaaaaactttttcctgcaatattctctgccggggattatttaccgcaactgggacggtataaaaaaatacatgtctgagctgtgggaaaccgtgaaaaccaccatcaaaaccaagtgggatcaaatcatcacggatattcagaacctcccggcaactatgaagcaggccgcatctgacatgatagacagcgtcattaacggcattaacgagaaatgggaagacctgaagaataaatttgccgaaataaagcaaatggcaaaagacgctcttacgccggactggctgaaggaagcgaaacaggatccgaagttcgtggcggcagtagaggccacaaaacagagcacaacaaccggcggcatccgcaatgccaactggacgataccggataagaaatttgccggggcctatgattccggcgggcatattccgcgcggccagtggggtattgtcggtgagaacgggccggaagtagtggacggcccggcaaatgtgaccggccggaaaaatactgcagcactggcaatgctggcactgagtacgctgtcccagccggtagccgcagcaccggcacaaaccgccggcggttctgtcagcagcgcgtattcatcacagcagaacgccgcgccgatcatcaacatctacccgacaccggcgcattccgcacaggatatcgccagcgaagttgcccgccagctggacgcccacgcccgccgacagcaggccagccgccgcagcgggtacagtgacacagaggagttttaa

SEQ ID NO: 290764 - DNA, 603 bp, Morganella morganii
atgaccattacagagttgttacagaacttgcatcgtgatacaaaaattgttgcccatgctcgttttaataaaagtaaaagattagcacgacaagcgtggtggtcgcttttctctatatcatttatgtctatttctttaatattaattactttatacgaaagaataacaaccgccccccctcctatagatttatttgatggatttcctaactggtttattagcatttctttatccattattatattagctatttcaatcacaatatcctcagccaaactagatatgaagagtaagagacttcatgactcagcaataagaataaataaaatatccagggaaattgaattaaatacatgcaatcaaagtccaactccagatgaatataaaaaattacttaaaaaatataacaacataattcaaaacaatacaattaatcatgatgaaatggattttttaattgcaaaataccaagtaaataaaaaatacgaatgtctttccttctacaaaaaacacataagacaatctatatcattaattccgtactatataatctcattactttcattaattataattttttcaattataaaaaatcttatgtga

SEQ ID NO: 290765 - DNA, 324 bp, Morganella morganii; identical to SEQ ID NO: 278079

SEQ ID NO: 290766 - DNA, 156 bp, Morganella morganii
atgcgtgatgatgagataaatcaactgattaacgggctgctgaaacacagtgaaccgtacagacagcagaaactgaaacgagctgtaaagcctgcggtaaagcgcacgtcacagcgtgaccgggagataaccgagtgcttccggaaccgttcgtga

SEQ ID NO: 290767 - DNA, 447 bp, Morganella morganii
atgccgtggcaacctttaaaacgatgcagttatccgggctgtaataagcgagtgaagtcaggccgctgtgatgaacacagacgggaagcccgtcagcagcaggacagcagacgcggctcaagacgtgagcgtggttataccgttgcatgggataagtaccggctgaactatctgaagctgaatccgctgtgtgttcattgtctcagtctgggagtgtacaccccggcaaagatagttgatcacatcatcccgattgacggcaacagtgatgttctgttctggccgaaatggaatcatcagccgttatgtcatgcctgccataacaccaaaacattcaggcacgacccgctcaccaaacagaagcgcaggaacggagactaccgggagcaggaagaaaaggcggaacaccgcagcgactggatacatgagtataactgcaatgcgtga

SEQ ID NO: 290768 - DNA, 843 bp, Morganella morganii
atgaaattacctgaaaggtattattatagagtagaaacgttacacgagattgataaaaattacacagtagaaaaccttatacattttgctgctactagtagattagaattatgtgtcagattaacgaatactaattttgtggatggatattgtttaaatgtgaatgataaaatcagaacagcatggcgtagccatggaagaacaataattccaaatgtagagtttaattgtaagtatggatatataagatgcaacttacataatcctatagaggaaaatattgttgatccggaaacatctactattgaagatgtttgttgtttattttcaatttccagtgatgttattaggaaaggcgaactatctttaattaaaggtgagaagattaatgctatatggctgaatatgcccagggaactacgatttgaatcatttagtatgaacttcgcccctctttgttttaaaatgaatagtgattatttttttgatattagcgagctttttataacaaaaatagaattagataaattaaataatggtggtgagttagttgaatttcaaagaaatgaagctaattttgatataaagcctcatccaacagtagagagacatgcaatcaacagagagcagattttaagtgcagctctgagattaattgaagagcaacctaacgtattcaatgataattgtcggaaaaaagacggatctattaactattcagctttcgccagagagttacttgaaaggcatcattttttccctaatggtgaacctccaataaaaacacaagaatcagtagctggaattctgagcaatgcatataaatcaccgaatcaaaagtaa

SEQ ID NO: 290769 - DNA, 192 bp, Morganella morganii
ttgcatgagaagggctataactctgcctggattgagactcagcttgcgcatatcgataagaatgcgatccgtggcacgtataatcatgctcagtatatggatgaacgcagagaaatgatgcagtggtatgcagactacatggatgagttggaggacagtttggataatgttgttaatgtgaattttaagtaa

SEQ ID NO: 290770 - DNA, 198 bp, Morganella morganii
atgagcgcaaatatcaccttgcagcaggccgctgaacaggctcaccagctagaaattatcagcttgatgattgagtcctacccgcacaaattcacagatactgacattacggtgcttgcgtcactgatggtgaaattatccggcggcgtttccggtttcctcagtgaaaaatcggcagcacaggagggtaaaccatga

SEQ ID NO: 290771 - DNA, 681 bp, Morganella morganii
atgattgatgtggataaaggtctaaaaaatttacggcagcaatatatctcattgtatgagctatttgaatatctaatgaagaaccctgacaataaagatatttcaaaaaatgcaaattggctgaatgcaaggttgaataaaattgaaccatttccgtcattatataagttagatgatggatatatctttgattattttttccctgatgttgggtatgacgaagatttatattttgtttcgaatttattaacggagatctacaataataaaaaactacctgatagagatgtgggtaccatgtctataggtgagattctcttgtcagaaaaaaatacaatatataatttaggttttaaaaaagaagatattgaagattttttggaagaattaaatggtgatgaattatgcatgagtaagaatgaaaatgactcccatagtgagtggcaggagtttggtggtaaggatacagcattaatgtttattgctggcctggctattactttagaaaaatcaaaaccggcatttaagcatggaacaaaaatgaacaaaagcaatatagctgatgccgcagttaaagcaatcaatgactatgggcatggaacagagatcactactagagcgttaacttcacttattacacaagctctggataagtttgcacctaaggtgacagatgattaa

SEQ ID NO: 290772 - DNA, 171 bp, Morganella morganii
atgacaaacgaactcagcaggaaggaattacgtcaggtgcagaattattatcacagacgaccggcggcagagaaatttgaggcactgtttccccgtgaaaaacgtaacgaacgggcagtgaaattatttcatcgtgcattgcgtcagactgccggagtgctgaaaccatga

SEQ ID NO: 290773 - DNA, 228 bp, Morganella morganii
atgattgccgatgctgaggcgcgggggctggatattaccggcgggcaaataaaacagggattacacgcttacattaaccggaaggtgtatcttagaactctcatgacgggcggcaatcgctttgatatgaacggacagcctaacggtgaaattacaccagagcaggcagatgccgctgaacaaaagttgcagggatggcaacacactaataagcaggatgaattatga

SEQ ID NO: 290774 - DNA, 480 bp, Morganella morganii
atgacgctctacagcaaagccaaagcgtttgaggccggggaaaaggtcacgctgggcggcaaagagttcgcgccgctctacacgccgaagaacgacacgctgatttccctgttcagcatcaccgacgacgagcagcggcagctccgcacgcttatcagcgccggaatagccgcagagcgccacaggacgcgcgagaaggcccgcaggcgggccgctggggcggttgaccgggaaacctacctagacgctgcacaggagcgtcgcagggccgcgcaggcgcttcgggccgagggattgagcgtgcggagcatcgcagagcgtctaggcgcgtccgtgggcgctgtggcgggctatctgaaggctaccgacagcgttcagggtccgtgcgtattacaggggcgcgaggtcgtcgggggtgggtgttcaaagtccgtgcgtattactaatggcggagcctcagcgcccgaggtttccgcatga

SEQ ID NO: 290775 - DNA, 246 bp, Morganella morganii
atgatggcctgttccccgtgtggcgcggttctccggccggaggccgggagtagcccctgtgttgaaataacacgagtagcccggcaagccgccgtaggcggcgcgcaggccgcgaagcggccggagagggaagggggttcgggggaggggatcggcggccgtcgggtgcccttcccgagtagcccgccgcgccgtcaggcgcggccccagtttcagccgttccagctcgccgaggtgcgtccgtga

SEQ ID NO: 290776 - DNA, 300 bp, Morganella morganii
gtgagccgcgcacgtcgatctttcccgcccgagctgttggctcggctgcgcgatatgcccgtgtccgatgcactggacgcattgggcctctactggaagcgcgaccccgattttcggccgctcaaggacaaagcgaccgttcgggtgaacgtgtcgctgggtggcggcgtggtcgagctgctggcaaccgggccgaagtggtacgacacgcgcacagagaaaggcggcggcggggcaattgatcttgcgatgcacctgctgcggctcgatttcgtttccgccgtgaagcggtttgaatga

SEQ ID NO: 290777 - DNA, 177 bp, Morganella morganii
atgagagtaaaggagtatatgagtattcacgaccgggcaagggagttggcggcattgaaggcggccgtgcgggccgcgaagggctgcaaggtgtacgtgccccggaatccgaccatgttccgcatcgctgaggccgagcagcgccagctccgggcgctgctggacggcagacgatga

SEQ ID NO: 290778 - DNA, 408 bp, Morganella morganii
atgaccgccgagctggacgctctacgggaacgcatcacagccgatggccgtcactggcgcgccctgatcgggttcgcgacgctgatccgtaaccggctggccgcgtcgaggttgtcgcggcgggagtacgcggacgatttcgcgttcctgcgcatcgagctggcggcagggatcggtgtcggtcatgcggcactgattgagtatggcgtgcgcagcgggcgggagcggcacacggtcggcgtcgtcaccggccgatgggaagatgccgagctgcacgatgtgcgggcgtgggaggaaggtcagccgtgccagattgccgaggcgtggcagtggatcgagcgcggcgcattggacgagatgcccgagctgcgcaaggcacagcagggcagggtgcttgtacttaattga

SEQ ID NO: 290779 - DNA, 1110 bp, Morganella morganii
atgcaccgcgcagctctaccgcttgctgcttttctcgctgctatcagtggcagcgcctcggccccggccgtcgccgctggcacctgcatggtgccgccgaatcccatcaagaccgtgacaagccggttcggcatcgcccgctcggccggtcagcatggatcggcggcgaaacatgcccacatgcacgatggcctcgatttcagcactcaggggcaaagcccgctgtacgccaccacggacggcaaagtgatttttgccgactactggggcggatatggcaacagcatcatcatcaagcgccccaacgggcacaccgtgcgctactcgcacatgaagggcttcgcggatggcctgaccgtggggagcgaggtcaaggcggggcagcaaatcggcatcgctggcaataccggcggcgggaacatggcggtacacctgcatttcacctacggcgtgccggatcgacaagatgcccgtgcaaggcaatttgccagcaatgccgccgcgctcaagtctctgaaccccggccagctcccgaccgtgctacgcgacggtgggcgtggcctcggctggaaaaccgaccccagcccgtacttctgcgaaacattcccgatcagcgacggacgcggcgaccgcttcggcaacacgacgatggagcaatacgccctgctctacggcaatgccccggatggcggcgcgccgccggagctggccgctgaacggatgcaacaggcggaagccgcagccgccggacagccaattgaagaatggttgtcggattcggatggctacggcgcgttgcccggccctccgattggcgactatgaaaccatgtcgtcacgggaaatgctgctcaccgaagccatgcgccggtttgcaagtgcagcgtgggccaacgagctgcccaaagtcagccagcgggcgttatgggtcgattacacgcgcatgactggcgtgtcgaacttcctagcgaacgcgaaccgtgagaagaaacagcgcatcgaggcgctgctggccgtgctgaccagccagcggcttgagcacgtccgcaagggcactgcggcggcgcaggaacgggcggtgcgcggcgaggctgtgcggtcagttgagtaa

SEQ ID NO: 290780 - DNA, 456 bp, Morganella morganii
atgaagtcccgtaccctgcccctgctgctgactgtcctgctggccgcgcctgcggcgcacgcgctcgatgcggcgcaatggcgagctgtcgcgccgctcgtgcaggcggctatcgagtgccgggcgaagcccgacacggccgccgccgcgtggaagtccctgccgcgtgaagaatacggcggcatcgctccgatcaagccgcccgcgccgttcgtggtgttcgggctgccggtgcgcgaggtttccatcttcatcgacccggaaggcatcgaaggcgaaagctacacggccaagatcgacgcgaccccggccgccgttcgcaaggccgcccgcttcaccacggaatcaggccgagcaacggacatgggcggcctcacgctgacggaagatcgcctgacatggctcacctgcactgtgcagggtgaatacaacgaaagcgactttcaagagaactga

SEQ ID NO: 290781 - DNA, 540 bp, Morganella morganii
atgccgtacatgctgcaaccgcaacccgtcccggccgatgtgctggccgccctgctccgcgtcgccgatgacgtgctgcgcgccagtcgccgcctgtcggcccggatcaagcgcggcctcgctcgcgggcttgccctgcccctcgccctgctcgcgttcgctacaggcgcacacgcggcggaaccgacactggccgacgcgctggaatgccgcctacctgctgcgcaggcggaatcggtgcttgccgactacggcatcccggtcgatggccccggcgtccagttcggcacactggtcacggcctacggcatcccggtgatgaaagccgaagccacgcgcgaggccggggcactgcatgtgttctacatcatcgcggcggccgcgttgcagccgttcatcgacgctgcggaaatggagccgatccgcgacggctacgtgcggctgttccacgaatacaacggcttggaaactcccgccccggcgctggctcgccagcgcggcagccgcatcgttcctgttcactgcgagatgaacgtatga

SEQ ID NO: 290782 - DNA, 180 bp, Morganella morganii
atgaacgcactggaacagaaactggaccggcttcgggatcggcttttcttccacgggccgcacgtccgccggaaccgttgcatcgccctcgcactctggattccgtggtgtgtggcttggacggctttcgtatggaacatggccgcaccgacgttcaaagccatcctcccgagcttctaa

SEQ ID NO: 290783 - DNA, 417 bp, Morganella morganii
atgagccatctcgattacgagcgtgggctgtacgaaggcgttgccgcacaacagcaccaatacgctgagggtcggcgtgacgggtgggatgaagccatcgaggaaatgaccccacgctttcaggcgttggaacgcgaacgcgacgatctggcgtatgcgctgaaagccgtcgcagcgacaggggcggcattgatggaggcgatgcgagatgcgccgcctcacgtccggattgccgcagtcaacgcttacaacgaccgctgtgatgatctgatcgggtccgtactgcgttgcccgccgcatctcgatccgactgtgcaggagcgtgaaccggcggtcgctcgctggattcccgacatttccgaccagctcatcaacagcgggcaagccatctttcccgacgatgatccgtccccctga

SEQ ID NO: 290784 - DNA, 2502 bp, Morganella morganii
atgccaatgccgttcagcccctgccccactgacggggaaccttgcactgaccagtcggtggcaatcctgcgcgagattttcggccctgtcattgaccagctcgccgccggagccgaccccgacacggtaagcgcaacggcgaacatccttgcgtcgatgttcagcgtgttcaattccggcgtgctggtcgtcggctcgctgattgtctcctacgtcgcggcagtcggcgtcctgaataccgctaacgacggcgaggcaatggggcgcaattggtcgtcgctctggacgcctgtgcgcatcgtcgcgggcggcgcatcgttgatgccgaccgcaagcggctttagcttcatccagctattcgccttcatgctcgcgctgtggggcgcgggtctcgcgaatgccgtctacgacaagggcgtcacgctcgggctgctcaagcccgaaggcttgatcgcgacaatcaacgatcccggcagtcagtacggcatccggcagttcgcccggcagtacgtcgcggcgagctactgcgcgaacgcggcaaactcaatcttcgcgggcttcggcggcaacacgccgcaggtgcgcgccaatagtgagcctgaccgggtgttcaatgcagggggccgacgcgaatacgtgttcgagatcaaggaccggaaccggacgacgaatctggccggtggcgatccgatttgcggcacggtcacggtcgccgagtatcttgcccagcctcgcgacgacgcgaccgcgcaggcgacggaacaggtccgtgcgcaagcgatggaggaaaagaagcgcgccgtcgtggagatgatgggcgcaatcgaccgctgggtgattacgtggccagatgacgtgtccaaaacgggctgggatggcgtcagctcggcgcagttcaacgccatcgtgtccgaagccgaacagaaggtcgtcgcgggcctcgaaagcagcattgcatcccggcaaggtgcgatggcatccgggctgagtgcttatgttgcatcgctgacaaatgagggttgggcgacggccggaggctggttgcaaaaagtcgggctggtccgcacgcaactgtctgcgacgttctccgagtcggtggggagcgtcaccaatccgagcttgaccggcctgcccaacagcccggcatctgacatgcttgccaactcggtcggcatcgtcgcggacatcacgcgcaaagcggagtcgcacgacgattacacatccggggacatcaagccggacgatctgacttccgcgatcccgaccgacccgatggccgcagtgaacgtcggccaaattcaagccgacatggacgcgaagatgtcgagctgggtcaaccgccgcatggaggacatggtggacatcgccgtcggcgcgaacggcagcgatggcacaagcaattggtgcggcacgtcaggactggtcggcggcagcctcaaccgcatgaagtgcctcggtgattatctcagcgcgacacagggagccgcgcaaacgatgaaaacggggctgctcacggccgtgacggttgtgcgtgtggcggcgggcgtcatcggcggaacgaaagtgctgggcaacggctttgaagccgacaaggttatcgatccgatttgggactggatcaaagaagtcatcattccgccgctcgccaaactgaaaatgatgctggaaatactggccttctacttcggcgtgttcctgccttcgctgccctactccattttcatcatggtgatctgtggttgggtgctgtccgtcgtgcaaaccttgctcgccgccccgctgtgggccgtcatgcacatgacgcccgacaagacgttcatcggctcgcagcggcaaggctacctgttgctcatgtcgctgttcgcgcggcccgcgctggcggtgatcggtctgttcgcgggcatcctgatttccgacccgcttataaacttcgcatcgaagggctttttcgcgatgcgcggtgcgattgtcacaagcaccggcaccgtcggtgcgatcagcgagtttttcacctttacatggtggatgagcgcgttcgcgctcatgttgctgccgatcttctacatgtgcttcgggctgccgcaagtgctgccggacaaagtattgcaatggatcggcggcggtgttgcggacctcggcgaaacgtccgcgctcggagaaatgcgcaccggcctcgcccgcgcgagcgcctacggccgcgtgccgggcaaggacaaggacaagcagaagaagctcggcggcggcggtaatcgtccgttgccgggcagcggcccgcgtggcggcggtggcggtggcggtggcggaaatcagcccgtgagcggcggcgggcaaggcgtcacaccgcgcctgcccccgccaagctcgccgggcgggcgcggccaaggggatgccggaatcggccctgctggtcccgcccctcgcccgcaaggaaacagcggcctccgccgactggccccgccgctttcagcgaacgaacagggcgcaaggcccggaaaggagtaa

SEQ ID NO: 290785 - DNA, 357 bp, Morganella morganii
atggcttgggacgtgaacgagtgggcgcgacggatcgacccgcgccggggcggcggggtcgttgtctatggcctcatcatcgccgtggcggtctacgcggccgcctcacatgcatggcgcacaggtcgggcggagatgcaggcgcaggccgatgcacaggcgcagcagctcgccgacgcgcaggctacaaagctggaaaccgcgcgactggcggcgcagtccgtagtcgatctacatcagcattgccagacttacccggcggattatggctgcgaaaacctgcacggaaagtcactggatgaagtgctggacatgcagcggaaacagcgagcggaagccattaattccgttcgttaa

SEQ ID NO: 290786 - DNA, 132 bp, Morganella morganii
atggcttggaacaagaatgcgacgggtaagacgtgggaacaggtgcggattcttgacctccgctttgccaaggctgggctggcgttcggcgtgattgtcggcgtgctcgctggcctctttttactgccctga

SEQ ID NO: 290787 - DNA, 1710 bp, Morganella morganii
atgccagaaatcgaagtcggcgagcgtgggaacgctcaatggttcaaatacgtggtgctgccgcgcgtggtcctgttcgtgcttgccgcgtggctcggcatctggatcggcatttggccgttcgccccgtccggcatggcccgcgccgggtacgctttcaatctggcgctctggaccggcatccccgtcagtatcgcgtacatgctctatcttggttggcgcgaccgaaaggcaggcaaggaagccgccagccagccagcggccgcgcaggacgttgacgacgcgcaacgcgagacatggcgacacgacttcaaggggcttttcctcggctactcgacgggctttctgcaagcgcggaagcccgacaattcgggctggccgacgccggaaggtgcgcccatcgaactaagcccggaagacgccgcaaagaacattctggtactcggcggcatcggctcgggcaagacaacccgctccgtcaatccgctgctttcccgcatgctgcaacagaatcccggcgcgctgattttcgacattaaaaccgactaccgggacacggcggaaaagatcgcggaagcctgcggccgcacggtcaagattgtgggcgacggcggcatgacgttgaacctgttccgtggctgcacgccggaagtcgccgcgtcctacctgaaaagctgctttatggccgaagggcagggccacggcgattccgctttctgggtggattcagccgtcgaagcctgccgccacgcgctcaatctcttgaaccttctcgacccgccgaattacagcatcgccgggtgctatgaagccgtgttctatgacagcgtgcgcgacaagctacttgccgccggaacggagcaaatcgagagcatgacggacaggcaacagcgcctgttcttgcagtcgcaacggttcttcgtggaagtctggaacaagcatgatgaaaagctgaaacgcaacatcatgggcaccatcaattcggtgctgtcgccattcaaccatcccgaccttgtagatgcgttctcgcaggccagcgcgcagggcgaggccgatctgtcggaattgatccgcgatggggcggtgttcatcatcaatctgccggtcacaaagtacggcaaggaaggcgcacgcttcgcgtatttgcttatcaagctgcgtttcttcacgatgatgcgcgagcgtaagcagcatcccgagtggaaccagcatcggcatgtggccttcatctgcgacgaatatcaggccatcgttgacccgatcagtgacaccgatttttgggacaagtcgcggtcaacaaaaacggtcggcatcgtgtcgatgcagggcgtggcatcgttgacgcaggccctcggcggaaaccggcaggcagcggacgcgatcctgcaaaacttccggcagcgcatcatctaccgcaccgaggacacggaaacgctgcgcatgatccagtcggttctaggacaagtggacgtgacgctgacaaccggcagcgcgagctattccgagtcctacagcaacccgaccggcctacagggcagcgcgagccgcagcgagtccacgagcgagacggaaagcaccagcatgacgcggcaagagctgttcggcccggccgacatgcgcgccctgacgaccgatcaatgcttgttcatcggcaacatcgcggaacgctcggtcgatgaagtgctgcgcgttgaacccctgtatatgtga

SEQ ID NO: 290788 - DNA, 306 bp, Morganella morganii
atggccgctccccggcgcaagacatacgaacccgagattttccgcgcgctcgatcaggagttcgccgccgcgcccgaagtgcccgccagcgagcgcccggcaaccgctgcggagctggtcgaagccctgcgcccgcgcatcaaggacatggcggacaagggctatacgctggaccagatcatcgagaagttcaaagcgaagggcgtagagcaaccgccagtgcgggccgtgaaagctgcaatgcgcggcgatgccagccgcccgaagcgcacgcgccgcaagcctgcatcgcagccgggggcttga

SEQ ID NO: 290789 - DNA, 375 bp, Morganella morganii
atggcgcgcaagaaatcggacaagcggctgcggacagtggtggcgtactcgcgcatgacgccggaggaatacgcggatgttcaggacaaagcggccgcatcgggaaacacggtgtccgcgttcattcgcgcggcgtcgctgggccgcaagctgcgcaatcgtcaggaccgtttgaacgtcgcggcgcttgtagacatggcggcagaattgaaccgtctcggcgggttgcaaaagcaccttttctacgagggcggcaagtcgaaccgtgccgagtattcggccgttctggcggcaatcaagaaggctaccgatgcgctgacagtggccgtccataggctggggccggacgccgacgaagccgacgccgaggattga

SEQ ID NO: 290790 - DNA, 2445 bp, Morganella morganii
atgatcgtggaattgttcggaaagcggggggacggcggcacgtcgttcaagtcgcttgcgaactacatggcgagcgtccgcgacgtgatcgacccagacaccggggaagtcatcgaccggcgcggcgtgacgacgttcacgaattgcctttctgcggaaaccgcgtggattgaaatgtggggttcgtcggccaagagcgcacgagttgaagacccggtttttgcaggcgtcgtaagctggattccgggcgagaatccgacagatgaacaggtgcgcgatgcgtgcctgcacgtactcaaggccgagggcttggaaggccaccagcacctaatcgcggtccaccgggacaccgacaaggtgcatgggcatttcatggcgaacaaggtccattgggagacgggcaaagctgccgagctgaaatggtccaagatgaaggctgtccgcgctgcgcgtgaaatcgagatcgagcagggttggcagcacgtcgagcaaggcccgttcgtagtgcgtgaacagggcggggaaaaggttgtcgattacagacacgccagcgcccaagcacgcatcgcggagcgtgaagccaagggcaagaacaagccagaccaagcccgcaagatggaggcattcagtcactcggaatcgctggcgtcttacgtgcaggacgagccgaaaaaggatgcgctggcggcactcgacaagggcgaatggcaggagctgcacaaggcgcttgctgtgcatgggctggcgatcaagcccaaggggccgggctttgcgattcacagcacgcgcgatcctgatgcaaccccggtcaaggcatccacgatggcgcaagccttgggcggttcccggctgaaatcgaagctgggcgagtatcaaaagccgacgccggaggttgcacgcactgaacagcgccgggaatacgtgaaagagcggccgacgcgcgatccgaagatgcgcgaggaacagcgcgaggcgcgggcgttcgagcgggctaagttgcgcagccggtatgacagctatcgcaccgactggaacgcggcgaaggccccagctcgcgccaacatgtacgaaggccagcagcggcgacgccgcgagctggcgacgaaggcgaaggcacagcgcgagcgcatccgtgaaagcggcttgtcacctgccgaacgccgggcgttttacagcgtggcggcgatgcaagcggcggccgagcgcaaagagctggccgaggcgatcaaggccgagcgtgaggcgttcaggaaagagcggccgcaggactatcggagctgggttgcagatcgagcgcaggaaggcgacccggccgcgatccggcaggtcaggggctgggcctatgccgacaagcgcaaggcgcgggaaatggagcgtgccgacgcagcagccgagaacgggccgcacttggccgtcagcgacggccaggtgcatgaccctgccccgccgtcacgcaggctgtcggagcgcgtgagctggaacgtggaccgtgacaccggcacagtggcgtaccagctcgacggccgcgacgcattcagggattccggccgcaggatcgactacacgaccgagggccagcgcgacgccgacgccatcgaggccgggctgttgcttgcacgcgagaagttcggcggcactgcgttgaacatcactgggccggacgagttccgcgaccgcgtgcttgccgttgcagtggaacgcgggctggacgtgaagttcagcgatcccgagcttgagcgccgccgcatcgagggcctgagcgagcgtcaggaagcgcgccagacgcccggccagcgcccggactggacgcagcacagggcaaccgtcgccagcgacggccgaggcccgcagcggtcgccagaggccgcgcaggagccgcacgcgcgcaggatgacggccgaggaagcggcggctgcccttgcccggccccgacccgtggagccggtgcaggaggtcgtggaggcattggcgatccagcaggcgggcgaggtgtaccggcagcagctcgaccgcgagttccgcgaacggtacggcgagcggccggacccggcactggcgtccggtgtggtttcccgctggatgaagcggcaggaacgcaatctatgggaccgcgaccacggcaagattgaccagcaggtgcaggagcgcatggcgtacctgcgcagcgacgcgccggacgccatcgcgttccgcgcgaaagcgtggagagacgcgcaggaaaaatatggccgcgaccatgaagaatgggccagcggccgcatggccgcgctcatggcaaccagttcgcaggagaaggacatggcagcaccagagcagcagcccgacgacgcccgtgctcggcgggcggcggaggcccgcgctctcgccgagaagcagcggcagcaggcggccgagcgcgagcagcagcaggagcgcggccgcgatgacccggagatggaccgatga

SEQ ID NO: 290791 - DNA, 216 bp, Morganella morganii
atgaacacagaccatgaaatggtgacgctggccgattacccggtgctggccgagattgccgccgggcataccacggcaacgcggctcgacctgcgcgccgtgcgctggctctaccagcagcacaatgcccgcgtggacgccgccgagctggaacccgcagaaaagcgactcgtggcgcgactgcgcgccgatgaagcgacgaaggagaagccatga

SEQ ID NO: 290792 - DNA, 417 bp, Morganella morganii
atgaaagccgaagccacataccggatcgcgcgcagcgtgatcgctacagttcgcgccctgcccggccccggccagtggggcgatgacacaatcatccgcgagcttgccgacgcgagccggttttgcaccgtcctgatcgacagcacgggcgaccggcgaacgctcgacgtagcgttcggcacggtcgccagcgatggcacgcggcagcagatcggggcggttgtcggggtgtgggatggcgacagcgagcggctggcgatggtgcaagccgctttccggggcgagccggagagcttgccagcgacggccgatgtgctggacgactacctgcacctgcccgcctgcgcagggctggaaacagccgaatacgaggctatgcagcggaaaatccgcgagtggtgcccggcggtcgcgtga

SEQ ID NO: 290793 - DNA, 489 bp, Morganella morganii
atgctcgaccaccctgccctgccgattttcggccgtgacgtgctggcggtgatcttccgcgattgcgatggtcccggcctgttcccgttctcggatgaaatgacgcgcgagctgggcggcgcttcgcgctacatcgtcgccctgtctggccgcccggattccgggccgctggcggtctggctggacttcggcgacgtggacgcagccgggcagcgccagaagcgcggcgagttccgggcgagatggattccagaagacggccgcatcgtcggcgaggtctccgcatggctggacggcgtgctggtggccgacttcggcgcgttcgcccgagccttcgcgccctttatctacgccgaccttccgggcgtcaccggccctgccgtgcaggcgcaccacgcgctgatgaacgcggacgcacgaggcgcgacggccgcaatggcggcaaggtggcagagctggcgcggggatggctccagcgcgtcacactga

SEQ ID NO: 290794 - DNA, 231 bp, Morganella morganii
atgacccgcccgcgccatgtcctagatgccgtgctggatggcgtcgccgatcccgctacgctgccagaacagacgcgcaagcgccttggtccgatgcagcccggcgaaccgccagtgcgccgcctgacgcgcgaggaactggaagcgctgcggcaggaaatgcaggaagccggggcacgcatgaaagcccgcctgcgcgcccgtgacgccgcacggaatgccgcgacttag

SEQ ID NO: 290795 - DNA, 309 bp, Morganella morganii
ttgaactacgtcctgaccgacgacgcggaagccgacttgcgcggcatcatccgctacacgcgcaaggaatggggcgcggcgcaggtgcgcacctacgttgcgaagctgaaagcgggcattgcccgcgtcgcggcagggcagggcgtattcaaggagctggacgcgctctatccggcgctgcgcatggcacgctgcgaacatcactacgtgttttgcctgccgcgcgaggacgcgcccgcgctgatcgttgcgatcttccatgagcgcatggacctgatggcgcgactggccgacaggctcaacgattag

SEQ ID NO: 290796 - DNA, 255 bp, Morganella morganii
atgagccgcttaaccatcgacatgaccgaccagcagcaccaaagcctcaaggcgcttgctgccctgcaaggcaagacgatcaagcaatacgcgctcgaacggctgttccccggcgacaccgacgccgatcaggcatggcaggaactgaaaaccgtgcttggcgaccgcatcaaagccgggttgtccggcagggtgtcgaacaagagcatcgatcagattcttgatgaagaactggccgagggtggccgcgcttga

SEQ ID NO: 290797 - DNA, 351 bp, Morganella morganii
atgaacacccgcaccatcacacgcgccgagctgcaagcgatgtttcagccaccggcaccacccaccaccgacgaactggacgcgctgcggcggctgatcgaggtcgccaagagcgacaccggccagtcgcgccgagtcgccgacttcctgctggcgtggtggaacgccggaagctgcggcggcttcgacctgacaaccttgtggggcgtggaccatgccatcgccgccgacatggttgcggtgttcgggctggttgcccgtgtcggcgaatacccgccccgcctcgaccccgtgtttgacgccgagttccgcgccatcgtgcgggcgtggcgtcccgagctggccgactga

SEQ ID NO: 290798 - DNA, 204 bp, Morganella morganii
atgcagtccatcaccctgcccttgccgcccacgttcgcccatttctgcgagcgtgcccacgtcgcgccggaaaccctactggcgacattcatggcggaccttgccgagcggccgcgcccggccactggcgaatgcttgcacgcccggcgctggttcgattccgtcacagagccggtcggcgtggccgtggaggtcacggcctga

SEQ ID NO: 290799 - DNA, 645 bp, Morganella morganii
atgcccgagctggaacgcaagatcgcccgcgtctatctccgggtcagcacagatgaacaggacttgcagcggcaagaggccatcgtcgccgaggcgcgggccgccgggtactacgtcgcgggcgtctaccgcgagaaagccagcggcgcacgtcccgaccggcccgagctgctgcggatggtggcggacctacaaccgggcgaagtcgtcatagcggagaagatcgaccgcatttcccgcctgcccttggaagaagcggagcagcttgtcgaggcgatccgcgccaaaggtgcgcggctggccgtgccgggcatcgtggacctgtccgagctggcggccgtcgcgcagggcgtgccccgcatcgtgctggacgcggtgcaggacatgctcctgcgcgtcgcgttgcagatggcccgcgacgactacgaggaccgccgcgagcggcagcgacaaggcatcgagctggcgaagaagaaaggccgctatgcaggccgcaaggccgacaccaagacccacgagcggatcatcgccttgcggtcggccgggcgcagcatcgccgataccgcgaagctggccgcgtgcagtccggcgacggtcaagcggatatgggccaaacaccaacagtcaaccgaggaaggggcgtga

SEQ ID NO: 290800 - DNA, 1047 bp, Morganella morganii
gtgaagcggctcactatcgacattcccgaaagcctgcatcgagcgattaagcgccgcgccgccgagcaaggcatcaagatcgcggacgtggcgcgcgagctgataggggaatgggtgcagcgcgatggctcccctaccccaaagcccgacgctggcccagccattcaaggctatgtttacttgctgattgacgccagcggcgagcgtttcaagatcggccgtagcatttccccgctcatgcggatcaagcagctaccgcaggagttcgacctagcggcgagccgacaggtgccggtgctgggttggcgtgccgacaaggtggaaaacttgctgcatggcctgttccgagaacaggctgtgacgatgccacccggcgcgggttataccgagtggttcggcatcgaagcgtgggacgccgtgctggcctttctcgcggaccatcgcgagcggctggggattggcgagccagaggcgattccatcccgccctgccctgtcggactggacggcgcagcgggcgttgatgctcgaacgtgaggccgcgcaacgggccagcatcatcgagcacaaccgccgggaactggatcggcttcgggaatggctgggagccttgtccgagcgtggggctattgtcggaatcgtagacgcggttccgctgcctgatagccccggctggtcgctcgatccctgcatgtacctagtcggggccgatgatgacttggggcgatggacggaaaccgcgctggatttctcctttgaggcgacgaaggggcaacggtgccgggttttcaatagctactgcgtccatgacgggatcgctgaactcatcatccaccctgccctgctgaccatgccggtcccttggccgtccgagaacgaaatggtcagcccgaatgtcccgcgaaacgccgttcacacgttgctggtcgagcatcgcgcatcggccccggcggatcgggacaggctcatgcagcttcatgcggctttcgatgcgctgcgagatagcgggttggcacaggtggccgaagcgatggcgaacgagtgctag

SEQ ID NO: 290801 - DNA, 630 bp, Morganella morganii
atgaaggtcatcgccgtgctgaaccagaagggcggcagtgggaaaaccaccatcgccacccaccttgcccgtgccttgcagctcgacggcgaggacgtgctgctggtcgattccgacccacagggcagcgcccgcgattggggcgcggccaaggaggacaaccccgtgaccgtggtcgggatcgaccggccgaccatcgaccgggacgtgaagaaggtcgccagcaaggatttcgtcgtgatcgacggcgcgccgcaggcggccgacctcgccgtgtcggcgatcaaggcggcggacgtggtgctgattccggtccagcctagcccctatgacatttgggcggcgtcggacctcgtggatttggtcaagcagcgcatcgagctgacggacggggcgctgaaagtcgctttcgtcgtgtcgcgggcgatcaagggcacccggatcggcagcgaagtcaccaccgccctacagggctacgagctgcccgtgctcgattcgcgcatcacgcagcgcgtcatctaccccggcacggcatcgagcggttccacagtgctggacgacgagccggacggcgatgccgccgccgagattcgcgccctgctggcggaagtccgggcgaagctcatttga

SEQ ID NO: 290802 - DNA, 225 bp, Morganella morganii
atgacgacgaaacccacccttggcctcgccgcaggccgcccgagcgcaagcccgaagaacaaagccgccacgctggccagcctcgccgacaccaaggcgaccaagcgcgtgaacttcaatctgaccgaggacgagcacctgaaattgaaggtcgcggccgcgaagcagggcaagagcatcacccagcttttgaccgactacgtgcgcagtctgccggatgagtaa

SEQ ID NO: 290803 - DNA, 336 bp, Morganella morganii
atgattgagcctgacgaatttgctgatctggagtctgcgacggttgtcgatcatcgcgtctaccgggagcttgcggcagcaggcagcgtgcaaggggcgtgcgttcgctccgctggcgaagacaaggggcttgtgatcttgctccgggtcggaaaccagaatcgcgttctcgggcggcgtgcgggtggaccccgttacttccagagcttcgacagcgcggcccatgtgctcgatcaagcgggcatcgtggattgggtcgctacgtcgaggggctggacgccgaaaaccgccgtgaaataccggcaggacaaggaggccagagcggcggaggaatga

SEQ ID NO: 290804 - DNA, 282 bp, Morganella morganii
atgcgcacataccgaaaagcaaagcccatcacagccacagtaaccggcactgtcactaaaccacctcagcgggttaagacggccaccggtaaggtaatggcaacaatgaccattcaggcagagagcgaacgccgcagcccctacccgctgaagctggtggcatttgatatgaacgcactggaactgatgacctgccagaaaggaagccgggttatcgccactggccggcatgaatggtttaacgggtatcagcttaccggggcgcagatagtcacctgttag

SEQ ID NO: 290805 - DNA, 375 bp, Morganella morganii
atgagcaatgtgatcccgttcagacaaaaaaataacacgctggagaatctgacccgcgattttgctgccgcagtataccgttgtcaccatcatgactacgaggacagttaccggctgacggagacgctgggcggtaatactacctgccgcgacatcccgccgtcagaatatatcgtgctgctgaccgactggtatttcatcgagccactggcagaacaggcggaggattacgaagcgacagcagcggacgtactgacccgtgcagtagattcggggcgtttaactccggcgggtgaggcactgtatcagtcaatcctcagcatatcccgtgatatggccgctccggaaggaggcgcagacgatgaaatccattga

SEQ ID NO: 290806 - DNA, 330 bp, Morganella morganii
atgatatacgcgcctttgtgccagccggatttatgggtcacgctccacatatcccgcccccggctgcgcatcagccagtctgccagtgttgcccgtaacgccggtttggtggtgacaatcacgccgctggctttcagtgtccgccagccctcacgctcaccgatatctgccatcgggatcgcctttgtggtgccgctgccgcagtccattatcaggaatgactcattcacatcgttaacgcccgcagccaccaccgtcagcgggtcactgagccactgctcgttattgatgatttccccggtttctttatccagcttcgggatcacctga

SEQ ID NO: 290807 - DNA, 186 bp, Morganella morganii
atggctatccctacccaaactcaattcaaatttctgtttctggcggtaaaacgcgcagacagcacagatattccgcaccgcatcgaagctacagcaccaaacgagcacagtgcccgcctgctgctggtacgcgattacatcctcgcctttgccggacgtttaccggttcgtgaggtggccgcatga

SEQ ID NO: 290808 - DNA, 186 bp, Morganella morganii
atgacagaacgccacggttcagacaacgcagagcacatcgtcagcctgtacgcctcaatgattgacggcagcggcacgttacgcctgtctgagtggggctctgacattatggacaccatacacggggcaatagcgcaggacgtggcaggcggtgtgctggagcagccggaactgcggacacactga

SEQ ID NO: 290809 - DNA, 690 bp, Morganella morganii
atggcaaaaaatgaattatccgttccccacataaaagacgccgatgtttacaaatcatcagcgtcaaaacttcttttgcttatacctaaaagcagatcaaagaatcacacccttgcattaaagtatgctggccttgttgagtcaatccaagtgtatgttgaagaacaactttttactatttgttatattgatataggaatagcaagaaactgtgagattgcatctaaaataataaatctagctcaagggtggaaggggttcaccgtagtatataaaggaaaaacgatctcaagctttcatctatcttaccgtctattgccatgcattattaaggccactcagtgcaacagcaagaaagcccactgctcgcagagagtaaatgggaatgcctacataaaaaaccatgggtttgctaattaccgtatctgtgattttgatttaattatcccatgcaagctagctgatattggtttctatgagccagcgctggacgtgccaatcaatgaacaatatcaagcaatggcggtagagcttggcgtgcattggtgcccattttttaatgctgataacatacaaataattgacgtaccgaaaagctcaccttcaaaaagtaatgactttgacatgcaagtcagtggagcgtcggctatattgagtatcgatatatctgatttactaaacaaaaattaa

SEQ ID NO: 290810 - DNA, 1011 bp, Morganella morganii
atgactgatagcaaaaaagaaaaggttacagggaaggccgctggcggcaaggctagagcggcaaaaatgacagcggcagaaagaaaagagtcggcaaaaaaagcagctgaaatgaaaaaacactacgcctccttgcctgtggcggcgtatggagatagtggcgcatcattaaagataggtgacatagagataccatgttacgtgctagatgatggcaggcgagttttatctcagggtgggttacaggctgggataggaatgtcaaaaagcggcggtgtgcgcggcgagcagcgaattgttacttttataaagaatttagaatcaaaaggtataattaccaatgagttatccgcacgctgcactagcccaatagagtttagggtaaagggtggtgggcgctcaatttatggttttgaagctgtgatattggctgatatttgtgacgctgtattggaggcaaactcacagggaatacttgctgtgcagcaaaagcactttgccaagcagtgtgaattgttggtcagggggttcgctcgtgttggtattgtggcgctcatagatgaagctactggttaccaacgagaccgagaaagagatgcgttagcaaaaatattagaatcttttgtggcgaaggaattgcaaccatgggtgagtacattccctcccgattattatgagggtctatttaaaatatatggccttgagtatcctccagctagtggaaacaaatcgtggagacctggctttatggggaacgtcacgaataatgtagtatatagtcgcttggccccagatctgctgccagaactgaagaaaaccgcatcaagatcagagaaaaaggctaaattgcatcaatggttaacaaatgatatagggcatccgaaactaagggagcacttagcatcaattgttacattgctaaaaatatcaaaaaccccagagcaattttacgatttagtcgaccaggttcacccaaaattaataatggatgaatctgagcaacaaccatga

SEQ ID NO: 290811 - DNA, 693 bp, Morganella morganii
atgacaccgcgtttagaatacggcgagatggtgatatccactgccgaaaatgattacctgttccgcccgtcactggatgccatgacgcgaatcggtgagcctaaagagattgtgagtgcgtttacgcgattaaatggcgcagaggtgcagcaaattattgcgtctgctgtgggcgcttacggggttgttcctgaatggctgataacgctgttaaataagccggtttacggacgcagcatcttatcgaccgcaatggacgtgatgcaggcatgttgtgacgatgactgttctgaggttatcggtgagtggcgacctggcaaatccggcatggtgtaccggcagggcgctatacattatcgcgatatcatcctgctggcgcgcgaactaatgacccacggcattatcggtaaagccaaggtgcgcaaactccagcgcaacgaaggtaaagacgaatactccgacgagttccacgccgtcgattacatcagtgccgcccgtgtacatttcaacattacccgcagcgaggcggagcaactcacaatgaccgagttcgtgatgatgctgaaagcgaaatatccggatgagaaaggcttcacgaaagatgagtatgaagccataaccaaagccgacgatgcccgcaacgatgatctgattaatggcaagcgccggttggtgagcaggaagaaggcgtga

SEQ ID NO: 290812 - DNA, 243 bp, Morganella morganii
atgctggtacagacagtaaaggattaccgtttttcaggcagacaaaaaatgtttcaggggatcagtgccgggaactctgcctctccccgggagttgatttttcagttaactgacctgatgacaccgctttccgttaatgtgctggatatcggttttgggaccggaatgtctggcacggactggcacaggatatcccgcaggaattatttgccaaatatgatgttatttgtctgccggatgtga

SEQ ID NO: 290813 - DNA, 675 bp, Morganella morganii
atgaccattaaaattgaagtgacaaccgagttaattctgagtctgtatgagcggctgaatacgttatttccatggcagaaacgctggtatgagcaccgttttcagcgcaagcgctatctgcataaaggccgtcagattggcgcggattattattttgcacttgaagcggtgcttgatgcctgtcttaccgggcggaataaaatatttatcgaaccggcaccttctgagccggaagatacgttttattcaaatgcagctcaacatgccgggcgttttcttgggttaaatattaaatcgggtacgcaaagtattacttttagtaatggcgctaaaatccgttttttatcagagaatcatcagggatgggcttgttttaatggtgatgcgtatgtatctgaatgggcttggttcgataacccgcgtgacatgattaaaatcgtgatgggtattaccatgcataaaaaatggcgcaggacatattactcatcccgtgacggatgtgataatggtgccgggatcgtattcagagagaagtcatatttttatgacgtagttcctttcatggttcacgaatgcggtgaacagcattgtgccaaacgtcctgtgagccgtggtttttataaagaacatcagttccggcagcttttcttatgccagtcaccggaagtcgtttaa

SEQ ID NO: 290814 - DNA, 237 bp, Morganella morganii
atgcaattttgtgatttaaaaaaagatgaatctggttattccattactgctatttttgaatataacggtttttttacttaccacgtccaaaaaagcggtgaaatggatcaggttgtcgagtttgatagtgatgagaatgtgacaagaacatcatttaaaaaaaactcagaggaggaaaaagaagccatagaatttattcgtcaggtgagaaaaaatcacatttgttcggttatttga

SEQ ID NO: 290815 - DNA, 177 bp, Morganella morganii
atgaaaactgatgtaagagaccttatcgctaaattacttcaggatgctaaaagattacaagaaattgagccaaacgcaggaactgaggctagaatcattgaagcaaaaaaagttcttaattcaaatatcgtttgctatacaagaagaataagaaacacagaacgccggtatagttga

SEQ ID NO: 290816 - DNA, 1014 bp, Morganella morganii; identical to SEQ ID NO: 80749

SEQ ID NO: 290817 - DNA, 156 bp, Morganella morganii
atggttaatctcctgaccgaaaaagccgtcttcgataatatgattatcaaagtgttttttagcctgcaacagcagagagccggagcctgccgccgggtcatagattttattcacctgcttctgaccgtgcagcgccagctgagcaatcagttttga

SEQ ID NO: 290818 - DNA, 642 bp, Morganella morganii
atgggtctggagcatttgaaacgaacaccattaatggatatttcagagctcggtaaatccctcaacttcaaattaaataaaccttattttttagtgacttaccatcctgtcacattaggtgatgagccacctgaattaagttttcaaatattaatcgatacgctcgatctttacccagaatatcagataatattgacttatccaaacgcggatgatggtgggcggcttattattccaatgattgaagcgtatacagcttcacatccaacacgtgtggttgctattccttcactgggacaagttcgttatctgagtgcagtaaaacattctgcagctgtaatagggaactcttccagcggaattattgaggttccttcatttgaagttccaacagtaaatattggagtgcgacaaaaaggccgtttatctgccaaaagtgtactacatgcatctctggatccagattcaattaaaaatgctatcgactgtgctatcagccggtgctacataaaaaaagatgaaaaaatcataaatccttatggtcagggaaatagtagtgctaaggcaattcatatgatcaaatcaatagataacactacatataaatcattctatgacttaacttttgaaaaagaagactga

SEQ ID NO: 290819 - DNA, 399 bp, Morganella morganii
atggctgtatctattgaaaatagagccccatttctggattacagaatgattgaatacgcattttcaatgcctggtgaattaaagctacataaaaacgaaacaaaatatatatataaaaaagcagtcaaggatttgattggttcaaaccttgcctatagaaaaaaacaaatgttcactgttcctattggtgagtggttaaaatcagatctaaaaccattggttaatgaattactattctcaaagactactgaaaatcgaaatttatttaactactctcatattaaagacatgtatgataagcattgtagcaatgaaaaaaattatactcgtgaaataagagcactaatggctctggaaatatggttcagagagtttattccggagtatacgcatgtctga

SEQ ID NO: 290820 - DNA, 246 bp, Morganella morganii
  misc_feature (219)..(228): n is a, c, g, or t
atgacaaaacagtcagttaccagactgaagccaggtaaaatactcgacacactgggggcaatgaaaaatagcctgacgcgagtatcacagcgtattgctgaatatatcctgtttcatcctgttgaagtcactcagctttccatcgcacaactttcccggacgactaaagctggcgaagcaactgtagtacgtttttgccgcactctgggctataagggnnnnnnnnnngggctttcaggactttaa

SEQ ID NO: 290821 - DNA, 342 bp, Morganella morganii
atgagttattcacaagccgagaaattacagttacttatgatgtgtgatatttaccgtgcgctcggtatcggaaacagctttaaccctgacgttatcgaagaggccattagcactgataactactgggcgattggctggaacaatgaagccctaaatgacggaaatgaattaccagaaaaagtcagattcgttattgatacaattgaaatgtatttattgctggattacacctacagcaacatgagtgacgacgacaagaagctggtatcaactgaagttcaattttttttcatcagaacactcaaccacatttcctggattcgatggcaacaacgagcataa

SEQ ID NO: 290822 - DNA, 714 bp, Morganella morganii
atggaagatgattttttaccaacaaataccgacagttggttctcttatccgcattttgttagcgatgcggtgataactgacggaaagttgccgagcgagtttacgattggcgggtgggtttatgtgatgagtaacccaagtatgcctggaatattcaaagtgggcatgacgacaaccacgccggaaagaagggctagggagctttctgcgtcttctggtgtacctaccccattcaaagttgaaaccgctttttattcatggaacccaaaagacgacgagcagtgcatacaccggattttatctgagcacagggttagcgaatcacgagaattttttaacgcctcgctggataagatcaagtgggcgtgcagtgatgccggtctggattgcagagaaagcgatctttcagagatggctatgctcacggatgtaatttgcactgacaccgttaagaggcttgatatcgaagatattttcgataatgaaggcctttgttttttcggtgataaaaacgcaattgcagagatgcttatcattatctcagcccgtcttatgcgaaaggccagaggcttttcattctatataaacaatggggaaataagcctcattgaaaaagctgatgagcagtatttccggggcattgaaagtcggcctcagagtgaaatacccaatttcattaaggagctaatcaatggccagagcaagaaatattaa

SEQ ID NO: 290823 - DNA, 894 bp, Morganella morganii
atgactgaaaaatacgaagtcacagccaccaaaaaggacggtacgacatatcacggactgaccactacagtagaagctaaaggacaagctgatgataataccgaagccatcctcgatgaattatcagggcagattgggcgagaccaattagctcaagacttattgggtgagattaacagtaaagctgaacaatcagctgttatggcgctaaataatcaaattaaagctaaccacgatgcaattttagcggagaaaatagaacgaggtacggcgattgaacaaagtgaaaggaaactggatgaaacgggtaagttattatccgaacggcttaatcaggtttcaaccgcgacggaagcacaagtggctgctattaaacaagaggaacaatcacgtattgagggggataaaaccgaggcgcaacaacgacaatctttagccatacaacttcgtggtgattataccggtaatgatttatcccaattaactgctggtctcatctcagcagagaagcaagctcgtattacgggtgaccaggcggaggcaaaagccaggcaatcactggaaacccggatgaatgggaatgtttcagtaattaataaatcattagaagcgctcacgtcaaaacagcaggcgcaaacgcaagagctttcaatcctcaattcaaatcttaaagggaaagcggatagtaactcggtaaatgaattaaatacgcgcgtatctgatattgatggcaaagtgacgtcagcaacttctcgggtgcaaacgttatccagcaaattagacaaagtaaaggccgatttatcagagtcagttgttgatctggatctgtcagcattagatgaaagtacttattacccggttatgcaactcacggctccggcggttttgccatga

SEQ ID NO: 290824 - DNA, 525 bp, Morganella morganii
atgggctatactcgtgatccatcatccatccaatggcgttggtactgtgaaattaaagataattacgatgtcattattaatgatgatgggaaaggtgagtcagcagatttagtggggttgagaatagttgatgactgtattgttctctccttaatccattgcaaatattcaggttcagaagaagcaggagccagacttaaagacctttacgaagtatgtgggcaggcacagagatgcattcgttggaaacacttgaatctttcctatttataccaccacattaagcgtcgcgaggaacagtggcgatcgcgtggtcattctcgctttctgaaaggcactataaaagaccttgctgctatgaaagagcgctccagaatcacacctcttaaattccaagttgttattgttcaacctgggcttagagtaagtaaaattagtgaagaaggccttaagctacttggcagcacggcgctgtttatcaaaaaaacaacgatggcagatttagttgtcattggttctaaataa

SEQ ID NO: 290825 - DNA, 123 bp, Morganella morganii
atgataatcaaagaccctgttacgtgcgaatctctcgtgcgcgataactattcccgcatgccagatgatggctgtgatcataccaacggtcacttaaaccggctttatgtcgcgcgccggtag

SEQ ID NO: 290826 - DNA, 1803 bp, Morganella morganii
atgccggttaagattcgaagaattgaaattacaaactttagatcaattcaaaaaatggtcattgatagtgcacggttacaaattattgttggtaataatgatgctgggaaatcaaatatattaagggcattaaatctattctttaattcacaaacaaaccctggtgaaagttttaacttttccactgattataatgtttacgcagccaataaaaatgctaaaagctctaaaaaagctaaagaaataaaaataaaattacttcttgatattccatctagctatcacatgacaaatggagatttgattgaatgggaaaaatcttggcggtcaagtggattgtacaatcaaaatattcaagggattaaattacataatggtcccagaggtggtcggacaatagaaaaacaagaaattccggcccgctcaaatgtgaggcagttgcttaataatataaaatatgtttacattcctgcaattaaagataaagaatatatcgcaaagttaagaagtgaaatatattttgttgtcaatgcggtatttaatgagaattttagtgattcaagtaaagcatttgagatgagtatcgctgaaaatcttcatgagctaacaaaggagattagcgaatcacttggttttaattctaaaatttcactaccccgagatttaagcaatttatttggaaatttagattttctaaatgaaatgaaaatatctcttgatgaacgtggtgatggaattaaagctcgtcatataccgttaatattaaaatatattgcggagaaaacaaaaacattacaggctagaggcaatcctccttatactttcatctggggctatgaagaaccagaaaataatcttgaattaacttcgtcaataaaactagctcttcagtttaaaacttttgtaccagaccctgtgtcgcaattattcataactacccattcccctgcattttataatctatctaaaaaagatagcactgttagctgcatttttattgagaaagaccagtctgacataacctgttgtgatgatgaattagcagtgcttgatgacaaaatgggcgtaatggaattgctgttaccctatattgaggaagtgaaatcccgtatagaaaatattgaatccgttagtcagctcggagatgaaaaggctgtaatttacgtagagggtactagtgatcaaattataattaaaaaggcaatagaagtttttatacctgaaagggtaaacagtattgatgtaattacaaaaaactatagtgcaggggtgaattatgtctgtgatatgcttaaagcatattttcatatgcataaacatcatcagaataaatataaatgtgtaggtattttagatgctgatgaagatggtaagagagcaaaaaaagagcttggccatattcaagattttggtaaatcagttaagtgttttacactaaggccgacacaagatgtgctcaaggcgaaaaaagatggatatgaaatacctggggttttagaatctaattatcctatctctatgtggcaggatgaattagaaagagataaactagaaaaaagaaccgacgtgattgaaatacttacacctagaaaaaataatcaattaattcaatcagggataaaactctccgatgatttagaaggcaaagactacaaaataaaagttgaatattctgttcccaaagaacgtaagattccgcttgcaaataaaatagctcaaatgagcgatgatgattgtagggaaaccttgagatttttagaagatacattaagggaaattgaaagttttttattttctcagtga

SEQ ID NO: 290827 - DNA, 372 bp, Morganella morganii
atgagcaacaatgacctttcaaacgccacttttgaaacaggacttcagattgtaaaaacactaattttagtgaatggcggagctgttatcgctctcttggcgtttttaggaaatgtttggagttcagggatgaaaagagcatccctggatttatttgctttatctatgatgttttttggtataggtgttttttgtgctttattaactatattatttgcatatcttgcaaattttggacaaattgccaattactcaagccttaaaataaaaattttaagtagaatcatgatgatatttggtgcatcaagttctatattgtttatagtcggcgtgtaccattcatatttagcaataacgtgccaatttaaataa

SEQ ID NO: 290828 - DNA, 534 bp, Morganella morganii
atgaaaaaggcaatcacgatattacttaacgggtgggtgtgggctgttgtgtttttcggtctgtggatgttcagcatgctgtcagccgaacaaacggaaagccaacataaagataaggttatcactgaccagcaaaaagtgattgataacgcctacaccagtatcgatatttttgaccgcgtggcagccgcaaacgccaaccggaatatgcaggcagaagcccaatcacaggagaagcagattgaataccgcactattatccggaaagagccgacctgtaatttgtatattcctcagtctatttctgatgggctgctcagccacgtctacgccatccgtgtatcagcaatgcgttccgctcccggcatcactgacacaaccggtattggcaccgctgccacccgccgactgacatattgccaggcggttgaatggatagagccgttgctgacgacactggataaagctaataaccaactgttggcgatacaggcgctggaagttgagagtaaatataatatttggcaaaaatga

SEQ ID NO: 290829 - DNA, 219 bp, Morganella morganii
atggcaaaagcaccgaaaccaaatgagcctatctacaacattggcgatcaggttgttatcaaatctggaggccctactatgacagttgaaaaacctatgtgtaatttttcatctggaaattttaccggcgattataaatgccagtggtttgcaggaaagaaactgaattcaggtacctttcctgaagagtcactagagctatacgtcccaaagccataa

SEQ ID NO: 290830 - DNA, 324 bp, Morganella morganii
atggaaatgcgcaggttttatggtaacaacaatcaaaaaactgaatgtgagtatattaagtggcttaatgagtaccccgatggttttattttaaacttcagaaaagataccgaaggaaaaggcagtaaaagtacagagcgatttgcacgtttacatagtgcatcatgtaaacgtctttgttcccgccaaactgcaaaatcacagaccccatttaccggaggaatgtatgcaaaattagtctcaaactcatttgaagaattggataaggaaggtcgcaggatattagggttggatagtataaaaaaatgtccttgcttagcctaa

SEQ ID NO: 290831 - DNA, 510 bp, Morganella morganii
atggttctttctgccggttacacattcaatgccatgtctgtccgaaaacacccattacaggcagacaatatttcactgaagatatccgtggtacaaaacggactgattaccatcggttcaaaaaccagacaccggtttgtggacagtatggtaacgcccacaggacaattcataaaagtccgtttttcatcaccaatatattataccttttatagcttttatagcttttatagcttttatagcttttatagcttttatagcttttatagcttttatagcttttatagcttttatagctttctttctgttgtcagtaatccgggcaataatattacgacaatgaaaaatgtggcaaaaacaatagcgaaaaggctctgcggggtactgaataccgaggctcttaacagtaagatcaggttgctgagaataaaaaccgggggataccggaaaagggaacgttttaaaccgggagtagcatttcacttcggaaagccggatatcagtttttaa

SEQ ID NO: 290832 - DNA, 1074 bp, Morganella morganii
atgatccctgagatcggcagtatcttattatcattgtcactgtcattatctatattttcgattatttatcctctggccggtgttttgaaaaatgatccgtatttgatgcgaagtgctggtattttcacgctgagtagttttatttccttgttcggctctttaatttgccttgcttatgttataatcataaatgattttactgtaaaatatgtaattcagcattcaggaacacaacttcctctttattacaaaatagcatcagtttggggcggacaggaaggctctctgcttatgtgggtgttttttatgaatggatgggcagttttaaccgcactctttaataatatatttcctgtcattaaagttaaggtcttaattatattgtcacttattaattctggtgttatagcttttattctttttatttcaaacccttttgagcgctcacttccttttattcctctggaaggatattctttaaatccaatgcttcagaatgttatccagattattcaccctccactgatatatcttggttacacaggtttttcagttatttttgctttttctgttgtatctcttataaccggccgtattgatatattattatctgactggttgcacaggaaagctattatttcatgggtattcttaaccggaggtattttatcaggagcattatgggcgtaccatatattgggttggggagggtggtggttttgggatcctgtggaaaatgcatcattaatgccgtggctagcagcaattgcattaattcattctttatatcttgccagaaaaaataatatatttatattatggcctgttttgctgtctattattgtatttgcactttgccttactggtctttttttagttcgttcaggtattttagtttctgtacattcattttcgcctgatcctcatcagggtttgattttcttattatatttagctatggtaattagtccttctttgattttatttgcattcaagggtcagctgtttattttaaatcatagtgattccgttttctctttcaattgctataacacctttaataaaatggagtga

SEQ ID NO: 290833 - DNA, 474 bp, Morganella morganii
atggttttagcacatatgggtattccggttatggttattggtattattttcagcgaatattatgctgtgacaaaagatatcagtatagaaacaggaaaatatagttcaatttccggctatcaaatttattttgataaggttgatgttgtttataataaaggttatgttagtgaagttgttacagcagaactttataaagataataaactaattgctaaactttacccagataagagtttttatccggaaagaaatataaccattacaaatccggcagtgtaccatagtatatcagatgatctgcatattattcccggagaaaatatttcaggccatttatggacattcaggttatataaaaaaccatttatgtcattcatttggtttggcggatttcttattacttttggtgggatactgtgtttgttttacaaaaatacatatatagataatgagactgaatatgaaaaatag

SEQ ID NO: 290834 - DNA, 477 bp, Morganella morganii
atgaataagcgattggttaaaaaggtaatagccgcttgtactgccggggcaattgccggtgcgctggtactgatccccgcatatgaaggtgttgagtatataccttatcgtgatgtggccggagtgctcaccgtatgttatggccataccggcagagatattcagcccggcaagctgtacacggacgctgaatgcaaggccctgttgcacgacgacctgacgaaagtccggcactcggttgatcctatgattaaagtgccgattgatgacaatacccgggcggccatctattcatttgtctataacgtcggccccggcgcgttctcgcgctccactatgctgcggaaactcaacgccggtgatatcgccggtgcgtgtgacgaaatgaagcgctggacattttccggtggtaagcggtggcagggtctgattaaccggcgcgagacggagaaagcgatatgtcacggaaccccataa

SEQ ID NO: 290835 - DNA, 681 bp, Morganella morganii
atgaatcttttttctagctatataaaaatagtctttgcgggactattttttgtatcttttccttctttttctggaacggaaagatatatttgtttaaataatggaaaagaacaattggaattttgtcgcaatgagggttttggttttgattacagaatgctatcctctcctcagcatttattggtatcaagaaataaactagaaaatgaagttggtaatatatataactatataaagttacctagcaatgaagaatctatattttcagcttcaaatatagctgctggaatggcgttattagtatctattgtagttcctatatggcagagaagaaagcaaaaaaatgatagtgtgaacgatggtttctgggctcaagaaataataattccaaaaataaataggtgtattgaaaacacatatactaaagctaagtgtgttggtattaataatcagaatgaattagtggctgaaattgatgcgttaagggattcctttacattaatacaggtttatccaaaatcagaaaactcatatttaaatctaaataagatatgtgatgattttgagaatgctatttttgatgatgtggatggctctcttgataatattagtgttgcttcatcaaccttttatgtaaatataacaaaagaattaatcaatacgcataaaaaggtgacgtaa

SEQ ID NO: 290836 - DNA, 345 bp, Morganella morganii
atgataatggctaatgtaataatagatttaaataaatttgctaaagagcaaagtaaaacgttgttcgcagggcgagctaatgggcaacgtgccgcagagcaatttagagttaatgaatttgataaagggaatgatgatattatttcctttaaaatagaatcaggaattgtggtgtctagttcttattatttaggtatgttggaaagcattttgcctgaattctcatcttcaaaagaattttatgaatatgtgcaagttgatggtaagaaatatgaaataggcatgatgaaagagttagaaagagcaatcgaaagaggcttgtataaaaatgaatcttttttctag

SEQ ID NO: 290837 - DNA, 1383 bp, Morganella morganii
atgaaaaaaaataaagctaatggtcgagatatttatattcgaagtttccgtaagtttcttttgtctataaaaagaaaaggaagaaaatatttacctttggttaacaccagtgaaaaatataaaagaataaaaagcccaaagagcatattgaaatttgttaattttttttgtcttttagggaagagtaaggttaacataaataaatttaatggtgttttaactataccaaaagatttttcatttttttatgagccagcgaaggctttaacttttatatataaagcaactaaaattgtatctgaaagtgaaataaaagaaatgactctatgttatgatagggttaaggaatattgccttggtgctgaatgtttgttggctatggcactaacagaagctcgtaaaataaatccatattctgataaacgaggggtgctaattaatggaatataccctgataatgatcagcatttagaaattgttagagatattgggattgttagagaaatacagcgagatgagtatacagagataagggataattctgatagagaaaaaaagaaaaatcaaattatctttataaaagatagtattgaatgggaagatccatctgtacatgcgaatgatactaaaaataaaacatctgagtcatttgttaaatatataaataactgtttaaatccatacaaattagtattaaacagtaatgctgaagataaattaaagtcatgtatggctgagttattagataacgcagaaagacattctgggcttttgcaaaaaccactttggtatgtcagaggatatgtaaatcataaacacgaataccctacatgcgaaatggttatttttaactttggtaatacaatccccgaaacatttaataacttatctaatgaacatttctctttgagaaaacatattgaaccatatgtttataagcatattagtgcaaagaaaatgtttaaaaatgggttaataacagttgcagcattgcaggagcgagtgagctgtaaaaatgagtcagcatctgatagcaatggcaccggaactatggagttattagatttgttccaagagttacacgatagtttgtgtaaattaagagatgttgaaatgaaaccagttatgtcattagttactggtaatacgcatataaagtttgatggtgcttttagaataataaaaaagaaattacgtaacagtgatggtgagactcagatttatccgttaaatagcacggggcttgaaaacccacctgatagaaactatatccataacatgggggatgtacgctttcccggtgttatgataaatattagattccccttaccatctgaagtgatggataatgttgaaatgataaaagaaacacaggcggaataa

SEQ ID NO: 290838 - DNA, 177 bp, Morganella morganii
atggtaattaccgggataagtgtgatgaaacagaaaagacagcaggcaactaaaataaccgtatcaggaaccataacaaaagaccctcagcgggtcaggacagcaaccggtaaggtaatggtaacgatgaccattcaggctgagagcgaactccgtagtccccacggcattcgataa

SEQ ID NO: 290839 - DNA, 447 bp, Morganella morganii
atgaatgaatttatggagcacgtaaggttagcactggatgattccattaattatctgacatgggctttcttttcgctggtggctgcatttgtgtttgatcaggctatatctattaaaaaatttaagaataaggtcggaaacttcatttttgtggggctgttccggctctattttctggcatttatggctgccggggcggttaatatcgagtttatacgtcaggcgttttcccggcgactcgatggttttatcatcatctccaacatattttgggtgctgattttagtgatgattgttgttaatgctgcactggtggttatagggatcggtagcaaaaagaagaaatcggtcaccggggattttacgcagggcactctcattcccgggatccgctacacggccggggggattcgtaatcagggtgaggaaactacaaaaatcgtgtag

SEQ ID NO: 290840 - DNA, 192 bp, Morganella morganii
atgatgaacaaaaaattatctcgcagagaggcagcccaggaattatgtgttagtccacaaacattggcaaactgggcttgcaccggaaaagttaatattccatatcacaagatcagtaagagaaaggtcttttactatcaatcagatattgatgcctatattgcatctaccagaaccacccacgctgagtag

SEQ ID NO: 290841 - DNA, 753 bp, Morganella morganii
atgatattacctgagaggttatactatccattgcctgatgctgcaagaaaattagattgcacggttcaggatattatccattttggcgcgataggtgctattaatatatctgtttatatcggtaatcataaagaaaaaaataataatagctttcatttgaatatgcctagtgatttaatattaaacattgatgattttggtaatatatatggtgatgggtggtatatatataatattgaagaaagacacgctaacgatgagttaaatttagatggttatttttcaaacggaattgatggttttttttatataaataattttgatttaacaaaaatagaatttgatgcaacttgtaaattagagttaacacaagtttcaaccggtagtgaatctggttataatggctgcattgatgttaattttttaacagcccccctatctattgatagaagttttttgtgtataaaaaaagatgacatatataattttaaagaaagtataagcattcatcggaagggacaatctttattgacagagtcccccaaaaccatagcaacaaaatctgagcttattccggcattattaaaattaatacctgagtttgatgatgtggatctttgtactgcaccaatcgctaaaataactgatttagttgaggctatagcagcgaaaagaggtgtggttattcctcatatccacaaccaaacatggcaggcttacttgggcagagtgaggaaaaataaaggaaagtga

SEQ ID NO: 290842 - DNA, 828 bp, Morganella morganii
atgtctaatttagacgaaaccgttatttctcagattaagaatatggctgttgctgccttaagtctggatgctgtagaaaaatccctctgtcctgctgtggttttaccggatgatttcaatgttaaaagcctggagcacttacaggaaggtcgctatcgcttccgtggcgcaatggatacaaccagtatcacggattttgtgaaatattccctgcaacacggtattgaggaaggtgtcagctgttttattgatgctgatgaaatggctgctaaaactatttttaatatcggtaccatcggcgagccggggcatgctgacaatacagccaccgtatcactgaaaaagacagcaccttttgcatcactgctgaatgttaacggccgccgtcagggccagaaggaactggcagagtggctggaagattggcgtgaaaacctcatggctttcgatgccgatggtaattctctagatatccggcaagcaatcacagctgtacgcaaaatcaccatcgaagcaagccgctccgcagatcatgaagacagtgatttcggcgctaagcgctctgtgatggaaagcgtggaagcgaaaagccgtgacgtcatgcctgcagtattccagtttacctgcacaccatacgatgaactgtctgaacgtgctatcaaactgcgttacagcgttctgaccggtggtgatgtacctgtgctggtactgcgtattgttcagcaggaaaaactggaggagcaaatcgcccaggaattccgtgatctgctggctgataaattcgaagaaactgaaatccagacctatatcggtaaattcaaagcttaa

SEQ ID NO: 290843 - DNA, 462 bp, Morganella morganii
atgaaagccagtcaactttctacgctatttcaagatatacaaagcaaggtatattcacattatggcgctgcgtatggcataaatagtagtgccggagataaagatagcgctaagttacattcctacatgctattggttcttgaaatttacattgctgactacaaagaaaaattaaatttaagcaagacaccatttattaaattgacgggtgattcagtattaaggcatgcgatactaactgaataccggtatccaattgaacaggctaattctctttcgcttcagcaaatggtttttcttcttctgaaacacctatcccctgatagcttctgtgaaggagttcgtgactatttaaatgtaataaaattgaattcagatcattcgaaaattgattggaatctgaaagtaaactggaatctgggtgatggcgcagattatttatcagggcctgacactgaataa

SEQ ID NO: 290844 - DNA, 720 bp, Morganella morganii
atgattaataaatacttggctatatgttgtttttttatctccggaagtgttttctcagcttctgattataatgaatcaattgctgtgcgtaatgtttctgatgcgcttataaatagtgagataaaaacatttaccgaaggtggtgtaaccgctttatttgaatccatccctgaaaataataatagttccgatattatcaggaactatcataaaaatgaattatcggctaataaaaagtatttagataaaaaaataagagtttcaggaagggttagtgagataaaatcgagtcataatgacggcggtattgttgagatgtctgatacatcgatacctggcgtcattcaattgcaagtagatgcaaatagtgactacattttaagtctgtctcgtggcgatttcgtcgacattgtgtgtgttggtgataaataccaaatgagcattttgacaatgaaagagtgcatgccaacgaaagatttgataaaaaatatagcattcaccacaaaaaaatcagcaaaatttaaagctgcatcatatgccatgtttatggccaatgaagatattttaatgtctgaatgcattaagaattcggatgaatgtgaaaaaaaattattaaacttaatgataaatgaaaaagattccactaatgaacgtgtgactaattatataaataaccacaaatcagagatagttgagaaatttggtgatgtgtttctttaa

SEQ ID NO: 290845 - DNA, 306 bp, Morganella morganii
atgaatgttatagaaattcctgtttccaacaaaaaccagcaatttgatattcagcttggcggggggcgttaccgcattcgcttggtataccgtcagttttgtgggtgggttgtggacatgatgactcagacgggatcggaaatttttattggcgtaccactggtcagtggagtggatatattagaggcgtatcggtatacaggtatcaaaggcagcctttttttttattgtgagaatcaggaaaacgagacggctcgggatgaattaggtattggcaataggctatacttcacttatggtttgtga

SEQ ID NO: 290846 - DNA, 480 bp, Morganella morganii
atggctcaaattacagacccaagtaatgcattatcaggctttcagctcgcgttagattctagggggattcaccctaaaaaatgcatgctgcatactgatctttatacttttacggatgagcaaaatggagtgcgtcggtatacgtatgcccatattgagaatggaattgctaaaggtatcgttatgtttgttacaatacctaaaataaacaaaaccccatcactaggtattggttatgcagtgatgaaatccaatgaaaatcaaggcattgctacgcgattagtaaaaaaaagcattgatgaaattaaatcacgctttagtttttctttttatttacaagcaattattgatgccaataatatagcatctcaaaaagtggcattaaaaacattgccctgtactccggtgaaaataattgaacaacaaggtaatatgcctgcctacgattttacattctatgtagacaacaataaaaagtaa

SEQ ID NO: 290847 - DNA, 756 bp, Morganella morganii
atgaatatcatcgctcgagtatattgctatgtatataaaaatgcatataatagaggtctgacattaaatgtaaataacaaaattatgataacgcactttaccaaagaatttgaaaatttattatctattatttcatcaaattcatttctattaaagtattgcggtgagtattttggtgataaaaatggtagcgtggtttctaacgctgcgcaccccatggtttcatttagtggttatgattctgatgaattaccaacaagaaggataacatatggtggatatggaatatctcttcataagagttgggccttaaagaacggaataacacctgttaactatatagagagaaactccccagttgctttaggacttatagcactgcttaggtctcgtcaattgaacgaattgcctcgccatcttaggttgccagttattcagctgaagtgttttacaaagcatgtctatggatataacagctattttcgtcttaacaactatgatttcgaacatgaaaaagagtggcgatatatcccaacaactaagcaaataaaaaataacttaatttctataaatttctcagcatacaatagacgaaaggatttttataattctaagataaaagaattcccccttaaattctctcgcaaagatgttagatacatatatgtacaaaatgaaagtgagaaaagtgaaataatttcattttataatttcacaaatggacaggttattatcgcaccttggcaaaagatttaa

SEQ ID NO: 290848 - DNA, 1173 bp, Morganella morganii
atggatctattctcaacaaaaatagccacaaacaagctaaataaaaattttaaacttatttgtaaagatccgaaacttgccccagtaagagaagtgctccaatcttgggcacgcgggctacagcagcgtagtggtgagaaaactaaatttattaatgaatttcagaccaccttcaactctgcgttatgggagttgtatctgaatgagatgtttattcgcctcggctattcggttgattatactaaagatagtcctgatttttatgttacaacaccatccggttacaaattcaacgtagaggcaatggtctctgacagacctcacaagcctccagttggcaatattttcagtgaatcgaaattcaagcatcaatccacgctaaaacttctcggaaaaattaaagataagcatgacatatttaccggcattaagggtaagaagttcccctattcaacgatggaacatgtagtcgataaaccattcgttctggcgcttgccccatttgattcagacttatcattaactcaaaataatgttatcattaatcgcgtgttgtttggcatcgaggaaccttcaatgagggatctcgcgaaaaatcagcagcgaaaagtctcatcgattaaaaaaaatgatcatactgaaataccattaggtatttttacaaatgactcatataaagaaattagtgctgtaatattttcaacaacgggtactttcggcaaggctgtagttcaaagtgggattcaacgatatataagaacaacaagatttcgcgctcttgatataaataacttcattgcttatgaaggtatggggaatgagggatctcattctaagaaaattggtcctgagcattatttaaaaaccaaacgatacttttataataatgaagttgttggtgcagatattgagttatgtcattccagagactatacagaaacacattttgacggcttgcatgtttactacaaccccaatgcaacagtgcctttggataaaagtatctttttccctcctgaaatcacgcaaaacttttatgacatggcgaatgattcgcctgtgcagaaccatcctgatagagccttggtctcgcggcagttgtttgaaccttctaaggtcagtctgagatatattgttaaacactggttccctgagtatatcggagatctttaa

SEQ ID NO: 290849 - DNA, 414 bp, Morganella morganii
atgaaaaatacaaagcttgatcttatggagaggtatttaattattctcgataagtttgtgagtaaaatatcagaatctggagtgccgcaacaaaaagtcatcgaacaatcatatctattttgttctggcttttatattaaatataagcaagaaattgaaaagataaaattctctaatagtgatgttgttttgacgtttctactctattcatactataaatttattaataagatagatgatgatttaattgataagagacgtataaggaaaatatgctctttgcttattaattttattgtcgataatggtagtcaatcagagaaggtctatgttcaggaaaaaaagaagtatgatgctttccagttacaaagagatttatcaatgaaaaataagagaaaaaaatatgggttgtaa

SEQ ID NO: 290850 - DNA, 198 bp, Morganella morganii; identical to SEQ ID NO: 277455

SEQ ID NO: 290851 - DNA, 1839 bp, Morganella morganii
gtgccgggaccgaatgaaagcgacgaaatcccgcagtatcaggcaacggcgaatgaggtcatttccggtgagataaagggcggcgaggcgatgattaaaatcgccaggcaagatgagttcgattatttctatgacatcatcaagccacgctcagtatcaatgaccgtaaatgtatcgtatggcacaccaaccggtaacgtgacaaaagacatcaaagtcgatgcttatctgtctgaggcgaaaaaaacagatgacgggtcaatcgtgctgcctaaaaagtattacgagttctttttcaccagcctttccggtggtgacctggcgacgctgccgccaaatgctgtcgtcaataccactaaatttattctgtatgacaatcagtttttgactgtcggtccattcttttcaccgatggatggtggtcagttgtgggtccacataaacgcccagctcggcgagggtgattatgccaatgccaggatggagttctggaaagtggatgataacaacgaggaaatttccggcaccagggaatcatataatcgtggatttccggcagcgccaaaaacgaaaaattactataaaacggagaaattcacaccacaaggtgggtacggtcgatatgcattccagttaaccagactggaaaacagtaatgaccacagcatcctgaaactggagaaggcccacatcatccgccgcaggctcaatgagaagcataatgacgatactcttgtccgtgtgaccgtaagggcgacagagaacccgacaagctcgcgtgagcgcaaatataatgctctggtgacaaggcatgtgatcagctatgacatgatcagccgcaaagtggattacacagagcggccatcacgctcatttgcggatgcagtggcacatacgtggctggttaccggaaagcagccggagaacactatcgacctgcacggactgtatgagatttacgccggactgccggacaagcgcctcggatactttgattacacgtttgatgacgaggacgtatcgttaggccagcgtgtcgagacgatctgcaatgtggcgcgggtaacggcgttctttgataacggcgtactgacattctcccgtgaggaggagcggaaatatccggctgcggtgtttaaccggtcaaatatcaccggcaataacttccgcatctcatacgatatgtcgctgccgggcgggaatgacggcgttgaggttgaatacgttaatccgcgaaccaacaaaaaaacctatctgaagtaccgtatcgaaaacggcgcagtggtgaaaggagcagcaaaaagcccgaacaaaatcaccctgcacggatgccggaacgagtatcaggctattgaccgcgcattgctggaaatggatcgcctggtaagccagcggacaagcatcagcctgcaaacactggcagacggtgactatgtgtacccgggcgatatggtattggtggcagacagctacgacagtaaccagcagggcgggcacatcaccggaagaaacggcaatgtgttcagcaccagtgagcgtattgaattttccggtgacatggtggtgagcatcaccgatcacctcggaaactcatccggagaatatccggcgcgggcgcgaactgatacggataagggctttattgccgatatccatgatattcagctcaatatctatgacggccataatgttcagtcaccgtcacgatacatcatatcaaccgtcactgaaatggacgccatgcgctgggtagtctctgacaagaaacctgacgcagacggaacattctctatcaccgcaagcgagtatttcgcaccgaaagcagactataacgtctga

SEQ ID NO: 290852 - DNA, 894 bp, Morganella morganii; identical to SEQ ID NO: 279729

SEQ ID NO: 290853 - DNA, 447 bp, Morganella morganii
gtgggttttgtagtcaatgccgctgtccgcaccggccaccagcaccgctgtgccgccgaacggatagtattcctcctgactcagcagtttaccgtcgccatccgtttccaggccgctgctgccgatcagattgtcgtaactgaaccgctgatgatcttttttaccatccggccaatgcagcagccgtacctgtgcccgcccggcaacaccggcgcagatcacctgataattttcttttccgcttcgcagctccagccccggcagatagatcacctgctgtgtctgtgtgctgttaccggttttctgtacggcagttttcaggatacgctgactgcccgcatcataacggtagctttcgcgatcaccggcagcaccgttacgcaccaccggcgtgacctgttgcagctcgccgcgtgttgtccaggacagggtttgtcccggctgtaa

SEQ ID NO: 290854 - DNA, 237 bp, Morganella morganii
atgaaaatagacatcggcggcagcggattacaggagcaggaattgcacttcgtgtcctacccggtgcagaccagcgttaacggtgcatctgtcacatggaccggtcaggttatctgtaaaaatctgcataacgatgatgacgagttcggtgatgtgattattgagttcccgccgccgttcggcagctggctggatgtcattgtcactgaaacactgccacggtgcaaggagggataa

SEQ ID NO: 290855 - DNA, 186 bp, Morganella morganii
atggtcggctcgagatactgtgccagcccgatagtggtcagtgtggtggaacgcaccgccgccgtgaagaacagcagcggcagcagcgtgacaggcgcggtcagtataaaacagatgcgggtaaaggtatctgcggtgctgaatgtgtgttatgaaccaccaacaatgagaaacaaagatagatag

SEQ ID NO: 290856 - DNA, 1029 bp, Morganella morganii
atgttcggactcgacaataaatccggcattaacgtaatgccgccaatcgccccggctgacagtcagtccccgttgtggttcacagaagggggcgcgggtctgtctgccacctatcctggacaggactggtttaatcagattcaggctgaattgcttaacgtcctgaaggcggcggatattacgccccaaaaaggcacactgactcagctgtcctcagcgatttccaaactggccagtgcttatgcggtgtccattgttcatagcactggccagtcattaaccagtgtcatgagtcaggatggcgcaacaaaagcattctctccgctatctctttacggcaaggagtcagatggctctgcaaagattggctcgccttcaggtgctgtattaacattttcatataatggttaccttggggtaaccaataaagatggcgttcaggttgtatctttcacaaacaacggcgttttggaaaaagggtcaatacctgttggtcgtctgaccgggcttactgactcccccgggcaatcaaaaacagctgttatgtctcagtatggcgttacgcaatacgcggcagaagcttccgtttataccaccgctagtgataaatcagcaaaaatagttactccttcaggccgtagtttttctgtctcatacaatgcatataccggcgtacatgatgctgacggaaatcctatgtggctgtttgatggcgaaggtaaattaacaaacggcactatccctgttgcaagggtgtcaggcttgcaacaaatcggtgtgggccaaagatggtacaacagaacagaccggcaacagggaactacatataccaatgaacgaaatatgccgattgcagtggcggtgtattgcctcggaagtaacctgtacgttaatgaggtcagtgtcgccgggtcttattatcaggcgcgaagcacggtgtttgcaattgtccctcccggagcaacatacagatgtgaccggcagtccggcgtaagtgaaaactatctaacttgggcggagatgtactaa

SEQ ID NO: 290857 - DNA, 426 bp, Morganella morganii
atgaaatacaaatactttaaagatgaagtaaacaatctggtgtacgcctacgatgaaaatcaaatgtcatttgttgataaaattaatgcgcctgattttgatgggaaagacgaaattccagccgtatatttcgagattgatgaaaaaataaagtcgatgaagccgatgtctgacaaggagtattgggaatacattaaccctccggtgaccaaagagcagttgatcgcagaggctgaagtcaaaaagcagatgttaatttctgatgctaaccaaaagactcagatgtggcagactcagcttatgctgggaataatcgcggaagaagataaagccagcctcaaagaatggatgctgtatgtacaggaggtgcagacggtagacacctcaacagctcctgatatcgactggcctgtgaagccagcttaa

SEQ ID NO: 290858 - DNA, 1170 bp, Morganella morganii
atgaaaatcaatatacaaaagcgagaaccagataagaatggcctgcgccccatcaggcttgtgtactattacggctcaaagacctcggaagacggttcaagggctcaaaagcgctcttacgagccgctgaatctattcctctacaacaagccaaaaaacgcagttgagcgcgagcacaataaaactacattgcaaaaagctgaggccattcgagccaagcgtctactggaaatggaatcagccaaacacggcttagctgaccgcacaaaactcaatggcagcttctttgactacttcgaccaaattacagcgagtaaagcatccggtagcaaatccaactactcaatttgggtttctgcgggcatccatctccaccgttatcaccgccacgcagaactcacttttgaacaggtagataaatccttcttggaagggttccgccattacctactgcatgaggcaatgacaaaatcagataccggcctctccaggaataccgcctgtagctacttcaataaaattcgggcagcactcaaccaagcacaacgagaccgaatcatcagagataaccctgttgaacaagtcaaatccatcaaagcagagaggacacagcgcacttacctcactctggatgaggtaaaggcccttaccaaggctgaatgccgttacgatgtgctacggagagcatttctgttctcctgcactacgggtctacgctggtcggacattcataaattggtgtggggtgagattgaactatttgctcaagggcactacagaattatcttttcccagataaagctcaaaaattctggcaatggcctgcaatatctcgacttaccggattcagcagtacgtttgctcaacttggaaaacaggggaaaacctactgaacgggtttttaagggattgcattacgacagttacagcaacgtcgcgctagtgcagtgggctatacgagcagggataaccaaacacgtgacctttcatgcaggccgccacacttttgctgtaaaccaacttgcccgtggcctagacatctattccctttccagattgcttggccacagcgaactcagaacgacagaaatctacgcagacattctggaaacccgtcgcacagaggccatgcggacttttccggatatttttaaagaagagtcagactaa

SEQ ID NO: 290859 - DNA, 366 bp, Morganella morganii
atgtttaatatcagacggttaagcttagatttaaactcaatagctattgttacggcaattggctatgagaatcctttgtcttcattatctgaaattgaacatgaattaacttgtttgctcggtcaagagttaaatggtgaggtaatttttgatctcgtttgctcaaatggcttggaatggaaccgttttttgtcattacaagtcaaaaacggttccttcgactataattctgtttctatattagataaaacagattttatttctcaattatttgatgaacaagcatatttcttaagtaagaatttacattatcttcaagactctgtacttacttctgacgaaattcctcgtgttatcggtgtttag

SEQ ID NO: 290860 - DNA, 1071 bp, Morganella morganii
gtggaacggagctacaagaacttaaaccttgatcgtgcggcgatcaaaaatttggtggagagttttgcaactgagcaccaatttacgattaagtcgatatcagcaatacctggcacacaaaaaggaactaggattgtttttggacgcacaggcaacaaatttgcgactgtaaatgtgtttttcaacaaagatggcacttcaactatacagtatctgactggtgcgaatcatgatattggcaaattaatgaccgatcatctttatggttcaataaatccagctgaatttgaacaagttaatatggttcttgaggggttcaccgagtctgttatattacctgttttagagtttgcagctgaagagtctcacatcaaagttgttgtgcatgctcaagacgaacatagaactgtatggaaaatacgttctgaagaatatcaagatgaacttactgtaacacttcatatcagaacggataaacttcaaatacaaggtcgcccactatcatgctatagagtttttattttcaacctatcagaactacttgatttacagggattagaaaaggttctgattagacaagaagatggtaatgctgaaatcgttcagcaagaagtggctcgttcttacctgcagtcagtcctcggtgaatcttacgaacgactgcactctaatgtagaaaaattgctcatttctggtctttgtgttaagctcgcgtcccccaatttgcctgactactgtatgttgctttatccggagttgcgttcaattgaaggggctttaaagagtaaattcatggccttgggtatcgaagttggtaaggacggatttggtgatttttttgtaaaagaccaaggtgttcatgttttgaatgctgactgtgctgctttgtgtgcgaatgctgaagccgcaaaaatcattagtgaagcctatactttctacaatagagaacgtcatggcttattccatatggaagcacttgttgaagctagtagaatgattagcaacattgcccatctcatgacaaaatctactcaagcttgggatctcatcaagaaattatatagtatataa

SEQ ID NO: 290861 - DNA, 345 bp, Morganella morganii
atgactgaaaaagagatgcttcagcgcatgctgatggatatgtcattgcttaaaaaactgattaccgatcatatcaaaaacgagcaacttcctgatacgacaaaggaaatcctcacagttgaggaatgcgctgagctgacggggttaaagaaaagcactttgtaccggctgacccatgaacgcaagatcccattcttcaagcctaatggtaatcgggtgttcttcaggcgagccgatatcttggcttggttgcagagtaaccgagttgcttcttcatatgagattgataaagccgctgcagatcatctagttgctaaccgaaaattttatggtcggagatattga

SEQ ID NO: 290862 - DNA, 1674 bp, Morganella morganii
atgcaatataagttgcaggatgatgggctctattgcttgtcctctgatcggtggctgcgaataggtggttggattcaggtgttggctcgcactcgtttaactgacaaacgacatgggcatggagcgctgctagagtggcaaaattttgatggggttaggttacgtgaagttgtgtatgccagagacctgaatagtgataatgcacgtcagatcagggatatgctggttgatactgggtatcccttaactcctggccagtcaagttggagtaagcttcaacattatctaatagagcagatggctcttgctgctccggcgacagtggttaatcgaacaggctggcatggttcagtgtttgcaaccagtaactggactatcggttcggctgacgaaccgcaccatttcgtaggtcagctatctggttctacaacgttagaggaatccggaagtctcagcgattggcagacttatgtcggtcagctatgccgaggcaacccgttagcaatattcagtattggaacggcgctggctgccccactaatcgcatcttctggtatggaaaatggcgccattcatctggttggggcatcgtcgactgggaaaacgaccttgttgcaattggcggccagcgtctatgggagcaaccgctatgtccgcagttggatttcaaccagtaacggactagcggcagtctcttcagagcataacgacatgttgttgccgttggacgaaatcggaatggcacgcccggaagacatcgatacagccatttatcagatcatgaacggctctgggaagctacgcgccaacgtttccggcgagctggccatgacttctcattggcgaacgctggtgttaagtagtggagaagtctggattgcagagctacttcagcagatcggtaaaccgttacgcgctggtcagcagatacgcctggtggagcttcctgtgtttgggacctacggtgcgttcgacgaattgcatggtcacaagcattctcagcaatttgtggacgagcttaagtcgtcttgtcagcactaccatggcaccgtaattcgcgagtggatttcgttactgaccgagcgtcatgacgagctgaatagctacctgagtcaggaaattggtcgcctaagcggtatttggataagtgaccagatggcatcgcaggtgcaacgggtcatcaggcggtttgctctcatcggggcggcactttgtctcggtagtaggaattttatcctcccttggagtgaagaagagtccttggcagccgtccaccgaaccttgaaggcttggctggacaatcggggccactccagaaattccgaggaatttcggcttctcaaagcgctggaacgagcaatgaaagtctgggagcgcagtctcagtgatattgaacaagcgataggtcatgggggagctggttttcgacgctcgcatgagggatgtgagttgtggctgatctataaatcgcacttcctgaagcggctcggactgccgacccattacatgagggaagtggaggtgctgttacaacgcaattgcttggtaacgaatgagcgctctaggggaacctataagacgcggattaatggtgagtttcaattttttgcgctcaaacctgaccaagttaggcgccaccttgaagatttagagagggttgaacatgacgactag

SEQ ID NO: 290863 - DNA, 189 bp, Morganella morganii
atgacgggtaataaccaacctaaacaagaagaacggttactgacttatgctgaagtgtgtgatgttttgcaaacgtcacaagccacacttcgccgttacgtgcgcgatggtccaataaaacccaatcccaatggtcgtactgttcgctttcggtacagcgacatcacagcttggttgagtgatttgtga

SEQ ID NO: 290864 - DNA, 3216 bp, Morganella morganii
atgagccaaaatatagtttctaacagtacagcacagcatgatgccttcaatcacatatctataaaacgaaatcggccttggaagggcgaagaagaagttcggattgcttgggtgacagcattggaagctgctttagggcttcactttgatgctgaacgtgccaaaaaagattgcagttacaacaacgttattattgaattcaaagccccaggttacttcaagtcctccaaaagcagcgccaagttcaaagaagctaccgatgatcgtttactgccctatatcaagcgagaagctgtaaaagtaggtattcccccagaagactttatcgggatagcaattgatggcgaacacatttgttttgctcaagtccgtgacgatgccattgaaactcagcatttaatccctttttcagaatatgcggttggtttggtgatgcaggctattcgctctgaaactcgacgggtcgtgtcgattgataacttattggctgactttggtcacggttcccgcaacgcacaatctttgatgcaggcaatgtcaaacgcgctggcagatgaactagctgttgcaggcaacaccaaaatcaaaatgctatttgaagaatggagaacgctttacggacaggttgctgatatgtccgtgctgcaagctgacgccattagccgagaaatgggctttacgtggcagggccagccagagcaggctatgtctgggcgccttttcatcattcactcctacaactcgctacttatcaagctgctcgccgctgaaatagtctcagcacatggcctgtcgtccatacagcaacctgctcaagaaatggctgctttattagatgacgccgcgttgttggactcactggcacagaacatcgaacgcgcaggcatatttgcacaggctgggatctacggttttgtagaggaagctatttttagctggtacttggatgttgcacggaacaaagctcacgcaccatttattgttcccgcaattcgcggtattttgtcagcgctatcgctgtaccgaactgacaagttaactcatacccgtgacgttttacgagatctttatcaaggcttggttcctggaaaactgcgacaaagtttaggtgagttttatacaccagattggctggttgactttgcggttgaaaatgcacagaacggtacgtggcttaataagcgggtacttgatccaacctgtggctctggagcatttttattagccgtcatgcgccggatgcgcgatgaagccattcaagaaggttgggacagtcaacgcattgttcgacatttgtgttcgtcagtatggggttttgatctcaatccactcgcagtgcaaacagccagagtcaactttctgatggaaattgccgacttgctcaaagcggcaccagggcaaacacttgaagtgcctgtgctgctggctgatgccatctattccccagcgcctgatccggtgaacggacaggatgttgtgaagtatcaggtaggtagtcaggttgctggattggatatagcgttgccgtcagcgctggcctttgaccgttcacgtttggatcacatctttattcagatgggcgaagatgtggagtgcgatctggagtaccaccagtcagaagcgaaacttaccgcttcagggttaatcactcaaaaggaagctactgattggcgtgaaccactccaatatacctacgatcaaatcctagagcttcacagacagcaatggaatggcatttggtttcgtgtagtacgcaatttcttctggtcagcaaccgctgggcattttgactgtattgttggcaatccaccgtgggtacgttggtctaagttaccggatgcgtaccgtgagcgggtaaagccaacatgcgaccattacggtattttctcaaagaataagcgtcacggtggtaatgaattagatatttccgccatgatcacgtatacaaccgcggataagtggctcaagaccgatggccgtcttgtttttgtgatcacgggtacggtatttaaaaatccttcatctgctgggttcagaaccttcatgttagagccgtctaacccaaaatcagcctacttaacacctgtatgcgtggatgatatgaaaggcttaaaaccctttgatgatgcatctaatcacacggtagttgctgtgtttaataaaacaagcgagtcaggacagtacccagtaccgtaccgattgtggagcaataaggccggaactacccgaagcattcccacacaactaagcttggacgcagtaaggcagcgcattgccattgaagcgaaagaagctatccctgtgggagaaactggttcgccttgggctgtgcttactcaaggacggcatcatgttttaaaatcgatttcagggcagtgtacctggactactggacgcaaaggcattacaccagatttgaacggagtttattacgtgcctatcgttgattccaacgacatgcttgttcaaattcgtagccgtccagatgctggcaggaaagatattgggcaagcgagaacggcttgggttgaacccaatttgctttacccgctactaaaaggggccggtgattttgaggcgtgttacctcaagcttgcagacccggcaagggcagaagaaaagctgtatacctttgtgccgaatcgtggcatcgacaaagaagaatattcatcaagcgcgatgcagatgaactcgctagggctaacaaaaaccaaggcgtggttctccagctataaaggactgctgactgagaggtctacttatagacgccaaatgaaaggcgcaccatactttggtgtctataacgtgggtgagtacacgtttatgccgtggaaagtagtgtggcctgaaatgtccagccgcttttacgctgctgttgttggtgatgcagaggtgccagtagccggaatgcggccttacgtgccagaccataaggtgtattactcagccttcgaacggaaggaagaagcattttacctgtgcggtttgctcaataccccaatggttgctgagtggattgaaagtcatacagtgaatatccaggtcgggaatatctttaagcatactcatttgcctgaatttgaagctgggaataaggatcacattcgcctggcagctttaacggaaacagcacatgcaacgcatgaaccggcaaaacgagctgagattatcgcccaaatatcagcgcttggtgaggagattttacactatgcttaa

SEQ ID NO: 290865 - DNA, 333 bp, Morganella morganii
atgaattatactcaccatttatactccggggctatgaactatgaagaactcctcagaaacatcggaaaatccggcttaaccatccgtgattttgctgaaattttaggcatgaatcgcgtgtctatctctaatctttcaaaaaaagaagaagtgcctgtgcatttggggatcattgccgcccttatgggggaaatggccgagcatggggtagatttccgtccagtgatcgcaaaaatgaatatcaagccgagacccgcaaagggtattgcagccaaaggagtatttggcggaatgaaaagtaaatcgacatcagtagttgacggtgaaaaatga

SEQ ID NO: 290866 - DNA, 594 bp, Morganella morganii
atgagtgacaattcaaccccgtttataactttggataaacaaataacagcgtggaacacttttttaaaaagcgaaaacaaacaagttgaccatgaagaagccacaatattcgcactttcaacatcggagatgtacttacgctacattcacaaatctgcagaactggaacagctacgttattactatgttgcccagcgaatagccgatctttattggcatcacaatcaggctcatagaggagaaaactctccgggttatccaggccactttggttgccgtgttaggttgcgagagatgaaattagaaattttctgggtttacaacgagtttaaacctaaaaagaatgctgccggattccaagtgatcagccattatcttccgcgagatgggcatttccgataccccaaaattacgtttacccaagcacaatactgggaaaaacctgtgattaacgtagtagaggaagcttttgccatcatccgtagagccaatgccaatctgatgagaatgcgccagctatgtaggtggaatgacactaacctcttccaaatggcaggcgatatcggcgattttaagatggataatcctttatag

SEQ ID NO: 290867 - DNA, 1035 bp, Morganella morganii
atgacagataacatcccccaagctcctcaaggtgagtttgttcttttcaccagtgcagatggtcaaactcgcgttgagtgtcgttttgagtctgacactttgtggctttctcaggctgcaatggcagagctttatgacaaagacgtccgtacaattaatgagcacctggtcaacatctacaacgagggtgagcttgtacaaaacgcaaccatccggaaattccggatagttcgattagaaggtacccgccaagtatctcgtgagatcgaccactacaatctcgatgcaattttgtctgtaggctacagagttcgttcgcaacgtggtacacagttccgtcaatgggcaacgcaagtcctaactgaatacctgatcaaaggcttcgtcatggatgacgagcgcctcaaaaatccatccgttggccattctgctgtgccagattactttgatgaaatgctggaacgcattcgcgatatccgagcgagtgagcgtcgcgtttatctgcgagtgaaagaaatctttaccatggctgctgattacgagccatctaaccaagagaccaaccgcttcttccaaaccattcagaacaagctgcattatgcttgtacgcatatgactgctgctgagctgatagctagtcgtgtggatgctagtaagtcggatatgggcttaaccagctataaaggtgatgaagtgcgcaagacagacattactgttgccaagaactatctgcatgaagacgaaatcaaagagcttaatcgcatcgtcaatatgtggctcgactttgccgaagatcaagcgctgcgtcgcaagcaggtattcttacaggactgggctgataagcttgaccagtttttaagttttaatgatcgggacgtactaagcggagctggaaaaatctccaagaaagacgctgatgataaagcaaaattggagtttgacctctttgcccagcagcgccgccgtttaaaagaagctgaaggcgcgcaggccaatattgcagcactcaaggctatactcaaaaaagataaatag

SEQ ID NO: 290868 - DNA, 2406 bp, Morganella morganii
atgatgctaaagaaaattcaatacattaaaaagcttggtgtgtttgacgattttagctgggatagtgaagttaaaaacaaaggcggcgccgttcagaactttgttgatatcaacatcatctatgggcgcaactattccggtaagaccacactgtcgcgtattgctcgtgctctagagacacgcactttatcagacaaatatggcacgccttcgtttcaactaaaatttgctgacaactcagatgtaacactcgcggccttaaccacccacgacaagaacattcgcgtttttaatgaagactttattagagataaccttcgatttatcactaatcctgacgacagtattgagccatttgccattttaggcgatgacaataataagatcgaaaaagagattgaagctcttgaggaagaactcggttctagtattgaaggacaagaaactggtttgtttgccgacaaaaagcaggccgcagttgcatacagcaatgcctttgcctctcataaacaatcgaatgatagtctagaaaaacgattgggtgataaagcgactaataaagacatcggcattaaatacaagcctgagcgttttggtgaccaaaactacaccattaccaaattaaaggccgatatcacaactgttagtagccctgattttcagcagttaacatcagagcaagtgagcgagcacgaaaagctgattgatgaaaaggttttgcctgcaatacctaaattttcttcacctcagctaagttttttgagcttggcacagcaagttgatacgctggtaaccaagcccatcagtgagtctgacaaaattcaggcgttagtaaaagatgctgtgcttaaccgctgggtcaatgaaggtcgtactcatcatcgaaataagcatgaaaaatgcgcattttgcgacaatgaaatttcggctgaacggtgggctgagcttgataagcactttgatgaagaatctgagctattagaaaagtcgattgatgcgttacttgctaagatagaaaccgaaaaccaaacagttcatgccgcactcaccattgatcaatctgttttttattccaagtttcactcacaactaactgccttagatttaaggttaaaagcagcaaccaaagactatcaacttgctttaggtaatctagccaagcaactgaaggcgcgaaaaggtgatattttaaacgttaaagactatgagtgccccgctgatggtacagcgaaactaacgcaaatctggcaggaatatagtgacctttgcgctcaatcagagttatttagcagctcattagctggcgaacaaaccaaggccaaagccgacttgcgattgaaagaggtcgctgagtatttgcttacgattgattaccaaacacagctcaattcaattgaaaccttacagcaaaaaagagacgaggctcaacaagcgcaggcgactatcagtgcgaatattaccgaaaagcaagcacaagttacggctaagaaacgtgaactgaatgatgaagaaaaaggggctaaaaaggtaaatgaatatctaaataattttttcgggcatcagtttttgacgttggaggctaaaaaggatgaagggccaacgcaagatgcaaaacgtattcggtttgaagtgatccgtgacggtaagaaagcttatcaccttagtgaaggtgaatgcagcttgctggcattctgctactttttggccaagttggatgatgtcgcaaccaaagactcaaaacccattatttggattgatgatcctatctcctcgctcgatggtaaccatattttctttatttatagcctattaaatgcagaagtggtcgagaagggtaagtttgcacaactgtttgtatcaacacacaaccttgatttcttgaaatatctaaagaggctgaaagacaattatcttactgccgaaggcgacaaggtgaaatgtcagaaggcttactttgttgtggttagacaagataaaaactccaccttacaggtcatgccatcgtacttaaaagaatatgtgaccgagtttaactacctgttccatcagatctataaatgtgcctctcttgatactatcgatgataccaactacgtaatcttttataattttgccaacaatgcgaggaagtttttcgagatttatctctattacagatatcccgatctaggcatgacggcagagaccctaagtgcattttttggcgaagatagtattccggcgatcttaacagacaggattaacaatgagtattctcatctgtcaggagtttttgaaaggggtgcatcccctgtggaagttcctgaaatgcaaactactgccaggcaaatcattgagcgactcaaacaagataatgaccagttttcttcactaatgagaagtgttggtgagctcgtcgaggtataa

SEQ ID NO: 290869 - DNA, 498 bp, Morganella morganii
atgaaggcaaccaatatagaccctcaactgcttgaaaaagccacgagcatctttgctgagttgggcttacctattgagcaggctattaacgtctttttagctaaatccattcaagctaaaggttttccgttttctgttgctcttgaaaatgaagtagagacacgggaagttgcacaaacgcaacacaatatcagcaatgcagagataaccgaagctatccaagacttggttgaacatgctctgccgctgagtgaaatagaaaacctcacgcagctaagctattgtcgcaacatttttgggttgtcattccccgtgctcaaactagctaaatcatcacggccagaagacattcgcagtgcagccaaagatgccaaagagcgaaaccgctactccaccactaaagtggctcagcgagatgaaaaaacctacgttatttgcacccaatggaccgacagacatcgttctgcattttgccgttggcaagacatttttagctga

SEQ ID NO: 290870 - DNA, 168 bp, Morganella morganii
atgttcgcggcacctgattgcatcaatatcgaaagtgataagatcctctcactagcagggcatgacaagtataactgctgttttgttagtctgtttttcagttttttaagatcaattatttataattttttgactttattgctagccgtgaaaatgcaaagcctatag

SEQ ID NO: 290871 - DNA, 624 bp, Morganella morganii
atgttcattcgagcttaccttcgtgcatcaaccaaagaacaaaatgctgaacgggcacgcgaatcactcattcagtttgctgctcagcatggccagcgaatcgctgccttttatatagagaatgtttcaggagccactttgcaccgacctgagttgatgcgcttgattgccgagtcaggcgagggtgacattgtgctggttgaacaaatcgaccgcctagcacggctcaaacaaggtgactgggatacgttgaaacaaaagttggcctgcaaacgtctagccattgtttcaccggaacttcccaccagttggctggctttgcaacaacatagcgaaactgactttactggtacgattttacaggcggtgaatgccatgatgttggacatgctcgcggccgttgcccgcaaagattatgatgaccggcgacgtcgtcaatctcaggggatcgctaaagctcaatccgatgggaagtacaacgggcgtcagcctgaccttaaacgtcaccagcacatagccagcctactgaaaactgggcatagctatagtgacattcaggacatgttgggatgttcgcggcacctgattgcatcaatatcgaaagtgataagatcctctcactag

SEQ ID NO: 290872 - DNA, 162 bp, Morganella morganii
atgactgcatttgagtggggaatgcttgggctattcctattttttagtttggtcaccttctggtgtctttacagctatagggccaaccagaaagtgtcaggccaaggcaaacctcaagctgaagagtgggagggaaaacatgagtcaaaatctcaaaaatga

SEQ ID NO: 290873 - DNA, 432 bp, Morganella morganii
atgaaaagtgaatatcaggatctagacaatattgttttggcgatggatgaagtccaaacggatcccataattcttacttacctgatcagtcatctattgacgagaaattcggtgtttcatcagcctagagttggatgtgtcaaatgcaagagcacgggagaattagtctatccccatagctggattgagcttccaggtggttggactgttgatcttagactgaatcaggctttcaacacgttcgaccgttatccgcaaggcattttcgagccatcatcctaccggaaccttcagtatttcggtatgccccttaccgtgcccgaattcgaaccatctgaactcgatgaaatgactgattttatgttttccaagttattcagtgtgcaaggactggatactcgagtgagcggaggttgctatgactgcatttga

SEQ ID NO: 290874 - DNA, 843 bp, Morganella morganii
atgaaaaaatacccatctttatcattaatagctttatgtgtgtccttgtcaggttgtgcagccgggcctcgtcattatgctcaaggcgaatctcgggctttgaatttggcgcgagccgggggcatctacgatttggatttgagagattcccacgatggtactcactcttatagcaagggtatgttggttccattgcttgatctcgccaggctaactacttcatttgatgatccgcttcggcgtctttctggtacgcagacgttcgcgtttaacgctaccgatataatgatgacaccggacaatccctcggctagaccaagtctaatgggatggatgcccgcatctgctgctacttcagaatctcaggcttatgagaaatatgtgcatcttgtcgatcaggcaatccagcatgtggccgatgatatggcgttgaatgtcattaaactgagtaatgtagaaacgccagaaattgatggtcatcccatgattctttggtctgttgaaagcgccgagcatggatgcggtattggtcaatgtgtggttgcttacaacattacgactccttatctctggaagagcccgctctacattaaagatggtgagtccgaaagctataacatcgccgctaatcacctgaagaactattctcgctttgttttccgccagtcaggcccaaaaaactttccagttgatgagttttatagagccgtcagtgctgcattgccatcgtggatagtgatctattttccaccaaagcatgtggtgaagaatggccaatctctcccatatccagtgttgtatgagcaaggggaacaactgctgtttaaggagcctgcattatga

SEQ ID NO: 290875 - DNA, 633 bp, Morganella morganii
atgtttcagtatcatctcgaatttgaaaaaccaatcattgagctggaagaaaaaatcgccgcattgcagtcatttaaagagcgcagcagcgatttggggtttgatccggatgatgaaattgcctgtctgcggaaaaaatgcgaaaaactgacccaatcgatttacgcggatctcggcgcatgggagattgtccggctggcccgtcacccgctgcggccctataccctggattatatcagtcttatttttacggattttcaggcgcttgccggtgatcgcgcctttgcggatgataaagcaattgtcggcgggctggcacgccttgaaggccgtccggtgatggttatcggtcatcagaaagggcgggatactaaagaaaagttactgcgcaatttcggcatgccgtcaccggaaggctaccgcaaggcgctgcgtctgatgaaaatggctgaacgttttcatatgccggtgctgatgtttatcgattccgccggtgcctatcccggcgaaggctgctccggcggggcgctggggattggggtcggcgatcgtatcaatatgctgcaatacagtacctatgcggcgatttcgccggaagggtgcgcctcttattctgtggaaaagcgcggataa

SEQ ID NO: 290876 - DNA, 210 bp, Morganella morganii
atgtttaatcatgcattaattgcattatattatgcatatttactgtttatcagaacgacagcagaagaatgtagtgaaagtgttaatacccggacaaaagccataaaaaaagcgtatcagagatacgctttttccggtgaactgtcaggcggtgattatttaaataaatcagcgctgatagtcacgttaccgccgctggactgccactga

SEQ ID NO: 290877 - DNA, 189 bp, Morganella morganii
atgattggtcagatgatgcgtgatacgtgtttatacgtatttgtcagtatgaacgaagatgaccggaaaggaaggttatttttgaccggcataaaaaaatccggaaataacaccgtatttccggattctgatatgacacaggatcagcacgctgatccttcactgccggtgacaatcaggcaaacttaa

SEQ ID NO: 290878 - DNA, 378 bp, Morganella morganii
atgaaccatagtataggcgtaatcgacacccatgccgtaagcaatcagaacaataactttaatttattaccaatatctcataatttagcgataggattctctattaaggcctctgagtattataactcacacttgaacatatatagtgtttatcctaataagttaaaatgtagaagcagtaaaaaaatcaaaatttatcgtgtatcccatgattacattgatggtatcagtggttgggtaactatgattggtgtaggacaaacaaaaacattatatacaccttatgaactaaaagacattgaacgttacctgcagtatcaaaatgataattatgatcatcactattcaccagaggtaccagaattagtcgaattataa

SEQ ID NO: 290879 - DNA, 1194 bp, Morganella morganii
gtgtattttgacaaaagaaaatacaaaggcagctgtcctcattgtgaggtggtgatagagtatcacgtaataatttttcctgttgaaaatgatgacggagaaatggtctgtacatgcggtgcttgcggtgaagaaataagtattccgtgcctcaacccagaagagtcacatattataagtggtgctaacaaagattacgttatagattacagttgcgaggctccatcttatcttacagaaatagatgcaatgtttgaatataacggagatatatttaaaaacgcaccgagttataattccaatacaatatcattgtatagttgtgaaacttgtgatgacaatttagagttaatagctcatcaagaaattgataaaaaattcaatgaatttgctagtgctataaatgattatacaataattgatatcaaaggttacggattcctacctgaaaaaatactcgtagcaatcaattttaagtgctcttgcggaacagaacataaagcgttattttataaagactacaatcactgtggcttcgcatcagacgatttcttactcgcaaacataactaatacccaagatctaaatgacaagattgatggtactctaacaaaaagtgactcactagaaattttaaagaaaataatagtcagatgggaacttgtctttgatagaacttatttaatattcccctatgttggttattataaatcccctgctgataaaacattgaaattgtggaaggaaatactatcacaaagccactcaccaaaattaagtattgtaaccaaaacacaaaccttaaacagctttaaaaaagcagttacaactgaatatttggattataaaatccttgaaaggtttgactttactccaaaagctataacttcggctatcaaaaacacaaattcgcacgcgaagatatactgtggggtatcggaagattatgtcgagtccattagcggctccgcaaacatagctcagggaccgtcagcagaacaacttaccttcaaaagatactattcttactctgattttcaccgcagataccttgcaccattcaatttaaaagaaatacctgaagacttatttccattgaagtctactcatgattgtcatgtcttatttgatgaggacaacaactttgagtccaaaaaattgtacaaaaaacagctctttaaattgcttgattga

SEQ ID NO: 290880 - DNA, 297 bp, Morganella morganii
gtgactaaacccgaaatcagcctggctgatatcaaactgcactgccgtattgatgatgattatgacgatcctgttttaacgatgtatgcggatgcggcgctggaggtctgccagcggcatatcggcaaacgctttgatgacgggctggagtttactccggcgatcagagtcggctgcctgatgtatatcagtctgctgtacgagaaccgggaaatgataggcaatgagaatctgaaagaggttccgttaacgattgattccctgtggtctgtttaccgtgatgtggggatttattaa

SEQ ID NO: 290881 - DNA, 336 bp, Morganella morganii
atgaaagccggacgcatgaatcagcgtattgccgtccagcggtcgaagctgaaacccggtgcgataagcggcaacgaggtgatatgggaaaccatcaccgtggtctgggcggaggtaaaaggcattcggggccgtgagtatttcagcagtcagcaggtgcagagtgagactacattgcgggtctggatacgttacatctctgatatcacatcaaaagaccgcctgaaatttcactgtgccgggtcagataccggatgctggaatattaagagcattgtgtcagacagagccgatggccggatggaaattatttgtgagggggcggaaagtgactaa

SEQ ID NO: 290882 - DNA, 519 bp, Morganella morganii
atgaaaaatgatactttcactgaaatttttgagcctgttgacagtcttgatgaattgaaatgtattgattattattttaaaaatgaaacatcagtagataattcagataataaggatttagctattttatttcaggcgctagttattttatctcgcgctggttgtggtcatgttgctggcaatatatccgaccttgctttgaaaatatatagagatgattatcttagtgaaataaagaaggatataagtaaaaaggaattagttagagatgaaaaaagtaaggctggtaaagggaataccagtaaatataaggaatgtgcattacagatagcaaaagatacatgggatgtatatccaaacgcaacacaggaaggaatgacagaggaattatttcactactttagagggaaaagaaccgacaatccagcagcaagtacaatccgtgtatggttgtcggcatccaaattgaatcctaagaatgagataaaagatagaaaattcaaactgataattaaatga

SEQ ID NO: 290883 - DNA, 342 bp, Morganella morganii
atggcaagacaaaccaaacccttatccgcaaaagagagcgatgcagcaaaaccaaaacagagtgattatgtcctctatgatagtgatggattagagctattggttaaatccaatagcagcaaactgtggtcattttgctacattcgccctctcactaaaaagcgagctaaaaagagccttggttcttaccctgccgtcagtcttgctgatgcacgtagttaccgccttgaagcaagaacactgctcgctaaacagatagaccctcaagatcactataaagaacaagcccgtcataccttagaagctaatacaaatacctttcaacttgtcgctctgcaataa

SEQ ID NO: 290884 - DNA, 3303 bp, Morganella morganii
atgaacaatgatcaaaactcgttaatctcagaactagacttatccatagtcactactgacactagattagcaaggatattaagtggtgataatcgagcctgtgctttagagttatggctactgcaaacacaaactcacgatgctcttgagaaccgccttctgtatggtcgcgtgctaccatacgacttcagcaatggttgttggtgttctcccgcggaagaccgcttcaagttaatacgtaatggactttctgctcaatgtatacgattgacactctattgttcttcgagtagcttacttaatctcttaaacgttatgacaagtggtggaaccatcacagatgcaagccggaatgctggtgtctcaatgtcagaagcctttgagaaacgttttgggtctgtaaaattacaactaccgcttactgttcgccccttaatgcatttacccacccgagactacttccgcgggttcaccaataaggtcagccctaccaattattctagctgcgacagtgcttctatctccagcctgttgaagcccgatctcttcttaacaggaaatgaagaagaccgcgaacttgctagctttaccattaaccatctcaacacagatactggccttgattttgcgaacattgacgcatggagactgggtgatttggaacttcttgtactcccaggattgactgaacaaggttcctcctgcgtaaacttgaatactcagcccaatggtgtgagcgtgcaaatagatcagccactcgctagcggtacgaaccgttttagagtgcacgcgcgattttttaatgatggagccatatttcacgcaacttcaatgatgattgaggcaaatatcacttatcccaccactgttaatttctgttgtccgactacattaggaggaattagggatgccttagtgctggagatcgaagcacagaacgatcaaactaggactagctggctatgctatcagtggggctcattcctcatacgcgaaattaaccaagcgatacgtttttccggcggccaggcactcttcaaaagcgattggttatccaaggcattgcggccttctcatatggatcgccttgaagaagctcagctgatcactaggcacgcaagaggaacagaatcggtaatcggaggtcgtaaagacgatccttgggtaactgtaaacaggcatactacatcgatggttaagagtttgataccaccaaggtcaaaaggaagatttttcctgcgctattccgaaggtgagaacacaggtcgcctcgaactagctgagtggattcagcatattctagatatccatagagataagcatatagcttggtttgacccatacatggaggatataggaatccatcttctgaatgcatacgggtcaggctgcgggacttacacagtttttactggagctgggcgcagtgaattgatgcctcggtggtgggaacgagtttattcttggatgaaaagggaaaccatatccgaaaaccgtcttgaccaacgtattcagaacttactagcagcatgtgagacttggaaaacacaatatggaatggtccatctaagggtttttggacttccacaggaaaaacttcatgaccgcatggtgcttgttcgagactcccagatgcggccaattgaagggttccatctttcaaattctctacaaaaggcaaatgagaattttccgctactgataaccccaattccagcagatgtcctacagcatgtacttgattattccgatgagcttttgcgctcccacgaaagccctgcaacaacccaagagggcggaacaataaaactcaagatactgttcgattctcagactcaaggagaaaaaccacaacgatacaatcccattgatgtttttgaaacgttacgagccggtgaaattctggactggtggctttcctcatctgatcttgcaggaacagatgctcaaactctgagaaacaaactaaatgagtatggctttcttagcggagataaactgagaaatgatacgtttgaacacttgcctgagaaaatttggcaggaaggtttgcaactcccaaatttcaactctgcctgggatgctctttccataatactaagtaacactatggctggcgatactatttataaagcaccagacttgtccgtcccgccactgggagatgcgctgctcgcatatctcgagtctgatcgccccgatgctatccagcccccagagcggctcaccatggtggatatgaccaccgagttacgtaaagaattatccgatttaatgagacaaagttctgaccctcaacaactgtttggtcatgatgtaacggaagtttcttggggagactactatgctttaaaagttctttgggcgacagatccttccgccttactggcgtggatagaagctggagctgaagagcaattcaaagtaaatcgtcgtcggcaacttggcttaaaatgtgccattaggttcatctcgtctgaagttgagaacctttgctcacgccgccagcttggagctcttctgaagagtactaacggtctccttcgctggattggatatgttgctttcgagagctttgtatataacgatcctaaggagttagcattaaacggtattacatctatattatcttcagacgaacgtttggatttactcggctggatgacagcaagagcgagccatttaagcttacctgtacgacaagagcttatccgagaatttcaaacttcgatgtctgcaacactaaatgatgtggctttaaaaaaaatagtcgattctatgcgaaatgcaacaggaaatgtatatgacaacccaccgtggatattgaaagaagtgcttctgcctctaataagcactcagcgactcgaagtggatctagtaacaagaatgtggtttgatgaattattcaacttatggaccaaatgtaatacatcaagtattatttttcgaactaatacagagggggaattcactgatgaagtggctaatctttgtgttatggcatcaaccaaagtgcaaaaagctatcttggcaaaagtttctaaagcgatagccgtccatgcacgaactatccagagaccattctcatctcagattaattattctttatacgaccaagcctttcagatacttctgtggatttctggttatctcagggcttggcttaaacagtcatctctccctagccaaatcgaaaaaaatttacaatcagtagaagcggttttggcaaggcgtagtgaaagagaatggagacgaaattatgccacagatttacttcgttatcgagaattgaataccctataa

SEQ ID NO: 290885 - DNA, 1077 bp, Morganella morganii
atgaaacgcctagacaggaaccctgaaaaatttgaagcactagaagtatttacagcattcagccgtgaacatggttataaactcagatcacaagaagacactgaacaatttattcaaatatttcgcgactcgctcaaagcctcacaagaaaatgatattttgcttcacggtaagcgtatggaatcatgttttggtcaagttgtcgcaggtctacatggttgtagcttgataaaaaccgaagacacaggtgatgtcatttatgatgatgatgaaattgaactaccagactacaagctcattctgaaagatggacgacaaatatttgtagaagtaaaaaattataaccaccaaaatcctaaagcatcatattttcttggtaagaattatgttgaaaagcttcaacgctacagtgaaataagtcaaatacctctttatttttcaatatactaccgtagtctaagaatgtggacattgcttccagtaacatcctttattgagcgcgacaaaaaatatgaaacatgtgctctgcattctttggcaaacagcgaaatggcaatgcttggtgatgtaatgattggaactaagcccccacttaccattgaactagtagctgatgaaacacaagatatttctatcagtgatgacaattatgcaaattttgtctgtgccgatgtgaaaatgtattgctgtagagaagaaattattgaacaagatgaaaaaaatatagctttctatcttatgagattcggtaaatgggagtgtagtaaaccggaggcggtaataaatcaggataataagttacatagtgtacgttactcattttcaccccaatctctggaagactttgaacaacttggattttcaatacttggtaatctaagttccatgataactgaagctttcaacgaacataccgtatatgaacaggaaataacagcaattacttctagagcagaacctgacgttttttcagttaaaatacctaaagattataaaggaaacgttcttggtttgtggcgcttctctcttgaggcaaatcctgactttaaaattggtgaagacaaaattattgaataa

SEQ ID NO: 290886 - DNA, 1188 bp, Morganella morganii
atgctgactgataccaaactgagaaatttaaaaccgaaagaaaagctctataaagtgaatgatagagatggactgtatgtcgctgtaacgcctgctggctctgtctcttttcgttataactacgctattaatggcagacaggaaacggtgacttttggtcgttatggtattggcgggatcactttagctgaagccagagagcggctaggggaagccaaaagaatggtggcagatggtaagtccccagctaaagaaaaagccagagataaagcgagaattaaaggtgctgaaacatttggtgcatggactgaaaagtggcttcgtggctatcaaatggcagattctacacgggatatgcggcgatcagtttataccagggaactcaagggcaaatttggcaaccaaaagttaaatgaaatcacacacgaagacttacgggcgatcactgacactattgttgaacgtggtgcaccagcgactgcggttcatgcacgagaaatcgtacttcaggtttatcgctgggcgattgaacgaggccagaaggtagaaaatccagcagatttagtgagacctgcaagtattgctaaatttgaacccagagatcgctcgttaacaccaggtgaaattggtttgatgtatcgctatcttgagaaggttgggacaacgccctcaattcgggtagctgtaaaactgctattgttaactatggtacgtaaaagtgagttaacgaatgccacctggagtgaaattaatttcagtgaagcaatttggacaatcccaaaagagcgaatgaaacgtcgtaatccgcatttggttttcttatcgcgtcaggtaatggatattttagttgccttaaaaacctttgcaggcggttctgattttattctaccatcgcgctatgattcagatgcgccaatgagtagtgcaacaatgaatcgggtgctggatctcacctataaagcagcacaaaaagacgggcatgaccttgctaaatttgggcctcacgatttacgcagaacagcgagtacattattgcatgaagcaggctataacacagattggatagagaagtgtctggcgcatgaacagaaaggggttagggcagtgtacaataaggcagagtatcgtgaacaacgcactgctatgttgcaggattgggctgatatgatagatgagtggataatttaa

SEQ ID NO: 290887 - DNA, 999 bp, Morganella morganii
gtgatttataaagaaatgcgggaagatttcaggtttctgttcccctataaaaaagatattgtttataactgggggttgaatccggtacgggaattctcagaggtaattcaaagaatacgtcatgaatattgtctgaattgttatgatgaagatctgaaaacagatatcgatttaatcaggattatagataatagtgagtatccaaaaatcattgacggagtaatgagtattagtttcggggagaaaaccatcaagcagctttatgaggttatcaaagtaaaggaaaggatgtataactccataatgaaataccacaaaagtattttaaagctaaataaaaaggctgtttttctgtgtttttcattatctgttaacagagggtgtcagtttggtgaaaatgaaacgcaggaaaatatcaacatttacaataaaatgctaaaaaagttaaggactgaattttttaataacatcaggtcgcgtgcattctttaaaagaaatgttattggtcatttctgggtgtcgttacaggagacgggtggagagtatatgtatatccatatcaacttttatcttaaggacaggcaatataattatcttcttggcagggaaataaacagcgtctggtttggagtccttgaaaaaaatgaagtaaccggacagaccagacattttacgataacggaaagctatgaaaacagcagggcaaataacaatgcaaaaagaaagaaaaaaatcacctataaagcatatgaggtctacgattaccgaaacaaaaccagaaaggtcatggatatttatcctgatttaaacggaggaaatcagaatgccgaatatagttttactaataaatcagcaggtctgccgtttagtttttatgtcaaatcgctggtaaaaaaagcattccatatctcaggaatgcgcagtttcggtacggcttctcttcagacggaacagaaggtatctgcagaaagtggtaccgcacagatacagaaagaataa

SEQ ID NO: 290888 - DNA, 1791 bp, Morganella morganii
atggtagataatgatattaatgaagtaaatgctgaagtgatttcagtttatccaaatagcattaaaattatcgttggtaacctcgatgaatttaaagatggacaaaatctaaaagtaggctcttacattaaagttccatcggacgatgaatcaatgatgctaatagggataatagaaaatttctctattgaggcaaaggataatggggaaagaaagtatctcatacaggctaatccattaggtataataaaaaatggtagatttgaaagagggggggactcaatagcattacctcctaaacaagctgctccagctacgtttgaggatattgataatatctatagaaactcagttgataaaaataaacacttcgagttttgttcattatcatacaatgatgatattcgaatccctttagatggtaataaatttttcaataaacacattgctatagttggttctactggttcaggaaaatctcatacggtttcaaaagtaatacaaactgcggtttctgggaaaaatggtgactttaatttaaataattctcatgtcattatcttcgatattcattctgaatatcactcggcatttcctgacgctaattttcttgatgtcaataatttatctttaccgtattggttgttaaacagtgaagaattagaagagattcttttagatactggagaaagagataattacaaccaatcctcagtatttcgtatgttagttaccgctaataaaagaaagcataatccttcaatgtcaaaagttttttatgatagtccagtcttttttgacataaatgaagttgaaacggctttgaaaaatctgagggatgaaactagaaactcaaaggcaagtgatagatacatgattgttggagagtcgggagctgctgatgagaaaaaagatagttcaactacttcagaatgtggatgtaaactgagtgatagtgaacgtattgagaaatactttaattgtaagtttgaattctacaattcaaaagcgtcaaatatttcaaaaggtttttacgcggatggcacgttagataagtttatatcacgcttctcagaaaagattaatcaagatagactgtcatttcttttttcagatgaatcaaggaatcaaaaattcgaaaatgtcattaaaagcttgctaggggcttcagatacaccagaaagtaataaaaatgtaacaataatagatctgagtggcataccttttgaagtgctgagtataaccgtttcattgatatctaggcttgtttttgaatatggctacatttataagaaactcatggaatctcaaggtaaagatactgatttccctgttctcttagtctacgaagaggcacataagtacgttccaaatagtgacttggtaaagtatagatcctctaaaaaatcaattgaacgtattgcaaaggaggggcgtaaatacggagttactcttcttttggcaagtcagagaccatcagaaatatctgaaacaattttttctcaatgtaataattttattgcaatgagactgacaaacccaatagaccaaaattatgtgaaaagattactaccagatacacttggtgctattatcgatactctcccatcacttaaagctggtgaagcattagtaataggtgaatcaattgttttaccatcaatagtttcaattgatgaatgtccaaaagatcgtcaaccttcctcaaatgatattaaatattgggaggtttggaaagaacagtggcacagtgtgaatttttctgatgtcaaagaccattggcttaaataa

SEQ ID NO: 290889 - DNA, 1254 bp, Morganella morganii
atggacagcccacgtagtgcaatacatgcaattaaaggttatttctatcagttcgataaaaccattgtggagttattacgcgccaaagatgatgatgtgatctatgttgaaggggttgaggatatagatctaaaaaatgcagatgaaatcactgcaattcaatgtaagtattatgaaaatactgagtataatcattctgtcattgcacatcctatacaattaatgctagcggattatgctaaaagattagctgcgaaagtggagatttataagtatacattgtatggttattatccttcaggacatgagaagttagcactcccactaaccattgaatatcttaaggaaaattttttgacatacaacgagtttcccataattaataaggtcaagacaaagaaaactattcgcgtccacgaagatttaaatattaatgaccaacagctaatggattttatcaaccttttaaaagttgatattcatgcttcttcatatgatgttcaattgaaaaatatattcactcttttatctggtaagttttcttgcactgagtttgaagctgagtgttattattataataatgccatatctaaaattaaggaaatagcgacaaaaaaaggtgtcgtaaatagggagatcatacctagtgaatttttcaataccattgataataaaaatattttatttgatctatggttcgaggttttcagaactgagaacgagtattgcaataaattaaaggatgagcttttcccgacagtaatgaatacaagtaactacgatcgttttttcttatttgaagacaataattttaatattcaagattatattgaaatagtcgccgtcattgttaaaagatggtcaaagttaggcgttgtgagactatcaaaagagaatcgttttagtccatatatatatattgacggaatgtctctcgaacgattgaaaagtttaaagcgggagttagctagtgctggttttcccccaatggatggatttgattttttgggtgatgattttagtactgattcaataatgaaggatgtaaatgatttatcgtactataaggtgagatttattaatgatattcgatatttagatgaaatcttagcttgttcttctaaaagaaaagagatctatcaattttatttgaataagcctatttatgagtgtgagataacgcgcggaaagtcaatgaaaatccaagtgaagtcattagatatgtgcaaaaggatacttaaaaatggtagataa

SEQ ID NO: 290890 - DNA, 369 bp, Morganella morganii
atgcgcagatcacatcttgtgccattgtctgttcaggcgttagatttactcaatgaactcaagctcatgacagggaactatcgttatgtttttccggggcggaacgatccgaacaagcctatgagtgaggcaagtattaatcaggttatcaagcgtattggttatggcggaaaagtcaccgggcatggatttaggcattctctatctacaattcttcatgaaaacggatttgattctacatggattgaaatgcagctcgctcatgttgacaaaaatagtattcgaggaacgtataatcatgttcattattttgaaaaacgtcagaatatgatgcagtggtattcagataaaatattaaaagaaggatga

SEQ ID NO: 290891 - DNA, 1299 bp, Morganella morganii
atggctagtcattcagaaaatataagctggttgctcagacaagagcctatgtctgttaatcaactcactgataaattgaggattagtcaacctacagcatctcgtgccttgacgtctttaggggaaaatattgttcgtataggcaaagctagagctattcaatatgctttatgtgaccattcacgcgggattacttccgcgcccatttatcgtgtcactgaggaagggaaaatcaagcatttgggcgatctcatcccagtgtatccacacggattcgtaatgaagcagacagacggtgtgaattattttagcgactcaataccctggtggctggatgatatgagaccgcagggatatctcggaagagcatatgcgtcagcgtacgcggatgcgctaggcctaccgacagatcctaaaaattgggatgacactggcgtgattaaagctttgctatcacatggtcatgatgccatcggtaatctgctgataggggaactggctagagataaatatgttaatacacctgaaccaattcccgtcgaacgatctgcagcatttcctagcctagctgctggcagtgatgaaccacctggatcatcagctggaggggaacaacctaaattttgctcgtatacagaacgcggtcatgtgttagtgaaattcaccgctgctgtagataatgcggtcagtgaacgctggcgagatcttctattggcggagcactttgcattggatgtcctcgatgttgaaacagaggtgtttgattttggtatccagcgtttccttgagattccccgatttgaccgggtgggtccctttgggcgtaaagctgttatctcgctgcgggcacttgacgctgagtttgtaggggggggtagtaggccttggcccgtattggtagcaagacttgttgcggaaaactgcgttactgcagaagcagcataccgtagctcgcttctttgggcgtttgggaaactgattggcaataccgatatgcacgccggcaatctatcgtttataagcagtcatggacgtccatatgacgttgcacccgcctacgacattttgcctatgggatttgcccctcaaacaggcggtgatatgtcgaacgagcttaaaccagcccaattaccggagatagtcagcggggatatttggcgggaagctcttgtgttggctaagagtttcttagcgaaagtcaccagttgcgagagattttccgataattttgcttcatgtattgatgccttgcgcggtcatattgatgaagctgaacaacgtatcgcacggatcggctaa

SEQ ID NO: 290892 - DNA, 222 bp, Morganella morganii
atgaataccaccgataccaccacagccccttccctgcttgacgacccgctcgtggagatgaaagagatcacgaaattaaccggattaacggataagtggttttacaagctgattcaggaaggccggtttccgaaaccgataaaattcggccgcagttcccggtggcagaaaagtaaggttgaagcctggctgcaggcccgtattgcagagtcccgtgagtaa

SEQ ID NO: 290893 - DNA, 780 bp, Morganella morganii
atgcaaaaaataaaaattttagcggctaaaattatgtttgtcgcttcaattacaactgtgacttacatacagtctccaattgctatgtcagcaggcattcccgtacttgatggtacgaatttaagccagaacattatgtctgctatggaagctgtagcccaaacagcgaagcaaattgaacagtatcaaactcaactacaacaatatgaaaatcaattacaaaacacattagcacctgcggcttatatctgggatcaagctcaaactacgattgataatttattacaagcaacagatacacttcagcactatcagaatcaattaggaagcttagatgcatacctgagtaaattccaggatgtttcatattatcggggatctccttgctttaatggtacaggcggatgtacgccatcagaaaaaaaagcaatggaagaaaatcgcatattggcttttgaatcgcagaaatctgcgaatgatgcgctatttcgtggattagatcagcagcaaaaaaatatacaagcagatgcaaggcaattacaacgtttacaacaagcggcccaaggagcgaatggacaattagcggcaattggttatgcaaaccaactggcgagtaatcaggcaaaccagttattacaaattcgtagtttattaattactcagcagaatgccgctgcggctagactatcctctgaactggatgatgaggctcgcggtgcagcaagagaaaagcaattacggacatggaattatcaaccaagcccaaccgataattattga

SEQ ID NO: 290894 - DNA, 237 bp, Morganella morganii
atgaataatttattttttatcgtgttgactttattttgtatttttttaactgggtgtgaaaggacaataatagaggctaataaaataacgtgtcatgaggataattatgaaaagtctttatcggaaattaaagacaaaagttcacagggaatatttattggtgaatgtaactccataagaaaatcaaaggaaatgagagagtggaaatttaaatcaagtccagaagacaacttttaa

SEQ ID NO: 290895 - DNA, 1350 bp, Morganella morganii
atgaaaatcactatctcatgttgtttcttaattatattagggttatttcctgatatcgcgttggcacaagaattaagtagtagtggcgtgatgaatgatgttctcaatcgttttcatagcgcagcctcaacctgggctccaacaatagaaggtgctgccagtcggttattttggacattagtaaccatttctatggtgtggacgtttggcatgatggcgctacgtaaagcggatattggtgagttctttgctgaactggttcgttttactattttcactggtttctattggtggctactctcgaatgcaacacacggaatgaatatagcaggttcaatagtggattcattgcaacagttgggagctgaggcgggagggcttggcagtagtaaattaggcccttccagcattcttgacatgggctttgaattatatgacagaactgttgaggcaacgtcagaattaagctggaaggagtttgccacagctttaatgatggaactaatggcattggcagtactggttgtattagccattatctcagtaaatttattattactgttagctgccagttggattttactatacgcaggcgtgtttttccttggttttggcggctccagatggacttctgacatggcgatcaactattacaaatccattcttggtattgctgcacagctactgtctatggtgcttatcgtcgctattggtaagcaattcttgttggattatcacaataaaatcagtgagaacatggcaagccaggaattagccgtgatgttagttatttctctttgcttactgtttttagtgaacaaggttccaccgatgatttcaggtttagtttctggcggtaatatcggaacgatggggattggttcattcggtgcaggagccgcgatggggacagtgatgacagcggcaagtatgggggctgcggggatgaaaatagcaggtggtgcgatagcaagcggggctgctaatgcgactagtggtatcagtgcgataaaggcggcttttgaacaagcacaaagcagcatggctgatggagccatgccaagtggaggtagtgagacaacacaaaatagaagtggtgggtctagtactgattcaggcgattcacctttcagcaaagccgctggtttcgatagcacggatagatcttctgtaagcccccaaaaccgcactaaggatgcagactcgtctattcgtgatgatatggcagagacaagtgctgatagggccgagttttccgataatgctttgacaggcggggataagcacagtatggatcctgataatgatgaggttaatgactttgttaatcgtaacaaatcagataaataa

SEQ ID NO: 290896 - DNA, 258 bp, Morganella morganii
atgaaacaaagtagcttcttggtagcatttgatttacttgaccagaatgcggatttaaatgcaaaagttgcctatgagccgattgatgttgtgcgcgcggaagaaaaagtagatgcgacagaagaaataactaatttcattaaaaagagtgaaattgaagttaaaaatgagggattttgtagtgaactagccagtaatgtgtttgaggagaaatcggaagatagtccattttcaatagctgcggggcttactagctag

SEQ ID NO: 290897 - DNA, 1692 bp, Morganella morganii
atgaatatatatgatttaagcagtttaaaactattgtctgatgaacctgatgctgatgatgatttgtatgtctggtatcaacaaagggaaatttgtgactttttgtcttctgatgaaggtgatgaatatatacttctatatgcctcattaccccatgtgttcctccatgcgatatttttacctgatacacatgcacaaaaagatagttttgcaagcttgatacattggagtggcggcccgtattcttcttggggtatttcatgttcatcaaatgacgtgactatagaaaaacctttatctaatttcggtgaaaaatctttaagttatggcgagcagatcatatttgcacgttcatttgaaggggtaaatggaagcgaaacttactacgaaataaatcaaaaaatagctcactctttagatcttcattatgtttcagaacgaaagtcgtggtgtaagttaaacgctcacggagaaattgatgaagttattaaaataatcaatatttccgtagagagtaaagaagttggaacggttatttgtgccaaaaatattgttttaggggaatatgcgggaatagaaagtcataagctatttagaatgtttgattttactcgatataaaacaggtgaatttaacggctggggttccaaaaaaaattcggtagaaatgaatagtaataatatttttggtagtcttactgtggttaaaggtgtcgggagttattccagaggatttcaattatcagatatagctattcctaaaagtaaagtaatttctaatatatggggaaattctgaagaggaaaaagactattgtagctatatagcacaagactggaagaataatgaaataaaggaaatttcgtgcaatccaagttgtttggcaaattacttcactgagtcagacttgccttttgaaataacgccagcattttttaaaccagaagtattattaaaatacaaaacagaccgggataggtatactcttaatagtcgtagtgtttattgtcgaggtgcatgggaattaaagacatttgatgtcaattctgctggacaagttcacacatacttaatatatcttagccacttaccgtatgaggagcaattgcattggaagcaatacaatgagcgtcctaaagctccaatttcaaaacgtgctatggaaaatgatattgaagggaagtggagtaacgattatgacgcattgctgagtttgaaagataaactagagaagttgaattctcaaggagtcccatggtggaaactcagagataaaaatgcacctgataaagttcattatccttatactagctcccgcgatgaatgggctgaagaaattttaaatttagaccagttgattgtcgaaggtttagaggaaaagtggcttaggaaaaaagcaaaggatttgaagttaaatcctgatgctagattacgcgcattaaaactaattgaggtgatattagttggtgttggatttgaagccgagcatgctcgtgaaatcatgacaccatttcatgaggttcacaatgcacgttcgatcttaaaagggcatactttggggcaggagtcagaggaacttagaaagaatgcgataactgaatttggtagttataaaaatcactacgaaaaaatatgtgccaattgtgatgaatcgctcgaaattatagctaatgtatttggtgacattacatga

SEQ ID NO: 290898 - DNA, 291 bp, Morganella morganii
atgaaaaaactaaaattgcagtaccagaaccctgaaacttattttggaataaaaagggaatggaaatactaccctttccttcgcagttggatacacaaaaatttcagtaccaaacaagagaaaggttactactttttacacaaatttgagtataaagattacccgttaagactgcgctctgctaggggaaagcaattggccactccctgggatgactacccaacaatgacttataagcttggaaaaagctggaaacataactccaaaagaaaaaaacaacactttagataa

SEQ ID NO: 290899 - DNA, 771 bp, Morganella morganii
atgacgataactggtaatgtggttgttccaacaagcacggcttttcaggcgagagtggttatttatcagccgagtaaaaagccattagagcgtaaaggtcagtggatttatacttcgtttggcaagtgtagagtgacaggaagacttggtcaacgtcacgctgacattgttgaaagtatgttttttgtggctgagcgtaagcgtgatatagatgatggcggaattgagttgttggtcgatcctgcaaaactgaggaaagtgttatcagacaatcaatatagtggaggaagattaaataaattacttctggagttaaaggcagcaactgtcgaaattgtggcacctcagctggaggaaaatggggatgggggacgaattattggtggcctaattgatcatgttatcccgtcaccaatgactagatacaaccctcttacgggcggagttcgtaggctttggaaagttaggctaggcatcgcacttgttatgctactggagcgtgatttgtatttatatcaccagcctgcattaatcgtaaggctgaaacatggcattagtcaggctgtggctcgccatgtactgacacatagtaataatccttctggggggtggcatcttgatacgttgttcctcgcagttagtggtaattatattagtgcaaagacaatgcgtaattatcgaaccagaattaaagatgatatagaaagtttgcgtgttataggcgttcatatcaattcagaaaatcgggtaaaacgactcacaggggcctga

SEQ ID NO: 290900 - DNA, 852 bp, Morganella morganii
atggcgattgaaataatgtctgcattcacaaatgaaccacctttatttgactatgttttacccaatatggtcgctgggactgtaggggcaatagttgccccaggaggtgtaggaaagtctatgctggctttgcaattagctgttcagatagccggtgggcctgatttattaggaatgggggagctaatgacaggtaatgtagcgtatttacctgctgaagatccaacaatagcgatatatcacagactatatgctttaggtgcaagtcttacttataagcaacagcaatccgtggcaaatgcactcatgattgaacctttaattggcaaatccccaaatgttatgtcttctgaatggtttaatgatttacgtaatattgcaaaaaataggcgtttattaattttagatactttaaggcgctttcatattgaggaagaaaatgccagtggcccaatggcacaggtaattgccaaaatggaagcgatagcaaccgagacaaattgctcaatcatcttcctgcaccattcaagcaaaggagctgccatgatgcgtacaggagaccagcaacaagccagccgaggttcttctgtattagtcgataatatccgttggcaatcatatctatcagcaatgacgtctgaagaggcggttgagtgggacatagagcctagccaaaggaactattttgttcgatttggtatcagtaaagcaaattatggtgagccttttactgaacgctggtttcaacgtcatgagggcggtgtgttattaccagttactctgacaaaaaagaaacgccagaaaatgattagaaataaagcggtggtaatggacgatgacgataactggtaa

SEQ ID NO: 290901 - DNA, 618 bp, Morganella morganii
atggtaacagtaagctctgtagctgccacagaacagcatgataatacaataactgttactgcaactaagcgcattcaaagtagttttgatgtaattggtaatgtgaatgttcaaactgatgaacagttaaaaaaatctttagttaatcaaactgatgatttgagcgcagtttttcctgagttgttatctgcaaaccgaagttcgcgtatttataacaatatgactcttcggggccaatcttcggccgatttcttttctccgagtttgggactgtttgttgatggtgctccccagctttctcaatcgtatgctcaatctcttcaaggggttgagcaagttgagctacttaaaggcccacaaggagttatttatgggcgtggcacattgggggggattatcagtgttattaccaaaaaacccagtagtcacgctgaagcatggttaggggggcaatattttggtcaaggggaaagaatcaatacaggaggaagcactggctacatggaaaacggctgggcttttcaggggaatgttagtctcgatagaaataatggttctttgaacaatccagcatgggataaaaaaaatgttgatagcagagatataaaagctggatga

SEQ ID NO: 290902 - DNA, 1320 bp, Morganella morganii
ttgtctgctaattatatttcccctgatacattatttgagtctaatttaaaagtaggtggagaaaattaccattctcatgaggaatattttgttcctttttcacctctttcacgttcaaaaattgatactgaatggttatatgaaacacctaatcttaaacgtaaattaaaaaacatttcctggaatactggttatgattttaatgatgaatggaagtttaaaacgatactttcttatcaaaatatggatatagatagattgtttatggacgggacgttacaagatgattctcaggatattttgtattcagaagcaagagctaattatgaggggggggatctaagtggaattatagggatatcatttcaaaagatgggttatagacatgataatttatctgtagggaaagtcggaatgggaggaaaaaaatctgataatgatatttataattactctggatattttgatggtgcatacaggataaatgacaattgggagttaggtgcaggggctcgtttttctcacgaaaaagcaaaaactcgaatgattattttagaaaaaggaaaaggtgagtctaattataataataatgcagtttttaatgcctttattccacgagcaagtatcgcctggcttccaaatgagcagaatcgtatatggtttggagttggccgcggttttaaacctggtggttttaacaaagaaggggctgataaactagctctgacttcttataaatcggaaactgccacggaaatggaattaggttggaaatggcacagtgttaatgataaccatatggccgaaattactttatatcaaatagatagtaaagatgttcaaggatatgtaggtgttattggttatcaggcattatctaatatgggagattcaagaagtcgagggatagaatatctttggaaatcaaagcttacccctaatcatagtatttcactgggtggcatgttcaatcaatcagagtttaccagtggagaacataaaaataaaagacctgcttatactcctagttatagttcattaatttcatgggatggcttatatggcaaggagcaaaagtggtcttctcgcattgcagtcagatttaatggaccattttactttaatgagcaaaataatttagaacaagggcattatactgttgttgatgcatcaatatcatggcaccctacaaagcaatatgaacttggtgtctatgcgaaaaatattggtgatactttatatcgaacgtatgcatttggtaataaagcacagctaggtaacccgagagagatcggggttcagggaagtattaacttttag

SEQ ID NO: 290903 - DNA, 315 bp, Morganella morganii
atgcaattcactgtatatagtaatacagggaaaagtgccgtttatcccctgctgattgatgtaacaagcgatattatcggccagttaaaccggaggattgttatccccctgttacctgttggaatgtaccctaatggtatgcgaccggagcgcctgactccgcttatcaggctggttgatgataatgagtatgtagtcatgactcatgaaatggcgagtattcctgctcgttctttgggggctgcgttctgtgatgcttcttcttatcgtaagcagatcaaggatgctattgattttcttctcgatggtatttaa

SEQ ID NO: 290904 - DNA, 237 bp, Morganella morganii
atggctgtaacacaacgaccaatgcaaaccgtaaccatgacggtaaaacgaaccttgctcacccgtgcgcgtgaggctggaattaatctgagcgccaccctgaccgctgccctcgatgctgaattacgtcagtacgaagctaaaaggtggcaagaggaaaacagcgaagcactggaagccctcaatcgcttccacgacgaacacggctgtttcagtgatgaatacaggacattttaa

SEQ ID NO: 290905 - DNA, 348 bp, Morganella morganii
atgaacataattaacagatttcttagttcagcgctaaacgatttatacattatcatttctagtttattagaagggttttacaaaggaaccttattttatgcggcttcactgtttattctgtttgtttcatttgtagccgataacccgactgaatttttttcttatttaactcacaatacagattcggataaacttttatttggtggaacacttgaaataataaaatactattcattttgtattattgctttcagtggtatttttcttttaaagaatactttaaacagaggtaaacacgttaataaaaattctttttcacatggtgcaggagcgagtcataaaaattaa

SEQ ID NO: 290906 - DNA, 1602 bp, Morganella morganii
atgataagaattattgtgtttttgttctcgttattttttattccccatgtacttgcatatggggaatatgaagtagcgcaatctatggcgcaaagtaaggaggaggcagaacaaaaatataatcaagcacaagaagatttaaaaaaactaaatgaattaacaattgaatgttcaaagggtagtgaacaaaaatgtttagagcttgataattttaaatcatacggaaaaataaaagcagacccaagttttgtagataagtttacaagtacctttactaaagagattaataaatggatagctccgattgaaaaggccgctaaatatttattatttacatttgctattatcgggttggtgttattatttatacctttaatattaaaaggtgcagagttgggggagatattaaaagagctagttatatttgttttagttattagtatttggtttgcctttataataaatgctaaggattggactaatgcaattatagatagtttttctcaattagctgttaaagctaatgcatcgtcagcagatgcaacgcctgtcggtgttattactcaagggtttattgttgcaggtaaaacgatagcgggtagttataatcctattactttgcttggacagttaatatgtgcattaatcctcattgttatttatgcaaaaatagcattctatgttctaaaagtaattttagaaacaatgattatctcttatgcgggaataattctactaggatttggggggctatcttttaccagtgactatgcaaaacgatatttcacctatgttctatcatgtggaataaaattatttataactctgctcattgttggttttggaactaattttatcgcgggttatgtcaatagttttgatatgagtgagctaggcaattgtttagggatgatttgtatcgttttaatgctgatgtttatagcagaacagatccctgatatggcgcaatcaatggtaactggagctagtttaggcggcggaaacatgaatattggcggtacgctggcgacaatggccgccgcagccacagcatttaccgctgcctgctatgccggagccgccgcctttaaagcggcaggggcggccaatgcagcaggaggaggcggagccgctacaggtggactttccggcggtgatttagcgaatgcgttaagcaaaggcggcggctcgggtgttgccggtgggggcggttccggcggcagtagttcactgcctaacgggggtaaatccggtgctcagttagtgaaagagggaaaagtgccatcgcctaataaaaatacgggtaacactgcaacgggtaatgaagcaggaaaaccacaacaaagcagaacgggagcagctctgaaagccgtcgctcaatccgttggtgagggaatactcaataaagcggcaggaggcagaggctccacggcggcaaacattacccgtgcagcgttaaataatgttgcacaaagtcaacagtccacagaaagcccacgtaaacctattgccagtccgtatgcaaaaagcaccggaaataatagtagcggaaccagtaaaacgcctaacaagggaaataatgatacaggggaaaatcaatga

SEQ ID NO: 290907 - DNA, 759 bp, Morganella morganii
atgaaaaagatattaattgtaagtgtgtttgcaataagcacatttacaacgctgaatagccttgcttggcatggcgttgctactgaaaccactcagtggttaaataatatacagcttgttgagcaagttaacgaacaaattaatactataaaacgaatcagtgattctatagataagcaaatacaagatatggcaagtatgcctgcacatctaattaattctggttccaataaattaaaaattctaaaaacatttcaggatcttaaagatatttatcaaaaaggacagaatattgccaattctgcaagagatcttgagagaacgtatcgtgaaatgggaaatattgatattgctgatgcgctgaaaaatgggaattatcctcagttattcaacaaatggagcacccagaatcatgacacggttaaaggggttttagaacaaaataatttgtcaatggactggtttaacgacagacaaggcgaagttgcggattataaccgtatgctcaatacctctacaggaactgtttctgctttacaggcagcagggaagatagccaacgctcaactggatagtctcagccagttgggacaattgcagatggcgcaaaataacctgttagcatctcaggcggcaattcagcaaagcgagaaagatgtggaaagggctgatactttaaaacgttctaattgggattttaaagtgccagaaaaacaatcttctgcaactgatattctcaaaaatgccagacaaaattaa

SEQ ID NO: 290908 - DNA, 363 bp, Morganella morganii; identical to SEQ ID NO: 277841

SEQ ID NO: 290909 - DNA, 555 bp, Morganella morganii
atgctcaaccttcccgccaccgcaaccgctgaggatatcaaagcggaactgcagaaagcgattgacctgatttccggcggtaagggaacgacggttgccgcagggcagagtctgactgagctgctgaaaaaccagacgcagcagattgctgacctgtcttcaaaagcctttgacccggcaaagtatgtgccggttgaagggtatctggaactgcaggcaaagctgaacgcagagcgtcagcacagtcaggaacatcaggttgatgcgctggttcaggctgcactgtctgacggccgcctgatgcctgcaatggaaaactgggcgaaagacctgggccgcagcaattttgccgcattgtctcagcatcttgaggctgctgttccggttgccgcgctgtcatccacccagaccggcggtaaagcgccgtccggtgcggcaaaaacgcaggacgacctgcagtctccggacggtgagttaaatgatgccgctctggctgtctgcagtcagttcggcatttcccctgaagaaatggctaaacagctcggaggtcagtaa

SEQ ID NO: 290910 - DNA, 270 bp, Morganella morganii
atgggcctgtgtgaccggtttggccgggtcattgccgagatgaaacgacagaccacggcggaccataacaaggacagcaccctgttccccgtcacggttatccgcaaaatcatcagccacacccagcactgtcaggccgggcgcaccgggcacggcaaaaccggacgcatcggcgcagacaacatgtccgccgtaaatacgggcaccggccgcaaccggtacgggaaaaagttcaccgggacggtgagcggtattgcgatccattactga

SEQ ID NO: 290911 - DNA, 255 bp, Morganella morganii
atgccggcaatggaaacctgggcgaaagagctgggccgcagcaattttgccgcgttgtctcagcatcttgaggctgctgttccggttgccgcgctgtcatccacccagaccggcggtaaagcgccgtccggtgcggcaaaaacgcaggacgacctgcagtctccggacggtgagttaaatgatgccgctctggctgtctgcagtcagttcggcatttcccctgaagaaatggctaaacagctcggaggtcagtaa

SEQ ID NO: 290912 - DNA, 180 bp, Morganella morganii
atgggccgcacgtttaccggcggccgtccgggcgggccggtgacacagctgcggtttaaggaggatggagtctggataccggacgtctacacacagaaagctaaaaataaaaaagggaaaaagaaaaaaggcaaagaccagatccggccggttgcactgacagcagacggagggaaataa

SEQ ID NO: 290913 - DNA, 498 bp, Morganella morganii
atgaatcaggatctcaacacacaggatctgtctgcaccggcagccggtattgacccggtagtacaggtcatgggcggtaacagtgatatcgcactggatttggtggtaattattgataccagcggctcaatgtcagatgagtccgccgatctgagccgtgaaatagacgcagcgatagagaaagcggcagcccgctgtccgtctcagctgcgggcgactttcctgggcattcagggtacctggaccggcacaaagtttgatcagacagtgagtgattatctgattggcaaaggcgcatccgagggaaacttacaggccagaaaaccatttacagaggctgatggccgtgaccatgccgggaataaggaggatttatgccgcgcggttattgatgccagtaaatattttgactggcgtcccggcgcccggcgcccggcgcccggcgcgccatttttgtactgggtgatgaaggcatggaaggcggcggcggaacactga

SEQ ID NO: 290914 - DNA, 609 bp, Morganella morganii
atggctcttactgatgctaaagtcagggctgccaagcctttggataaatcgtataaattgaccgatggtgatggtatgcacttaatggtacataccaacggctcaaaatattggcgcttgcagtatcgctttggcggtaagcaaaaaatgttagcgttgggcgtttaccccgatatctcactcgcagaagcgagagaaaaaagagatgcagctagaaagttaattgcgaatggttttgatcccagtgaaaaacgcaaagaagttaaagaagagcaacagaaagaatttaatacattcgagaaggttgcacgtgattggcatgcaaccaataagaagtggtcggaagggcatagccatcgagtcctaaaaagccttgaggacaatatctttgctgctattggtaaacgcaatattgccgaactgaaaactcgcgatctcctcgaaccgattaaagcagtggagatgtctggacgtcttgaggtggctgcacgtttacaacagcgtgtgactggcattatgcgttatgccatacaaagtggcttaatcgactataacccagcgcaagatatggcgggcgcagtcgccacaggtaaacgagtccatatgtaa

SEQ ID NO: 290915 - DNA, 939 bp, Morganella morganii
atgaaaatatattattacgatgcatactataaatattatttatatgaagaaaatattgacggtgagcgtggcaagcaaattcagcgaggtgaagtattacctgcaaatgcaactactacaccaccacctgattttcattcatcacaaaatgaaataccagtttttattaatgatcagtggttaataaaacctgatacgttttggagacccaagtataaagaaattaattataatgccaataggtcaatgaatacctttaattacattgacccacattcaatttaccttggcccactgcctgatttacctcaactattcaatacaaacttagctaagctaagaatattacaatccataaaaataataaataaaaaattccacaactccattgggttacatcaagatatattaaacaatcgagcatattcaattttttccttaactgaaaaatcaatagaagaaagactgcttccagttgctatttatgaactaaaaacagagctggaaactattgtttacttgatgcgaaggatattggatactgtagttcaattagtagatgtattaattaattttgatgagtttgaaaaaacaaaaaaaataaaatcacaatctatcggcgatgtgttgaaaaacaaggactcatctttatcaaaagtaatacttggtgatgatatatatgaacccgatagcactaattttttacaaacatcaaatgatctttttaatagttacaaacatacacttatacacgacaatacttactctcaaatatcgttgcaatttcctgctttttgtagttatagcgtaaaatactccgatcacaaaaaaataatcacataccataaccataacgcatatcatataatgatgggatttgaagattgcttaataagaatctgtaataatataaataaatatagagaactaaataattaa

SEQ ID NO: 290916 - DNA, 369 bp, Morganella morganii
atgaacaaatatcgtgacaaatcagatccagagattaataaggctgtggctgattattatttaacacgcgcgtatagatttaacagtgagaatgaaactgttgagttgatagatatagatttatcttgtgaatttggcagtaaaataaatcgggtagatgctcaggttgtcggcacattcgacccatgcaacaacccgtctgacgcaatgccgattattaacgagtatggtattagtcttatgtatcaagagagggaattccaggttgcaactaatgatggaaattattactgctgcatgagtaatccactgaaagcagcaatggttattttcctgatgatgaaggatgcggagaatgaaaaagtatga

SEQ ID NO: 290917 - DNA, 210 bp, Morganella morganii
atggaatggattaagtgctcggaaagaatgccggaagatggagttgtagttttaactgaatgcggcggtcatttaaatgttggtgtcgggaatcgctctggtgccaactaccaatacatcacatcagcaatcagcgacagagaactgatggttactcactggattgattttgatgacattccactgccacaaccaccggaggagttatga

SEQ ID NO: 290918 - DNA, 354 bp, Morganella morganii
atgaagtatttcaaacaatatccggtaactctcagacacttttttgacagaccagtgtatgcggcagcggcagggtatgacttcaatttcttcgactgcatggcgtataccgcacacgcctacgttaagtttttgaaggattatgactggcttttctggctggatgctgaagtcagagaactaccaatgactgtggttattttgataaccatgctttttgttgccgtgacaacgccgtttatttatccggtttatggcgtggctacatacgttatgtgcaggagagcgcaaaaagtgcagtacaccgaaatcatcgacaggaacattaccggctggttaatgaggttcaaatga

SEQ ID NO: 290919 - DNA, 222 bp, Morganella morganii
atgataggcgatatcgcaacctggatgtttaaaatcagcatgcacatattctgcggccttggtctggctatggcgtatgtgattatccgctattacgaacatgacgcagtatggtttcaattcacgttaaaagcggttgcgtggactgccgtagtgttctggtttctatcaatggcatatgtcggtatttatttgttcaacaaagtttatttaccgaggtag

SEQ ID NO: 290920 - DNA, 528 bp, Morganella morganii
atgcccgccggaatcataggccccggcaaatttcttatccggtatcgtccagttggcattgcggatgccgccggttgttgtgctctgttttgtggcctctacagccgccacgaacttcggatcctgtttcgcttccttcagccagtccggcgtaagagcgtcttttgccatttgctttatttcggcaaatttattcttcaggtcttcccatttttcgttaataccgttaatgacgctgtctatcatgtcagatgcggcctgcttcatggttgccgggaggttctgaatatccgtgatgatttgatcccacttggttttgatggtggttttcacggtttcccacagctcggacatgtatttttttataccgtcccagttgcggtaaataatccccggcagagaatattgcaggaaaaagtttttaatcgccgcccatgccccggtgacaatattggtgatccagttccatgcggcagaacaggcgttactgatgcttgtccacatgccgctgtaataagcggatattga

SEQ ID NO: 290921 - DNA, 174 bp, Morganella morganii
atgttatatattcagaattatttatatcacataccatccctggtatgcttcatccgtaataatcataaatcacatgtttttctaaaaatttctcagaaaccatttatacagatactgaataaaaaccacgaggtcacgaaatacaaaataaccaaacgcaattataacgattaa

SEQ ID NO: 290922 - DNA, 396 bp, Morganella morganii; identical to SEQ ID NO: 288264

SEQ ID NO: 290923 - DNA, 216 bp, Morganella morganii
atggatattacatttgagtgcagaagtttttcaggggtaacgcggcgcagtaccggcaaaattgtgattgaagctgatggcgctgttctcgatggacacattgatgtatcagatatcgttgaagagtattcggctaatgcgcttctcagtgagattgaagaggatgacattgtcaaatatctcaccgagcgtggttacgcagtaatcgaaccgtaa

SEQ ID NO: 290924 - DNA, 303 bp, Morganella morganii
atgatttactcaaatgtaaaaacttattacataagcgatgacgcaacgggaggtaggctggttcggtatgacgtaattaccatcagtagcgatgagtatctgataaaggtttttgatgaccagcagcgcagcatatctcccccgcattccattatcttggtcgatgagtttaagttcaccagaagcgaatacatggaaagaaataacattggcaacaatagtatgatccgtcgcgatatggctccgtcatttgaaagtgacattctcaataagtgcaaggagcacaggaattcactcaaatga

SEQ ID NO: 290925 - DNA, 126 bp, Morganella morganii
atgacaccactgacccgctccggcgggttttttattacctacgagccgccgatctcctctgccacattagccacgacctgtgccactcctcacagtgagcgtgtggacatccagaataatcggtaa

SEQ ID NO: 290926 - DNA, 219 bp, Morganella morganii
atggcatggcaaaagcgcatgtggtgctcaccactgagcgggaatatttatttcggtaacgtaaacactgacaccggaaaggcgacaaaaggaaaagttgccgtgaccgatgatgccgttcgatcagtagccaagcatctgtatttaaccggtaatgaagaaaaatacacaacaaatgatggagtgaaaataaccatcagtgtaaaagtggagaaataa

SEQ ID NO: 290927 - DNA, 591 bp, Morganella morganii
atgaacagtgaagatttaaaaaagattcttgatgaacatcaggtgtatttaacgtcatttggtgagaggggagctagagccaacctgagcggagcctacctaagcggtgccaacctgaacgatgccaacctgagcggtgcctacctaagcggagccaacctaagcggagccaacctaagcggagcctacctgagaagcgcctacctgagaagcgccaacctgagcgatgccaacctgaacgatgccaacctgaacgatgccaacctgaacgatgccaacctgagcggtgccaacctgagcggtgcctacctgaacgatgccaacctgagcggtgccaacctgcctgatcgtacattcattatcttcggtgaagagtacgcaataacaatcaccaacggcgaatatgtccgtgccgggtgtaagaatcaccatatcgatgcatggcgcaagttcagtaagagcgagattgaaggaattggcgggcgaagagcgctgaaattcttcccgcggctgctggatatcattgatttctatctcggcaagggtgagcgcccggagtggcttaacgaaccggaagcagatggcgaataa

SEQ ID NO: 290928 - DNA, 219 bp, Morganella morganii; identical to SEQ ID NO: 278021

SEQ ID NO: 290929 - DNA, 282 bp, Morganella morganii
atgaacaaatatcgtgacaaatcagactttgagattaataaggctgtggctgaaattgttcaccaaggaaagacattcactcatgcatattcattcggtgatacctgcggaagctcagtgcagtggattggtggctatgctgaatatattcatgtcgattattgcaataacccggcggacgcaatgccgattattattgagaataagatatgcatgaattatatcgataaggatattggctggggtgcgcgtcattttgatgaagaaaaaaggcgaacttga

SEQ ID NO: 290930 - DNA, 249 bp, Morganella morganii
atggatagattaaccaaaagcgaaactcagatattaatcgattacgtcaaaggcatgattcaggataataaagagcccgaaaaaaaggcaattattgcgctgtgtaatgaacttgagcacattaataatttaaagccggttggatatatcagccctgttgggttggtgaatataagaagaagtcagccggtgctcattagccaatttaataaaatatcaaccatcccactctatcgcttagataaataa

SEQ ID NO: 290931 - DNA, 249 bp, Morganella morganii
atgacagataaaacaggtggctcggcgtttccaatgcttggcagtgttgcctacaactcagattggagtatcgacccaggaatgacgctgcgcgactacttcgcagcaaaggtcatgcagggtgattgggctgcgcaaagtaatgaggttggttatttctcaccacagtcaacggatgaacaactaaataatggtgctgaactctattaccgcatggcagacgcaatgctcagagcaagggagaaatag

SEQ ID NO: 290932 - DNA, 687 bp, Morganella morganii
atgacgcggttaaccaaagaaaccaaaaaaacgctgtgtgagaatctgttgcgagtttctccgctttatcagaaggcaaaggacacacttattaatcgtgtaaagctggttgagcgaattaggctggcttgcctttctcaagaaggaacttcggatgaagaaatatccgcggtggtcgagaaagtaaataagataaaggtgataaaaaactttgctgaaccagatatcagaatggcaaccactttaagtagcactcttgaaattgggataaatggcgagcgcagagatttaagcacccgcggagttgaccggctatggagcaacacccgatattctcatcgcatcaccgatacggaatacttcggtaaaggaattataccgtcagatatcccgtcaggattcgtgcctattaatcgggtgcttctgaaaaatgctaataatttttatgacgaactcctgtccagtgatagtcaaatagcatcattacttgatgaacttgatgagttccgccttaaagtcatgggcgcattacaacctataaatacagtcaagcaactggaaaagcactggccggacgccgtacctcatttgcccatcattgttagaccaactaaaacggaaatcgcattatcacctgacgctcttaatgcgatatgcggcctgccaacagaatcagaagctgcatga

SEQ ID NO: 290933 - DNA, 648 bp, Morganella morganii
atgaatatactcaacattggcgaccgcattaaattgcgaagaaaagagctcaagctcactcaggctgcactggctaaaaaagtcggtgtatcacatgcatccatttctcagtgggagagcggtacaacagcaccagacggtgctaatttgctttcagttgctaatgcgctaggctgtactgcggagcatcttctgaagggtaaagactccgctgaagtaaacgtttctttttctaaattccaccactctcgcggcgaataccctttgatcagctgggtgagtgcgggtaattggagtgaggcattggagccgtatcacaaaaaatccatagatgactggcatgaaacgacagtcagctgttctgaggattctttctggcttgatgttgttggtgattcaatgacatcgccatccgggctaagtattccggaaggaatgataattttggtagaccctgaagttgagccggttaacgggaagcttgttgttgcaaagctcgataatgaagcaacattcaaacagtacatcacagatgctggggcaagatatctaaaacctctgaatccgcagtacaggatgatacccattaacggtaactgtcagatcataggcgtagtggtcgacgcaaaaataaaaagactcccataa

SEQ ID NO: 290934 - DNA, 186 bp, Morganella morganii
atgcgcaaagatgacgcagttaaatattttggctctcagcgcgctatcgctgaaaagctggagttaacagatgcggcagtatctcagtggaaagaagtaattccagaaagagccgcactgaaattaagccgtatcactaaagggaagttggcatacaaccctgacctttatgtgaaaaccgcatag

SEQ ID NO: 290935 - DNA, 165 bp, Morganella morganii
atgaaccagaaacacgaatctgaatttgaaaaagtagtgaagcccctgatgaaatatctgtcagagaactaccatccgcacgttaaggtcattgttgacagttccagcgcggaggtggttgaagtgcacagttctatttcaaccaatgattttatcaaagactaa

SEQ ID NO: 290936 - DNA, 588 bp, Morganella morganii
atgaaattttaccgctgggtttgtagtaatgatgggttgtatgaaattggcgatacctttgagtacggggtagtaaatagccaatattatgaaaggacaagagataacagtaagtcttttataaatagcagcactggaaagcgtgtgacatttattgattttgaaaaaaatataaaatcgaaagtctctcttgatatcgctgctcaggttgaaaagataaaaaagaaagaggaaagcaaccttgagagggagatcatttttgagagagttaggcgtgattgttataatgaaaaaccatcaagaatgagatgtgcatttgcttgttcatcagaagccatagcgttaatgtggaagagtgacctatcactcggagacgcgacatacgtgcaattggtagaactcgaagccgtcggcgatgtcaatttcgtcgagtgcgatgatcagtacttatataccaatgaatcaatgaatagctctgaaatagaaaaaatggcccataagtactggtctgggaagggaaacaaaaggaaagagttccttttagaaggaagatttagaataacccgaataattaaacacaaccagtaa

SEQ ID NO: 290937 - DNA, 762 bp, Morganella morganii
atgaataaaatgatgactatagatgctgagatgttatcttatgataatgataatatacattcaaaaatgatgctgatgaatttaaaaataaatcagttaatgaagaggtctgaaattcggctttataattcagtagatagtatatatctaaaatctgatagctcattaggtgatatacataaaaacttaatgataggtagcgtttttaaaaagtatctacgtggtagcgagtaccaatatttaatgcctaggctggcaaaaggaaagccaccggcaattggcacattaacagcattgaagatggatgagaactcaacaatgtttacatacgatgcttatgggtatgtaggaatatgctactacaatgaatgggagtctaaaaaagtatcagattggcacgtttcaccacagggtggttactggaaacttggcagtgactattatggaaatgacatatcaaatataattcatagcggtgaatataggtttgagacaaattcattcacatcatttccaactactgagccatgcgtgataaaagtacattatcatgacgattaccgcaaatgctatcgattaacaactactggtactgtctatattaaggagtgggtttcatataacggaaccacatggatgtcgttaccaactgttttcacaaataacccgtcatcagagcaccttagaataggtgatatgcttatagatggaaatggtgaattggcgataaaggtaaactcaaccacagtgaaaaaactttaa

SEQ ID NO: 290938 - DNA, 1377 bp, Morganella morganii
atgaaaaagaatgatattctactacttattttaatatctttattttctctaccaatatttttccttgttgatgggtacagggatgattttgtcagaaattataatggagatatgatatggcaaagagagggaagaccattctcttacattatattgtacgttttaaatcttggcggaaaaataacaaacccattcccattggcgcaaactgcatcaattgcaataatgtttttaacatgcaggagattatctaatgagttcaatattaaaaataagactctttcctctttgatatctgcgcttttgtttttaaccccattttttatacaaaacctttcatatcagtatgactccctccctatggttgcatcagtctccatggctgcaatagctggtatttcaggtcgagtttttatcaaattcacattgttgtttttgtcaatatcaacataccaatcagcccttcctattttctttatatttgaaggcgttaggtacttcaatcatggtaactctaaaaatatcttgatatcaatggccatagctgccgttacattactattgtataaaatggtagtaataaagtatttcgtctactcagactacgcaacaaatgcaagtaggatgctaaacccattttcatatgatggtatatattcattcttcagcaatgttaattattatgtatcatacttttatggttactataagccgattccgttaataatttacacttccattgttttaatatcactttctattttattattaaagtggaaaaagtctattggatttatatctgtaacatcgataatatcatcgatattaatattttgcattatagatgaatatagattatatgttcagccgagagttttcatgtggtctggagcattgttggttatgtgtttttatataattacaaagtcgatagagcatattggagcaaaggtaactcgcgtcatatcagtattagtgtgcatattattagcatacgcaatatctatttcatgcatttattcatatgcatataaaaaatcaatagaaacagatattgaaaatatgaacttaatattatcatctataaatgacaatgatggaaccattctatttagtggctctcctgtaaaatccgatatagaggaaagggctataaataaatataaattccttgatgaggtaataggtgaaaagcttacctcgtggtactcatggtactattttagaaactttggactaaatgtaaatgtaagaaaggctgtagatgaagagtatccagagtgcaaggatttgatatcaaaagtaaataataactacatgatatataaaacaaaagaaaactatattgttttctttggtgacgtgaaatgcaaataa

SEQ ID NO: 290939 - DNA, 474 bp, Morganella morganii
atgtttgatgaaatatacaacgattcagaaacgctaagtgggctaggtggagaacgaatagccaaggataagtttgaaaaactacgctctggagacaaggtatatatgacgcggactgaaattgagtccctagttcgcaatggcacgctttctattgtcaagctacctacaggcggatactgcactaattcgtcttgcagtagagtgtgtggtattggcgagttctccgctgaaattaaaccatgcgaacatcagataatcacagacaaggaggccaaaagaactcaacgtcaaaataagcggctaataaatacatttcgagatttgaataatggcgaccctatgatgaaaagtatacttatcggagttaagcaaaagataaaaataaatgagtcattgattatcaaccatggaattaaagtcacagcctttgaggataatatcaaaggcataatcgcaaccagtagaggttaa

SEQ ID NO: 290940 - DNA, 960 bp, Morganella morganii
atgaagctatatgtaataggtaatggctttgatgttcatcatggccttgacactaggtatacatcttttgggctttatctcaaaaataactactgggaaacttatgagctattgctcgactattacgggtttgctgacttagacccagattttccaacaacaatgtcagaccctttatggtctgaatttgaaacgagtatgtcactgcttgataaagattcagttttggaagcaaacatggatgcaatgccaaactattcttcagatgactttcgagacagagaccgatacacgcttgaaattgagatggagcgaatacttggccttctaaccactgaactgtataaagcattcaaagagttcattttggctgtacagtttcctcagtttgatcacagccgatcagtaaacattgatagagacgctgtttacctcacattcaactacacagatacgctttctcaatactacgcaatccccgataagaacgtgctattcattcacgggaaagccgatgaacatattgatgagttaattctcggtcatggtgttgatcctgaaaatttcaaagagaaacctgccgaaccaccatcaggattgagtgatgaagatttagaacgttggatggaatatcaatctgatcaatatgactactcattcgagcgtggtaaggatgcggtcaatcagtatttctcagcaactttcaagggaacagaccagatcataaaaaacaatgaagacttctttgcaaagctcggcaatattgatgaagtatatgttctcggtcactcattagctgacgtagatttaccctacttcaagaagttggagcaatcagtcagacctgatgctaaatgggttgtaactttttatgaccctgatgatgagaaagtacacggtgaaactctaacaggacttggaatagccaacgttgcagttgtcagaatggaacagatctaa

SEQ ID NO: 290941 - DNA, 1182 bp, Morganella morganii
atgctattagttggttatccacttaattgttttatcaatttatttgatgacaatttacaccatgtgttcaaggtattgattatggaattacagacaaggctagtttttatcgatacaagcgcttttgaaaagaaaaactatcaatttgggcaacacgctcttggtcgtcttcaagaactaattgaggatgagaaaatccacttgctcattactgatgtgacaaggaaagagatcgactcccatctcaaacacaaatctgaagaagcagcttctatgataaagaagatgcaaagagatgcgatgttcctaagaaacacccccgaccttgattgtcatggcatcttcaccaagattaaaggtgatgatatttatgctgttatcagtgaaaaatttgatgatttcgtcgaaaacggctacgtcgaaacaattgatgtaagcactgttaaccctcaagttgtatttgatgcttacttcaacaaccttcctccttttggcaaagaatcaaaaaagcacgagtttcctgatgcatttgcgctagaagctattaaacaggtgagcttggctagaggatattcagcctatatcgttagtgacgacggcgatatgaaatcattctgtgagaaagaagataacttcattcatcttgaaaatgtcgatgacctaattgacttgattattcgaagcgacaaagcgtacgaagaaccagccaaatttgctgatgaaatattcgaacaactcctagaacaaatcaaagcggatgccctgcaagctctcgaagatggcgagttcaactatgaaaacgcagatcctttcgatgagactatcaattctatagaaatcaactcggtgaatgttgggaagaaaaacttacagaatgtcgatgccgagtgggctgaatacgaagtagaatttgaggtggttgttacggcagattatcgattctcagattatgaccgttcaccttgggaccctgaagacaagcaatatgtattcgtcttgagtaatgagtcaacagtaaaacacaaagaaacatacactgcccacataacacttgcctataccgatggattaaaagctaacgcatacattgaagagttttacttccaagatacatattttgagctgactgataatgactccgaagtcattagcttcaaagaactagatatcaacggtgaatga

SEQ ID NO: 290942 - DNA, 1089 bp, Morganella morganii
atgagaaacgttgttagtgacgataaaatcagtgattttcgagacttagttaactcaaactctagctttgtgtatcaaatatacaaagataaaggtggtaagaatctttttaacctcgtttgctctgctatggattggatctctgtctctgttcgccacttagaaaatgcgcctgagtttgacaagaacatagatagtagatgtatgcaggtctactctctgatctcttcaatagaccttattttcgagtcaataaaacaactccatcgagtgtttataactgataagaaagatccgttttatggtgaaaagaaatgtttcaaagatcgcctcttcgctaatgaagatgataataattattttaaaactatcagggcgtgtttcagtgctcaccccgtaaatctgaatcaagaaaactcaaagcgtttcgcaagttggccatttcaaagtcatttcaacactggcgatttgagtgttcatttgtacagtcgagatgtgggtaaagaagacctaacgttaaacctcaatatcaatgagctgttggaatttctcagaattcgatatgagtatcttgatgttattgctgataggattgaaacgctgtttgttgagtatcaacacaaactttcaaaagaaaaaattgagactaaattagatcctttagaacaactctatgttcttcgtactgagtcagaaaaacgattagataacgattactataacggggagattgacgacctgattatgatttttgaagcggaagtaactgacgctgaccttgtaccattggctgataagtataaagaatccctcctacctctgattgaagagattaagacgaaccttcaagaaatgaacatcgttgacctagcaaacgatagtgagctgagaataagatctgaacttgataaagagttacgttatgaacttggtaagttctacacttgggttcacggtggcaggtacgatccgctacttgaatactattttgaaaggtttaacgcttctactgacggtaagttcaagttcaccaaaactgatgacatcaaacttacgtttcttaaagcaaagctcatgctaactgaatag

SEQ ID NO: 290943 - DNA, 153 bp, Morganella morganii
atgaagacaattaaattaaccattttactattttctctggcaccattaccactggcaatggctgccgagactaatattgatatcattaataatacagcacagctaaacgatgataataacaaaaaaaataatcaccgttttgaaaaaagataa

SEQ ID NO: 290944 - DNA, 213 bp, Morganella morganii; identical to SEQ ID NO: 25793

SEQ ID NO: 290945 - DNA, 264 bp, Morganella morganii
atggtcacattaaccaataaagaatatcaggcattgatggcccagagaaagattgccggagttgtagttagcccaactgtctgtgatggcgttttaaagattattgcagggcccgtatcggacgtcgtttcaaaattggtggttagcggagcagatgaaaagacagttcacgcagccgccgagctaacggcagctgcaattacactggctattacaactcaggtggtgataggtgaccaaatcgcccgttgtggagatgaataa

SEQ ID NO: 290946 - DNA, 216 bp, Morganella morganii
atgtctgaactcaatgcattggatttagcaaaaaactacctttcccgtaccgatgaaccgctcaccccaattgaatatctgtcaaagcttttagacctggagggcgagttcaaggcgctcctaaaagaaaaagatgatttcagtgttctggatgatgaaacttttattcatctccacaacgggcgatttggtcacctatcaccacctgagttgtaa

SEQ ID NO: 290947 - DNA, 279 bp, Morganella morganii
atgaatgaaaattatacttccattgaaaccaatataggttgtattaatggttttattgatgaaaatggaaaattgattgttgaaaatgaaaatcctaatttagttagatttctgcccagcaatgcgttgcatacgatgggggattttttaaaaaatccaaacaattccctgattgttctttcacccgagggtttttctggggagtgggtattctccggtagggatatatcacgaggtgatgcatttacaccatacccatttatcttcacaaaaaaataa

SEQ ID NO: 290948 - DNA, 585 bp, Morganella morganii; identical to SEQ ID NO: 270443

SEQ ID NO: 290949 - DNA, 990 bp, Morganella morganii; identical to SEQ ID NO: 270442

SEQ ID NO: 290950 - DNA, 2544 bp, Morganella morganii
atggtttctaaaaggaagcatttagatgtggctcggtttttcattgacgaaccttttaaatctaaaaggcctggtcgaaattcaggtgttcctggtcgagatagaaaccaacatggaagttatttggctggtttatatcagaatttaataaatgcttacgaacaaaaaagaaaacaacaaattaatcctatcacagatgattctggtatttatgttgaaattatcggagttgatggatgcaagctcccattagatagtttagataacagagattttaaactctgttcttgccaaatgagaggagatagagagttcgcgttaatttttatacctgaagataaacgtgatacattccttaaaaaaatacaacagtatttagaccctcagaaagatggaaaaccaaataaggaaggcgtttcttttcctcgaaatcatacgttaatagatagtatttccgagatcaggcttgcaaatttggagtcattttggacagatcctatagatttatttcctgcagataggaatcttgatgtctggtgggaattatggttgaaaagtaacaccgtagacgacgttaaaaaaatagcagagtctcttgctgaaagagttgatggtcgcttaggaaacacatctctttcatttttcaattcttttgttgttcttattaaagcctcagttaataaacttgagaaagctcctgaattaatttcaaatttagaagaaattcggaaagcgaaggagacaccagttcccatcattagctcttcaccaaaagagcaacaagagtggctgaagagtatttctgatcgagtatctctttcagataatataacaaccagtgtgtcaatactggatactggtattaattacaataacatgctgttaagtaaagtgtgctgtgatgatttttctgtttcttgggatcctgattggcccaaatacgatcaatatcaagcactagcgccgtttaatgagcatggttctttgcaggcaggacttgcagcatttgggaatttgatggatgtcgtattaggaaatagcgctatccaactatcacatgttattgagtcagcaagaattttacctccgcaaggcaacaatgatccctttttatatggggctataacggtaggaacagcatccaaacttgaagtagataggccagatataaatagagtatatagccttgctgttacgtctgatcacgaaagagaaagtggcagaccttcttcatggtctgcagaaattgatcaattcacttctggtatgcaagatggaaagcggagactttttgttatttctgccggtaacaacttagatattcgtcctgaccaagactattgggatcaagtcaatctcgcgcagatagaagatccagctcaagcatggaatgctattactgttggggcatatacagaaatgaccacaaatgatgatccatattttgaaggttggtcaccatttgcaatggcgggtgatgttgctccatcaagtcgttcttcggtgaattgggcgtggagaaagcaagcaccatttaagccagatgtagttgccgaaggtggtaatcgacttttgtcacctgataagactgaactcagtaatgaagatactgttggattattaacaacatcaggaaaaactaccggtcaggtttttgagcggggtagtgatacaagcgctgcgtgtgcgttagtctcgagatgtgcggctcagttaacagccgagtatcctgaactttggcccgagactatacgaggtttgataattcactctgcggagtggactccacgaatgatggaacgatttggtttattaagtgcagtacatagtcctaaagtagcaaaagaaacattattgcgtacggttgggtatggtgtaacaaacattgacagagctagatatagtgctgaccatgcgcttactttgatcgctgaaggcgaaattcagccatttatcaaatcccaagatgctaatgcgtcatctgatcctaaactaaatcaaatgaaactttatcagttaccttggcctctcgcggaattgcaaaatttgccgccagagttagaagttaaactcaaagttactttatcttacttcatagaacctaatcctggtaggagaggttatcgtacaagatatagctatcaatctcatggtttaaggtttgaaactatcagacctggtcaatcaattgctaacttccgttcttacattaatggtttagcaaatatggatgattacgatggaccagaaggtgacaaggatgggtggtttttagggagtcaacttcgaacaagaggttcaattcattcagatcactggactggtagtgctcaagatttagctgatatgcatactatagctatttttccagtaggtggatggtggaaatataaaactgcagaagaacggtgggaaaatagagtgcggtttagccttcttattagtattgaagtacctgatgagagtgttgacatttactctgtaatagagaatcagattgaagttgcaatagaaaatcaggtcgcaatagaaattgtaacttga

SEQ ID NO: 290951 - DNA, 1926 bp, Morganella morganii; identical to SEQ ID NO: 270440

SEQ ID NO: 290952 - DNA, 1662 bp, Morganella morganii; identical to SEQ ID NO: 270439

SEQ ID NO: 290953 - DNA, 966 bp, Morganella morganii; identical to SEQ ID NO: 270438

SEQ ID NO: 290954 - DNA, 186 bp, Morganella morganii
atgtatcgactgattctgacaaacaaaaaaaagcgaacgcgagagtatcagccttctgatgctggttatagggcagctctcaaagccacgcgcaagtttttggaacaaaatccccagggaaatgcagtgctttacgggcatggtgtttgtgagtccttgactatacgcaacatgcctgaagcctaa

SEQ ID NO: 290955 - DNA, 270 bp, Morganella morganii; identical to SEQ ID NO: 270437

SEQ ID NO: 290956 - DNA, 396 bp, Morganella morganii; identical to SEQ ID NO: 270436

SEQ ID NO: 290957 - DNA, 858 bp, Morganella morganii
atgaaaatgaatatgtcaacttccgtaagttcagctacagccttgttcgccgccattatgctcgcaggctgtgctacaaccccaaaatcctataattcagagatgtccagagcgttaaacttggcaagagctgggggtatttatgaccaagatctgagagactcagaagatgggcggaactcatatagacagtctctactgatgaaagcgctaaatgtcacaagcctggccacatcgcttgatgctccattaagaggattgaacggtcagcaaactctcatgtttaacactgcaagcattcttacatcaccggataacccatccgctaggccaagtttgatggcttggatgcctgcatcaatggctaaatcctcagaagatgcttatagcaactacataaacctaattgataatgccgttgcggtagccgcgaaatctatgaacctggatttaactaaaatagtggaaagtacagcgcctaagattgatggaaatcccttaattatgtgggcagtaacggctccacaatttggctgtgatggctcaaactgcgtaattgcatacaacgttacaatgcctaatccgtggaaaacaccagcctttgtgggcagtggtaatattgatagctttaatctggccgctaataacacgaccaaatattctcgattgattttctcccaggtcagcgacgtgaaatcatttccaatggacgatttttacaaaagtacgagccgagcgctgccggagtgggcagtcatgtatttcccgcccaatagtgtgttccaggatggcaaagctttaccatatccagttatctatgaaaaaggccagcaattgctatttaggaaggcacaatga

SEQ ID NO: 290958 - DNA, 1425 bp, Morganella morganii; identical to SEQ ID NO: 270407

SEQ ID NO: 290959 - DNA, 3405 bp, Morganella morganii; identical to SEQ ID NO: 270408

SEQ ID NO: 290960 - DNA, 255 bp, Morganella morganii; identical to SEQ ID NO: 270409

SEQ ID NO: 290961 - DNA, 309 bp, Morganella morganii
atgacaaaacgtacaagacgactatttagcgcagaatttaagttagaagcagcgcagctagtcttagaccaaaattactcagtgacggaagcagcccaagccatgaatgtgggcaagtccacgatggataaatgggttcgccagcttagagaagaacgccaagggaaaacacctaaagcttcacctatgacccctgagcaaatagaaattcgggaattgaaaaagaagctggctcgccttgaagagcataatgaaatactaaaaaaagccacggctctcttgatgtcggactcactgaacaattcttga

SEQ ID NO: 290962 - DNA, 873 bp, Morganella morganii
ttgataatcaagaaactcaagcagagccacagcgtaaaaatattatgcgaagtcttcaatgttcatcgaagtagttatcactattggcttaaacgcccagcgttaattaatgcggaaacaataaaactgcgcagcttgattagcgaggctcacgccgcaagcaatggctctgcgggagcgagaaccattgcagatatagtcacaaatcagggtgtaaagctgagccgataccgagcaacaaagctaatgagaactcttggtttagtaagctgccaagaaccaaagcatcgttacagaaaggcttcacaagaacatattgacgttccaaatcacttaagtcgtcaatttgctgttacggctccaaatgaagtttgggctggcgatgttacgtatatttggacaggtaatcggtggatgtatttagcggtcgttatcgatctttttgcccgcaaagtgattggttggtcaatgtctttgtcgcctgatagtcggttgacaggtaaagcgctgtctatggcctatgaatctcgcggaaagccaaaaggtgtcatgttccatagcgatcaaggcagtcattatactagccgtaaataccgtcaattactgtggcgctttcaaataaaacagagtttatctcgccgaggaaactgttgggataatgcgccgatagagcgcttctttagaagtctgaagacggaatgggtgccaactgtgggttatcgtagcttcgctgaggctcaacaagagatcacccgctacattatcggatattactgccaactcaggccacatcagtataacggtggtctaactcccaatgaatcagaacgattatattgggaaaactctaaaaccgtggccaattttagttga

SEQ ID NO: 290963 - DNA, 1407 bp, Morganella morganii
atggactgctggacagatcctcaaggtgaaacacactgccctgtaaatactggtggaaatctcaacagttgccagatgtatgaggataatcctcagtgtggatttattagttctgaatgtattgatggagcagagggttcctcgggtaagtgttatgtgtttaaagatacctacgactgcggaacggacatatcaatacctactttagagaaagaaacgacgtatcaatgtggtggacccattaggtgtatgggggatgattgtctcgatataacaaagtcacaaagcactgatttcgctcgtgcatctgcattgttgaatgcagctcagttcatgactcaggatatgagttgtactggtcaaaattatgatgataaccccactggtgaagaaaatgtgatgtgttcagcttttgccggtgaggctggggaatgcaagattgctgtgggtggtgtctcagattgttgtgaaaagccgacgaatatttcgtttgctgattatctcaatttgattatggccgtgcctaagctagacggtgccgttatgggactctctgatggcagtgccgtgaaaggagcataccaagtattaagagaccccgtaatgtctggctggaccgaaataacacagccttttgcaagttatatagaaaatattagtggagcggttgatagttttctccagcctgttcaacagtttgcccaggagactattggcgcattaaaggagcaaattaccaagctgacttctgaagctctaggaaatgcttctgcgacgggagccgctggcgtacctgctggggctcctgaatcaatgactgaacaaatcctcggccaacaaggtgccgccatgctaagcaccgttatgactgtttacacagtctatgtagtgtcgatggtcatgatccaaatgatttggaagtgcgaggaaaaggagttcaccatgaatgctaaaagagcactaaatagctgcacatacgttggatcttactgcaagtccaaagtactgggagcatgtgtcgaggagcgagagtcctattgctgtttcaactcgccactctctcgaatcatccaagagcaagtgcggccacaacttggccttaactttggtgatgcgcgcacacctcaatgcggcggaattccattggatcgaatagcggatattgattggagtaaggttaacctagacgagtggttgggtatacttcagcaaaatggaaaacttcctgatcccgcatcgttaaacttggatgctttaacgggagctggaagtgattttaatattgatggtactcgacaagacgcctcagaacgtattatggagcggctggaagggattaatgtggacaaaattagaaacgacaaagcgcgtgaaatctttcctgacttggatggcaatggtggttga

SEQ ID NO: 290964 - DNA, 228 bp, Morganella morganii; identical to SEQ ID NO: 67537

SEQ ID NO: 290965 - DNA, 954 bp, Morganella morganii
atgaagccatttagccaactacttgctcagtatcaggcggatatcgaagtagaaaatagtgataaatcacaaggcttgagtcgggctgagtctgaattaatagatgcctcagtaaggattaaatcagatccaccctcgcccaatgatttcacttttatgcactcaatcatgtgccaagtcggtttgcctcgttcaagagtaaatggatctgagtttgagaggcgttgtggtgctgctggtctatacatccgagcgggtaaaatttgggatggtaagcagtttctccaacagcctgttccgtatggtcccatgccaaggcttgtaatggcatatctgaatactcaagcgttgcgttcaaaatcacccgagattgatgtcggcaatagcgccagtgctttcctcaaacaactgggcaaggagtcatcaggaggaaaaaatgggagctatacaaacttccgtaaacagcttttggcgttatctgcttgtagtattacccttggttttagtaccgctgataaagcgttcacttacgatggtaagcccatccaaaaatttgaggcttggattggtaacagcgacaatcaaggtgctttatggcctggtgttattacattttcacacgagtattttactacgctaagcgaacatgctgtaccgcttgatttaagggctctaaatcagcttaatagcagtgctcttgcgatggatatttatgccatgctttcggatcgtttacatcgaattagcggtaggcctgtcgtattgtactggcgtaatttgcgcgagcagtttggtcaagaatataccggagacgacgctgacaggaactttaagaaggtattccttcctgctctaaagagagtccttactgtttatccggatgcaaaagttaagaaagtgactggcggaattctgatgatgtccagccccccaccgattccataccgtaattga

SEQ ID NO: 290966 - DNA, 1218 bp, Morganella morganii; identical to SEQ ID NO: 270417

SEQ ID NO: 290967 - DNA, 630 bp, Morganella morganii
atgccagtcactattagcatttccgatgatgtgtaccgcagattggaagcgttggctgtcggattcgacacaccagagagagttatcgagcgattgctcgactcggttgaggagggcggacccaagtcaagcgaaaacaaaccgtccctaacctttgtccctgatgagactgctttcaaaaatgagctgatagctcgcaagaaggcacaggtcgttcttcatttgaaaaacggtgaacgagatgtcattcattggaatgcgtctagattccaacccagttcaaatcttcgagctaatttatggtctggcattctgagaaactggaaggataaagggatcacctctgctgaactttcggttctacccaggagccacaatcatcccgacgacaatacagatctattaatagctattgccggagaagttcattggacgctcgaagaggtagagcagtacttcgttgattacgatctggtaggcagtgacgacggccatccttactattacctagcgacgttcagtgatgagacacctgacgagctgaagcgaattgcagggctgaacagctcaaatcaacttcacatgggtctaaacatagttccggatgaagatcagggagaattcgagtag

SEQ ID NO: 290968 - DNA, 528 bp, Morganella morganii
atggaatggaagtcagtatcacgagacaaagcacgggatatgatatcaactgcattaaattgccgattttctgatgaagggttgagaatttcagtagtttcagaatgcttaaggagcgtattacatcaatattctatatccgaaacagaagaagctaggcaaactgtaacctcgcttcggctcactagtgcagtaaggcgaaagttggtgcctttgtggccagacattgcagatattgatgatgctatacatccaggtattatgtctatattggacagtttggccgaattgggtgacatgattaagttagaaggtggtaattggctaactgctcccccacatgcggtacgcactgaccataagatggctatttttcttggtggagagccttcctgttcattttcaacgggcgtggtagctaaatctgctggaagagttcgcttggttgagcaagaagtttgtactggcagcgttgaaatctgggatgcaaaacgatttccggctttatcgacgcgcctagcgatatga

SEQ ID NO: 290969 - DNA, 2328 bp, Morganella morganii
ttggtttcaaattcgcggcttctgaaccttagtgttgaagaacataccgctcaactatcacatagagatagggccagcgttcatgctactacagaactctacgaactgagattccaagatgttcttattaacgataacgacaagcccattgatgtacttagttgtacgacgacgatggaagtgggggttgatattgggtctctggttgctgttgctttaagaaacgtccctccgcaacgagaaaattatcagcaacgtgctgggcgagcaggccgccgtggtgcatctgtttcaacggtggttacatattctcaaaatggccctcacgatagttattatttccttaatcctgaacacattgttgcaggttctcctcgtacaccggaagtgaaggtaaataatccaaaaatagccagaaggcacgttcattcttttttagttcagacttttttccacgagttaatggaacaagggatttataatcccgcagagaaaacgtccatgcttgagaaggcacttggtactacacgagagttttttcatggggcaaaagatactggcctaaatctcgatggttttgataattgggttaaaaaccgtattctatctaccagtggtgatttgagaacaagtgttgcagcatggcttccttctgttcttgaaactggaggactttctgctagcgactggtttgctaaggtagcagaggagtttttaaatacactccatgggctggctgaaattgttccacaacctctcgttctggttgatgaggaaaatgaagatgatgatcagacctctagtggaatgaaatttgaacaagaagaattgctcgaattcttgttttaccatggtttattaccaagttatgcatttcctacaagcctctgtagtttcttggtcgaaaaaatagcaaagaatactagaggttcttttgaggtacgaacagtacaacagcctcagcagtcaatttctcaggctctgagtgaatatgccccagggcgtttgattgttattgataggaaaacctatcgctcaggcggtgttttttctaatgcattgaaaggagaactaaaccgggcacgaaaacttttcaataatcctaaaaagtttattcattgcgataagtgctcttttgtccgcgatcctcataataatcagaatagcgaaaatatttgtccgatctgtggtggcattttaaaagaagaaataatgattcagcccgaagtctttggacctgaaaaggctagggaacttaatgaggacgacagagaacaagaaatcacctatgcaacagcggcacaatatccacaacctgttgatcctgaggattttaagttcaataaaggtggtgctcatattgtttttactcacgcaatagatcagaaactggtgacggtgaaccgaggaaagaatgaaggtgaatccagcggtttttcagtatgttgcgaatgtggtgcagcctccgtttatgattcctactcaccggcaaggggggcacatgaaagaccgtataaatatatatctactaaggaaacgccgcgcttatgctcgggcgaatataaacgcgtttttctcggacatgatttccgtacagatttgctcttattacgaataactgttgggtctccgcttgtaactgacacttcaaatgctatcgttctacgaatgtatgaagatgcattatattcaatagcggaagcacttagacttgcagctagtcgccataaacaactagatcttgatcctgctgagtttggctctggtttcaggattttacccactataggggaagatactcagacattagatctcttcctatatgatactttgtccggcggtgcgggttacgcggaagtagctgcagcgaatctggatgacattcttactgcaacactcgcattattagaaggttgtgagtgcgacacatcctgtacagattgtctcaatcatttccacaaccagcatatacaaagccgtctcgataggaaactaggtgcatctttacttcgttatgctctgtacggaatggttcctcattgtgcttcacctgatattcaggtggaaaaattgtctcaattaagggcaagtctggaattggatggtttccaatgcctaattaagggagctcaagaggcacctatgattgtgagcttgaatggccgttctgttgcagtgggaagttatcctggccttattgatcgaatcgactttcaacacgatgtatataaggctaagaaaactaatgatcatatagcctttaatgaataccttcttcgttcaaatctgccacaagcacatcaaaatgttaggaaattattgcgctga

SEQ ID NO: 290970 - DNA, 450 bp, Morganella morganii; identical to SEQ ID NO: 283488

SEQ ID NO: 290971 - DNA, 252 bp, Morganella morganii
gtgaatacaaaatttttattgatggcggaatatgaaacctctcagataccactggcggtagtagcaaaaaaattcctaaacatcactgaggctcatgcagttaaaaaagcaaatttaggagaattaccattccctgtttaccgagatactactagccagaaatcaatacgtatggtacatataaatgacttagctgaatggattgacacaaaaaggaagatagcacgaagcgaattttttaatttaaaataa

SEQ ID NO: 290972 - DNA, 738 bp, Morganella morganii
atgcttaatagatatttgattactgctattattcttatgctgattgttatagcatcgtatatcatccaattcttttttaatcttggatatggtatatccgataaggcatctgactgggttgattttagtgactatgttggtggtctgataagtccgttgctgagctttatatcactaatactattaattcaatctttaaatttacaaaatgaggcaaataaagaactaagggaagaagttaagttaaatcaaagaaatgaaaggcttaggtcgtttgaaatatatttttttggtctgattgattctcaaagaacttcattttcaaattttaaaattacatttcctaaatgcttgggaggaaaatcattaacaggtgtatgcgctgtgcaggaattggaggatttgattcaacgttttcgggataagtcctggaaagaatattatataatgaagtgtattgatcgtattgataaagacgagaagatttttaatacaattcgtattttttataatattgttaaaatgatttctgaaaaattaagcgatgaaaatggatttgatattgaagtaagaaaaagccaatttttaacattgattaatttcacagagttctcacagttacgcttagttatgataagtatgcaatttatggagtggaagtcagctagatatttaaagtgtaataaagaatttatagatattctacattctgtaggagtgggaactgacttatattaa

SEQ ID NO: 290973 - DNA, 819 bp, Morganella morganii
atgtgtataaactttgacatcgtgattgatagtcatgattattctgtagatatgaattctgggctcgaaactctaaaaggagcacctgaagctactagacaaatagctagtactttacttaatgaacacgttcctaagagattaaccagtgataataaagtgcgaactaaattaaagaaaacttttgaaggatcttttggacagatattttcattagaaattgaatgtgaagatctgaaaagaagatttaaaaggataggccgagatgtttttagcgagcttatgtcttattttatccatgaagcgttatatagggagacacctactttatcaaataaagccgatgaaatccttaacaatttaactgaaaaacttcaaaatgagttaattgatcagttaagactgtcctcattatctcgtttacataatgtatctatcaattttaataaagatgtaaaaataagatatagaaataataaagaaaataaagttctaataagtgttaatagagattcttattcaacattaaaacctaaaacggataaaaccaaagtaaatattattgctagtattactagattaaatattaatactggaaatgggagattattgattaaaggacaaagcgatacagtagcatttgggtttcctgctcgctatgaggacgtaaagaagactgctaagaaacagttttctgccaatcttgataataataatggaataagtagagatgagtggaaaactttaagtttaaaagctcacactcaaaaaacaaacgatggcagaattattaaatatctaattgaggaaataaattag

SEQ ID NO: 290974 - DNA, 1809 bp, Morganella morganii
atgacacaaaagattttaaaaaataagattatactaggtattctagatgaatttaagaaaaattataactttggagaaagtagtgaaagtaagatttttgaaaatctagttaattatgtaatattgtctaaatatgaccctgaagcatttagtgatgtatcaaattttgacttagttgatgtagataaaagcggtacttttggccttgattctttcgctctatttattaatgataatctaataacctgtacagaagaaataactgagcatcgtaaaaccaaaagaatggatgtacgactagtattcatccaaacaaagagatcaacatcatttgactatggtgattttttaaaatttacaacagctataaaaaactttctctcagatgaacctttaattgctctatcagatgatttgactttttccaaagatcttattaacaatcttttctctgtagaaaacgctcgcttctttgccaatagaaaaccaaagtgcgatatatactttgctatttccggaactaattctcatgaagataatcattgtcaattatttgagcaagaggaaaaaagcttaaggttacaatcaccagaatttgaatcctttacaattaagctagcagactctgattatataatagactcatataatgaattagagaataaatataatgtactcataaattttgaaaaaaatatcccatgccaccctataaaagatgttgaacaatcgtatattggttacctaccaatatctgaatttttaaaattaatcactggttctgacggaaatattaggaaaaacatattctatgaaaacgttagagactttcaaggtgttgaaaatgtcgttaataaagagatatctgaaactttaaaaaataatgataaaatagataagtttttaatattaaacaatggaataaccattgttgccaaagagttttcaaacattagattaaatgagtatgaaatatgtgattattatattgtcaatggttgccaaacaagcaacgtattattccataataatgaaataataaaaaactctaaaaacttattcatcccaataaaaataattcacaccactaacaacaatgtaatatcaagcattataaaatcaacaaatagacaaacaccagttcctgatgaggcatttgtttcactagaaaagttccataaaagattacaagattattactatagattttcacaaaacttttttgagccactatattatgaaagaagatcaaaagaatttagtggtaatgctgataacttagagcggcctagaatcattaatttgcatgggttaataaggtcatttacatccttgattcttaatgagccacaattagcaatgagtcaaaaccctacagtcatactaaaagaacatcgtggtaaattattccaagataagcatacatattcaccatactttctatcatcattacttttatatctcttttacatcaactctgaaagtggaaaaatctcgaagaaatatgtaatatcaagatattggatttgctggatcgctcgagtattgttatttaaaaatataaacattggagatattaactctcgaaaaacagataataaatgccaagaagtgatagagtcactatcaactgaaaactatccagtttggatatttagagaatctataaaaatttatgacacagcaaaagataagcacagaaaaactcatggcagacagcttaacaagcaacttgttagattaaaaactttcaaggaagtagtgaagtctgagcttattaacgccatacaggcaacaaaaccacaatag

SEQ ID NO: 290975 - DNA, 447 bp, Morganella morganii
atggaccggcgattggtccatggcgaaacggccgaccttgcgccgaccggcttcgggcaacaggtccgcgaagccatggaccagcgccgcgagcatcatatcgaacagcgcgacgccacgcgcaacagggacggccgaatcttctaccggcgcaatcttctcgccaccctgcgcgagcgggaagttgcgcgcgccggtgcggagatggccgagggcaaggcgctgccgttccgcgccgccaaggatggtgagagcgtcagcggcaagtttaccggaaccgtgcatctatcgagcggcaagttcgccgtggtcgagaaatcccatgagttcacccttgtcccgtggcggccgatcatcgaccgccaactcggccgcgaggttatgggcatcgtgcagggcgggtcggtgtcgtggcagttagggcggcagagggggctggaacgctga

SEQ ID NO: 290976 - DNA, 1215 bp, Morganella morganii
atgaccaccacacgccccgcgtgggcctatacgctgccggcagcactgctgctgatggctcctttcgacatcctcgcttcactggcgatggatatttatctccctgtcgttccagcgatgcccggcatcctgaacacgacgcccgctatgatccaactcacgttgagcctctatatggtgatgctcggcgtgggccaggtgatttttggtccgctctcagacagaatcgggcgacggccaattctacttgcgggcgcaacggctttcgtcattgcgtctctgggagcagcttggtcttcaactgcaccggcctttgtcgctttccgtctacttcaagcagtgggcgcgtcggccatgctggtggcgacgttcgcgacggttcgcgacgtttatgccaaccgtcctgagggtgtcgtcatctacggccttttcagttcgatgctggcgttcgtgcctgcgctcggccctatcgccggagcattgatcggcgagttcttgggatggcaggcgatattcattactttggctatactggcgatgctcgcactcctaaatgcgggtttcaggtggcacgaaacccgccctctggatcaagtcaagacgcgccgatctgtcttgccgatcttcgcgagtccggctttttgggtttacactgtcggctttagcgccggtatgggcaccttcttcgtcttcttctcgacggctccccgtgtgctcataggccaagcggaatattccgagatcggattcagctttgccttcgccactgtcgcgcttgtaatgatcgtgacaacccgtttcgcgaagtcctttgtcgccagatggggcatcgcaggatgcgtggcgcgtgggatggcgttgcttgtttgcggagcggtcctgttggggatcggcgaactttacggctcgccgtcattcctcaccttcatcctaccgatgtgggttgtcgcggtcggtattgtcttcacggtgtccgttaccgcgaacggcgctttggcagagttcgacgacatcgcgggatcagcggtcgcgttctacttctgcatccaaagcctgatagtcagtatcgtcgggacattggcggtgacgctgttaaacggcgatacagcgtggcccgtgatttgttacgccacggcaatggcagtgctggtgtcgttggggctggcgctccttcgatcccgtgatgctgccaccgagaagtcgccagtcgtctag

SEQ ID NO: 290977 - DNA, 627 bp, Morganella morganii; identical to SEQ ID NO: 149106

SEQ ID NO: 290978 - DNA, 1176 bp, Morganella morganii; identical to SEQ ID NO: 52403

SEQ ID NO: 290979 - DNA, 723 bp, Morganella morganii
atgatgaccttagttcacactctcgctgtcgccgaatatctcaacttccgtcacgccgccaacgcgctcggcgttgcacagtccagcgtcagcgcccgcgtgaaggcactggaagaagacctcggcatcctcttgttcgagcgtcatgcgcgcggcgttcggctgaccgaggccggacgccatttcgtcgagcggatagccgtaggtattgaccaactcgaccatgcggtgaaaaccgccggcatggcggcagccggagaaagcggccggcttcgtatcggtatccatgccctgattccgcatagcttcctcgcaaagctgatcggccaataccgcaaggattaccccgatgttgaagtcgagatcgccgaaggcccggcccgtgaagcggtggtgcagcttcgcgccggcaggttggacgtggcgttcgtcgcgggcacgccccaaccacccgactgccattcccgtcgcacatggaccgaaccgctcttggcggtgctaccggaacggcatccgctcgccaagcggtcagccgtcacatggcccgatttggcaggcgagacgttccttgcgtataggaagttcaaacgcccttttcgggcagtctgctgggtaggcggcggtcgcgcaagccccgttttgggcacggatcggacgtctgtgagtgggatttcggcatcgcggggccacgcagcggcgttgtcagcagccatgcttcgctga

SEQ ID NO: 290980 - DNA, 135 bp, Morganella morganii; identical to SEQ ID NO: 34870

SEQ ID NO: 290981 - DNA, 1659 bp, Morganella morganii
atggttggtgcaacatcttcactcaatatcttagaaataggggcaggtacaggagctaccactcaaggtatagtcgcagtacttaagaatacgcattactcatacacctttactgatatatcacattacttccttgataaagcgcgaaaaaaattcactgctgtaggagaaatgcgctatcaactctttgatattaatgcaccaatacaattttctcatcatccagataatggctatgatctgatcattgcatctaatgtattacatgatgcatcacatatcggccacgcactaaaacggattagaagcctgttaaaacctcaaggctatttattatttatcgaagcaaccgagtgtcaaagtgctatgcaaatggcgactgttggctttattgagggattaagtgcatatcaagataagcgtatattgacgaataaagcgatgcttgatagtgaaagttggcatgatattttaatcaatactggttttgaaactattggtcaatggccccaaacagattcctcatctttgcgacaaacactctttttagcctctcccactcgtggaggaaaaccttatttaggtaaattacgtgattatttatctcattctcttgatcagaatatcgactcttttgagttgttccaatgtgaaaatattgaagcaacccttaatggcatagcaacatcatccgctcaagagctaaatgaacagatacaacctgttgcaatacctgatgtaccaaccaatatgattaatgaaatcattgcattatggtctgagttattaggtcgtgaggtcaatagtacaaatgatttcttccgttctggaggagatagtttgattgcaaccaaaatgatcagccaattacatcaacggggatatccagcaacattacaacagatttttacctatccatgcttagccgatttttgtgctcatttagagcaggaaaagcaatctcaacgagagtactcctctttgatacctctaagcgctgtatctgctccaaaaccttaccactactttatggtacatgcttctgatggtgatcccggtgtttacctacctcttgctgagtcgttaaataatacagtgtggggattaacagttacagatgcttcaaaactaactgatttggatacattgttatcattacatttatctagcataaaaacagcacaacagactggcccttatattcttattggttggtcatatggtgcttttattgccagttaccttgcagaacaactctcgcaacaaaatcattccgtattattagtattaatagatcccgtctatcgacatgattttattaaattttgtcatgatgactcagatagttcatcagatgaaaataagcagcttgcatgcactaaaagacttatgtcattcctacctgaaagtgacctaccattatctgatgatatcgcctgtttatggctagaagccaccaaccacccaacagaatggacatcacctgaaaaagagtggtaccaacgattaccgccacatacccaacatcactatttttcaggggagcactggtcaatactgcaagatcgcgctaccagcacacatctggccgaaatcattgatcagtgggtgcaacaaaaactttctaataacggatatccatccgaaggaggtaattaa

SEQ ID NO: 290982 - DNA, 264 bp, Morganella morganii
atgaaaattaattctttggaagactctaactctagattaaatttttatagagaagcatatgggaaagaagatatatctattaaagcatcccaagaagaaggtaatagcggttttttcaaaatatggaagagcatagcaaaagatttagatatgttacatagtatttcttttggatattgtgatgatgagcattttaacgtaactattaacattcctaaactagaattagataaggttatatataatgcgcataataattattga

SEQ ID NO: 290983 - DNA, 228 bp, Morganella morganii
atggccggtaaacaggttatctgtctcggtgatacgactgaccacggcggcgtagtcatctctgcgttggataattacaacatcaacggccgcccggtggcgacggagggggattcagtctcctgtccgaaatgcaatggtgtttttcagattgtttccggttcttcccttatgaccacctgtggtgccacactgattgcgtcacagtcattaatggtatcagagtaa

SEQ ID NO: 290984 - DNA, 315 bp, Morganella morganii
atgacatttaagcgaattatacttgccggtgcggtcgcgtcggccacattactggctgtccagattgcttccgcctgcacccggctggtgtatctcggggatgatgcgcaggtgatcactgcccggtcaatggactggaaaagtgatgtcggtaccaatttatggatcttcccgcaggggatggaacgcgatggtgccgccgggccgaattccgtgaaatgggtgtcaaaatacggcagcgtggtggcttccggctatgatgtttccaccaccgacggcattaatgaaaagggattgtccgcaaacctgctgtag

SEQ ID NO: 290985 - DNA, 519 bp, Morganella morganii
atgtctgatttaaataatttactatcattttctgtaggtgtggctgctcccttgattacacaatttgtaatgtattacattactaataaacataacaacaggaaaataaagatggaggatgttaattcagctatcaatataattatacagttaacagattttattaatgatagttatgaatttataaaatcccaatatgttacaaataatgatggtcacacagtaagaattggtggggatgctccagagtttaattataacaatgatctggacttgaagtttcttgatgaaaaaaccgcttttagtatagcggttttgcctacaagaataaaatatataaagaatcaggtttctgtatactttgaatatacagatcttgaagatatagaatatatggaatatgagaaaaaattgtatagtgatttattaaatgaagtaattgaaataagggcgaaaatatgtaatagatttaagcttcctgaggataaattatttgatctgagcaatgtttattcatag

SEQ ID NO: 290986 - DNA, 1029 bp, Morganella morganii
atgaaaaaaattggtgatgtcaccagtaccgccgataaaaacggcgagtggacaaacggcaacgtggccgccggtatcgcaccgacaattcttgaggctggctggcttaattccgttcagcgggaaattctcggtgtgattattgccgcaggaatgcagcaggataaaaatgatgacactcagctttctaaagctatcagcaaaataatctccggtggtaactacgccacggcagaagacctgaaaaaatatctcgccaaagatcagaacggcgcagatatcccaaacaaagatacctttatcaaaaaccttggtttaggagatgtgataaaaagccccctgatcgcgatccccggtggcgctgatgtactgacttattttcccggcaaaccaacgggtttttattcatccggagctgaccttaacaacacgccagaacctgcggcatggcgtaactttatctggttgaatcacggcagtgacagatacggtcaattaatttgcctgtggggagggggtaaatccgcagtaaggtcgctgaatgccgcagaatgggatagcaagtggtctgttgctctgtctgatgcagatattgttgatgtgctcggtaattcacagaaaaaagtcatcagtcagaagaaagtgaccgaagaattacaggctgagtctctgctgactaaaatcaaaactgttgatggtgcaaactcgggactggatgcagacttgttgcgcggactgcctgctgattttgaatcttaccttaccccgaacggacggcagaaattacccagcgggcttattattcaatggggtaataaaactatatcacccgactcaacagagacagtaaattttccggcagcattcccccgcagagtttttgttgtagtggggaacccacactccgcaaactattcccagtcgacggcgacaattaaccagacatcatatacaaaggggtcgtttagcgtgaaaaactatagcaccaccaatcaggtcgattttcattatattacttttggggaataa

SEQ ID NO: 290987 - DNA, 501 bp, Morganella morganii
atgctaatcatcttcagtggtttgccgggaagtgggaagagcacgatcgctcaggctttggcaaagcagttaaacgctttttacttacgaatcgacacaattgagcaagccatactcaaagccgaagaagatgactgtaaaatgggccctgctggttattttgtcgcatactcactcgccagggataatttgcaattgggagcaacagtaatcacggactcagtgaacccactggcgttaacccgtgatgcctatcgaaaaatcgctttatcggcaagaacccgctttttagaaatagagattgtatgctccgatgagatcgaacatcgtaagcgagtagaaaccagagtgtctgaagtagaaggattaaccctgccagactggaaatatgtcacagatttgacttatgaaccatggcacagagaacacctcattttagacacatgcaatttatccagcgatgaatgtgtcttgcggatcatcgacgttctttcccaatga

SEQ ID NO: 290988 - DNA, 789 bp, Morganella morganii
atgataaaccaacaactggaagatagatttaaggcgcttgagaaagattatgaggcactcattaccacaaaatattctgctcagagcgtcatcacccatactgtggaaacctatgttgatcctggtaagtataaacactggatcgccagagtgaaaaagttaatagaagacagctacggaaaagagtctgattattacaatgatttcaatactgtaaaccgcagttggtctactaattacaatacactgataagaagttataagccgttgtttgacgcggcgagaaatgatcttgtgcactctgctgtcagtgctaatacgtctcaagaaaattcagctctgagccttgtgctaaatattcttaacaggtttccgacctttgttcgccagctaaagagacggcacaacggacgtgcaccgcttgaagttaatgatgaatatgacgtacaggatatggtttatgcactgctgacgcttcactttgatgatataagggcggaagagtatactcccagttttgcgggcgcagcctcaagacaggactttcttttgaaaaaagagaaaattgtgatagaggtgaagaaaacccgtgaatcgctgggggccggcaaagttggaggggagttgcttattgatatggcacgctaccgcgctcaccaagactgcgatacgctgatcttgtttgtatatgacccagattgctatataaacaatcctatgggcgtgagaaccgatctggagtctaaagatgcggaaggaaaagtgaaggcggttattgcgcagttctga

SEQ ID NO: 290989 - DNA, 726 bp, Morganella morganii
atgattactggtaaaattaagaatttaaatttttatgatttgcatctcgttactaatccatttattgggtttaacaatgagaaaagagaggaaagtgagtccgaatcgtacttgtttatgtttattcttgaatgtctaatgctatttatagttagccacgaagtcggccatttcattaataaacatggagaccgagcgataagtcaatcttttgatactatctttgatgatgttttaggtcatagaaaaatcgatggtgcagcgctaatatcaagtcatgcaagggaattagtcgcagatagttttgcgcttaatgttgttaaaaaacatgtacaatctgcatttgatcagcaagcatcttatcttgataacttacttaatttttatgattgtaaggaaggcggaattgtattttcattgttgttaatactttgctacttcaaactatctgatggtttatcaccccatgaacattttcaatcgacgcatccctcaacagcggcacgggttaggtatatccttagttgccatgttgaatcattagacaatgaggatgaagaacaagaatttggattcttttataatttaatgataactcaattgaaatcaatattttcaactatgggcgatgactttgagttaagttggataaaggatacgagtactccagaaatgaccatgtggtttaatgatgtttatgcagagcacgaaaaatggatagtataa

SEQ ID NO: 290990 - DNA, 435 bp, Morganella morganii
atgaaaaaagaccttttactggaacctcgcaatctcgctgcggctgtaagagcgcgtcttgatgagattgaaggtttgttagacaagggtattagtaggcaagaaattgctcaacttcttgatagtgaatacagcttttctgtgactgtgaaagcgttagatatggctttgtaccgggcaagattgaaacgcaaaaaaggtggattgcacaatccagaaagtacggtaaatactggatcgcacaatccaaaagagcaggagaaagcggaaccggtggaaactggattgcacaatccagagccagaaaaattagttgaggatatgggcgggaacaaagaatttttatccgataccgattttaaaaaaattggtgatgaggcaaagaaagtcgcaacctcattcaaaggtagcgtaggtaataagaaaggtttctaa

SEQ ID NO: 290991 - DNA, 519 bp, Morganella morganii
atgcttagcgatttcaataccgaacagcaaactctaattgagaaattatcattagttgatgatctagaaacttgggcaacttataccagacatcttgaaaaagaagtcaagaaaagcatctatgagtatgccagacgtttgtggataaaacgtaaaatacttgatggtagtttgcttttacatcctaatgttcgaattgatttaattgagagggagtataggccattatctattcacaagaaaatgatctgggctagtgtattagtctcttataagggtgaagatagtagggagtattttaaaagaataaaggggaagataattagaaagtatggtctcaaatggtggaaagatgttgatagtagaataaaaccagcttatgcagcgcagcaacgtattttaaagcgtgttggtgctcttggtccgggagtaaaatactttgcctcacaaagttcgtttgtaggcagcatgttaaatgatgaacttgatgcagcattaagaatgattccagaggattaa

SEQ ID NO: 290992 - DNA, 633 bp, Morganella morganii
atgaggcaaataataaaaaaaagagaacctaacgaactaacattatataagagattaaaagatgctatttacgacggtccgaatttcaccgaagtaaaggataaaatccggcaaagtttacttcttgaacaaggttatttgtgtgcatattgtatggaaagaatagaccttaactcaatgaaaatagagcattgggcttgccagcattcgaatcaagaaatgcaattagagtacagtaatttattagcatgctgtaaaggtcatgagggctcccctcctaaagagcagacctgtgatacacgcaaagggggcaatgcactaaaactttctccggctaatgcaaatcatagaataaatgaagtcataaattatgaccaccaaggtcaaataacatctatcgatgatgaatttaatgttcaaattaatcaagtccttaatttaaataagcatagattaaagtcaaatagactaactgcactcatcatgattcaaagagaacttcaccaaaaaataggtgagaggaaaagatcagaaattcaaaggctgatagataaatacaatcaaagaaatcagcatgggaaattacctgaatattgcggcataatcattcattatcttcagagaaaactatga

SEQ ID NO: 290993 - DNA, 1599 bp, Morganella morganii
atgagcaagcgaattaatagtacgataaacaaactggagcataaagctcagaaaaactcatgggaagctgcgtaccaactatatgaatattaccttgatggtaaatatgtagagcaaaactatgataaggcccaattttatataaatttggcagcagatcatgttaaaagccattttgtttatatggaggagctgagtttatctgactttagagcgttagatgatttaacattaaatttttctgataaaaacttaattgtattagctggtgaaaatggagtaggtaaatcatccatattagacggtttatcatattcattgagttggttagttaataggattatgtataagggtggaaaaggaaaagagattgaaaggctagatattagagatgactctgagaaaggctactcttctattataactaaatttaagattaatcgatataccactatcgattttgaactttgcgagttacatattggtagttcggttaataaaaaaagttatttaaatgaagtaacaaagctaggagcactttataagtttgctggcgaaaatagattatcttttacattaccaatcttcgcatattatggtgtatcgagaactattgatataagcacaaaagatttgaatatgattgatgatgttaattcaatacaaatgaacaatcgctatgaagcatataccaatgccttttcaggaaaagccgatatcaaatcttttttgaaatggtttaaaaggttagatgatattgagaaacacagagccgtctcctcagacaatttttcagcagatgatgaccttattaataaattagctattttagctcccagcgatctaaatgcaagaaagctgttagagtcgctcaaacaaaaaaaaccaaaaagtgaatctgataatgtttcttgggaaataaataaaatcaaaaacatcttaaaccagacaattagtctattcatggatggttactcggatttatctattgaaattgaaccgactgtcagattaacaattaaaaaaaacaataaaaccttaaacatacttcaactttcacaaggggaaaaaagcttaattgccttattgctagacattacaagaaggatgattctattaaatccacatcttaaagacccgctctcctcgccaggaataatcattattgatgaattagatttgcatctacatcctcaatggcagaggaacattgttagacatttagagcttattttcccaaactgtcaatttattgtatcgactcactccccgcaaatcattagtgaagttaggcatgatcaaatcattattttggacagaaatgaaaacgattgtgtatatgggtataagcctaatcaatcttatggacttacaactaatgaaatattaaatgaactaatgagcgataatgataagcaaatcataagaagcagcgaagttgaatatagacttcatgaaatctttaaatttatcaatgatggcgaaattgagattgcaacagaccttatttctagattagaagatgatttaaatggagatatacctgaacttgtaagagcaaaaatggagattgaactttatgagtgggataaagaatga

SEQ ID NO: 290994 - DNA, 960 bp, Morganella morganii
atgaagctgaatttatatgcaaaacttacagataaactaggccgttcaaggaatactgttgaacgttatatatcgaatgggcccatgaaatacaaagtttacaccattcctaaaagaacatctggccagcgggttattgcccaccctgcaaaaaaactaaagataatacaacgtgcattagtatctgtgttagaaccacatttaaagatacatcataaagcaatggcctacaggaaaggtttaggaataaaagataatgcagttttacatagagaaaacgaatatcttttgaaacttgatttcagtgacttctttaatagtattacaccagaattattcattaattattgtatgcagaatgatataattcttagcaccgctgagaaaaatcttctgattaagacttttttctggaataaaacaaaaaagaatgatggcaaacttgttctcagtgttggcgcaccaagctcccccttcatttcaaatacaataatgtacttttttgatgaagccatagatgaatactgtattacgaaaaacataacttattccagatatgctgatgatttaacgttttcaacacctgataaaaacgtgttatttcacatacctacactagtcaaaaaacaacttggaataatattttccaatcaaataactatcaatgatttcaaaactatattttcatctaaagcacataataggcatgttactggggtgactattaataacgatggtgaaatatcaatcggaagagaaagaaaaagattgatttcctcattaatccacaagtttattttaggtcaattagatattgaacatattcgatatttacaaggcctgctatcatttgctactgatatagagccaaaattcaaatccagaatgatttcaaaatactcgaatcaagttatcgaaaaccttatcaaattcagaggtagcgatgagcaagcgaattaa

SEQ ID NO: 290995 - DNA, 432 bp, Morganella morganii
atgtcatgttacatagctcattcggtagtgaatgggcaggacactatgcaaaacagagatttagctgttcaaaaaggtttcgctatggctcttacgctggcatccaataatcaaggtgatattcttgtattggttccaatgatacagaatataagctctggccatttgagatcagcgctgggcaaggatttcgcggacaagctaaaaaaaccagcatcattcgaaattaatgggataaacatcagtcgtacttcaaaggttccacgatcagtaccacggaatacagtcgtttggatgttgtggccttccctgcgcgatgcagaggacatgacaaaggtctcttatggtcaggttgatattgttgcaacagagtgggtgccatttgatgagcttaaccgttggagattagacaataaagctaaggttatctga

SEQ ID NO: 290996 - DNA, 192 bp, Morganella morganii
atgaaatggattaagtgctcggaaagaatgccggaagcggatgtttctgttttggctctgtggaacggaggtatacaggtgctgtttgtacattcaaggacaggactgtgggatgacggagatttttggtcatgcatagaccatgatgaggtaacccactggatgccgttgccacaaccaccggaggagtga

SEQ ID NO: 290997 - DNA, 249 bp, Morganella morganii
atggcaggacacccacatgctgaccttatggctaaggcagcagagataggaataccagagccggtacaggaattgccagaggatggcgaattgctttgggttgcagatatcacgacatcgggagccatgcgccttgtatggacatcccatgagtcagacatacggatgtttaaacgcggaattctccacctgacaaaagaagcagcagaagcccacatagccgccctactctctttcacacagaagtaa

SEQ ID NO: 290998 - DNA, 183 bp, Morganella morganii
atgaaaaatagccaccgctgcgaaatatgcaataaacggcttaatgaaagtgagcgattttattacggctacacctgtgagcaatgtgaacgccatttcattactgagcatgaaggaaataaattaaaaactgcactttcgcttatcaggctgtatttcagaaaggtaatttactcagtgtag

SEQ ID NO: 290999 - DNA, 183 bp, Morganella morganii
atgagaaatagccaccgatgcgaaatatgcaataaacagcttaatgaaagtgagttgctttattacggctacacctgtgaaaaatgtgaacgccacttcattactgagcatgaaggaaataaattaaaaactgcactgtcgctcatcaggctctatttcagaaaggtaatttactcagtgtag

SEQ ID NO: 291000 - DNA, 375 bp, Morganella morganii; identical to SEQ ID NO: 285432

SEQ ID NO: 291001 - DNA, 1083 bp, Morganella morganii
atggtggtagaaaatgcaaatgcaggtgtagatggctcaacgggatacacctttcagaaatgctgcgcgatccatcttcttttagaaaatcatgaatctttaaaagatagagattattttctttttattgaacactatgatgattttctttttgcattttgcgatcccagtggtcatttaattgaagttgaagcctatcaagcaaaaaaaggggccgaagattggtcaacagataaagaacttgctgatatagttagaaaacttaccattgttggtaataatttaataaatgatccaattccaaaagttggaaattatattcataatctgcactttataacaaatcgaagcatcaacttaacctgtggtaaccgtggcaaaggagcattaaaagtaaaagtatatgcttcgaatacttcaaaaaaatattgtgatctagctttacaaatacaaaacaatttgtgttctaaatttgaaaaagatgtacagctatatattaatgaattggataatataacctttaagtatttagacctgccggcacgaatttcaagcatcaaggatcaactagtaggaagcgctcgaagagttctccacacacaagtaaatgatcacgtagcagtcgttgatacccttcttcaactattacttgaaaaagaaaccacatataataatgcaggaaatgtgcgcctatctgatccatcaaagcgattagaaaagaaagaaattgatggtactttcaatatgttgatcgcaaatagcaaagcttttgatttttggcgaaataatgccaattcattatctaaaggtctaagaatcagcgtatcactaagaaaaaatgcgaaggaattgttagataattgctttgactatttcaaagatattcaacaagtagaatataaaaatatctataattttgtagaatctacgactaaatttgacgctatatcatactcacatgaagagtgtattcaaagcatctatgagtattttttagtcaaaaagtcatcaaaattagagaagcatatgatcgcatttgcggtgatcgctgcatacgtagaaacgagaaatataaatgattaa

SEQ ID NO: 291002 - DNA, 2112 bp, Morganella morganii
atgtatagaggggcggggggagcagaggtagcccttttaatacgccgcctctgtgctcggttggatatacctagggaacgcatgcgctgcattcttaccagtgctagcttggggtccattgaggatggagaacgttttgcccaagatttaactggcttatcaccaacctcttcgaggaaatttcgaattattgagggtacaagggaatcgcgtcctggctcgcaaactgttaccagtaaagaagctaacgcattggctgaattcgacctaaattcatttcagtgcgtagctgaggatcttgaatctgcacatgcagcaatagaatctcttgccgaacggatgggctggcaaaagccaataataaaagatcatagtgcattacgtaattggttgtttgataatttgactggttttggtcctattgaagcgcttattgaaatagtttcaggtaaagctgttaagctaaatatcctgagtgaaaacctttttccggactctccacaagaaattgcagagcgtgcgacagatgcattactcgcattgggttgctatgctcagaggacttccgatggcagagtgctaattccgacccgcatgcatctttttcatcgaggattaccaggtctttatgcctgtatagatcccgattgtaatcaacgtttaggcaaccacagcgggccaactatacttggccgcctatatacgaaaccattggatcaatgtaaatgcgcttcaaaagggcgaatctacgaattacttacccatcgtgactgcggtgcggcttttattcgtggatacgttagttccgaaatggactttgtatggcaccaaccgaacggaccattatcagaggatggggatatcgatcttgttcccattgagatattagtcgagggaacacctcatttacatagtgattaccaggacagatggctacatatagcaacgggactcctttctaaacagtgtcaagacgagggttctggttatcgcaaagtttttatacctgaccgagttaagtctggatcagaaattacatttgatgaatgccccgtttgtacgcgaaagacaagaagtgatcagaatgaaccttctaaaatcatggatcatgtaacaaaaggggaggcaccttttacaacgttagtacgtacacagatgtctcaccagccagctagtcgtcctattgatggcaaacatcccaatggggggaaaaaagtacttattttttctgatggccgacaaaaagcagctaggttagcacgtgatattcctagagatattgagcttgatttgtttcggcagtccattgctctcgcctgttctaaactgaaagatatcaagcgggaacccaaaccaacatcaatactttaccttgctttcctatcagtcctttctgaacacgacttgattatttttgatggggaagattcccgaaaagttgtaatggcccgtgctgaatttgatcgtgattgtgatagcgatctggctcaagcttttgatgatgatttcagcccccaggagtcaccgtcacgatataaaatggcgttgcttaaacttttatgtagcaactactattctctttctggaacaactgttggttttgttgaaccatcgcagcttaaatcaaagaaaatgtgggaagctgtgcaggccaagaagctcaatattgagagtaaggatgttcatgctttagctgttgcttggattgataccttactcactgaatttgcttttgatgaatctattgattcgacactacgaaccaaagcggctggattctataaacccaactggggtagtaaaggacggtttggaaaagctcttagaaaaacactgatacttcatccagctatgggggagctttctgtggaagttttggaggatatttttcgtactcatctgacattaggaaaagatggtgtttactttcttactccaaatgcacttcgcctgaaaatcgatctcttgcatgtctggaagcaatgtaatgactgcacagcactaatgccatttgctttagagcattctacttgccttgcttgtggtagtaacaatgtcaaaactgtcgatccgtcggaaagcagctatattaatgcacgaaaaggattctga

SEQ ID NO: 291003 - DNA, 429 bp, Morganella morganii; identical to SEQ ID NO: 168645

SEQ ID NO: 291004 - DNA, 681 bp, Morganella morganii
  misc_feature (653)..(662): n is a, c, g, or t
atgagagtctctcccccttacattagaacactatctgcctcttgtttaatcatcttctctgtcgtcgccactcatgcctcggctgaagggcttcagtccgagatggatagactattcaacgaaatgagtaatacaactagaccgggtattcatgagacacaacgccgtggagttattgcgggtgggcgtgtgaccaccaaagcgcgtatttttgatgaaaacctagttagctttgtccctccatcctggaaagctgggtgtggtggcgttgatctattcggtggttctttatcgtttgtgaatgcagatcagattgttcaactgatgcgagctgtggcagcaaatgcaaagggctatgcttttcaactagctctggataatgtttttcctgatggtgccaaatggatagaaaactttcagaagaaagttcaggctttgaaccagcatttaggcaattcttgtcagttagctcagggtattgttaacgattcactaagtgcttttgacacgaaactaaagaacgatactcgtacaaaagcatcgaccaaaggtttatttgaagacatgttttctgcaacgcaggaaacggatggacaaacggcaatcaagacgctgaaagacaactcgccacaggcctaccaagagatgatacnnnnnnnnnnaccaagagatgataggtaa

SEQ ID NO: 291005 - DNA, 792 bp, Morganella morganii
atgagcaatctgattattgttgacggtattaatgtgcgccgggacatggccggtcgctattgcctgaatgatttacaccgtgccgccgggggtgaagagcgccataagccatctaactttatgcggatggaatcaacacaggcattgtgttcagaaatcgaccgatgctcagatatgagcatcgcctctgtaaacactattcgcggcggtacggagcaggggacatatgttgcccgtgaggttgtttatgcctatgccatgtggataagcccgctgttcaacctgaaggttatccgcacgttcgatgcggtggccggaacacagcaggcggtacagctggccgataaggtacaggcaggcgctatcctgctggagtctatggcgaaaacgctgaatctgtcgaattcctcaaaactgggcgggtatcagaaactgcaaaaaatggctggtcttccggatctggctccctcctatgcgattgatgcaccagcgggtgcggtagatggctccagcagaccgacaacctctctgactacgctgctgaaaaatcacaatgccgcattgtctgcgaccagagcatataaacgtcttgctgagctggggattgtcgaacagaaagcccgtccgggttcgaagggaacacaaaaactgttctggtctgttacatcaaaggggcttctgtacggcaaaaatatcacatctccggcgaacccgagggaaacgcagccgcatttctttgagagcaaatcagcggaactgctggcactgatgatgattccggcggtggcctga

SEQ ID NO: 291006 - DNA, 1077 bp, Morganella morganii
atgtcaaaaaagcagtctaaaaaaagaaaagagcaaaccaaattatcaaaaatactctcttcatctagcgaaaaaagagttgttatgtcgaatttttttcataagctaaatgaaaatgaaattaggttatcagtaccagacttactacaacaccgacattttaagaaatccttatttatagggaattttggatttgacttgatatacaatatttccagccccaaagtaagtttatataaaaatattcattggtgtttaggtattattgacgcacataaaaatataatagatacctttttgtataaaaaagaagctattttgcaattaattttaaaaaatgattttaatcaagcactaaatcacttagatgacttagatgcggcttgtgggtactcaatttggtcaataagtattagagggacattattaacgttagaaaaaagcatcgaagaaaaaaatgattacctcaatactcttaatacaaaatcccaaaaaaataaatttcttaaagcgactgtgtcattagtggctaataggcatagtgataattcaacattgcctgcttttaatgactttgcagaacaaaaaattagacgaagctttactggggagttacaacattttttaatgtataaaatcgtaccttactcgtatagttttgattataattttgaacatattctaaatatcgaaaaaaacacacctcctattgatatatattgtgtgcttttagatatggttagatactcattactaacatctaatcagcataatttttataatgaatctaaaataacaatcaaaaatttatataaattattccctgtagatgaaattatgagccttgcaaatggttatggtgtattaactccatttttatttcagaatgaagaaatatatattttagacctatacacttccggtagatatcaagatgtttgtgatttttttgaacaaaatgaaaataggaacattaaattttcaatgttcgaaatatgggtaaagtcagcatgtagaacaaaaatatccaaacggatttcttggggatttaatacaaaatttagtatctgttattaa

SEQ ID NO: 291007 - DNA, 237 bp, Morganella morganii; identical to SEQ ID NO: 96025

SEQ ID NO: 291008 - DNA, 366 bp, Morganella morganii; identical to SEQ ID NO: 96026

SEQ ID NO: 291009 - DNA, 798 bp, Morganella morganii; identical to SEQ ID NO: 191551

SEQ ID NO: 291010 - DNA, 477 bp, Morganella morganii
gtgtcagtcgaaatcatccatctcactggaaacgatgttgcgttgttgcagtcaataaatgccatgttcggcgaggcattcaacgaccaagatagttatgcccgcaacaagccgtcatcaagctatcttcaaaaactgcttagcacttctagttttattgcgttggctgcggttgacgagcaaaaagtcattggcgctatcgccgcgtatgagttgcaaaaattcgagcagcaaagaagcgagatttatatctacgatctcgctgtagcggcaacccgccgcagagaaggcatagctacagctctaattaaaaaactcaaggctataggcgcagcgcgtggagcttatgtgatttacgtccaagctgataaaggcgtagaagaccaaccagccatagagctctataaaaaactaggaaccatcgaagacgtatttcatttcgacattgcggttgagcagagtaaaaatcatgcctaa

SEQ ID NO: 291011 - DNA, 249 bp, Morganella morganii
atgaacatgcgctcagaaagcaaagagatttacggtgtgagtgtgctcccggtgctggccgtcctgcatcagattcgccggtggtgggtactgcgtgacctgaaagaccactggaacagccgccataaggtgatccgcatttgccgcagccgtggctgggatgaccatatccggtttcagaatatcgagcggcagtatttcatgacccgcgccacagctaaacgctaccagcacaaagaggttatctga

SEQ ID NO: 291012 - DNA, 414 bp, Morganella morganii
atgactggcggcgatgcggccctggacctgaccgcaatgccggccgtggtgttcaccgacccgcaggtcgccaccgtgggctacagcgaggcggaagcacatcacgacgggatcgagaccgacagtcgcctgctaacactggataacgtgccgcgtgcgcttgccaacttcgacacacgcggcttcatcaagctggtcatcgaggaaggtagcggacggctcatcggcgtgcaagcggtggccccggaagcgggtgaactgatccagacggcggtgctcgccattcgcaaccgtatgaccgtgcaggaactggccgaccaattgttcccctacctgaccatggtcgaagggctgaagctcgcggcgcagaccttcagcaaggacgtgaagcagctttcgtgctgcgccggatga

SEQ ID NO: 291013 - DNA, 198 bp, Morganella morganii
atgcaacagagccttgcattcagcgtccgtgtacagcttgccgggctgaatatcactaccggtatggccgtaacatacggtgagcaccccgaccacatcacggtaaggtttgtactcaacgccctcgtatgcggggatcagcaccagcgcaccggcaatagccccgacggcacaagcggccatgacttttttaaataa

SEQ ID NO: 291014 - DNA, 390 bp, Morganella morganii
atgtttaatgcttccggagtaatgctttatggtgatgttcctgttgcgagaatttctgatttaaatacaaagctgtttggcgtcggacagtcagtacagaatgtgacatcacagcgtagtgttggcaccacatataaaaataacaccgggaaagcgatttgcgtctctgccggtggcacggcaaaagcaaccaccgagcctgtgttcctgtctctggaggttgatggttatctcatggcaacaagtaagacagcaacaggcggcggggctaatggtatgtcgcatgtctttgtttgtggcactgtgctgccggggtcatcatatatcgttaaagacggcactgcgggtaatgacaaagttgatttaaaattctggacagaggtgcgctga

SEQ ID NO: 291015 - DNA, 387 bp, Morganella morganii
atggaaactaacatcattgagcagcggttttttaaagacgctgaaaatacggttttttgtctggatatcatgccgatgaatcaggattcatggcaatcagaaattcaggacggctggcaggaaatcagcaaaaaagaagccgataaaatcagaaatccaccactgacgaaagagcaattgattgaacgggcggaggctgaaaagaaacttttgattgcggaagtcactgccgaaaccgaaatgctccgggcaaaactggcacttggccggatcaaagatgatgaaaaggcgctgttaaacgcctggttggattatctggacgaactggaggcagtggacgcatccactgccccggatattatctggccggtgaagccggaggtgtag

SEQ ID NO: 291016 - DNA, 438 bp, Morganella morganii
atgaaaaattacatttacagtgcgtcacaaaatatgattttaccggtatcacttaagcagatttatgtcgatgcgggaacatggccggaagacggtacagcaatctctgatgaggtcgctggtgaattcatggggcagtatccgcagggaaaaacactatcccataataaagatggtcagccatgctgggcagatattccgccgctaccaaaggagcaacagatagcggaagctgaagagaaaaagcaatatttgttatctgaagctgctgccgctattgccccgcttcaggatgccgtggatttgggcatagcaacacctgaagaagaatcagccctgaaagagtggaagaaatatcgtgtgctggtcaatcgggttgatacctctcccggagctgctgcggtatggcctacacctccggcttcaccggccagataa

SEQ ID NO: 291017 - DNA, 408 bp, Morganella morganii
gtgggtaaaaaaaacacgcaggagaaaccacaggagccgggcggcctgccgcccgagctgatggtgcccggtcagggtaatcaggaatcacaacagagcgattccggcgataagcaggatgatcaaaccacagcagaacagattgccactgctgattccgctggcggtaatgccggtgatgagcaggattcagacccggaacatggggctgatggtgtatatgtgcttgctaaaggccgctgtgtacagcatgacggcgagctgtaccgggaaaaccagcagatcctgctgggtgatgccgatgccgcccgcctgattggcctgggtgtggtaatgacgctggaggcagtgcggaaaatgctggcgaaagccaacccgcccggtactgtaaccattaatgggcgttga

SEQ ID NO: 291018 - DNA, 237 bp, Morganella morganii
atggatttttatttcgagtcactaaagcaaagagtttttgagttattcagtgaagtcagcgagaaagaaagaacacatgtgcttaacgtcataacgaacaagatcaggcagtttaacggtgatgtgtgcggagtggaaatatcaagaaccccttttcctgcggagtccgggtgctttgcacacgcagaagctgcagtgcacaacattcgcgtatatatcagaataacgactgattaa

SEQ ID NO: 291019 - DNA, 828 bp, Morganella morganii
gtgacagaacaaggtgaaaaatcagatcaattaaaagtccaggagccgttatttagcctggaaataattgaactaaggccagttattgccccagacaccgcccatttaagacatacagcaatcgcatcggatggctgcgaatatgcagtaaaaggtgtacatgacggcgattcatcacccgtaaaggtaccatcaccaatgttggtaccggcggcggaatggttctgtacgaagttagccgaagtaagcggcatcccgacaccaacatgtagaattttgcgcggcagtgacggtgagtttctttttggatcgcaatatgaactatctgcactggcaacgccaaaaattcaagccgacgtgattacagccctttcctcaaaggatgccccgcttcttcggtggcagttttgggcaatctacgcattcgatcagttcgtctttaatgttgatagacatattaacaactacttatatctaaaaaacagagatgggtcattcatatgcaaggcttttgactttagtatttcatcaatggttgttggttggccaagtcgcatgaatggagccctgctgccgcgagggtgcaataccacagatatgtggctcattataaaaagcttgacatccttcgatgaaaaatgtaaagactacgctcttggcgtgctagagagaatcgggcaagttaatcgcggaactattgaaaacatactagaccagatgcccgactcatggctcaatcctttgcaaagacaagcgttaattacttggtgggaaagcaaagaaaaagataacagactaaatttggtaaaatctgaggtgttaaaatga

SEQ ID NO: 291020 - DNA, 819 bp, Morganella morganii
atgaatacatactattacagcattatacggttgacgccgagtccggtaaggtcggagtctgtcaatgttggtattgctattcaggcaccaaacggcccagatgtgagaatgatcacctcaatggcaaaaattaatgccataacctctgattacaaatctaatgaattacaaaaattaaaaacacagatagaagatttcatgctaaatggcattgatttatatcagttatcttcattttataatggtgcaataaatttatcatcagttggtatgttctctctctcagcacctgatgagtacgaacaaaaaatcaatgaaattaataaattatatattacaccggaacgctcacagaaaatcacatcagttgggcaaaaaagaataatcaccgaacttaaaaaccaattcaataagtacggtatattaggcaaggaattgtccgatattaaaaaccataaagtggtagctaagtaccctttatctgaagatgaagggttatacgctgaattgttattaaaaaatggtgcttaccatttaactgagacgattgacttcagaacagacaatatcaagcaaaggcttggcgaggctgcattgaaagcagtaacaatggataaggccaagtgcttatgggatgatggggttaacgcttttcttgtttacgcggcagaaactcaacatgaaaagctacactctacacaactaacgcttatagataactatgctgacaaaatgtttaatttattgagtaatgatgacatggctgcctatttcgaccacatgttgagcgcagctgggcataacgtactgccacattaa

SEQ ID NO: 291021 - DNA, 630 bp, Morganella morganii
atgaaagagcgcggaataattttcaacgatgagatggttcgcgccattctcgatggtaggaagacgcagacgcggcggattattaaatcagttccgactactcacgactttcacggctgggtaatgtccagcacatgcgcgaaagatgaaggtaaagccttctgggctatcggcgattcaccgttactcaaagacccgattcgccgtaattgccctttcggcaagattggcgaccggctttgggtgcgtgaaacatggcaatgtgggttatgcacagagtcaacttttgcatacagggctacacataaaccctccgatcttgaggagggctggagcgaaataataaagtggcgcccatcatcacaaatgccacgctgggcttctcgcatactgctggaaataaccgacgttcgtgttgggcggctgcaggatatcagtcaggccgatgctattgcagaaggcgcaccgcccagccacccatctattgatgctgtatctcgtgaatatggcttccctgattttccacgctcgtggttcgggcaaacatggtggcatatctatggaaaggaaaattggcaggctaacccgtgggtgtgggttatcgaatttaagcagattcaggaggggtga

SEQ ID NO: 291022 - DNA, 183 bp, Morganella morganii
atgaagcagaagcagataaaacgctgcaagcactgcggtcacgataatgtgaaagtcggccgtgatatcaaggataaatttgccgcagcacacgtgtgtgttgatgaacacaagctgtgcgtagagcgtggcgacacatacaacgatgcaatcaggaactggaacgagaggttcgggaaatga

SEQ ID NO: 291023 - DNA, 198 bp, Morganella morganii
atgacagagaaaacacagaagcttaagccctgtcctttttgcggcgggaaaaaaattaagtcatcggaaaataaaaagcatgtaaggcagtcagcaatttactgtgatgattgccccggtcaggtgatagtgattggatttaaacgtgacgcaatcgccgcctggaaccgcagagcaccacaatgtgagaaggagtag

SEQ ID NO: 291024 - DNA, 726 bp, Morganella morganii
atggatatccaactttaccacgggtgttgttttgacgtgctgccaacaatcgaaagcggcaccatcgatatggtttgcgctgacatcccatatggaacaacacaatgcaaatgggactccgtattaaacctgcagcgaatgtgggaagagctgtaccgggtggcaaaaccagaggctgcaatagtcctgttttcagcgcagccattcaccagtgtattggttgcaagcaatatcagagattggaaaacagaatggatatgggagaaaacccacgctacagggtttctgaatgcgaagagacaaccattaagggcgcatgaaaatatccaggtgttttacagaaagcctccggtttacaacccacaaatgacgcatggtcatgaaagaaaagcttcatcccgtggtgaaccaaagacagaggtttacggcgctgcaacaaagatagtttcttatgattcaacatcaagatacccaagggatgtgcaaaaattcccaagcgataagcaaaaaaacggtggcctgcatccgacgcaaaaaccggtttcttttgttcaatatcttattgagacatacagcaaccaaggggaaaccgtattggatttcactatgggtagcggtacagcagcaatcgccagcaaaaatagcggccgacggttcattggcattgaacgagaactgcagtactacaaaatagccgagcagagggttaatgaattaggaggctaa

SEQ ID NO: 291025 - DNA, 420 bp, Morganella morganii
atgtcagattcagaagattttatggaaggcgaacgtgtacttgaagagtttgcggaaatgagatcgtggccggacccgcgtctttatgatttagtggtcatggttaatcaggggttctcgacaccagtaaccgtatctgtttccggtattatttattctgggacaatggttagtgaaaaggaatggcttgaggaaaatttaaagttagtgcaattatctgattttgagcataaacaaagcaatattgactattacaataagttaattgacgacttccgccgtgagccagaaaggacggcaatgaccctacacatgaaaaatgtaaaaattatcagtcatccgtctgctgatatgcctgtgtttttatggcgcattcgcattgacagggttgatgcgtttcatgtcggcagaatgccataa

SEQ ID NO: 291026 - DNA, 501 bp, Morganella morganii
atgcaaaagtttaatcgtgagcttcaaaaacacattttgactgcctgtattgctgcgtaccctaaatgcccatcatggagtaactatgacctagttaaatttcctgaaataatgaatgacgatatacttttggccaatatgtactacctaagcgagagggggttaatcaccatagaaataccgagaaatgacgaccctttcaaactatttgagaacgtctgtgccactgcggatggtattgatttcatgatgaaagatggtggacttaaggcaatacttgatatacgaaccatcaagattcattcagacacaatgaagcagttggaagaaattatttcgatgctaaatattcctgaagctgagaagaagggactcttagcaaaacttcgagagcttccgtcaaacaccataacacacctgacgaatgaactgaccctgaaggccgtccttgcgctaccgggcgcacttccaataattcaaacgtatttgcagaatctttag

SEQ ID NO: 291027 - DNA, 759 bp, Morganella morganii
atgttaataaataactcattccatagctggaaaaaaacagaaagagattccggtactgttgtttttaataatgatgtttttacattaaagaaaacaagcgataccggtgcggctacgcttagatatgtactgccgttagttgccgggatgaaggttgtaataaaattcaatggtaaaaacactgggggcggcgctgggagaattggcatagagtcccctgacgccggagccttagtcaatcaccagcctattttatctaatgactgggttaattacacgacgtcttttacggtgcctttagtcagtaatagaacaaaaggtattgttcaaatatttatagggttaagtggggcggataaacctggtgaaatatctatatcggatgtggaagtgtatattagcaatactgtgtcaaccccacttggggcagtatgtgttgtcaatcaagagaagggaaagcagccagttatacatggggagtatatagagcatggaatagaatcaattgcatattcaactgaaggccagcactatataataaaaacaggaatgaagcgagataataatgaagtaagaaaaggggtatgtattgctcagttgctaggaataagtcttggggggtatgagataagaccatccgctgttaatggagacgggacaatatacatgcgaattcttgataatcaggggcgtcatatttatctgtcagcaataacagaagactcattcatgttttctgtttgcttgtttggggtgtaa

SEQ ID NO: 291028 - DNA, 966 bp, Morganella morganii
atggaaaggaattatggtatagataatgcgaaatcgatattaatattcttggttgttcttggtcacttaatagaagagacaatacagacgaatagtttatcaatgtcgatattttcatttatatactcgtttcacatgccagcgtttataatgttatcgggagttttttttaatggaaagacaaactacaaaaagacatacaatgatatagttgttccgtttttagtgtactcagtaatatatgagtttctattatactgcatgcatggtgagatatcattttacaccaagaatttatacccaatatggattatgtggtacttatttagccttgctatatggagagtgataactcctttatttctaaaacttagaaacccaataactatatcgattataatatcactatttgcctttaacttaaatgcaagtggatatacgctcgggttccttagaacgctatacttcctgccgtttttcctattcggatttatatataaagaaagaatattatccactaatacaacggtagagaaattattgtgcacttctgcattcctcggtatatcaataatactatcaaggtttgatataaatattttttattttattggcggaagagagttagcggcaattggcgatggatttacacttggtaacttcaccagggtgtttatcatgtcaacatccctgattctttctattttatttataaaatctatgccacgaaagaggatgctgataacaaatacagggtcaaaaaccatgtcaatttatcttatgcacggccttataattaaattaatggtttacttcaaggtgattaatactgcaattgtttatcttaatcctattgagttactaatagcctctatttttgtttcatttttaatcgttattattacatcatcaagcctgttaacgcatacaaataacataatatttaatttatttaggtcaaaataa

SEQ ID NO: 291029 - DNA, 477 bp, Morganella morganii
atgaataaccgattatttaaaaaagtcatggccgcttgtgccgtcggggcgattgccggtgcgctggtgctgatccccgcgtatgagggtgttgagtacaaaccttaccgtgatgtggccggagtgcttaccgtatgttatggccataccggcagtgatattcagcccggcaagttgtacacggatgctgaatgtaaggcgctgctgcatgacgacctgacgaaagtccggcgcgcgattgacccgatgatcaaagtaccgattgatgacaatacccgggcggccatctattcatttgcatataacaccggaaccggtgcgttctcgcgttcgacaatgctgcggaaactcaatgccggtgatatcgcgggtgcctgtgacgaaatgaaacgctggacatttgccggtggtaagcagtggcagggtctgattaaccggcgcgaaacggagaaagcggtatgccacggaaccctttaa

SEQ ID NO: 291030 - DNA, 510 bp, Morganella morganii
atgagccagcccacacttcgtgctaaccctgccgaaattagtgcaacactcaaggaagctgttgttgacagtctattaaatcttacgtacgcgcagctcagcgggcagggagaggcaggagaatatctttatggtgctcgaccaaggacacttttgaactctggttttctattaccacagcgtaacccgttaggagacgatgaggtaacatctcccatctgggtatcgtcacacggactgcagatgcagctcaatctttccgaatcttcaataataacgttctaccccaagaagaagatctcacgaaaccgaattgctgcccagtatttatgttgcgcagagctattgttgacgaaattacggcagagcgtaaccgccaattggaaaaagcatgggaagaggttaaaggagcttatacttcaaaatggaaacatccagagtggggtactattcgctctcagattgtggaagaaatctatactgctagaggtattcctagacacttactaa

SEQ ID NO: 291031 - DNA, 831 bp, Morganella morganii
atggcaaagcaaaagtttaaaatcaccaactggccagcctacaacaaagctctcagacaacgtggttccctgactgtctggcttgatgagtcagccgttgctgcatggactgacagtacgcggcctgaaggtcgtggtcgaccgctgcactacactgatatcgctattaccacggttctgatgatgaaacgtgtgttcaatctgcctctgcgctcattacagggcttccttgactcgatttttaatatgatgaacctccctctgcgttgcccagattactcccttatcagtaaacgggtaaagagcgtcaacatcagtataaaaacgccaacacggggcgaaatctcgcacctcgtcattgatagcacaggtctgaaggttttcggggaaggggaatggaaagtcaggaaacatggggcaggcagacgcagggtatggcgcaagcttcatctggccgcagacagtgcgacgcatgagattatctgtgccgatttgtcgctcagcggaacaactgacgcacaggctcttccggggctgattaaccagacacaccggaaaatcagggaagcttcagcagacggcgcttatgacacacgctactgccatgatgcgtttttgaagaaaaaagtcaggccccttattccgccacgaagcggggcgcagtactggcctgataagtaccatgagcgtaaccaggccgtagcgaatcagcatctgagcggcaacaatgacgtctggaataaagaaagtgggttatcaccggcgttcagtggcagaaacagcgatgttccgcatcaaaaacctgctgggcggtcatctgagtctgcatga

SEQ ID NO: 291032 - DNA, 2040 bp, Morganella morganii
atgactaataacaatttctcttcaacagcggcatttctatggtcagtagctgacctgttacgtggcgacttcaagcaatctcaatacggacgcatcattcttcctttcactctattaaggcgcttggagtgtgtgcttgctgctacaaaggctgatgttctggctaaatacgatgcagtaaaatcaatgccgattgaagcacaggacaaactacttacccatgctgctcagttaagcttttataacacctcaaaaatggatttgaaccgtcttggtgaaactggtgtagcgaataatcttcagaactacattcaatcatttagcccaaatgcccgtgagatttttgagcacttcgacttttttaatactatcgacaaactagaagaagctgatttgctttataaagttgcaaaacgttttgcgactactgaccttcaccctgacaccatcagcaactatggtatgggtttagtgtttgaagagcttatccgacgctttgcagaaagctcgaatgaaaccgcaggggaacactttaccccaagggatattgttgagctgacgacgtcattgcttttcactaatgaggaagagttaaccagttcgggtttagttcgctcaatttacgaccctactgcaggaacaggtggcttcttatcgtctggtatggagtatgtccacaaactcaacgagaaagcctctctatccgcattcggtcaagagctgaatccagagtcatacgcaatctgtaaagcagatatgctgattaaggggcagaaggtcgataatatcaagctgggtaataccttatcgaatgatcagctccgcaatgataagtttgactatatgctatctaatccgccctttggtgtggattggaagaaaattcaaaaatatatcactgatgagcatacccaaaaaggttttgaaggccgctttggtgcgggcttaccacgagtgtctgatggttcattactgtttttgatgcacctgattagtaaaatgtgcccagaaactgaaggtggttcacgtattggtatcatcctgaatggttccccactttttactggcggagcgggtagcggtgagagtgaaattagacgttatattctagagaatgacttactcgaagcgattgtggcattgcctactgatatgttctacaacacgggtattgccacttatatttgggtgttatctaaccataaaccaactactcgcaaaggtaaggttcagctaattaatgcgtcaaaagaacgtgctaaaacaggtgggcgcgggcgtagtggtggcggtgaagtcgaaggtggtgatgaaaacgtgttttatgctaccatgcgtaaatcattgggcggtaagcgaaaagaactgacagaagaagcgattgagacaatcgtgcaagcatatggtcagtttgcagaaaatgactttagcaagattttcgattacaaagaatttggctaccgccgaattacggttgaacgtccactgaaattagccattttcccgaaagatgctatacgcctcgaagctctacaagcagatagtgtttggcagaaaatggatgaacccagccaacaagctattctttatgctctcgcttcctttgacgctggaaaatatttgtctcgtgataaattcctcaaagagttaaaaaccaagctggcagacattaaattaagtgcggtgcagctaaaattgattgtgaaacaccttggtgagcacgacgatgaagctgaagtgtgcaaagccaaaggccagattgaagcgaaccctgatttacgcgacaacgaaaacgtaccactcactgaaaatattactgattactttgctcgagaagttctgccacacgtaccggatgcttggattgatcaaagcaagctagaccctctagatggtgacgtgggtatagtgggttatgaaattccgttcaatcgccatttctatgtttatgagccaccaagagcattacaagagattgatgcggagttggatgcgatatcgactgagattatggagttgctgaaagaggtacattcgtaa

SEQ ID NO: 291033 - DNA, 1272 bp, Morganella morganii
atggttgggcgctataaggtatatccggagtataacgattcaggggttgagtgggttggagagataccaacttattggtttgtaaagccaacattctcggtatttgatccgacagtaacaaaaaatacggaagggcaagaaagcactgttttatccttaagctatggaaatattattgagcgcgatgtggacactaatttcgggctacttcctgaatcgttcaatacataccagattgttaatgatggagatctaatccttagattaacagacctacaaaatgataaaaaaagtttacgtgtaggtttagtgaagcagacaggaattattacatcagcatatttaaagctgaaagcaaacaaatctattgaacctcgatttgcgtacagattacttcattcttacgacacaacaaaagtattctatggtatgggagggggattaagacaatcaatgaagtttgaggaatttagacgattacctattctgattcctcctcttgaagaacaacataaaatcgccaacttcctcgatcatgaaactgccaagattgacactttaattgccaagcaagaaaaattgattgaactgctacaagaaaagcgccaagcggtgatttctcacgcggtgaccaaagggcttaaccctgatgtgccaatgaaggattcagatgtggagtggttgggggaagtacctaagcactggagggtagtaaagctaagttactttttaaaactgcttagtggagatggaataacatcagatcaaatagaatctgaaggtgaatatcctgtaatgggaggtaatggttttagaggatattcctcaaattataattgcaatggtgattatgcactgatcggaagacaaggggcattatgtggcaatattaatatcgcacaaggtaaattttttgcctctgaacatgctgttgttgtttacccatacataaactttaatttgacatttctttctgagtttcttcgatttatgaatttaggacaatactctatttctgctgcacagccgggtatttcagttgagagaattaatggattaaaaattgcgatacctccattggatgagcaaacgcatattggcgataaaatcgagaaaatggcttacaattttgatgggttaataatcaaagctgaaacaatgatagcagttttaaaagagcgcaaaaccgctcttatcgcagctgcagtaacaggcaaaattgatgtacgtgattggaagccagtagagaacaaccttgtagaggtagcttaa

SEQ ID NO: 291034 - DNA, 486 bp, Morganella morganii
gtgattgtagacttcggggccaaattaaaaaaactcaaggatgagcaaataaaactagctgaagaatatcaatctcagcaatcttacgaattagcctacatcgcttactggtctgtagttgagctctttagcaaagaagttggtgagttcttcctcaagcaacagttagagaaaaagttgattgagtggcaagattacctttcaggaaaactgaaatcttgtcctaaaggaagtaatatttcattgaagttaaaatgttcgaccattccacctatgaatcaattaacagagctgctaggtgaattaccgaaaacggcttatttgctcaattcaaaattaaagtatagaaaaaggcgtaatgatatcgctcatcgagccacaaagtttaataaggaacagacttttcaggaatatagaaaagctgttattgattctattgaagagttggagctcgccgtaaatcaatctttgggagacgatagatga

SEQ ID NO: 291035 - DNA, 3204 bp, Morganella morganii
atgagtgatatagcacaagaaaaaatattccaaaatgacatccttgaacaaatgctgtcccacggttggttattaggcgaatcgagcaagtacaacaaagagttagctctttatcctgatgacgttatcgcatttgtgaaagccacacagcctgagcaatgggataaactcgcgcagcactttccaaataccacggctgatgcgctactcaaatcattagaacaagaacttaaaaaagaaggtacactctgggtattgcgaaacaaggtcaataaccgaggtgctaagtttgatctttgtagctttaaaccggaccacgagctgaacccaacggcaacggttcgttatcagcaaaatattctacgggttgtaccagaactggtttactcgcccaatggttatgacggccgattagatttaacgctattcgtgaatgggataccggttgctacttgtgagctaaagtcagagtttaaacagtcaattgataatgctaaagtccaatatatgaaggacaggctacctaaagataagaagacacataagtccgaaccgctattgaccttcaaacggggggcattagttcactttgcggttagtcagtacaacgtggcaatgaccacgaacttaaatggcaaaaatacctattttttgccctttgaccgtggaaccagcgaaggcggtaaggggaacgatatccccgaagatggcagctatgcgacatcttatctttggaatgaaattttccaaaaagataatctgctgcttattcttgggcgatatattcaccttgaagtcaaagatgttgaaaatttagatggttcaattagccaaaaagaaacgctgatctttcctcgttatcatcagtggtcggtggtttctaaattactcagaaccgtagaccatgaaggtacaggacataaatacctgatccagcatagcgcaggttcaggtaaatcaaactcgattgcgtggttatctcaccaattagcatcaaaacactatgatatcgatcaccctgatcttgataagcaagcaggggacaaggtatttgattctgttattgtgatcaccgacagaacggtgttagacagtcagctacaggatactatttatcagtttgaccacagcgaagggatgattgctcgtgttaaccgcgaagaggctcaaggctctaaatccagccaattagctggggagttgaaggctagtacctctatcattatcgtgactattcaaacttttcctcacgtattagaagcgatacgccaagactcaactcttgcaggccgaagctacgctgtgattgcggatgaagcgcactcaagtcaaacaggaacaacagctcgtaagctgcgtgaagttctcatggctgagcaattagacggtgatgaagagctagatagtgaagatatactgcgtttatcacttgaagctcgtaaaggttcgaataagctcagctactttgcttttacagcgacaccgaaggcaaaaacactagagttgtttggtcgtagacccaatcctgaagaaccagcaagcgataccaataaaccccagccttttcatgtctattcaatgcgccaagcgattgaagaaggttttattctcgatgttctgcaaaactacaccagttaccgagtggcttaccaattagcgcataaaaatcctgatttagatcatgaggtagacagtaagaaagcagcatcgaaaatggcaaaatgggttcgctttcacccttacaacattgctcaaaaagtggaaactatcattgaacatttcaatgataaaattaagcatttgctaggcggcgaagccaaagcgatggtcgtcactagtagtcgtttagaggctgtacgctacaaactggcttttgaaaaatatgtgcaagagaagggctacaccaatgttaatgcaatggtggcgttttcgggggaggtgaatgatcctgatttccctgatcatcctttcactgaaaataatatgaatcctaatctccgtggtcgcgatatgcgtaaagcattcgatacctcagattatcaggtcatgctggtggcgaataaattccagacaggttttgaccagccaaaattagtggcgatgtatgtcgataagccattaaaaggcgttgagtgtattcagacgctttcgaggttaaaccgtacttataaaggcaaagaaaaaacctttgtgctcgacttcgttaatgatcctgaagatatattggcagagtttaaagtatatttccaaactgcagaattggctgatgtctctgatccaaacattgtctatgaactaatgaaaaaactcgacaaagttggtatttatcaatggcgagaggttgagatgtttgttgaaacgtataacaacaagcaagcaaatcaagccaaactcgctaatctgtgtaagccagctgttgaccgcttttctgttcgttataaggatgcatcacaggttcttcgagctgcacaagcggagctgtccaaggcaaaaattgaaaagaacgacaaaaaaatcaagtatgctgaaaatagcgtaaaacatgctaaagaagcccgagacattcttgaggtgttcaagaaagaccttatctcgttctatcgctactacgaatttacttctcagattgtcaattttgatgattatgaattagaaaagctgagtattttcgctaaatatcttcatccgttgctgcgcctcgatgttgtggaagacgaaattgatttatcagatgtggtgatgactcactaccgactacacgagcaacgcgaagccgatttacagcttggccttatgattggagaagaaccaaagccttatctgcctgcagcaaaagaaggctctggtgctgtaccgaaagatcccaaaactgaattgcttaacgagatcattcagcgaatgaacgacttgtttattgaagatggtttatctgaaaatgatatgctcaattatgcgaataccatcgcaggcaaaatttcagaaaatgaagtcgttatggatcaactgcgcagtaacaccaaagaacaagctatgctcggccaattccctgagtcaatcaacaatgccattattgagagtatggatattcataatgagatggcaatgaaacttctgtctaatgaagcgatagcgaaaggctttgctggattgatgtttgatgtattaatgaagggattaggaaaggcgagtgaagctcaacgttag

SEQ ID NO: 291036 - DNA, 273 bp, Morganella morganii
atgaaagatattaattttattgtagggcagaatatccgcgacttaagacaccgtaatggcttgactacaaagatgttggctaagatgctgggggtctcacagcagcagttgtcgaggtatgaacgaggtgttaataaaatagatgtcagtgttgtatttaagataataaatatatttcatgtgtcttatgaatatctgtttcctgaaactcagaatgattatactgaatcagtaaaaagctcctttgtatatatggagcctttagcaatctga

SEQ ID NO: 291037 - DNA, 588 bp, Morganella morganii
atggcaaaaatagagctgggtggtgtattgggcaaaacttttggtaaaacgcaccagcggcttgtctgtaccacgtccgaagccgtccgtgcattgtgctgcactgttccgggctttgagcagttcctgaataccagcaaatcacgcggcttaacctatgcggtatttcgcggaaaaaagaatatcggggtcgatgacctgggttttccggtgactgacgatgtcatccggattgtgccagtggtgatcggcagcaaaagcggcggattgctgcaggttatttttggagcggtgctggtggctgccgcctttatttctggtggtacatcactggctgcatggggggctctggagacagggttagcaatgaccggtgcatccatgatattgggtggtgttatccagatgctgtccccgcagccaaacggtatagccatgaaagaccagggcgaaaataaaccatcctatgcgttcggtgcgccgacgaacacagtttctcagggctatccggtaccgatcggttacggtaagcgccgtatcggcggggccgttatctcagccggaatttacgtcgaagatcagcagtaa

SEQ ID NO: 291038 - DNA, 639 bp, Morganella morganii; identical to SEQ ID NO: 289373

SEQ ID NO: 291039 - DNA, 369 bp, Morganella morganii
atgatttatggtgatgttcctgttgcgagaatttctgatttaaatacaaagctgtttggcgtcggacagtcagtacagaatgtgacatcacagcgtagtgttggcaccacatataaaaataacaccgggaaagcgatttgcgtctctgccggtggcacggcaaaagcaaccaccgagcctgtgttcctgtctctggaggttgatggttatctcatggcaacaagtaagacagcaacaggcggcggggctaatggtatgtcgcatgtctttgtttgtggcactgtgctgccggggtcatcatatatcgttaaagacggcactgcgggtaatgacaaagttgatttaaaattctggacagaggtgcgctga

SEQ ID NO: 291040 - DNA, 1218 bp, Morganella morganii
atgaagctaacagtcagacaaatcgacacagccaagcccaaagagaagccgtacaagctatctgatggtggaggcctttatcttgaagtaaccaccaacggctcacgctattggcgtttaaagtatcgttatgcgggtaaagaaaagcgccttgctttcggcgtttatcctgaggtttctctcgctcaagcccgtgaaaagcgtgaagctgcgaaaaagttactatctgctggaagcgatcccggagaagcaaagaaagcagaaaaaatcgctcaaaaactaaactacgaaaataccttcgaggctattgcccgtgaatggcaccagctgagagcggatcgttggtcattgcgctatcgtgatgaaattattgatacctttgaaaaggatattttcccctacatcggtaagcgtcccatagctgaaattaagcccatggaattgctggaaacccttcgtcgtatggaaaagcgtggtgcattagaaaagatgcgcaaagtcagacagcgctgcggtgaagtattccgtcatgcaatcgtgaccggacgcgctgaatacaatcctgcacccgatctcgctacagccctcgcaacaccgaagaaaacacattttcctttcctgactgccgaagagctccctcactttcttagagatcttgcaggctataccgggagtgttattaccaagactgcaactcaaatcatcatgcttacaggggtacgaactcaggaattacgttttgcccgttgggaggatatcaattttgaaaagcgactctgggaaattccttctgaagtgatgaagatgaaacgacctcatatcgttccgatgtcgaatcaggttgttgaactctttaggtcactgaagcctattacggggctatacccgctggtattcgtcggacgcaatgatcgtacgaagccgatctcaaaggaaagcgttaatcaggtgattgagttgttgggatataaaggaaggctgacggggcacggtttccgtcacacaatgagtaccgtcctacacgaagaaggctttaactcagcatggattgaaacacagcttgcgcatgtggataagaacgcgatacgtgggacatataaccatgcgcagtatctggaggggcggagagagatgatgcaatggtatggtgattatatctatgagctagccaggattagtaacgaaatacatgcagcgggtaattacaagactgcatga

SEQ ID NO: 291041 - DNA, 264 bp, Morganella morganii
atgttatcacttccagaatcaaactatgctcaactcatagccatgcaccaagctattggtgccattatttcactattgcctgaagacaaaaaagagcaggccaagtcgataatacaagtcttaagtgagctgaattatgcagacaatgttagcgacatcccaaccttaacgaatgaaaaatgcgctgaaatatgccaaaaaataaacgatacttacagggaaatactttcttctattgaaaccttcgaaatgaagaacgaataa

SEQ ID NO: 291042 - DNA, 495 bp, Morganella morganii
atgaaaaaattaacagtatccataggcagtctgggtagcgcggctgccggtgattatgtggattttaatatccggcagggaaagcgactgctggtcagtgatcgcattgaaggtcgccataccggtacgttctaccgtgagtatgatgtggattatatccagggtgaaccactgcgcatcgaaagcaatgcgccggcgggttgttctgtttttgtccatgcggaaccgggtgatggactattgcattcgtgtgatgccgctggtgtaccggatgcagtatctacaaacatttataaattgatcgcaaaaagatttgtatttcattaccccaatggtgagccggtatcggtggtaggggtattcggtaaaaacaataaaacattagagcagcgtgttgccgatctggaaaaaagactgacagaagagcaggaagtagccagtcttcaagatcgaattagtgaagttattcgttcttcatttcgaaggtttcaatag

SEQ ID NO: 291043 - DNA, 621 bp, Morganella morganii
gtgtataaatctaaggttttttgggtaatcagtttggcttttggtgctgcggtggtgagttttttaactgttttcattaaaggcgtttttttcggggatgccacagttgaatcttttgatggtttgctgaaaatgacccaatcagtatcatttattgtagcagcatatggtgttttttttacggtattcaccggaacgcaacagtcaataattaactctactcaaaggaaaaaagaagcagctttctcactagttaatcagtgggatagcgacagtcttcttgccgccagaacactctctaggaatattaagaaggagcataaaaaactatcttcggatgagttaattgaaagaattataagtgatgatgccactgagacatctattgcaaatatttttaattttgctgagaaacttaggttgagtgtagagcatgatttagctgataaagttatacttagctcattagcttatacagttaaggatatcatgaagagatttgaagattactatcattattgttggaaaaatatggaagggcaggagcaggcaagagaggattacgcatccacaataagagtgtttgatgaatgtatttctgcattgaagcaaaaaaaataa

SEQ ID NO: 291044 - DNA, 1770 bp, Morganella morganii
atgaccgtacgattaactaaagttttaatcactaactttagatcttgtaaatctactgaaattcttcttagaccatatacatcattggttggatataataacgcagggaaatcaaatattattttagcaataaaatggctcttaagtggttccacactaaacgacccagatatgtacaatccacatgaaccagttatagtggaaggcactatagaaggtattacagatgaaactctatcactacttagtgaagaaaatcagcaaaaaatcaagccgtttatcttggatggaactttaaaaatcgcaagaaggcaagaaaatgaaacttccagtggtgataaattaaaagttaaaaaagcacttgatatttttaatggaaaggaatggaagaaaaaccctggcggaattgatggggcaatttcaaatcttttccctgaccccattcatattcctgccatgtctgatgctgttgaggatgcaacaaaaaataaatcaggaacaacaattgcaaaaattttaactgcaataattagtgaaataaaaaatgaatacgaagaacagttctcggagaatatttctgaaataggaagatatctttcccatgatggttcaaccagactagacggtctaaaaaatattgatgatggagtcagtaaaaaagttaatcaatttttcccagacgtaagtgtaaaactacatttccccacaccaacccttgatgaaatatttaaatcaggcacattgaaagtattcgaacaacgagcagaattatcaattatgcaagatattgaccgatttggtcatggaacacaacgctcaattcaaatggccttaattcaatatctcgcggatataaagaaaacaagtagtgacacaaaaaaatctaacacactaatttttatcgacgagccggaattatatttacacccctctgcaataaactctgtaagagaatctttagtcactttaagcgacctaggattccaagtgattatctcaactcactcggcaagtatgctttcagcaaaacatgcttgtaacgctatacaagtttataaagatgctaacggaactatagctcgaaaaaccatttcggaaaaaatacaagatttatatgaagcatcttcttcacaacttcactccgcatttaccttatctaattcatcgtatttcttattttcagaggaagtattattagtcgaaggtaagacagaaacgaatgttttatgcgccatctataataaaattaaaaactgcactattaatccaacaaaaataagtattattgctgtagatggtaaaggcagtctattaaaaatgtcagaagtcattaaatcaataggaataaaaacaagaattcttgctgactgtgactacctatcaacactattatcgaccccttacagggagatattgattgatgaatataataatctactctcatctttaaccacgtcattgaactctcaaagtttgcaactttctaattctatcacctcattagattctctgaaaagatgctcaagcaaagattttattgaaatttgtaatcaccctgcaataaaaccttacatcgaaataatacatgaaaagttaaaaacacatggaatttacatttggaaatcaggggatattgaacaggtatatgggtatggtaaaaagcaaagtgaatgggataacttagtagagtgtttaggtgatgataataaagatgctagaagtttaatcaaaaaatatgacgaaatggaagattttattttatggctttaa

SEQ ID NO: 291045 - DNA, 771 bp, Morganella morganii
atggatcaaaattgttgtgaaagggtaagggctgaatttattagttgtgtcgaaagaacactacaacggttggaatccgaaccaactagaatgcctttccatgaagctctattaagtaaagaagcaattttctggagccgtttcgagcgttctttcagtacaagttttgggcaatctgtaattgaaagaatttcagcagttattgctgcttcatctggggcaactaatgttcaaacgcaaaagcagacgattgttacattagaccaaaaccatcttcaagaaatagaacatcatatatcccaactgcgtcttagaggttctggtgtgaatccaaactgggatgatgattaccaatacatactaaacatcccacgctccggatggtcaatagatttaagagtaatttcagatctttatttcgaacgcaatggaacacgtaactacttatccatcaagactgtcaaaccaaatatcgatcaaactgctgaagccaagcgagacttattaaaattaaaaattgatgacccgaactgcaacgtatatttcggactgtattacaatccttatggcgttcaaagaaccgagtatgcttggacacccccaatgagaatttttaatttccacgatgattcctgcatactgattggcaaagattactgggattgccttggtggtgaaggaacatatgagataatattagaaatagcccaatctgctggagaatcacttcagagaactattaggcagtatggtgtcgataatttcatttaa

SEQ ID NO: 291046 - DNA, 1389 bp, Morganella morganii
gtgagtaccataacaataaaagaagcagcgattatactagatatttctccccaaagagtaaggactctgtgtcgttctggtgaggtcttggtagcaagacagtcaggtaaagtttggttgattgatgaaaaaagtgtatttgcattgaaaaataagaacgaaacaaaagatgagaaatgtaaggtgagtcataagaagccaattgcgttgagttttttcagtggtgcaatggggttagatattggtctcgaaatggctggatttaatacgttacttgcatctgagattgacaaaagtgctagaaaaacaataaaggccaataaaccagatatagcattaattggaaatatcaatgactatacttctcagcaaataatggagcacgctgggctcaaattaggcgacgaagttgatttaattatgggaggccccccatgccaagctttttctaccgcaggtaagcgcaagggtcttcatgatgaaagagggaacgtattcttaaaatatttggatgtaatttttgatattaggcctaaatattttgttattgagaatgttagaggcttactttcagctccgttgaagcatcgtccacatagtgagcgaggtgatgatttccctccattaaaaagcgaagaaaaatctggcggtgttcttagttatatctttagaatgataaaatcgcgtggttatagttgttcttttgaattatataacgctgcaaactttggtgtgccgcaatctagggagcgagtgataattatgtgtgctcgtaatggagagagaattccctatttagagccaacacattctcaaactggtgagtttggactgccgagttggaaaacctttgctgaagctgtagagggattatctgataaatctcatacgcacttagaatttccagagaagagaaaaaaatattacgaactcttggggccaggacaatattggaaaaatcttcctttagagttgcaaatggaagcattaggtaatgcatttttctctgggggcggaaaaactggtttttttaggcgattagcttgggataaaccttcccctacgctagtcactcatcctgcgatgcctgccaccgatctagctcacccagaagaaatcaggccattatcaatagaagaatataaaagaattcaacagtttcccgaagaatggaaattagaaggtaagttaatcgatgtgtataaacaattgggcaatgcggttccaattggtttgggttttgcgattggtaaacatttattaaattttgacgctggtattgcacccaaagaatatcctgcttttaaatattcaaggtataaaaaaacctcggatttagatctaatcaagaaaattggtgaagcagaaaatttgagttttgatctttaa

SEQ ID NO: 291047 - DNA, 309 bp, Morganella morganii
atggtcgcgatgcatggtaatgatgataattacttaataacagatatttttactgatgatgcttgtaggttttttataaaaaatgcaattaatgttataaatgaaatattttcattcgctaagatggaggttgttaatatcgataaacatagagagcttagtaaatatttatataaaaacgaaataaaactattcgattttttaactcatagatttaataataagaaaaatgcaattatcttaaagggtatcacttctgagcctattacttatgtaggtacttttaatgaccatattgtgtccagctaa

SEQ ID NO: 291048 - DNA, 423 bp, Morganella morganii
atgggacttgatgtttttccagccctttcgcttgctgatgcccgaggtgtaagagtggtagccaacgggatcgacccgcaaattcaagctgaagtcgcagaggaagggcagcaaatcgctctggacagtattttttctactggcgccgccaaatggttcaaactcaaactcaaactcaaactcaaactcaaactcaaactcaaactcaaagcaaaagcaaaagcaaaagcaaaagcgttacacttgattgcgcaaaaagatattgggagctcattggagaaaaatgtatttcgtgccatctgtgagattcccgttcagcaaatcaaagtccgaacattggccagattgatacaaacccagcatctggtgtcggaatggagtttgagaaacctaaaaagcaaaacatgccgacgttccggctag

SEQ ID NO: 291049 - DNA, 1107 bp, Morganella morganii
atgagcttagaagatgaagtaaacgattcaaagaaacaaattatttccgatggatatgatatgtctgttggtgaaataatgaatctttacagagataatgaattaattatatctccagattatcaaagattatttcgctgggagctttctcaaaaaacacgctttatcgaatcattgctattaggaattcctatacctccaatttttgttcaccaggatgatgatggggtttgggaactcattgatggtttacagcgcgtctctactatattagagttttccggattactgcgcgacagcacaaataacacagttcttcccagttcaatattaaatgggacacaatttctgccgagtctttccaacaagaaatggagcgatgcaactaaccccgataatgaaataggcaagtcactccaacttgaaataaaaagagctagacttagggtagagatattaagaaaaggaagcgatccatatgcaaaatatgaattatttcaacgtttgaacactggaggtgcaaacctttcggaacaagaagttagaaattgtattgctgtaatgcttaattctgaattatatcagtggcttaagcgatgctctgagtttcccgcttttgtgagtactacaaatcagacacaggaagctatcgaacgacaagcgaatatggagcttacattaaaattcttcgcttataaacatttcccttacgtacctggaatggatgttcatgaacacttagattatgcattagttgaaatgtgcaagtcacaaatagatttaacagcggaagagcatatttttcaaaatgtatttacacttcttaatgatatatttcaagaaagggcatttaaaaaatgggatggtcaatcatttaaagggaagtttttaatttccttatttgaaactatcactaacggtattcaaaataattatgatgccatcatagcattacagcctgatacaatcagagatgatttcattactcaaaaggtcaaaggcctttgggatgaggttgattttactaataactctggtgctggcgttagaggtacaactaggttagccaacctgttacctttcgcatcagaatattttaagccgtaa

SEQ ID NO: 291050 - DNA, 660 bp, Morganella morganii
atgagcaaaattagaactcttgagggattccaagattacgttgatacggagatggcttggagaatcaaggagatcgctcatcttacggcctccattgacaaaagttcatcattagctcagagaacaataattcgagcctcaatcccacttttgtatgctcattgggaaggttttattaaaaattcagctgcgatgtatatcgaatacatatcaaatctgaaacttaattattctgagctagaagattgcctaatagtattaggcatgcgtaagaagctttttgaaataactagcacaaataagcatgacattatttctgaatctttgaaatttatacttgcaggacaaaaagaaaaagccattctaaaatttgattcagcaatacaaactgaatcaaacttaaaatcacatgtttttgataatattgcaaaaagcattggagtgtctgttgaacacttcaatacaaaatacaacttcattgatgagagcctcttaaagagaaggaactgcatagcacatggagaatatctagatatagatgctaatgaatggcgtaatttatctaaagaaacgcttactttaatgcgaacatttaaaaacgaggtacttaacaatgcttctactagaaaatacttaaaaccagtgcagattaatcaataa

SEQ ID NO: 291051 - DNA, 321 bp, Morganella morganii
atgaaaactcaacctgcaacaactccgcaggcggcgaagccatgtctgtcgcccctggctgtctggcaaatgttactgacaagcctgctagaccagcactatggtttcacgctaaacgacacgccattcagtgatgaaactgttattcagaaacacattgaggcaggtattaccttggccgatgccgtaaactttctggttgaacgctatgagctagttcgtattgaccaaaaaggcttctctgtgcaagatcaagaaccttggttaacttctatggatgtccaccgagcacgatttaaactcaacgtggaacgtttataa

SEQ ID NO: 291052 - DNA, 327 bp, Morganella morganii
atgtcattaatatcagcccatgaatggggactacaaagagaaattgttccacggtttggtgccagattagttcaggaaggcaaccggctgcattatctggctgacagggctaatttgatgggcattttcagcgatacggaatgcttcaaattggatgacgcatttccacactttatcagtcagatggaatcgatgctgactactggtgaactgatcccctgtcaccatcactgtgtcactctctaccacaacgattttacctgcgaagccgacacccttggcagttgcggctacgtgtacatcgcggtttatcccactcaacgctaa

SEQ ID NO: 291053 - DNA, 471 bp, Morganella morganii
atgtctgcgcccaatttattcccggaatttcctgtaaacgagcaacgtgttatacaacgcgcactgcgattgctggagaagtatcagcgtcaacccagtgaatcatttactagcaccagcgttactaaagcctggcttcaactcaggatggcacaccttgagcgtgaagctttcatcgtgatgtatctcgacaatcagcactgtttgctggaacgcgaaacactgtttaccggcacactgagccataccgaagtacatccccgcgaagtggtgaaatcggcactgaagcataatgctgctgcggtaattctggcgcacaaccatccatctggtacgacagaaatcagccagcaagataaacatattactcagcgtatcgtgaaagcgttggcgctggtggaagtgcgcgtactcgatcatctcgtagtcgggaatgagacaatttcatttgctgagctgggattactttaa

SEQ ID NO: 291054 - DNA, 450 bp, Morganella morganii
atgtctgaaaatagcacaggaaaacttcgcagccttacagaaaagctgaatttcccacgcaggaaagcatctgccgaaaaccaggatatatcttctgaacgtttaccggaaagcacggctaaacctccggtaagtggcgctgacaaatacagattgttactggaaaatattgtcatcaatggcttgctgaatattgccgaggataaacttagtgatgatgcttttgttgaagttgttttcagcaaagcatatgagcttttgcctgccccggtcaggatcgtcctgaagcgggaatggtgcctgagttaccttcagtcgcaaaaagcgccgattctggtgaaactgcaactttaccgcgcaggaaagcttagttctgccgaactatctgcattgccgttaccagattcagaaaaggcaacatcgcagatacaaccttcgattttgccttaa

SEQ ID NO: 291055 - DNA, 804 bp, Morganella morganii
atgcataaattaattgctttatcgctcagttcagtcgctctgcttattccatctatatcttctgcattgacagttcacggagatatacatcccgagcgttatacctttttcctgacccaggaaggcagtagccaactaaaacaggcgaatgatcgactagccaagaatccacaggcctacacgcttgacgtgaaccatacaggcattcagccctttgatgcagtccggtgggatggtaagcctgtaaaggccgtcacctgtgtgctggtagacggcattatgatggggaaaaaagctacctggtcacaatgcaaagatgaaagtggtgcggaatatttcggtaatgccggatggcctgttcgtgattacgtcgcaaaagcctgtgaagtcggaaaatcagattgtcctgtttaccttgtgcttcagacagatcctccaacaatgcgcagcgatatggctaatttcgttcctgcccctaaaaactttaatgcttctgcaaacctgacggatgaaattaaaaacgacggatgtcagatggctaacaattcctttgaatatgcgaaaagcagtattcgttgttctgcaatcaataccgtgcgttttattcgcaaacaaaataccgaagccaaatatgaggctgatctcaccacaacttcaggcgaaaacctgacaatgactgtcgggtacacctatgggaatgcatccagcaaagaaccaggctggcgtaccatttctgtcaaagaggggggcattattactgatatccgcaaacagggccaatggctccctaatggctacaagtag

SEQ ID NO: 291056 - DNA, 435 bp, Morganella morganii
atgttgaagactacctctactttgcttttcagcgcagctttattcagtaccactgcacacgccgttatccaagaccagcaatgggggaactggttcggtaacatcagtgcgatggagtttgaaatcaatacccaaaacaactcaggtgaagtgctcacactaacctgtacaagcggaaagttagctgttgcttatagcgttcccgcagaagactatcgcgtttcttccctgacgggacttgcagaaccggggatgagtattaacggcacaaactattctctggatgaaacagcttttactgcactcaaatctgcgggagataaaggagtaataaaaataacctcaatgaatgccgctatctctaaaaaattcagtgctaaagggctgaatgaagcgctggccgatatctcatggcaagactgtattaatcactaa

SEQ ID NO: 291057 - DNA, 1155 bp, Morganella morganii
ttgaatggaaaaatgtggatagatataaaaacaaaacgtgatgtaagattgtttttatggatggtaggaaacgatgttgctattgaaaattaccggcaaacaaaggaaattaaaacataccacctgaatcacatatatggtgaagactacaatttagcaacactggcaataaacgaagcttttcggattctttataagcattcggacgagttaatctcatacgcctatagatttaaaaaagcgaaagaagcattattaccaataaaagagtttggttggtttaaacgtaacaatgatgcctgttattttgcatgggcatatatcagggtttttagtaaaaaaaatagttctttggcaaactttggtggaaatgactcattttctatttataccagaacaccttatcatcgctttattagaattgaacatccagtaagtcaccgtgagcgcattgagtgtatagaggatttttttgatagatcacgaatggatctttcatctaagttatccattatgttaagtataagggatgcgtgggatagacattctcagttagcagatatattgccgttgaagaagaatgacaagggaaaaataaactgggcatgggactatatctgcaaagataaaataaattatatcaatggctcgataaaaagagcacaagaaaaattaattgaaaagagtaagactgacgagacaggccagatttcacaagcagttcttgatgaaatatataaatcgagcattgaaggatatattcatcaacctcatttcctcagtctctttagaccatcaacaacgactgagaaatatctggcgctacgttgcatttacatttccatgtactattatgataaaaactttatacccagatttaaaaaagcctgggaattaacatcctttcgtaaagcaaaaaagaaaagtaagaacaaaaccttaaagttaacgaaaagagaacttgacggcaatgacactccatccgattctactgataatactgaaaaagaaatagctaaaactgataaagagctcatgagagagaaagcacatgagataatgaagaacatcaaaaccagaaactcggaactatcgtcagaaaagggtagcgatactcctccagatttaagtagaaatggttggccttttatttga

SEQ ID NO: 291058 - DNA, 204 bp, Morganella morganii
atgaacaccattgatattcataacgataagttcgtcagcatgcagttcattactgaactgactgggttatctgataaatggttttataagcttgcacaggaaggtaagtttccaaaacctgtaaagtttggccgtagttcccgctggattgaacgtgaagtaaaagaatggttagaagctcgcattaatgactcgagagcataa

SEQ ID NO: 291059 - DNA, 1032 bp, Morganella morganii
atggacttatccgaatcattcctgttatctcatgctgaatatcatattgagaataatactccccacatcatcatcactgatgacaatgagttccgattcaaattagagcagttggatatctgccttaaaactgtcagcagaggacgtaagttacctttcactattctgtataaccgctcaggatacaaagagagtgcagagtcagccaccattcttgatgctatccgtcatctcaatatgttaccgcaagatgcgatgaaagtacgaatagctaatccacgtatagctacatttcagcgtttatttactcgcgctgatttatatgcgcgtgtccataacgggaaaatagtaggggcagataccgttaccacagcagaactgctgaataagctggtgcaggactaccggcatgccgtcagtcaggcagggtttaaacagacatgcagaaagtaccagcggacttcgttgaagaacctgaaaggagtgttgaattacatcagacatctgcaggagcgtcattcccgactacttgtgttgcggatagatttatcatgggcgaatgagcataaggctgacatcactgctgatgacgcccgtaagcaccgtcagcagttgtttcgcaatatgcaaaagaatccattatttcgccatgttctcgggacagtgtggaaactggaatacggcccacaacgtaagtttcattaccacatgctgtttatcttaaatggcaataaggcacagcaggatggcgtgatcgctcatgctttcgggaaatactggaaagacaccatcactagaggtaaaggcatcttctacaactgcaacgcttacaaagagcgttatgaggactgctgcctcggcaaactggtgcgtggtgacaacagtaaggataaagggttacttcaggcgttgagctacatcaccaaagtcgatgcctgtgcccgactggttcttcctggaaatgccagaacctttggtcgtggggaagtacgctcactgcagaaaaggaagagaataaaaagaggccggtaa

SEQ ID NO: 291060 - DNA, 1584 bp, Morganella morganii
atgacactcatctctcttttgaagcgcgaaggtccctgcctgagttcaacgctggcggatctgctgattcaaagcaaaaacatctctgctgaaaatgcgaggaaggttatctcacgggctgtcttagccggtgagataaacagcattaaaaacgtattcccaaagagggagcagtttgtatatatcagggactcctatggtagcgatgagttctggcaggtactgaccgataagctgatagagagtggttcagcattgggccttgcattgagcgcccttctggccagaggcgggatcattcctaaacgtgattttggtgctgcaagtggttcacctgtagccatgaagaaaaaaatttcgttcactgtagtatggcaaaggctggtgaaaatcggtttatgcactgaaattatcctgcctgaaattggagaatgcatcgctctcagagaaaaagatgaaaggcggtacgattccgtatcgagacagatacacgcgcgtctggtgacagagagcatttttatcgcgacgatggttcagtggagtcagaacctcaatctgatcagctataacctggcaaggacgaggctggatgaagaagggaagccacctgctatttcaaactatctgttcgatttaacaggtcccagctatttgtctcctcttgttacgccaggaagcgatgtaaacaagccgggtttttttgcgtgtgacgttctgctggggaccaaagtcactctggcccaggtacagcccttcatagctaaatgtaaatcgctaaggagcataagaaacgtaggtaaaagtctttttatgctggccgccagtcagttcgataaagatgcttttcatgctctgaagaaggaaggcgttatccccgctacaccagaaaatctgttcggtgaagagtttgcaaagtcactgcgcgagctgaacgattttctgttctattacttcacaaatgccagctctaacctagaaaaaattgattctattatggttgcgctaacgaatgttaaaggtgccgcggcgcagctgcagggggcgctcttcgaatatcttgttgctgaagtgatgaaacatgaaggagccgttgagataggaaaagttttccgttctgctgacggtaaaaaagctgaaagtgatgtgttcatcgctaaggggtatcaggaggtaaggtttattgaatgcaaaggctacaaaccctattcctttgtcaagcatgaagatgttaaacactggataggagatcaggtacctgtattttacgatgccgccaaaaaagagaagccagaagccgacattcatgtcgaattctggaccacggggaagctgggcttagacagccaattatcgcttgaaaaatttcgtgataacaactcagtcaggaaacgctataaaatacacgtgctggaagctcatgatgtaaaaaaaagattccatgcgaccagaaataaaaacctgattaacgtttatgaaaaacatttcgcagaacctttctataaagaaaaaaaattggatgacctcagggaaagttaccgtctggcaggagggccgcaatcatacttcgaagatgaagaaaaatga

SEQ ID NO: 291061 - DNA, 171 bp, Morganella morganii
atggggtttgtgctcaactgctcaggacgggataacacacttattgccagcagtaaaggttttggttgcacggttcctgaactagaaattgtactgcttgatattgatcttgaaaaggtctttacagcggacccgtatattccgaaaacagctaatcagcttctgttttaa

SEQ ID NO: 291062 - DNA, 1410 bp, Morganella morganii
atgctcaatgatgaacatgaagggaagcccgtgataaatctgataatgaaagtgagtgatgaagactggaacgttcccgtgggccagattgccaaaagctcgatgcccctgagtcgttatctggaatacacgaatgacagactctcgatcatctacagagaagtgaataaaacggtcctcgataaacttaagctcataccctgcctgctgatgactgagttcgtgaatgaacagaaccttgagggacggtcgcgcctggtatccaatatccgggtgggtatgcttgagagtgtaacagtcaacgggaaaaatttagagtatgcagtccgcatcgattatgactacgagaaagtgactgtagataacttcagagtgctgggcgatcggttcttttttcacctgtttgaaacgtcgaggacccactgggccatcaaggaagtcagccttcctgaagtcatgaatgcttttgggttaagacttccggtccccccgcttgccaacgttccgccgccgccgccgccaggattgtatgaacgcgagcagagcgtgacgtcggtagaggcattcctgcagaaaataaatgaatttaaggctcaggaagggcaggaagtcttttaccgcggacacagcgactataagtacaagctggaaccttccctctttcgtgaagaggaggccgtgcctctctacaggcataaagaaaaaaacatgattaacgagatcctgacggcccatccggctgaattttatcaggaccatttcatgatagataagctggtccgcatgcagcactacggcctgcctacccgcctgctggacgtcacagccaatccgctggtcgccctatatttctgctgcgcagacatgctcgataaaaacgcggaggaagagaaaacaggggatgtgaaaatttttaccgtccaggcggacgacatcaagttttataactctgacaccgtaagttgcatcactaacttgtccctgcttagtatggaagataaaaataaaatcattccggaaactgacattcccattgatcatcgaaacaaaaaatctacggaaatgaagaggctaattcatttcatccgctccgaaaaaccgtacttcgaagacgcaatacgtccgggcgacttgagccgtatcctttttgtgcgcgggagaattgccaaccagaggatttcatcccagtccggtgcatttctgcttttcgggcatgaggctgtcctgccggataccggccacagcggtcttaaggtagaccgaatctatatcagcaacaagaaagcgatcctgcaggaacttagcaggcttaatatcaaacccagtaccatctaccccggtattgaagagacggcgagagaaattgcccgcagaacgaagggtgaagagatccttaaccggctaaaatga

SEQ ID NO: 291063 - DNA, 714 bp, Morganella morganii
atgtccgaagatacaaagaaaaaaggagtttatgacagttttttccgacctgtattgaagttgtttcttcaattatgcttatttgttttgcttatcgggtttgtttctttcctgtttttttatttctttaaaagtccgataaaagaatttgttaatacctttggttggtatgtttcagctaattccgtttcggatatgactgctaaggaaactaaggcgctagctcatttgatgagtaaaggttatatattaagtaccaatgatttgctttctcaaattggtagtttttattcatatacaataacgatattgatatttttttgcacgttctctgcattttttgctgtattggtaataaaaatcaatgcggatgacaaatttgatatcactatagctgaaaaagttagatacttttttgcaaatgataaaggttttgacagcgatgtaaaatctaaagtttctgatatctttgcagaagaaggcgaacaattatctgggataactaaaaatgaagataatgatattgttatccagctcaggcatgaaattaaattacttaagatggatttttataagctaaaaaataagttggctcctgatgatgagtcagaggttaataccgatgactattttaagaatatgatagattctttgcaagaaaaagggcagatagtaactggtgagaaagaggatgttaaccatggcaatccttaa

SEQ ID NO: 291064 - DNA, 546 bp, Morganella morganii
atggcaatccttaaaagaaaagtaagcagtacctctgcctttttgcctgtggatatgatggatttaaataatccacaagacgtacttgattatgccattacacttaatgttaaaccaacaccatttgatctagatgattttataaataaaattggaattgagttaagacgtgttgtgatggctgatgatatttctggtcaacttcaaaagaatgacaatggcaaatgggttatatcagttaattctttacatcatcaaaaaaggcaacgttttactttggctcatgagcttggccattattttttacatagaaatagagccatagagtttattgataaggctttatatcgtagttcgcagatggactcaatggaatacgaagctaacaattttgctggagctttgctaatgcctaaaaagatactcattgagtttattaaaatgaaaggggctaatgccgaaataatttctgattactttgatgtctctgtccttgctgcaaaaataagagtggagactttacagaggaagttatatgaatattaa

SEQ ID NO: 291065 - DNA, 216 bp, Morganella morganii
gtgattgatttagatgatgtttcgacccttgaacggatcgctgtcatagccaggattgcggctggtagcagttgcacagtccgagaacgcagtattttgctaatgttggtagtggaactggcagagagcgggtatcaggatggcttggaaaacattagaaaatatgatacaaagctgaccatccaaaatactgatgaatcctttatggcgaactaa

SEQ ID NO: 291066 - DNA, 846 bp, Morganella morganii
atgatagaaagagttaaaaatcctattgttggttcttttattttttcttggttattttttaattggaaagtaatcttaattttactatttagtgataaagaaatagacgataaaataaacagtatatcagcattgatttcatataaatcttttctattcccattggtttttgcttttttgtacagtgtgttacttcctgcattttcgctatgcatcgatatattattaaaaccgatttttagaaaggttgtaaatatacgtacagatagagaagttgacgaatacgaatcaagacaaaagacaggaagaaagagagcagatgctgagttagcttatgaattacaaaaaacaggggggttggaaaaaattcaaaggatgcaagaagagattacggcatcaaaagatagagagggagccttagttaaggaaagagataatgttattgatgaaatgaataaaatgttagaagaaaataagatgttaagagagaagtataatgatatatttaataagttgaagaaaactgaaaaagaaaaccttagagttataaatgaaaattataatcgtaaaaataaaaatgattttaaacatccattaattaatgactactcttttaataaagaaattggtgataaatacaatattatagttcatataattgaattgttaggcttggagactaattcatttatttctgatgctgactataaataccaagatttgcttatatcttctatggggaataaggatataagtaatatacttgaggataatatgaccatatttgattttcttagcgaattagatatgaaggagctattttctttagaacagaaattatcataa

SEQ ID NO: 291067 - DNA, 1047 bp, Morganella morganii
atgcagcggctggccaaccgcgatatttacggcacagccgcatttttcggtgatggtttccttgtcaccaaagccgccgaacaataccgggtcacaccgggaacggcttatatcgaagggctgcgcggcacgctggaagaaatcaccaccttcaataatctgcgtgatactaaaatttacgcggatttcaccttccagggcaatctggtcagcaaatggcagacgtttgttaaagtcacctcggctaaaacgttggcgcattatcaggatgccgcaggatttcagcattatgttgctgttatcgccgaaatagaccagaacgggaatatcactgataagcgggtaaaaggcaccgcgattgatcgtgaactagctgaattgaaaaataccttgcctgatatatatcttgttaaagaaaaaaacggtgatgatatcccaaataaagatacctttatcaaaaacattggtttgggagatgcggcaaaaagcaacatagctcagattactgggtcatcgacaaccgacgtgccaagtcaaaagcttttcactgatgcaataaccagcagggtcaagattgatgactttaataaagccatggaaggaaagtttaatacggcggatgtggtttcatctacaggtaacagtgtctatcgcgttatgagtcagaaatcagtaacggatgcccttaatgagaagcaagcttcgggagattacgcgaccaacgcaaatcttaataataccaacgataagattataggggtcgggcaaaaatgggtcgatgtgacatccagcagggttaacgaaactttatacactaacacaacaaaaagaccgatagcggtcatggtgtacgccgcgggaacagatcagattgctgttgttagtgtggatatatttgttgatgggatttcagcgtttaagacggcagtaggtggaactggtgttaccaaaagagtctgcgcaagcgctattgttccgccaggtagcatttaccgtgttattgtccaaaacagcgctatcggtcaatggtgtgaaatgaggggttaa

SEQ ID NO: 291068 - DNA, 354 bp, Morganella morganii
atgaattattacaaagatataaataatggcgatgtttatgcttatgatgaaaatcaagtaacagaggggtgggtaaaaagtagtttgattaaaatgacagacaatgaaataaatatgcatattaatccgcctgtcacccataaagaattaattgaacagtcagagtcgaaaaaacaattcctgataaccgaagccaatcaaaaaacccagctctggcagacacagttaatgctcggcatcatcactgatgaagacaaaaccagcctcacagagtggatgctgtacgtgcaaaaagtccaggcggtagacacctcagccgccccggatatcatctggccggagaaaccggaatga

SEQ ID NO: 291069 - DNA, 756 bp, Morganella morganii
atgagtgcccagcgctggcaccggcaaaacatgagcatggcggcagatatgccgccgatcacctgttcgatactgccggtgcatccgtttgtttatggcattggccagaccaacgaatccggcagctatttaagcccggccaacgcggtgaattatattgcaggaaaacttgccgggtccggtcagatatcggtactggtactgatggtcaccggcaaaacctttgcggaatttatgcagtcactttcggcattttcggcggttttcccgctgccggtattttctcaggttgaacggatggccagaacggcggaaacactggcaacaacaaaaatgcagttacccggcaaaatggccggtggtttgccgttgccacagtcactttccacgtcaaccagccgcatggccgggaatgcacagctgattgaagccgccaaagctgccgccggtaaaccggccagcccggacagcctgaaatccgcactctcagatttcggcaccctgaaagacaatgccctgaaacagatgggtgacgcacttgccgggctgctggggaaatctgcctctgtatgggcgttttccggaacggatgatgccacagtactggctgaaaagatgaaaaaagacatcccggaaccggatgccgtttacacactggcgaccctgttcgccggtcacgaaattgatgcattaacaaggatgttaagcaatgcagacgatagttctcgccctgaacggcgaagcgatcccgcttaa

SEQ ID NO: 291070 - DNA, 957 bp, Morganella morganii
atgcttttctttatgcgcccggaagaagccccggcagtacagaaaatcctgcgtgactatgcctatcaggaagacttctacgaactgaccacacgtaaagcactgaaagcacggtttcatgccgaagtcatagatccggataaaggctctgctacgggctatgttgctaaatacatatcaaaaaacgttgacgggtatgcaatggatgatgaaaaggacgatgaaagcggacagccgatgaaagaagctgccaaagctgctgctgcctggtctgcccggtggaatatccgtcagtttcagtttatcggcggtgcgccggtaacggtatacagagaactgcgcagaatggcagatcacgatacagcagcagggcttgatatcagctttgctgcggttcatgacgcggcagatcacggggactgggcggggtatataaatgctcagggtggcccgttcgtaaaacgtgatgaattagtcgcccgtctttggtatgaggaaacggaagaaatgaatgattatggcgaggaaattatccgtatcaagggggtttttactccgatagttggcatagacacgccgatcctgacccggctcaaacagtggaaaattgtgccgaagttagacgacgcgaatgcggagtctgctgttagtggcgcgaacgcgccacctaggagttctgtcaataactgtacggaggcacggaggacgattaacggaaatgagaaaaaaatccggtctgtgatggcagatttacggttaaccggcagagaaataagcccggaacaggccggaaaattgataagtggatccggaattgtgatagacggccgggaaattaccttgctgccggatggccagctgcggtaccgagccagcacaacggaaaaatatgaaaaatatagaaaaaaatctgcgtcaattttggctcgggttaaaaagatgagagccggactgtga

SEQ ID NO: 291071 - DNA, 453 bp, Morganella morganii
atgtttgacggaaacgacggcgattaccgggaagaaatcatcaccaataacggcttctggccggatgtggatttgcaggactttcagcggagccgcgctattccgacagacatcagcgctgattttctggcagacgcgctgatcgccacactgacggaggtcaacggcgaactgtcagaagtacaaaaacaacaccaggcagacggatttgcaacggcacaggatgtgccgggtgtttcccgcaaaggccggaacgcgctgtgtgcacagtatctgaaagcggtttttgccagggcaaaagcagatttactcggcgaatacacatccattgtcagccgggcaccgaacccgcagcaggaaagcccggaactgcgccgccggttgctggctgagtccgcactggtgatccgtaatatgaaaggcctgaaacgtgccacggtgaaaacgatatga

SEQ ID NO: 291072 - DNA, 453 bp, Morganella morganii
atgtttgacggaaacgacggcgattaccgggaagaaatcatcaccaataacggcttctggccggatgtggatttgcaggactttcagcggagccgcgctattccgacagacatcagcgctgattttctggcagacgcattgatcgccacactgactgaggtcaacggcgaactgtcagaagtacaaaaacgacaccaggcagatggatttgcaacggcacaggatgtgccgggtgtttcccgcaaaggccggaacgcgctgtgtgcacagtatctgaaagcggtttttgccagggcaaaagcagatttactcggcgaatacacatccattgtcagccgggcaccgaacccgcagcaggaaagcccggaactgcgccgccggttgctggctgagtccgcactggtgatccgtaatatgaaaggcctgaaacgtgccacggtgaaaacgatatga

SEQ ID NO: 291073 - DNA, 306 bp, Morganella morganii
atgggtaatcatggccagcgtgccggattctttgttaaccagaccaatccagttaaaaacaaaatcacccgcatcggtaccgagcgtgacgctgtaggccacggcgttttcactggccagcccggctttgttgacagcctgacggtgtacgatttgcccggccggcggcagcttttcatcacggctgatatctttcgacggatcaagccccggcacattggcaaaaacaaattcattcagcgcaacgggtttgccgagcgcggcttcctgcgctttccagcgctcaaaatcggttgtgataactga

SEQ ID NO: 291074 - DNA, 339 bp, Morganella morganii
atgacactcagtgaaaagcagtccctttttaccgtcatgatcgcccagatgattttatgggctaatgaccacggttaccgcctcacgtttggtgaggcatacagaacgccggagcaggcgaaactgaacgaaaaatccggtaaaggcatcagcaacagcctgcacactcagcgtctggcggtggattttaatctgttcatcaacggccagtataaaaccgataccccgagttatctgccgctgggcgaatactgggaatccatcggcggtacatggggcggacgtttctcacgtccggacggcaatcatttcagccttgagcataacggggtgaagtga

SEQ ID NO: 291075 - DNA, 219 bp, Morganella morganii
atgtgtatctaccttaacttaatgattttgataaaaatcattaggggattcatcagtgcggagtatcatttcggcccgcaatggtcagatctgacacttgccgccggggtgaaaaacctgtttgatcaggccagctttacccgttcaacagataataactacggcatttacgccgggcagccgcgcactttctttgcacaggcttccgtgaagttttaa

SEQ ID NO: 291076 - DNA, 159 bp, Morganella morganii
atgataataaatagccctgaaaaatataccaccaaagtaaaacacacttggaaactagaaaaaaaagacattgaggaatataaagaaataatgaatgatgaacaatacaaacagttcaaaaatgcattcaaaaatgaaataaatttcttattgaactga

SEQ ID NO: 291077 - DNA, 324 bp, Morganella morganii; identical to SEQ ID NO: 278079

SEQ ID NO: 291078 - DNA, 177 bp, Morganella morganii
atgattcagacatttttcacaaccgaaacaaccgtgacgacatgtaaagagtggaataaattcggcagatgcacgcgtgcagagcaggatataacagtgttaattgaaaatgagaaagataaaaaggacagtgtctataagcatcatgcggatattgattatgagtatgtttattaa

SEQ ID NO: 291079 - DNA, 195 bp, Morganella morganii
atggaaccaacggattttgaaaagtggtgtgcgggtgagatgggttgtaagcctgatctcatcatgaacaaccggagaaatgactctttcagcgccgctggatacaagctgagagatattgatgccagataccgcgcctacatggccggagttcgcagcagactgccgtaccagacacaaccaccggaggagtga

SEQ ID NO: 291080 - DNA, 201 bp, Morganella morganii
atgacagataaaacaggtacagcaccaaagcagttgccatggcagttggaagagttgcgtgatgggttcgctaaagcggctatgcaaggaatcctgtccaataactcaatgattgacaccgcaacagaatcaacatttgagtgggtgacgaaaaacgcctatcggctggcagacgcaatgctcagagcaagggagaaatag

SEQ ID NO: 291081 - DNA, 366 bp, Morganella morganii
atgaacaaatacagtgacaaatcagactttgagattaataaggctgtggctgagtattatttaacacgcgcgtatagatttaacagtgctgatgaaatcgttgagttgatagatatagatttatcttgtgaatttggcggtgaaataaatcgtgtagatactcaggttgtcggcacattcgacccctgcaacaacccagcagacgcaatgccgattattattgagaatgggatatccagtttattcaacggtgatgaatggatttgtagcgcctcggatggtgaatttctttccattaatgaaaatttataccgcgccgctatggaagtattcctgatgatgaaggatgcggagaatgaaagctga

SEQ ID NO: 291082 - DNA, 768 bp, Morganella morganii
atgccaagaggattgatttcaaatcaaaattattcaacatgtgatatctttgatcaggcattatatccaagaatgaaagaggagcctcttctcgatgaagatgactgtattgttgtacctgtcagaaatcagaatgcacctcacttcagaaaagtaggaaatcaatccttcggtaaaaggttaggcagagctgaaaataatccaactcatgatgattgtgtgagttatttatataaagaactgacaaatgaaaacattcagattgttaagttctctacttatgtttttgatgacaatggacaatatggcgagcaagtcattttcagtccattagtcgacagtgattatggatggtataaagaagctgatgcgagaattgcatttcatgatgagtattatattcagccagatataggaggaagagataaaaacaaatttttcccacgctccgcttatccaaacattatcattgaagtaatccgcactcactctccagacagagatacttttcaaaaactctttgagctttcaaaagaaaattatcatatctacttctatttcattggcgaaggaaataaaaattcaaaaataaatagagtcatatcacatgataataacttaacaattagagtatctcattatttagttggtggacagctatataagaatggtaaactttatgctccaatgaaggataatgaatcattcgataaatggtatcaataccttgaaaataattattttatttgcgcaatggaaaaagcgtag

SEQ ID NO: 291083 - DNA, 1230 bp, Morganella morganii
atgagtaagttcatcactgtgaaactgaatgaactggctgctccgggtaggtctgttatatctgggccatttggtagtaatattggccaacgtttttttaaaactcatggtgtaccgattatcagaggcaataatctgacgacagattttaaaaaatttaatgatgatggattcgttttcttaacggaagaaaaagcagatgagctgaaagcagatgccatcaaaggcgatattttgtttacggcggcgggtacaattggtcaggtgggaatgattccacaatcggcgaagtatgatcgatatgtgatttcaaataaacaattaagattcagagttgatcctacaaaagcagatcctgactatgtatattattggttagcaagcccttggatatacaaaaccattattgatagaaatacagggagtacagttccattaattaacttagggataatcaaatcgctacctgtttctttgccaaaagatatagttgagcaaaagaaaatatctagagtattagcaaacattgacgaaaaaatcgctctcaacaacagcatcaacgccgaactgcaagcgatggcgaaaacattgtacgactactggtttgtacagtttgatttccctgacgctaacggaaagccgtataaaacctccggcgggaagatggagtataatgctacgctgaaacgtgaaattccggcgggttgggaggattgtaagttaaaagatatcattagcctggagtatggaaagcctttaaaggctgatactcgttctgggaatggttatcctgtatttggctcaagtggtattgtaggatttcatcacaattatttagttgaaggaccgggcattgtcatcggtagaaaaggaacagtaggtaaagtaaattacacgttcgataaattttatccgatagatacagcttattatgtaatttctaaaattagcatgatttttttaaagtttcttatcagctctatggggctggaaagaatgaattcagatagtgcggttcctgggttaaatcgggaaaccaccttaggactaccgattgtaagcatgccaatggatttaatattaaaataccatacctttgttgaaccctggtttgaaaaagaacgattaattctggaagaaaataacactctcattaaactccgtgactggctccttcctatgcttatgaacgggcaagtcaccgtcaaacaagacgctaatactgtataa

SEQ ID NO: 291084 - DNA, 1635 bp, Morganella morganii
gtggtagaactggaatttagagacaaaaccaaagccctgatcgataacctgaaaagcatctgtgcgaactacggtctgggcaacgacggtaacgaatttaaaatcatcactcaggcatttctgtacaaattcctgaacgacaaattcgcctttgaagccaaaaaggtggacaaaagcgtcgccagcgcagaaaaatgggaagttgtgctcaatcagatgagcgaagaacagcgggataaactgcaactgaagatgagtgccgacacagcacgtctgaagccgcatcacttcattcagtatttatacaaccgtcagaatgaggcgaatttcgccaccacttttgacgataccctgatggacattgccggtaccaacaacgacgtatttgctgtcaaaactgacggtggcgctaaagtggtgctgtttgaacgcctcagccagtatatcgctgatgaatcaaaacgtgatgacttctgccgcgccatcatcaacaaactggctgatttcagcttcgaacgtatcttcacgcaaaagtttgacttctacgccaccatctttgaataccttatcaaagactacaacagtaactccggcggtaaatacgcggaatactacacgccccacgccgtagcgcgcatcatggcggaaatcctggtgccgaaagtacagcagggcgtcgtgcgtaatgtaagttgttacgacccgtcagcaggctccggcacactactgatgaacgtggcgcacgccattggcgaagaccgttgcagcatctttgcgcaggatatttcgcagaaatcctccagcctgctgcgtctgaacctgatcctcaacaatctggtgcattcgatccccaacgttatccagggcaacaccattctgcatccgttccacaaggacggcagctcactgaaacgctttgactacatcgtctccaacccgccgtttaagatggacttcagcgattttcgcgactcgctggacagcgcggaaaaccagcagcgtttctttgctgggataccgaaaatcaaagccaaagccagggataaaatggagatttaccagttgttcctgcagcacatcattttttcgctgaagcagggcggtaaggcggcggtcgtggtgccgaccggcttcatcaccgcacaatcaggtattgataaaggcattcgtgagcatctggttaaaaataagatgctggcgggtgtagtctccatgccgtcgaatatctttgccaccaccggcaccaacgtttcgatcctgtttattgacggaagcaacaaagagaaagtggtactgattgatgcctctaacctgggtgaaaaagtcaaagatggcaaaaaccagaaaacggtgctgaccgaagaagaagagcagcgcatttgcgaagtattcaacaacaagtggaatgaagaggatttttcggtggtagtcagctatgacgatatcgccgcgaaaaattactcgttcagtgccgggcagtattttgatgtgaaaattgaatacagcgatatgacgctagagcagtttactgcgaagatgaaagggtttacggaaaatctggagagtttgtttagccagtcgagagagctggaagcggatattaagaagcagatggcggggctgaagtatgagtaa

SEQ ID NO: 291085 - DNA, 3099 bp, Morganella morganii
atgaaattcactgaagacacccgggtaaaaattcccgtcatcctccacctgatacggctgggttactgctacctgtctctgaaagaacaacaccgggataaagaaactaacatcttccctgaccttttcactgctgctgttggcagaataaatcccggaattgcgcccgacgatattgaacgcctgttaaaagacctcacgctgcttcttgactacgacgatctgggtcgcgccttcttcgaaaaacttagcgaccgctccggtatcaaactgatagacttcgacaacttcaataacaacagtttccatgttgtcactgaactgacctgcgaaaatggtgatgaagagttccgtccggacatcacactactgattaacggtatgccgctgatctttatcgaggtgaaaaaacctaataaccgggaaggcatcatcgcggagcgtaaccgcattaacgaacgctttaagaaccctaaattcaagcgattcgccaacatcactcagtttatgctcttttccaacaacatggagtatgatgatagtgacccggagccgatacagggagcattttacgccagcagctcttacagcaacccggtattcaactactttcgcgaagaagaactttttaacctgactgcattactgaaaccgctttcagaagaaacagaactcactgtcctgaaagacaacaacctggaagtaattcgtaccaatccggaattccagaccaacaaagatcacaatcgcccgaccaaccgcctgtgtaccgcactgctgagccgcgatcggctggcatttatcctgcgctatgctctggtgtacgtcactgaacccgacggtattcagaaacacatcatgcgctacccgcagctcttcgccaccaaagcgatcgaaagcaaactcaacgctggcgtgaaaaaaggtatcatctggcacacccagggcagcggaaaaactgcgctggcttactacaacgtgcgattcctgacggattatttccagaatcagcaggtgatccccaagttctactttattgttgatcgacttgatctgcttcagcaggcacagcgtgagttcactgcccgtggtttaattgttcatcttatcgactcacgcgaagctttcacccgcgacatcaaagcgacacaggcgttgcacaatcaccatggcaaagcggaaatcaccgtcgtcaacattcagaaattccgcgatgacccggatgtcgtcactaccaaagactatgacatcaacatccagcgcgtgtacttcctcgatgaggtacaccgtagttataatcccaaaggaagcttccttgcaaacttaagccagtcggacgccaacgccatcaagattggcctgaccggcacacctctgctgggaacggactacaactcccgtgatctcttcggcgactatatccacaaatactactacaacgcctccattgctgatggctacacattgcgcctgattcgggaagagattgccaccaactaccggatgatcctgcaacaggcgctaaaagatgcggaagtcagaatgggtgatgtggatcgcaaatacatttacgcccatcccagcttcgtcaaaccgatgctgaattacatcgtcaccgactttgccaaaagccggggggcgctgaatgatgacaccatcggcggcatggtgatttgtgacagctctgaacaggccaaacaaatgtttgagttgttcaacactgactacgctaaattgcccgccgcagcggatgaagtaaccggagaaatgtctgtattacaggcagcagaacccgctgctgtttaccagatccacgctaaagaaacgcggaaaatcaaacgtgcagccctgattctgcacgatatcggcagcaagcaggaacgtaaagagtgggtggagcaatttaaggcgggcgagattgacctgctgttcgtctataatatgttacttaccggctttgacgccaagcgactgaaaaaactctatcttggccgggtgatcagaaagcacaatctgctccaggcgctgacccgcgtcaaccggacatataaccacttccgctacggctacgtggtggatttcgccgacattcgccaggaatttgacgctactaataaagcctactttgaagaattacaggcggaactgggcgacgaaatggagcactactcccgtctgttcaaatcggcggaagagatccgtgaagaaatcgaacacatcaaagatgttctgttcaccttcgatacggaaaacgcggaaattttcactgaccagataagccagattcaggaccgggaaactgcgctggcgctgaaaaacgcactggccgacgcccgcagcctgtacaatctgatccgccttcagggcaacactgaatttctccgggcgctggacttcagtaaactcaatatcctttaccgcgaagcctgccaccggctcgacttactcaacctgaaagcagatctggaacagggtgttgatctttccggcctgctgaaccgggcgctggaagaggtgatctttgaatttcataaagtgggcgaagaagagctggtactggccgacgaactgaaagagacgctgcgccgtacccgcgaggcattggctgccaacttcgatcagcaggacccgcagtttgtcagcctgaaagatgaactggagcgcttgtttaagaaaaagaaactcagcgaagtgactcaggaagaaatggttgcgaatatcggcacactcaataaaattcatgagcgcatcaaagagctgaaccgacagaacaacctgctgcgccagaaataccggggcgacgtgaaatatgcgcgtacccacaaacgcctgtgtgagcgcagcagctttagcgaaccagagcgtaaaattttcgaagcactgcttggcgttaagctggatgcggatgaaaaagtgctgaataacagccagatactgaataatgagagttattttatgcgccagatcgtgtcatgtgtgctggaacgctttgaagaacagcaacacatcacgctcagtgcgaaagcggctgatgacatcaaccgcctgattgtggcggaatacctgaacgaatttaataccggagcacgtacgtggtag

SEQ ID NO: 291086 - DNA, 1029 bp, Morganella morganii
ttgaccgaagtagaaataaaatatggctttccgcttttctcaaaaccttcctcattggtaactctggggaaaaatgagaagatcgtaatatcagatatctgggcattctgggactatgttataaagaaggcgagcaatgaacgtaaaggagaggattttttaaggtctcttctcgaacaagcaaaacacttttatataacagcagaagctagtccagtgaaaagccaacctctcctttattactattcatttctaaatttatctaaaataataataaatctttcgggtgcgcatgggcctaggaaaatgtacatgcacggaatgaaggaggatcataataataagttttcgcagtcaacaatcacaaaacaaaaacaaaaaattaatatcgtacaagttgcgcatgaaatcgtatcgatatttgatcctaatatagccaccactgatataaccataaatgttaaagaacttctaaatcattgcgtgggagtccatagagcctattctgaaatctataatcagaccgaggtcttttacaagatagcgaactacaaattatacaaaaaaggaaaagagctgatttttaaggcagaagtccaatgttctgataccgacatgacaagtctctcagcaaaagggtactcgatagtagaagatgaagatgggatgttctattacacttgcaaaataacaatgcccacttatacgccaacaagaaaagactatgctgaattaagcaaggaaatacagagaaaaggcatttggtactttattggcaatagcggatatacaatgtatttatcaaattcatcaattggccgttacagccaagagtccataatatatatggtaatgttctacttgggttcgataacgcgttatcatccatacatgtttgacgaaatattctctgacaaagagcagtggcttatgagtgaattcttaaacactcagcctaaacaatttttatatttggcaaccgctagaattctcggtcaaagtgtcttaaaagcgtatacaagcttctag

SEQ ID NO: 291087 - DNA, 1242 bp, Morganella morganii
atggcaagaaaaacaaagccattaaccgataccgaaatcaaagcagctaaaccacaggacaaggactatcagctgtatgatggtgatggactcacactgctaatcaaatctagcggaagcaagttatggcaattccgttactaccgcccgtatacaaaacaaaggaccaaacaaagttttggggcctaccctgcagtcacactttcagatgctagaaaacttagagcagaatctcgctcattactggcaaaagatattgaccctcaagaatatcagaaagatcaaataagaaactctcaagaggctaaaaccaatacctttcaacttgtcgctgaacgttggtgggaagtgaagaagtccaccgtaaccgaagattacggtaacgatatttggcgttcacttgaacgagatgtgtttcccactataggtgatatcagcgttaccgatatcaaagcccatatattggttcaagcaatacaaccggttcaagctagaggtgcattagaaaccgttcgtcgcctttgccagcgaatcaacgaagtgatgatctatgctcaaaacactggcttaattgatgctgttccaagtatcaacattggtaaagcttttgaaaagcccaagaaaaagaatatgccaagtattcgccctgagcaattaccgcaactcatgcaaacaatgcgtacagctaatattatcttgcctaccagatgtttgtttatgtggcagctgcttaccatatcccgcccagccgaagccgctgaagcccgttgggatgaaatcaactttaaaaccaaggaatggaagatacctgcggctagaatgaagatgaaccgtgaacatactgttccgctatctgacgctgctttagctattctagagctaatgaaaccactcagtagtcatcgtgagtttatatttcctagccgtatcaagcctactcaacctatgaacagccaaaccgtcaatgctgcattaaaacgcgctggattcggcggtgtcttggtttctcatggtctacgctcaattgccagtacagcactcaatgaacaaggtttcccacccgatgttatcgaagccgccctagcccacgtagataaaaatgaagttagacgtgcctataatcgcagtgactacctagagcaaagacgccctatgatgcaatggtgggctgattttattgaatcggctgataggggaagtattattgaaggcggaataagagggatatcgctagttggataa

SEQ ID NO: 291088 - DNA, 468 bp, Morganella morganii
atgcatttcaactcaattttaagaagaatcaacggaataagtacacctatttttggggtgtcatggacgccagataatcaagagtttcaagctgttcgaaaactagttacctttcttgaagatagaagagttttgtactacggggaagaaagagaaggtgctgattattgtaggatttcagtagagaaaattagagaaaagctcactgaatttttgcaagaatttgatacgaataaagatctagttaaaagtgttcgctcttttcgttccgcttgtcgtaatttttgtaatgaaattggagcaataaatgtttgtaacgagcctttgcctgtacagcgttcaattttaaatactgaattatcaaaattaagaaaggtcgctggtaaaactgttggcgcattagctatttcttatggtttagatattgaagatgagttagcggctttaattccattcaaagtagtataa

SEQ ID NO: 291089 - DNA, 888 bp, Morganella morganii
atgccaactttaagcaattcaaatattccaaccccaaaaagctgggatgagttcgaagatattacactcactgctcttcaaattcgttggtcaaacagcgagttatttagaaatggtcgacaaggtcaaaggcaggatggtgttgatatatatggaaataactcatcaggaaattttgtcggtgttcaatgcaaaaacacgataagaggaataactgaaaaaattgtcatggatgaaattaaaaatgcagaatcgtttacacctccaattagtgaacttgttgttgcaaccacagctgacagagatgcaaatcttcaaaaaaaagtaagaaacataagcaaagatagacaattaaacaatttgttcactgtaagtttattgttctggaatgatatttgtaacgatttggttgaggatgaggacaagttttttaagcattatcctcagttcaaacttaaagaaaataaagcattggcgcatgatgagaacctattcaaagagctaatggaactattgaagtcaaatggagttatcagattcttagaacagaacaacatggcaggttttgcattccaagatagcaagctagatccaattcgtgaattttattatgaatggggtgtaccggaaaaagagtttatagagctaagtttagaggtgataaaaaagtcacttcacgacaagattgagcaatatttggaaataatcgcaacacaaacttggtcactaaactcaaatttaaattttcgttcagttccatccgaatgggaatttgaacagccagatcgttttaaaaaagtggtaggacaacttcatgagctagcaggtgaaatagtggcgatatatgaaaatcttatcaggagtgcaaagaagcacttcaatacataa

SEQ ID NO: 291090 - DNA, 390 bp, Morganella morganii
atgagtgccatccgtcttctttcagggtttaattcaatcaatatctatcgtgatcttgtgaaggtggaaagaataaatcgtacaaaacgcaagagaatttcatccaaagggggagatgcgattgctaaactaactaaaattttccgaatggaatctatccgcttactcgataaacatatgtcggaaggtaagttctggaaaagtcgtcaagaagctgcagatgaaatagctgaagaattatggcaattcattgaatctaaaattaatgagggatataaaactcagcttacgcaagataccttaaatgaagcggtattgcgttgggcagcaaagaatagtgatcttgagagcgtaattgatagagctgtaaagaaagaacgaaaaaagtaa

SEQ ID NO: 291091 - DNA, 1314 bp, Morganella morganii
atggcaatcgaagaatttactgacacatattcagacgacataatttatttaagggaagcaagagaggcgcttctgacacaccctcttcgttcagaaatacctgattattgtaatgcctctctgagcagattatatgcaattgtaatgattggtagtattgagtcaatgctggagagatggcttgaccgtgataaccttgaaatactaaatgcttattttaagccaaaagtaaccaatactgttcgcattagtggtttatgttcgtcttttacctcgaagggcataaatgttaataaagatgtatttgatgattacttggcaataaaatacatacgcaatgcgatagtacacgccagttgggctaaacaatctggtgccctgaaacaagacgaaatagactggattcaaagtcgtggatttcccacggatacccgcaaactcaatgcaacgcattggcagcgatttgaatgggtcaatgaaaacatgatgctctacattgcacttgcaggattggtaaaaaaaccctctactcattattcgggtacggtaggtattgatattaaaccgttgccagataccagaggtatcatcacctactcagactggccacgactctactggttgaatcttgaacgtatatctgagtcattaaacacaagtatagaacaaaggattagccaaaatgaaagtaaattggtagaaaaatttgctgattcagatttcaacaagctgacattttttcaaaaaaaacactatctcattctgtctgcttttactttagttaaagatgagcagtgtatagtacagaataaaactaagctttcagaaaatgtattcatgtgctggaaccaatttgttgctcattatcccgaatttagaagtttaaaaaaggcggaggaagtcaagtctgcaataagcacccttattatcatgcatgagaacaatattcatcctatagattatatttttccagaacttaaggacgatgccccattagaggtacatgaagatttggtttcagcacgttttgaaaaaacagacctcctcacaattactgatattgctaaagcttataaactgggaagaatggcatatcgtgtaatgccaaacattatgccgctaaggttgttctcttatttaatgccattttgtttccctgaaagaattcaggaatggaatgataaatcaaattatatttctgatatatacaagttaaatcgcctctggtactcatccatagaagggaatcagttgaatcttgatgaaatcgattattatcaagatttaattaatgccttcagcaaaataaaataa

SEQ ID NO: 291092 - DNA, 816 bp, Morganella morganii
  misc_feature (803)..(812): n is a, c, g, or t
atgaacgaacatcctgaattaggaagggttatttcagcctttcctgcttcattccaaacctcttttttcaaccaactcaaccacctaatcagctactctcccaccatcggcctgatgggtaaaaccggagcaggaaaatccagccttatcaacgcactattccaatcgacattatcacccgtgagtaatgtctccggctgcacacgccaagcacaacgcttcagtatgacgatgaacaaccatacactcacctttgttgatttacccggtgtaggggaaagccttgagcgagatagagaataccaccagctatatcgtaacttattaccagagctggatttaatcatttgggtactcaaagccgatgatagggcatggtcttctgatgaacaatgttatcgctttcttactgagcaatgtggctaccaacctaagcgatttctatttgttctgaaccaatcagacaaaatagagccctgccgccagtggaatgaactgagccaccagccatcccctgagcaatcggctaacttagaattgaagcaacaagccgtagtaaccgcctttaagccacataaccctgtgatcgcggtttctgtagtcgaaaactatcaactcactgaattagcagcgcaattaatacaggcgttaccggcgaaagccagtagcggtgtcactaggcaactgaacagtacttaccggactcattccgtggaaactttggcacgtaacgattttgggcaatgtgtcagtgatatcgtcgataccataatcgatatcattccattacccccattgataannnnnnnnnnataa

SEQ ID NO: 291093 - DNA, 1743 bp, Morganella morganii
atggataacaaatacataaaacccattgaaaatctctctatcgggaaaattattgaggtagatggctctcgaattatcgccgagctcgcccctactatttcagacttgtcccgagtatttgctggtgaaaactatccaattgggcaatttggctcaatcatcaaagttcattttggccgccgctctatttatggtttagtcagtcgattacgaatgaaggctgactaccagctagaaaagggcttacctgtcgcatcttccgatgaacgaattattgaagctgacttgtttggagagggtgagtggcgtaggaaaggtgaagatgagtttgcccttgagtttgaacgcggtgttgctacttatccactaccgcagcaaaccatttacctgacacccaaatcagagcttaggtttatttacggtgacgccaaaggtgccgttattcaacttggcgagcatgttggctctggcggcgcaccttgttacgctgagttgaatgaattgctaggtaagcatactgctattcttggttccactggggctgggaaatcaggtacagttgcggcagttattcatagtattcttgagcgtggccagatcgcctgtcatgagcgctggcacccacaaattattatccttgatccacataatgaatatggcaaagcgttccccgcacatcaacgtttatcgaccgatgaaggttcacttaaacttccttactggctactcgatttagaagaatcattgagcttatttatcggcaagaccgagtttgcagcaacctcacaatcaaacattgttaaaaatgcgttgattgctgtacgtgagcaggcagcagaacaacttgagcttgataaaaatcaattaacggttgattcccccgttccttatattctgggtgatagtagtgggctggataacttcggaaaaaaagatgatgagttgtatacggaaggattaattggagcaattaatcaacaaagaccatcaaataaaactcaaaaagatcacgaggattataataaagtcattcgcaagattgattcactgctaaaagacgcccgactcaagtttatgatgaaaagctgggatggaactgaagacccactaccaacaatcatcaatcaattcttaacgcagcaaaccactgtgcaaattgttgacttgtctggtgtgcctaatgaagtggctggggtagctagtgctgcaatcgctagaatcgtgtttcaacttaaagtctggcaaaccgaatccgaacggcaaaatagccctgtgcttttggtttgtgaagaggctcaccgatacgtacctaatcgtggcgaagctcaatatgaggcggcacaatcggcagttcgccgtattgctaaagaaggtcgaaaatatggcgttggcttattattagtttcacaaaggcctagtgaagttgaatctacagtgctgtcgcaatgcaattcatggatcgtgcttcgtataactaatgatgctgaccgcgaacatgttcgcagtatattacctgattcaatgtctggcttaacaaaaatgctttcaggtctcagacgtcaagaagccatatttgtcggccaagcagcaacgttaccaaccagagtgatgattagaagcttatctgatgaacaattacctcgctcaaatgatatagattttgacaagggatggcagcaacaggctatgacaatcgagcaaattggcaatgtggctatgaagtggcgttatcaaactaagtaa

SEQ ID NO: 291094 - DNA, 1143 bp, Morganella morganii
atggcatttgatatcacagtttttgaacaaaaagagtttagagcggccatcagtaaattggaagaattactgtcacactcaaaagcagttctcctaggtgcaggtgcgagtttttatgctggccttccattaacgaaccagctaacagagagagctctaaacagtgaaaagctctccactgattcaaagcaaatattgactgccatacaaaactcttttgcaggtgcctaccctacatcgcacattgaagattacttaagtgaactcgtcgattggcttgctatcacggctcgtcgagcaaatcgcaaggtaacagcgagcaaggtggctattggtggcactgaatatagtaacgatcagctattacaagcgataattgaaataaaacttgcgatttttgacgtaattaatgttgaggtagattctgctgtacatgagcgttttgttcaagcattgcatcgaccaatgcggccaggtaaagacaacctatcgagcaccattgattacctagtgatgaactacgatacgttaattgaagactcactcgcactatcacaacttcgatacgcagacggtttagagggcggtgtatctgggtggtggaatccttcgacatttgaacagaacaatctaaatgcccgagtatttaagctacatggttccatcaattgggctgagcatgcttcttcatctacaccattgcgcattgctccacacttgaagcggaaccaagacaaagcggtaaaaattatgatttggcctgcttccactaaataccgtgaaacacaactcgatccctatgcaaacttaatgcatcgagctagagcagttttaaacccgcaaggtggcaatcaacgtgttttgttgattactgggtacagttttggtgatgcacacatcaacctagaaattgaacgtggtttaagggcttcaaatggtaatttaaccgtgattgcctttactagcgacactgagcctagtggagtattgcagacttggtatcaagataactcaattaatgaacaagtactgatctttgctgataaaggatttttccacgcagagcaaaaggcaatctcaaccaatagtattgaatggtggaagtttgaaaacctaacccagatccttgaaggaggtatttga

SEQ ID NO: 291095 - DNA, 1227 bp, Morganella morganii
atggagcaggttttatataaactaccgggaggatgggaatggcattcagttaagaagcttagccataacatccagtacgggcacacagctaaagcagaaagtaacggtaacgcaaagttcttgcgtattactgatattcaagatggaaagatcgactggcagggagttccaacagtatccctagaagaaaaagaaatcagtaagtacgcgctgaatgatgatgacttgatctttgcccgtagtggcgcaactgcgggaaaatctattctaatcaagagtgcaccaaaagatgccgtatttgcatcgtatttgattagaattgttccaaaccaagaaaaaattcttcctgaatacctcagctatttctttttaacaccaacctattggaatgttgttagccagaatgcagcaggagcagcccagcccaatatcaacggtacaaagctttcagagttcattgttcctatagcaccttatagagagcaaaaacgaatcgtagaaaaactcgatgtgcttctcacccacatcgacactgccatcgaacatttgcaggaaagtatcatattggctgatgcgttgtatgcaagctcacttgatcaggtgtttgagaaagtctatttgaattacccaacgcaacctttatctgcccttgcaagtaaaataggtagtggggcaacaccaaaaggtggacaaaaagcctacaagaaatcagggatatcactgatacgcagccttaatgtgtatgactcggaatttaagccagaggggctagcttttatcgatgatgatcaagctgaaaaattgagcaatgtagttgttgaagcaggtgacgttcttttgaatattacaggggcttcaattgctcgatgctgtattgccccagatgaatatttgccagctcgcgtaaatcagcatgtctgcatcattcgccctacagaagcaataaattctatatatctaaattaccttttgattagtcccaaatttaaagctgcattactgttcataggggctggcggtgcaacacgccaagctttaacaaaagtaatggtttctaacttagagattccgcttccaccgcttgaggtacagaccgagctagtaggtaaagtgaatctattaagccaaaaaaaccgtactttaaaggaacaggttaattcaaagatttccgatttaatcatcttaaaagcatcaattctggattcagcctttaaaggcgagctctaa

SEQ ID NO: 291096 - DNA, 357 bp, Morganella morganii
ttgccatattcgggtgttaaaaccaacgtgctgttttttgagcgcagcggcggtaccagtgatgtgtggtactacgaatgcgaacctgagcaaaaactcaccaaaaacaaaccgatcaccgatgaacacttaaaagagtttgtgaagctttatagtagacgagaaaccaccgaccgctcttggacggtatcagctagcaagctagcggaagattatgacctatccgccaagaaccctgctaaacagaaagatactaaacatttagcgccaaacgatatccttaaacagattcgcaccaaagaaaagctggtatctagcctcttggatgaaattgaagttctgttagcggagaaataa

SEQ ID NO: 291097 - DNA, 627 bp, Morganella morganii
  misc_feature (608)..(617): n is a, c, g, or t
atgattgatgaatgccaccgcggaagcgctaatgaaactggctcatggcgagctattatcgaccattttagtagtgcagtacatgtgggccttacggccacaccaaagcgtgaagcaaacattgatacatatgactactttggaaaacctgcatttgaatactcattaaaagatggtatcaatgatggtttcttaactccttaccgggtcaaacgggtgcgaactaacttagacgaactagtgcttaccaaagatgaccaagtgatcgaaggcgaatctgggcaagatatttatcaggtagaagattacgataaaaaaatcgtggtcgatgagcgtaccgaactggtcgctgaagctattttagacactataaatccactagaaaaaactatcatcttttgtgaaaaccaaaatcatgcactcaccatgcgcgatatgatcaacaaatacaaaaaagtaaaagatccacattactgtgttcgtgtaactagtgatgaaggtaaaataggtcgtgaattactagaaaagtttcaggataatgacaaagacatacctaccattattacctcatcgcaaatgcttaccactggagttgatgcccgtaatgnnnnnnnnnnatgtgcgtaa

SEQ ID NO: 291098 - DNA, 585 bp, Morganella morganii
atgagccattatgcatacatccgagtaagacatgatgacagtgatgccttagcaaatcttgagcaatacacacagcaaattgtcacgttttgccctgaggctaaggataatatcatcattgaacgtcaaccattgcttgatgtgaaacttcctccaccacaacttatggaacatattgaccatattttaacaccagaagacactttaataacaaggggtctctatgatataggaaataatactcagcaggctgcacagattttatctcgatgccacgaacttggtatggctgttatcattcttaatcagtctatcacgaatatatttgagcagaagtttttcttgctagacgtgctgaatctattaaatgatttagaagaaagctatgaagcactaaaactaagcaggcgacattacatttcgttatcccaaaataagtcattaggtcgaccagcaggaagtaagtataaggattatatttacgagctaaggtgcaagggatataaacaacgcgagatagcaaataagcttaacattagtctttcaactataaagcgccactggaataaagatattttcgaatag

SEQ ID NO: 291099 - DNA, 744 bp, Morganella morganii
  misc_feature (676)..(685): n is a, c, g, or t
atgtcattacaacaaaagattgatcgaataaccgacatactacgccgcgacgatggcattagtggtgccatgcactataccgagcagacctcatgggtactgtttttaaagtttttagatgattacgagtctgaaaaagaagatgaagcgatactgtcaggtaaggactatcaacctgtattagatggaaagcaccgctggtcaaattgggcctgcccgaaaaataccgatggcaaactagatatcaataaggctcgcactggtgatgacttaaccgattatgtcaacaacgagttatttccttacttaaaaggctttgccaatattgcagccactgcctcagatcctaaatctttcgcctataaaattggtgcaatctttcaatacttagacaacaaggttgcctcgggtcatacactgcgtgaagtgctagatattatcgatacactgaattttcaatccagtgatgaaatgtttgagctctcgttggtctatgaaggcttattacaaaacatgggtgatgcgggtggttacgcgggtgagttttatacaccacgccctgtagtacgcaccatgatcaaggccattaacccacaagcaggacaaaccatttatgatgctgcagcaggctcttgtggattcttggttgaagtgtttgaacacttgaaaactaaannnnnnnnnnagcgaactatccaccgaacaatggaattttattcaacgcgacaccttttatggttttga

SEQ ID NO: 291100 - DNA, 1434 bp, Morganella morganii
atgcgattttctgaatattttgaactaaatcgttcacaagcatatctcgattttgttgacataccactcgatactgatataccagtattcttggacccaggagctattagatcgctcgactcaaattggggtcaagaacttgcatcacatttacagagtttttttgagaaagtcttaaagttaattaaggcaggagataatagtaaagcacaaaaattactggcttcactaaatgaaagaaatgaattccacttaggatattcatcaggaaaatcccgtggtcatggatttggagttggttctgctcattcagtttggaatgcactcactaaaagtaaagctgttaaaacaggattgttaaaagaccttgaagatacagccttattgattgctggtatcggaaccgatatgatttctgatgcagttagtaatatattaagaggtcctttgatagaatacactcaaaagatgtgtaattattatggtataaaattaactccggatatagaatcaggcccaatatgggaaccacatactggtacatggcataatgaatttgtatcattaccaatgacaacatatgggaaggtaattcttgttcccaaagtattagtcagacatagattatgtctacaatatgatgaattttataatcactatttattacctgaaatgcaggatgaacacttaagaaacaactcaacacttgttgaagttttaaaaaatggcactagacgcgtaactaaaaagagtttaaaaataaaatatggcagtgataaaccttccgtaataaatcagactatgagtcgccctgatgtatttgaagactataaaaaacataaggaaaaaaacccatcctcaccattatctcatgagacttttaatgaattagaaaaaattcaagaaaaaatagatataacaccaattctcaacaagctaaaatctataaaaacaggaacaaaacaagctggagattatgaaaatactattgaagaactattttcagttatattctacccatcattatgttttccaacaaaacaacatgaaatccatcaaggtagaaaaagaatagatatcacctacaataatgaagctaaatatggttttttcagttggctttcgcaacattatacttgccctagaatttatgttgaatgcaaaaattatacttctgatatttccaatcctgaattagatcagctatcaggccgattctctcgaaatagaggaaatgtaggtattctagtatgcagaaaaataaaggacaaaaatttatttagacagcgttgtcttgatactgcaagtgatggaagaggatttatccttgcaattgatgatgatgatttagatgaaatatgcaaagaatatatgaatggaggaaaccaaacatttcaagcattaagaaaactatggaatttcttaatagattaa

SEQ ID NO: 291101 - DNA, 1149 bp, Morganella morganii
atggaaccaaacgagtttgaaattaaagcacaaacccaatcacatacttttattcttttccctttcggtactccttacacttctcttgggtggaaaaattatcgcgaattcaatgaaattttgaacaactacctcagtaactcaggaaaagctctaaaaaagaaattttatatacacgaatatgaagtaatacttattgaaaaacattttgcatgggttgttagtttctttgaggaagatattaataagcaaatagaaatatcaactaatctaataaaatacttagccagtcttattaattcattttataaaatagacgctgaaaacatcaccatcaccaataacaaatgtaatgatttttataacgaattaatgtgtttcggcataccgaatattatgaagcactattattcattagtcgagcttggcgaaaaaaaatttgacttaaaggatacaccaaaaccaaaggaaaaaacctttgaaatgccactaccagatttaaataattttaatggcgaattaaccgttggtaattttatacaagaaatcaataattacctctatgatatagatgctgacaaacgatataaaatgatttatgcctctgatggatactggtcaacaaagtatcctgagttaaaatttcttagagaggaatttattccattaaaatattttataaaaaacttcaatatctctaatgataattttctttaccttggatttgagcgtgaaacttatgatgctcgatttcagtcatctgatagaatcagtgaaataatagttgagataacagctgccatccctaaagaagaccaccttttgctttctctctttgagatgtcatttgattcggctatgccagtaaaaaattggcacatactaaaaaaatatattgatagtattccagaaataattatcacagcaatagacaaaaaacatgacaaaaactacccacaaggaagaatactaatcgtcactctcccatcagaatatgtataccaaggagaagattacatacttaatgagattgttagtgaggtttctaacaattgcaaaagaggaatcggaaacttcaagaaaatttatttactatgcaacggaaaattcaaagaaatatttaatacttccgacgcaagccaagactaa

SEQ ID NO: 291102 - DNA, 489 bp, Morganella morganii
atggctatggctgcactcggcctgttcgtgtttgagctgcgaaccgtgccgtttcaggggatgcaggaagaaaaacaataccgctttgcgtataacagccgggtcggaaagcgtccgtcctggcaatttttaggattatccaatgatccgattaccttgtccggtacactctgcccggaaatcagcggcggtaagttttccatgctggcgctggaagccatggccgacagcggaaaagcctggtcgtttatcggcggtgagggaaccatttacgggatgtatgtgattgagtccatcagcaaaaacaaaagtgagttttttcacgacagcgcggccagaaagattgatttcaccatcaagctgacccgcgttgatgaatcgctgtcggagatgttcggtgatatcagcgcacagcttgactcgctgactgacaccatcagtggcatgggtaataaaatttctgacggcattacagggttattatcatga

SEQ ID NO: 291103 - DNA, 1206 bp, Morganella morganii
atgagagtagaattcacaaaaaaaacaaaggatattcttgctgggagagctggatatcaatgtagccaccctcaatgctcaacaataactattggcccaggtgaaaaagagaatgagatatccagtataggtgaagcatcgcatatttatagcgcggctaaaaatggccccagagggcaggatggactcactgaagaagatttaaaaagccctgagaatggaatttggttatgtaaggtacatgcaaggctaattgatacaaataatggagaagggtttaccgcatcacaactaattggctggaaaaaacttcacgaagaatttattaaacatcaccatgggagaatttccaataaattatattggatatcaaaactatcaatagttgatagtcctttatttcaagaatcaataagcatcgacctttcaaaaataacaattattgagagtgatactaatggttcgggaaaaacggcaatatgcgaatggttatcaagtgtcagttcaataaatagacttgggcgttgggttgattgtgaaaagctaaatattaaaattcatttgcatacgccagaaccacactcaattgaagttagtataaatagtggaaaaatctcctatcgcgttgataaccatgacattacatcaagtccctttccttttgcgtgctatttttttgattctaattatttggagaaaaaatataataaaacatctgatttttttgcggaattaataagtatatctccagagctacttggaaatatctttgattatatatgcaaaaataaaaaaggcatacttcaagcaatcagatttgctactaaggaagagctggaacagaaagatgaaagggaaagcgaaagcgaaagtgagcagaatatttattgcatgatacaaagtaatgatttttatttgcctttcgaaaatttatctagtagtgaaaaaaacggagtgctattggatgttataattgcatcattaaatgagcgttcaaaatacacaccgatactactttttatagaaatgaatgaaacctctttatcaaaggaatcttttaaaccatacattgaaagattgaattccaatgagacttcatttcaaactatcgtaacaactcactcaaacacgttaaatgagtgttctatcggttttcctcattatgaattgataaaaggtatcaactttaaggtaaagacaaaataa

SEQ ID NO: 291104 - DNA, 525 bp, Morganella morganii; identical to SEQ ID NO: 278786

SEQ ID NO: 291105 - DNA, 309 bp, Morganella morganii
atgagtcattatcgaatttatgcggattttattgatgaacttcagtctaggctaaagaaggtactgattggtcaattcgggagcaatattatctcaattggttttaatagcgcaactgatagcattgttgtttcgtggtctaacctcaccaataacaatcccgaatcatatagcttcaaagttataagctctgaagaatatcacgctgacgggtttgtgaaaaaattcgatgcagagttttacatgaatcgtgagattaaatatatctctagtgagatgtttaaaattgatgacaggcagcgtggataa

SEQ ID NO: 291106 - DNA, 159 bp, Morganella morganii
atgccatggaaccctttaacgctgatcatcattgctatcatcctgctgaccactgctctgcagtcagttttctatctgcattcactcccgaaccactgcaagcctctgccgagtaatccgctggacggtgtgatccactatgagtgtgtcgggtcatga

SEQ ID NO: 291107 - DNA, 192 bp, Morganella morganii
atgaattacctgaaaacattagaggctcaagctgaagctttgattgctgaattgtttgcaaatgatatgactccgatggaacaatttggtacaagctgggctcaggtagaaatgttggaaagagatgttccaagattggtctataatctgaatttaccaagaagtgattttccagaagcattgtgctgttaa

SEQ ID NO: 291108 - DNA, 543 bp, Morganella morganii
gtggataataaaataaaaaccgaacaagatgttatcttcggtatggtagctaaaaaattacaatgcagatatcctgataaatcgttaagtattacctatccatcaccactggttattgacgatcttgataccttgcaagagcaaggtaagctaagttggaaagcatccataaaaagtggtataatgctgaccattgatcaagtgcacccagtaaaacttgtggtatactacagaaatgttcctgtaggttatgcgtttggtggctataaagagcatttggaaacattagaaatttcatggcttgagaaacgaaaagatgctcatccagatcttaattatcaaatgttgggtttgacgctggatagctatgcggcttatgctgccttcttaataaagaagggtaagcctgtcaagcaaattgctcttgtaagtcctgtagaagatgtgaagccttattataaaaaacaagggtttaaatacaccgaaacttacgatggctatactgaagctatgatttttgaacataaaaatattgtagtgtaa

SEQ ID NO: 291109 - DNA, 1491 bp, Morganella morganii
  misc_feature (1426)..(1466): n is a, c, g, or t
atgccaaaaggagtagggcaaatcattagcgttctggctattttattaatggggggaacttatgttccgattgatgtactacaaccagaagaacgtataaaccgcattgctaaaaatgctcagctttcattactcatcgtatctgatagcgatccatcctattcaatctatgctacattttgtaacaggattgtttggcaaaaagttcaaccctccgagaataaaccactacacaatatagatatatctcctcatcaagcagcttatgttatttatacttcaggttctactggagagcctaaaggtgttgttgtatcccatgccagcgcaatgaatacctgccttgatctcaatcggcgatataacatttcagacaaagatcgggtacttgccatatcagcactacattttgatctgtctgtttatgatattttcggtgttttaaatgccggagggactcttgtattagttaaagaagatgagcgccgtaatcctgatgcatggttacgacttattaaccaacataaaataacactttggaacagcgtacctgcactgtttgatatgttactaacctatgcagaaggaatagggtcatccattccacaatcgctgctattaatctatctctctggagattggattgggcttgatctcccgacacgttactataatttctgccctgatggacaaatagtcgccatgggaggtgccacagaagccgctatttggtctaactattttaatgtcacaacattagacccatcctggagctcgataccttatggatatcctttatccaaccaacgttatcgtattgttaatgctagaggagaagattgccctgattgggtatcaggagaactttggattggtggtgcaggcgttgcgttaggctacctaaacgatcccgaaaaaacagcacaacagtttgtaaaacaaaatggtgaaaattggtataaaacaggtgatatgggaagatatctccctggcggtatacttgaatttttaggaagacgtgaccgccaagttaagattggcggataccgtatagaaccaggggaaattgatgccgcattcaataagcttcagggtgtgcaaaatgcgattacactatgccttggtaatggtaataaagaaaaagcattacactcttttgtgatactaaattcgggtaattaccagaatattatcagttcaaatagcgccttttctcccctctactatctgcgctcaaccccaataaatgtacaacaacaatcccaagaaacggcaatcatagctggatttttatatgattatcttactgaacaaaatattgatttcgacaacctcttgtcagaaaaaaaatcagcagatgaccatggcattatcgctagctatcagtcattaatggctaattggctaaatttaatagcacaatatnnnnnnnnnnnnnnnnnnnnnnnnnnnnnnnnnnnnnnnnnactaatagtacccagcgaacgctaa

SEQ ID NO: 291110 - DNA, 453 bp, Morganella morganii
atgaatgatgtctcagcaaccggccttgcactggtggtacaggccagcaaaacattcccttcagggatttttatcacgcagtttgcggacgatgcggatccgctggatttaccggcggtggatatcgcgcagaccggtatggatatcaacggcaatctcgtgagctggtcaacgcccacacctcagactgtcaccattaacgtgctggcgggcagtgaggaagatcagaacctggcgattcttcttgaggccaacacggcgaaaaaaggccgccgtcatgccggtgatattatcactatggtggcctcttacggtgacggctccaccactaccgcccgtaacggcaaaattaccaacggcagccgggggaactctgcggccagtgccgggcgtcttaaatcaaaacagtacaccttcgtgttccaggattttgactccacgcgtaatcgttaa

SEQ ID NO: 291111 - DNA, 183 bp, Morganella morganii
atgacgtacatgtactacgtcttcaactttaatccggatgagcgtctgcgcgttctgcttgaaaacttcgatctgatgccgcgtccgtccggggtgggtgtcaaatatcgtattgtggctaaaaaagccttcggccacggcgaacatcgtaaaaacttcctggaaagtaacttcggagaataa

SEQ ID NO: 291112 - DNA, 285 bp, Morganella morganii
gtgatcgacggcaaaaacgcggacgcactggtggtgcagtcaacagatggttctgtgtgcttatccctgcatgccgataaagcggtgctggacacaccgttgtttgaggttaatgcgccggaaaccatttacaccgggaatgtgacaattaacggtaaccacgcggtcaacggcaacagtgattcaaacggcggcaccatgaggcataacggtaaagatatcggatctgcccacaggcattccggtgttcagggagggaacggaaattcaggagagccggtatga

SEQ ID NO: 291113 - DNA, 285 bp, Morganella morganii
gtgatcgacggcaaaaacgcggacgcactggtggtgcagtcaacagacggttctgtgtgcttatccctgcataatgataaagcagtctttgacggcccgaaatttatctctaatgcgccggaaaacgaatttaacggcaatgtgatcgtcaacggcaaccacgccgtaaacggtaacagtgaatcaaacggcggcactatgacgcataacggtaaaaatatcgggtctacccataaacattcaggtgttcagggtggcaatagtgattcaggagagccggtatga

SEQ ID NO: 291114 - DNA, 339 bp, Morganella morganii
  misc_feature (322)..(331): n is a, c, g, or t
atgattaataaaaataaagcaactgaacgttcgggtatacatgagaccgtgaaaagccttagtgagaatctgagaaaatatattgaggcgcagtatcatatccgagatgaagggttgattgctgagagacgagcgcttttacagaaaaatgaaactattgctcaagctccttatatagaagcaacacctgtttatgaacctggcacgccatacagtgaattgcctattcccgaatcggcaagtaatgtgctaactcaactttcagaacttggaattggcctctatcaacgaccctatgaacaccaatcacaggcgcttgagnnnnnnnnnngcgcttga

SEQ ID NO: 291115 - DNA, 300 bp, Morganella morganii
atgaataaagaactatcaagtaatgaaattaaagaaatattattaaaatcagataggttcactattctttgtgattcaatcaattattacacctcactaaaaaaccttaggtctacaataagaaaatcaagcacaaactcgattatcatcgaaataataaataataaactttattacatatatgattcacacaataatgtatggatagagactaacaatatatcaggctatagatttgaaattccgtattcttataattacggcctcgatgaaaaatttactctaacgtattatctttaa

SEQ ID NO: 291116 - DNA, 237 bp, Morganella morganii
atggcaaacgaactggtcgttatcgaaccagcgacagcgctcgacctttttacagcgccggataaggttcaggtgctgctgcctggcatccgggagaaagcacttgcagaacaggcattactcgatactgatttatcgaaagccaagaatcgcgatgctatcaagtcactggcctacaaagttacgcagtcaaaacatacatcgacaaagccggaaaggctgtcgttgatgagctga

SEQ ID NO: 291117 - DNA, 435 bp, Morganella morganii
atgcttgactacttaagaaatgacgtaattaagaaaacctgccattacaagtactttgattggttaaaaccatccgatataaaaatgtgcaagtgggtctataactatctggtcaaaagtaaagcattgactaaaaccgaatatcaggatagtgaagagctttatctttacattgtgactggtttttatttatggcaatcaccccaagatgaaaaagataagcgctataaaaaattactcctagctcgaaatgagcgaaaacacagaacaactactcaatcaaaaggttcggtaaggccaaaaaaaacaccgaaagatattcaactttcagcagaggcaagaactaaattgacagagttagcccttaactatggtgtacccgcgtcggagtggttaaatagcttcattattgatgaatatgaaaaaatgaaataa

SEQ ID NO: 291118 - DNA, 864 bp, Morganella morganii
atgaataaactcgaaaatcattttcttttcctccctaaaggggctaaggatgtgtttttatcccatttgaataaactcatcaactactcccccaccatcggcctgatgggtaaaaccggagcaggaaaatccagccttatcaacgctctattccaatcagcattatcacctgtgagtgatgtatccggctgtacacggcatgctcagcgtttcagtatgacgatgaacaatcacacgcttacctttatagatttacccggcgtaggtgaaagccttgagcgagataaagagtatcaccagctctatcgtagcttactgccagggctggatttaatcatctgggtacttaaggccgatgatagagcgtggtcttctgatgaacagtgttatcgctttcttactgagcaatgtggttatcaaccaagtcgctttctatttgtgctgaaccaagccgacaaaatagaaccctgccgccagtggaatgaactgagccaccagccatccccagagcaagtggctaacttagaattgaagcaacaagcagcgataacggcatttaaacctcatcatcctgtaataacggtttctacggcagaaggttaccaactgactgaattagcagagcaattaatacaggtattaccggcagaggctagtagcggtgtcgctaggcaactgaacaacacttatcggacacaatctgtggaagactccgcacgtaacgattttgggcaatgtgtcagtgatattgtcgatacgctgatagacatccttcccttacctgtcttgataaaaagcacgattggtacggtcaaaaacagcatcgttttcgtcgctaaatccctgtggagcctgttcttttaa

SEQ ID NO: 291119 - DNA, 318 bp, Morganella morganii; identical to SEQ ID NO: 289953

SEQ ID NO: 291120 - DNA, 1095 bp, Morganella morganii
ttggcttctttacaggttttgaatgctatcgctgttaggattacacctccagaggacgaacagaaagattggtcctataccttaggcgccctctggcccaccgatcagcaggaggtcatcacatttacaacgaaagtagatgcaagatttcataagagcagcaaatctcatgcgaagtttcaaaaaccttatccaggaagttctttcccttcaaagctgtcaaaatttttagagaaagaaacttcattcgaagtcttcgtacatgattttatccagaaaaagttaattacatctgcaagacaatccagagcaagtaatggtgcaatattggtttttactcattaccaactgcaacatgaaaaggaagatggttctgttcataaagatttcgagcgacttcttgttttgatgcttaaaaacacagatgcattaagattcaaagaaaatctacaactaaatcccgttgatgtaattgacttagataaattcttgcagggagcaagagttgatataaccagattcatgtctgaggaagtagaagatgaagacaaaaataatttatgcttcatccgtggaactggtgatgtaagaaaatattttaccgaatcaattggtgccgaagatattatctccaataaaaccagtagtgagcaatgtattaaagctttggagcaattctctcaccaaaaagaatttggtcgtgctttgagagaaaaaatcgaatccaagattcaggaactatttaataattgtaagcgtggacagtccataacccttgaaaagattcaaacacaaatcgatgctattatacccgttgatttagcagagcataaaaatacattcgtagattttgtaaacgaaaatggatttgaagttaatgaagaattcgaagtatctgcaagtgataaaagacaatatgaatggttagattttgaaaccaatattgcaaaaatgagtgtaagaaaacatcagattggtttgcctggttctgatagaccaattatctttgacaccgaaacaaacgaagtaaagctaactcagaagattaatgatccaataattattgctcggctgaaagagcttgcaaatgaataa

SEQ ID NO: 291121 - DNA, 270 bp, Morganella morganii
atgtctatcgatatcaaaaagttaaaatcaaaattaattgaagattataacttcgctgacgagattagcgatgatgaactcaatagagttttaagtgaaatacacaaaaaggatgcctcaacacaaaaagaagtagacgaaattgtctatacggtattagagggtaaaaggcattattctttcgaaagtctggatacatccaatactacatcccttgcattacagttaattcaggcggcaaaggtatatgctcaaacacaaggaagatga

SEQ ID NO: 291122 - DNA, 288 bp, Morganella morganii
atggtggtgatgggttttgcccgttaccgccaccatttcacccgtgactttctgcgttacagcaagcccgggctgaccggcggtattctgcaaatcttcagctacggcattgtgatatgggccatgggacaggcgccgataatgattgtcgcagcgttacgggagaccagtgtgctgttcgcactgctgctctccgcgtatttcctgaaagaaaagctgactcccgcccggattctggccgcctgtattattgtggccggggtgattgtgacgaagatggggggatag

SEQ ID NO: 291123 - DNA, 231 bp, Morganella morganii
atgtcattatccgtgatgcctgtccttatggcagggacatctttctccgttatggccgatgattattatccggccagtttatttaacattcccggcagtaactcacaactgactaatgaagatgtcaatgttttcaaagaaaatgataatgcgcccggaaaatacaaagtaactcttgttattaacaataataaaattaccacaaaagagattgattttgttttgaaataa

SEQ ID NO: 291124 - DNA, 684 bp, Morganella morganii
atgtcagttaataaagaataccaaattgtgaacctaatgagagtgacgctatctattattttttgtctcgttgttttatttctgataatgaaatttctttgggactctgaagttgatccagttactaaattttcatcatttttcactgcaatatcatcgctagggattttagccactatagttgtttatttttggcaaaagaatgatgctaaagagaaaagtgatggagacaaaaatagcgagctaatggcctacagtaaaatatacaaaacagaacgaatgaaatacaagaaaatgtttaaaacatttattttaattagagaaaaactaaaaaaaacagaaaacataaaagtaaaaataagaagaagaggaaatatattcacatttatattaaaatacaataaaaacaaagaaataaccaaaaaatatactctcgtctttttccaaagcgatatgtttttactaaacgaaatttcattaaaacttataaacatcgatattcccacgcatgaaaaatgccaaaaaataatttttgcataccataagcttcacgttaaaatcgatagcctttttattatgtataacattgaagataataatcttttcgagatagataatgtacctagatttatacgtaaaaataactttaaagtcgatagcatttacaatgaaacattcaattag

SEQ ID NO: 291125 - DNA, 366 bp, Morganella morganii
atgaacaaatatcgtgacaaatcagactttgagattaataaggctgtggctgagcgttatctgctgtgcgattacagatataacgaaagtgacaaaattgttgagctagtaggcataggcctttcatgtgaattcggaagctctatagatatagagaaagaacatgtttacggtaaattcgacccctgcaagaacccagcggacgcaatgccgattattattgagaatggaatgtcaatgattaaaagctcagggggatggatatgctgtcatggtgcagccggtgtaattgagcatgaaaacttatatcgcgcagctatgatttgtttcctgatgatgaaggatgcggagaatgaaaaagtatga

SEQ ID NO: 291126 - DNA, 225 bp, Morganella morganii
atgaaagttaaattattgaacgatggtgattacggtggaatgaaaaacactgagtttcctgtcattgtaaatggtttttattatgactggttagaccacgtagttggtgtttcttgcagtgaattaatcagggtcggttctgataaagatgcttttgatattggtggtgacctggcttttttgattggcgaagaatgcgaggtggtcaatgaacaaatatcgtga

SEQ ID NO: 291127 - DNA, 621 bp, Morganella morganii
atgaatccgataaaaagaaaggaatacatcctcgatctgctgaatcagcagggggaagtcagtgtgcaggatcttgctgatacactgaatgtcacctctgagacgatccgccgtgatctctccattctggagaaagaaggcgagatcatcaaaattcacggcggggcgatgaagaaaaagagtgtcagcgaaggcagctttgaacagcggctggaactgaaccgcgaggaaaaaatgaccctcgcgcgctacgctgccgggctgatttccgagcacgacacactgtatatcgattcctgttcgacaacgctgctgttttccgcgcagttaccggcgattgcatttaccgttttcaccaactccgcccttatcgcggataaaatcgcctcgcagaacccgctggcgaaagtgtatgtgctgggcggtgaatacagccatgaattccgggccaatctcggcgcgaaaaccctgcatgaaatcgatcatatttatgcggacttcgcctttgttggtgcaggcggtgtgcgcgatgaaggtattctggtcaaaagcgttgaagaaggcatgattgcgcggaaaatgctggaaaaaagtaagcagaaaattattctggccgactga

SEQ ID NO: 291128 - DNA, 981 bp, Morganella morganii; identical to SEQ ID NO: 153911

SEQ ID NO: 291129 - DNA, 780 bp, Morganella morganii
atgaagttaacgcaagtctgtaatgccaccctcatgctggaatacgccggaaagaaattccttatcgacccgatgctggcagaaaaagacgcctgggatggttttgccggaaatgcgcgtccgcacctccgcaaccctatggtaccgctgcctgtggcggttgaaacgctgctgaacgttgatgcggtgatcctgacgcacacgcatactgaccactgggacgaagcggcacagaaggcggtgccgaaagacatgcttatctatacccaggacgaaaatgatgctgcactgatccgctctcagggatttgttaatatccgtgtactgaaagatgaaaaccatttcgtagatggcctgacaatttacaaaactgacggccagcatggcagcaatgaactctacgcagataccgtctggggggaattactcggcgatgcctgcggactggtattcacgcaccacgatgaaaaaacgctttatatcgcaggggataccgtctgggtgaaaccgtatgtaaaaagcctgcagcgtttccgcccggacgttgtggtgctgaataccggctatgcggttaacgatctttacggaccaatcatcatgggtaaggaggacacgctgcgcaccctggcgatgctgcctgagacaaccatcgttgcttcgcacatggaggcgattaaccactgtctgctcacccgcgccgagctgcgtgaattcacccttgagcacggcattgaaaaacaggtacggatcccggctgacggagagatcctcacgttctga

SEQ ID NO: 291130 - DNA, 1191 bp, Morganella morganii; identical to SEQ ID NO: 153909

SEQ ID NO: 291131 - DNA, 852 bp, Morganella morganii; identical to SEQ ID NO: 153908

SEQ ID NO: 291132 - DNA, 504 bp, Morganella morganii
atgaaaaaagaaccaataggtacttttcacgaaaaaggaaaagcaccaacaattgaacgtattgcccaactaattaaagggcacccatcaaggagtgcggcagctagagcttggggaataaatataaatacccttaacagctattttaagaatgtagaaaaccctccagccccccgagatagcgtgctgcagcgaatagctatcaacgaaggtgtaacaatagagtggctattagggaagagtgatgaatcaccaatatcaccaagaaatgaccaattgtgtgaggtgttatcatttttaacgcatgaagaaagagagcgtctggctgtaatacttgctaggaaaggagtcgaatccatacttgagttgatttttgagttttctaatttatcgccaagcgaatttgatagagctatccgcttagccaagcaaattaaagagggggcttttgaagggggtcaggaagacattatagcccatcaggtaaaaaaccaagtggggtga

SEQ ID NO: 291133 - DNA, 174 bp, Morganella morganii
atggtatttaccagacaaccggtctatattattccgcatgacagaggtaaagacgcaatgacatcagtaatcacaaaaccgaaacggggacggccgccgaaaaatcatgatgcgggtgcggatgtaaaaaaaatgctgatcctgattagacttgagataaatgacaggggataa

SEQ ID NO: 291134 - DNA, 705 bp, Morganella morganii; identical to SEQ ID NO: 8686

SEQ ID NO: 291135 - DNA, 333 bp, Morganella morganii
atggcgcgaaaatatcccgacaaacctcaaagtatttttattgctattgttatgttaggtatcacatattacgcaggaagtgtgattgtttattttttaaatggttatgattttttatatatttataagcattatcaatctgatttattgtggcaattgattagcgaaagccgaattaaagcatctatacgggtaacggctattcctgctttgctgattggcttcgtggcatcttttattttacctgtggcggtgatttatttattaaatcaagaaaaaatgtcacaaatgggaaaaggaaaattcaaaaggtattttagttgggaaatataa

SEQ ID NO: 291136 - DNA, 204 bp, Morganella morganii
  misc_feature (180)..(189): n is a, c, g, or t
atgaacaaattcaaattaacattgatcagtatggtatttggggcttcatttatggcttcggctggtattcctgttgctattgacgctaaccctgaatgggcgattgaagcggggcggtggtctgaaaaattgaagcaatggtccgatacagtgaaacattataatgctcaaattcagtcnnnnnnnnnnaggatgaattgttag

SEQ ID NO: 291137 - DNA, 567 bp, Morganella morganii
atggcagtcatcggctatatccgcgtatcaacaactgaccaaaacagtgatttacagcgaaacgcgctcatcagcataaattgcgaccatatttttgaggacaaaatgagcggtaaatccgccgtcaggccgggactgaaacgggcattaaaggccattcagccgggcgatacactcgcagtgtggaaactggacaggctcgggcgtagtgtcaaaaacctgatagcgctgatatctgatctgcacgaacgcggcgcacatttccggtcactgacggacagtatcgacaccagcaccgctatggggcgctttttctttcacgtcatgtcagcgctggcagaaatggaacgtgagctgatagtagagcgtacactggcaggcttggccgcagcgagagcgcagggaagaattggcggaagacccgcagcactgacacagaatgaccgggagcaaatcggccgactgctggataaagggcattcacggcagcagatggcgattatttatggtgtgggggtatcgacaatttaccggtattttcctattgggcgccgcagcgagagttaa

SEQ ID NO: 291138 - DNA, 279 bp, Morganella morganii; identical to SEQ ID NO: 277734

SEQ ID NO: 291139 - DNA, 342 bp, Morganella morganii; identical to SEQ ID NO: 279727

SEQ ID NO: 291140 - DNA, 342 bp, Morganella morganii
atggctaagtccccagcagaacgcaaagccgcgcagagagcgcggcaaaagaaaactggcatagttaaacttgagttgctggtggatgaacaggaaatagaaatgcttcagcgtaattgtgcattgcggcgaccaggtcgggaaccttatgagctgaatgagtacctaacgacactcatcagaatcgatgatcggtcgctaaaatctgaaattgaggaactgagtaagaaaacttgccggaaatgtggcgagaaactaccagtggaggaatgttgtatgtccggtgattctgagtgctggaatacgcttgggtggcatgagttgaagcttcatttatcttga

SEQ ID NO: 291141 - DNA, 2154 bp, Morganella morganii
atggggatgagcaagttcacctactttggcggtatgggggcggtagtcggtggaatagctgcggttggtaaagcagcctggaatgctgagcaggaagtgacgctgctcaaccgtcagctgatcgccaccggtaattatgccggtaaaacatcggcacagcttcgcctgatggcagatcagatgtccggtggctggataaccaggtcggatatgactgctgcgcttacaagtgcagtcggttccggttatttcttcggtgaccaggtatcacttgtggccaaagcagctgcacagatgaaacaggccaccgggcagtcggtggatgaaaccgttaatcagtttaaacggcttaaggatgatccggtcaacgcgattatggaaatggataaatccatgcacctgctgaccgcatccgagtatgaacatatagctgcattggaaagatccggaaaaacccgtgaggcgtcagaatatgccattaccaaactggcagaggttaccaaccgtcgcactattgagatgagtgaggatgtgggtatccttgaacgggcatggaataaccttacaacaagcataaaagaagccggtgatgaactggcgaaaatttggagggcacctactgaagcggaaaagttggctagtgtgaatgaacagatcgcatctcttgaaaacggtgatgggtggatgaccgactccgctcgtaagagtagtttggaaacattaagaaagaacaaggccgaacttgatttcgccgttaaatcccagcaggggtatctggataataaaaataaaattatccaggccaatgaccgagaaaagaaaagccagcaggatctcaataagtacattgaggcgagcctctctcaggcagaaaaaagaacgcgggagcacgaaaagttaaaccgtgaaattgctgccaatgcaaaggctgcaaaagataccgcctctgcatctgacagtgaaaaaatcaggctatggacacctgatgaaatagcgaaagccagagctggtattgataaaaaatatgccgaccctaagacgccaaataaacgcgattatcgtgttgatgaaggaacaaaagcagaagaaacggccttaaaagagcaaattgcacttgaatcaaaattgcgcgtgctcagagagcacaaatctgttacggatgtaatcagtgctgaacgtaaaaagctttgggaaaccgaggctcagattgccattactgaagagtccagaggtaagcgccagttaaccaaacaggagcagacgttgctggcaaataaagcggcagtactggctcagcatgagaaactggcactattgggtgatgaagttgttgctcaggaacgcctgaataaacttcaggatcaggctgataaatacgttaagcagcagactgaaaagcaaaatgcaatccgcgatactatcggcaaatcttcgcgcgaagcgcagcaggctctggagaggtcgcaaatcctctccgctcatcaggacaatccgcggctgaatgaaatgctggcggctcaggcagcaacgtatgcagcggaagaggaaaagcgggctgactggcttggtggtgcacagactgcgtggggggattaccgtgatgccgcactggattcaaatgcgcagatccagaatgccaccatggctgcactgaacggattttcaactgaactgacctctgtgctgacaaccggtaaagctaatttccgtgagttcaccacgtcgatactgaaaatgctgacagaaatttttgttaaaaaatcgattgttatgggaatggatgcgatggggtttaattttaccccaaatgccaaagggggcgtttatagctctccgtcactgagtgcgtacagtggccaggtggtacataccccgacaatgtttgcctttgcaaaaggtgctggtgttatgggggaagccggaccagaggggatttttccgctgcgccgtggtctggacggaaaactgggtgtagtggcgaaaatggctggtggaggtgatggtgtagttcagcattttaatatcaccattcaaaatgacggcagcaacgggcagatgggcccgcaggcgacacagcaaatcctgaagctggttgagcaaaaaaccaagcaggttattgcatctgaacgtcgtccgggcggagcaatggggtaa

SEQ ID NO: 291142 - DNA, 354 bp, Morganella morganii; identical to SEQ ID NO: 288973

SEQ ID NO: 291143 - DNA, 723 bp, Morganella morganii
atgaacgaagaagacaaaaaaaccacagacgacggcggttttacgccggagcaggtcgaacagattaaacaaatcgttgtgtctgcgctggctgccggtacaccggcaacggatgaagatcctgaaaaaaaggaaacgaccgacgaagagtctgatcctgaaaagaaaacggcagatgccggagccgatgcggaaaaagccgttgaaggcgcagaagcggaagccgaaaaagcggaatccggtgacccggaagcggtagaagcggcggaagtggcgattgaagccgcagaggaagccattgctgaagccaaagaagaacttgaccaggcaacaaccgacagtctgacccgtcgccttaaacgtctgaaacgcggtattgcgtctatggatgagatgtccgcgatgaaacgcaaaatcgcccgtctggagaaagccagaccgacgacggacaccggcgaattattaaagcagatcggtgagcgtgatgcactggcgcaaaagctgacaccgtttaccggggtgtttgaccatgcagcgatgacaaaacagcaggtggcggaatacggtgtggaaaaactcggtatccgttgcgataagggcacggaaagcattgctctgaatgcctggatgcaggggcgcacacctgactcacaaaaggcgcatgcgacgatggataccgccgcaggcacggactcaattatgaaaaaatggggtgaaaaataa

SEQ ID NO: 291144 - DNA, 663 bp, Morganella morganii; identical to SEQ ID NO: 288975

SEQ ID NO: 291145 - DNA, 762 bp, Morganella morganii
atgcgggcggttgaaaccggccctgttgagtgtccggccggtaaattaaacacggtggcaagttcggttctcggctgggaaacggtatccaacccgaccagtgcggtattggggcgtgttgccgaatctgatttacagtcccgccgccgccggaaactgacactggcaaaaaataccgtcagtgtcggtgaggcgattacctccgcgttatatgagctggaaggcgtccgttcgctggcataccgcgaaaattatactgataccccgatgagcctggacgggatcacgctggtgccgcacagcgtatacgtgtgtgttgagggcggggaaagcggggaaattgcccgtgctctgctgcgcaccaaaacaatcggggcggctttcaacggcagtgaggaggttgaggttccagagccggtcagcggacagacctataccgtaaaatttgatcgcgctaaagagattgtcctgttctgccgcgtgacagtgaaaaaaacatcactggatgcgcagacggttattccggcggcggttgagtcatgggcccggggcgaaaccgaaggggatggcgggctggttgtcggccgcgaagtttccccgtttgaaatatcggccggtattaatgcttctgaaccgcgtctgtttgtcacacgggtggaactgtcaaccaacggtacggactggtcatccgatacttatccggtaaagctgactgaggttgccggaatcagacgcagtgcggtacaggtggtgtttgtatga

SEQ ID NO: 291146 - DNA, 264 bp, Morganella morganii
atgagtataattgaagctcgttcccaagggtgtgccttagtatcgacaagtaccaacggtggaataaagctaattgataatttaaaaaatggattactcgtaaatataaatgatacatacgatttaactgaaaaaataaatcaacttattactgataaaaacctacgtaacgcattgattttacagggttatgatgacgctctaaattatgatattcaggtaatcgtaaacaactggaaaggtatacttggacatgatttgtga

SEQ ID NO: 291147 - DNA, 237 bp, Morganella morganii
gtgaaagcgctgcgcggggaaatgctgcacaagctggataaggggatcccgtactggaaaaccaccttcgggcgacaggctgatctgccgctgtttgaatccgcgttccgcgagcgtatgcgggaaattccgcaggtgaccgccgtcgtgtcattcagagccacgctgaatgataacgaactgaactatgtggctgtcctgcagacagaatacgggagcattacgttaaatggctga

SEQ ID NO: 291148 - DNA, 207 bp, Morganella morganii
atgagcaaaatcaccatttcccccgagagcatccgcgataaataccggatcgataatcgcactcgtcagtgcctgttttttaatttccaggtacactctggaaaagtacccgacactgaaagcatcatcaggcagtgttgccaaaacgtcataggcatcctgagtggcaccaccggccagcaaaccaccaatgacagcggcttctaa

SEQ ID NO: 291149 - DNA, 237 bp, Morganella morganii; identical to SEQ ID NO: 291147

SEQ ID NO: 291150 - DNA, 168 bp, Morganella morganii
atgctaaaacaccaacactacaaagaccggccggtaaagctcacgttcccggacggcagccacggttacatccgtactgatcgtcggtgtgatgtgtattacgacctgcccccgcaggtgaaaattgaggcccgtaacgagccgcagcagaaggatgaaagcaaataa

SEQ ID NO: 291151 - DNA, 546 bp, Morganella morganii
atgggtgagttaagtgagcgccctaacatctggctggatgatactccgggaatgacgctggcacacattcaggccgagtgccggaaactgaaacgcaagacagggaaaatcgggtttatcggcgttgactacctgacgctgatgaaggcaggcaaggcagaccggaacgatatcgcatacggcgaaatcacgaagggtctgaagcagctggcaaaagaactcgataccaccgttgtcctgcttactcagcttaaccgcaaactggaagacagggcagacaagcggcctatgccaagtgacagccgcgacaccggccaaatcgaacaggactgcgattactggctgggtatctacaaagattcagtctacaacgacaacgctgacaaaactctcacagagctgattatgcgccttaaccggcacggtaaagcgggaacggcatacgtcgagcagaaaggcctgtgcatgtttgatatcgatcagactcaggcaatggtcagagccgaaccaccggcgcggcataacccaagacagaaggacttttga

SEQ ID NO: 291152 - DNA, 708 bp, Morganella morganii
atgcgtaaaaacattcaggcagctatttttgcacacgcagaacgtgaatacccccgcgagtgctgcggagtaatagctcaaaaatcccgtgtggtgaaatacttcccctgtcgtaatattgcggccacaccggaagagcacttcgtattatcgccggaggattacgccgctgctgaggattggggtacggtgaccggtattgtgcacagtcacccggatgccaccactcaaccgtcagaactggataaagcacagtgtgatgcccttggcgtgccgtggtacatcgtcagctggccggagggggatctgcggactgttcagccgcgcggcgagctgccattacttggtcgaccgtttgtgctcgggtttacggactgctgggggctggtgatgagttggttccggcaggaacacggcattgagctgccggattaccgggtggattatccctggtgggagcagggtgagaaccgttacgccgataactggcgggaagcggggtttattcaggttgacgatccgcagcccggtgatgtcatcgtgatgcaggtgcaggcaccggtcgccaatcatgccggtattctgctgcctgataacatgctcctgcatcacttatacggtcacctgagccagcgggtaccgtatggcggttattggcgtgatcgcacagttatggtactgagatataaaatattcatgacaacatag

SEQ ID NO: 291153 - DNA, 444 bp, Morganella morganii
atgtcagatgccggtggctggattggtgctgtcggtaacttcctgggaggtgccgcggcaaatgccaaaggcggagtttatgactccccgggcctgagtgcgtacagtaatcagatagtcagcaccccgacttattttgcgtttgccaaaggggccgggctgatgggtgaggctgggccggaagcgattatgccgctgacccgggcggcggatggctctctcggtgtccgggcgctcggcggaaatcagaacagcggttcagcagcaccacaggtgtttattaccatcgacagtaacggcagcagccagacgcaatcgtcagctggttatgagcagtttggtaatgaaattgccgcattcgtcgatcagcgtttccgcatactaatggacaaggatacccgccccggcggagccgtctggaatctgactaaggggaaaagatga

SEQ ID NO: 291154 - DNA, 276 bp, Morganella morganii
atgggcgaagctggaccggaagccattatgccccttaaacgcgggccggacgggaatctcggtgtacgggtatatggtggtgatggcggcggcactggtggtttttccgtcagtataggagatattcattttgaaaaaacaaatggtggtgatggttcatcatctgatgccgccgggataaagcagcaattaaagactgctgttatcgagactatcagtgatcaggctcagagaccaggcaccccgctctggaatgcaataaacggtaggagataa

SEQ ID NO: 291155 - DNA, 336 bp, Morganella morganii; identical to SEQ ID NO: 279989

SEQ ID NO: 291156 - DNA, 759 bp, Morganella morganii
atgatcacaaacgactaccagaagctggaaccgggtaatgccgtccggctttttgaggttgacggtaccgcgttcggtacgccggatattttgcggttccatgcatacaatatcccgcacacagagactgagattatgtctgcaggtggtgactcggagaagttaccagcgaaatccatctggtggcagggagaagagtatcgcgcgtggccggtacagattgaggggctggaagcatcaacaaccggatccggtgcgcagccgaagttatcggtggcaaatctggacggttccatcactgcgctgtgtctggcctacgatgacatgctgaaagcgaaagtaacgatacacgataccctggcgcactatctggatgctgataatttcccggacggcaatccggcggcagatcccacccaggaaaaagtctcggtcttttatatcgacagcaaatcctcggaaaccaacgaagttatcgagtttgaattagccagtccgatggatttacagggggtactgattccgacgcggcaactgcattcaatgtgcacctggtgcatacgcggcaaatacaaatccggtgacggctgtgattatgccgagcagaacgggtattttgataagcacggcaatcgtgtggatgatccggcacaggatcagtgcagcggcatgctgaacacgggttgcttcccccgcttcggcaaaaacaatccgatcccgtttggcggctttccgggaacctcattactgaggaaataa

SEQ ID NO: 291157 - DNA, 864 bp, Morganella morganii; identical to SEQ ID NO: 288089

SEQ ID NO: 291158 - DNA, 228 bp, Morganella morganii
atgacagcgatagcgtctggtgccgggaaactgactttattgggtttttttgcgattactgcctctatggtcatggcggtatatgaatacccgacatttgcaacatccggttttagtttggtttttttccttttattaggtggtttattgtggtttattcctgttgctctttgtgcggcagaaatggcaacagtggaaggctgggaagagggcggcatatttgcctag

SEQ ID NO: 291159 - DNA, 894 bp, Morganella morganii
atgctgtcctggaagtggggtattacccgcataatctgtcccggggggatgaaacgtaatgaatcccgcaccattctggtgattgtaccggatatcggcgatccgttttttaccgatattattgtcggcatcgaggaaattgccgccaaacacggctatctggtcctgatcggcgactgccgttatcagcacaagccggaacacacctttgtgaatctgattgtcaccaaacaaattgacggcatggtgctgctcggctccgatgtgccgtttgacagccgccatgatgaacagcgccacttcccgccgatggtgatggctaacgaatttgccccggaactggagctgccgacggtgaatattgataacctgaccgctgcctttaatgccacccattacctgcagtcactcggacacacccgcatcgcctgtatttccgggccggaagagctgccgttgtgtcagtaccgtgtcgaagggtatattcaggccatgcgccgtatgggaatgccggtacgggacgagtatctggtgcgcggggatttcacccacgaaagcggcgcggaatgtgccgcacagctgctggcactgccggaaccgccgaccgcgattttctgtcacaacgatattatggcgatcggcgttctctgggcggccagaaaacaggggctgacactgccgcaggatctctcggttgtcggtttcgatgatttaccggctgcacaatactgttcgccgaccctgacgactatcgcacagccccgttatgaaatcggccgtcagtctttcttactgctgctggaacagttgcagggacacaccgtggcaaaaggttcgcgcctgctggattctgatttaatcatcagagaaagtgcctgcgcgcctaaaagctag

SEQ ID NO: 291160 - DNA, 174 bp, Morganella morganii
atggatacgctttacacccaaagagcaacagaaaaatacaatttaagacttcctaagcgagtgaaagagcgccttgaatcaagagcgaaggaagagggtttgtctcttaattcagcaataattcagcgcttggtatggagtctgaacaatgacaagagtatgcagcaccaataa

SEQ ID NO: 291161 - DNA, 297 bp, Morganella morganii
atggcgaaatacccaagtcaattgcaggataaatttaacctaagacttccggatggcatgaaagacgccattgcagcaagagcggaaaaaaatgggcgctccatgaactctgaaatcatccagattttagatgatgcgcttagcggtaattttcatgacgattcagcgcttgttgctggcatgctgacctacatgaaagtaaacaaaggcaaggacggcagcaccatcctgacaatggatcttgataaaatcagagatataagtgacgagcagcagaaaaaagacgctaacaaatag

SEQ ID NO: 291162 - DNA, 381 bp, Morganella morganii
atggtggtggtaatgaacaaatatcgtgacaaatcagactttgagattaataaggctgtggctgttgccataggagcaaagccatttccgcctgaacgaactgaattcaagcaatgtgaaatacccgggcttgaaaacgcaatcatcgtaaaaattaccggtgtgaaaacggggctattcgacccctgcaacaacccggcggacgcaatgccgattattattgagaatgaaataagcatgaattatatcgataagaatattggctggggtgcgcgccattttgatgaagaaaaaggcgaacttgaaatttacggtaaaaactattatcgcgcagctatgatttgtttcctgatgatgaaggatgcggagaatgaaagctga

SEQ ID NO: 291163 - DNA, 456 bp, Morganella morganii
atggctagcggtctggaaaagtacctcaatgatttagaaaaaaggctgaacgcaacgggggttgaggctggatttttccctgattcctcttatgaaaatgacggaacgtcagtcgccacggttgcatatgcaaatgaatacggtgttcccggaaataatcagccgccacgcccgtttttccgtggtgcgattgataagaacaaggatgagtgggtcgattccatctcgaacgggctggcttccggcttggatgcaaaaaccacgcttgaggttgttggcgcgaaagtgcaggcagatatcagagattctatttctaccctcatggaaccggcattaagccccgccacaataagagctcgcagaaccaggaaggtcaggagaaatgaatccaccaagccactgatagacacaggggttatgtatgaatcagtcagctatgaggtaacagatgattaa

SEQ ID NO: 291164 - DNA, 216 bp, Morganella morganii
atgacagagaaaacacagaagcttaagccctgcccgttttgcggagggaaaaatattaagtcattttggtttttcgccgacacggaaaatgaaaagcatgtaaggcagtcagcaatttactgtgatgattgccccggccaggtgatagcgattggattcaagcgtgacgcaatcgccgcctggaaccgcagagcaccacaatgtgagaaggagtag

SEQ ID NO: 291165 - DNA, 195 bp, Morganella morganii
atgaaatggattaagtgctcggaaaaaatgcccgcgaaaaacgaaatggtgtttttttacaatggtcaggtcgctcgcggacgttactgtggtgacgggtttgttcattctttttgtatcggaacggtgcgtaatgtcacgcattggatgccgtgtgatggatatccagatgagccacaaccaccggaggagtga

SEQ ID NO: 291166 - DNA, 195 bp, Morganella morganii
atgaagggtaagggaacagatttcaaaacactgatgatgattttccatcgtgagcgggtttctcggcttattagaggtataaaaaacggcaaggggttcgatgagtatcgtggcccaaaatacagatgtgagcgggtaataaacaaacttctggtgctggaatcacaggctaaattacgtagaggccaccaatga

SEQ ID NO: 291167 - DNA, 324 bp, Morganella morganii; identical to SEQ ID NO: 278079

SEQ ID NO: 291168 - DNA, 726 bp, Morganella morganii
atgagtatccaactttaccacgggtgctgttttgaagttctgccaacaatcgaaagcggtaccatcgatatggtttgcgctgacatcccatatggaacaacacaatgcaaatgggactccgtattaaacctgcagcgaatgtgggaagagctgtaccgggtggcaaaaccagaggctgcaatagtcctgttttcagcgcagccattcaccagtgtattggttgcaagcaatatcagagattggaaaacagaatggatatgggagaaaacccacgctacagggtttctgaatgcgaagagacaaccattaagggcgcatgaaaatatccaggtgttttacagaaagcctccggtgtacaacccacaaatgacgcatggtcatgaaagaaaaacgtcatcccgtggcgaaccaaagacggaagtttacggcactgcaacaaagatggtttcttatgattcaacatcaagatacccaagggatgtgcaaaaattcccaagcgataagcaaaaaaacggtggcctgcatccgacgcaaaaaccggtttcttttgttcaatatcttattgagacatacagcaaccaaggggaaaccgtattggatttcactatgggtagcggtacagcagcaatcgccagcaaaaatagcggccgacggttcattggcattgaacgagaactgcagtactacaaaatagccgagcagagggttaatgaatcaggaggctaa

SEQ ID NO: 291169 - DNA, 216 bp, Morganella morganii; identical to SEQ ID NO: 291164

SEQ ID NO: 291170 - DNA, 183 bp, Morganella morganii
atgaagcaggagcagataaaacgctgcaaacactgcggccacgataatgtgaaaatcggccgtgacatcaaggataaatttgccgcagcacatgtgtgtgttgatgagtacaaactgtgcgtagagcgcggcgacacatacaacgatgcaatcaggaattggaacgagaggttcggtaaatga

SEQ ID NO: 291171 - DNA, 171 bp, Morganella morganii
atgaaaactctgagatatttattccatgacagatgggttctggttaagtggcggagagataacaatcccgatgccgatttagccgataacattatcagatgttacaaactgacaggttggatggcagaagacgtcaggcgcatctgtagtaaaccatctccggaggagtga

SEQ ID NO: 291172 - DNA, 195 bp, Morganella morganii; identical to SEQ ID NO: 291165

SEQ ID NO: 291173 - DNA, 195 bp, Morganella morganii; identical to SEQ ID NO: 291166

SEQ ID NO: 291174 - DNA, 207 bp, Morganella morganii
atggaaccaacggattttgaaaagtggtgtgcgaaagagcttggctattcgcctgagtgggtcatgagcagacggagaaaagactttttcggtaccactgggtacaagttgagcgagattgaagtcagataccgtgcatggaatgccggagtacgcagcagactgccgtaccagacaccgccaaaaggagatgaagatgaagggtaa

SEQ ID NO: 291175 - DNA, 165 bp, Morganella morganii
atgactacagaacaactcgcagaattaaaacgcattgcactggaaaggcttgcagaggcagaaagggcggtgcattcctatgcaagagagtgcggaggatttcgtaggattgaaggttttgatgcattaaaaaaaatcagactggcgaagcaactttgccggtag

SEQ ID NO: 291176 - DNA, 315 bp, Morganella morganii
atgatcatgaagttcagtgctaaccgcagcatgtaccgaacggcagaggattatccgtggcaaaacaacgcctgttactggatggtcacgaagttacatgcactgagtcgtgcatctggactgaccgagtcagagctgaaaaaacgctgttctcaggaactggcggtgatggcatccagaatccgatccggcgaagaaattccggcaccacgtgtgcaaatccctaagctgcatatcccggtaccgaaggaaaaagcactggcgcatattgcagaattaaaggccaagttcggattccggacgcggacggcataa

SEQ ID NO: 291177 - DNA, 705 bp, Morganella morganii; identical to SEQ ID NO: 83604

SEQ ID NO: 291178 - DNA, 432 bp, Morganella morganii
atgaacttaactagttttttaaaaacaggaacctatttatcattaaaaataggttcgcatgaaaaagatgtatattctatcttctcaaaaaaagacttgggacagaaattttattttgataataaaaataagcatgaagggttttcgtattttcatgatgcattagagataatgataattaattcagtggtatactctataggatttgatttgtctcgttatcctgtgtttatactgaatgacctatctatatgtagtgaaaccagtttcgagcttataatgagatatcttgacgtagcagatatagaatggtcttttgaaaacaaatactgtaatggccgtgaattaacgattaaaacagaggggaacgttttacttggatgtatttatgataaaggaaattattggttatcaaaaatcaaggtattttaa

SEQ ID NO: 291179 - DNA, 393 bp, Morganella morganii
atgcattttttttttaggatatactcacacggagtaaataatgtaccgattattaagagtaacatattagcatcatggattttcttttctttcacctttgtgctcggtacagtaataattcaccggaaacaaacagaagtaagcaaaagattcagagcaatagtttatttggtatttccttatataatcagtgtggtggtatggtatttttttgactatcacggaactgaaacgcattatcagtctgtcagggaaagatcacaaagtattggtgatttttttatcttttcttttattgcacacggcatattttttatcccgctggtggcgtatacctgtgattttttgctgagttttatgttttgcagaaacaaaaaaacaccaccgggataa

SEQ ID NO: 291180 - DNA, 1221 bp, Morganella morganii
atgaaaaaaatgccactacaaacagatcttctcatttctgatgatgacgattcattagtcaatccatcagacattaaatatgaattatcatccaccatcggaaaattaattcaaaaagccacatacacagacttaattataggcgctgtaatagctatacttctgagttcaactttaatcactctctttggagggctaaataattctgatgattttatcgattcgctttatttcagttttgtgacatttacaacactaggttatggggacctaacccctgtcggatttgctcgtttcatatcagtaatacttacattaaatggattgctcttcacttcattattaatagggaaatttgcatccgaacggcagcaagccatgctccttttagtacacacaagcgactgccagagacgtattgatgccttttgtatagagctttataagctcaatgatgatctaatcagtgcatttaatgcgcagaatatcccgctaacacaatctatcttgaaaacaataacatcacgatttgaagctagctctaattatattattttccatgctaaccagtctgatttaacgggatttggaaatgattctgtactaatgaagttttaccatgtacttaatctgattcaggaaagctgccatgcaatccaaacacataagcaatcttttcctgacgaactaatatttaaccgtagtttagcacttgcaaaaagaagttgctcattaattagcattatgtataagttacatgtgcggtcaatgaaaaattatggttacaccgatgcgcttctcattaaagttaaaaacaacttaccttcaaaaaaacttaattttagaacactttctttcctagcctctgcttataaccacacaaaattatttatatataataagttagaaaaaatcacagccacaaaagaatataatgacaataatagcttgctggtgggaataaagaaaataagaacactgatgcaaaaaaggttgagtgaaattattgtatcacataaaactatcataaaccctaagcttctcaatgaggtgtatgatttaatgcctgaaggagataaaacaagttggggaaaaggtatacatagaagcatagctgctaatctgacaatttcaaacagactcgcacagtccgcgatagatactttaatcgcgcaaaagaaattacctcgctatccacgcagagactctaaaacaaaatag

SEQ ID NO: 291181 - DNA, 453 bp, Morganella morganii
atggctcgtaaaactacaataaagacagttgacaaaggtgaattaggtcatatttacccgattactgttatatatcaggtcggcaagaaaaattatattctggcagaagatgacggcggtaattatctgatcaagcctatttatgagaatggtacgtttggtgaaagtattactgtcaaaaacttcggtcgttattatgatatcatgcaggctgcttatgatgaccttactgccacaacttacctctgtgcagttagtttaaaaaataagacaatggaggtcttttcaaccacgaacggtggattagtcagtactcacgagtggtcttatgaaattgaagatctcaaaacattcaatttcttctttatctcaggccgtctgtatgtattccatggtggtgaagatgcaaatggtaagtatactgtaagatcaatcagttactcagaagtataa

SEQ ID NO: 291182 - DNA, 171 bp, Morganella morganii
atgccgcttattatgcggcatattctctttttttattttctgtatttaattcagctttatctttcctgttattattacttatttttccgcgactattattattccgtaaacccgagaggattccgatacccgtcagcgccggagcaggcgacaatgttacagactgaataa

SEQ ID NO: 291183 - DNA, 858 bp, Morganella morganii
atgctggcacatcagaccgccgggcgcggctcggacagttatcttcaggcgttgcgggataacccggtacagccgcctgccgccagtgatgtcaaccgcagctggcagtatgacaaagcctataatattactgccatcgatgaccatcgctggcgccgtatgcagtaccgctataatcagaatgaccaaattcagagtacgtccttcggcggtttataccctcagacagagcagtttgattacggcaccaacctgaatatccggcagcagacgctgataccgggggaggcgcagggtgccctgcatcagttatcgcagcaacagcaggcggggcgggtggtccggcgcaccacggcaaccggtcattttgattatcactacgatatcaacgggcggccggagcggaaaacagaacaccggaacggcttccgtccgcgtgagtggcgttaccagtgggacaccttaaatcagctcgcatcctgcttcaccccgcagggcgactgttggcgttacacgtatgatgccttcggccgccgcctgagcaaatatcaggtggtaaatacagaggaaccggtacatcttcagcacctgaaccagccgccggtggtccgtggccggcagtacctgtggtccggcaatcagatgattgagcgccggtctatgcggacggcacggtggcgtatgacgccggggttcagtggctgtatgagccgggcgcactggttccggcagcgcggtatgaaaaaggaaaactgcattacctggtcaccgaccatcagggcacaccgcgtgaaatctgtacgtggtaaagcgtctgctggggcacgtcagtctggcgtctacgatggaatacattga

SEQ ID NO: 291184 - DNA, 447 bp, Morganella morganii
atgaaaactctatccattatttttactgaacttatccccgagcaattagaagaaggcatcctgtatgtttcgatgccatattctacgatagctcatctatgtgcatgcggatgtaagaatgaggtaattactccactttctccacttgattggagtatgacttataatggaaaagaaatttcattacatccatctataggaaattggcaattcccatgtagatctcactattggataagaggcaataaagttgtctgggccggaaatatgcacaacgatataatagaaaacaatcgtagtgcaaacttagcattaaaaatgaagaaatctgaagcaaatattacttcacataattatactgaaactggcatgaacgataaacctaagcaaacctcttatttcaatcaattaatgaacacaattagagagtggttaggatataagtaa

SEQ ID NO: 291185 - DNA, 1194 bp, Morganella morganii
atgtcactcaaactgataaatcttaatccttgcctgaaaagacttcaggatgagggctatgaactcgaaattagagatggtttccttatggttcactcagtaccatatgtaaactccaataaagaggtcctgaaagggacccttatcactaatcttgttttagcatcccccgatgttgttggtaagcctaatacacaccaaatgtatttcaatggggaacatccctgccaccctgatggaagaatattaacagccattcagcacaccactccaaatcaaacacttgggaatggcatcatagggaatcactggttttccaataaaccaccgtcaggtagctatgatgattattatcatcaggttactagttacgttagggttattgagagccaagccaaagctattgatgaaaatgtttcagcgaaaacatttatttcgcattaccttactaatgatgaagacattttcacatatcaagatacagcttcagctcgtattggaactgttcagctcaacaatctaattgcaaatcagaaattagctattatcgggttgggtggaactggctcttatattttagatatgatatctaagacctgtgtaagtgaaatacacttatatgataaagaccaattccaacaacataactcatttcgtgctcctggagccgcatcgatagatgacttagaaaaaaaacaaacaaaatgtgattactattatcaaacgtatagtaatctgagaaatggagtcattcctcataatgaaatgctgtcagaaactaacttacatgaactaattaattatgattttatcttcataagcatagacagcgccacttcacgtaagatgatcactgattatctataccaacataaaatcagctttattgatgtaggtatgggattaagttttactgaagacaaaagcagtattttcggcacttgtcgttctacattatatacaaaagatatggatgatacgcctttaaaatcactgccaaccatatcaagagatgatgaagtatacagatcaaatattcagttggtagaattaaactgcctaaatgcagcatttgctgtcatacaatggaaaaaactatttggtttttattgtgacgacatgagttcgtatgaaatgacttacagtttagggttaaacaaaatagcaaataaggttatggagagagtagaatga

SEQ ID NO: 291186 - DNA, 663 bp, Morganella morganii
atgaaaaataaattcataaaaatcaatgacaaaattgttgagatcgatgatctcactcctacaggggctcaaatccttcttgtagctggtgtcaaagacattgttgagtatgttctgttccagaagctgaaaaatggcttgcttgaagagattcgtcctgaagaaaaaacgactctcgataaagaggaggttgaaacgttcctgatgtttaactccgatcgcacttatcgttttacacttaatggcaaaatgtttgattggggagcaccaagcttaacaggggccacagtaaaatctctcgcagagtgtgattttgacagtaatgacgtatggcttgaaatgaaaaatgagaaagacaaactcattactgaccatgaacatattgaccttactcagccaaatgttgagcgtctttatacccaggaaaccagtattaacatcattgtcaatgcaaaaatgcgggtcgtaaatcgccgcgtgattagctactgggatgttgttcatctggcatatgaacatgccgaaaacaaggaaacatcaatctattctgtagattacgctaaagggccaattagcaatccagaaggctcaatggttgatggtcaatatgttcaattaaccgacgggatgattttttatgtcactcaaactgataaatcttaa

SEQ ID NO: 291187 - DNA, 324 bp, Morganella morganii
atgagttcgacattgggtaataaaatcaatgcaaggcgtagggagttgaaatttagtattgataaacttgctgaattgtctggaacaagtaaaagctatatttgggagttagaaaatagggaaagctctaacccttcagctgaaaagatagaaaatatagcaaaagcattaggtgtgacacctcaatttttactcgaaagtaaaagtgctaatcctgatgaggatgtaatagatgaggcattctttaggaaatataaaggtctttcagatagcgataagaaaaaagtgaggaagttaatagatgtctgggatgacgaggattga

SEQ ID NO: 291188 - DNA, 816 bp, Morganella morganii
atgaagccaaaggcagaggcaaataaattatcaaagatcctgagcatttttttgggagaggataggtttcctgttgatgttgaatctttagcgctagagtattctaaagaaacttctcctagtgatcctatagtgaaaataaaaaagagtgatgttgataattttgaaggtgctttaattaaacacccaaataaaagtcaatggatgattttatataaagaaaatattcgttcagaaggtcgtaaaagatttacgattgcacatgagttagggcactacatgttgcatcgtgctgaaatggatgaatttttatgtacatctatagttggtgaacaatctctatcagtccgcgatatagaaaatgaggcggatacatttgcatcatatcttttaatgcctttggacgattgtagaaaacaaacatctcatcagcaatttagtatcgaattacttattcactgcgccaatagatataatgtatctcttatggctgcagcgttgaaattgaaggaaattcttccaaagcgaattgtagttgtcgcagctagggatggtatgattttatgggcttcctctaaccaaaaagcatataaaagcgaagtatatatcaaaacaaaaggtgttccacctatatcaattccagagggttcattaatgtcctcattatcaacgaatcctgttggtgaaagtaaaaaacagccagcaaatttatggtttcctgatgaaccgaaagatttacatttaattgaacatgtgtttgttgcaactgaaggatatgactataccctgggtgtgcttgaacttgaaagtgaatga

SEQ ID NO: 291189 - DNA, 321 bp, Morganella morganii
atgattatcgataaagaatatgcacttgtaaatgcaacagcaagacttaacactgacctgagagattatgaaagtgaaataaacaaggctgccagcgtaacgtttggtaatgaccttactggcatagtcatttatcagttcagttttatcattaaagtcagaacagatggtgagaagataaagcacggtcttcttgttaactttggtaaaaacatagcaagacaggtttcatctctttgtgcatctgcgatgcgattctacccgaatgaaagacataaaccgagccgtcagctgtttagatgcataaataaaaattcgtga

SEQ ID NO: 291190 - DNA, 714 bp, Morganella morganii
atgacgctgataacacaagaaaacgaacatgacagactggcaacccgcctctccatcatcctgagccgtttgtttcagggagaaaggctgcatatcggaacgctggcagaggaatttggagtgacgacgcgcacactacgacgagatttcaacgtccgcctgacgtatcttgatattgaacagaacaacggcgtatatcagcttgcctcacattactttcgccgccgcacggaacgggatatgaagatactggcgagactactgcatcttgaccgtctgctacccgcgatggatgccaaactgctgagtcttctgcttgacggggagcacccttcaccctacaggattatgctaccggagccgcgccagaaaccaacgctgttcggtgatttcagcagactaaccctcgccatacttaaccagaccaaggtgagtatcagaaccgacgaaaacgtcagccataccgttcatccctatcgtctgctttgcagccatgcagagtggtttcttgccggatgtgctttatcgggagtgttcgttatttccctgtcccgaatcaggctggtagaggttataccggatacaacttttgagatcgataacacactcatttcgctgattgaacagtctgactttatggaagcgttaccccacatgaacattattcatcagataatggattacggggcaaaacaaccgaataatcgcaattaa

SEQ ID NO: 291191 - DNA, 750 bp, Morganella morganii
atggctacctaccgacacgaccccgaccttgagtttctgcgccactgtcatcgtgacgatctggatttactggtttctgtgcttatctgcgatccgaaagacggactggcacgcatcacggaaacgctgacttacgatcctcagtataaaaaacacaagcccaaccacccgcactactgggatgccattgctgccgaggttcagacatttggtgcaaacagcttcgccacgctgctccgcaggggtaaaggggtgctgtaccgggaaattcttaccgatgcctgcgataaaatgaaggtgaactacaacagcaaatccagcgtcgagacgattgaaatgaatctgctcatgaagatccttgagaaaagtcttgagaagatgacgcctcaccagttaaagaccgtggcggaagagttgcagacgggctacagcaatcccacgccggagctgctgaccatggcaatccaggcaggaataaaaacatccgggtttgcggcctatcagatggcgcttgtggtcacaaatggcgtggcgaaggccctgctaggcagagggctgacgttcgcaggaaatgccatgctgacgcggaccatgggcgcatttgccggccccgtgggctgggtgctcagttctctctggctgatgatagatttagccggtcccgcataccgggtcacgatcccatcctgcatctttattgcctacatgcgccagaagcatctttattcacctgagaatactgacgtttag

SEQ ID NO: 291192 - DNA, 384 bp, Morganella morganii
atgaaaatttctaaactgttaaccgccacacttctgctttcagccttcagccacagcgcgtttgccgacgagcaggccgacgctcagatgataaccaactcgaccttctgcgcgatgtactccacccgcctgacccagaccagcgacagtggccttcaggtaaaaggcgttaatctcaatgcccgcttcaacggaccggtattcaacagggtgcttcaggtgatgaacaaaacctatggcagaagctggctcgaatcaaatgcccgtaagggcagcatgaccgccatgcagctttcgcagtcggagctgctctataacccggagtatgcccggcagtgcgatgcctttgcggataaagtggaaaaggaatggcgcggaaagtaa

SEQ ID NO: 291193 - DNA, 1464 bp, Morganella morganii
atgtccagcccgaaacgcttccgttttactaatcagctcattaaatccctgccccctaacacatcagattcacgcagcaccgatgccgaatacagcgataccgagatttctggcctgaagtgtctggtcagcaaaggcgaaggacgtaaaaaatttttgctccgctacctctatcatggacgaaaacgcgccatagctattggtcactggcctgaggtggatgtcaccttagcccgtaagatttctatggagcataaacgctcacttgccaccggaactgaccctaagcaggaacgtgaaaacaagagacaagaaatgacattcgatgaactctttaaccagcattatctggtatgggcaaaatctgctaaacgtagctggggaaaggatttccagcgctaccgggatcatatccgtcccgccttaggtcagatgctactgagtgatatcacaccagccagcattctccgcctccagcagacgttaagcatttcactgtcagcagcaacctgtaatcgtgtcatcgtactgattaaagcggtgtttacctgggctggaaggcaaggcattacctctatccatccggcaagagcggtacagcttctcagggagaacaacgcccggcagcgctatttcaccgaggatgaaattcgtcgtatttttctctccgccgatgatgatacaagccccgtcgctgcatgctatgtcaaactgctgttactgaccggccttcgtcgtgatgagctgcgtctgggaaggtgggagcatgttgacccggttaaacgcaccctgtggctcccggaaaccaagaatggctatggacggattgttcatcttaactcactggcgatggacgtaatcagaacgctgccaacacagcgtggaaatccgtggttgtttatcggtaaaaagcaaggaatgccgctgaacaatccggtcaaagcctttcaacgtatcgtgcgtcgggcgggaattttcgacaaagaagtgtgtattcacacctgccgccattcggttgcagcgctcatcgtttcccatggtggaacgctgtatgacgttcaggcgcagttaggtcatcgcagtagtcagtcatcacagcgttatgcgcaccttcatcctcagcgcttacagaacaccagccaacttctggcggaaaggataccggcgattcgtgccctaatatctggcttgccagacacctcgattcttttcagaaaggggccgatggcgcgtatggcaacgatgaaggttaatcgtcgcaggcaacacactaccggacagggagaacggcttatccggctgaccatggtgctgttttacggtcagacaatatctgttcgctatatcacccgacgatttgacgtctctccccgtacggcaagacgggacctcacccatctggcctttgtgctcgaatccgctggccctcaccgctggcgactggatccctcgctgaaaccctga

SEQ ID NO: 291194 - DNA, 1731 bp, Morganella morganii
atggcagaacaaaaattcataagtgagttatttttagaaaataatcaattcatcctggttggtttaactggaagaactggttcaggttgtactactacagcaaatatattagaaagtaaaagcattgcctttcctgaattaagtggtttgagtggtttttataagggtttagataaaaggcgttactctatagttaaaaagtttgctgaagagcattgggagaatttttattcgataaaggtcagtgaccttatatcaatatacttactattattacctgctgtaaagttaactagtttcatatattcttgcggggagaatatagctaaaaaatcttgcgagtctttagtaagaaaaggtgttttatcaaaaagttttttaaaagaaaactatagtgatgtcataaaacaacttttagatcatcactctgaaattgatttcagtgatccaaaaataacacgttcattcatcaggattctacagctggttagaaaatttacgagagaccttaaggctgaattaaaccagttagaatccggtttatatgtctcggtttatcagtctgcgggtaaatcaattagacgaattggcaaggttgatgcagaatatgaaagcaaagacttcattccaagctctgttttccatttgccggagaccattaatagagttattaagtcaataaggaaggtgaaaaatgagagagcatacgtcgttattgatgcaataagaaatccctatgaagctaagttctttaaagatcgatatgcagcatttcatttagtttcaattaatgcgccggatgaacacagaacaagatacttacaaaaactgcataaattttcaccggagcaaattaaaaaaattgatgacgaagagtcgggtaaaggagatagtgaatataagcacttaacgaatccaaatgtaaaaaaatgcatagaaatatctgatatacatttattcaacccaaagaatgaatatgataataacaatgtgttaaaagcccaaatcgcatggtatatagcattaatgcaacaccctggattaatatcccctacatcaatggaaagggtcatgcaagtcgcatatacagtaaaattaaactctggttgtatttcaaggcaggtgggtgcagttgttgccgatagcgataactcaataaaatcagttggttggaatgatgttgctcaaggacaggttccttgtgctatgaggtcaattgatggattaataaatgattttcactcagaaacatatagccattatgaaagaaataacgaaaaatttagagagaaggcgcgagagttctatgatatttttaaaccagtaattcagcaatcaagttcttttaaaggaagaaatatttcatattgttttaaagatatacataacagtatagataataaaagtaaccaagtgcatactcgtgctttgcatgcagaagagaatgctttcttacaattagcaaaatatggtgggatcggtattgttggcgggaagttatatactactgcgagcccatgtgaattatgtgcaaaaaaagcatatcaacttggtatttcagaggttgtctttattgatccttatccggggataacgcaagaccatattattaacattggaactatgccgcctaagttaatacagtttagaggcgctattggtaaagcatatcatcgactttatgaacagattatacctataaaagatgagctggattacatgttaaaatag

SEQ ID NO: 291195 - DNA, 1674 bp, Morganella morganii
atgatacagaagaataaatttcgtgtttttgtgggtgagggtccgatagataactcaggggatctgatagtttttaaagataaagataagtggaacgattttaccttttatacaaggtattcctgcaatatatatataaacgctgtgctaaggcatagcatggatgtctttgtaggggtttatgattcaaaaaacaaagcaactgggctaggtaatataatgtctggcgcagtctctatggaactaaactatacgaaaaacaatatacgttttttttctatgcttagagatattaaggagtatagagctctggttagagagttttctgtatatgaggcgaatgaaattttagatgcaatgaatgacttagtgtatctaaaggagaatatgaaaaacatacctgacatggagaaatctctttacacgagcgcaattagaactgatgtttttaaaaagtcgttcattcggcattcggcttcttttttctcctttaaatcatccggtaaaattctcaggggtttatctttcgaagagttagatagaatatctaattcaatacagatgcaatttaaaatgaaaggttttaatggattgcataaaatagatttaaaatttaacattaaatctattttgcctaagagaatcaatgtattgattggtaagaatggtttgggcaaaagtcaaacgctaagacaatttgtgctgttagcgaatgaaaaaaataatcataccaaaatgaatgatcaaaactatgtttttgtcgatccaaaagaaagaaactcacggcctgtgattaatcgagtaattgcttttgtgatgcctggagatggtgtcgatgcattcccagatgagatggatattgagaatgttgattataaaaaaatagtactgacaagaaatcatcatgaaaaaaaactaaatattggagaggaattagtagcactggttagaaatgaaaactccattgctgacattgcaagatgggatatcttcctaagtgccattgaaaaagcaatgccattaaattatctttgccttaatactacagatggagtgtctgaaaatctatgcacactttcaggaaagggattgaatgaggagcgacaactacttttatgggatagcattcaaaatgcttcagatccttattttaattttgataacaaaaattatgatctaagctcagggcagttagcttattttaaatttgcgcttgaagcatgtcagcatattgataatggtacttatgtcttgattgatgaacctgaaacacacatgcatccgaattacatttctgattttatgtcactgcttgatgatattcttgaaaaaacagggtcattggctattgttgccactcattcaccatatatcgtaagagaagtatcaagagagcaagttaatgtattcagagttaataaagaagatggttttgaaatattgaaacctcgccttaagacatttggagcaaatataaatgacatatctgattttgtttttgaagatgatttacttaataaactatcgggtaagattcttaaaaaatccaaaaaagaagatataaaatattccgacctaaaaaagctatatggaaatgagttgccagtagagatgctacattaccttaaaaaatcattggaaggtgacagggatgaagaaattacaaccgcctaa

SEQ ID NO: 291196 - DNA, 888 bp, Morganella morganii
atgaagaaattacaaccgcctaaggtgtatgatttggcaattttgaaggaaataaaaaataatgcaggatgggccgccaatccctatataaatggaagttttaaatcaatgagagcagactatataacttatagacgaaataaaggttctgctttctttgtgaatcaaatgattatgggcgctagccttaaagccaaactgatatatcattttgataatccaagagctgaattatcctacattgacaatataaggtatagattgtctccgaattgctgcccaacatgcgggggcgaagggacattttcggtagaccattatctgcctaaagctggttttccaaatctgacactttattcattaaatctcgttccggcgtgcgattgtaattataaacgaagttccgtagtaagaggtgcaacagcgaatgaaacggctatacacccgtatttcgatgatggacttgatgaaaggctcatgaaggcggaaatcataggagatctggaagagggggagattgatgttaattttgtacctttgccttgccagcggattcatgttgataaaataagattccatatagaacacgtgataaacagaacaagagcaaaaacatggatgattggccgctggtcaactctcgtcaataatactaatactattgttacaacaatacctgaacaggataccattcttactaacgcttctctgaaaaattttattgatagaaatattgcggctcatgatgatgagcatgaaacaccaaataactggaagtcgatgtttttatatgggattagagaatctaatacagtcatagattggttggtaaataaccataataatcgagtgcgaggactatcagaagctttaacttttgaagaataa

SEQ ID NO: 291197 - DNA, 825 bp, Morganella morganii
atgaatactgaccttgctttccgctatgcaaatgctgaaacatttttaaaaatgcttgaaagccaagaattatggtttaccgatctccggaacatgaatgattgggatgagtattctgctggttataggattgctaagaatgtgataataaatgaatttccaaaccacattcaggtgctagaaaacatctcacgagatcagatgcgcgacgatttcatgatgcttatttgttctcttacaagtgatggagattgtttgagcatgtggcgtgggtatggggataacggtaaaggtgctgccgttggttacagcacatttgagatagagaatcatcatctctttaatcggtatctacaaaagctatcccctattcaaggtaaagctaagttttatcccgttatctattcagaagaagaacttaaagaccaaataagatcttacgagcgtagattattcacacttcgtgatgatattccacaacatatggttcatgatatcttgatatttaagtctcgtatgtttggagatctacttacaaaactatgcactttatataagaatgatttttttaaagatgaaagagaaattagaggatttattgaaataaacaatgtcgtagatccatacgatatgggtaagcgcaatactgattttggtgatgcacactaccataagattagttcgtccttccaaggtattccatcaatcaaagaagttgtactgggacctttatatgaggaatctgatgaatacgttcgttcaaaattggatgaaatgggattaagtggtgtaaatattagacgctccagaggtacatatcgttga

SEQ ID NO: 291198 - DNA, 408 bp, Morganella morganii
atggactggagtgttgttgtgacatcggttttggctggtgggatcgttggacagatatttaccgtcttttgcactaattacctaacgaaaaagcgagagtattataagtggcgtttggtagagaggcataaagctataactggacttttcgatattctcacatctaatccccatgacttgaacgagctatctcaatggtctcataaagttcgaaatgcatcgatgaaaatccatttattatatagagatggaacagctcctgaaaaagttgatcaggcactcgaggttgtatttaagctggtacagaagagaaaagatggcttagatgattcgaattggtctttgcacttcaaggaatcggtttcaaatttgagaaaagaattatcaaacaatctagatgctgattga

SEQ ID NO: 291199 - DNA, 1302 bp, Morganella morganii
atgaatgatagagttgacagttttagctctgagcctaatgctaaaaagctaatccacacaaagcagggaaaggcttggttggagcaatttgaactagcagatagagaggttgctatttttgtagcgaataaactaacgctagtttctcatactgaatttgagcgaaatttacttaaaactcttgaaaagactgcttcaagttatgctggtcggataggtttttttgcggtacgcgagttagagaaaaaacaaccacaacaaagtacattaacttgtgaggtcattccattttattcacaagttaatagtgatgatggtatttcagttaatgctctgtcgtcttcacctgatcaaggtagcgaagctcgtatagcacagattataaggcagctttgtaagagacaccctaataagtacctcaatcatccaacactagaatcattacgcgataataaatgtgatgcaatcatctttgttgatgactttattggttcaggaagtcgcgtgagagaatttcttacaagcttctggattgaaccaagcgttgtttcttggctttcaggtaagcaaatgaaatttcacgtagtggcgtactctggtatggagcaaggtatagcaaatgttgcgcgacatagatctaatccatcagtaaatatttacagagacgcacccacttacgattctttattatggaataagagtaaaaaagaaaaagtcaaaaatatttttagcaaatatgggcgaattgctaaccgaaaacggaaaagcatgtggcttggttacaaggaaggtatgggtgcaatagtgtttgaacacgggtgccccaacaatacacccgcaatattttgggagcctgatttccaaggtagtggttggaaggggctatttcctaatagggctatttcttccgaagttgcttcggtttttcctccagaaattgtctcaggagattcaatagaaatcctgatggaagttggtcaagctaaacttgctaagtctggtttattaagcagacgaggagaaattgggaaaatatttttgacggcgctggctttaatagcaaaaggacaaagaaagcgctctacactttcttacgctacagggttaaatgttgatgactgcgaacgtttgattgagaagtgtatccgatgcggttttattacggttaacagaaagctaactccaagaggagttgctgagcttaatgctgtaaggaaatggcgtgttaggaacttcaaaccacttgataaaggaacagattattattatcctgttcaattgagagagaccactaatgattag

SEQ ID NO: 291200 - DNA, 183 bp, Morganella morganii
atgattagtgtttacaagcaactaagttgcggtgcttttacaatgtatgagtactggggtaaggatttcctgaacctcaaggaaaagcggacgcttgactggagacggagcactccgccttctgcccgcgtacgccttaggtcgccagagcgctccgtcgcctgcggcgacgatttggagtaa

SEQ ID NO: 291201 - DNA, 1131 bp, Morganella morganii
atgtggtctcctcataactacaaacaacaaggtctaaatcaaggactctcagatgagttgcttgaaagagctatttctcaaagcgaagacgttatagaacgaaaccatgacctcccctctatattatctcttaagcacttgtctgttcgaacatgtactagtcaccagaaactgacaaaatttgtagcgcgagaagagttttattatgaaaaattctcaataaaaaaacgctctggtggtcggaggtttatttatatacccgaccctactttattgcatgttcaacgctggattaatgaattcatattaaagccagttccggtacatcaggctagtttcgcatttaatccagggagttcgataaaaaagtgcgcagctaaacactgtggtgctaattggttaattaagttagatattactgacttttttgaatcaatatcagaaattcaagtgtttcgactttttcgtgaatttgggtatcagccattagtagcttttcaactagcgagaatttgtacaataactactacagaaatgagcccaagaagccaactcaataactggaaagtaagaagtaagaataaaaatatacctaagtacaaccaaaggatattgggttatttgccgcaaggggctgctactagtcctataatctcaaacttagtaatgagaaaccttgatagtgagttttctaaaattgccagaaaatataagctagtttatacaaggtatagtgatgatattattttttctacgagagcaaatacgtttaaacgagactctggaagaatactcattgctgaagtctacaatttgctgaacctatctggctataaacctcaatatcggaaaactaaaataatccctcctagcgctaaaaaggttgtattgggattaaacgtagatggttctgctcctcgtcttcaaaaagaatttaaggataatattcgtcaacacttttactacatcgagactttgggacttagtgagcatattgtgaatcgcggctttgatacggtctggggattcaagtgccacctaaagggattgatagactatgccaattcaattgagccggaatatgcagggaagttaatcatcaagtttaataatattgactggcctgtttag

SEQ ID NO: 291202 - DNA, 1221 bp, Morganella morganii
atgtcctcatttaatttagatttagagacaaatgacctaactgttaaggatgatttttttgttgaagatgatggttttagtgaaaatagtgaagataatcgttggactgaacagcaaaagagagaggtcggcaatgctgtagtattttctacggattggactactgaaacaataatcaatcaaatttataaaggtaatatagaacttaaccctaattttcaacgaagagatgcttggaccactaaagaaaagagtcgttttatcgagtcactaatgcttggtttccccatacctcctatagtgctggctgtcaataacttagatagaggtaaatatattgttcttgatggaaaacaaagattattgtcactttatagttttttttccaatgaccgagaacgagttccaccattaaagttgactgggcttaaagtaaaagatgagtttaacaatctaacctttgagaaaatgcagacattacctgattgcacgaatgatattgcattcttagagaatcagcccattcgaacaatcgtaataaaaaactatcctcatgaatcttttttatatgaggtttttttaaggttaaataccggaagtaagccactctctcctcaggaattacgtcaagcattacatccaggcccattcacttcttatttggatgttagggcggcaaatagttatgtactaagagatatattaaacaggaaaactccagattttcgtatgcgagatgttgaattgctattacgagagttatcttatgcgtttttccttaaagagtatgatggtgatttgaagagctttcttgacaatacgtgtaagaccttgaataaaaattgggcagcagttaaggataaggttgagaagtattgtgatgaatttgaaaaagctcatgagtttactaagtctatttttaataaagatgcatatagaaaatatttaaaaggcaactttgtgaataggtttaatcgaggaattctagattcgatgattttttattttattgagagtgatattagagactatctcaaagataagaaggatgatgtttataacgcatttattgaattatgtaaaacagactcagactatatggattcaattgaatcttcaacaaaaacaattccatcaacccactacagaatagtttgctggggttttattctaaaaaaaatgggggctcctgttaatatacctgaattggatggtcagtaa

SEQ ID NO: 291203 - DNA, 786 bp, Morganella morganii
atggaaaatatcggttcaagaattcaaattgatgtgatgaataagagggacatatcatctcgctcatcattatatagagactatatctcgaggttaattgagctagaaaataaattcgtgtcagaaaatattataattgatgctcaacaagaaccacattatgataatgatccaactaatatattcgatcaagatcacttacgttcatttcgattactctgtcacgcagagacagaatttctacttgaaaatttagctgccagactaagtgatgctgaatataagagttggaaagatgccggtgttccaagtgatatagttgtaaacatcgtagcgtgtcattactctggatgggataaacttgactgtagtgtcaaagaatataaacccctatcagatcaacagattaaaaaatatgatggattagtaacattagctgctacagaaaaagcttatggagcatacaaatataatttgattcataaccatggagtgaaagaagataattttaggaatatgtttatgccactagggatattagaacgaaatcatcaggaattaattcgtaatttggagagttttggctcattgcgtgggttagtagctcattctggaaaagctgttaaacatcaaataaatcccatagatgaaaagaatctcataattgagatagcaattggtatttattttttggatgaagaaattgacaatagactaagcgatcaaggcaatgcaatgcttcgtagattgggtgaaatgacaaagcaacaaactcaaagtgcataa

SEQ ID NO: 291204 - DNA, 432 bp, Morganella morganii
atgcagcgcgatatacagaaaatacttttgcactggggcggctgggttgttcacgggcgtactggcctcggctgggcatcggtagccgccggatttaaaggattggtgagccgcacccgtatctgtaaattgtcgtgctgtgatgaggacgggttaatcatcgatagctgtgttgcaaggctgcgcactgcgggcatggtacaggagtgtgactttattgaatgctattactccaaaggtatgtcaaaacgtgccataggccgtaaatatcgtctgaatgagggcgaggtacgccgacgtatggccgtggcggaaagctttattctgggctgtctggctatgtccggggagacgctggaacttgatttaatctgcggcttttacaaccaccagcagagcgtacagtcgcaaaacataccggcgcacagataa

SEQ ID NO: 291205 - DNA, 465 bp, Morganella morganii
atgtcaaaggtactttattgttctttttgcggtaaatcaaaagatgaaacgccggtgttaattgccgggccaagtgtttatatctgcggtgaatgtatcggtctgtgcaatgagattgtggaagaaaaacagaatctggccggaattgagcaattggataagaatgcagcggaaatataccgtttcatcagcagatctgccggtggagtgtttaatcaggctgtactttgcccggattcattactgcggggctatacggggcttgatgccggtcagatcgatacggccttaaaattgcttaccgaacgccggatgataaaggtgatcccgtacgggcgcgcggctaaattgtatttgctggatggtggttcttctgaaattaaatttgatgaacaaatcggggtatacagcgtgaaggccaatgtactggtatcgccggacccgaagataaaactatttccgtaa

SEQ ID NO: 291206 - DNA, 564 bp, Morganella morganii
atgggaaaggcacaggcaatgtaccagattaaaatcaccctgaacgacacgaaaccacctgtatggcggcgtttgatagtgcctgaggcgatcgcattaaacgaactccatcacgtcatacaaattgctatggggtggggtaactatcatttgtactgctttgagaagggaaacctccgctatggtgaggaattggaagagtttttcgattcaagtttaaaagacagtaccggtgtcccgcttaccatgctgctccgcaaagaaaaagataaatgtctgtatgtgtatgacttcggggattattgggagcactctgtcttacttgaaaaaatattaccggccaccagcgatatttacccggttcctgtctgcgtgaaaggtaagggcacctgtccggttgaggattccggcggtgtttggggctacagtcaaatgctggaagaagcgtgttccccggataatccggacagggcggagatccaacggtatcttatggctgatattgatacccgtgagtacaatctggacgctatcaaccagcggctcagaaaattctatttgtag

SEQ ID NO: 291207 - DNA, 351 bp, Morganella morganii
atggtttctctcgatctccgaaacgccaaactacgttgtacggctggtacactggatatactggggcatctcgttatatggcttttactgtccattatcacgcttgggctggcgatgatggtgtttccgtattacctcataaaatttatcctgaacaatactgaggttatcgataaacgggataatactaaaatttgccgtctcaaatgtgaaataagcctttctggtatgatcggctacatcatactatggacaattctgtcgataatcacattcgggattttgtactttgtatttttatacaaggtttatgctcactgcctggataaaacaacatttactgagctttga

SEQ ID NO: 291208 - DNA, 699 bp, Morganella morganii
atggcaactgaaccgaaaaagctgatatacccgtttgagaacccttctgttaccgcggggctggcggctatcaatgcaacggcaccgccgtttacagttgaagcgaagcacctcagtacatggttcaaagaagggattattgcacgttatattctggtggatgacatcagagaattatggagtcgtgaagggttcggggctttattcgaacaggtatacggagaagctaaaaactatacgctgattgcgagttgcaggactgatatggagtggactcgcgtagaagaaaatgagatcccgacctacggagttttttgcattaattccgctgaattgctttatacaccgcacaccgaggaaagcagagcaggtgaaagcgtattttttcacgacgcattgtctgttgagatacccttgcctgaaccggttttaccccgttatgaggctcagaagatttacgctttaatccacggtaagcccactgatgataccgaagctcccagggaaagacactcagggaaaaaagaccgtattattgttgacctgctgagtcatgcagggttcacggaagacgattttaagggatcgattgccgcattccagaaaaaagccgcgcgattggggctgtgcaaagatttagtttctgctgataaaaacacgatagctaaattgctgaaaagcacaggaaagcgtgagtga

SEQ ID NO: 291209 - DNA, 204 bp, Morganella morganii
atgtctgaatcacttcttagattacctgaggttatccgccgtaccggactggcgagatccactatctacaaacgtgctgctgaaggcacatttcctaaaccggtaaaaattggtctgcggggttcggcttttattgaaagcgaagtcgagcagtggatagaacagcgcattgtcggatctcgtggtgaggtgcagccatgctga

SEQ ID NO: 291210 - DNA, 558 bp, Morganella morganii
atgctgatgcacaatacccctgcccgtaatatttaccggcttaccgataaaaagggcttgcctgtgcggggtgagcttggctatagtgatccggcaccggcaaaatccggtgtcaggcgtggaaacctgaatatacaaacggcgacacatgacgcgccccgcgtctttttttgtgtccgtgcctgcgcacacctgcaaaatacggtatcgtgccgttcagattcaatggtggcgctggcagggcagcctccgggctggctggtttccgtttgtgccagtatttccacccctgtcagcgtcaccacccctaaagagcgtggaaactcaggtggtgacttcgtgttaatacaaacggagatcatcgttatgatggctatccctgcccgtactcaattcaaattcctttttctggcggtaaaacgcgcagacagtacagatattccccatcgtatcgaaaccactgcaccggacgaacaggccgcacgcttaatgctggtggcggattacattcttgcctttgccggtcgcgtccctgctcaggaggtggctcatgtctga

SEQ ID NO: 291211 - DNA, 198 bp, Morganella morganii
atgtctgatcatccagtctttacaaccccggccgatattatccgcccgatagccgcagcgttagaaacggctcagtttctggcgttagatcctcaggcgaaagatctcgccagtgacttaatcgcatgggcgcaggaaaccgccgcgcttatggctgccaatatgcagaatgagaaaccggaggctgaacatgcgtaa

SEQ ID NO: 291212 - DNA, 213 bp, Morganella morganii
atgcgtaaaagtcgttcttctgctgatttatttcagattcaggtaaaacagatgggaaatccggtggtacatgaggggttcagctacacagaacgtggggatgtcactcccgataccggtaataaccgccgtaccagacgcatgattaaatctatgctgcgtaaggataaagccctggcgataaagtccggcagtcgaggggataaccaataa

SEQ ID NO: 291213 - DNA, 2397 bp, Morganella morganii
atggaagtgaaattcacctttgcgcggggagatgcgcgtctccccgatgtgttaacgaaaagcagttttaaagcgttcagcgaatttattatagccaaaacggttaaaattgctatttcaccggatatgacgacagaccagaagaaggcagagaaagcaaaactcttctggtttgcggctccgctgaaaacgaccggcatacggcgcattaaaaagaacatggcagcgtgtctgttcggctgcggtgatattgacgagagcacaccgggagcaatagcggcattaatgccggtgttatcgcgctattccatgctcgtttaccagaccgccagctatacgcctgaaaacccgcgcatccgctttgtgtgcgagttttcccggctggtggagccgtcagaacgtgagtctgtctgtgacgcagtggaagccctgctgatgcaggcagcgggatttaccctgcacagcgtgaccggacggaaaaaagcccgctgggtaaagggtgaggattacctgatttgtgatcgtggggtttacagcgaacaaagttacctgtactgccctgatgccggtgcggaatgccacagctacgaaggtgcagtgattgacgttgatacgttacccctgcccgtactcccggaaacagagcgtaatgcccgcggcacgaaaccggcagactccggggacagtaccggctttgatgatctgaccgagccggacgagcaccttataacggatttacgcagtgcgttgtggcaccctgatatgctgcggcaggcacgaagtgatcacccgtggataaccaacggctaccggctggcctcgctgaaaggtacggtatttgaggatgaagcccgtgcactgtggattgactggtcgttaacagcggcggattcctacccggatgagcaactggacgatgtggccgccgcacgctgggataacgatctggttccggacggcagcagttaccggggcatttttgcagatgctcagaaatccggctggacaaatccggcagccctgcgcctcagggcgcagaatatcagcaaaatggcaccgagtacccgcggcgagttactggcgcagcattacggggatgtttgcttaaaggctgacggtaacatggtttaccggtataccgggcagggatggacgtttatccctgaggctgagttacgccgccgcctttctcagatattcagggataacaatgcgccgtttaacccgtatgagataaaaagcgcgattgagacaatgcagatgcaactgccgttaatgggggaaaccccgcgtaacctgatcggctttgctaatggtgtgtacgagctggaagccaaagtattccggccacaccggaaagaggactggctgacctgtcataatggcgttatgtacacgccgccggcggacggggaaaacctgaaagagcatgctcctaacttctaccgctggctgtctcattctgcgggtggcaatgcccggaaaatggagcgtatcaacgccgcgctgttcatggtactggcgaaccgttacgactggcagctttttattgaagtgaccggcaccggcggcagcgggaaaagtgtgtttaccggtatcgcccgtttactggccggtgaggaaaataccaccagcggcaccattcaggatatggacacggcgcgggaacgtgcgtcatttgtcggaaagagtcttatcacactgcccgaccaagcgggttacaccggctcaggtgcggggataaaagcaattacgggcggggatgtggtgcggattgacccgaaacacattaaaccgtttgaaactgtcatccgggcggtggtcattgccacaaataacgaaccgatgcgctttactgagcgtcagggcggcatatcccggcggcgggttattttcccgttcacccatgcggttgatgtaaatgaacgggatccggcactggcggagaagataaaagcagaactgcccgtcattgtgcggcatttgctggcaacatttgaaaacccgcaggatgcggaaaggctgttaaccgagcagcgggattctgcggaagccttacaggttaaaaacgaaaatgacccgatgtatggtttttgttcccagcttgtcgggctgcctgatgcgaccggtatgggcatgggggatagacgtaaagcctatgatccgtggctttatctttacccggcttatattgcctatctcgatgcctacgggttccagcgcattccgacactgaataaattcaaaggtgatttgaccgatacccttaaagcgtttggggtgaatttacggagcacacgaacagaaaaaggattcaggtacaatgtgaatctggctgatgatgcgaaagaatggatgtacggagacgatgaggaggagccgccgactgccccctga

SEQ ID NO: 291214 - DNA, 153 bp, Morganella morganii
atgaaaaataattatttaatattaatgggttacggtgaaaatgcacacctgtacacgtatgtataccttgaaacttttgctgtaaaactttttaaaaaactcttaattccggtctttggatttgggctgtcagatcatgccggcatggggtag

SEQ ID NO: 291215 - DNA, 471 bp, Morganella morganii
atgtttggtttattcaaaaagaaaaaacaggaacctagacgatacgatgttacgcagatagagtttgatgtcaccgcgttggcttcgaatttgataaaaaaacaaactgatttttattattttcaaaaggagcaacaagaaagaaacaagcgttcacctttgttatccgctgaatatattaccccttgggttattggctattgtgtcggtatgcttgacgcaattgctcagacggaagcgaatcacatggtatatacaagtgaaatgcaattgcttttattttcagttgtgtttggtgaagaacatgttattgatgcgtttggtatgtatatagcctgcaatgaggttgaatccaattctccatttggtgtaataaatgaggagtattcattaggtttaaataaagcttttaatgaagtatgcaataatgaatcaatagcagggttattaatgcatttacaaatatcatga

SEQ ID NO: 291216 - DNA, 294 bp, Morganella morganii
atgcctaataaaaaactaataacactcacggaagtagccaaaaaaatatctattcgatatggtaagcttattaatatcgctaaggaaataggattgattacaacggagtattgttatttatgtcgtaaagggccaggaaaaacacaacatcgttactattatgagggagaactcttttatgaccttaacgcgactagaaaagatcttgagacaaatcaacgattcgctgttcagcaggttagccctaaatttttggaaataatttatgaatatctccacaaggaaataaactaa

SEQ ID NO: 291217 - DNA, 1230 bp, Morganella morganii
atgagtgtcgagaagaaagtgccacaaatccggtttaaaggatttagtggggagtgggtacaatccaattttgccaaatgcacggatctacttactggcaatccttttaatagtaaagaatttacctctgaaggcattcttctggtgaggggaatgaatgtcaaaaggggatatttagatacatcacctgaaatttctgaattttggccatcatctaaaggtttagaaaaatattttcttgagccagaagacattgttattcaaatggacggtgcattaattggaaaaagttatgcaaaaatagaatcgattaatttacctgccattttagtacagcgtgttactcgcgttaggtgtagtgaggtaaatcctgaatttatttaccagtacatacaaaaggactttttaaaccatatttctggaattaagactgaaacagcggtaccacatttgagtctgcatgacattcgaggtttctcggtttttttgcctaaaaggccagagcaaaatgccatcggcaactatttccaaaagctcgatgcgctgatcaatcaacacaaaaaaaagcatgacaaacttaataatattaaaaaagccatgctagaaaaaatgttccccaaacaaggcgaaactatcccggaaattcgttttaaaggatttagtggggcgtgggaggagaaggagttaggtgaattagctgaaattgttcgcggcgcgagccctcgcccgattgaagatcctaaatggttcgatagtgaatcaagcgttggttggttacgtattagagatgtgaccgagcaagatggcaggattcactatttagagcagagaatttcaaagcttggccaagaaaaaactcgtgtattgcatgaaaaacatctgctgttaagcatagcagcgagtgttggtaaacctgtagttaactatgttgaaactggggttcacgatggtttcctaatatttaaaaagccactttttgaaattgaatttatgtatcaatggttaaaatcctttgaaacaaagtggcaacaatttggccaaccaggaagccaagttaaccttaactccgatattgttaaaaacctgaccgtgactattcctacaaatgaagaacaaacggccatcggtcactactttcaaaaactcgatacactaatcaaccagcaccaacagcaaatcactaaactcaataacatcaaacaagcctgcttaagcaaaatgtttgtataa

SEQ ID NO: 291218 - DNA, 474 bp, Morganella morganii
atggcggatttgatttatcttactataaaaggaaataaacaggggcttatttctgcggggtgttcatcatatgactcaatcggaaacagatatcaacaaggccatacagatgaaatcttagtttatgctactgattatgaaatttcacgcagacaaaatgtatcccatgcaaattttatttttataaaaggtgatgataaatcatctcctttgttactttccagtatatcatctaatgaactactggaatgtgaatttaagtattatcgaataaatcacagcggtggtcttttacactataaaaccataaaactgactaaagcatctattgttaaaataggaaatatatatcccgattcactgactgaaaatgaagcgtatccgaaagaaacgatagcgttaagatatgaaagtatcacatcaaatcatcatgctgccagtacatcaggttacagcatcagtaataatatttaa

SEQ ID NO: 291219 - DNA, 780 bp, Morganella morganii
atgaagacattcaatatgaaaaccccgctggcgatactggttaccctgagtgctgcattctccgctgtacaagctcaggctgatgcgggctatggcagttcagcaccagcaccaaccggcggttatatcattattggcgtaactcagccccacgataattacctgcattcatccgaaggtggagagcccggtattggctatacaggattatatcaaggcgctaaaatcagttttgctaatctgcaaggacaacactatccagcccctaatgataacggagtttctgttgtcacccccgtttctcagccacaccgtagtatgggttcttttaatttttccaaaatagccgatgccgatatttattacggtgaatgggcttccggtaccgatttcagtgacgattcccatatggtgtattactccggaaaagatatcaccaggtatataccatccgaagacactgcacagtacagcattaaaggactcagcgggtacagcagcggtgaacagatcagcggcacattcagtgcgaattttgatgacaatacctttaccggctctctcagctcaaccggcctcagctacagcctgagcggcactgtcagtggttcagcctttaacggatccgcatctgtcagcaccaccggtactgataccaccgtcgtcaacgggatgaccagcgggcatttctttggtgacaatgcacatcaggttgccggttatgctgagttcagcaacgataaagcgaagaacattgcgttcggcggaaccaaatcttaa

SEQ ID NO: 291220 - DNA, 339 bp, Morganella morganii
atggatatgcgcggcttcaatacccaccagcgcgccatccaggcggagatcataaccgcagaaagcgcagcgggagtgataggcgcgcagtatgatgtctctgaaatgcgggtcgcggttttttgtccggtcaacaaaatccaggctaagttggttggcaaggatccgctggatactttccgggaaacggtttgtcagaatttgctgggccagcttataaaaccggtgaatttcaatggaaggtgtcacgttaataagaggaaaagactgatgttttcgtctggctatactcacattcacacaaacatcaaacttaccgaaagtataagcgccccataa

SEQ ID NO: 291221 - DNA, 1023 bp, Morganella morganii
atgacaaaatattgttgtgagaactgtttcggtgatagagggttaaagaagaatattataccatcactatcatcaatttatggggattgtacttattgtggttcaaaatcagttaacatcataaatcctagtctattatcaccatacttttcaactttaaccagcatatatgaaagaaatagtgacggaaagagcttggttgaaaacttaaaaggtgactgggagttattttcgcatccaaacttagatgttgctcattctaaagagctgctaggtgatatattagatgatggtaacattgtcagggaaaattttgtattatcaaaagcatataagagtgagtcattagctcagtgggataatttatgtcaagaacttatgcataaaaatcgctattttcttagtgaaacacttgatagagatagattagagcatttattgagttttttggttacagataatatcccattatattggttccgtgctcgtattttcgctgaagaaaattgccctacaatagataatatgggtgcaccacctaaaagactggctagtcatggtagagcaaatcctattggtataccatacttataccttgggtctgaacccaaaactgcaatatctgaaattaggccacatacaggagataaaacgtgtgtggctaaatttaaattaactagtgatttggcaattatagatttaagaactccccgtaaaacagtttcaccatttctgttagcagaacagactgaaatgggaaaaatgttatcagatattccttttctcgaaagacttggtaatgaattaactcgtccggttttacctaaaagtgcggctcttgattatattccaagccaatacatatgtgaatttataaagaaagttggtttccatggcgtactttataatagttctgtcagtgatggtgttaatcttgctatctttgagccatcaaatgcgttagctgagggtatttcagtttatcacgttgataaggtagaggttaatatcagcgatatatga

SEQ ID NO: 291222 - DNA, 936 bp, Morganella morganii
atgtattatccttattttcgaggaaagcaatttgagttattggctattagagatactgctgctttaatggctgaaatggattttacaccaattatagaacctgtgcgtgaaacgctaaatggccttgagcgaacattaaggtcaatttgtgataatagaggtaaggctatagtcataattaatccagcctgtggtgatcattcaactgatggacaaggtattactgatttattaaaaaatgaattcagtgaatatgaagatatttctataggggtgcttcttgatgatagcatgtcaatagaaaatattgatgaccttgttcactctaacacttcacatgaaattatatttattcatgcagggtttaatcaacccgaagttttatatgaaagatatggaagtgatttttcgaatatatttattttaagtcattgttcgaagagttatagaaaacactttcgggattcaaaacgaattctgattgaagatggattcgtaaaacgaagaaatgctgatcatccttactcggagtttttttcagatattcatcttaactttgaagatgaaggtatggatggttttggtgattttttaattgtaggtgatgaatatagcgaatcaggtggtccagcttatgctgtggcaattcatctaacttatattaatttaaaacgtgaagatgaaatgtatatctatcattttgtttcgacgacacgtgatacaccaacagaccccgcaggaaaattctctcaatcacttggaaaattaatagatactttagattcaggtgagtcgatgctgttagaaacatcggctattagagagtttagacgattaaataatcaaaatcattttcctgggcttggtacagtgaaaaaattatcaatgatccatcatatagaaactgttgctgacttcatggataatgatgtatga

SEQ ID NO: 291223 - DNA, 801 bp, Morganella morganii
atgtttgctcgttctgttcgagcaaccaaactttttgagtatgaagagctactaaaattgacagttggtgaagctttcaatgaggcctttgctgtgcttcggcaagtgggtttacgaaatgagtatgtttatcgctcagctattacacataatattttacttggaaagcattctttaaatacagcgtgtatgttaagtgaatttagaattggctcttgtaaagctgatctcatcatattgaatggaactggaacagtttatgaaataaaatcggaaagagatactcttaatcgattgaataatcaaattctgaattatcgtaaagcatttgggacaatttacgtaatttctggtgtcgatcatatagatgaagtattgaaaaccactgattcatctattggtgtcttgagcttaactgggagaaataaaatctctactgtaagaaaagctgaagaaattttagattttatatgtccaataactatttttgaatctttgaggttaaatgaagctaaaattattgcatctaagttaggtgtgaatattttaaatttaccaaatactcaaatacatagtttcttaagggacgagtttagtcgtttaccacccgtttctgtctatagattaatgcttgaaactttaaaaaagagtaggagtttatattcactgagagagttaactgttaatttaccaaagtccttacagcctgccgcgctttcggttccacttcgttttaaggatcatggtaagctaataaattcgatgaaagttcctctttttgaggctttattatgggagtag

SEQ ID NO: 291224 - DNA, 303 bp, Morganella morganii
atgaaccagactcagacaactgagctgattggtatcaaacagacaaccgtttctgatttcgagaacaaacctgaatccactaagctgagagcgctgttcaaaatccttgccgttctggatcttcatgttacgaaatgcggctcagctcaggatgaaaaaaagacctggaataaggtgcgatgctcagccacaagatcaaaagacttgagactttccgctctgcaaacgttgtcgtgtccggctcatatttaccatttctcccgtctggccggagagttatccggtatttccgcagattcctga

SEQ ID NO: 291225 - DNA, 1041 bp, Morganella morganii
atggctgaaagtcaagtcccctacccttacaccgaagataatcatagtatcatcagtagcttatcagaagctcgctttgctccttacttaaaaaatgcaggatttaatcagcattatgcttttagcctgtatctgtacaatgcacgcctgtcaaaagcttttctttatccattacatattcttgaggttacgcttcgtaaccggataagtgatatttttagtacgaattttgatgaaaaatggtatcacgatagggcgtttagatcgggattatcagcagaaagcttagatgctcttgatcgtggggaacgcagagctaaaagacctgataaagaggatatagtcgctaccctgacttttgatttttggtcaaacttattccggcctcaatacgaccggtttttatggcaaacaaatatgaaaaaattattgcctaatattaatatgacccgaaaagattttgaaaaggttgtaaaaaaaattaatgattttcgaaatcggattgctcattatgaaccgatacacaaaatagatctgagtgaaatgcataccgtgatcctgacgactctaatgtggctatccgatgatacccaccgttgggttaaacacttctctactgtaaatgaatgcttgcgaatgaaaccatcaattcagggggatgggcataccttagtaagtgaaaggtgtgataacaatttcaacgtgatatccatcactgataatattagtaaaatacaagactcacactttactctatgcatggatcatcaggataatatagtttctgttattaaccatgatcacctggctaaatatttaatatcacatattgaaaatgaagaaattattatagaccttaaaaatcatgaagttaataacatcattacgtatttaaaactaaatggaaatgcagtttgctgtagttcgcatgaaccttttaaagctatagaaaaatatttcaggaaaaaagttaagtttctcattgtattaaatgatgagggtatttcaggagtcattgaaaaatcgcaccgcagatactaa

SEQ ID NO: 291226 - DNA, 276 bp, Morganella morganii
atgccagatttccgcgcggtaacggccgggggcttcagcggaaaagaaataacgtgtggtgccgtctgcggtaagaaacgcaatgccgtccggcgccgggcgccaggccgttatttgcggctgtgccgtgaaatgcagctgaaacccgtctgccgcgctgtcgggaaccgctgtgagtccaaccggcagcgtctgcccgtcctccgtaaactgccagttgccctgaagatcatctgcggcggggattttcaggctgatggccgcactctgccctga

SEQ ID NO: 291227 - DNA, 606 bp, Morganella morganii
atgcagatggggatggggcgtccgccgttccgcgccagtcttgaccacggttttaaacccggcctgagcagcgatattgtctgtgtcggctccggtgacctgttctcgcagatgcgtctgggtcttcagttccagcgttgtatggacagcgaagcagaagcaaaccgcaccggcaaaaccaccaccaaaattgacctgagtgtgcgcgatgcgctgacctgggcaacacacggcagtgcggaagcgatggggatggagaaagagatcggctcgattaccaaaggtaaaaaagcggatattattatcgtttcccagaaagaagccttcgtaccgtccagttatccggcgggctcagtggttctgcagaccacatcatccggtgtggatacggtgattatcaacggcgatgtgaaaaaacgctttggtaagctgacacagcagaataccgacaaaatccgttctgatgcgacagaagcactgcgccgtattcagaaagcggcgaaaaagctgccgaaacagacagcagaagaggtggcaaccttcttcgatgccgctcaggagcaggcgcgtgagaatttctcagccggttacagctataaaaaataa

SEQ ID NO: 291228 - DNA, 162 bp, Morganella morganii
atgaaagccgatcagcgcccgctgatcgctgcccgtttgcagggaacaccggcggagcgcgggaaagtcagggtaaatatcaaaggaatgtcttaccgcaacatgtgcggaaactcagacccggtctattctgtgcggctgacagtgaaaaaagcggagtaa

SEQ ID NO: 291229 - DNA, 411 bp, Morganella morganii; identical to SEQ ID NO: 277239

SEQ ID NO: 291230 - DNA, 333 bp, Morganella morganii
atgtcaaagcgatatttttttatgtcaaaatcaatgacaaaaataaataatttatctaaagctttggttaaaccagtaacgaaggaagaacttgaggcgataaaattacctcccaaaaataggacagaggctaagcagcagttagcaataaaactaagacttcaaaaaatgggtatgtttgatgaccattcagttaataaccagataaaaaaagcaaaacattctctttcagtctctcattctcttaggtttgagcaaggtatagttgattctgtggataccgaaaaaatatctgagtcaaataaacggtggcgaggtaagacagcagattaa

SEQ ID NO: 291231 - DNA, 651 bp, Morganella morganii
atggaaagccagaaaaaattaaacacaatacttccttctgaatcaataaccaaaaaattcactaacccagtaaaattcatagagtatggaattgatcgactagaatacctggcgagaaataagccaaatgatctttttcagataggtattgcagcgtgggaccgtttctgcaatgcaaattctagccaaaataagtttatatttggaaaggaatgtcaaactagcaacccgttattatataaaaaagtatcaagacatataaaagaaaatgttattaaagacattttatacgtgcatggagaagttcaggatccagaactagatgagaaagagacggtagagctcatattagcacacacctaccctaatattttaatgatcgtcgatgtaatgctagtcaatccatatgaacctgtagcccctcaaaaatatgacttccaggagtatcatggcctcgggcttttcgccgagcttctggagaatgccatacagtattgtaagcaagaaggtattcaggaaatatatcttaccgctgctggcataccactcaaaaagcattttgaaaaatatggatttgttgttcatgatacatggatgggtaaagcagctcttgaggtaggacaaggcatcccgatgagcatgtacctctaa

SEQ ID NO: 291232 - DNA, 213 bp, Morganella morganii
atgcgtaaaagccaatcttctgagcatttatttcaggtaagaattaggcagcttggtaatcctacgattagggaaggctttggttatgacaagcggggggatgcagttcccgatctcggtaataaccgccatacaaggcgaatgctcaaggctgcgttacgtaaggataaagccttggcgataaagtccggcagtcgaggggataaccaataa

SEQ ID NO: 291233 - DNA, 198 bp, Morganella morganii
atggctaatcatcctgtttttgccacccctgctgatgttatccgcccgatagcagtagcgttagaaacggctcagtttctggcgttagatcctcaggcgcaagacctttctaatgacttaatcgcgtgggcacaggaaaccgccgcgcttatggctgtcaatatgcagaatgagaaaccggaggctgaacatgcgtaa

SEQ ID NO: 291234 - DNA, 558 bp, Morganella morganii
atgctgatgaacaataccactgcccgtaatatttaccggcttaccgataaaaaggacttgcctgtgcggggtgagcttggctatagtgatccggcaccggcaaaatccggtgtcaggcgtggaaacctgaaacagttactggcgacacatgacgcgccccgcgtctttttttgtgtccgtgtctacgcacatccgcaaaatacggcatcgcgccgttctgattcaatggtggcgttggcggggcagccttcgggctggctgggatccagtaactccagtatttccacccccgtcagcgtcaccacccctatagagcgtggaaactcaggtggtgactccttcgataagttactggagatcatcgttatgatggctatccctgcccgtactcaattcaaattcctgtttctggcggtaaaacgcgcagacagcaccgatattcctcatcgtgtcgaaaccacagcaccggatgaacaggccgcacgcttaatgctggtggcggattatatccttgcctttgccggtcgtgtacccgctcaggaggtggcacatggctaa

SEQ ID NO: 291235 - DNA, 552 bp, Morganella morganii
atgagtaaggcatttaatcttctttactatcccttggcattggctgccgaagaattgaaatgccccgaagtgaaactattgttattagcacaggcagggggaatcactttgcatcagtaccctgatcctacaggtggtctgattgagtgggaacccatatctacggtggatatcggggctattcttatcaggggcacaaaaacaggtcaacgttaccgggataccttgtcagctattgatattcaattgacagatattgttctactgcccgaagaaatggtgaaagcttttaatttgctggcgttttcagaaaatgaacgcaaagaagagcaaaacgtatccaccaaaaccatcaactatctggctagatttgctaaatcgattgtacgaatacattacggagccgatgttgctgataatctccggaatgcattagaaaatgccgatagcgaaatttgcgaagactttaaaaatgcaggtttgatgatacctaaaggcagggcattaggggatcatcttcgtaaagtagatgtagaaacaagcgataattag

SEQ ID NO: 291236 - DNA, 738 bp, Morganella morganii
gtggcaaagcaaaagttcagaatcaccaactggtccacctacaacaaagctctcatcaaccgtggctccctcactttctggctggatgatgaggcgattcaggcctggtatgagtcggcaacaccttcatcacgaggaaggccccagcgctattctgatctcgccatcaccaccgttctggtgattaaacgcgtattccggctgaccctgcgggctgcgcagggttttattgattccatttttgccctgatgaacgttccgttgcgctgcccggattacaccagtgtcagtaagcgggcaaagtcggttaatgtcagtttcaaaacgtccacccggggtgaaatcgcacacctggtgattgattccaccgggctgaaggtctttggtgaaggcgaatggaaagtcagaaagcacggcaaagagcgccgtcgtatctggcgaaagttgcatcttgctgttgacagcaacacacatgaagttgtctgtgcagacctgtcgctgaataacgtcacggactcagaagccttcccgggccttatccggcagactcacagaaaaatcagggcagccgcggcagacggggcttacgatacccggctctgtcacgatgaactgcgccgcaaaaaaatcagcgcgcttattcctccccgaaaaggtgcgggttactggcccggtgaatatgcagaccgtaaccagcgtaatgctctgccagtgttacaaccaattaaccaattctga

SEQ ID NO: 291237 - DNA, 924 bp, Morganella morganii
gtggcaaagcaaaagttcagaatcaccaactggtccacctacaacaaagctctcatcaaccgtggctccctcactttctggctggatgatgaggcgattcaggcctggtatgagtcggcaacaccttcatcacgaggaaggccccagcgctattctgatctcgccatcaccaccgttctggtgattaaacgcgtattccggctgaccctgcgggctgcgcagggttttattgattccatttttgccctgatgaacgttccgttgcgctgcccggattacaccagtgtcagtaagcgggcaaagtcggttaatgtcagtttcaaaacgtccacccggggtgaaatcgcacacctggtgattgattccaccgggctgaaggtctttggtgaaggcgaatggaaagtcagaaagcacggcaaagagcgccgtcgtatctggcgaaagttgcatcttgctgttgacagcaacacacatgaagttgtctgtgcagacctgtcgctgaataacgtcacggactcagaagccttcccgggccttatccggcagactcacagaaaaatcagggcagccgcggcagacggggcttacgatacccggctctgtcacgatgaactgcgccgcaaaaaaatcagcgcgcttattcctccccgaaaaggtgcgggttactggcccggtgaatatgcagaccgtaaccgtgcagtggctaatcagcgaatgaccgggagtaatgcgcggtggaaatggacaacagattacaaccgtcgctcgatagcggaaacggcgatgtaccgggtaaaacagctgttcgggggttcactgacgctgcgtgactacgatggtcaggttgcggaggctatggccctggtacgagcgctgaacaaaatgacgaaagcaggtatgcctgaaagcgtgcgtattgcctga

SEQ ID NO: 291238 - DNA, 162 bp, Morganella morganii
atggacaagcctgaagtaattgcagcaaaagtaagatgttctgaaatagcaaaagatatcttgctggaattaatgaaattaaattcaagcaaatatactgatagcaaatatacgatggaagaatatcaaaaaatatattctgaaatatgtcgtagaatatag

SEQ ID NO: 291239 - DNA, 600 bp, Morganella morganii
atgaagaaaaacataggtttgatacaaaaaaaagaaagtgaaaaattaagagctgatgcagatattgcgtatgaacgtcaaaagacagattctgagaaagaaatacaggaaatgcgtgagagtattaccgcgtcaaaagaaagagaagggatacttgttaaagaaaaagaagaagcaataagtgaaaaaaataacctgttaaaaagtatggagttaattaaaaaagagtctaattctttatatgctgagctggatgaaataaagaaagaaaactatcttttgaaagataaaattgaaaaaaataatacttatcttgatggtgttaataatgtggggttaataaatggtgagtattttaatgtgccatttgagagttataagcatgacataattgatgctactggtataaaagaaaatataatcatgactgatgttatgtctgatatttatttacaagataagattatgtcaattccaaatataagaaagattattccatcagttaaatcaagtgtaataaagagtataactttcaaacaattcctcaatgctcttgattttgagcaattaagtagctttagaaactctgtgttattttaa

SEQ ID NO: 291240 - DNA, 312 bp, Morganella morganii
atgaaacatagctacacaggtgatcactcaagacctgactatgatgaaaaaatcacaagctggttgaaaaacaaaacagaaccaatgtttggctcaatgtcctaccctgtggctctttaccatgacggatttctctatcgcaaaattactggttcaggtttaaatgaatatgtatccatttgtaatttcttggaaaaaataggacttgttaatctgctggctcccgacgcaacattccgaggctacgatgctgtttttgctattcccgcagtcaaaacagaaatggataaaatcaaaaaacagcaaaagtaa

SEQ ID NO: 291241 - DNA, 252 bp, Morganella morganii
atgacattcccagcacctgtttttatgccagttaaaagttgtgaagccgataacgcctttgttatcgaatgtttagttaagcacaaccgcatggatgaacgccgcatagttgctgatcgctatgcatcccgcatgcgcgttcttggcgcgatagccgttcgggacaaactggattgttatcagattgctgagttgcttgagggtgaagcgagtcgggcagagaacgaaatccgggagagtgaccatgcctga

SEQ ID NO: 291242 - DNA, 522 bp, Morganella morganii
atgcttatattgaatctttcctctggtttgcccggagcatcttgccactcttcattttcaaatttctttatttcaatgttattattttttgtccatataacattaaataaatcatcacgcctctttattcctacgctgatttcggtatcatctctagtaactccatcaataaaagaatctagatctctttttatagattgtaagccgactaactcttcagatctacccatcgcaattcgtagtgattcaacaaatgttgatttaccagcgccacgtccaccaattatagcattgaagagagggtgcagttttatctcaacaggttttcctgggataattccacagtgggtcatttttttaattgttaggttgttaattgacaggtttggtagagaattaggatcgtcaatttcgttacttacgcagaatttattatcgtataatgcaagccttaaaccatcaattgttggttttcccatcttgatccaagaggtattagctcctagtctagacttttcatga

SEQ ID NO: 291243 - DNA, 639 bp, Morganella morganii
gtgatcagcagccgtttttacggtacggaaaatggccggaaaaccggctacagccagaaatccctgacactgccggattcggtgcaggacacagtggatatgcaaaaacaactgccggttgcacaatgttttgtgtatgccgcagacagctggatgcacagcggtaccgataaactcccgccgcatgtgctgaccctaacaaccgatcgctatgatgacgaaccggcggataaaagcacacagaaaatccgtcagcaggtcaccttcagtgacggttttggccggatagtacagcaatctatccgttttgaggacggcgatgcatttcaccgtaataaaaacggctcactggcgaccggaagccggaaaagtgagaaagcaacaacgcgctgggcagtatcaggccgcactgagtatgataacaaaggacatgccgtccggacttatcagccctgctttgtcaatgactggagatatgtcagtgatgacagtgcgcggcaggatctgtacgccgatatgcactattatgacccgctcggccgtgagcatcaggtgatcaccgctaaaggttatcagcggcgcacactgtacacaccgtggtttgtggtcagtgaggatgaaaacgataccgcagcgtaa

SEQ ID NO: 291244 - DNA, 1629 bp, Morganella morganii
gtgaaactgcctgccggtgtccgttatgataatacctgtcgcttacaggtggcggatgtgcaggggctgggtgtcgccagtctgcttctgacggttcctcataccgtacctcgtcattatctgctgcatctgaccaccgaaaaaccgtggctgctgaatcagatcaataatcagacggggatgtcgcagaatctgcattaccgcagttcggcacagttccgtctggatgataaaacccgcgaaccggtttcatatctgcctttcccgctgcacacgttatggcggacagaaaccacggatgaaattaccggcaataaactggtaagcgaagcccgctatcaccacggagtctgggatgcacgggagcgggaattccgcggcttcggctgtgtggaaactctggattctgataccgccgcagcccgcgccaccagcgatgtactgacgatgccggtactgacccgtaactggtatgccaccggctatacccctgtcgatacattgctgaaaaatgaatactggcagggcgataaaggtgcctttaccgggtttgttacccgtctgacaaccggcagcggtgataaagaatccgtctgttctgatgccgtggtacaaaaacaggcattctggctcagccgtgcgcagaaagggatgacgttgcgcagtgaggtatacggcaaagacggcagtccgcagcaggatttaccgtacagtgtcagtgagcagcggctgagtgtccgtctgatcacaccggatgcggatatgccggtggtccggccgtctgtatcagaaaaccgtgaatatcactatgaacgcatggccgctgatccgcagtgttcgcaatccgttgtgctcagtaccgatgagtatggttatccgctgcgtgaagcaaacattaattacccgcgccgtccgaagccggcgaaaaacccgctgccggataccctgcctgcgtcactgtttgattccggttatgatgatcagcaatttcaactcattgtatcgttatcacggcatgcacggcaccacctgactgctctgaaacaggaacagtggctgaccgggcttgcgggcagtgaccgcagtgacgtttttatgctgacagccgcacagcaacctgacgcaggctttacggcggaatctctcgggaaactcatcgctgacagcagatctgcacgaatttttgccggacagcagttgacacactggctgaacaagaacaataacgtggatctggtgccggcctggccaccgcgtcggcaatatatcttaatcgcagaattggatgaccaaatcatttctgaactgaaaacaggtttcagcatcacggaacagttgaagaaaagcgactaccggcatactgactatctgtttgcggatgaaacagaaaaaaataaaaaaatatgggctgtctgctccgatatggcagcttatggtgattacactcagttttggctgccaatccgtatccgcgataactctatggtcggaatgcgtcatctgacccgcgacaaacatcactgtgttatcactaaacacaccgatgcctccggacttgtcactgcggcaaaatatgagatgccaatgacaatatcagtcaggtacagactgatgcgctgggacgggtga

SEQ ID NO: 291245 - DNA, 822 bp, Morganella morganii
atgggtttagacctatcgtctaatttggcaagacaccattttctgaatgggatcccggttcaattccgggtaggtaaagagcattcgcagagtgctttttacctacctcgaggtcaactaatgcaagaatctgataggaacaacgtctttgctgctcaaacaaaaaatgtaagagcacttgagcaagcatggaaacacatcaataagtctatcaacgctgcatattcttgtggcgacatttcttcagctgagatacatacaaagttattagctcaagtttattgcgcttacgctgaagccgtgttttcaaaagtcattcatactcctaatggtctgagtatcaatgacattaatcaaattaaaatgagaggtaagaaaaatatcgtagaggcatggaaaaaatgcgtcgaactttcctttaaaaaagtacaagggaaaaatagtagccatgtcccaaatgcaaaactaaaaattaatgaactcatagatgcttatgtttttgacccaagcttgctacgaaataagattgcccacggtcaatggattgttgcattgaatacaaataatacgaatgtcaatgcagagctgacttctaaaattcaaggcatatcggtgatagacctttatcaaaaaaaagccgctttccaaagcttgtcttgcatacttgaagacataattaagtctccgaacaaagcccaccaccgcgattattggctccatattacgcagtttgagaaatcacaacatgatatggcatcatggacaattgagaataaaatatctgctttaagagctaaaaaattacatgctaagagaagataa

SEQ ID NO: 291246 - DNA, 819 bp, Morganella morganii
atgcatatcgcaattgatgatacatatggtactgctggaaatggtaattcagtctacgttactaaaaatagaaggacgcatgtggctgtaattgtcgatgatgaatttgtaaatccattgaggaagaacattgtagattacttgcaagaattaaatgtaaatctaggaattaaagccaaggagtttcatttcacagacatttataacaggcaacgcgactggaaatgtttaactactaacaattcaataaccaacatgctaatatttcaacgctttgcagtctttgctgtagaatttaatattaaatttgtaatacagactgttgacgataggactattaaagatcatggcgataaattaataaacctgaatcttcctggtttcgatacaaataaatttgaagacttatctttgttgatgctattactaaaattaagaatgaggtgcaaaaaccatccagagaacgtaattttatttatggatgaagggagggaacgtgccaagactccttttgctgaagagattttctccggtgtcgttgctagttacaatggtatgtatgagtcttcagactcagaggcattgctacaaatggctgattttattgcattttgtattaatcgctcaacacatctacaagttaaagagccacgaactacgtttgacaatgattttctgtgtttcatgcaattcattcattttttagatcctgatgagaatgagatgcgtagagcaataatgacgaaaaaggctaaaacaattcatactgacttaatacactggcttgatagggttgataaaggaatgaaaaaaccttag

SEQ ID NO: 291247 - DNA, 135 bp, Morganella morganii
atggcgagcctgagcttacagggacgtattcacagcgacttttcatttttaccggttatcaccggtgtcacaatccaccttcatgctatcagcgcggaggctgtaactctgccggtacagtatctgatgttttga

SEQ ID NO: 291248 - DNA, 1026 bp, Morganella morganii
atgatcaagtactgctgtgcgagctgttttggggataatggtttaaagaaaaatatcataccttcactttccccagattttggcgattgttcgtattgtagtaccaaaggtattgagattattgagcctcatgctttatttgatcactttagttcattgataaacatctacgaaaatcatccggatggtaagagtctagtggcacatttgaaagaggattggaagctattttcacatcctcttttagatgaggctcatgccaaagagttattaggtgatatacttgatgatgggaatattgttagaaaaaccttcgtactttctgatgattataagagtgaatctctcgcattatgggatcatctttgtcaggaactcatgtatgaaaatagatattttctcaataaatcacttgatacagataggcttggcgagttattaagtttccttgctttagatggtttttctaaaacttggtatcgagcccgtatttatgcagatgatgctgcttttacgatagaccaaatgggggctccccccaagagattagttagtcatgggagagcaaatcctacaggtataccgtatttatatcttggatctaaaccagatacagctttgtctgaaattcgacctcatacaggtgacagagcttgtgtcgcagagtttactctaaaagataacctgactctaatagacctaagaaaccctcgtgaaaccgtttcaccgtttttattaaccgatccaggtgaaatgggtaaaatgcttgcagatataccttttcttgaacgacttggttatgaactaacaagacctgtattacctaaaagtgcagcccttgattatattccaagtcaatatatatgcgaatttattaagaaaactggctttcatggagtactttatagtagttctgtaagtgaaggaatcaatcttgctctttttgatccgttaaatgcgactggaggaaatgtaagtatttatgatatagataaagtcgaagttagtgtaagtaaacaagattaa

SEQ ID NO: 291249 - DNA, 933 bp, Morganella morganii
atgtattatccttattttcgtggaaaacaatttgaactgttagctattagagacactgctaatgtaatggctgaggtaggttttactccaattatagagcctgtgagagaggctctcaatggccttgagcgaacactgaaatcaataaaagaaaatgatggtaaggctattgtcatcattaatccggcatgtggtgatcactcttccgatggacaaagtatagctcaattattaaaaaatgaatttagtaattataaaaaaatttctgtaggaatacttcttgataagagtatgactattgctaaggttgataatctccttcattcagatctcgttcatgaagtcacctttatccatgctgggtttgatgagccaaaggctttacatgaaagatttggggatggacacaaacatgtatttatttcaaactactgttctaaagcttatcgaaaacatttttcggattcagaaagaattttaattaaagatggctttgaaaaaagacgaaatgctgaccatcccgattctgagttcttttcagatcttcatcttaactatgaagaagagggtatgaatggttttggtgatttcttaattgttggtgatgagtttagtgagtccggtggccctgcgtatgctgttgctattcatctaacttacattaatacgaagcatgaagatgaaatgtacatctatcattttgtttcgacaacacgtgatacaccgacagacccagcaggtaagttcgcacagtcccttgataaattaatggctgctttaaattcaggcaaatccatgttgcttgaaacatcggctatcaaagaatttagacgattacataatccgagccacttccctggtttaggcacagttaaaaaattgtctatgattcaccatatagaaaccctagccaatttcatggatggtaaataa

SEQ ID NO: 291250 - DNA, 801 bp, Morganella morganii
atgtttgctcgctctctccgagagaccgagcttttcgaccatgcagatacacttgggattaccgttggtgaagccttcaatgaggcatttaccttactcagacaaacaggcttgcggaatgagtatgtttatcgttctgcactcacacacaatcttttgcttgggaaacattcattaagaactgcctgtatgcttaatgaattcagaatcggctcttgcaaagctgacctcatcattctgaacggaactggaacggtttacgaaataaaatccgaaagggattccttaagccgtctacataaccaaataacaaactaccgcaaagcatttgggaaaatctatgtgatagcaggttcagaacatatagatgatgtgctgaaaacaactgaatctaccattggggtattgagtttaacccgatggaatcgaatttctactataagagaagctgaagaagtcttagactttttatgccctgtaacaatctttgaatcattaagaattaatgaagcgaaaattattgcttccgagttaggtataaaaatccccgacttaccgaatacccaaatgcatggtttcttaaaaaaagaatttagtggtctaccacctgtttctgtatataatttaatgctaaaaactttaaaggaaagcagaagcttactttctttaagagagttgattcttaacttaccaaagtctttacaaccagcggcactttctattcagcttcgctctaaggatcatgagcgattaattaatgctatgcagcttcctcttaatgaggcattgttatgggagtaa

SEQ ID NO: 291251 - DNA, 297 bp, Morganella morganii
atgtcttatttaatcaacaaggaaatctacaaaaagaagtctgatatcatagctaaagcacaaaatataatttctgtcacaaatgccggtgatgaaattcatggtgaaaattatgattttatcttagatctgctccaaaaccatgacgaatgggaacataaaacttcaaatggttttcagggaattgcagttggtaaatcaatacacggtacaacgtgtttctatattaaaacaaatgatgggcttaaagatatatcctttcattatgcagttaagtgcttaaaaaaaacacaataa

SEQ ID NO: 291252 - DNA, 270 bp, Morganella morganii
atgaccgaaaagaagacctgcgctcaggaattaactcgggcaggtttatcggtcatagccgcctgccggttagtttcactgcccaggacctctttttaccggacaaacactgactggaaaattaaggatactccggttatcgaagcgatttatgccgaactggaattatcaccacgagccggattcggaaatgttttcaccggatgcgacagaaaaagtactcctttaatcataaacgggtttaccgggtatattgccggctgggcttaa

SEQ ID NO: 291253 - DNA, 276 bp, Morganella morganii
atgaagttaggaacgtatgaacgaccaaaatattggggtgttgatggtgttatcggtgatatctactactatccggattatactttattctttagattaaaatataatggcagtccatctgataaaaactggtattatccgaaaaagaagtcaataatcagttctgggattgggttgggtattaccccggaacgatgtcagagcccaaaacttggcgtgaacccggaatcgagggttgcatttactatgagccggaatatggttatttacgtttga

SEQ ID NO: 291254 - DNA, 258 bp, Morganella morganii
atgcaatgtgcattggaattccattctgcggatgttcgtccgacagaggaaatggatgacagagacgtcattgtttataacccgtgcgatggctggcatatcggttacattcgctcagacagagagggtgatgattgctacgtggggatatatgactttccgggatcggagttgtacccacatacattttacattgcatgggctttgttgcctgattccgatttaatgtcagagcaatttccacgcaagtggagatag

SEQ ID NO: 291255 - DNA, 1284 bp, Morganella morganii
ttgacaacaaaaacagcaaacattgcaacaccacaggccgccaaagaaaaaaaatggcttcccgaatacaacatctggttttatgccttattcggcaccgccgtcggcgcgggaacgctttttctccccgttcagctggggctttccggaccgctggcgatgctagtcatgttacttatcgccctgccctttacctattacccccacctcggcctcgctcggtatattctcagcagtgacagtccctcgcccactctgctcagtgccacacaacaatattacggcacaaccgtggcccgcatcgtcaatgcgctttacacgctgaccttcctgctgattatttttgtttacgcaatttccatcaccaactccgcagacagcgtactgcgccagttctggcagatacagctgcccagaccattactcgcggtcctggtggtttccgccctgcacgccctgtttctgttcggcaaacaggttaccctgaaaatcatggggatgctggtcattccgctgataatttacctgaccgcactggcactcactctcatcagtcactgggatacacagaacatccttcggatggcaaacgatatccggcttgatgccccgtcgctggaagccctctggttactgttgccggtaatggtgttttccttcagtcacactcccatcatttccacctttgccaatcactgcaaacacacctacggggacggggcggaaaatcatatccgccggattatgaaacccagctacctgatgatttgcgttactatcctgttttttgtcttcagctgtgtctttaccctttccccggctgaaatcgcggcaaccaaagcgcagaacctcacgattctgacggccattgcccaaaaaagtgctctgttctggattgccctgactgccacaccggtcgccattatcgcgatggcaaaatcgtttctgggcacctatttcggagtactggaaggggtacggggactggtcggcagcgtcgagcacgatgtgctgcaccagaaaaccaatcagaaacgggacaaattgatcagtatggggctgattttcatcctcaccctgctgatgacactctggaaccccaataccctgaacgtgattgccgggataagcgggccgatgatcgcccttattctgttcatcctgccgtcactgtcattctggctggtaaaacccctgcgcccgtaccggtcgctgaccagcctgatggtactgctcaccggcgttgccagtttcggtattgcagtgttcaacctgcttcactga

SEQ ID NO: 291256 - DNA, 396 bp, Morganella morganii
atgaagaaccagcttttcggcccatcacgcacgtttgtttgctgcgatgatgctgaggtgatggtttactactcgctggcttctagcgctgtggcgataaatactgcgcccggtcgtttccaccgcaatatgcctgacccgatcccagttgtggtactgggacgtctagcggtggataaatcactacatgggaagggcttcggacgcgcactggttcgcgacgcggggctgtggataattcaagtggcagagactattgacattcgcggaatgctggttcatgcccagtcggatgaaacccgggatatttacctgtgggtgggggttgagccgtcgccgatggactccatgatactgatggtgacgctagggggtttggtgggaagtactatctga

SEQ ID NO: 291257 - DNA, 1086 bp, Morganella morganii
atgagcagtgttttcgagagagagaacgataatattcgggtactttcactattctccggttgtggtggtatggattttgggattacctcagccggtggagatatcgtctttgccaacgatgttgtagataatgcctgcaaaacattaggaaactatttccccgatactgatatcaggcatagcgatatatctcaaattaagtcttttccagatgttgatattgttgttggtggctatccctgccagtcattttcaatggcaggtaacagaaaaccaaacaatgacgacagaacaaacctttataagcactttcttcgggtattagagactattcagcctaaatattttgttgctgaaaatgtttctggcttgaaacatttgggggcaggtagttttctggaacaacagctcacggcatacagagctgccggataccaggtcagttatcatatggtaaacgcaagggcttacggcgtgcctcagtcacgcaagcgtttgtttatcattggtgtcagaaatgatctggggcaatactttgaatttcctgctgaaacacatggcaaagcgacaaaaaagaatccccatttaaaaccctatgcttcacatggtgaggctataagggatttacctctatggcctgaaggtgagttttatgaacgaccacacgatcctgaagggcatttctcatggtatttcatgtcccgaaaccgtaaagctcaatgggatagccctgcttacaccgttgtcgctaactggcgtcatgtgacattacatcctgccagcccggtgatgaagttaacatggtcaaacctggaggatggttggaagcagcgctgggatttttctgatgaatatgagcatctaactgcggatatttctcgtcccaaactggaacaggcaagacggttatcatggcgggaatgtgcacgaatacaaacttttccacaggattttgagcctgtaggagatgtcgagtcaaaatttacccaaattggtaatgctgttcctccactactggctgaggtactttttcggcatttgttttctggtaccggtttgaaaaagatgacagcgaacggtaattag

SEQ ID NO: 291258 - DNA, 2766 bp, Morganella morganii
atggatgattctttcccagttactttagaacaatggaatgctgaactagtaaagatcgtctttcttgagtcttcgcatacgggctcgaccttaagtcgaattgatactacgggacgtatttttgagcaacttgcaggtccacgtagcaaagaggatgctaagcgaagttttctggcttcgtttggaaaagaggcgtctaaaatccaggctgctcttagggatgagtcgcggttagatattttagcgcaactaagaggatatcctacttattttgccatcttatatttaacattacttgctgctagtgctgatgatgagacgcatgacgaagggaattttcgggttcgattttctgtactgctcgggtttgataaaaagaaagaatttatttttactgaattacccagtttatgggaaagattagaaagatggagcagtagaaaacaaaactgtacccgtttagtccttccagaaccattaaaacgcgaaaggttaatcggatattccaagagaattgctttcccctgctataaggatgaggtttttttacgggacatactcgtcagtaatgaattagatagctattcaacctttgagtcagttaataagttagtacatcaatatatatcttgttttggcgaagtttttaaccaggagtttattgagtttagaacattactttcaaaggctgccatgcagcaggcttatgactctcctttttggggagccgttcgtgatatcactgtaaatacagagagagaacagctcaaagaaaatggtaagtattgtattcgccttgagtttaacgattcaggtaatccagagatttatcttcttatggatgacgctgctgctgctacctcagaaattaagcgttattactcattgcccaatgaaatagagaactataataatatatattacgaacgagatatgggtaccacattagactccctggattttttattaaaaaaacggaagagttatctctataaatcacgggtgggggctgcactacggtctgggtgtttgccgctttttcgtgatgagttttgttatattagctcagaaggagaatattatgataattctccactctatttaatacttcaccataaatatgcagacagtatttttacagcgttgaaaaattctggcgaaagggcacaacgttgggatattaaatctgtcaaatggtcgatagttttttccgataaagttggcaggcaaacactggataagatagcctgtttgttaccagaagaagcccgtcgttttctaatacagggatggcggcctgcccgacctcgtatatcaggcgcagcacggtttggacaggctatacttcttaaccctgccagcacccctattatttatatgcctgaagtactaagaggatgctatgtaattagcaataaagacggagaagaattaatccatggctcactatctcagggggctgaaggattattcattccaccagaggaactgatggaaatatctggtcaggcattttgtcgctatgaacttacgttggcgtattcggatatcccagtaaattttgatgtacacgtgttagatcatgcgccttacgccacttattgtaaaattacagagccacatgattggatgactgatggaccatcaggaatattaatgatgttaggggatacggcagtgctcccctcactgaaacgcgaagaaataacgccattgagtggtgctcagatgttatggcagtatgaaaatggctttcctgttacatgtcaatatactgaattacataatatacccgcagcatttgactggatcgctgaagcgctggccttgcgttttcaacgccgtagcacattgccttttggtgaattaaaaaaacatattgaatcagtatcacaggtaacgaggatacccgaatggcaattgcgtcgcatgctctttgccgctggctggctttgtgtagtacaacgacgccatgcgccatattcgttagtctcattggctgaaagaaccatttccgttgatgtcacagagcagggaattattgcccgaattctggggatgtttacaagaagcgaacgtaatcttctacaagaagcacttaataacagtgagcgaatagggcgtcggttagttgagggttacggctgttcaatgggttgtattgaattacatttatcagccagggagcgtgtccatgctttcattgaacagtttgggttacgtttgattaatcacgacgatttccccgtaaatgctttgagcggagtattgctaccgctgtctcaaatgcagtttatcccagctttacccccggatctccatgtgtcgctatggcaagctgaaaaataccaatggtcagaagaacagcggcttactcaaacggctaataatctattgatacggagtaaggaaaaacagcgttatcgttattttattcggcagaacgccggatactggcaaaccgatagcttctcctgggcattaatggctcaggtgatatgttcaggagaaacggttggtgtgcgaaaaggcgatagtgactggtgctggtcaatgaaaatcattgcgttaccgccctccgttttgcagtggtggatccatgttgcccatggatgcttgtcgataacagacaatggtggttacttatttgcaggggggaaaattccactctgggacaatgtaatggccttcccctcctgtcaacgagcgttggcacgacggaacagagcgctgacaacacgcaagctgcgcagaaccttacagtaa

SEQ ID NO: 291259 - DNA, 1623 bp, Morganella morganii
atggctaaaaagaaaagtattatcagcgaccggctgggccaaatgtactacttcggtacagaatctcatgaattgatcagatgtttgcaagagtgcaagcaaacactcaccagaaatggcgctaaagcggataatttaccgaaaggatcagagaaaagattacattttctccgtacgttaccacctaaggccaaacctgttgtgtctgattggcttcgtgaaaatttgacgttttctgaacaaaatgatccgcaaactgttcttagggatctgttaaaagcagaaagcaatacggaagatattgagctatctaaaccgctatggcgcacaattcttggattctatatttcttctgactgtcctgaaattataacgaaattcctgaacggtgaacaaattgatttatcccaacatggtgtttctgacgccctgacaattaatgtcactgatgaagacattgagcaatgtgctttaattagccaaggtaaagaaattcctatacctgagcgtacgattccattgtttgtaaggggattggttgacgtactcaagggatcacatacagctgagaatcgatggcggacaaagctatcagaacattctttaccactggcacgaaaattgggtgaacttatcgatcagtttgaggccagtaacgacattaaagcgatggatggtaccagtgtaatacaggctcctcccgttgtttccaaagaaatcgacggtacgatggatgaagttatgttcattggaaaagtgttaacgctaaccgcgtctggcgctttttttgttatgccgatgggtctgttagttgatggcaacccacgagatctcccagaggtactggtaaaagatttttacccccataatggagaagtcattggttttgaaaaccatttcagcaaaaaatttactcagggtgaaatggcaatatggaaagcccaatatcagccgtccgataaatccgctcagtatgtcattactgactacctgtcgcgcgtttatcctgtagttgcgctgcctcatgcctccaatgagcctgacgctgtcagggagtggttacttaccagataccagccgcaaaacgatacatctgtaatttttcagctaagtgacagcatctccctgaggttgccaggggacttgcctgatcctaaaaaatataactttgatatgccgctggagagttaccgtcaggtctctcaaatactacttggttctcatgcactcacggtgatcactgagctccctcaggtgagtgaaaaatatgattgtgctgaagccagcacgtggatcaaacgcctacttaaacgaactgattcagcaaaggatttccctcaatttagtaaagggcagctacaaaacttaacccattttattgctgaacatgagtttgataatgagtcatcctatcttcgtgcagtatctcatctggaacagatagcagatacaagatcttttcttaatgatacgactcaacagttactagctttacctgatgttgaggcgcaaattaatattgagaaacaggaaatactgactcgttacgaagacgaacagtatcagattaaacaatcaataacggtattatctgaaaaaaaatacagcttgaaaatgaaatag

SEQ ID NO: 291260 - DNA, 1110 bp, Morganella morganii
gtgctacgtcagcaagaaaatgaactggaacaacgaattaaaaagaccttcgaggctgcatctcaagcgggagtggaaacgctggcccagacagcgttactgcgggtgataatcaaaaatgaaacagcccaggaacaacctgctcaacaacgaataacatcagaacctataaccgaatcagcaaattctaatttcccattagcagagacgaatgctctgactcgcaaacatcaactatcatcggctatcgaaaaacaagcactggcgactggactaagtgaatctttattatccagccttatcgccacggcgagtattacacctgtagtcggattgatgggaaaacagacaaaacaggctatcgcatcattagcgaaccttttagctggtaacgtttggggggaagtatcgatacatagtgatcattttagtttcagtgatttaatgaactcccccacactgatccgtttatctggcgatactcttaccactacgttgggtgattttttgacccaacaacaagaggcagggcttgcgagcattattgaattgcgtggttttaaccgcactcctccagaaacgctgctccctgaactccaagagtgtttattcagaactcgccatcgtgccgcatgcagttggatggatcggcggcagactctacgacatttacccatccggcacccaatactttttttactcacattcactaccgggaaaagcacgtttccattgcaggctcctcttgctcaccagttacccctatttctggcagagaatatatggtcggatgaacgtccatttgagcaaaatactgacatcacgccttctcgtattacccctgaactatggcagacaatctatgtggacaaccaccaaccggtgcaccaggcttgtgcgccgtgggaagcgctaaaagcagcgctactctctttactccctgatgaacaagcgcaagccgttgctcgtctggcttacggtctcggccgtaatacagcacaagatattgcgaccacgattgatgctcttgccccggagttagggccatatgttcaggaaatgactaccggtgaatctgcaagcgtacttgagactcttttccagttataa

SEQ ID NO: 291261 - DNA, 5949 bp, Morganella morganii
atgaacaacccactggaaacttttgaatcaataagagatttttatatttcgtaccttgaaacggccttccgtattggttcatcagacatacagactgaacggcgagcgttactggaacagcaagggacattatgtgccgagctatttcttgagccgatgccccgatatcagcattatgacttaactatcagtgaattacgaaatgatgttcatggtcagacatggttgccagagtttaatgcgcaacaaagggcggcattcatcgacctctgtttaggtggacttctgccccgcaataaaacggattcaactaagggacgttttaatctttatacccatcaactggacatgctgaaaagaggggtacagccggggaaaccgggcattgtcacctccgggaccggttccggtaaaaccgaatcatttttactgccggttctggcacagatcgcaaaagaagccaccggctggccgcaaagcccggcgttgaagcgttggcaaccgtggtggcataaggtagcggataaacagcccagcttcatgcgcgagcatgaggccgctgcacgtccgaaagcggtacgcgcgctgatcctctacccgatgaatgccttggtagaagatcaactggtacgtatgcgacgggcgctggattccagcgaagctcatgatgtcatggatacgtatttcggcggcaaccggatcttctttggccgttataccagcgcaactaaagtaactggctggcttaaacatccccgactcagtgaagaaaaaaatgagaaaaagcgcgtggctaaaaaaattactgagctgcgtgagtatatgcaattaacggaagagacccatcaggaggcggtacgacaagcgcagcaggacaaggataacgaattatcgtttaatttcccccgaaccgctggcggagaggttctcagccgctgggaaatgcaagagacaccgcccgatattctgatcaccaacaccagcatgctctcaacgatgctggttcgcgaggtggatgatcctatttttgagcaaacccgtcagtggattgagcgcgatcctgatgcctatttttatcttattcttgacgaacttcatctacagcgaggaaccgctggtactgaagtcagctacttgcttaaacatttgatcaaccggctggggctggatcaggaaaaacaccgacacaaattgcgtattctggcctccagcgcctctttacccgttgaagggtctgaaggtgatcaaagcgtcgaatatttatgggggatgttcggtcagcggggattacccgcaggtgcctcttccagcgactggagagaatgtattattaaaggtgacacccttccccctggcaatatgtctcttttccagggggatctggaggcgttttatcacgcagtgcttcagttacagcaagcaccatttacctcattacaacactggcagaatgtcgcccgcagcatgggaatgacagctagtgaagcctctacagaacaactagcgcaacgtgtcgttttacaggcgggcaacctgcttgaaaatggctgctatacggaggatcattctccgagagctacgtcaatcaaaatgcttagttcacgcctttttaacgcccaaccccatagtgacaaagcgctccaggcattaatctggttacgttcgactgagggagactggccgcaatggttttcacatgtctttcctgatgatatcggtgcgccacgtttccgcgctcatgcttttttgcgcgctcttgaggggttatatgtcgcgccattgcccgtccctagcgctgcacctgcccaagaaattaatcacagatattttggcgatcttaccgtggagtccggcttacgttacggcaaagataaaaaatcgcggcgtgtcgaattactctattgtgaatgttgcggtaatctctttttggggggtaaaccttcggtcttttccggttcagaaagtcgaattgaacttttacccaacgaccctgatacggaacaactgcccgaacacgcaaaatcagtcatggtagaacgccgatctgctgaagaatacgcgctatttatgcccgtcgtcgaacgtttctggccgaaaggagatgaggagctaaatagcgataatgacaatacttttggtacttgggtaaaagccagctacgatccatttaccgccactattcaacacccagtatcgctcttaaaaccgctaccggaaaaccatatcgcgggctggttctattacgtcaaacccggtgaatttgcctcctcggaaagaggccagtcatccagccagtcaccgggaacggcgctaccttttcagtgtccggcgtgcggtacgtcctataaatacggcaaaggtaagctctccccaatccgtagctttcgcgtcggtttttcgaaaacgacacagctactggccagctcgctaatggcggaactacagcgatcgggtaaccgtgagcaactggtaacgttttcagacagtcgtcaagatgccgcaagggcggcgctcgatctggaatcgggtcaccatgacgacgtcagacgagaaattgttgtccattcgctacagaccattgcggctgataaaccgtcccataaccaactaaaaatacgccaggcagagatagagaaccggaataaaaaactagttaacctcagcgtaaggtcggatgaggaagaggatgaactggatcaacttgctgatgaacgaaagaaaatcagagggttattatcaaagcctgaagctgacagcatacctctgcgtgaaatcctcgaacctgaatcaccggatgcaggtcaaccgcttggcccgctgttaagggcgcaggtagatgcaggtattcacccttccgatcgtactggcatcgcgcccgttcccgatccagaaaaacatgaagaaggtacgctgacctttgcatggcaacaactctttgaaaagaacgcgcagggggagtggtgctggaaggcgcttccatcctatgaagacaacctgcttgtggcacgacaggagatttcacgcgatctgaaacggctggtgggggaaagcgtattcagtaaaacctacttcgcgctggaagagtccggttggggttatccctgccttcccattaccggaaatgactcacgggaacatctcgcgatttatgacgcaatgtttcgtgtgttggcggacgcataccgggttactccttcacaatatacaaagccagaaactccatggagttcagcgcgcgatgtcaatcgtagaaaccgcctgcaccgttttacgcaggagatatgccagtgttcaggaggcgagcctttatctttaattgatagttttctccggagactagagctggcgggtcatcagggcggtattattgatattggtaaaatgcactttcgcctggcggaacctaccgatcgcgtctggcgctgctcccgttgtgggcgtatacacatgcataccggcgcgggaatatgtactcgctgctactctcctttaccagaaacgccgtgcagcgaggcaaaaacgctccagatgcaacactatctcggcaaacgtctctcacattcttctggtattcacaggatgcgctcagaggaactgactggaatgaccgaaaatccggcggcaaggctacgccggtttaaaggtattttgattgccgacgacgatgatattttaccagaaggaatgaaaaattttgagcccgatcgagatcttgaccgggcagctcgggtggttgatgtgctttccgtaaccacaaccatggaagtgggcgtggatatcggtgatttacgtgcggtctttcaggccaacatgccgccacagcgctttaattatcaacaacgtgtcggacgtgccggacgacgtggacaagcgttttcattcgtattaaccgcgtgtcgcagtaagagtcacgatctgttttacttccgctatccggaaaaaattaccggcgacctccctccgccaccctttctgactacaaagctggaaatgatctgccagagactggtacgaaaaatctggctggtgtcagcattcaaatggttaagacagcaaacggaaaaagccgatcacccatggccggttgacgactacgcacacgtccctgataaccatggtgagtttttcccggtgcactggctgaaagaaaaccaaacggactggctgccaaaaatccggcaggccattgaagcaaccatcctggcgcgtgatgaatttgcccaagttagcacacagcaaaacccccatttgttccagaaaattattcagcctttgacgccggaacagctgattcaggatatcaacgccgtactgaacgacagcgcgatggaggcgaaaggactggcagaagcgttggcggaacacggtaaattcccaatgtatggcatgccgacccgatcacgccttttgctgacaaggcctgtcagcacaggtgaaaaagaaatcgaattcgccagcatggaccgcgatctggatattgcgatacaggaatttgcccccggaaaaattctggttcaggataaacgacgctactttacagcaggttatagtggactgcttaaacagagcagaaaaaatccacgatcattttattcaaatgcctgcgaaccgggtgaactcagaacaatgaccgcctgtccggtgtgcaacatctgggctccggcaaactctctggctaccgaatgtactatctgcggtgccgttatggataaggcagagcgctatcaatgctatgttccttatggatttatcaccacgctggaaccaaaatcggctaaagaggattttgatcagatcctgaccacggccagtcgtgtatcaattgcagaagcctacgctttttctgcagcgcctgagcctggcgttaatgtggcgatacagcttcagccacagacatgtctgcaccgcctgaatcggggaatttataccgataaaacatggcgtggtttcagcgcaacacaggggagcctatcggtccctttcagaaagcaggggacctaccagccgctttgggcgaatcgggtttggatggatagtcaaataattgaggccgacctgttagttaaaaaccgctttaccgatctgggagaaacccgaaacacattttatcttgccgcgcctaaagtgactgatctacttgcgctgatggttgcccaaaccccgacgggtctccggctacagtattccactctaactccggcattcagagctgctgcgctctcggcatcttttatcattgttaactatgcatcaaaagagctattggatattgatcctgaagaaattgaaattctggaaccccgcgttcaaatgctgaaaaacggtaagtcggtgccggttctgcaaatggccgatcgtctggttaatggttcagggttatgtgaacggctgcagcagaaggacacatctggttctctcattatacttgaggtcatgaagaatattttaaataacaaaacggcttacccgctggctgagttcctgcaatccgatcatcgcgaacgatgctttcaagggtgttatcactgcctgcaccgatacggaaaccagccgtatcacgggttgctggactggcgtctgggactggatgttattcaacttcttctggatcaaacctataacgccgggctgaacggtgattttacatctccgggcgtgtctgactggccggaaaatgccctacgattagccaaagaggccgcttcgctatatagcgatagtgacgtaaaagtgatggggaatatacccgtgattcgcaccggtgacgggcggtgggccgccgtactacatccattctgggatcccgatgctgcatttgctgcaaaccccgaacttgaggcattttcatatgaggtagatgtagacgcgacgaatacttttgcattgtctcgccgcatggggactgaaatggcgaaattacggactcaggcgtactcatctcaggagtga

SEQ ID NO: 291262 - DNA, 1149 bp, Morganella morganii
atgaatgaaatgacgctatcgcgtactcgtccggtacttccttccctgttgggttatttcgccgtttgcccggcgaaatacctgctggaaagtgaagctcattcttacgctcgtttaccgctgcacccgggagtgattctgggtcaggtaatacatcaacgggtcaattcagtgatacgcagggaggccgcttttgggaattataccctcaggcaactggaaaatgatttttcgatcgagctgacagccaatcgacgtgccgggccggtagcaaactggatatatgaccgtcacggcgttgccgggctggtgtcacgccaaatgcttgttacccagatccgctacgtcagatcgcttatgacgcctgttttcgtaaaagggggccctgcacacgaaaaaacattacccgttggccgggaggttatgctgaccagcaatgatttcgatatgcatgggcgggccgacctcatatatcaggagcgacccgatcggttaaacgtagttgatttgaaaaccggaaaggtaacagacgaacaaaaccagccgaaagaagctaacctgttacagattgcggcctatggcataatggtaaaagagcaagcacctgatatgaacattgggttagttctgacggggagccgtgatagttgggaagggacactgaatacagacctgattgaacgggtcactacgattatcaaaaatattaatcgacttttgccacggaatatcccactttcagtatatgagttggcttgtccaggcacgtactgctcccattgttcctgccgttgctcgtgcccggcctggacagaaaagctacgcaagcagatgcaaccgtctctttctgatcatcagcatggcggaatcgatatcagtggaaaattacttgatgcggaaagtgacgatcatcttcttacgctgaagatcctgctacccgataattcagttgttaaggtctttcgtgtgccttccagcaccatcccagacccaacggaaataacaggaaaacaaattgcattgtacggattaaacaccttcagtgagacaccaacagagtattttccctgcaacctctacgtcatcaatatgcaggatacaagaaggtcggcgtttcagtttcactggcaaagtgaaggagagaattaa

SEQ ID NO: 291263 - DNA, 912 bp, Morganella morganii
gtgcttccggcgcttaatgaaaattacgtggttgccacactaaacggtgcgacaggggcacaattgcttgaccagcaaaatcatcatttacgtactttgctggaagctggacctgctgatggcgaaaaatcgctattttttgcatccccgacaaggcagatctcgtcattaatattatacggaaatgaagatggtgaatggcggtttagctggaaaatgacagaaactcagcctctcaatcgcgtacgaaagcttgatccggtcagtcctgctttgcagcagctggcaaaggagctggcagcaggaggaacgacagatgcattttgggaaaaacaacgactcatcggtacacctttggttgaacctgtggatacaatccataagcaggtcacttttttgtggcgcgcagcgcgcggcaacgtgtttattttagggtctccggcaggagatcatgatccgatgtttaagcttggcgactcagatgtttggtttcgcagctatgtggtacccgcagatacgcgtatgcaatatcaattggccccggatgttcctaaaatagacggcaatccgagtgaacaacgccatgcgattttggtcagtgcacaagcagacccatttaatcgcgacattatgagtattaagaatgatgatgagtggaatacatcatctttacttgatttaaaacccacgtgctattttacccaggaagcgatgaaacagcctgtacgtcatggttctttgactcgtcatacatttaaaagcgaacgcctcggaaatagtcgggaaattcttctttatcgtccaccggttgcaacacctgctaactggacattatttttgttcgatggtctgatgtggcaagacaaatatcataccgcgaatatgcttgatggtttgattgccaaccaatag

SEQ ID NO: 291264 - DNA, 774 bp, Morganella morganii
atgaataaatttactcatgaaaatggtgcatattttaaatctaatggggcaaatatttattatgaaataacaggagccactgatggtatacccattttatttttacacggtggtatgttaaatattgaatcatttaatcacttactatcttttttccctgaaaactatatgtttatcggtatggacacaagaggacatggagcatctacttttgacgggaacctctcctataaaatattatgtgaagatgtagagcaattgttgttacacttacatatcaaaaaagttgatattatcggtcacagtgatggtggtacagttgcaatgaaattagccattacaaatccccatttagtgaatagtttagtgttaataggtgctcaatattgtttaaatgacactgacccagctattgatatgtatgagtcaataaccacggaaatgtgggaacatgaattcagaaaagatgtcgaatattataataaaataaataaaacgccaaatttagaaaagcttatatctgcaattaaagctatgtggttagatcgaggtgtagatagctatcctgatgataccataaaaaatataatatgtgattcattagtcattcatggcgatgatgactttttagtatcacgaaaacaaattactcaattaactgatatgttagaaaaatcacattttgctaatattccattttctaatcattccgttcatgaagaaaaaccagaattagtagcatcattaatccaagagttttatgcaaaaaaataa

SEQ ID NO: 291265 - DNA, 513 bp, Morganella morganii
atggcagttcctgaatctaaagatgaattattatctgctatagataactcatttaataaattattgcttcagttatctaaaataccaaccgacagagtctctgaaataagtatggaaggtcatgcaaaaggaacaagtatgtcaccatgtaatcttgtttcctatttaatcggatggaacgagttagtgatcaaatggttatataatgatgataaaggcaaagctgtagatttacctgaaaccggatttaaatggaatcaacaggggttgttggcacaaaaattctatgtggactattcacaactcagctggaatgaacttattcaacgtctcgaaactgtcaaaagtattttgatagaagatatatcaaggcgtagtaatgaagaattatatgagatgccttggtatggcaaatggacgaaagggcgaatgattcagttcaatacatcatccccctacagcaatgcaaaagggcgtattagcaaatggttaaaagcgtcggcagctttgtga

SEQ ID NO: 291266 - DNA, 957 bp, Morganella morganii
atgacgatgaatctgcccccccaaacaagcgcccctaacccttcagcggcggccagcgtatccccgctggagcactcaggctcctcaaaaacgaaattttgtaggggcaataataaaaaagatatttatcagacagtgactgagagcattattgaggcgctggagtccggcgttaagccctgggtgtgtccctggaaacgtaatggtactctgttcggtattccctctaacttcgccacaataaccgcctacagaggtatgaacattatgttactgtggtgtagtgcggcaaaacagggattcaatgattcccgctggctgacctataaacaggctcagtctttgggtgctcaggtgcgcaaaggtgcccggggaaccactgctattttttataaaacgctggagaaagaaaacgaacagggggaacttgagcagatccccatactgaaaacgttcactgtatttaatgtggagcagattgacggcctgacgctgaacagtaaggaggtgataactcaacccgtgtctgaatttgatccgctgccccaagttgaggcgctttttcagcgtagcggggcgaaaatcactgaacgtggacaacaggcgtttttcactccggtaacggatgaaatttatttacctgaacgtcatttatttactgatgctgcaaatttttatgccacagggttacatgagctgacccactggagcggaggaaaaaaacgcttaaacagggaaatgaaaggaaaatttggttcagaagattatgcctttgaagaattaattgcggaattaggaagtgcttttttaatggctgatctgggggtatctggcgatgttcagcatgaaaactatatagcatcatggcttaaagcactgaaaaatgataaacgctatattttcagggcggccagcgctgcctctaaagcacattgttatctgatggataagctctga

SEQ ID NO: 291267 - DNA, 753 bp, Morganella morganii
atgcttattcataacgttgctgaaagaaatgaagctgcaaaccagagaatggaggcattgctgagttttcttaaggaagaaacattctctgattttttaaccttaaaaaaagtcgtcggctataaaggaaaacacaaccatgcgatgtataatctgctgaataaagcggtgaccctggggtttctgagcaaacatgaatatccggtactgaccgggaaaaaatcattgtggggaataaccatgcagggactggcaagggtggttaatactgatgaccctgttttccccgcttattttgagccgggaaggctcaaatactggacgctggagcaccgtctgttaaatcagcgggtaagaatagccctggaggaaaaaggcggtacgggctggcttaacggcgaccggggggcttttatggcgcagtatccgggtgtcagacacagaccggacggcattattaccttaagtaacggtgccatcattgcattggaaacagaacggtcgatgaaaacccgcgcccgttacatcagcattattaacagccatcttgcagccagcgacgccggacgctggcactatgccatgtatgttatgccggataataaaatgaaagagtcgctggtcagattgtttggcagcatcaggacggtgatgaggaacagcattacggttccgtttgatgcgaaaaaccgggaaatgtttctcttccgtaccattgatgagctggaaaaggcagatatcaacagaaattaa

SEQ ID NO: 291268 - DNA, 1737 bp, Morganella morganii
atgggaactcacctgatgcaaaggctgaatgccttttcggataccttttctgtttttctgctctggctgcaacacaacccggtaatattatctctgttcgccgggctgacactgccattcatctttcatctgccacgcgaagaaagaaaaaacgcccccttctggttaaaatcggtggcgtgtgtgtctatcttcttctttatatccggcacactgtcaccgctgaccattcaggggctgagttttttctttaaagtgctcgataatgacattctgctcagattatcactctggatactgaccgtcggatttacgcttgccggtctggcatttcacattaccacccgaagattactggcaggcgaaattgacagtcttaaacaccggatgattaaaaaaagcaaactggaacgaaatatccgaacggatgttcgtaaagtcagggatatgttacctgacagtattgcgtataatccgctggattatattgacctgaataacggtattttcatcgggctggataaagacaatcagccgcaatatatcaccgccgaagaatttcagacccagcacgccgaccttatcggcaccacaggttccggtaaaggagtcagtgcctgtgtcctgctctatcaggcaatactgtcaggtgagggtgtatttgtcgaagatcctaaaaatgatgagtgggcaccgcatgtcctgcgggaagcctgccagaaagcgaataaacagtttgtcctcattaacctgaatgaccttcatttccagcttgacctactggctgatatttcacacgagcaactggaggagctttttaatgccggtttcagtctgggtaaaaaaggcgaaggcgctgacttttatcgtatagccgaccggcgggccgccagaaatacagcggctatttatgaaaaagggatgacgttacgcgacttatttagcaccggctttgtgaaatctctcagtgaggatgtgcctgctttttatggcgagctggaagaaatcgccttagtgaattccattaatgccagtgagggattttcattaaagacaatatttgatgagggtggatgttgttacatcatcggttcaatgcgtaaccagaaaatcatctcggcgcaacgcatgattttgacccggcttatccagatagcagaaacacgggaccggatcaaagggaagccccggcccgtcactattttcctggatgaacttaaatatcacctttcccgcccggcgcttgagggtcttggcgcggcaagagataaaggtgtacatatcatcatggcgcatcagtcggtgaaagatttatatgactgcccggcagatctggaaggtgatgccgtcgccggttcagttatcgaaaactgtaaattcatgctggtttatcgccttcgtgatccggataccaccgactgggtggcaaggatgaccggctctattctggttgacgatgagatgaggaaagtgaaaacggatatcacactgacggagaaaatagaaacggacaggatgatccgccaggctgaacgctattatatcgacagcaatatgctgctcaatctgccgaaatttgttggttttgtttttacctcgaatgacctggcgaaggcgacaaagctttttcacataccggcgaaaaagcaatataccgacctgctttcatttgagcataaaaacccttttcataccgaaaaagacaatccgattcacaaaccgcccattaatctgtga

SEQ ID NO: 291269 - DNA, 306 bp, Morganella morganii
atgataagtgaagatttattcattaagaatatacactcaaaaaatcaggacagaatatctgtagccctggtatacgacacgttatcaaaagaagcccacagaggttgtggtctgtattatgaaatatacgaaagctgttttatcggtcttttgcgcgatcatctttcagaacttaatgaagctgacgcaaataaattaatgaaatatgtagaaagtaaaggtgataaaattgatgatgcgtcctacagcgaagcactggaagctgaaaggaagtgcagagctgaaatataccgcgagcagatgtaa

SEQ ID NO: 291270 - DNA, 306 bp, Morganella morganii
atgaaaaaaaccgttatcacggcggttgtattatgcctgaccgcaggaacgccgatttattcattcgccgctgacccatgcgaagttgttctttgcatgtacggaaaagcaacgggtaatagtggcgggagtgaatgcagttcagcagaacgcgcattttttaaaatcaacgcttttaaaaaacaccatcgttttaatccgggtaaaacattcgatatgcgaaaagaatttttaggcgaatgtaaagcagcagaccctgaatcaataagcaaaatcctttcaaaatttggcagagtaaaaggataa

SEQ ID NO: 291271 - DNA, 399 bp, Morganella morganii
atgataaagaaacttaaagtaatcatgttagcggcaatagttaccggatgttcatcgccaccgcctcccgttcctgtagagtgggataaagccgcagagccattaaataccagtttaccgcaatggagtgacaataacgttatagtcccttccccgacagttaacggtaaatggacatcatcaatcagcgcacaaagtttccacgatacaatatggactccggcagtattttacgcagtcgcccattcaacacgaattgtcgtcactgcacaatccggtactgatttctttaatgctaaaaactggcttcgccagaatggcgcaaaaggtgttattgaataccagcccgtctttaattgtctgacatgcagagaaaccactatttatttctctcgctaa

SEQ ID NO: 291272 - DNA, 1026 bp, Morganella morganii
atgaccgctaagaatatttccctcgaccgctataaacagcgtttctttggcgactttctggagcttcccggcctgacggagatcgccgtcaaccgtccaggtgagctgtataccaaaatcaacggcgtatgggagcagcacgccgttcctttgtcctatgaggattgctacaactttgcccggtgcctggcaaagcaccacggcgacaatatcgaagatattaagccggggctgtcagccacgctggaatccggcgaacggtgccaggttattgttcccccggcctgtgaacgcgatacggtgtctgtcaccatccgtaagccatcaaaggtacaaatcccgcaccaggcgtatattgatgcgggattttataaccgggtaacaggcgaagaaaaaacggagacgcacgacgaggaattaattgcattgtacaatacaaaaaatattcctctgtttatggagaaatgcgttgagtacggtaaaacgctcgcggtcgccggggaaaccagcaccgggaaaactacctacatgaaaatgttgataggttatattcctgtacatcttcggatatcaaccattgaggacaacccggaaatcacgttctttatccataaaaactacgtccatcttttttatccgtcagaatcatcagatgaaaaagggtctatcgttacccctgcgagccttttacgctggaattaccggatgaaccctgaccgaattttattaacagaggttcgcggtgcggaagcctgggacttccttaaaataacaggttccggtcatgaagggagtatgacctccattcatgcaggatctgcgaaagaagctatagacgggtttattacccgttgctatgaaaatccacagtgcgcccagctcccctatacatttatgttacgtaaggtactggatagcctggacgtgattgtgagcattgatttagacggaaatgtccgccgtatgaatgacatttatttccgtccaattcatcggaatcaatattttgaggaaatgaaagcatga

SEQ ID NO: 291273 - DNA, 1269 bp, Morganella morganii
atgaacgacgaaaacaaagtacctgtgccggatgaagcgcaggcgtccccggcacacgctgaggatgatattgccacgcttgagcgggaagcccgcgctaaaagggaggccgagcttctcaatgcgcaggacgacgaagggaaagacccggtacaacccgccgttaacaagctgaaaaagcgtaaacggggcaaagcaaccgcctttcttgccattgtcgcggtcgcgcttatcttcctggcatggggtggtaaccgggtttatcgcaatatcctgtggcagcctacggaagaaaaggagcaggacacaaccccgcagacgaacaaaaccgattaccgacagcgtaacgatctcggcatgtccaccgatacagccgaagaagagcctgagcaacaggacaacggccaaaacagcgcagcgggaacagggcaggcggctccggccgccccgccagaactcaacaaagccagcttccttattcgccgtgatggttcggccaccacactgaacccgataaaaacccggcagcaggaaatgacgctgacatcggcaacgaccaccggacaacaggacagcagcgcggccacacctcccggtcagccgcaaaataccaccgcaccgtcaccggggcaaagccccgcaccagtacggcggataccctataaccctgacctgtacatcccggaaaatacctcgatcccctgctcactggatcgccgctttgtatctgaccgggcggggaaacttcgctgcacggtcactactgacatctggagcgccagcggcaacacgaagctgatagagaaaggcaccaccgcatcattactttaccgcgccatagcggaagaaggtatgaagcacgggcaaggacgggcattcatcattgcgacgaagctacgcacccgccagccgccttatctcgatatcccgttggttgataccagcgcggctggcgagctgggcgaggctggcgttgatggctggacagattcgcacttccaggaacggttcggcggcgcgctaatggtcggcatgatccccgatattgccgcatgggcatccaacagcgcgggtaaaaaagaccgcaatacggactacacggaaaacagccgccaggctatggcggatatggcgcgtaccacgctggagaacagcatcaatattcccccaacactccataagaatcatggcgagatcatcaacctgatcacaggtgaggatattgatttttccaacatctatacactgaggttgaaaaatgaccgctaa

SEQ ID NO: 291274 - DNA, 906 bp, Morganella morganii
atgaaaaagttaacgtttaccgcactggcactgatgatgtgcggcgcggcatgggctgcggccataccgcaggcaagccgctatgactcccgcgtgcagcaggttatctataacccgcagaacgtcactgtcgttaacaccaaacccggctttatgacaacgctagtctttgataacgatgaggcggtcataagcgccaaacctggctttgatgaggcgtgggaagccacgccggatgcaaaccgggtcaacgttcgcccggtcgcgctcacgcagggagcgcccggagaagatggcaacacaacgcaggtcgtgatccccccgaacagccgggactggcataccaatatgctggttgtcaccagtaagcgcctgtacaacgtcgagctgaacgtcatcgatgataaatcggcacaacaacccgctttccaggtgagctatcgctatccgggcgaagaacgggacaaagcgagccgggaggcgacggccagacagcgcgagtgggagcagaaacagcaacaggccagcgtccagaaagcgctgaactcggcgcagacgccccgcaactggagttacaccaaatatccgggcaaaggcagtttcaacattgttcccgattttgcttacgacgatggccgctttacgttcgtgggcttctccccgtctaagtccattccttccgtcaccaaagagctgaacggcaaagagcatgtggttaacagcagcatccggaaaaaaggcgacttcaccgtactggtgattcaggaggtgacgccacgcctggtactgcgttccggtaatgctgttgtgggtcttgaaaatagcggatttggcaaggtacacgccgccgatggttccaccgtatcccggcaggtggaaagagtggaaaaaccggaatccagataa

SEQ ID NO: 291275 - DNA, 684 bp, Morganella morganii
atgagtgaacagaaattaattgctgaatcccgcacctttgagcagcaaatgattgagcgggataaacgcgccacgaaagccggttttgttgttggcggcgtgggtctgctgattgcggtactggcgctcgtcgccgtggtcgtgatgttgccgctgaaacagacggacgttgagctgtataccgtggataaccacacaggacgggtggaacacgttacccggacatcgaaaaccagcctgaccgcaacagaagcctatcaaaaggcgatggccgcaaactacgtcaaagtacgtgagcggtatgtctatccctctttgcaggacgactacgagacggtacaggtctacaacgctccccaggtaaacgatgactatctggcgctttacgccggaaaaaacgccccagacaaggtttataagaacggggcgcacaccgtgaaagtggagatcttgtccaaccagatcaccgatgcgacagcccctgatagggtcgccaccatccgctacaagaagattatccgccgtctggctgataacagcacccgcaacgaatattgggatgcccggttcacgttccattctaaccctgacaaggaaatgagcgatgcggaacgcgagatcaactacttcggctttaccgtcaccagttggcagaccgaccgcgaaatccggggaggtgaatga

SEQ ID NO: 291276 - DNA, 138 bp, Morganella morganii
atgaaacgcttaattgcgctggctttgctgtgcgtgctttctggctgcgcccagaacacgcttccctctgcttttagcggtaagggagaacccgtaaacactcctcaaattatggcggagttaaacagtcatgagtga

SEQ ID NO: 291277 - DNA, 1098 bp, Morganella morganii
atgagcggaggtgttttcggaggtgttgaaaaatacctgattggaaatataaccaacgctactaaaggactgatgatgaattactcacacatgattatggggctggctgcaacgtcagtcaccctttatatcatgtggcgtggataccagacgctggctggaaagctgaatacgcccatggaagacacgatgtgggatattatacgaatggctatcatcttatcttttgtagcaaatgttagtggataccttgatggggtaatcgatgcaatcaatgggttaaaggagggtttttcaggcagcgaaaacatatgggtgttacttgataccttatggaataaggcaaagatattaggtaaaacattgcacgacctcgacaattccacttatgttaaggatgagggctggacagctcaattttatgtatggcttggtatatttgttttaatgatcattacagcatttgtttcgatgatagctgaagtaatgattctattgttgagtataacagccccgatatttattttctgtctgatgtatggctttctccgaccgatgttcaataactggctgcaaaatatatttgcagccatattaaccatattattatcagcgctttcgctaagaatagtaattaattatttaacgttggttatgaataaggcaactatgcttgcaaataaatcaactatcgttgagttaggtgcacaagtttgcctggcaggtgtctgtgcggcaatccttgtatggctctcggcaaagctggccggatcgctggccggggcaagtgcaaccgtatccatgcaggggctggccgctgtaggtctaggtgctgcggtatttggagccggaaaactggccacgagtaccggacagagtgccactcgttccacccgtgagaacattcagggctggaaggatgcaaatgccggtaaatccggcaagcccggaggtgagttaggctataacgctgctaaagcgcgtaaatacgcgattgagcaaatgatagcccggaacgaagcccgcaggatagctcagttaagggcgtcagcagtacagaaatttaattcaccgccgccaaaaccatcgattacctag

SEQ ID NO: 291278 - DNA, 708 bp, Morganella morganii
atgaaaactcgctttcgtactcttattctggcttgcgtcattgcaagcccactggctcatgctggtattcccgtcgctgttgatgctgaccctatgcgggacgtgcagtggatgcaggagttaaaacgctggatggaaacggccagacactaccagtcacaaatacaggcatataaagaccaactggcgacggccactggcgttcgtgacattgctgattttgtcgatcaggccaaaggcctgaaagctgaccttgaaaagctgcgtaagcccggacaggcactgaatgatttgcttctctccggcggttcctccgggcagtttgatgcgttgtacgagaagtataaaattttcgacacctgcaacacggcacaatcggggagttatgccaacgtatgcaaacagcaggtcatcaacaaggctattcagcttcagcaaaccgacgaggttcagaatcaggtaagccaggccctgggggaaatcaacagcctctccaacagggtagcgttagccaaagattcgaaagaatctcaggaccttgcaaacagtattcagctaaaatctgtcatgctgaacacgcttaccacccaatgggaaatgagtgtgaaagcagcagagaagcgcgaaaaagtgcttgaggcggagcgtgttaaacagtggaatcagcagcagttaaacgcgccaacagcagacctaaataatttatga

SEQ ID NO: 291279 - DNA, 2739 bp, Morganella morganii
atggcaaagctgctcaaagcaatgaaacgcccggcggcgctgtggggggtgccaatggtgcccctgctggctgtcacgggtgtaaccatcatcgttgctgtctggacttccgtcgttctcctgttcttacttcctgtgcaatttctggtgatgaagtccctcaccagaaatgaaccgatgcggttcagtctgattgccgtatggctgagagcgaagggaaagccggtagcaaaccgtttatttggcgcaacaacatttatgcccgttgagcatgatgatgttgatatcagggagtttctcgacgccatgaaactaaatcagtgtgccaccatcaggaagtacatcccgtactcatcgcacattcatcagcatgtgattcgttcccctaagagcgatctgtactgcacctgggaattgatgggaacgccgttcgactgcgagtctgacgaatcgctccgcttcgggacgaaccagttacacgggttaatccgctcattcgaaggtatgcccgttactttctatatccataacgaccgcaatacatttaccgacaatcttcataaaaattccggcaacccgtatgccgatgaagtcagccgtctttactacgcttctgtcggggtgttccggcgtaaccgtctgttcctgacggtctgctatcgcccgtttgtcagccttgaaaaagcagaacacaaacggatgaaagacagccagaaactaaaggagctggacggtgctttactggaaatgctggaaataaaaagcacgctcgataccgcgctgtcgcgctatggtgcgcggcctctcggtacgtttaccgaaggaaacgcggtgttttcgtcgcaactggctttctatgaatatctgttaacgcaccagtggcgaaaggtgcgcgtcacccgcaccccggcctgtgacgtgatgggagcggcggcgttgttcttttcggctgaatccgggcagataaaccacgccaacggtacgcaatatttccgggggctggaggttaaagagttctccgaagaaaccgccacgggaatgatggactcccttctttatgcgccctgcgattacgtgatctcgcagtcttacacctgcatgtcacgcgaggaagcgaaaaaggccattaagcgtacccgtcgacttttgatgagtgccgacgacgatgctgtttcccagcggctggatctggatgtggcgcttgacctgctgacatcggggaaaatcgcttacggaaagcaccatttttccatcatggtgtattccccgtcgctggaaagcctggttgctgatacgaacgaaatcagtaacgcgctgaacaacatcgggataacgcctgttccggcagaaatatcgctttcagcggcgtatatggcgcaactgccgggcaactacaacctgcggccacgtaaaggggagctgagcagccagaactttgtggagctggccgcactccataatttctatccgggcaagcgcgataaagccccctggggggatgcgatggctttactgcgcaccccgtcaggcgatggctactatatcaatctgcataacacactggcagataaggacgaattcaacgagaagaacccggccagtacctgcatcctcggtacgaacggttcgggtaaaaccatgttgatgacgttctttgagatcatgcagcagaaatacgggcgcgaggatagcttctccccggatgccagaaccaaacggctgacaaccgtttacctcgataaagaccggggcgcagagatgaacatccgggcgctgggtggccgttactggcgggttatcagcggtgagtctacagggtggaacccgttctcgttgcctgcaaccaaacgcaatatcaatttcatcaggcaactgatgaaaatcctgtgtacccgcaacggctcgacgatctccccacgcgatgaacgccgtctgagtgatgcggttaatgctgtgatgaatgacgagccgcaatatcgcgtctacggcattacccgaatgctggaaaatttaccagagccggctacgaaagaagcccgggaaaacggcctcagcattcggctgtcacagtgggcgcagggcggtgagttcggctgggtgtttgataacgagtctgacacgttcgatatcagcaactgcgataacttcggcatcgacggaacggagttcctggacgatacaagcgtatgtgcgcccatctcgttttatctgctgtaccgcattaccagcctgcttgacgggcgacgcctggtcattttcatggatgaattctggaagtggttacgcgacccggtgtttaaggactttgcttataacaagctgaaaaccatccgtaagctgaacgggatgctggtcgtcggtactcaatccccggcagagatcatcaaagatgatatcgccccggcagtgattgagcagtgcgggacacagattctggcggcgaaccccaacgccgaccgcgcacactatgttgacggcatgaagtttgaaccggaagtgttcgacgtggtgaaaggacttgacccgcaagcccgccagtatgttgtggtgaaaaatcagttcaggcgcggcgataccaaacgttttgctgctcgtgtcacgctcgacctgtcgggtatcggcagatacaccaaagtcatgagcggcgatgcccccaacctcgaaatattcgaatcgatttaccgggaaggaatgcagcctcatgaatggctcgatacctacctggctaaagcgctctga

SEQ ID NO: 291280 - DNA, 294 bp, Morganella morganii
atgatacttttccgcaagctaaaagctgtggtcccccccgtttcggcctgtacgctgacgactttttctgcaaccccggcactggccgacggatttcagcgggcaaatactgtcatgcaaaaagtctccaccgggctgcatggtctggcggctatcacgatcaccgtggccgtgatctggattggctataagaccctgtggaaaggcgagagcctgtcacagtgcggctacatcatcattggcggcattttaattggcggaggcagtgaaatcggcgctctgctgatgagctga

SEQ ID NO: 291281 - DNA, 711 bp, Morganella morganii
atgctttccaccacagcctttctggcggtagccatgcagtgcgccgccagtattcatccgtccactgcactcgacgtggcacgggtggaatccggttttaacccttatgccatcgctgagattgtcccgaaggccggaccctcttcccgcgataaacacattatttctcacctgccagccagtctgggagacgcagagcatattctccgccgcctggcagcacaggatcgccgttactctgtcgggctgatgcaaatcaccagcaccaatttccgccattatggtgtgtccgccacagagctgcttgatccctgtaccaatctgtccatctttgaacgcattctcagtgactgctaccggcgcggcggcacgctgaaaagagcgctgagttgttattactccggcaatttcagtaccgggcaacagcctgaaacggctttttccggaacgagctatatccagcgaatcggttatgcgccgggatcatcccgctatgctgtccccggaacccgtgaggacaaatcatctgtttccactcctctgaaaatcgcccctgccggtgactcatcccgtcaccacctgatctggcccggagtcgtcgtccgtggcgtccctgcgaaactccgccaggaaaaaatcttcatcgcccccttctccgcgctgtcagtgcgccggagcctctccctgtcaccccgtgaggaggaagaataa

SEQ ID NO: 291282 - DNA, 231 bp, Morganella morganii
atgagaaagcctgtttattacgcatatattgcccaggaaagtcatccggactctcagggtgagaaaaatacctggtggacaaaagtcggagtcgcctttccccaccatggtaaatccggtctgaatattgtcctgacgcccggtattgccgtttccggcaagctggtcctgctggagccccgggaggaaaataacccaccacaggatacaggctccatcgaaaccatgtag

SEQ ID NO: 291283 - DNA, 207 bp, Morganella morganii
atgccggatgaaatcgatcgcgaccaggaatttaatgagcaacaactggaagagatgattgaacaaagccgtttcaggccgggtgaaacatcctcgctgttccactgtcgtttctgcggcaaccccattccggaaaaacgacggcagacattgccgggtatcacaacctgtacggagtgccaggaaaaaattgaacgcagacgttaa

SEQ ID NO: 291284 - DNA, 228 bp, Morganella morganii
atgtctaatcatcctgtttttgctacgcctgcggatgttattcgcccaattgctgcggcattagaagcggctcagttcttggagttagatcctcaggctaaagatctctccaatgacctaatcgcatgggcgcaagaaacagctgcgcttatggctactaagatgcaaaacgaaaagccaactgatcagtcattggcattagagggtgaatatttcgcgagtaggtaa

SEQ ID NO: 291285 - DNA, 567 bp, Morganella morganii
atggcagtcatcggctatatccgcgtatcaacaactgaccaaaacagtgatttacagcgaaacgcgctcatcagcataaattgcgaccatatttttgaggacaaaatgagcggtaaatccgccgtcaggccgggactgaaacgggcattaaaggccattcagccgggcgatacactcgcagtgtggaaactggacaggctcgggcgcagtgtcaaaaacctgatagcgctgatatctgatctgcacgaacgcggcacacatttccggtcactgacggacagtatcgacaccagcaccgctatggggcgctttttctttcacgtcatgtcagcgctggcagaaatggaacgtgagctgatagtagagcgtacactggcaggcttggccgcagcgagagcgcagggaagaattggcggaagacccgcagcactgacacagaatgaccgggagcaaatcggccgtctgctggataaagggcattcacggcagcagatggcgattatttatggtgtgggggtatcgacaatttaccggtattttcctattgggcgacgcagcgagagttaa

SEQ ID NO: 291286 - DNA, 261 bp, Morganella morganii
atgaaaactgaatacatttatatctgtgctcaggcgtactgcaatgaccagggtagcggcatcgaatattacaccgactatgagcgctttgataatcgaaatgacgccattaaaaatggctggaagcaacgcgaatcagacgatttcaacatcggcgttcttgttaacggccgccttgtttcggtcgactggatggctaaaccaattgataccgaaccagaaacattacggaaaatcgaagaccagcttgagctgtattaa

SEQ ID NO: 291287 - DNA, 1131 bp, Morganella morganii
atgagtaaatgtttggtctgttctacagaaattacggttgctaatgatagcaatgagcacattatcccaaattccattggggggaagctagttattaaaggcttcctatgccgaaagtgcaattcagaaaccggggacaagtgggacgttgagctgagcaaacaattaaatccattttgtcttcttttaggtggtattagccgggatagaggacttacacctgatgaagtatttcctacaatatcaggtaaagagataagacttgccaatgaagggaaaatgtctattgcacacccacgatgtacacgtgaagaaatagatggaaaaattcatgttagatttacttctggtaatacgaagcaaactaagcattttgtgcaaaatatttgtagaaaatacccttgcttaaaccaacaagaattaatgaataacttagtgtttaataaaacctatctgggagaggatgccttaatctttagcccaaagttcgggggagaaaatagtggccggtcattggtaaaaacgattcttgcatttgcagcaaaaattaacattgaccctttttcatgtaacaaagcggttgattaccttctaaatgacggtgaaccttgttttggttattattatagcgatgatttagtagtcaatagggcatttgaaaagcctgtacattgtattgctgttcatgcagaacctaactcaggttatgtaataggttatttagagtattttggagtatggcgagttatttcactactttctgattgctataatggcgaagaaataaaagagtcatattacatctatccagaagattctaagtcaggtagttttgagattaatttaccattagacatagaagtcataacagcttcttataactatgataaatatgatgaagccattttccgtgaagcgttctctttcttcttggattattgccaaaaaaaagactttgaaagagagaaaaatactgtcattactcaagcttggaatgatgcgttaaagaaaatgggtttacaagaaggagatgaatggtctgaggagcaaatgctggagttttctaaacacataacaaactcagtgcacccattcttaatgaaccaacttattaaaggtaggaagcgctag

SEQ ID NO: 291288 - DNA, 255 bp, Morganella morganii
atgtgtgatctgatccttcaactcagcaaaagttcgatttattcaacaaagccaatttccggcaccggtttattcgcagataaaggtaaaatcgactttgccgtcagcactgccttctgtgacaaaatcattgctgtaacggatatcgcgggcaaagaaagggaaaatttacatttttacatcgtgactaccaatcactatctgaccatcttccttgataaattcactttgttgctgattaggcaatatatctaa

SEQ ID NO: 291289 - DNA, 474 bp, Morganella morganii
atggtgaaattttccggaatagacatcggcctgtactgttttcatggattcggacatgttttttaccgtctgcgccacttccaccagcgggataccctcttccgccaggcggcgggagaactgcaccgcgctccacgggtcaaacccgagttcacgcaggtcatcaccttcgcaccatgccagaatgtcggctttgatgatgtcatgatcaataacttcgccgtccgtcagttcaagatgtccggcagccgcccatttccggtacagatcggcaatatggttcggtgcggtttctatccggccttccggcagccagaatttacacttaacatgcacctgtccgcgcggatcttcataaaccttaattgccgcggccacgtcgattttatttgccaggtcaacaccgatccagacagggtagttcttcagttcatcatccggcgcgttttcagggcagttgtcccattttcctga

SEQ ID NO: 291290 - DNA, 675 bp, Morganella morganii
gtgaatctgcattctgaacaaataaaatgcttgtctgaatctgatttccctgaacatctctctaaatatgttacaacatctgaaatcgatgaatataatatttcagtaccaacctatagggattctcttgaggagttcgaaaggaagctacaaacatataggttagtgaagcctttttcaggctttaaagttaacattatcaataacaagactataaaactcaattctattgctattagaattgagtttccggatttgtttaaagtggaaaagaataaagagacaattgttgagcctaaacgtccaaatattccaaatttattagctgaggttgagaataggtgtcgtttccctgagattgataccataagaaaacagacaagaatgtttgatgtatttaagcatgttgatttacccaattttgaatcaggccttaacatctctagttttgatgctaacattaattctatttttgattctattaaagttgacaataatattgtggatatcaatcttaaaaatatccgtcaagatacgatgaagacaataaatgaaggtgatttaattatctatccgattaaagaaggatgtgcagaaattagcattaaaatgatatgcgatgaatactctagatggaaagaaattaaaattcctgtcacggttactttcaattaa

SEQ ID NO: 291291 - DNA, 477 bp, Morganella morganii
atgaaaacagtaattaagctagcattggacttacgtaacatacttgaaagagatcatgctaagctagattccatgggcttccctttcataaacatgtttccttatgattgctgcagggaagcttctgtatttcttgggcttattgccaataagtattatccgaacaatacaatccatgttgttctagggacaactcatgataaatctaagagacattattgggttgaaataaatgacaaaatttatgatatagctattgagcaattttcattatgggataatttgaaagaacaatgcccagattatcctatttatgctctagagaaccatccactggaaagctatttctgtcataaggtaaggtattcccttgttcaagtatttagcctttattgtagggaatcagcaatgttaaaggatgtaattactataaatgacctactaataaataaattaaaagaattaggatggctatag

SEQ ID NO: 291292 - DNA, 627 bp, Morganella morganii
ttgtcaggaaaatctgtcgcagctcttctcgaataccttggtttgagagaactttaccttgcactgactggcgggacgctgaaaggaccgttaaatatcgaatatgttggaggtaggggattaactacaggagcaacagccggaacatcaatttatcatgaactgcatctgcttggaaaactggttgcctggtggggaattataaacagtaacgaattagtgcttgaaaacagagtcgctggtaaaaaattaattattggccctgatggtttcaaaattgacggtaaagacattgcgactactgagcaacttttcggtgttggtcagacctacaaaaacctgacgaccagccgtcaaaataaagtctggtacaccaataccgacagcaaaccccggattgttcatgtagaaacgaacagaacaggtactcaatatcctttcagtattgatattcaggtcattcataacggagtacaacatcgtgcggattatcgctggacaactgctgatgaggttatttgtttaactgctgttattccgcccggcgcaagatatagcgtcaacggaggatggggacagccgacagaatggactgttattaacttctggctggagtactcgctatga

SEQ ID NO: 291293 - DNA, 354 bp, Morganella morganii
atgaaatattacaaaacgaaaaataatgaagtttatgcacttgaagataacgactctgcaaaagagtggataaaagaaaaagtgactgaaatcaccaaagaggaagctgataacatcacaaatccgcgaccaacgaaagaacaactgatcgcaaaagcggaatacgataagcaggcgctgattacagaggttcaggctgaaactcagttactgcaaacaaaactggcacttggccgtatcagtgataatgaaaaggcgcggttaaacgcctggctggattatctggacgaactggaggcagtggacgtatccaccgccccggatattatctggccggtgaagccggaggtgtag
